United States Patent Application Publication US 2005/0228172 A9 - sequence listing, part 112

SEQ ID NO: 521257 - DNA, 628 bp, Homo sapiens
atgaccattttgaggaagtcactattgttactgccatcattcttgagggaactgaggctcagagaggtgaagtaacttttccaatgtcacctgcggttagagccatggtcaaaaccaggccgtggtctggctctaggatttgagctattaacctctaccctgtcgactcttgttttaccttcttcctaaaagattgtaaagatacaatcaagggtggatatctatataccaactatctacagaggatggtagaggaaaaaactgtttgccttccctctccataggataaatgtaaggcaagaggttgcatcccacttcagcaagcccctttctgactggatgttgaaaagcacacggcaccctggggatctcccctccacacttctaagacctccatccttctttccatccctggcccctctggccttcactggcattggcatggatctctcagcccraactgcgcctctttcctccagtctgatccagcatactgttcccaaggctgtttctaaaacacaaaactgttgttttctgtaactcaaatctctatgtcactgatttattttgtggataaaagccagataatttagcctaatacacgaagtgcttacttcatgcctctgcc

SEQ ID NO: 521258 - DNA, 398 bp, Homo sapiens
cagctgcttttaggcagacatactattaattggtagctggatggagacaaaatagaaaaaacataaaacacagatacaagaacttagaagggtttgtgatctttactcattttgcatatggctcaatacccatcaccaagaagtctccaaaacacatggctcttacaccactaagttaaagaaaaaaagtaaagtggatgtaacagtttgagaaagagaagtatgcaatattgtagaacatgttttctaaaattacagatatcagttatttagaaaaataagttttgtagaaaattctgacaatactagttaaatgaagtagcgctaaatctgaatcatctacaagagtgctacaaagargggcattattactccaatgtatgtaaggactgatgagc

SEQ ID NO: 521259 - DNA, 639 bp, Homo sapiens
ttttcaccacacagagctccagttaaccttgaattgtactttagatttggggtgagcggggggtggggaggaatgcccaaaggtagaatgtggtaattcttagaaggcagggaacgatgattctttttaaaattccatatggcacttaccatgacatttgacgattatagctcttacatacacactgtgtctcagtgtgcaccttgtttggaatactaaactactcatctaaatcccaaattattctcttccatacattaagtgatcttgaaaaggggtatataaagtttaccaggagatactctgaagatggctatttaaaggaatattataatttcttttgtaaagttgaagatacttcaataaaaaaaggcaaccaattgctaagttttacatactctagatcaagtttgtccaacctgcggccctgcaagaggcctaggatggctttgaatgcagcctcaaacaaattcgccacctttcttaaaacattatgagatttttyttttctgcaatttttttagctcatgggctatccttagtgttagcatactttatgtgtggctcaagacaattcttccaacatggcccagggaagccaaaaggttagacaactctgctctagatgatctcatggta

SEQ ID NO: 521260 - DNA, 452 bp, Homo sapiens
tggcattaaaagacaaaaactctcacaaaggcaacaaatacttacaagagtctccaaagcaggtgtagaactttaaacgagatgtgttttccaactgggctgtccrttaatggcctaaactgagggcaatgtgatttatcatcagaaagatacataggtcaattttttccattcagccttggccaatagtactgaatatttagggttcaatataaaatgaatttgtaacagcactattttcaaaagaatgagtcttcacgacaacaaaaagtagatctaatcagagttgcaaaggcaagggaaatttatcaggtagaacagatgcattcaaagcaatggaacttgtgacattttatttccaatgtgcatggtaatcaccgctaaaatgtttacacctaattaaatatggggaatgctcttacttatatagcatcatagaaaaattaaggaga

SEQ ID NO: 521261 - DNA, 643 bp, Homo sapiens
ctgccaactccctgtctgtgggctttctctctgctcccaccaaacagggctgaaatgctggtgagttcatacctcaagaagcaggcttcggctaaggaggaatgagagttaataaataaataccccagcttctcaccacttccgagggacaattctgaagtgtgttctacactgccccctaaaggttcccaatggaattgagccttgtctccccctggtgtagcctgtcattaacacmctgttggtctccttccctttctggtctcagcaccttacttccctgtaggtacttcttgcaatcacaattgcacataattgatttgcatctcaatcctagactcagggtctgtttctagggaaacccaagctttgatgccacaagaggattttattagaccaaaaagagctgcacagatcttgataaaagctccctgtgattcaggaaatataaaaataagacttccccaccagcttctaggaagtatacactgctccttcgataggccaaaaagggagaagtctggactgacattctagttacggagcgttggtggattgtcaagttgtctgacattaagtttggaaagataagggaaattatttttctctcaactatgcaagcaaaaaacttaaaataactccc

SEQ ID NO: 521262 - DNA, 396 bp, Homo sapiens
acttcccttttcactgtgtagctaacaataacacggcatcacagcaagagctgtaatgagatgtgtccaggaagaaatagagacacccaccaacactggcaacarggcagggaagtcttctcagaggaggacataatctactgaggccaaaaagtaagccaagcaccaagtgctaaggaaaaagactttcaggtactgaaaactcatgcccaaagacagggaagacattaaaataaacaagctttctacctggaaagagaagctacttgacggtaaagagtcctatattttagcctagggtccgaggcaaatgtaaacctgcaactctaagactcaaatacttctaaccagcaaggattccgaccttattgccatacccatctcttcatttgtttc

SEQ ID NO: 521263 - DNA, 577 bp, Homo sapiens
tcctattagacttacagccaaaaattttacatgaaaaatagagtgatcataattattgagaatagtttattcctcgagaagaggggatgtgggggagtgtgagggaagacatacaatataagaaagaccagtatttctaagtaggttgtggttccatttgtattcagtcaatatggaggcaaatggatcccacaagccgttggatagagccgaggaaataaaggaagacatatatccttaccccaacttaccccaggaatttcctatctaaaytgaactagattatttaaggttttctttataaatcagaattgtcagatctctaaaaataatataacctgctctccatccctgcatgaccccataagtttgtagccatatcacagtgaaaaagaagcaaacagttgttacaggctgaggaagcggcacctttaaagacacaaagctattttagtgcttggtgtagttgtagctaaatcagggagtataagtagatgaaggaaaccaaaaatgtttcacccaaaaatacacttctttgacatattttgggatggctattcagagggcctgcagacag

SEQ ID NO: 521264 - DNA, 656 bp, Homo sapiens
ggatgggaagaaatgagttgcgggctccattcttagggaagtgttatttttaaggtagaaaatatcccagtcatagaaaaggtgtttcaaacagtgctgagtagctaggaaaattcacaaatgctcatgtcttgtcctcatacaagatcattgttacaytaccaaaatgtaagtagttggagaaaatattgacatgtctttctatctcctggaacctgaaattgttaaatgaatttcatttccaaagccatttccaattaattgctaatgattgcctagagttacatgttaagacatactctgaggttacacctgggctcagctggaaagagaactgaaatccagatgtgatgaagccatgggtgctgcatggtgggtgttaaatagcaggtacctgcaaaagtaaacatcttcaggctctgtgtttcactcatttcaaaaagggagaatctgaacatacctcatgatcttttgtaattgtttaggttaaaactgttcccactcatcaaaccatcttttcttaatctcactgaaatgtcatacaaactaattcatgttctttttcttcattccagtaactggcagaacccacaccttcaaaacagagactttggctgcatctggcctcctgctctgtcttcctctcacctcctcca

SEQ ID NO: 521265 - DNA, 552 bp, Homo sapiens
tcatttactttattgcatgatggcataatggttaagtatatagcctgcaatgtagagtttctgggctcaaattttgactctcctgcttcttgctatgtgacttggacaagtttctaactcctctgtgcctcaattttctcaaacctgtaatataggactagtattaatactttcattagaatcttgttgggaggagaaaacaggaaaatgcatgtacagagtgayacagtaattttggctttcataatttcaatccataaagccctttaaagtcctcacaaagcctccagtaactgtagatcttaaaaattaggtcagattttttcctacttatgatatgaatacatttagcagtgtctttttaaaaaacttcactgatgattagaagtactcggtaaaaaagaatgtcaaaggtaagtgtgcatttcataagcaagagacctgtgttaaaccaaccaaggtgatgcagaattattttgttttcttgcagaggtgattctgcttcttttacttgaaggcagagagatggagtcatttgtggcactaaattag

SEQ ID NO: 521266 - DNA, 635 bp, Homo sapiens
acttaagtttctattagcccagacacattgtagtttaagaaaagagcttataaaggctctttcttcccaaaagggtgtgaatagtgttttctcttctatttctacattacaatcatgtgtcacacggggatatgctctgagaaatgcatcattaggtgatttcatcattgtgtgaacatcacagagtgtattttcaccaacctaaatggtagagcctactactcacccaggctatatggtgggttgctcctaggttactatatggtgtctttctcctaggttacaagcctgtgcagcatgtgacttattgaatattgcaggcaattgtaacacaatggtatttgtgtgtctaaacctatctaaacatgggaaaagtgcagtaaaaacaggataytataatctttttaatcttaaggaaatgccatcacatatgtggtccattgctgacagaaacatggttatatagtacatgactgtattatatgtcaacttttgggaaactgggttaatctcatggagacgtggcaggtaactcttctgtggggtcactggagaagccccacaattctctgcagaagctagccactgcattctgagacttcccctatcagtacgacacttcttaattaaggcct

SEQ ID NO: 521267 - DNA, 651 bp, Homo sapiens
tctaccataacagactccatcaggatggatgtcttccaattctgaactgtacagaaggcaaaatatttatgaaaaacattagcatcattcataagaattaacattcatcaattraaatttgaacccagacctgaaaaaaaaaattgttgattaaaaaaattgttaaaaacacctcaagttcctacacaaaaaaagcaagattataaaactcaagtatggtataacaactattccaaaatggatgctgttctcagttttagtatagacttaaaagaaaaaatgaatagtccattggctctttccagctctcatccaacatctgttcatagcagctacaaccaggttatttgcagccatgcagttattttcaggctaagaataaacctgtccatgctgttctgagaactgttacccaggcattttttgttagacaacataaagaccatctattttaccttccttatattcaaaaacaaggaaactgaggctcagagagatttagtgcctggccctcccaattcaagcaattcatactagcactaagcaagacctaaaaccaagttttctcaattgtttctacgaatatgggtcaactctgaggatcagaaccactgactgttttcctgggatggaatgggcctttggaaattt

SEQ ID NO: 521268 - DNA, 651 bp, Homo sapiens
tctaccataacagactccatcaggatggatgtcttccaattctgaactgtacagaaggcaaaatatttatgaaaaacattagcatcattcataagaattaacattcatcaattaaaatttgaacccagacctgaaaaaaaaaattgttgattaaaaaaattgttaaaaacacctcaagttcctacacaaaaaaagcaagattataaaactcaagtatggtataacaactattccaaaatggatgctgttctcagttttagtatagacttaaaagaaaaaatgaatagtccattggctctttccagctctcatccaacatctgttcatagcarctacaaccaggttatttgcagccatgcagttattttcaggctaagaataaacctgtccatgctgttctgagaactgttacccaggcattttttgttagacaacataaagaccatctattttaccttccttatattcaaaaacaaggaaactgaggctcagagagatttagtgcctggccctcccaattcaagcaattcatactagcactaagcaagacctaaaaccaagttttctcaattgtttctacgaatatgggtcaactctgaggatcagaaccactgactgttttcctgggatggaatgggcctttggaaattt

SEQ ID NO: 521269 - DNA, 565 bp, Homo sapiens
ctgttgggttcatgagtgtgtgctcaagagtgaacatgcaactgctgcatgagtgctttgacttgggccctttccacggactctgtttcccacatcctgatgacgttctggaatcaccacaagacctaagtgtccgaagaagtcaaggtacagtggctatcacagggacacactgggaaattaaatctrtgctttatacacattgcgctcttcgctaagtgatggaactagataggatgctttatatttccttccccagttccccttaaggagtagttcccatggttggtcacatccttgtgaaatacctacaagcacagatagtcacagtgcaggggtggagttagacatagtggacttggggccttagggctcccacattcaggatgctcacttcttgaatgttcattgctagagtacatgtaagttatgatgaaataattactggtgtttcaggtttcacacacacacacacacacacacacacaaccaaatacaacaagtgaatttttcaaatcaagaactcaggaaattttttatgcttttaagttttaatcccaacttt

SEQ ID NO: 521270 - DNA, 578 bp, Homo sapiens
tttgcatgtataacctattacatacttgtaaactttggtttttatgtactaaacattgggagtaaactgggaccaatgggaataggttctaaggatgtaaattttgtccaagcataaggaaaaactagtagaagtgtattttttttatttaatggaggacctagtgtggaagtagcaagttcccagaatattggaagaattcataaagaaacagtcatacacacttacaaagggctttctgcttgtgtggaagattatactgaatgagatgtaagatccccttaaatgctaaaaaaaacttattgaatacatatcaagatgttccatatgcctggcactttatgaatattttccttcagtgacaataaaatggttcaaaacaatattttttccagttggccgcagcactggccctgcctggtgtttgcaaatcaagctgtgtcttttgttagctgcatcacccaataaatattttggaatcaagcttgagctggcaattttcttgataatgcataaggcaaaatagggcacarcctgcatttccacagctgtactggcattgccgcatttaatagtta

SEQ ID NO: 521271 - DNA, 585 bp, Homo sapiens
ccccccacttaatatggatagattttaatgggaaaattataattcagattaaataaaaaacaattcccttttccctgttgtatatcttaagcatttggaattttttttatcttctgaaatcatataaaaagaatgtcattagtaaaaattctaacttcgttttgtttaaaagacatgtggatgctccatgcccctaggattttgcttcctccccggtgctaaattagcaagctcctagagaagccatgtgattcccagagccaggcgctttacacctaaagtagtttgactttcttctgtatacatccagatggatcccaggcatccgggcaccaccctggtgtgtccctagaattcccactgctgggcctctatctccaygacaacaaaataaaaacagaggttgcttgactcattaccaaagaggcaaagcatgtgcgaccctttctgtcttattttaccaaaagatggtgcaaatctatgaccttcacattttttccaccacacccaccagtagctgttggtgattgcatggtgtctcggtgcatggggaaaggcaaggtcttctgagctcatcttaactgg

SEQ ID NO: 521272 - DNA, 467 bp, Homo sapiens
acattgaatcataagctcttacataaaaatccagcaaagatgatgatgatgataaaatcactgaatactttacaaagcactagactagaatgttttctggctatccatctaaccctcacaccagtcctatgaagcagctcccattctcatgccattttccaaagaattgaacagaatggatgagtggtccacccaacgtaacacagctacaggtgtgagagagccaggatgtagaggataaaacttcagggttctttctgccaataatggtatgawaatacctcccaatactaccatggggaggtgtaggggtagaagcagggcgacacgaatgagcatgccctcccgtacagatcaattatgttataaactcctaaggtacagcactccacagctcctacccttgcccaaacaggaagcccccaagaggctgccaaggttgtcctacccaaggtgtggttaagttc

SEQ ID NO: 521273 - DNA, 467 bp, Homo sapiens
acattgaatcataagctcttacataaaaatccagcaaagatgatgatgatgataaaatcactgaatactttacaaagcactagactagaatgttttctggctatccatctaaccctcacaccagtcctatgaagcagctcccattctcatgccattttccaaagaattgaacagaatggatgagtggtccacccaacgtaacacagctacaggtgtgagagagccaggatgtagaggataaaacttcagggttctttctgccaataatggtatgataatacctcccaatactaccatggggaggtgtaggggtagaagcagggcgacacgaawgagcatgccctcccgtacagatcaattatgttataaactcctaaggtacagcactccacagctcctacccttgcccaaacaggaagcccccaagaggctgccaaggttgtcctacccaaggtgtggttaagttc

SEQ ID NO: 521274 - DNA, 467 bp, Homo sapiens
acattgaatcataagctcttacataaaaatccagcaaagatgatgatgatgataaaatcactgaatactttacaaagcactagactagaatgttttctggctatccatctaaccctcacaccagtcctatgaagcagctcccattctcatgccattttccaaagaattgaacagaatggatgagtggtccacccaacgtaacacagctacaggtgtgagagagccaggatgtagaggataaaacttcagggttctttctgccaataatggtatgataatacctcccaatactaccatggggaggtgtaggggtagaagcagggcgacacgaatgagcatgccctcccgtacagatcaattatgttataaactcctaaggtacagcactccacagctcctacccttgcccaaacaggaagcccccaagaggctgccarggttgtcctacccaaggtgtggttaagttc

SEQ ID NO: 521275 - DNA, 470 bp, Homo sapiens
aaaaccccttttctactaaaaatayaaagattagctgggtgtggtggtgcatgcctgtactcccagctacttgggaggctgaagtgggaggatcacttgaacctgggagacagaggttgcagtgagccgagattgtgcccctgctctttagcctggaaaacagagtgagactccatctcaaaaaaaaaaaaaaaaaagataaagaaaaagatgtaaacacatttggcctattttttggtatgcgatattttagataattttagatcataaatgcccttttcccaggaagttgtttcttatctttgctatacaaacttattccagattctataaggacatcaaaaattagaataagggtacattatatttgtatgaaaaaaatatataaaaaattaaacaatatatctttagtaaaaagaaaaatctttcatgtgcacagatgttttggtttttatgttagcctctgtgag

SEQ ID NO: 521276 - DNA, 615 bp, Homo sapiens
tttgacagacttgcacaagcgctaaacacataatacccacaaaccccactgcaagggaaggtgccgggactgagctggcatggcagtactaactcagtttaatactcaaagaggaaagcatccttaggtcttgcacaagaacttggacgaccaagcagtctaccaggctcatcctcgccagaactgggaaaacctcagaagttgctgaccgacatcaccccacctggagagaaaagaattgcacacagccctacgtgcctggctctgtgattttccakgaactgcccttctttctcagaggcagagacagggtgagggcagggagctacagtgacggcaacaaagcctggactttttttcctgtctgtttcagggaggggattagggtctcctggggcaggaggattcctcctgcccagccctacagagaaaaaggattccctccaaggttcctattaggaggcactcaacctcccactccatccccacactatagatcagcaatcaagataatttaacaatgattattagttgctagagaactttaatttttcccaggcccacacttgacctctgtacatccctgaacatacacccaggcactgagatcccaga

SEQ ID NO: 521277 - DNA, 338 bp, Homo sapiens
cccattctggtgtggcatcaaagaggaatggtcagccttcggaattgctttttggaagatttctgtggaattctacctagaggagagtcctggcatcaaagccccaaggcatccaagggccaccaggttcccagcaaggctggggcccctgcacctcctcccgccctccacacttaggctgctgtgccaaggttgtgttctctgccctgtcccactccatggcggttaccttggcactgggcagagcggtaagcacttaattgccacrttaagaaggggggatgtaagaaacaaaggtaattgtgttggcagccgggagcttccttttcctggcaaca

SEQ ID NO: 521278 - DNA, 615 bp, Homo sapiens
tgttatacttcccagtagtcaattgggagggttcccgaatctgtatatgccaattgtacttattatatcattcaactcaatattacataaactgatgaatatgagttcttaaaaaagatagtgcttctrtgcaacccaagttaaatgtaacttgatgaaaataaatgtgagtagctaaaaatgaatttttattcaatgaatgtcaccaagacaattttaaaataatatttaactattctgaataatctagaagaattctgcgtttaaattgttttccaaatgtcttttagctttcctatttgactaacaataataaattagcttgttatagatgtgataagctgcaatactaacaacttaaaaagtttttgtcttatatcaaaagataggcaaatacatattcatttatacatttgatattaaagtaaaacgtttgtgtctcatgttttatgattccatctttaaccaacatttttgattaaccaaccaattactagtgatggttgcatcacttaagaaggttttattctgttagtagagcctggaccaatgcctgacacataacaggagcattattactaactgctgaatgaatttgttggatgaattagcggc

SEQ ID NO: 521279 - DNA, 622 bp, Homo sapiens
cagggaccatcacagcacagccttaaaccccgggctcaagcaatcctcctgcttcagtctcctgaagatctgcaattacagacatccaccaccacacctggctggcagaacttttatttaatagcctagtttcttgacttggttctttctaaccatttcaaaagggtctgagcttggacacaagcctgatgagacattggagcatggaaaattctggccaacacaccatctttattagggaaaactgagaggccaatgcttttgggtgtgaggtcagatggaaggacaaccaggtgacaaggcctccactgagattcctgatacaacatcctgctcatgtctsggggagaaaaagtgctctgcccagaattttgatggaataaggatttcagataaaaaggctttcaaaaggccttggaaatgatttcttagagcaaaaacaaatgggtgcccagtgagtatcttaatccaacttgagttttgctaattaggaagatttgatcattattctaaaataacttcactgtagataagaaatcacctgggtcacttattctaaaaacttcccagatccccatttcccatgcccagagagttggattcgggagtcttaggtagatgc

SEQ ID NO: 521280 - DNA, 563 bp, Homo sapiens
gagaatgcagagttgggctggagaggaagaggagcagaaatagcctctaagacctratttttggttactgtgaagatgaaaagatatgacctacagaaagcatctggcgttgcttgatttggtcacagagggaaaggaaaggactgcctgggattttaaataacatatcacggtgtgttagtacacatttccatctaggcttcccctgttgctaaggaataattaaataatttaaatacttttaaataattgagagattcccagaatctttatttcagcccagtatgtcccatgcatctgtgcattttggtctgtgcgtgtgttttgatagtaaaaggagacatgagagtctctctttccagatgagtccagtcctacacaccctccccaggacgccaggggtatctggggctttttcgtttgctggtgaccaaacctgtccctggcttccatcttcagttcttcccaattctttaatcccttagtccaggctttgctccctcccttcccctccagccgacccaccacccccgctcatccaggtctccatcaattctcagttg

SEQ ID NO: 521281 - DNA, 563 bp, Homo sapiens
gagaatgcagagttgggctggagaggaagaggagcagaaatagcctctaagacctaatttttggttactgtgaagatgaaaagatatgacctacagaaagcatctggcgttgcttgatttggtcacagagggaaaggaaaggactgcctgggattttaaataacatatcacggtgtgttagtacacatttccatctaggcttcccctgttgctaaggaataattaaataatttaaatacttttaaataattgagagattcccagaatctttatttcagcccagtatgtcccatgcatctgtgcattttggtctgtgcrtgtgttttgatagtaaaaggagacatgagagtctctctttccagatgagtccagtcctacacaccctccccaggacgccaggggtatctggggctttttcgtttgctggtgaccaaacctgtccctggcttccatcttcagttcttcccaattctttaatcccttagtccaggctttgctccctcccttcccctccagccgacccaccacccccgctcatccaggtctccatcaattctcagttg

SEQ ID NO: 521282 - DNA, 611 bp, Homo sapiens
agcctcaccgaacctcttctctctaacatggtgggatatgccaggcatggtggttcacatatataaccttagcactttgagaggctgaggtaggaggatagcatgatactagcctgggcaacatagtaagatcccaggtctacaaaattaaaattaaaaaatgagcaagtgtgktggtgcatgcctgtagtcccagctactctgggactgaggtgagaggatcgcttgagcccaggagtctgaggttatagtgaactgtgatagcaccactgcactacagcctgggtgacagagcaagaccccatctctaaaaacaaataaaacaaaaataagtaaaataaaatgggggaaataataaaccttccctctaaagaattgtttgagggttaaatgatccaatgtgtgtgctatccctaacacagcaatgggcacacagtccaccctgaatacctgttgttctttgctctattccaggttaaacatgttctataaaggaccagataacaaatatcttaggctttgggggctatattgccagcctctcttgccacttctcaattctgccgttgttgcaagaaagcagccatggatgacacgtaacaaaggtgcag

SEQ ID NO: 521283 - DNA, 526 bp, Homo sapiens
gaggggaccgagagacgttaatcaaatagggaaatacaacgcrtattccaggtggtgtgaaaactgctgaaaaagaggaaacttacatcttagggaacttccggcgcaggaagggtgctcgggctgtggggggactttttgcatttaattaaagagtatggattgtcattgctggttagcaggagggtgcaaggtttagcgagggtgtgactgacaacccaggagcgccatgctccatccgtcctgcaggtggcgcgcctgagcccgtgcacggcagcctctccggaaggtgaagcacgctgccgcactgggggcctgcctggggctctgaaagcccattacgctgttctccttggggtcctcttggtggcatggacccacctcccccaacccccacccaaagcctaggtagttcttgtggaaggtgcatttcatcttcaacaagagaagatccgtttttcccgaagtctctatttcatctatttttcaggagcggaggctcatttctccttccttggatttaaga

SEQ ID NO: 521284 - DNA, 526 bp, Homo sapiens
gaggggaccgagagacgttaatcaaatagggaaatacaacgcatattccaggtggtgtgaaaactgctgaaaaagaggaaacttacatcttagggaacttccggcgcaggragggtgctcgggctgtggggggactttttgcatttaattaaagagtatggattgtcattgctggttagcaggagggtgcaaggtttagcgagggtgtgactgacaacccaggagcgccatgctccatccgtcctgcaggtggcgcgcctgagcccgtgcacggcagcctctccggaaggtgaagcacgctgccgcactgggggcctgcctggggctctgaaagcccattacgctgttctccttggggtcctcttggtggcatggacccacctcccccaacccccacccaaagcctaggtagttcttgtggaaggtgcatttcatcttcaacaagagaagatccgtttttcccgaagtctctatttcatctatttttcaggagcggaggctcatttctccttccttggatttaaga

SEQ ID NO: 521285 - DNA, 526 bp, Homo sapiens
gaggggaccgagagacgttaatcaaatagggaaatacaacgcatattccaggtggtgtgaaaactgctgaaaaagaggaaacttacatcttagggaacttccggcgcaggaagggtgctcgggctgtggggggactttttgcatttaattaaagagtatggattgtcattgctggttagcaggagggtgcaaggtttagcgagggtgtgactgacaacccaggagcgccatgctccatccgtcctgcaggtggcgcgcctgagccygtgcacggcagcctctccggaaggtgaagcacgctgccgcactgggggcctgcctggggctctgaaagcccattacgctgttctccttggggtcctcttggtggcatggacccacctcccccaacccccacccaaagcctaggtagttcttgtggaaggtgcatttcatcttcaacaagagaagatccgtttttcccgaagtctctatttcatctatttttcaggagcggaggctcatttctccttccttggatttaaga

SEQ ID NO: 521286 - DNA, 416 bp, Homo sapiens
gtcagccttattcatcatagtgaagcagtcttcaaaagactgcttggcgcataacaagtactcagtaagtagctgttgaataaatgaaygtacagcttcaaaatcccaaaatctacagtttttttgtttttgtttttgttttttaatcccttagtccagctcccatttgagagattcctattgggtctcttgtaggcatggtgtactagggtcacctggcatgaatgaggcttctgaagaagggtagagccttttccatgcaatggggcagaaatgccagagctgaactgagctaagctgtgttattccctcagccaggagctgaaatcagctcgcatcactcacagtgtcaagtctgtaaagtcttcagcttggtcttgaaggccactctaatccagccctctcctacctgtctc

SEQ ID NO: 521287 - DNA, 416 bp, Homo sapiens
gtcagccttattcatcatagtgaagcagtcttcaaaagactgcttggcgcataacaagtactcagtaagtagctgttgaataaatgaacgtrcagcttcaaaatcccaaaatctacagtttttttgtttttgtttttgttttttaatcccttagtccagctcccatttgagagattcctattgggtctcttgtaggcatggtgtactagggtcacctggcatgaatgaggcttctgaagaagggtagagccttttccatgcaatggggcagaaatgccagagctgaactgagctaagctgtgttattccctcagccaggagctgaaatcagctcgcatcactcacagtgtcaagtctgtaaagtcttcagcttggtcttgaaggccactctaatccagccctctcctacctgtctc

SEQ ID NO: 521288 - DNA, 416 bp, Homo sapiens
gtcagccttattcatcatagtgaagcagtcttcaaaagactgcttggcgcataacaagtactcagtaagtagctgttgaataaatgaacgtacagcttcaaaatcccaaaatctacagtttttttgtttttgtttttgttttttaatcccttagtccagctcccatttgagagattcctattgggtctcttgtaggcatggtgtactagggtcacctggcatgaatgaggcttctgaagaagggtagagccttttccatgcaatggggcagaaatgccagagctgaactgagctaagctgtgttattccctcagccaggagctgaaatcagctckcatcactcacagtgtcaagtctgtaaagtcttcagcttggtcttgaaggccactctaatccagccctctcctacctgtctc

SEQ ID NO: 521289 - DNA, 574 bp, Homo sapiens
agtaaggaagtgaagttctccctttctcccggctgtcagtgaccttcctctgtgagactggtgaatgttgggctaccatccacagtagaggagaaggaacactgatttaggagtcagagagccttatttgcttctaattctatccctactctttcttcattgtgtgactttgggcttatttacttcagttctctgaagctcaattttctcattcacaaaataggaataatatctaatgatagggttccttgggagcttcagagtggaatttatataaagcataagttttagcacatagtaggtgcccaataaaagttatcttcttctttgggcattttctactagaaatcccagagccaaagtggaatttaaaattatcagagygcatattttagattacattttaatgtaatatagttatatttcaatatatcctggtcctgaccttcacattttcctgatactgattatttttctcactattttttaaattgtaggttcttttattggatatatccccaaattctttgcagaatgagatggatagactctaactgaaatcaggagagatgta

SEQ ID NO: 521290 - DNA, 479 bp, Homo sapiens
ttttttcaacttgagaaggttagtttcttaacatggccccctctttgkccccaccacctgctgtgtggcgagagctctttgtaagagtgggtgaggagtgctgatgggggcctctgggagttaaggttccatttctctgcaacctttccctctgtgcctacccagaggcaggtctgatgaaggggaagcagacgtgaaggaggcagtgcccttggagactgcgtggggttcaagaagtgtggggataaggcttcccccagagcatgggccacagcagtggtgtctgcgcatagtggggttgagtgggcttggggtgtccagtctgactccccacattgtgagggccacattgctgggatgcagagggcttccgcaatgtgaacaggggctttcttcaggctcggtctgctaatccccaagtgtggagacttctctgtctcaggacatagactaggagcccccactcgctttgttgttca

SEQ ID NO: 521291 - DNA, 529 bp, Homo sapiens
agctaccttggtctccctggaccctgagctctatctcctcaactctgggagtctgctgggaagtgcctcagttccttctccctatgccacagcctgaaaacactcagagcattatgctgggatatttgtaaggtttagcctgtttatttctcatctcttggggatcactgcccttcattgtgtaatatctattgtcttgaaaaatgttttatttatttcatctggtatgttttgttttgttttgttttcaggatacaggtaaatgtggtctccgttactccatcttggctagagcagaagtgtgtttcttaatttccaaatatgtggtatttttctagttatctcttgtcactaatttctaacctaatcgtgtgtcttattggatctactatattacacatgtccattaaatcaagattgtgttgttcaartctatctttacttataattgtctgcttgatctattggaaactgatagatgaggttataatctcccgcatgagttttcagcttttccctgttgttccat

SEQ ID NO: 521292 - DNA, 529 bp, Homo sapiens
agctaccttggtctccctggaccctgagctctatctcctcaactctgggagtctgctgggaagtgcctcagttccttctccctatgccacagcctgaaaacactcagagcattatgctgggatatttgtaaggtttagcctgtttatttctcatctcttggggatcactgcccttcattgtgtaatatctattgtcttgaaaaatgttttatttatttcatctggtatgttttgttttgttttgttttcaggatacaggtaaatgtggtctccgttactccatcttggctagagcagaagtgtgtttcttaatttccaaatatgtggtatttttctagttatctcttgtcactaatttctaacctaatcgtgtgtcttattggatctactatattacacatgtccattaaatcaagattgtgttgttcaagtctatctttacttataattgtctgcttgatctattggaaactgatagatgaggttataatctcccgcatgmgttttcagcttttccctgttgttccat

SEQ ID NO: 521293 - DNA, 651 bp, Homo sapiens
ggagacagaagatatgactcctagttcctgctttaccacttcgcagctgtgtgactataggaaagacmgtttgcctctcttttcctcaaagtaaaatgaaggagttgaactcagtgatagtctttcagatgtctatccgttcttaaattccttagttccatactttggatttttagaaccggacttcctttgggtggagggggtttgggaaatgctggtttgtgattagatgaggaggggggttatggaagtgttggacaatgacagagggagatttaaaaatcattcttctctttgccttttgctcttctgacagtgagaatcaggaagctgagaagcaagaaacttagaaaggtgacttaaaattctggcctatttacacaacaaattagctaagatattttaatgtatagcttactagaatagaaggtgccaccaaatggtaccaggagttccaggcctgagaactggaagggtttcaggtagaggcagtgcattccagtgaggcagactaatggctttctgagtccagcctgtgaagtgttctcaatatgaaaccatttctgctgaaaataaaatttgaacagtaatataagcagtacccattggaaattgacattatgaggtcaattttacaaaactatgcagtct

SEQ ID NO: 521294 - DNA, 651 bp, Homo sapiens
ggagacagaagatatgactcctagttcctgctttaccacttcgcagctgtgtgactataggaaagacastttgcctctcttttcctcaaagtaaaatgaaggagttgaactcagtgatagtctttcagatgtctatccgttcttaaattccttagttccatactttggatttttagaaccggacttcctttgggtggagggggtttgggaaatgctggtttgtgattagatgaggaggggggttatggaagtgttggacaatgacagagggagatttaaaaatcattcttctctttgccttttgctcttctgacagtgagaatcaggaagctgagaagcaagaaacttagaaaggtgacttaaaattctggcctatttacacaacaaattagctaagatattttaatgtatagcttactagaatagaaggtgccaccaaatggtaccaggagttccaggcctgagaactggaagggtttcaggtagaggcagtgcattccagtgaggcagactaatggctttctgagtccagcctgtgaagtgttctcaatatgaaaccatttctgctgaaaataaaatttgaacagtaatataagcagtacccattggaaattgacattatgaggtcaattttacaaaactatgcagtct

SEQ ID NO: 521295 - DNA, 617 bp, Homo sapiens
ccgctcctttgggatccactgcagcattcataccgagggaggccatgggttgcttccagtcagtaactgagcatgggtaccagagctggagcatttctgcttaacacagggctccttgaatggcgatctttccacttgggctcgccatcagcctcatggagactttctccagagcagcactgcaggctcttcctaccatcctcctttctctacccgctccttgcccaggcatcaacctgcaccaccaatcttgctccctctccccttatctttctaaggcatttcyctcaataaatctcttacacttcaacttccatcttagcatatgtcttccagaagacctgaactgacacagagcccaccagtaaatcctgaaaacttgctgcaaaaacatcctggcagagaggaaagggccagtttctcatccacctgggaattttgctattgtcaattacatcatccacagtgatactgaggccttggggaaataagaaccataatggtttgcattttaaatgcctttagggcagagttacagagtaatatattctgacataacaagagaaaaaaagggtcacaaaaagtcaggggcatattctctgagtaacagccatgag

SEQ ID NO: 521296 - DNA, 558 bp, Homo sapiens
ttcctgacttgtgaaattcatcttttatcccctactttaactttttttttttgagacaaggtctcattctgttacccaggctagagtgttatagctaactacagcttccacctgggcccaagaaatactcccccctcagtctctcaggtagctrgaaccacagacacaagccatcacactcagctaattaaacaattttattttttgtagaaactagatctctctacgtagcccaggctgatctcaaactcctgggctcaagcaatcctctcaccctggcctctcaaagtgctgggatcacaggcatgcaccactgtgctcagctaccccaattttaccttttaaacacaaaagctttcattaaatgtaaagccaccatttcctttgactttcaaatccatgtatcagtaaaataaaacaaaaatttatttgaatgcaataatagcagacatatgctgttctaaaatcctcagaaatctggcagtggaaactgtgaagatagttatgatctcatgaagtttgaatatagtcctaaactctttggaatgagagatttgt

SEQ ID NO: 521297 - DNA, 545 bp, Homo sapiens
gaaaccttctctcctcccagttactcactgctagaaccttccaccaaagaacatgccttctgtacccttctccacgttgggcaacaatttttactttgttggtttgttttctaaatatagaaccattcccaggctgagtagaacattgaacccaacattatgttctactgaacattttaactgaacatgagactgacatatttttttctttcttttcttttttctttcttttttttttttttttttttttttgagtctcactctgtcacccaggctggattgcagtgatgtgatctcggctcactgcaacctccacctyttgggttcaagcaattctcctgcctcagcctcccatgtagctagctgtgattacatgtgtgctccaccatgcccggttaattttttctgtttttagtagagacggagtttcaccatgctgaccagactggtctcgaactcctgacctcgtgacctgcccacctcagcctcccaaagtgctgggattacaggcgtgagccaccgcctctggcctgagattgacatat

SEQ ID NO: 521298 - DNA, 607 bp, Homo sapiens
taacctgccaaagacaattctgtggctctttaagcasgtttaattaaaaactaaaacgaaatacaaccatgtaatgccttttcatccctcatgaaaacttactctgttttttgagggaaagagtaataaaggagtaatatgagacaaatgggtgtacattagttagtagtcttcattcttatttacaagcaatcatgttaatgccctttctagggaggaaaaaagaaaaagatgcaatgaccttcattgaaattcatgcactaaccaacacaaagcatattttaaaatgccctgaaaaaatgcttcagggttatggggttaacacaatacaaactgctgcctacctttctgttgttttcctaccccggaatcttcctaagagaccacaagtttcacactgggatgatggggagaaggacatcaccctgtgtatttgcatcatttcccagaactgcctttctaatagctcgagattctgaagggcacataaaacattgtaataagtacattttgtgttttcatttatttcttgggagaatagcagccactattaatatatgttcttgacagatcattggattcacattcccaacagtttcaaataact

SEQ ID NO: 521299 - DNA, 487 bp, Homo sapiens
ttgaattgccaaatctaagaaatgtttcagggatgattgatgtcattaccagagtggatgcttctacactttggtgttcagtaacaaagctgcattattctgggtcaggcaatcattcctaaaatattaggaataaacactgggcgaawtggccaaacatagtgttttatgctgcaattttttttttgcaatctgtgacctattgtttcttattactttcaccaactgatgttggtagagatattgagatagaaataaactacaaaaatatagcttgatttcagacgatcaaaaacgtaaaagtgtagtcattaaagtcttccgctcctctccttgtctccctaacagcagcattagcatgctgcccacgatgacatgtcttgtgtcacctaacatgattgattaagggatatatttttaaatttcaccactgcctttgtttttatttttttattttctaggctgcttgtcacatgccccaaatctg

SEQ ID NO: 521300 - DNA, 487 bp, Homo sapiens
ttgaattgccaaatctaagaaatgtttcagggatgattgatgtcattaccagagtggatgcttctacactttggtgttcagtaacaaagctgcattattctgggtcaggcaatcattcctaaaatattaggaataaacactgggcgaattggccaaacatagtgttttatgctgcaattttttttttgcaatctgtgacctattgtttcttattactttcaccaactgatgttggtagagataytgagatagaaataaactacaaaaatatagcttgatttcagacgatcaaaaacgtaaaagtgtagtcattaaagtcttccgctcctctccttgtctccctaacagcagcattagcatgctgcccacgatgacatgtcttgtgtcacctaacatgattgattaagggatatatttttaaatttcaccactgcctttgtttttatttttttattttctaggctgcttgtcacatgccccaaatctg

SEQ ID NO: 521301 - DNA, 487 bp, Homo sapiens
ttgaattgccaaatctaagaaatgtttcagggatgattgatgtcattaccagagtggatgcttctacactttggtgttcagtaacaaagctgcattattctgggtcaggcaatcattcctaaaatattaggaataaacactgggcgaattggccaaacatagtgttttatgctgcaattttttttttgcaatctgtgacctattgtttcttattactttcaccaactgatgttggtagagatattgagatagaaataaactacaaaaatatagcttgatttcagacgatcaaaaacrtaaaagtgtagtcattaaagtcttccgctcctctccttgtctccctaacagcagcattagcatgctgcccacgatgacatgtcttgtgtcacctaacatgattgattaagggatatatttttaaatttcaccactgcctttgtttttatttttttattttctaggctgcttgtcacatgccccaaatctg

SEQ ID NO: 521302 - DNA, 597 bp, Homo sapiens
tgtagcttgccatgcctaaaatatgcactatctgactcctttcagaaaacaaaaattaatctctgcttttggtcatagtacctatatatccaagcagagcaacagctaacttaactgttattatttgagaagccccctaagacacacggcctataaagtatttgctaccaatctatcttcagatataacattcatacttgttttcacttgtacattgagcattaaaactgcagccttgccaccctcatcctccactaaaggcccttgcacagcagcatggcatagtaagtaatgccatagactcagagtgacatgagtaccaatttcagctattattaggtattgcttattaggtgagaaaattggacatgtcagagataatttcttcattcatcartaatttgcacagcagagtctcataaataatgcttcttggtacataccatgtgtattggatatctattgctgtgtatcaaatgaccctgaaatgcagtagctggataaaacaacatttactatctcacaattttgtcgttcaggaatccaggcatggcttagctgggtcctctatctagctcacggtctcttacaggataa

SEQ ID NO: 521303 - DNA, 573 bp, Homo sapiens
gttctctaaaacatgcttatcacaactgctgtctgacagttgtaacktgtgaatgcagttctttgtcaatgtgaaaaattattcattgactaacagtccaaataattttaacactttctaaaatctttcatccaatcttagactactgaagtcatagttacttaataagttacccttagatgtaagcaccaacggcaaggaacaagatagaaaattctgtttaataaaaacttaatgaaaaactgaaatgagaaattaaaatgaaatttagatatataataaattttggtatatttgtattctttaacagtgaaaataatgtatgtcacttgtaaatattgaatactttttcattgtacttcatcttaaaatttattactaatgtggacagaatggcagaaaaaaatgagaactgtcatttttcccattgattaaaacttgcaagtactggtatctcattctattccaaaaaaggcaatggcttagagcatagtcttttgtgttatacatgtaattatttaaacaagacacaaattttaaaaataactttcattttacagcgataataagcag

SEQ ID NO: 521304 - DNA, 594 bp, Homo sapiens
ctgctttctttgagtgttcaatggggagtttaaataagaatttaaactgcagttctaaaccttttcctttgtttatagtactcacaaactaaatactgaatctcaaaagatggccttatttagttttgaattcttatataaggtaattacagtattgacgtgattagtcagcaggctgaagttgtcaaagtaaaccaaaattgtctaacatttatgaaagaagtcaaacagtcttttggtaaatttattgagttagattctctaggaggcccttattattaacatcccaaagggagaatttattatcttaatataatttttgataatccaggtatacttttagtagtgaacattcaactttcaagataaccagagtaatttgatttgaccatcaaaaattgtgtgtgtgtgtgtgtgtgtgtgtgtgtgtgtgtgtgcatgtagatctcatttgatgtaatagttacacaaaaactatttctgaattttgaaactcagccaaagcaaaaaatcattggccttcaatacatttyacatacacaattgcacgaaataaatttatattaaagataaacaaaaatattcaacataatt

SEQ ID NO: 521305 - DNA, 694 bp, Homo sapiens
acacaaaaaaatgtgagtgataataaatggtacctgctgtttgacatggggacaaaagggagcaatgtggggagggctgcccccactgggactcgaaagcacatgcaacacctgcagcagcactaccttcctgcagcctttgctgcacaggaatatggacccaagcatggcccatttcccaagagaatgtagaaatcaaaatgtttagattaatttagaaacttttccgaatgttggtaaccaattaagtttagaaatacagatgaaaacaaacctctggcccaattctgtgcagaacaaaccaaccctgtctgaaggctacacttgctgtggttgtgtaagagcttcaggctcccagtctgtgacctccattatggaataactggttttactgttttaacttttttaaatcatttaaaagaaatatgagttttagctgtcttaaaatagccatcataactgttttccatacatgttcttttttcctatttgccttgtttcctyacatatttttctgttttaaaaatacatgtagatgaatcttgactcctaagataaaaacaaaacaacaacaaaaacaagatcagcttctctttctgctcctttgtacctggactaaattcagaagagcatgtttcagaaaataattcacacattttacctagtaagcactccccaaaatgatgagtaggag

SEQ ID NO: 521306 - DNA, 506 bp, Homo sapiens
tggtagatggctgatttctccctgcgtcttcacatcctcttccctctatacatatttgtgctcaaatttctagtttttgtgagtatatcagtcatcctggattgcccaccctaaagacctcactttaaccaaattccttctgtagcgatcctatctccaagtaaggccacaatctgaggtactggggactccaacacataaataaggttgggggcaggtgggcacgcaaatcaacccactgccaaggggctggtatcactgcactgcagtcagagagttcgccgtagggacagggggctaggggaccggccaagcagatagataaracaaactgagcctgaaatctggctggagaccaagtcctcaagggctctaagtgctgatgaggacaacgggggtgcaaagaggataagcccctcacccagtgctgtctgaagtctaccagggaggttgggtgaggacgtcctaagacttgaagcaacaaagaagtctcagggctgagccag

SEQ ID NO: 521307 - DNA, 641 bp, Homo sapiens
cacattttaaagggaattatctgtagataaaggyaattgtccataatatacacagagctttcacagattgttaaagacatacaacctaaaagtaaaatgggcaaaagaaatgaagtgatttgcagaacatacccaaatggtcagcagacatataaaaaaatgctcagctccattggtacttaggaaaatgaaaatgagtaactctcaacaaggaaaaacatttgagcttggtgacactgcaccagcagggaagctggttaggagcactcacagacttctgctggaaatgtcagcagcggctgccttgctgcaaaagcatgacaacatctattcaaacaagcctagagaaatacatgctgttcaacctagcaagcccactgccaaaaatctagtctatgaaaataaaagcatcatgggtcaaagattttcacatcatagcaatcgcatagtagccaaaaagttttgaaagaaagagaggactaaataaatatcaaaatagatacttgaataaattttataaatgcatacattgaaatattatatagtcactaaaaagagtgagttgtatagcagctttctctataatagcaccaatctgaaaacagcccaggtgtctatcaatgagagaatgaacaaactaa

SEQ ID NO: 521308 - DNA, 641 bp, Homo sapiens
cacattttaaagggaattatctgtagataaaggtaattgtccataatatacacagagctttcacagattgttaaagacatacaacctaaaagtaaaatgggcaaaagaaatgaagtgatttgcagaacatacccaaatggtcagcagacatataaaaaaatgctcagctccattggtacttaggaaaatgaaaatgagtaactctcaacaaggaaaaacatttgagcttggtgacactgcascagcagggaagctggttaggagcactcacagacttctgctggaaatgtcagcagcggctgccttgctgcaaaagcatgacaacatctattcaaacaagcctagagaaatacatgctgttcaacctagcaagcccactgccaaaaatctagtctatgaaaataaaagcatcatgggtcaaagattttcacatcatagcaatcgcatagtagccaaaaagttttgaaagaaagagaggactaaataaatatcaaaatagatacttgaataaattttataaatgcatacattgaaatattatatagtcactaaaaagagtgagttgtatagcagctttctctataatagcaccaatctgaaaacagcccaggtgtctatcaatgagagaatgaacaaactaa

SEQ ID NO: 521309 - DNA, 641 bp, Homo sapiens
cacattttaaagggaattatctgtagataaaggtaattgtccataatatacacagagctttcacagattgttaaagacatacaacctaaaagtaaaatgggcaaaagaaatgaagtgatttgcagaacatacccaaatggtcagcagacatataaaaaaatgctcagctccattggtacttaggaaaatgaaaatgagtaactctcaacaaggaaaaacatttgagcttggtgacactgcaccagcagggaagctggttaggagcactcacagacttctgctggaaatgtcagcagcggctgccttgctgcaaaagcatgacaacatctattcaaacaagcctagagaaatacatgctgttcaacctagcaagcccactgccaaaaatctagtctatgaaaataaaagcatcatgggtcaaagattttcacatcayagcaatcgcatagtagccaaaaagttttgaaagaaagagaggactaaataaatatcaaaatagatacttgaataaattttataaatgcatacattgaaatattatatagtcactaaaaagagtgagttgtatagcagctttctctataatagcaccaatctgaaaacagcccaggtgtctatcaatgagagaatgaacaaactaa

SEQ ID NO: 521310 - DNA, 641 bp, Homo sapiens
cacattttaaagggaattatctgtagataaaggtaattgtccataatatacacagagctttcacagattgttaaagacatacaacctaaaagtaaaatgggcaaaagaaatgaagtgatttgcagaacatacccaaatggtcagcagacatataaaaaaatgctcagctccattggtacttaggaaaatgaaaatgagtaactctcaacaaggaaaaacatttgagcttggtgacactgcaccagcagggaagctggttaggagcactcacagacttctgctggaaatgtcagcagcggctgccttgctgcaaaagcatgacaacatctattcaaacaagcctagagaaatacatgctgttcaacctagcaagcccactgccaaaaatctagtctatgaaaataaaagcatcatgggtcaaagattttcacatcatagcaatygcatagtagccaaaaagttttgaaagaaagagaggactaaataaatatcaaaatagatacttgaataaattttataaatgcatacattgaaatattatatagtcactaaaaagagtgagttgtatagcagctttctctataatagcaccaatctgaaaacagcccaggtgtctatcaatgagagaatgaacaaactaa

SEQ ID NO: 521311 - DNA, 553 bp, Homo sapiens
ggacatcatcatgtcgtcacaatatgccaggcctctgtccagggctttagggctttagaagtattcatttagtgcttaccrcaatcctatgagatagacacaattattcttctcatttagaactgaaaaatttaaatcttagagaacctttgaaatgtgcttctcagaacaagcacagtggcagacctgggtgatttacccaagacatttatacataaaatgccttccaattcccattgggcaaaactctttatttgatgccatttaaaaccttattatgttaaattctctaaccagaagctacagataagggtcgtccaaaaatttctccacttggccttttaaagtaagtaaataaatagagatggtaaattcatgctgaatattataacactgactccagaagactgaatttgaaaagacattactagcatattttagaataaaatgatacatattttcaacagttttacggaatttgtagagtggcactggagataggatagagcagtggttctcaagcaggggacagattcagcccccatgggatatg

SEQ ID NO: 521312 - DNA, 637 bp, Homo sapiens
gacacagcaaggacaaactggaatccataaggaaaaattggaaacactgtctgaatcttacctcctccaatcttgatgatatgagtgttctgtgttaggaagagctagctactctgtacctgggagcaacaattaaacctgaagctctagcaggatctgaaaaagctgtagatctggctgcttccacatgcctagcggctcagtaacaatgtgtgtgagctacaggggaacctggtaccctacaatgacctttagagattatagccattgtttcacatctaccattccaatcttgtgcggtttctcttttggctcaccctaacgcagaaaaacatagaaaacagaattacagaagacctagttttggcttaactaagttgatgttgtacgaagctgtcacagtctgccccttgtcaacctgatattcatatacaagcctttcgacttccaaataaagacagcaaaatcatgtttctgcctaataactgaacagacactaactarccatctcaccacaagagaacaccaagtccttttggccatctttgggtaatgctgtttccttttctagctgagacacatttcctcctggatatccttgttgcgggaagtcagggatccaaaacagagggaccag

SEQ ID NO: 521313 - DNA, 637 bp, Homo sapiens
gacacagcaaggacaaactggaatccataaggaaaaattggaaacactgtctgaatcttacctcctccaatcttgatgatatgagtgttctgtgttaggaagagctagctactctgtacctgggagcaacaattaaacctgaagctctagcaggatctgaaaaagctgtagatctggctgcttccacatgcctagcggctcagtaacaatgtgtgtgagctacaggggaacctggtaccctacaatgacctttagagattatagccattgtttcacatctaccattccaatcttgtgcggtttctcttttggctcaccctaacgcagaaaaacatagaaaacagaattacagaagacctagttttggcttaactaagttgatgttgtacgaagctgtcacagtctgccccttgtcaacctgatattcatatacaagcctttcgacttccaaataaagacagcaaaatcatgtttctgcctaataactgaacagacactaactaaccatctcaccacaagagaacaccaagtccttttggccatctttgggtaatgctgtttccttttctagmtgagacacatttcctcctggatatccttgttgcgggaagtcagggatccaaaacagagggaccag

SEQ ID NO: 521314 - DNA, 601 bp, Homo sapiens
ggcgtttaaggttttgctttaggatgtaggtaggtgcaccacatggagataagttgggtgtgagaagaaatgcagtttatgagcctatctgtctcataaactacacactgttatctttgtatttatacatttctaatttgtaatcatgtgtcattggtccagtttaagtaaaatgaaatggagactaggcctgaaaataatccctgagcagaaaaagacaggccttgaaagtggccttaaccttgtttgatatgcaaacataagtgaaatgtaatttaggctgttttgtgtaaatgcctatatttaaaaaaaaaaaaaaagaaagttaagcttaaccaatagcaggttgccarttaacttatagttatataactaggcactttccaatgggacagaccaaataaggccactacatagctgcaaacaataaaacaggtgcttttctttatttctatgttcaccctattaaaaaaaaataaaagccttcttttcacacgcctatgattttgaatttgattctctttattttaaagagttaaactctttaaaattttagtgtggatcattttatattttaaccgtaataacatttgatttttct

SEQ ID NO: 521315 - DNA, 414 bp, Homo sapiens
taataattcagaaggtattcatattttttgcatgcaatttatgtgaaaaccgtatatgttaatagtaaatcccatttgtccaagaattgcttgcttagacttgccttctagtccttttcctgtatcaatgtgtagctgattagtagataaaataactactcaggattcctgtgtgctgtgaattgaatactcccatcctcccaaattcacatggtgaagctctcttatcaatgtgatggtactgggaagtggaaccttttggagttaattaggttgtaagggtggagcccccttattagtgtccttatagaaagagaaagagagcgatctttctctcttttattcagtaagaatacactgaaaagatctagacagtactttccygcaaactagaaagagaatcctcaccagata

SEQ ID NO: 521316 - DNA, 621 bp, Homo sapiens
tcataccacaaaaaaatgtgggggacagataactcggtgagatgatgaatgtgttatctggcttggttgtagcaaccatttcactacatatttaaaaatatcatgttatacaccttaagtatacacaatttcttttaaggtgcaggagccctcaggagggaaaatggaaagttttggaatctattattcttagataatctcactttcagaaattctttcagtatgtagaagtaaacatwatttgttccctttccaacaatacctataaaattaaccccaaacatatgacatggctgggggcagggaggggaaacatgagaaataatttcattttcttgttgaaagactttctgctaccaaaacaatgcaattagaacatatcattctttatttcaaatctttaccagtctatttagtggtaattgaaaagtttatgtttgtaagttttaaggtttatgtaggacagatttccaacaacatcctaatttgaaattgtatttttagatttaaagttattccccccagaaactactctgcttaaagtgttatgaatacctttgaagtagctgaagagcctgctgagaagataagattttcccaaaactactgttcataaatgcc

SEQ ID NO: 521317 - DNA, 621 bp, Homo sapiens
tcataccacaaaaaaatgtgggggacagataactcggtgagatgatgaatgtgttatctggcttggttgtagcaaccatttcactacatatttaaaaatatcatgttatacaccttaagtatacacaatttcttttaaggtgcaggagccctcaggagggaaaatggaaagttttggaatctattattcttagataatctcactttcagaaattctttcagtatgtagaagtaaacattwtttgttccctttccaacaatacctataaaattaaccccaaacatatgacatggctgggggcagggaggggaaacatgagaaataatttcattttcttgttgaaagactttctgctaccaaaacaatgcaattagaacatatcattctttatttcaaatctttaccagtctatttagtggtaattgaaaagtttatgtttgtaagttttaaggtttatgtaggacagatttccaacaacatcctaatttgaaattgtatttttagatttaaagttattccccccagaaactactctgcttaaagtgttatgaatacctttgaagtagctgaagagcctgctgagaagataagattttcccaaaactactgttcataaatgcc

SEQ ID NO: 521318 - DNA, 621 bp, Homo sapiens
tcataccacaaaaaaatgtgggggacagataactcggtgagatgatgaatgtgttatctggcttggttgtagcaaccatttcactacatatttaaaaatatcatgttatacaccttaagtatacacaatttcttttaaggtgcaggagccctcaggagggaaaatggaaagttttggaatctattattcttagataatctcactttcagaaattctttcagtatgtagaagtaaacattatttgttccctttccaacaatacctataaaattaaccccaaacatatgacatggctgggggcagggaggggaaacatgagaaataatttcattttcttgttgaaagactttctgctaccaaaacaatgcaattagaacatatcattctttatttcaaatctttaccagtctatttagtggtaattgaaaagtttatgtttgtaagttttaaggtttatgtaggacagatttccaacaacatcctaatttgaaattgtattttyagatttaaagttattccccccagaaactactctgcttaaagtgttatgaatacctttgaagtagctgaagagcctgctgagaagataagattttcccaaaactactgttcataaatgcc

SEQ ID NO: 521319 - DNA, 621 bp, Homo sapiens
tcataccacaaaaaaatgtgggggacagataactcggtgagatgatgaatgtgttatctggcttggttgtagcaaccatttcactacatatttaaaaatatcatgttatacaccttaagtatacacaatttcttttaaggtgcaggagccctcaggagggaaaatggaaagttttggaatctattattcttagataatctcactttcagaaattctttcagtatgtagaagtaaacattatttgttccctttccaacaatacctataaaattaaccccaaacatatgacatggctgggggcagggaggggaaacatgagaaataatttcattttcttgttgaaagactttctgctaccaaaacaatgcaattagaacatatcattctttatttcaaatctttaccagtctatttagtggtaattgaaaagtttatgtttgtaagttttaaggtttatgtaggacagatttccaacaacatcctaatttgaaattgtatttttagatttaaagttattccccccagaaactacwctgcttaaagtgttatgaatacctttgaagtagctgaagagcctgctgagaagataagattttcccaaaactactgttcataaatgcc

SEQ ID NO: 521320 - DNA, 593 bp, Homo sapiens
ggccagaaagggaataaacctattttcagagaatcttccaaataccacacacaccatgaagacamcaccactgatcctcctacatagccagcagaattcatatgaatccctgtgtatggccacccagaaggactattttcaaagcaactgttgctcttactccactatttccatacacttccaaaaaccattatcatcctagaagccactccaaacatggaggaaatacaggccactgggatttacagcatgctgcgcatgctctatataaacacaggaactatctgggtctcctcctaacacatatactccactcacctactttaaagagcaaaagcaaactactactggcttgctctgttattctaacctgctaagactgtttcctttaccccttacctcattactctaccacctggctccaacagccagagactaggacaaaattcctgtcactaacatgtcctctattttgttgattggttggatgaggggtcatctgaggcagacatggtggtcagtcccatgcttgcccttcaaacttagccagtgtaccctctgtccccataccacacagagcaacataaagccag

SEQ ID NO: 521321 - DNA, 593 bp, Homo sapiens
ggccagaaagggaataaacctattttcagagaatcttccaaataccacacacaccatgaagacaccaccactgatcctcctacatagccagcagaattcatatgaatccctgtgtatggccacccagaaggactattttcaaagcaactrttgctcttactccactatttccatacacttccaaaaaccattatcatcctagaagccactccaaacatggaggaaatacaggccactgggatttacagcatgctgcgcatgctctatataaacacaggaactatctgggtctcctcctaacacatatactccactcacctactttaaagagcaaaagcaaactactactggcttgctctgttattctaacctgctaagactgtttcctttaccccttacctcattactctaccacctggctccaacagccagagactaggacaaaattcctgtcactaacatgtcctctattttgttgattggttggatgaggggtcatctgaggcagacatggtggtcagtcccatgcttgcccttcaaacttagccagtgtaccctctgtccccataccacacagagcaacataaagccag

SEQ ID NO: 521322 - DNA, 593 bp, Homo sapiens
ggccagaaagggaataaacctattttcagagaatcttccaaataccacacacaccatgaagacaccaccactgatcctcctacatagccagcagaattcatatgaatccctgtgtatggccacccagaaggactattttcaaagcaactgttgctcttactccactatttccatacacttccaaaaaccattatcatcctagaagccactccaaacatggaggaaatacaggccactgggatttacagcatgctgckcatgctctatataaacacaggaactatctgggtctcctcctaacacatatactccactcacctactttaaagagcaaaagcaaactactactggcttgctctgttattctaacctgctaagactgtttcctttaccccttacctcattactctaccacctggctccaacagccagagactaggacaaaattcctgtcactaacatgtcctctattttgttgattggttggatgaggggtcatctgaggcagacatggtggtcagtcccatgcttgcccttcaaacttagccagtgtaccctctgtccccataccacacagagcaacataaagccag

SEQ ID NO: 521323 - DNA, 536 bp, Homo sapiens
ttatgccttctgtattttgtgccttgcttaagaaaatttccctatctcaagattactaacaaatgttcctgtattttcttctgctacctttatagttacaatttatgcatctggctgttaatttgttgcatgtagcttcatggttatatcttacaaggcaagaaccctgtcatgctcttcataaaaagaaattggctgacttactctacttattatatgctttcttaaaattacactggtattttatggattaatttagtaagaattgagaaatatacaatatagaaacatagtataggttttcacttactcagayttctattggtgacatttaataaggattcataagtttttgtgtaaatctttcacatttgtcattatatttgttaggtattttacagttttgtggtcatggaatcctatttggtattacattgtctaatttattattgctgatgtttaagtcttttgactttttaatgttgattttatattagacgcctttttagcaatctaagttctaataatttgtcact

SEQ ID NO: 521324 - DNA, 667 bp, Homo sapiens
tggaacctgtgaatgttaccttccatgggaaagggactttgcaggtgtgattaagttaaggaccctgagatggtgatatggtttggatgttgtcccctctaagtctcatgttgaattgtaatccccaatgttgtaagtgggacctggcaggaggtgtttgggtcatgggggcggatccctcatggttcagtgctgtcctcatgataatgagttctcatgagatctggttgtttaaagagtgcagcacctcctccactctctctcttgctcttactgtccccatgtgacaagcctgccccgttttgccttctgccattattgaaagctccctgaggcctccccagaagctgaacagatgccagtgccatccttcctgtacagcctgcacaactatgagccaattaaacctcttytctttacaaattacccagtctcaagtacttctttataacaatgcaagaatgaactaacacagatggggagattatcttggattatctgagtggattcagatgtaatcgtagggtctataaaggaagtctataaggtgttgcttttagccactaaggccgtgatgatttgcaacagaaaggtgtcttttaactatctcgagatgaagtgatttgctttcaaagcgggaacctgttcccagggcattattctgttt

SEQ ID NO: 521325 - DNA, 571 bp, Homo sapiens
tgacttctttgtacctgtttctcatttgtaaaatgagtacagtagtatttcctacttcctagtgttattgggaaggccaaatgaattaatacatgataaagccaagggcctggcactggctctatcacggctttagaagccatccttgatagatggttttacaactcaatacaagttttagtattatccatagtggtagaagaaatacaatatatgctatcaggtgatgatgttttttccaagctggattgtaaraaccatagggcaagggctgtcttattcatccttgtattcctgtttcagacacagaaccaggcttggaacagagtaagtaattgtgcccaaatggtgattagaggtgggtgaagtcagggtgtgctgtcgggaggaggaggagaccctggagcagggcttccagagaggaggagaagttggataatctgtgggagaggaactgggggagggtctgggggcccagattgggttggcgtgagagagcaaggaggtccccttggctgcacccagtgtttgtttagggagagggatcctgcatgctttggaggcccaacta

SEQ ID NO: 521326 - DNA, 599 bp, Homo sapiens
tttttactttgcaacctttccagcccccatatttcctcctatgtatgcatgcatatacacctctcactgcacaaacacacgcatgcatgcacatgtgcacagtcatcacccacagatcacgtagatcctctgtgcacccaaagacgcatacaaaggcattgttcaaatacctacgcgttgctgacacacatatgcaaggtgtgcttggtgtgtacacacagatgtgcacttgtgtcacatggtgtttgcacccctcacacatggtgagcaggatatcatggagaaggaagcctagattcctacatggggarctaggcatatagcctctccaggcttcggcatctcaatctctaaagaaggggaaataaacactactccacttccctccccagcacttaactgttgttaaggcagaatgacagccacacaaaggactgtgacgtgccctcctacaaacccccggcagaatcacacactgggtgcacgtatatgcattgtatgagtgtgcatgcactgtccaagtggcgtctaagctctctgtacatacaacattgtatttagacacatctctgcacacacactgtacacatgctgtgaat

SEQ ID NO: 521327 - DNA, 456 bp, Homo sapiens
tgccattcaacaatttgtatgtacccaaaactgtataatggacaaagttctcaatatagagtatcaccttgaaacctgaagacatcatttttttctcattttttaaaaataagaaatctgagcttcagagactttaaatagcttgcctaaatgtaaacaagtggtaaatatgggagacagaacttagagctatgccttcagcttctaaggcatgccactttctgtgagtgtttgctttaaagtcctattggagtatggattcatggaagatatcatgctgcaggtgtaatctataggagtttgagaaagacttagatgartttttcaaccaaaatctaaaatatcataggggaatttatttgacctatgtatggcttcctaaatatgagaggatttcttaaaccatggtaagacaaaataactcagaattgatttacttttcttataaataaagat

SEQ ID NO: 521328 - DNA, 439 bp, Homo sapiens
ctgcttctggttgctgttttaaggttactacctaatgtgtacttttagagactctccctagtgtgctgtcacaaagaagtcgattggatttttatgtaaagaagggctcggtgagcctctaatccttaaatcattcctttgaccacattttatttcattgtaaatggagattaccacacagaggaatatctgatgctgtctggctgatccatttctaactaaacarttaagtcacttgtatgtcagagcatactctcagcaactggcatttccattacttcaggcttaccctgagactattttggaaatatttcatcttctgctattttttttctagacatttgttattttatttttagattgacagacaaaattgtatatcttcatctgtacaacgtgatgttttgaagtgcatatgcattgtgaaatgaatgaatgt

SEQ ID NO: 521329 - DNA, 509 bp, Homo sapiens
gctgggggcctctctcttcctcttatactctcgctggggctggtggtccgggggccttattccttggaagccatgtgggccatgaggtccaccaccctgttgctgtagccaaattcattgtcataccaggaaatgagcttgacaaagtggtcgttgagggtaatgccagccccagcatcaaaggtggaagactgtgtgtcactgttgaagtcggaggagacaatctggtgctcartgtagcccaggatgcccttgataggatcctctgaagcctgcttcatcatcttcttgatgtcataatatttggcaggttttccagatggcaggtcgggtccacgaccaacaccttggcagtggggacatgggaggccatgccagtgagcttcttgttcagctcagggatgaccttgaccattgccttggcagtgctagtagatgcaggtatgatgttctggagagccctgtggccatcaggccgcagtttcctgcaagggccatccacagttttc

SEQ ID NO: 521330 - DNA, 627 bp, Homo sapiens
tcacttagatttggaaactgacacattaagcaacttttctgaagtcactaaggagttgatggcagcaatgaaagaacccagggaatttcactttgaaatatgtcaccctggtgtgttgattattttaaattaaaggcccttgaaggtcagtagatgctagaagaggctttattccttcatccgaattaagacaggaccggcaaaaaagaacataattgccttccagttcttccctgaaatttcattatctatcccagaaaagaagactgaggaatacagccacacctggacagactttttcacaaaatatctgtttctcaggctcattcaaattccaaagaatcatttacaagttaacttttgtctcccaggctcattcattctccctaataattatttactacccctcaaaagaattgcctatgttccccatctcctcctcccttataaagaagggtatatacacctccgggcctcataggttattgggtaatcacatttcggtgatttccccaccctctcrtgcatgttaaagaaattctatatgaccttttctcccattaatctgtcttttgtctgttcattttctgtggcccttcagatggctttccctcttcaaccctacag

SEQ ID NO: 521331 - DNA, 561 bp, Homo sapiens
accattaactaggattttctttttcaaaaatatatacttactacctttatttcctttaaactctgttttttctttacctttgagcattgtaagttttttatatttcccctatttttgtaayttaatattttctcttgacttcattccccccccacacacacacacaatgcaaatttaaatggctttttcttatagttaatatgtgcaactttgatagcatcacagctttaaatttttactttagagctgcttctttttctatcttttcttttaccaaactaccaattgctatatcacctcctctactcaaaacacactaacacacacaaacaattgattattgctgaaaactagactatattctatttgttaggacttagcttaatgtcagttagaacaaatatttaaatgagacaatagaaaacagttcgttaattttataattaattttaaaagagatacattatttgattaatgcatacatgaataactaactttatttaataatttgtctggagtaactcaacataagtgctccaatgtaccccaaatttgctattt

SEQ ID NO: 521332 - DNA, 561 bp, Homo sapiens
accattaactaggattttctttttcaaaaatatatacttactacctttatttcctttaaactctgttttttctttacctttgagcattgtaagttttttatatttcccctatttttgtaacttaatattttctcttgacttcattccccccccacacacacacacaatgcaaatttaaatggctttttcttatagttaatatgtgcaactttgatarcatcacagctttaaatttttactttagagctgcttctttttctatcttttcttttaccaaactaccaattgctatatcacctcctctactcaaaacacactaacacacacaaacaattgattattgctgaaaactagactatattctatttgttaggacttagcttaatgtcagttagaacaaatatttaaatgagacaatagaaaacagttcgttaattttataattaattttaaaagagatacattatttgattaatgcatacatgaataactaactttatttaataatttgtctggagtaactcaacataagtgctccaatgtaccccaaatttgctattt

SEQ ID NO: 521333 - DNA, 530 bp, Homo sapiens
taattttaaaattgtatttatgaatgacacaagtctaaaaatatatttccagayttgagtacctaatagtctattatataaatagctggtttgcatttattatctttcatatttccacttcatttaaaaagtacatacatgtgacccagggtagccactgggatttatgaagaggcaaaagtggggagatttgagaatttaggaatgtcaggagtgggcatacacagagctatctctgggcaccctcacccactttgcacaggcttttgcacagtggatgattgtgctcctggaagagatccagggagcacaaagtacgagacctgcttctgcccaagaggatcagaaactgagacctatgtgggtctcaggggatggtactaaaccactcgtgagaaattcaccaccataatctcatcacctcccaccaggccccacctccaaaactggggattatatttcaacatgagatgtgggtgtgaacacagattcgaactatatcattcttcccatggcccctcccaaatctc

SEQ ID NO: 521334 - DNA, 530 bp, Homo sapiens
taattttaaaattgtatttatgaatgacacaagtctaaaaatatatttccagatttgagtacctaatagtctattatataaatagctggtttgcatttattatctttcatatttccayttcatttaaaaagtacatacatgtgacccagggtagccactgggatttatgaagaggcaaaagtggggagatttgagaatttaggaatgtcaggagtgggcatacacagagctatctctgggcaccctcacccactttgcacaggcttttgcacagtggatgattgtgctcctggaagagatccagggagcacaaagtacgagacctgcttctgcccaagaggatcagaaactgagacctatgtgggtctcaggggatggtactaaaccactcgtgagaaattcaccaccataatctcatcacctcccaccaggccccacctccaaaactggggattatatttcaacatgagatgtgggtgtgaacacagattcgaactatatcattcttcccatggcccctcccaaatctc

SEQ ID NO: 521335 - DNA, 530 bp, Homo sapiens
taattttaaaattgtatttatgaatgacacaagtctaaaaatatatttccagatttgagtacctaatagtctattatataaatagctggtttgcatttattatctttcatatttccacttcatttaaaaagtacatacatgtgacccagggtagmcactgggatttatgaagaggcaaaagtggggagatttgagaatttaggaatgtcaggagtgggcatacacagagctatctctgggcaccctcacccactttgcacaggcttttgcacagtggatgattgtgctcctggaagagatccagggagcacaaagtacgagacctgcttctgcccaagaggatcagaaactgagacctatgtgggtctcaggggatggtactaaaccactcgtgagaaattcaccaccataatctcatcacctcccaccaggccccacctccaaaactggggattatatttcaacatgagatgtgggtgtgaacacagattcgaactatatcattcttcccatggcccctcccaaatctc

SEQ ID NO: 521336 - DNA, 530 bp, Homo sapiens
taattttaaaattgtatttatgaatgacacaagtctaaaaatatatttccagatttgagtacctaatagtctattatataaatagctggtttgcatttattatctttcatatttccacttcatttaaaaagtacatacatgtgacccagggtagccactgggatttatgaagaggcaaaagtggggagatttgagaatttaggaatgtcaggagtgggcatacacagagctatctctgggcaccctcacccactttgcacaggcttttgcacagtggatgattgtgctcctggaagagatccagggagcacaaagtacgagacctgcttctgcccaagaggatcagaaactgagacctatgtgggtctcaggggatggtactaaaccactcgtgagaaattcaccaccataatctcatcacctcccaccakgccccacctccaaaactggggattatatttcaacatgagatgtgggtgtgaacacagattcgaactatatcattcttcccatggcccctcccaaatctc

SEQ ID NO: 521337 - DNA, 581 bp, Homo sapiens
ctctgggttttgtttttgagaatatctttgaaacgaaacagtcaccacacatattagtgattctcagaaagttatttgtactatgcgattcaattttatacttctttaagtggtatttcccaaagtgaaagtcactctgcagtacatgttgtctagatcaacattgagaaaaaatgaatatacctcttttttttcatatccccaatccactctccctgaaaataaacttaagagtaagyagatatattcagtgctatgggggaaaatattgtaggtaggttagttacacgtaagaactactgctacaaatagtgagatggacataaatgcctttcctgttttatttcagatggatattggaagattagaatgagaaaaaaatagataaaagactgttgaaaaaaatacgtagtctacgtatagttaagaaagaagagatcaaaacaaaagagcatgtctcaacagatgctggaagaaagtgctaaacaggaaagagctgtggcccatatggtaggctacattcgcactgtaaaacgaaaagttcttcacatggagtatgtgtgctttgagatgccaaagag

SEQ ID NO: 521338 - DNA, 581 bp, Homo sapiens
ctctgggttttgtttttgagaatatctttgaaacgaaacagtcaccacacatattagtgattctcagaaagttatttgtactatgcgattcaattttatacttctttaagtggtatttcccaaagtgaaagtcactctgcagtacatgttgtctagatcaacattgagaaaaaatgaatatacctcttttttttcatatccccaatccactctccctgaaaataaacttaagagtaagcagatatattcagtgctatgggggaaaatattgtaggtaggttagttacacrtaagaactactgctacaaatagtgagatggacataaatgcctttcctgttttatttcagatggatattggaagattagaatgagaaaaaaatagataaaagactgttgaaaaaaatacgtagtctacgtatagttaagaaagaagagatcaaaacaaaagagcatgtctcaacagatgctggaagaaagtgctaaacaggaaagagctgtggcccatatggtaggctacattcgcactgtaaaacgaaaagttcttcacatggagtatgtgtgctttgagatgccaaagag

SEQ ID NO: 521339 - DNA, 437 bp, Homo sapiens
taagaaattttttttcaaaatggaatcatcccctcacctaaaataaatagataaaatagactatcaaagggaaatcatttgttgttactacccttttcttgcccaatcgaggcttggagaagtatcagactatatgatatttaagatccctcccatcactgggaacttgtcatttgatggaaataaaaaatgaaagaaaaatgtttggtcctcaaccttttaaatccagacacttgatgattgttaccactttacgtcagatcgaccttactttcatggaaaattgtcattttttggccactcagcatccaaacgaactttctctttctgagatatttactcccattacctcccaacagacttggccaataagatgwtcctgcctaagactttgaatctggaatggggaacacagagaacatgagcaacgaagaatt

SEQ ID NO: 521340 - DNA, 631 bp, Homo sapiens
aactcactttaaagttaatcagtactagtgctacatatgctgcactactcagtgagcagatgctgattaagtgaggcgctgctcccagccaaggtgtgtgctctggagagtggtaataattggaggccggtgtgtaaagctacgctagggggtgggagtgggggcgtaggggtgaggacttgctaagccatacctgcaccaatgtgattrgtctagggctcagcctaaacactggtaaatgatatatatcattttggtggcccaataccctgaacatcatgctgtatatatagcatgatgttaaaataccttgctgagataccaggaagcaatatcccatcgcaaagaagttcccagattctatgtagcgcttacaaagtagttggccaaacctggtaacgatttttgtccttgcttttaaaagagagagttgaactttgagaaattttcttcagagaattctgtccaatgcaggagatgtggagggtggccatttttgcctcaagcctagtgagggaatcttcaatgggacaactcagagagcttgacatgtgtttcctataattgctagatgaggtcaattgatgttgggctctgcctatcatatctaacaggtgaggaaaaggcaaga

SEQ ID NO: 521341 - DNA, 543 bp, Homo sapiens
ttgcagagatcattttttgtttataaatcagcagccagaacttagtcatttgatcaaacttacatgcaaggaaggctgatagagtcttaagctgagtgaaccagtgttccgattaatactttgtggttctatcactaatacaccgaacagaaggatgaaaactgcataagcacatttgcattataagcacatttttcaacaaaatcattaatacagcgtttctaaaagcataggcttggaccacagactgttcagaaaagttycctttttctaggggtaaaggaggtataattttatgcttctgggtcagaatgttttagcaaacagcagtttaacatagtaggactttatgcttatgcaaactttatctcaccaccctcctcccagaaaaaaaaaaaaaaatcagcatgctgagtgctgagttttagttttaataagcaaaaatcagcagcccagcagcctttaacgggcttgagggacaagtgtgattatttttacaaggatatttcatgaattaaatgaaaagaatcatattattcctga

SEQ ID NO: 521342 - DNA, 603 bp, Homo sapiens
cattccaggagtggaaagctgaggaaagagtgctgaaacctgtcagacaacccatgggaagaagctggagtgcagaaagggaaggcagcaagaatctggcagagattggactccarggaacctggagtcccatgcaaaggataggggtgggtattcttttctctcctctcccctgcaacaaactgctgaccactgaattgtccaggagcctctctgccctcttgagcccaggactcaaggactactgtccttgacaatttgcgagcttcctgggggcagagcaccaggtgaccagctcctgcaagtgcactagcactccgtcatacccaaattgaggcagcagacactgtactggttgtgcctccatcaaggacaactacctggggaatctcagggttgccttatccccagatgccccacaaatgttctccagaatctgctctggctttggcagtcatgggggaccagtgattccctggagatctagcccttaggatggacagcccctaggggaggggagcgtgcctcaccaaatcccccttgggataaaggaatcacagcatagtgcagttctcccaagaggggaagcattgttctgtccca

SEQ ID NO: 521343 - DNA, 305 bp, Homo sapiens
caaagtcacgtcttacatggaggtaggcaggagaacatgtgcaggggaactcccctttataaaaccrtcagatctcataagacttattcactatcacaagaacagcatgggaaaaacacacttccatgattcaattacctccagccaggtccctcccacaacacgtggggttattacaattcaaggtgatatttgggtggggacacagaggcaaaccatatcaccagcagacaagcagcactagtggctgggagcagacatggagagggtaccacctcttactccctcacactgctgcagacaca

SEQ ID NO: 521344 - DNA, 586 bp, Homo sapiens
gccagtgctggggagatggattggacttcaagttcccatagttagaggggtatgacaaacacttttgatttcttttaaatatctcagaagggccaaactctagaaataagcattacactctgtgaataatagcaaatctttaaacccaaactctgtacaagaacaagacgaaatctttctgtcaatcaaatgagaattttacctattttggaggaaaataatatcatacagagcctccacagggtttcatccacacagttttacatctgattaaaatttatgagtcatgtttaacaacgaraaaaaggactacctggctaaacactaacaagagttatcaaatagagagagactttaaaatatctgtgattaatatgttaaagaaatcaaaggaggatggattatttaacagagacctggaatccattttaaaaaattaaattataatttaaaaattaaaaaaaagtaatagtgggtttaatgacatatgagaaacagtaaaaccaaggattaatgaactagtcagtagaaagtataggagttgatgtacagagagaagagacagaaattggaggagaatataaac

SEQ ID NO: 521345 - DNA, 592 bp, Homo sapiens
ctgatgctttaatgttattttattatttttaaaaattcttgtttaaattggtttcttgtttgtctgttaccataatttaattgattttatccacattacttgtttgtattttaccatctatacaatcagtacatattctacaattgatggcatgtcatcgtttaattagcatttttctttcttaggagagagactcsatacccccattccagaattacttggtctgataggcagaacaatgtgcccccgacaaagggttcctatatcataatcctcagaaaaatggggaattggggtgtcagatggaattaaggttgctattgtctgaatttaaagtagggagcttgtacaaggttatccagtgggcccagtgtagtaacaggagtgcttataagtgaaaaaaggagggagcagagtcagtcaaagacagagatatgacaatagaagcagaggtcacagtgattccacatgtatgcaaccagccattgttccctttgatgacagaggaaggggccatcagttaaggaatttgggcagcctacataaactagaaaaggcaaagaaacatattctcccctaaagcctccagatg

SEQ ID NO: 521346 - DNA, 447 bp, Homo sapiens
tgatacaggaaagtgctgctttctagatgaaaccagctaagcgtggaaggaataacatttctgattctggcaaggattaccaactggtggtaaaccattaccatttatatacaatttatatctgtatgtttgtgtgtatacccaygttcacagagagaaaataagacacctagtgtaaagagtagtgattgtggaaatgggatacttttctttttctagtctgaattttctacaatgcatatgtactgcttctgtaacaataaaataaaaggttactttactaattgtttttaaagacagtaataatgctaattagcaactgctgaccacaaaaatagtagtttctggttttgttattttttttttatgttgtattcttgctcctcatatgacatccttggggaactgggaccagtaagaaataaacccctacttctgacaacaaaa

SEQ ID NO: 521347 - DNA, 558 bp, Homo sapiens
aaagatagcaaagtaagtagaaactgtatttgatcctagagttgctatgaggatggccatgatttaggccttaaatgggatgccattgttcagatcaagatgtataaagcaagtatgtytaattttcttttaatatatacctcattaaaaatacagttgttcactaagataggtaaggattcattgtgacacatgatggcatttaatcaagtctgtagcaagcttgccttgataaaaggtaactggattggagacctgattttttttcttctttctatattttaaagagtttacattaaaaattcttaacttgggcttccatggtctgttagcccctgaaattatatgcaaatggttgagtatatgagatttcctggagagactatttgtagctttcatcatgttatcagaggagttcggctcccacaaaagcctacaatcaccaatatgaatgaaactcaatagtgctgccttttgggatgcaagcctcaagaagatgtttcttttgttcattttgctcccatttttttggtgtaggaggcaagtggttaaatctag

SEQ ID NO: 521348 - DNA, 465 bp, Homo sapiens
ttccttgcccgccgaccccatcttgcaggcggccaagttcctgcagcagcagcagcaacaggcggtggcactgggcggcgagggggcggaggacgcrcagctcggcccgggcggctgctgcgccaagtgcaagaagcgggtgcagttcgcggacacgctggggctaagcctggccagcgtgaagcacttcagcgaggcggaggagccgcaggtgccgcccgccgtgctctcgcgcctgcgaagcttccctatgcgtgccgaggacctggagcagctcggggggctgctggccgcggcggcagtggccgcgcccctttcagcgccgccttcccggctccggccgctcttccagctcccggggccgagcgccgcggccgagcgtctgcagcggcagcgcgtgtgcctggagcgcgtgcagtgctcgacggcctcgggcgctgaggtgaagggctccggccgggtgct

SEQ ID NO: 521349 - DNA, 465 bp, Homo sapiens
ttccttgcccgccgaccccatcttgcaggcggccaagttcctgcagcagcagcagcaacaggcggtggcactgggcggcgagggggcggaggacgcacagctcggcccgggcggctgctgcgccaagtgcaagaagcgggtgcagttcgcggacacgctggggctaagcctggccagcgtgaagcacttcagcgaggcggaggagccgcaggtgccgcccgccgtgctctcgcgcctscgaagcttccctatgcgtgccgaggacctggagcagctcggggggctgctggccgcggcggcagtggccgcgcccctttcagcgccgccttcccggctccggccgctcttccagctcccggggccgagcgccgcggccgagcgtctgcagcggcagcgcgtgtgcctggagcgcgtgcagtgctcgacggcctcgggcgctgaggtgaagggctccggccgggtgct

SEQ ID NO: 521350 - DNA, 569 bp, Homo sapiens
tttggtaatttggcaaatatttatgcttaaaaggcagtgccggaaccaattatgacttccttgaggggtttgagartgctacctatggaatccgactacagggtttgagtgtaacattgccttggtatatctaggaagggtccaggaccatttctgttttcaatgcaaaggggaaaattcctttccaatgacttcaactgaattgtttgacatttcccagcccagactccagacctggtgatcagatgatcccagccccagccttcaaaccactgcaaatagagaagagacaagctatccctgagagagccctgcccaatctacagattaataaagaaaataaatactgttattatttttaaaaacagccctgtttggggtggcttgttatgcagcaataggtaacacgaacaaacggtaaagcttggagcctctgaatgcccggagtaaatattttagcagtggaggcacatgatgtttgaagtaggactgaacacacttgggcggggggggggggggggtagactgcacagtctaaatttcaagaagttagtttacatgttaacatc

SEQ ID NO: 521351 - DNA, 542 bp, Homo sapiens
tgaagtcggctcctttcatcacatttcatggcccctggaaaacaagctcattttccttcctctgtcagcaccagctacagattccttctcaccaaattcattccccccagggagactgtttctttgcaggcrtgttggttgtgttggtgccgtgttggttgtgttggtgctgtctccccaccgggctatggaggcccagagggagggacattcctgcattcagagcgcttgttcccttcagaaacatctggtaacttcagttctgcagcatcacagctcctcagcgtcagaggctgagacacaagcttggtggggatcgtggggatacgatcacccatatagcagcacataacacccatataacagcagcccccatatggttaacaccactgtataccagcatcgtgcttgacatttcctatgccttctcttattgaatccacttaacagctcttcaagaccagagcaatcattggcagccccatcttgtagatgaggagcctgaggctcagaaagactaagttaacacttctgagatcaca

SEQ ID NO: 521352 - DNA, 542 bp, Homo sapiens
tgaagtcggctcctttcatcacatttcatggcccctggaaaacaagctcattttccttcctctgtcagcaccagctacagattccttctcaccaaattcattccccccagggagactgtttctttgcaggcatgttggttgtgttggtgccrtgttggttgtgttggtgctgtctccccaccgggctatggaggcccagagggagggacattcctgcattcagagcgcttgttcccttcagaaacatctggtaacttcagttctgcagcatcacagctcctcagcgtcagaggctgagacacaagcttggtggggatcgtggggatacgatcacccatatagcagcacataacacccatataacagcagcccccatatggttaacaccactgtataccagcatcgtgcttgacatttcctatgccttctcttattgaatccacttaacagctcttcaagaccagagcaatcattggcagccccatcttgtagatgaggagcctgaggctcagaaagactaagttaacacttctgagatcaca

SEQ ID NO: 521353 - DNA, 542 bp, Homo sapiens
tgaagtcggctcctttcatcacatttcatggcccctggaaaacaagctcattttccttcctctgtcagcaccagctacagattccttctcaccaaattcattccccccagggagactgtttctttgcaggcatgttggttgtgttggtgccgtgttggttgtgttggtgctgtctccccaccgggctatggaggcccagagggagggacattcctgcattcagagcgcttgttcccttcagaaacatctggtaacttcagttctgcagcatcacagctcctcagcgtcagaggctgagacacragcttggtggggatcgtggggatacgatcacccatatagcagcacataacacccatataacagcagcccccatatggttaacaccactgtataccagcatcgtgcttgacatttcctatgccttctcttattgaatccacttaacagctcttcaagaccagagcaatcattggcagccccatcttgtagatgaggagcctgaggctcagaaagactaagttaacacttctgagatcaca

SEQ ID NO: 521354 - DNA, 327 bp, Homo sapiens
agctggcaggaggccctcagaggggaggtaggtatataaggagggggccgattcctacccaccgcatgggcctgccagccatcacycttcaattctgcttccggaattatcatgtgtgtccaccctgcccataggcccccgggctggcgactacacctaccgtgagggccttgagcacaagtgcaagcgggacatcctgctcggccggctccggagctcggaggaccagacctggaagcggatccggccccggcccactaagaccagcttcgtgggctcctactacctgtgcaaaggtgggtgggctgcagcggggcaggcagcaca

SEQ ID NO: 521355 - DNA, 564 bp, Homo sapiens
ataaatctgaagaatccagttctgctgtctgggagcctctcctttgcctgtcaccttccatggctacatcttggaggagtattgcagaggatgcccttttgttggggaaggaagggcatctgcaccttttcaagaattcactttatataggtgcagcaggatgtggggatcgacatgaacaatcagtggccattatgaggcttggttttcatgtttagttggctcctggtccatttgcttcatataaaagcatgaactagtaactattgtcagaaatctcgccgagtcatgtttgccttttatttattctgctttactccaaatatgcacttttagtctgaagatgcatgtcttaatttaatcctaaaagaaaaagtcctttctttatctctttgaatattacttctgtgccattctctccastctctttctggaacttccaccggatatttactagaccttctatttttattatcgttgttttgcctttctcttatatttttctcttcatctctctgtgctgggctctgggtgaatttctcagtactggctaaaaattcacca

SEQ ID NO: 521356 - DNA, 547 bp, Homo sapiens
cactgacaagaggatggctccagagcacccaaggggttcttggagggttctcacctcctcctggtgagtcaggatactgaggactcagtgatgctgggggacactgtgtcgagctcccaggcctggcctagggcggacgctgcgactgagcagccaaggggacacggcaggctggaggaggggccgggggcagcttctgctctcactgatgggaacatgccaccgccaccagctctgggtagtgctcagcgaacatggagctgacccatggctggcagaaggctggggacagcatacccggccctgcctcccagcttgggagccttcttagctcacgcaaggagccctccacctgcttcccagcctcacaggggcctctcctcctggccctgtcctgatgcagtgctgcctgcctgctgccatyctgtgccctgccccttcgtgtctccaaggtccaagggggaagcagggaagagaggcaagttcactccagagaagtggctcgttctcacacctcagaaaaggctctcctggaggggacatggag

SEQ ID NO: 521357 - DNA, 590 bp, Homo sapiens
ctggaatggcagcatggtagcrcctcctaacagattaaatagatcacatttgcttctaaaattaactcctgtttctgaggcttcccacctagattccgggtctgggtgcaggggactgagtcaatggagggagttgtgaaactaagggatgatcccctgtggctacaggcccccaggagagcaggggtacagctctgggtctgaataatcagcagagatgtgggtggggacactgttggccactgggcgccttggccggttgtgatgaacacaactgggaatcaagatgaacagccagcagcagccatgccggcccttttacgggagagtcgggaggtgaggcaagccttaccagggatctcccttaccaaggggtctgacaagttgaagttacttcctctggggggctggccagcctgagctgctagctataaccccccgaaggccaaagccccagaacaggtgagctgtccgcaccaggaggagcagggccacaactgtgcctccctgagtttcaggcctcccagggacttgccctgctgcctgagtgggggcagagcagcagaccgctccccagagccctccagaga

SEQ ID NO: 521358 - DNA, 590 bp, Homo sapiens
ctggaatggcagcatggtagcacctcctaacagattaaatagatcacatttgcttctaaaattaactcctgtttctgaggcttcmcacctagattccgggtctgggtgcaggggactgagtcaatggagggagttgtgaaactaagggatgatcccctgtggctacaggcccccaggagagcaggggtacagctctgggtctgaataatcagcagagatgtgggtggggacactgttggccactgggcgccttggccggttgtgatgaacacaactgggaatcaagatgaacagccagcagcagccatgccggcccttttacgggagagtcgggaggtgaggcaagccttaccagggatctcccttaccaaggggtctgacaagttgaagttacttcctctggggggctggccagcctgagctgctagctataaccccccgaaggccaaagccccagaacaggtgagctgtccgcaccaggaggagcagggccacaactgtgcctccctgagtttcaggcctcccagggacttgccctgctgcctgagtgggggcagagcagcagaccgctccccagagccctccagaga

SEQ ID NO: 521359 - DNA, 590 bp, Homo sapiens
ctggaatggcagcatggtagcacctcctaacagattaaatagatcacatttgcttctaaaattaactcctgtttctgaggcttcccacctagattccgggtctgggtgcaggggactgagtcaatggagggagttgtgaaactaagggatgatcccctgtggctacaggcccccaggagagcaggggtacagctctgggtctgaataatcagcagagatgtgggtggggacactgttggccactgggcgccttggccggttgtgatgaacacaactgggaatcaagatgaacagccagcagcagccatgccggcccttttasgggagagtcgggaggtgaggcaagccttaccagggatctcccttaccaaggggtctgacaagttgaagttacttcctctggggggctggccagcctgagctgctagctataaccccccgaaggccaaagccccagaacaggtgagctgtccgcaccaggaggagcagggccacaactgtgcctccctgagtttcaggcctcccagggacttgccctgctgcctgagtgggggcagagcagcagaccgctccccagagccctccagaga

SEQ ID NO: 521360 - DNA, 563 bp, Homo sapiens
ttggtctttgaagaccccgcccctttcctgggcggggccaaggctggggcaggggagtcagcagaggcctcgctcgggcgcccagtggtcctgccgcctggtctcacctcgcyatggttcgtctgcctctgcagtgcgtcctctggggctgcttgctgaccgctgtgagttgtttttgccccgaccagacgggagttgggagtggggaatgagaaggaaagggaaggaagacttcggggaagaggccttcctggctgatttttgtgggggcaggagggtgggtgggagctgggcaaggtgcccccgctcctggctgaatggggtgggctgcctctctcttctcccgggctggggtcccgggagcggcctacaggggccgctcagggaaggcactggctgcccaagcgtgcctagacggcctggacgggtttagggagcctcagaggctggccacacagagactggtagggggttcagagggcgggaagtgaggcggaccaagggaaggggcgggtctggcccgtttcctgtccccttcttattgtggacagatgccagcctct

SEQ ID NO: 521361 - DNA, 617 bp, Homo sapiens
ttccacctggctgcaaagcttctgttcctaacccctagaattacccagrccacatcccagaccaattagataaaatttccatggaggtggcatgtgacggtcatagtctaggcatcagtatttttttttttttttttgagacagtcttgctctgtcacccaggctggagtgcagtggcgcgatcttggttcactgcaacctccacctcctgggttcaaacgattctcctgcctcaatctcctgagtagctgggatgacaggtgcccgccatcacaccaggctaacttttgtatttctagtagagacggggtttcactatgttggccgggctggtcttgaactcctgacctcaagttgatacatctgccttggcctcccaaagtgctgggattgcaggtgtgagccgctgcgcctggccaatcatcagtatatttttttagagcttccctggtgattctgagattcagccagaactgaggacccctggtctggactttatttccctatttgagtcactgcttctatttcacaagtggcatccatccttctactgagccaacctgtcccaaaggacctctaggctctatctagccttatctctgggactggtttccaga

SEQ ID NO: 521362 - DNA, 556 bp, Homo sapiens
tctgtgcttgctcagaccgagggccttgggcattagccagcccatccaaggagttaagaagcaggaggaggggcagagagccgaaatccaggctccagtggatagagcccctgctggaatgtgtgtgtatgtgtgtccctcggtggtttggatttgtggggttttgtctacaaaagtgtgtgtgttttcctggttagtgtggatgtcctttaaaagaatgtgtgtatagcactttgcctcctgctcatggtggttgctgtttctctttagtgtgtgtgtgtgtgttgctggaattaacacaagtatgtctgtttctggactgcacctgtgtgtgcacacccacaggctcctgttggttttgtttgtacatgcccygttcgcatcccagcccactcagaaggctgcaggcccagacacagcctaatggacagagccaggtgggcagggcaggctggctggcctgcacccagggggcggtgggtggatctgggcatcttccagaggcaccggcctggcagggaacaaaggggcaatcagtagagaggccactagagca

SEQ ID NO: 521363 - DNA, 630 bp, Homo sapiens
agttggccaggcaaagaagaggggaggagtgccccagatggagggaacagtctgggcgaaagcctcaagacagcgcgcagcaagttggaggaatcctcagaaggtgggtgtggctggaacacagcccagaaggtggtgagtgctgagaaacggtcctagagagaaagccggagcctggggatcagggccctcataggccatgccaaggaatctggatacttgcagagctcagttagattgcatacaacgctagctgggtgtggtggcgcacccctgtagtcccagctactcaggaggctgaggcaggagaatcgcttcaactccagaggcagaggttgcagtgagccgagattgcatcactgcactccagcctgggcaacagagtgagactctgtcgcaaaaaaaaaaaaaaaaaaaaaaaaaaaaagattccatacaactccaaatgatggctgtttgactattttttcttcacmtcacggatcacccctgccgttatacatccatctgttgattgtctttccccctactagaaaggacaaggactttgtgctgttcactgctgtgtccccaacagccagaagagtgcctggctcacacagacactcaataaatacgtattgaatgcat

SEQ ID NO: 521364 - DNA, 619 bp, Homo sapiens
ctgctgtgtccccaacagccagaagagtgcctggctcacacagacactcaataaatacgtattgartgcatgactttactggcctgtgtcctctgcttactgagttattgaaagtcagggacctgttggattcatcattgcgtccccagggcctagcacagagcttgatgcacatgctgtttaataaatattgaaagaataaatgaatggaaaaacgtcttccccaatgtgttacacactcccgcagggccgggactatttgatttatgtatctagcgcccaacacattgcctggcagaaagcagaccctcaataaaggtttgttgagctagacaagagtctcttctgcatgcgggcccttgtcaggcctgtcatgggagctcaaataaaggcaaccagaccctatactactggatcaggcagaaagagataccttgttggcaaaggatcttaggaccctggagtcataggctgtgcaggcaggatcagcctgcatgtgtagggtggccagagagaccaaagagggcttcccgggggtcaggaatcctgcctttgtttatgtcccctagcactgcccttctctggcaactggcaggcagccccaccaatgaggtttggg

SEQ ID NO: 521365 - DNA, 619 bp, Homo sapiens
ctgctgtgtccccaacagccagaagagtgcctggctcacacagacactcaataaatacgtattgaatgcatgactttactggcctgtgtcctctgcttactgagttattgaaagtcagggacmtgttggattcatcattgcgtccccagggcctagcacagagcttgatgcacatgctgtttaataaatattgaaagaataaatgaatggaaaaacgtcttccccaatgtgttacacactcccgcagggccgggactatttgatttatgtatctagcgcccaacacattgcctggcagaaagcagaccctcaataaaggtttgttgagctagacaagagtctcttctgcatgcgggcccttgtcaggcctgtcatgggagctcaaataaaggcaaccagaccctatactactggatcaggcagaaagagataccttgttggcaaaggatcttaggaccctggagtcataggctgtgcaggcaggatcagcctgcatgtgtagggtggccagagagaccaaagagggcttcccgggggtcaggaatcctgcctttgtttatgtcccctagcactgcccttctctggcaactggcaggcagccccaccaatgaggtttggg

SEQ ID NO: 521366 - DNA, 200 bp, Homo sapiens
ggagcttcaggcaccaggcggaaatagaagcggtgcccrccttggggctcgtctctgtccaccacgctgatggtctggatgagctgaagggtgaggaggggatagagggctagtggtgaggctgagaccactctgggtcgaggtagaggatgctgctggccagtcctggaagcaacgcccagtccccaccccctcagggg

SEQ ID NO: 521367 - DNA, 345 bp, Homo sapiens
cggtcccactgtgtgccccatccggagctagggttgtgcacagtgacactgctaagacactgagtgctcactatgtgctaggcacagcgctaaggactttgcatgcattgccttaatctttatgacagccctgcgtaagacgtggtctcttacaatatactttttacagatgagatgcagaagtcaaatgacttgctaaggtctcgagagttagagctggaatttggacctaaytaggttgactcaaaagcctgaggtttttgctcattcagtgagtaggaaagtaggcatatgttgcggggtgatgtaaactcatgcccgcaggggctggagaaagggctggga

SEQ ID NO: 521368 - DNA, 638 bp, Homo sapiens
aaaagttttcagtcaccacagacagggataaaggtggatagttcacctcgggccaggaaccttgctgccttctctaaatggaggagagccaggacttaaatcagtgacaaggacacaggcttcagaaaccaaaagttcttcttttctgatggtcatagagtcagacagggggcagccatttatacctaggcctctatacccgatgtgaatttattcttggattttctaaatgcattaaccaaatgctatttacgtggtctgccttcattaggattttctagtaaagaaattcrtaagttggaaaaacatactttgttgatctcatatgagttctgcgttggagaatatagccatggtttaggggaaattagaagttacccagagaaatcaccccagaaaaccatgtccttttatagaagaggaaactggggtgcagacagaatgaaacttacccaaggaccacccccaccacagtgagttcacagaaaaactcccgtcttctgccttccagatcaccctgatgggccatcctcgggtaagaaagcagtactctcagaagaggtggttttgaggctgtgacagtaaagaaatagtctttttatacaaatgtcttaagacacaagccatatttcatattc

SEQ ID NO: 521369 - DNA, 596 bp, Homo sapiens
taaaggtggatagttcacctcgggccaggaaccttgctgccttctctaaatggaggagagccaggacttaaatcagtgacaaggacacaggcttcagaaaccaaaagttcttcttttctgatggtcatagagtcagacagggggcagccatttatacctaggcctctatacccgatgtgaatttattcttggattttctaaatgcattaaccaaatgctatttacgtggtctgccttcattaggattttctagtaaagaaattcataagttggaaaaacatactttgttgatctcatatgagttctgcgttrgagaatatagccatggtttaggggaaattagaagttacccagagaaatcaccccagaaaaccatgtccttttatagaagaggaaactggggtgcagacagaatgaaacttacccaaggaccacccccaccacagtgagttcacagaaaaactcccgtcttctgccttccagatcaccctgatgggccatcctcgggtaagaaagcagtactctcagaagaggtggttttgaggctgtgacagtaaagaaatagtctttttatacaaatgtcttaagacacaagc

SEQ ID NO: 521370 - DNA, 638 bp, Homo sapiens
aaaagttttcagtcaccacagacagggataaaggtggatagttcacctcgggccaggaaccttgctgccttctctaaatggaggagagccaggacttaaatcagtgacaaggacacaggcttcagaaaccaaaagttcttcttttctgatggtcatagagtcagacagggggcagccatttatacctaggcctctatacccgatgtgaatttattcttggattttctaaatgcattaaccaaatgctatttacgtggtctgccttcattaggattttctagtaaagaaattcataagttggaaaaacatactttgttgatctcatatgagttctgcgttggagaatatagccatggtttaggggaaattagaagttacccagagaaatcaccccagaaaaccatgtccttttatagaagaggaaactggggtgcagacagaatgaaacttacccaaggaccacccccaccacagtgagttcacagaaaaactcccgtcttctgccttccagatcaccctgatgggccatcctcgggtaagaaagcagtactctcagaagaggtggttttgaggctgtgwcagtaaagaaatagtctttttatacaaatgtcttaagacacaagccatatttcatattc

SEQ ID NO: 521371 - DNA, 586 bp, Homo sapiens
agaacaaggagttctaagaactttctgcagggctgttggttggagacgctgcctccatgcaaatctcatttgccgctgtcaatccagatcctgtcccaccacgaccatttctgagaaacagactcaagacatgaaaaaaaaccctctttctgtaaaattggttcgtgaaacagactacaggcattaatatcctttatgagtgacaatttagggccaatatttacactttgtaakgttcgttctctttctctcgggacagaaaagaatgttgccaatatcaatgaataaacattaataaaatcaaatataatcttgttccatctggaatcaacctttaaaaaaattcttaacatctgtatataatatacatacacctctatgtacaatagggaaatcagattttgcctgagagatgtgcacagtatttaatgccaatttatttggttccaccttttctccagactgctttagaagggtagcgtccctagaattgagattctgaattagtttcctctgactctcaggtacagaatgtccagctcaagccaagacatatcaaatatttatccactcccagattttcaaa

SEQ ID NO: 521372 - DNA, 586 bp, Homo sapiens
agaacaaggagttctaagaactttctgcagggctgttggttggagacgctgcctccatgcaaatctcatttgccgctgtcaatccagatcctgtcccaccacgaccatttctgagaaacagactcaagacatgaaaaaaaaccctctttctgtaaaattggttcgtgaaacagactacaggcattaatatcctttatgagtgacaatttagggccaatatttacactttgtaatgttcgttctctttctctcgggacagaaaagaatgttgccaatatcaatgaataaacattaataaaatcaaatataatcttgttccatctggaatcaacctttaaaaaaattcttaacatctgtatataatatacatacacctctatgtacaatagggaaatcagattttgcctgagagatgtgcacagtatttaatgccaatttatttggttccaccttttctccagactgctttagaagggtagcgtccctagaattgagattctgaattagtttcctctgactctcaggtayagaatgtccagctcaagccaagacatatcaaatatttatccactcccagattttcaaa

SEQ ID NO: 521373 - DNA, 540 bp, Homo sapiens
tggagggcagtggggtccatggagactggggagcagagcccctgtcgaatgggcaaattcactcaaatccggccaaatgaggctatatgggartgtggggtcccaaagtttctaaatcttcagtttttgtttttgtgtttttgattaattagaagctagaacttctagtgtgtgcaatgtcccagtttttaagaattgaaactaatgaaaaagaatcttgtgttggttaataccttgtaggtcagagaatagaagaaaatgtcagtgagccaaaatcagcagtaggccttccatttaaaccctccaagttaaattgggttgctatggagattgttaattgtatattagccattaataatattattttataagtggagagagacaaagtgatgcttgtgtaacatggtggcacctactgaccatatgattcccagggtagggtaaggcgatctttcttccattaattctgcttttctaatcagttaatatttttactccttttttttttccctgagactttaaagctctgaccccttaatt

SEQ ID NO: 521374 - DNA, 550 bp, Homo sapiens
agcaaatttcttcttctttgtatctattatgtttyttggtttagcaaatttcttaatttacttgcaatgcttcctgatttcaaagtgtttcttttttttttttttttttttttttctggactgtatgccctaagttccatagatgtcatattttgttctttattttattttgtcaatagatccaaaaacatgttctaaaataatgtatttctagtataaatttagttcagaaagtcaactttttttggtcatgtgcttcacttcatgggaagagagagcttttctgtttgctcatcctgagggcccctcctccttcctgtcgttctgttttggtgggtcgctattctggagaagctcatgtctcagaggcatccttcttacttaggatgcctgtttataagagacattctggcaccacatgaaatttctctttgtctagcctcaatgtctagaagtcgtcttgccatggggccatgaagtttgttacagtaagttccagcgggaggcaaccggcatgtcaccatgtatgccttctgactgtagctggtgt

SEQ ID NO: 521375 - DNA, 645 bp, Homo sapiens
taggccaaaattttcaacatacactactgaaaaaaaagaagttgactaaataataacataattatatagggtcataattgttttaacaatgttcaagtatactaattgatgagtttatattccactgagtctgtcaaaccttatcatgatgctaaatattaatttggatgcctaaatgccagctcagcattctaaattgctttctgcctgactgttaacttgaatactaaagccacttcacattttcaaatgactgtttaacaagggcttttgtcttcatcattttgctgaacagaataccaaagactgcataacctattaaaaaaaaagyttatttctcatggttctggaggctgggaagtccaaggtcaagggactgcatctggtgagggcctttctgctacatcatcccatggcagtagggagaagggtaagggagtgtgcaagagcaagggggaaagaggacaaactcatccttgtatctagaaccactctttgataacctgctccagagataatggcattgatccattcatgagagcagagcccccatgacctaatcacctcttaaacgtcccacctcttaaccgtcacaataaaaattaaatttcaaaatcaattttggagtggacattcacaccaaag

SEQ ID NO: 521376 - DNA, 640 bp, Homo sapiens
ttttagattagtgggacttttcagctccaagacaaagaagaactcaacccaaatttactttagaaaacatagctgaaaagtctgagggccatgctggtttcaggcatgtggctggattcagatgatgtcaatagaactttctttctctccaactcttattgcctccttcagtgggattgatgttgtggttaggatgcacgtggtgcacctggcstcctgcctcctcgctctaggctctccttcactgatgacaaatcggctgcagcacaacctcatagataaagtctagccagaaacagtcgccactccacttactcctgcagaattcctgagatctacttggattggattaactcttgaacatctgactgtggcctggagaatgtggtgtgctgaagtcaggctggatctcttctcaatccaggtagaccgaaagtggagaaaagtagactccaaacagaaatctagtatcttgctgaaggaagtgaggccaacaagatatgtttagtgcttgtattgtatttatcttctattggctgaattgcatccctccaagttcatatgtagaagccctaacttccaagtgcctcagaatttgactatacttgagataggacattaaaaaaggtgagtaagttaa

SEQ ID NO: 521377 - DNA, 538 bp, Homo sapiens
gaaatgcgggaaagctattttgtaagataaagtttgaacatagtcaacaacatctgggggttacagkctctaaaattatgtcttttctgtgttctggaagttcctgccctcaggtcaattttgtaggtcccaagggcaacctgaaccaagtgtcagtactcccctttcatataacaaagtgggttcaggtttcctgctttcagaggtcaaacctcccacatcataaggttagtatgttaacctactcaacatttgcttacaagatgagctaaggcgcatcgatgtaatcgcaggaggcattctcaaaggaggaaagaacaagaaagcccacttaattccacataagttctcaaggatttcttaatcctatgaagcccatgtttctgggaatccaggatctgaggtggtaggaaataggatctgcatgaaaagggaagaaaaaaagaaagactttggtcttaaatgtttagcttgagaaaagacatgtttgtaacaaataaaccatgatagaaataagtgggttaagagaagaggagca

SEQ ID NO: 521378 - DNA, 589 bp, Homo sapiens
taggtggtaactctattcttggttcaatttctgtaccttgtataaacttctgtttggttgatttttatacatcgccatattcatctttgtagctccggaaacttagcagtgcttggaaaagtgaaagtcattgaatgaataaataaagcaagggcaggaggaaacaggtctccaaagccaacagttttatttcatttgtggcaaagtgccattcgatttaaattcaaagccattttgataggcactatctcagttcaacagaaactccagtgttcattttgggttcctccagaagctcactggatggcaagagttcaagtacaagtaagatagagggaggtgaaaacacaattaggggaatgggaagctgaggtagggaaggsaaggcagcctgtgaaggatgcattcttaagccagttatcattgtggctcactgagtcagttcagatcatgcacctcagaattacccctcctagaggcagatggggtattcatacgctaactcccattggtcattgattgagggttgctcctgggacatattaattctctagggcatctggccagcagcatgtgggcagaataaact

SEQ ID NO: 521379 - DNA, 579 bp, Homo sapiens
tggctttctctgggctctagcaactatcccttctgcgttcctggtttgcctacccaatgtagggccacaatacatcatgatcccttaccactttctctcaattctgcccacagttttgtacaatgttcctttgttcaactcttttcaactgcccctttagaatatgccatcatttccctactggggctcagtctaaagaatagtcttaatttctagtatagtcttatccctatccaaccccacctccaaatttgaactacctctttgtactcctcaaaacaacatcctacatttttttcacatgatgtcttggctttgagttgttaccactgtatagaattgagagaccataagcatagtggggmaaaaagccccaaactcccaaaacatgagtctagtgtaagctatgccatttgctagccatgtggctttggaaaaatgacttaacctttccaagcacagtttcttcacctgtaaaataagggtagtgacattcactgagcaaggtttttgttccacatttcagaagtgagttgctcttcattaaacctgaagcaattgtttctcaactcccttaaa

SEQ ID NO: 521380 - DNA, 599 bp, Homo sapiens
gataaggacatgtactttgtagtgccattcatggaaatagtgaccttgaaaaaaaattctggagggccttcctctcatcttcctttctccagttcctatggatatggaaggatagggctaagaattgctgtctgccttctgacttaataaggagacttttgctcaaataaacactgagttcttttttttttttttttccaagccattcaccaactcatataatgtatctttgtgaggtctgttccttccataggataattcagaaagttatacctaggctgggcacagaggctcacactgatgatcccagcaccttcagtggctgaggtggttaggattgcttgaggccaggagttcaagaccagcgtgggctacacaacgagcctccatctctatgaaaaaatttgaaaacataattttttaaaaggaaagttatacctgggccagggattctgtaccgttcatgatcttgtattccagggtgtgtaatattaggaaggtttaggtttattgtctaaatgttaattgtgtaaataaggtggtaaccatggcarcccaatcccacccccctcagcattggcaggtggccagggaggtgt

SEQ ID NO: 521381 - DNA, 599 bp, Homo sapiens
gataaggacatgtactttgtagtgccattcatggaaatagtgaccttgaaaaaaaattctggagggccttcctctcatcttcctttctccagttcctatggatatggaaggatagggctaagaattgctgtctgccttctgacttaataaggagacttttgctcaaataaacactgagttcttttttttttttttttccaagccattcaccaactcatataatgtatctttgtgaggtctgttccttccataggataattcagaaagttatacctaggctgggcacagaggctcacactgatgatcccagcaccttcagtggctgaggtggttaggattgcttgaggccaggagttcaagaccagcgtgggctacacaacgagcctccatctctatgaaaaaatttgaaaacataattttttaaaaggaaagttatacctgggccagggattctgtaccgttcatgatcttgtattccagggtgtgtaatattaggaaggtttaggtttattgtctaaatgttaattgtgtaaataaggtggtaaccatggcaacccaatcccacccccctcagcatyggcaggtggccagggaggtgt

SEQ ID NO: 521382 - DNA, 588 bp, Homo sapiens
cccacgggggagaaaaaaggaccatckaatacaaggactgaggaatgccacaatgacatacacctgctgtaagctcaggtcctgcccaataatttaagataacctcaaaacatttgggatggattagtctattctcggtgaacacaaaatctcccaaatgcttacctctgaatccgacactggcggagagtcctccagatcggggatggcctcctgcctgggggccgtcttcttgctttcattgtgcagtttagttctggactccatcacctgaaatgaaaaagacgaaacagagcttaggccttgttttctaggaggaaagcatcgcttatgcagccgtctatgaatttatttctattaagctcgagtcctgggtgcctccgcaggtacccctcagcactcacagatctcgctggcctctctttccacgtggaaagctctttagatacaagttcttctggcttcagtctcacaagtttcgccaaagagatttcctcacgcagaacacgatggaagagtccctataaacaagtatttttcatttactcaaataatattcctatatctgtcaatacagagagcttctgg

SEQ ID NO: 521383 - DNA, 550 bp, Homo sapiens
ctgaagcaccactcgatggggtagcggagagccatggcctcttggggatggtgcccttgaaacctgagggtggctttttaatggctggtgtggctgctgccacattagcaaaagaagacttctttggcacgaggtttctaggtgcaggctgcttgcccaccgyggagcctggaggggctgttttctttgaggctgccatggctgccgctttctcctcggacctcctgtcttccttcgtggctacaaagaagaacacaggcgctgagtaagggaggacaccacagggtgctgtcacctgactctaaaaagcagacttacccttaaacctgtaagtgcccacctggcattactgaataggatacacatagagaaaaggatttgtaaaatgttagtgttcagaggagtgtaagggaggaccgccagcagcatttatgacggtgactacattttatttcagaaagaagaatgctttattattctatcttttaccttcaaccagcaaactctagttattaaaggcttgacttgcgcactagctaagcttcaaagc

SEQ ID NO: 521384 - DNA, 550 bp, Homo sapiens
ctgaagcaccactcgatggggtagcggagagccatggcctcttggggatggtgcccttgaaacctgagggtggctttttaatggctggtgtggctgctgccacattagcaaaagaagacttctttggcacgaggtttctaggtgcaggctgcttgcccaccgcggagcctggaggggctgttttctttgaggctgccrtggctgccgctttctcctcggacctcctgtcttccttcgtggctacaaagaagaacacaggcgctgagtaagggaggacaccacagggtgctgtcacctgactctaaaaagcagacttacccttaaacctgtaagtgcccacctggcattactgaataggatacacatagagaaaaggatttgtaaaatgttagtgttcagaggagtgtaagggaggaccgccagcagcatttatgacggtgactacattttatttcagaaagaagaatgctttattattctatcttttaccttcaaccagcaaactctagttattaaaggcttgacttgcgcactagctaagcttcaaagc

SEQ ID NO: 521385 - DNA, 451 bp, Homo sapiens
tgttttgtctgatttgggtcagatagcagtccttgctgactgcatgctgggcatcatggggataggcaaagtggggtgtggggccagggaccaggggagagccactgaggagggggctggccacagggtcatcttgccaggtggaactggtagggaggacktatcctgtcccccagaccctgggcttggggtggggctggtgctgggagcccctaaggccccctgctgtctgggctgacctgctccacccacctctccccgtaatcaaaagtcctctgttaggaagctctgtgccaggatgacttggactcctcaggagggtgggccttttcagctcctcccacctcgcctgatggaattcgcacacacccctcccagcccagccaccgcgctcacccagcagtgaagggagaatctccctccactcacttcaccgcgggagagattagag

SEQ ID NO: 521386 - DNA, 549 bp, Homo sapiens
acagggagaagctggtcctccaggtctgcctgggcccccggtgagtgtccctggctggggagacagcctttttccagtctggagagaaagggggaactcagaacagaggggtcattgatatcctgtctcatcctgccggagcccgggttgcctgaggggaggcctcagagggcttggagcaggcctggagccagcggggcgggaggggagtgtgtgggctcagcctctgcatgttcagggcagggcctggctttgaagctttctttggaccagcgccaggcaggccgggaccggggctggtacagcccttcaggtcccccaggcctgaggtcacctggagccctcccaccttcttcagytccaggggttgagggtcctggggctcagagccctgtctgggcccactgggggtccgacagagatgcctgctggcccttagccagggaggccgaggtgaccagacgaaggtcttacagatgccactgagggatggggcgggcagccttcctgggccagcaaggtgtgggcaagcaggacacacgtgcccca

SEQ ID NO: 521387 - DNA, 504 bp, Homo sapiens
tgcaccggctgcagcggggcccatccccgcctgggggtcccgtgcctggggctacacagaaagccttcgtgccactgctttccagccaaagtgagcccctagcactcaccccgcctgttagcccttgggggtccacgtscgccttggcgtctgcctgtcctctgcgctagaggatggcccacgctcccgccccggattcaaccagattcccagcacgcagcagacgccctaaagcctgctgaatgcaatgggtacaagaacagcggagtgtgcccctgtggctggcagggcaggtccctaaacacccccaagggcacttccttcaccttcccactcaggcttctcaggctccaaggggttgggggtcctttctagctccagcattcatcaccccaaagcagttaaaccattttccatcaatcagaaggaaaacttgcttctggaagacagcaccgtgtagatattttatgctttacgtaacaatacttctgatgatcctctctc

SEQ ID NO: 521388 - DNA, 504 bp, Homo sapiens
tgcaccggctgcagcggggcccatccccgcctgggggtcccgtgcctggggctacacagaaagccttcgtgccactgctttccagccaaagtgagcccctagcactcaccccgcctgttagcccttgggggtccacgtccgccttggcgtctgcctgtcctctgcgctagaggatggcccacgctcccgccccggattcaaccagattcccagcacgcagcagacgccctaaagcctgctgaatgcaatgggtacaagaacagcggagtgtgcccctgtggctggcagggcaggtccctaaacacscccaagggcacttccttcaccttcccactcaggcttctcaggctccaaggggttgggggtcctttctagctccagcattcatcaccccaaagcagttaaaccattttccatcaatcagaaggaaaacttgcttctggaagacagcaccgtgtagatattttatgctttacgtaacaatacttctgatgatcctctctc

SEQ ID NO: 521389 - DNA, 639 bp, Homo sapiens
tgttgtttacctcagaaatggggaagattgaaggaagaggaggttgagggaattgtaatctggagctcagttttggacttaagtacagctctctatagaccagtgccttttagatatccaaagaagatgttgaatggaagctaagtaatgagccccatgattaggaaggattcattcagggtcagagatagaagatttataaatataagagtcatcattatttagacaattatttaaagccatggggcagtatgagatcacttacagagtgagttaaataaacttgattaaaaaaaatctacggaaggagccctgggrtaatccaaaatttggaagtcaggaaattgaggaagatgagcaaaggagatgggaaagaagcaggccaaaaggtagaataataaaggaaggtggtgtgtctgcaaccccataaataaagtgtttcatggaaggtgtgagccagcctatcaaatggaaagaaggcaaaaagcaccaatatgtgaaattagacatcaagctcccacttacataaagtaaccacttcttttcagtacttagctctcttcctacaagtaaattaaatgagctcactttttcaaataactaagttggcatttcatgtttggtagaatattaggaagt

SEQ ID NO: 521390 - DNA, 627 bp, Homo sapiens
taaacatataaaaccttgaaaagagaacacaggtagaagtttcagagttttagaaaggtagcataataaagagaaagawagaatgcagtaaatccaagaaagtagagagtgttcgtccatttcaattcattccatttccaggaaagggcacagaggcaaaagcaaacaaagagagcctgttcgaactaccttagggaagggtggtgggagaatacttctagtatgcataaaaaggaacattgaccagttgcccaacagaggagaaaatatgagcctctgtcattactcaacatagataagcccatgtgaaatgtgttttaaaatacaaatttctgggaacatatcgttaaacttcagttcagcaaaaacattccacctgtttttgaaaacatatgaatcttgaaagaaccaaattgtatgaatttatactaaggaaataattagtaatgtatacaaggatttagctaaaaggatgttcatcttcacactgtttatagaagtgaaaaattggaagccacatacatatgcaagaacagggactagtttaaaaatgtatactatatccatatattagatgactttgctaccaattcaaaattgtgtagatgtgttttattaaaacagaaa

SEQ ID NO: 521391 - DNA, 627 bp, Homo sapiens
taaacatataaaaccttgaaaagagaacacaggtagaagtttcagagttttagaaaggtagcataataaagagaaagaaagaatgcagtaaatccaagaaagtagagagtgttcgtccatttcaattcattccatttccaggaaagggcacagaggcaaaagcaaacaaagagagcctgttcgaactaccttagggaagggtggtgggagaatacttctagtatgcataaaaaggaacattgaccagttgcccaacagaggagaaaatatgagcytctgtcattactcaacatagataagcccatgtgaaatgtgttttaaaatacaaatttctgggaacatatcgttaaacttcagttcagcaaaaacattccacctgtttttgaaaacatatgaatcttgaaagaaccaaattgtatgaatttatactaaggaaataattagtaatgtatacaaggatttagctaaaaggatgttcatcttcacactgtttatagaagtgaaaaattggaagccacatacatatgcaagaacagggactagtttaaaaatgtatactatatccatatattagatgactttgctaccaattcaaaattgtgtagatgtgttttattaaaacagaaa

SEQ ID NO: 521392 - DNA, 254 bp, Homo sapiens
gggtgttccactgaggttccagtctgctcayaccagatgaatccagagatgacaggaggtatctttcccgctatccaacttctgaatgtaccccaagactgccaggtgtcagttctgggccctcttctcttctctacattatcctcctgggggactcaaacaaacccttttctataaaataccatcagtgggctagtgacacccacaataacattttttgccttcatcccttttgtgagctccagattattgtt

SEQ ID NO: 521393 - DNA, 525 bp, Homo sapiens
tcccagtcaccatcctgcctcaaagccttgcaagtttcctccctttgcctggatgtcttctctctatgcctatggctaactccttctagaattcaagcctcagcttaaatgtttcctcccttaaatgagggttagctactatgctgcataaagtgactctctttaactcttgatcacatcacctrctgtctccttcatcaccacatcactatttgtaaccactgttcatataacttgcctaaaatttaattggtgattctcaacccggggcaagtttggcctcaggtgacatttggcaatgtctggagactttttaaaaaacatactatatttattcatttatttattaaatatgaattttattttctagagcagttttaagtttttagcaaaattaagcagagggtacagagagttcctgtagaccctctgcccccacacatgctcagtgcccaccattttcagcatcccccacctgcgtggtacattttttttacaatcaatgagcctgtgatgacacatcat

SEQ ID NO: 521394 - DNA, 305 bp, Homo sapiens
tatacactcacaggctctggccttcaggcagtactctcaattctgatctttgcagggctggttaattgcatgcactgcatctgccttgcaatctcagccatctacgtcaggggagggtgagaraggggagagtggagggcttcactttgtgcctcacactccaagaccacttgtcagggcaaccgtgccttgggcatgacgaggtctttcctttgcccctcatttcattgggctcttttcacttgcatgagtcctacctgtggcaggggaactgaaggccagggggattagcagcagcaggaaca

SEQ ID NO: 521395 - DNA, 604 bp, Homo sapiens
atgtcttatataatacactgctccatttggaaaaattgctttaaggaactcaatttctttctgaaaatcccaggtacctttagtgagaaggcttcatgaaatccttaggaaaataaaagaagctttgaattgagtcaaatccattgtaatccctagcaagcttcaaaaggagaaccagtgctttcggccagagggtggtacaacatgtcttcaaaatgaaatgtctcgaccrggcacggtggctcaggcctgtaatgtcagcactttgagagttcgaggcggcaggaacacttgagtccaggagttcgaggctgcagtgagctatgattgggccactgcactccagcctgggtgacagagcaagactttcttcctaaaacaaacaaacaaaaaggtatgcccccattcagatctcagaatggtatgaaacaccccagatccttggtttgcattgagttgtttccaggagaaccagacttctagcagcttctcggtcccttaggaaaaacgtgcagctcccagtgaacaaaccaacagccacagaaaatcaactaaattaaacctcctctcctgccattgctgtcactgctgcagatggtttcag

SEQ ID NO: 521396 - DNA, 604 bp, Homo sapiens
atgtcttatataatacactgctccatttggaaaaattgctttaaggaactcaatttctttctgaaaatcccaggtacctttagtgagaaggcttcatgaaatccttaggaaaataaaagaagctttgaattgagtcaaatccattgtaatccctagcaagcttcaaaaggagaaccagtgctttcggccagagggtggtacaacatgtcttcaaaatgaaatgtctcgaccgggcacggtggctcaggcctgtaatgtcagcactttgagagttcgaggcggcaggaacacttgagtccaggagttcgaggctgcagtgagctatgattgggccactgcactccagcctgggtgacagagcaagactttcttcctaaaacaaacaaacaaaaaggtatgcccccattcagatctcagaatggtatgaaayaccccagatccttggtttgcattgagttgtttccaggagaaccagacttctagcagcttctcggtcccttaggaaaaacgtgcagctcccagtgaacaaaccaacagccacagaaaatcaactaaattaaacctcctctcctgccattgctgtcactgctgcagatggtttcag

SEQ ID NO: 521397 - DNA, 604 bp, Homo sapiens
atgtcttatataatacactgctccatttggaaaaattgctttaaggaactcaatttctttctgaaaatcccaggtacctttagtgagaaggcttcatgaaatccttaggaaaataaaagaagctttgaattgagtcaaatccattgtaatccctagcaagcttcaaaaggagaaccagtgctttcggccagagggtggtacaacatgtcttcaaaatgaaatgtctcgaccgggcacggtggctcaggcctgtaatgtcagcactttgagagttcgaggcggcaggaacacttgagtccaggagttcgaggctgcagtgagctatgattgggccactgcactccagcctgggtgacagagcaagactttcttcctaaaacaaacaaacaaaaaggtatgcccccattcagatctcagaatggtatgaaacrccccagatccttggtttgcattgagttgtttccaggagaaccagacttctagcagcttctcggtcccttaggaaaaacgtgcagctcccagtgaacaaaccaacagccacagaaaatcaactaaattaaacctcctctcctgccattgctgtcactgctgcagatggtttcag

SEQ ID NO: 521398 - DNA, 435 bp, Homo sapiens
tggggagcagtctgctcctgtgcagcctgagaacaaaccagcggcagccgctgggggctgcagaggcggctcaggagaaggtggcatgaagaatcagrgctgcccgaggagggcgtgggttaccttgggacctgcaaccctgttcaggacatgttcaaagagctggagccatggggcacacacccagggggcaggcagggggtagaggagtccctgctaaacggagccccagcttccctggaaagacagcagccagcctctatctggcggggcccaactggctctgccacactcgcctcacctcggccatggccacggcgcccttctcagtgaaggtgttgtcattcaggttgatgacccgcagcagggggttgacagcgaaagcctgggccagggcagtgatgccagggtggttgatcccattctgtggcatgt

SEQ ID NO: 521399 - DNA, 564 bp, Homo sapiens
ctcagaggctggaacagcccttctgagttgcctacatcaggaccatgaaatggggtccttagacccccatgtcaacccgacgttggaggtggcctgcccctatggaggaggcagtcttaggcaaggcgattctccttggctgaaggcgaatcctggagcctctgtcctgaaggagaatccaggtggcagactacartctccactgaagtccactcctcttcacttccaccgcctggagccaacccatcacctctcatctggatgcagccttaagatcctccccagagctcagcattcatgcttggcccttcaccaacagagtccaatctgcaccaggaacccaaagccacaggaggtctcccagcacagaaatcagatcacttcacttcactgcttgaaaccctcaaatggcctcccagaacaaaacacactcagaataaaatcctgagtgatccctgcctctgcctatgacctctcccttcactgtgcttcagccctttctctctctctctcttttataacaatccatcatgacgttcaatgttctctttttcttgagacagc

SEQ ID NO: 521400 - DNA, 531 bp, Homo sapiens
cctctcgatgcctctttaagttcaagtctctctgtaagagcgtgcggggggagggggkgtgtgtatgtgatgagtcaccagccttggttgctatccacaattttatcagagctcacaacagtatctgaagtccattttcaaagccagctttatctttgggctcagaatttcccaccctgcaggcaggtgaagaggcagacctagtccaagtccagaaaaggcatcttgaccgctgcacctctccctctccccctccccacggaccttctgggggtctcgtggcctattgctgtgaaccatgcgtggcatcgcaaggactttcttctggacactgtgcaaagttcatgatatcctttctctttattttcctgtttattcagagcatgtgtaaacacatgggttgcctggtttcagcttctctttggccatttcattatttctggagcctctgagcatcactggaaaccttggattttctaaatgaatctaaaaataaactctttgaaaaaaaattctcgaagttggagagtt

SEQ ID NO: 521401 - DNA, 589 bp, Homo sapiens
tgggtttgcagtcactgacccacctgaggcgataatgaagacaacacctgccatagggtatgaagaactttccagacaagatctgcatcagactccacaagccaggaacatgggggtcacacttgctataccctgccctatcyccatacccagggatcaggagacaggagcctgcagggggcaggctaagagctaagaaggataagtaggaagtaaccatgcagagtgaagggaaaagcattccaggcgaaaggaacagtgtgggaaaggccccatggcaagaagatagtggttgctaagtctgatcaattcaagttcaccaacatctgcgcatctgttccattctctccacctgcacagtccccaccctcccgcatcaggacttctttctggcctccccaaaaccactctctggcccactattgcaaagaccactagctgtcaccaacatctattcttcccctcttccattgtcacagagttttagctggacccagggctgcccagaataaagactacatttcccagcttcccttgcagttagatgtggccatgtgattaacattggccaatggaaggtgagcagaaa

SEQ ID NO: 521402 - DNA, 583 bp, Homo sapiens
gtagtgggaaggagctgggcgtggtggtttatgcctataatcccagtactttgggaggctaaggtgagcagatcaccttaggccacctcctcaccttgaggccaggagtttgagaccagcctggccaatatgacaaaaccttatctcaactaaaaatacaaaaaaaagttagccggacatggtagtgggcccttgtagtcccatctgcttgggcaggtggggagggggcactgagacaggagaatcgcttgaacccgtgaggcggaggttgcagtgagccaagatcacgycactacattccagcctgagagacagagcgagactccatctcaaaaaaaaaaaaaaaaaaaaaatgtagtggggtaactgttagcttgcaagcaaggtaaaaatctcagaccctccacgcttcttgacaacagcattgtccattgtctagtgatcttttaaattattttttaaatcttattattattaaattaactaatacttcttcttcctctccaaaaaatctaaaacagcctattaatttatattgttcaaattccaccattttggatttctactttttttcctcattttt

SEQ ID NO: 521403 - DNA, 583 bp, Homo sapiens
gtagtgggaaggagctgggcgtggtggtttatgcctataatcccagtactttgggaggctaaggtgagcagatcaccttaggccacctcctcaccttgaggccaggagtttgagaccagcctggccaatatgacaaaaccttatctcaactaaaaatacaaaaaaaagttagccggacatggtagtgggcccttgtagtcccatctgcttgggcaggtggggagggggcactgagacaggagaatcgcttgaacccgtgaggcggaggttgcagtgagccaagatcacgtcactacaytccagcctgagagacagagcgagactccatctcaaaaaaaaaaaaaaaaaaaaaatgtagtggggtaactgttagcttgcaagcaaggtaaaaatctcagaccctccacgcttcttgacaacagcattgtccattgtctagtgatcttttaaattattttttaaatcttattattattaaattaactaatacttcttcttcctctccaaaaaatctaaaacagcctattaatttatattgttcaaattccaccattttggatttctactttttttcctcattttt

SEQ ID NO: 521404 - DNA, 525 bp, Homo sapiens
aatgggctcacctgggagagagtcggtaagaaatgcagaatctccattttcatcagatccccaggggattcctgtgaatacgaacgtgaagggagcaggcactggcctccatcatgttaaaatgcagattcaaatgtcattggtctggsatgaggcctgagaatctgcatttctaactttgcataacaagattctaagccataaacactttggtttaaagacaatctctggtgacgaatgttctgcaagaagagtcaaccctcttggaaaagtggaagacatcacccaactatcagcaatctattccctgaccattttgcatttggaaacaaagagaattacaaggaatccatgttagtctctgctgaaaagatgttgtagtttagttggaaaactaatacttaatgacgagaaataactcatgaacaataaaattacatattataatttttttttcagcaagtctttattgagcttctactacgggctatctctatttgatggctgggagacagcattgaaata

SEQ ID NO: 521405 - DNA, 483 bp, Homo sapiens
tgtaaattcagctttgaaacaaatgccatcaccccaccaggttgctctctctcggtatctcttgttctgagttttggagcagaccctgatttatagtggaacactcatttccagcatcagcaccaatcaacacagtggtcacatcctcagagcccctcctccaaccccaaccctgacaagggagctggtattgttatatcctgtgtttcactgcaggcctggagatagtagaagtccactctgtctttattaagattagtatttgactgcaaggatagaaaacccaaaataacagtgggtgatgtttcctaagtctggcactgggaggcccaagttgacatggtggacagaggggcagggttccaggctccctctgccttgttgcttccccatgtacagctcccatccctatgatcacctcatggtccaaaattactgctggagtaccagacattatawcgacattccagccatcaggaagga

SEQ ID NO: 521406 - DNA, 631 bp, Homo sapiens
gttcctgacaagcccatgtgtgttgacagcctctctgactattctcttctgggtcgttttgctgttcatgatatgagatagacagttactactggtgtcatcaaagcagtggacaagaaagcttctgaagctgtcaaagtcaccaagtctacccagaagcctcagaaggctaaatgaatattatccctaatacctaccaccccaatcttaatcagtaaaagaatgacctcagaactttttgtttcaattggtcatttaagtttaacagtaaaagattggttaatgaaaacaatgcatcagaaaagcttcagaaggaaaggagaatgttttgcggatccatttttttttttaatgtgtggtagttttaagttattagtttttaaaatcagtgcttttattttattttattttwttttggagacagagtctcacacagtctcccaggcagtggcatgatctcgtctcactgcaacctcacctccagggttcaagcaattctcttgcctcagtctcccgattagctgagattacagacaccctaaaatcagtactttttaatgaaaacaaccaaaaacctgtcacagaattttgagacctgttaaaactaagtttaatcagaaaaaaaagagtc

SEQ ID NO: 521407 - DNA, 596 bp, Homo sapiens
gactttcacttctacatgatttcttttttcttcttctyctttttttcttttgagatgccatcttactctgtcacccaggctggagtgcagtggcgtgatcttggcccactgcaacctacgcctcctaggttcaagtgattctcctgcctcagcctcccaagtagctgggattacaggcacacgccaccatgcccggctaatttttgtatttttagtagagatggggtttcactatgttggccaggctggtctcaaactcctgacctcaggtgatccacccaccttggcctcccaaagtggtgggattacaggtgtgagccactgctactggccactactacgtgatttctaacaacctgtttggattcaatattcttcttgcacaactatctgtcctttaggaataatgtgacagtaagagtgaaagtgcaaaaatatagtcagttgtttcatatcattcactaaaagtaattgttctcatgcatgcatttgggagcagtcatcttaagaaaagtttactacagtcaaatgtgtctgaaagacattgttcattatatctctttctcagaaggcagaacacatgtagtacattagag

SEQ ID NO: 521408 - DNA, 596 bp, Homo sapiens
gactttcacttctacatgatttcttttttcttcttctcctttttttcttttgagatgccatcttactctgtcacccaggctggagtgcagtggcgtgatcttggcccactgcaacctacgcctcctaggttcaagtgattctcctgcctcagcctcccaagtagctgggattacaggcacacgccaccatgcccggctaatttttgyatttttagtagagatggggtttcactatgttggccaggctggtctcaaactcctgacctcaggtgatccacccaccttggcctcccaaagtggtgggattacaggtgtgagccactgctactggccactactacgtgatttctaacaacctgtttggattcaatattcttcttgcacaactatctgtcctttaggaataatgtgacagtaagagtgaaagtgcaaaaatatagtcagttgtttcatatcattcactaaaagtaattgttctcatgcatgcatttgggagcagtcatcttaagaaaagtttactacagtcaaatgtgtctgaaagacattgttcattatatctctttctcagaaggcagaacacatgtagtacattagag

SEQ ID NO: 521409 - DNA, 604 bp, Homo sapiens
gttatagatggccagtcatctatattttatttaatgccatttgtagcattttcctccattctactacttgagaaaacagaaacagagaggatatctagattgtctgaagccacaagatgaaattagaataaarttcaggtatttctgacaattatttctgtatgtagagtacaaagttcattactgttatccttttattgctctcctctatatatacattttgctattttttcctgaaaatgttcagtaaacctgcatatctgctgatacatataataaaactcatttataaagcataagttatactatgggttaagtaatatttctccaagaatctatctatctatgtctataagtatgtatctatatataaaatttagagtgtattaaaatctgaaatgcttattcaaaggcatatttcaaaactccatcctcgaagatatcctataatctgtagatagaagaagagagagtggagcctggtttagaggtagttctgcatgatatgcagggaccacttgagagtggacaactattgtactacagactctttgggggacattcctgaaggacagtggtgaagggaaatcttcccagtggccag

SEQ ID NO: 521410 - DNA, 604 bp, Homo sapiens
gttatagatggccagtcatctatattttatttaatgccatttgtagcattttcctccattctactacttgagaaaacagaaacagagaggatatctagattgtctgaagccacaagatgaaattagaataaagttcaggtatttctgacaattatttctgtatgtagagtacaaagttcattactgttatccttttattgctctcctctatatatacattttgctattttttcctgaaaatgttcagtaaacctgcatatctgctgatacatataataaaactcatttataaagcataagttatactatgggttaagtaatatttctccaagaatctatctatctatgtctataagtatgtatctatatataaaatttagagtgtattaaaatctgaaatgcttattcaaaggcrtatttcaaaactccatcctcgaagatatcctataatctgtagatagaagaagagagagtggagcctggtttagaggtagttctgcatgatatgcagggaccacttgagagtggacaactattgtactacagactctttgggggacattcctgaaggacagtggtgaagggaaatcttcccagtggccag

SEQ ID NO: 521411 - DNA, 604 bp, Homo sapiens
gttatagatggccagtcatctatattttatttaatgccatttgtagcattttcctccattctactacttgagaaaacagaaacagagaggatatctagattgtctgaagccacaagatgaaattagaataaagttcaggtatttctgacaattatttctgtatgtagagtacaaagttcattactgttatccttttattgctctcctctatatatacattttgctattttttcctgaaaatgttcagtaaacctgcatatctgctgatacatataataaaactcatttataaagcataagttatactatgggttaagtaatatttctccaagaatctatctatctatgtctataagtatgtatctatatataaaatttagagtgtattaaaatctgaaatgcttattcaaaggcatatttcaaaactccatcctcgaagatatcctataatctgtagayagaagaagagagagtggagcctggtttagaggtagttctgcatgatatgcagggaccacttgagagtggacaactattgtactacagactctttgggggacattcctgaaggacagtggtgaagggaaatcttcccagtggccag

SEQ ID NO: 521412 - DNA, 355 bp, Homo sapiens
cccaaggtctgggcccccagaagggttgttacgtttcactcctgcagccagtaccatgccaccgcctgcagctcagcaagctggccaggaaagtgttatagccccttttagctcccacccgcagctcaatgaactggccaggaaagtgttacagctccttttsctcctgccatttgtcaggtcccaggttcttgtcccacatccaggaagaatgaggttaggtggacaactggagggtgagcaaggtggagaagagctttactgggcaactgaacagctctcagcagggagatctgtagtgggtagccttcactccaggccatggatttcacccggagctggaagcccaggccca

SEQ ID NO: 521413 - DNA, 654 bp, Homo sapiens
tgctataatggtggatacatgtccttatacatttatcaaaacccacagaatataaaaccaagagtcaactcaaaagtaaactatggactgtggtgataacaatttatcaatggggttcattgattgtaacaaatataccaccgtggtgtaggatgtcatagtgaggaaactgtacatgtggaggggtagggggtgcgtgggaactctgtagtttccactcaattttgctgtgaacttaaatcagctctaaaaaataaagtctattttttaaaaaggtaaactaaagtctgtgagttacatcatttcagtgtttttctcaatcacactatataatctggatcattatataagattttgaaattaacttcaatatctttatcttgatttttttcaaagtctcataagatacgctaacaaagtcagatttaagaagagttcagattctcaggataaaccaacaacatatyttataagatgttttccaagtaaaaaagtatttcctataagaaaatacagtcaaaacattacaaaaatgtattttcattcatcttttattataaaggtatagctcttatagaaaattagaaatacaaatataaaaaaaaagcattttctattacacaaactttgcaaaaaaaaaaaaaaaacccaaac

SEQ ID NO: 521414 - DNA, 585 bp, Homo sapiens
tcacgggggggttacaaaaaggcaaagttcaagccagcaataagtgtcaggaaaagcagttgtaaccacaaagccaagagtaagtgggggcagaagggtcatgaaccattacctttcatgcaaaagataattataaagcatcaaactatcaccagaaatatttaatgtctatagcaatgcccatgaattatatcatctcatcagctttccctctctgggcctcagtttccccatatttgaatctgaagaactcccagcttgagttagtgcccctcctctgttccccagacctctgtgttataactgtctatcagtgagtctgtctctctaactataccttgaattcctaacagtaggactgtattttattcatgtctgcatcctcaaagcctggtccagggcctggcatataacaggtgttccatcaatatttgctgactaaatggtctctaaaktccttggaggacagactcatagaatgactgaatcagttattctaggactctgacctctgcagagttcaagataaagtgagagctaaaaaaccttgccagcagcagtccagcagcagcagtgcaaagcagg

SEQ ID NO: 521415 - DNA, 585 bp, Homo sapiens
tcacgggggggttacaaaaaggcaaagttcaagccagcaataagtgtcaggaaaagcagttgtaaccacaaagccaagagtaagtgggggcagaagggtcatgaaccattacctttcatgcaaaagataattataaagcatcaaactatcaccagaaatatttaatgtctatagcaatgcccatgaattatatcatctcatcagctttccctctctgggcctcagtttccccatatttgaatctgaagaactcccagcttgagttagtgcccctcctctgttccccagacctctgtgttataactgtctatcagtgagtctgtctctctaactataccttgaattcctaacagtaggactgtattttattcatgtctgcatcctcaaagcctggtccagggcctggcatataacaggtgttccatcaatatttgctgactaaatggtctctaaattccttggaggacagactcatagaatgactgratcagttattctaggactctgacctctgcagagttcaagataaagtgagagctaaaaaaccttgccagcagcagtccagcagcagcagtgcaaagcagg

SEQ ID NO: 521416 - DNA, 585 bp, Homo sapiens
tcacgggggggttacaaaaaggcaaagttcaagccagcaataagtgtcaggaaaagcagttgtaaccacaaagccaagagtaagtgggggcagaagggtcatgaaccattacctttcatgcaaaagataattataaagcatcaaactatcaccagaaatatttaatgtctatagcaatgcccatgaattatatcatctcatcagctttccctctctgggcctcagtttccccatatttgaatctgaagaactcccagcttgagttagtgcccctcctctgttccccagacctctgtgttataactgtctatcagtgagtctgtctctctaactataccttgaattcctaacagtaggactgtattttattcatgtctgcatcctcaaagcctggtccagggcctggcatataacaggtgttccatcaatatttgctgactaaatggtctctaaattccttggaggacagactcatagaatgactgaatcagttattctaggactctgacctctgcagagttcaagataaagtgagagctaaaaarccttgccagcagcagtccagcagcagcagtgcaaagcagg

SEQ ID NO: 521417 - DNA, 537 bp, Homo sapiens
caggtagattggttccagagaacagagaaaacagaagagaaatgaatctgaggagcaagacgctaagtatctttttgtgcaatagcaagtctaggtattcagaggtgaccactagacaactggtaatgcaacactgaacacaggcaggaagcctgcattgaaygtaattatggggaggcacttgcaaagatgggagagttgacttgggaggaaggtgatgagaaggataacaagacattggcatagtgaaagaaattgccagggagagaacaaaagagaaaataggctcttagtattaactgtctatcagtgtgtaataaattaccctcaaatccagtggtgtaacacaacaaccatcatttattaattctcactagtgagaattaatggggtcaggaatttagacagggtccagtcggaatggctcatttctgttttaagacttctgggccctcagctttaagacttgaaggatggaaactggtatcatctgaaagattttcacttgcacatttgatggttggtgctggctgtcag

SEQ ID NO: 521418 - DNA, 509 bp, Homo sapiens
ctgggaagtggaagtgcctaaccaaatatataagatatgtgactctctaatgataagacatattttttattaagtgcatttccaaaccatgtattctaaatctctttaaaagccatttaaaatggaccactgttacggttacatttttttttttatggcagacttttctttgaaaatataaatttcacttcagcctagatttaataatcacccatttcattgtagtagagttactcattttttaagcaagtaactattgcacacttaygtgctaattgctgtgcaaatggttgtggatactgcagtgaataaacagaattcctaccctgtgaaacccaccgtggtccagcacacacaccctattaaaataaatgcatatttctttgtactctgtgataagaatcataaaagtcctgttcatatttccagtggaacacataaagaggccctagattaggtctgggtggccagacaaggcaatgtttgaagtgactattgatgtgaaaaat

SEQ ID NO: 521419 - DNA, 699 bp, Homo sapiens
gctgggaagaaccaaatttctgacatcaaagtctgtttttaaccattgctgcattgtcttaagtgcttggaattctttccacagtgagataaaatattaagaaaaaaaaattttttttaagaaaaatgggtttttctaaaccatttgtttagaaaattgctaatatataattaataaatatagtgaatcagaatctgtcctgttttggtactatttgtcaatcagcaaaagtaactgatgtggggaggcagtcatccctggttgtagaaggggggctggacaccagaattacatgttgtcagtgtgcatttagctgtagtcacatctgctgtcttcagcctcttgacagtaaagcatctgtgctctgaggcamttttgtgtgatccagttttgtacacaggcagtttgttgggagcgttaccattgcctctggttcctcatgtgtaaaatggtgagaaaatagtattaccttataaaatggggctaatcatagtgccacaagcctgatagggctgtttatgtgggttcatgaacttacgtgggttcatgcataaggtgcttacaacatgttttaagggctatataaatgttagctataaaaataataattactcttattgttaatagaaattgttattggatattttatttatggtaacatgagaggggcagtgtatctgcctttgtacgtgtattaaa

SEQ ID NO: 521420 - DNA, 699 bp, Homo sapiens
gctgggaagaaccaaatttctgacatcaaagtctgtttttaaccattgctgcattgtcttaagtgcttggaattctttccacagtgagataaaatattaagaaaaaaaaattttttttaagaaaaatgggtttttctaaaccatttgtttagaaaattgctaatatataattaataaatatagtgaatcagaatctgtcctgttttggtactatttgtcaatcagcaaaagtaactgatgtggggaggcagtcatccctggttgtagaaggggggctggacaccagaattacatgttgtcagtgtgcatttagctgtagtcacatctgctgtcttcagcctcttgacagtaaagcatctgtgctctgaggcacttttktgtgatccagttttgtacacaggcagtttgttgggagcgttaccattgcctctggttcctcatgtgtaaaatggtgagaaaatagtattaccttataaaatggggctaatcatagtgccacaagcctgatagggctgtttatgtgggttcatgaacttacgtgggttcatgcataaggtgcttacaacatgttttaagggctatataaatgttagctataaaaataataattactcttattgttaatagaaattgttattggatattttatttatggtaacatgagaggggcagtgtatctgcctttgtacgtgtattaaa

SEQ ID NO: 521421 - DNA, 642 bp, Homo sapiens
ttttatttttttctgtagaggtagggtcttgctgtgttgctcaggctggtctcgaactcctggcctcaagatatcctcctgtcttggccttccaaaatgtttagattataggtatgagctagtacacctggcctaattgtgcttctatttagtttagaacatatggtaacaaggataatggatttaaaccaatctgtaagtaataacattctcttaaaattgcatggagaaagtcgaatcctgttttctttctttctctctttttttttttttgagatgtagtttcgttgttgttgcccaggctggagtgcaatggcacgatcttggctcaccacaacctccacctcccgggttcaagcgattctcctgcctcagsctcccgagtagctgggattacaggcatctgccaccacgcctggctgattttgtatttttaatagagatggggtttctttatgttggtcaggctggtcgtgaactcccgacctcaggtgatcggcccaccttggcctcccaaagtgctgggattacaggcgtgagccaccgcgcccagccagtcctcttttctaatataccaccagatagcaccttctgaatcagcccagcacccttaaagcagtaattgatagtcagggcttgcca

SEQ ID NO: 521422 - DNA, 642 bp, Homo sapiens
ttttatttttttctgtagaggtagggtcttgctgtgttgctcaggctggtctcgaactcctggcctcaagatatcctcctgtcttggccttccaaaatgtttagattataggtatgagctagtacacctggcctaattgtgcttctatttagtttagaacatatggtaacaaggataatggatttaaaccaatctgtaagtaataacattctcttaaaattgcatggagaaagtcgaatcctgttttctttctttctctctttttttttttttgagatgtagtttcgttgttgttgcccaggctggagtgcaatggcacgatcttggctcaccacaacctccacctcccgggttcaagcgattctcctgcctcaggctcccgagtagctgggattacaggcatctgccaccacgcctggctgattttgtatttttaatagagatggggtttctttatgttggtcaggctggtcgtgaactcccgacctcaggtgatcggcccaccttggcctcccaaagtgctgggattacaggcgtgagccaccgcgcccagccagtcctcttttctartataccaccagatagcaccttctgaatcagcccagcacccttaaagcagtaattgatagtcagggcttgcca

SEQ ID NO: 521423 - DNA, 665 bp, Homo sapiens
tgtggcatcagcggcgacagtaattttctccctggcattcaaccagagggcagttggactgtgcaccgactgcactagtggtgggtagccaaagctagcctccaaagtgaaccacggtctggggyctggtcccgtttgaccgaaaatgctatccagaacccccaccgagctgcaggcccttcttcctgattgagctagaggtgagtgaagacagggtctggggtagggaggggcgtccacgccagcttgcccattacctgccggccttggtgatgatcatctcagtgcctatctcatgaaagcgcttccagagctcggctccctgcagatccacccgcggggcctgcggcgagggcagaggggtcccgggccgggccagggagcgcgccggagaccccttgggggagcctcccggtgacgccagaggggaagctccctgctggaagccgtcctcacagccgcctggacagcaaaggacagagaaagggaactggtgagggaaacagaggggaagccagccgcggagacgggcccacctggtggctgagaagaggaaaatgaccgggagaaaaggggaagctttggtgccatcaggtcctcctaaagaacaagccagtcgatagacacccacattctgcctgtcgaaggggcgcattcagagctcc

SEQ ID NO: 521424 - DNA, 614 bp, Homo sapiens
gtgtgtgtatatatatatatatatatatgacaaaggaattttttcctctccctcgtccctcgtttaattcaatctccgcaaccgttggctgcccttttatctctgacttctctgtaaactttcagtagagtagcatttgggggtagatccgccactgagactgatccttttattgtagaagagaacgcgcggttcctggaggccggacaccacagcgggagtaggaacctggcaggcgatgagcagaggcacgagcaagccgcccagccaaacctggcagccttgaggtcaaaaatgattttgtaatatccttgcggaggaagcctcttttagacgcctgagaaacaaactcagttgggaggaggtgttttgcattttacaaaatgaaggctttgcgaccggtttagagctgtgtggtccctagtgggtctccaagctccggggtaccctaggccggtattacatcattaaaaagaagcgcaaatcccatttctgaagcttagccgaaggcaggcgccggcagggagagctragaggccgcctagagagtttgggccgggagtgggagtgggacaaggcgggagctaacttagctggagtagacgccagaagaa

SEQ ID NO: 521425 - DNA, 499 bp, Homo sapiens
cctgatagctctgtgcttagtgattttgctgtctcgtgcctsggggctgtgactgggcttccctgtgtcctggtcctcgcccagcacacgactgagatggacaggaggttaatacatgagcgttgaatcagcggaagatctggggaccaactcaatgattacagagtgaatgatggtgccaaggccagggctctgaacccgcagggaacttgctcactgtttgtttgtgtggctgcaccctgcctcccccttccttgggggtctgagatgccacaatcaccttctctggttcactagaacagaaaaggggcccagaagcccccatgacatcacacacccccctcatgccctgaggcccaaagttcttttcagagaagtgttgtgttgttgagctccacctccacaggagtgattgagctcttcagggagggctgggggcagccatcaggtgcctgggtgtgtttggtcatgatccctggatagggacccacctgtgcct

SEQ ID NO: 521426 - DNA, 499 bp, Homo sapiens
cctgatagctctgtgcttagtgattttgctgtctcgtgcctcggggctgtgactgggcttccctgtgtcctggtcctcgcccagcacacgactgagatggacaggaggttaatacatgagcgttgaatcagcsgaagatctggggaccaactcaatgattacagagtgaatgatggtgccaaggccagggctctgaacccgcagggaacttgctcactgtttgtttgtgtggctgcaccctgcctcccccttccttgggggtctgagatgccacaatcaccttctctggttcactagaacagaaaaggggcccagaagcccccatgacatcacacacccccctcatgccctgaggcccaaagttcttttcagagaagtgttgtgttgttgagctccacctccacaggagtgattgagctcttcagggagggctgggggcagccatcaggtgcctgggtgtgtttggtcatgatccctggatagggacccacctgtgcct

SEQ ID NO: 521427 - DNA, 499 bp, Homo sapiens
cctgatagctctgtgcttagtgattttgctgtctcgtgcctcggggctgtgactgggcttccctgtgtcctggtcctcgcccagcacacgactgagatggacaggaggttaatacatgagcgttgaatcagcggaagatctggggaccaactcaatgattacagagtgaatgatggtgccaaggccagggctctgaacccrcagggaacttgctcactgtttgtttgtgtggctgcaccctgcctcccccttccttgggggtctgagatgccacaatcaccttctctggttcactagaacagaaaaggggcccagaagcccccatgacatcacacacccccctcatgccctgaggcccaaagttcttttcagagaagtgttgtgttgttgagctccacctccacaggagtgattgagctcttcagggagggctgggggcagccatcaggtgcctgggtgtgtttggtcatgatccctggatagggacccacctgtgcct

SEQ ID NO: 521428 - DNA, 499 bp, Homo sapiens
cctgatagctctgtgcttagtgattttgctgtctcgtgcctcggggctgtgactgggcttccctgtgtcctggtcctcgcccagcacacgactgagatggacaggaggttaatacatgagcgttgaatcagcggaagatctggggaccaactcaatgattacagagtgaatgatggtgccaaggccagggctctgaacccgcagggaacttgctcactgtttgtttgtgtggctgcaccctgcctcccccttccttgggggtctgagatgccacaatcaccttctctggttcactagaacagaaaaggggcccagaagcccccatgacatcacacacccccctcatgccctgaggcccaaagttcttttcagagaagtgttgtgttgttgagctccacctccacaggagtgattgagctcttcagggagggctgggggcagccatcaggtgcctgggtgtgtttgstcatgatccctggatagggacccacctgtgcct

SEQ ID NO: 521429 - DNA, 545 bp, Homo sapiens
tctgagtgatgcagccacaagccgaggaatgccgactcctggcaacaccaaagctcagacaaggggtgggagcagatccttcccagagccttcagagggagctcagtcctgccaacaacttgattgcagacttcaggctcccaggacaatgagacagtaagttcctgttgttttaagccatccaagcttgtggcagattgttttttggcagccctrggaaactaatacaatgggtgacaatggatatattcttgtgactcagatcctgctagtgcaatgttgatttccatctgtcactatataaaatcattgacactcagatgggaggagacagatcaaaggagatcaaatcatagaaaatagaaggatctgagaagaccattcttttaacatgcaattgccacttaacctaaccaaaagatgtattttgtaacttatccttaagactattgttctgataaaaataacgtttctttagagttctgaaattcaagagcaaaatgattgcctcattggaattacagttgacttacatttgagacagg

SEQ ID NO: 521430 - DNA, 615 bp, Homo sapiens
cttggctgcagatgagaattgaaagcacctgcatacacacagcctacctactggggctgagaactgagaccactgagacctaattatttgttccagaagaattctgccctggaagataagcttgtaaagcaataaataacttcactgtttgcttsaagaaactcctgcaaataatttaaccagacagtttgctcatctgagtagccatctctcttaacaggaaatcagacggttcacctgggcaataatagctcttgtataagacaacagtttccttatgaaggcttccttaggactttgtctcactgtgtccactgaccccaaactactatgtcattgatctgctcaactccaatcagtttcccacttgaaagatctgcaataagcgcttaagcccagatccccaggctctatgaacaccctcccctgacctctctttcctgtgacacctccatgactgtccacacgatggtgtcacttcctgcactagatctaatcagcgctgctctgcaatagattttctgtggtcatttgggaggtttgagacagaggacaaggtagaacatgcagtaacaaaagatgaaaaacacttctcatttttcttatttgtatgtc

SEQ ID NO: 521431 - DNA, 615 bp, Homo sapiens
cttggctgcagatgagaattgaaagcacctgcatacacacagcctacctactggggctgagaactgagaccactgagacctaattatttgttccagaagaattctgccctggaagataagcttgtaaagcaataaataacttcactgtttgcttcaagaaactcctgcaaataatttaaccagacagtttgctcatctgagtagccatctctcttaacaggaaatcagacggttcacctgggcaataatagctcttgtataagacaacagtttccttatgaaggcttccttaggactttgtctcactgtgtccactgaccccaaactactatgtcattgatctgctcaactccaatcagtttcccacttgaaagatctgcaataagcgcttaagcccagatccccaggctctatgaacaccctcccctgacctctctttcctgtgacacctccatgactgtccacacgatggtgtcacttcctgcactagatctaatcagygctgctctgcaatagattttctgtggtcatttgggaggtttgagacagaggacaaggtagaacatgcagtaacaaaagatgaaaaacacttctcatttttcttatttgtatgtc

SEQ ID NO: 521432 - DNA, 638 bp, Homo sapiens
attctatagcaaacattatgttctgtattcatgaagtttaggaaaattattaactataggtcttaatttggctttataccagtttctttaattcaacttctatagatctgacttgtgttctagaaagtttaaaatgttatactattttctggtaaaatctctgatgacagagtatttcatttagagagtcaggtaaagttgcatagaaaaagaatgaaatgaaaagaaggtagcattcagaaggttaccaaagccttgacaaaaatcatctttgaattggaaaatttgtttgcaggatgacagctaaagaaactgacaattcactgtggtattttatctcctaatttgtctagagctccttgtaaatattttaatttattgatttcatcataaattagttcccatatggccaatgttattttaaatatctattttcctacctatccatcatctatctatctatctatctatctatctatctatcgtctatatatatatatttatcatctatgtatcatctgtcttgcctgyattgggaaaacaaaaataaaattaggattagtatgtgactttatataggaagaataagttcttccagaaaaaggtttgtatttagacagagacaaatctctgataca

SEQ ID NO: 521433 - DNA, 584 bp, Homo sapiens
ttctggctgagggcagaggaaatacagaatgggtagaggtkgggggaaagctgtagatatcaattatagccttgtgaacaattatagaaatgaggacttatagtcttgtgaacaattatagaaacgaggaattatagaaatgcagtaactttacatattttctgttggcttattatatatatatgtgttgatttgtatttactaaccattttcttttcactccttccccattttaattttttattcaaactcttggcacttgtgttattttcctagggctgctacaatagagttaccaaaaactcggtagcttaaaacataaatctattttcttacagttctagaggctagacatctgaaatcaaggtgttagcagggttggtttctttcagaagctccgagggagaatacgttccaggcctttttcctagttcctggtggctgcctggcaatctttggcatccttgggattttcatgcatcactctcatctctgccttattttcacattgttttctcctctgagtgtctctgtgtctcatattcctctcttctttctttaataaggataccaatatttgaatt

SEQ ID NO: 521434 - DNA, 516 bp, Homo sapiens
tgctgaggggaataaaaatgttgctgctgtcatgaatcaatgaaatgtcaacatctcagatagtctatacgtggttttcagatggttttgggcaaagggagcttttatgaccatagatgtcaacttcttgcaagggtragggtggggttggggtgggatggggagtggttatggcccactgagaactaaggcactctgtcatctcatagtccattctttccaagctacctgaattgtgctccagagttctggggagtctaggttgaagaaacgaccgtgttagtggccgggtgcagtggctcatacctgtaatcccagcactttgggaggccgaggtgggtagatcacttgagcccaggagtttgagaccagcctgggcaacatagagagaccccatctcaaaatagcaataacaacatcaaagaaacgactgtgttggggctggctcagtcttccactggatatctagtgagtggacagtgcatgacacctacataaatcacctctttttttgta

SEQ ID NO: 521435 - DNA, 589 bp, Homo sapiens
tggaatttctgaagaaggctgctgaggggaataaaaatgttgctgctgtcatgaatcaatgaaatgtcaacatctcagatagtctatacgtggttttcagatggttttgggcaaagggagcttttatgaccatagatgtcaacttcttgcaagggtgagggtggggttggggtgggatggggagtggttatggcccactgagaactaagkcactctgtcatctcatagtccattctttccaagctacctgaattgtgctccagagttctggggagtctaggttgaagaaacgaccgtgttagtggccgggtgcagtggctcatacctgtaatcccagcactttgggaggccgaggtgggtagatcacttgagcccaggagtttgagaccagcctgggcaacatagagagaccccatctcaaaatagcaataacaacatcaaagaaacgactgtgttggggctggctcagtcttccactggatatctagtgagtggacagtgcatgacacctacataaatcacctctttttttgtatcaatgacataaatctagttcagtttggaagtatatacatactgtttcagataa

SEQ ID NO: 521436 - DNA, 481 bp, Homo sapiens
tccttatttttatctctttatgacgtctagctgtctatgtatctttgccctttgaagtctgtggaaattttttcaagtagactatctgggagctggctagaggtttatattacatattgattaaactgtgccaggtcaatggcatcttctgtgcttgaacggtgttagtcctgtggtggtggtcacgacagctattggcgtatgcactgtaatcatagtctcttctggcaagagttttgagacagtgtcggctcttatcaaggttaggtaaatttgactttgacataagcattagagggcaactaaccacaggccttgttcatctcacctgcttctgtgcaccttgctttacctagtgatagtttctgactggtgtcatctggttggttaacctgtagaaasctaccacattgcgagtgacacgatccagaaagcttgtatatttttattctctttcctggaattagaaaattattattgt

SEQ ID NO: 521437 - DNA, 533 bp, Homo sapiens
acaactgagtgggacaaaaagccattgaagaatttggagcagagaagtgacctgatagggtttatttattttttaagtatcaagagaaatggtgaaagcaagaccagctttgaggctactgtgacagtccacgtcaaacaatggttaccttataatttataaagaaatgctctaaacaataggtaggctgctccaaaaagccttccctgacaatgtacctcctcctcccctccaactggactagagaccccttctccatccttcctcatcacgctggtgttattccacattataccgctgacaatctgcattgtaacgggcgctacactcccctctccctgcccccttcaggccacaagctatgggcacacaggaatcccagctcagccactcggcatctgccactgtctgatccacrgtaggtgcttagtcagggtccttctcatgcttgaactcgacttcaaagctcaaataattttatgtaaattctctataacttttaatggcaaaaaccacaatgacttttccacaag

SEQ ID NO: 521438 - DNA, 587 bp, Homo sapiens
gaataaattggtttgagtcataggaagctgggttcaaatcctgacatcatctcctccctgccagagcattttagacaggtaacttaaccctttggggcctgagaacccttgtctataaaatgtgataacatcacctgccatgtagagctggaaggattaaaagagcaaacgtgttaggaagcattagcctagcaaggggtacagatattggttctggccaggcacagtggctcacgcctgtaatcccagcactctggcraagctgagatgggtgaatcacttgaggccaggagttcgagaccagcctggccaacatggcgaaaccccgtctccactaaaaatacaaaaaattagcagggcacggtggtgcgcacctgtaatcccagttacttgggaggctgaggcaggagaatcgcttgaacccggaaggcagaggttgccatgagccaagatcgtgccactgcactgcagcctgggcgacagagcaagactctgtctcaaaagagaaaaaggaaaaaaaaagaaggaaaaacaacccaaccaactattggttcctctcttaggaatgaagacagtcccaggcaaca

SEQ ID NO: 521439 - DNA, 641 bp, Homo sapiens
gctccttgattctcaccaccctcctggggagcaggggccccttctgctctcgctggacaccagctcgtcagtgcccggccggcaggttgccctccacaagggaggccctggctcctccttgaggcctggcccagccctggaactgaggctggattgtctttgccactgcctgcctgtgtgacttaaggcaaatcacgttacctctctggggtgctgctccgcatgggggagggcctccaagggctctctgcatctaggataaaatgacagaatagtcactattcttaytaatcttaataacaatcctttgaagcgagttctattattatcaacattgtctctatgtaaatggggatcaggcaggaggggggaacgtgacgtgtccaagatgccacagctattaagtggccaagtcaggattcgcactcagatctgtttggtcccaaagcccaagcacatagtcatgagatagttggggccaggcagcagggggaggactccaagcatggagaaaacctgggtgaggggccaggtcggcactgaggaccgagcaggtgccacgtgggtgctgggttattgatttgggggttaccaggtgggttggctgacccttccctggcccctcagacttctatggggaa

SEQ ID NO: 521440 - DNA, 542 bp, Homo sapiens
ctccttgattctcaccaccctcctggggagcaggggccccttctgctctcgctggacaccagctcgtcagtgcccggccggcaggttgccctccacaagggaggccctggctcctccttgaggcctggcccagccctggaactgaggctggattgtctttgccactgcctgcctgtgtgacttaaggcaaatcacgttacctctctggggtgctgctccgcatgggggagggcctccaagggctctctgcatctaggataaaatgacagaatagtcactattcttattaatcttaataacaatcctttgaagcgagttctattattatcaacattgtctctatgtaaatggggatcaggcaggaggggggaacgtgacgtgtccaagatgccacagctattaagtggccaagtcaggattcgcactcagatctgtttggtcccaaagcccaagcacatagtcatgagatagttggggccaggcrgcagggggaggactccaagcatggagaaaacctgggtgaggggccaggtcggcactga

SEQ ID NO: 521441 - DNA, 511 bp, Homo sapiens
gttgacagccgtgaccactgtggctccagccattaaacacggagctttaacggcccccaaaatacacctggggcgcttgtcagcggctcctgctcatcacatgtgcacatgcgggccgtgcacaggcgtgcgtgcctacacgggctcagcgagcagcacagagggtagcatgggaaagcccaggaggtggtgccacagccccttggcttagggatgggatactgggggtggagagcagacctccttccatagtctgtccctcgtggcctccccacttccacgttacactttatattttcatagcacttgctcattccctgcatccttacaaaaaggttttgatgtcggtcggatgctattcagtatctgctttcctcttgttcctcggcatagcccccgaggatgcagcacacacctggcacacagcaggcacggggccatggcttgctgccctggtacatcctgttgccttggccatcagtgaaaayccctaaaccagaccctcaggctt

SEQ ID NO: 521442 - DNA, 590 bp, Homo sapiens
gtgttcattttacaagctgcaaagggggaaaaaaagggcgaagctgaactgtggacagttatgaagtctgcagagcccttacctggcttaataaaaggcagaatgaaagtattgaacataagacctgctccacgcctaagccctcgggggacccagcggaaagcggtgtgaagaatgaagccaccgacctgagcagaagctggctgggtgacttcgggccagtctgtgagccttgctgggtgcagcaccctcatttggggcccagagtctaacggtgcgagctttggaatcagacaaacttgaccaccaggctctgccacttctcagtgacccggagccaggcccttaagttctctggggctctatttcctcatccaaaaaatgtgcagaacgcctagctcatgagtggctggggcgaccaagaggatgacagaccgtgyttcgccaccaccaggcacgtgctcaatgctctttcgtgcagcaaacgtgtattgggcaccgcactggtctaggcactgggaacccaaccatgaacagtgaacaagaccggccaggtccctgcccctgtggggctctcagagacaggccaa

SEQ ID NO: 521443 - DNA, 628 bp, Homo sapiens
gtggcttgtgcacaacaagagataaagacaacctagaatatctatttaaatcatataacatttgtaactacttatatgtagcctgggggacctttcctgccatattaggagatgattaaaagaagcaaatttcactcatctgaccaggagattgacctaagtgaactaggttccagtgtcccatatcatatacttagccagtgctaatgtgtgtttgtgcatggcaatgttgaaagaatgtgaaacattttcacattatgggaactagaagcacagagagagataaacttcctccagctgaagaacagagagtaatcttttctgttaaacagtgagaagcactcagtctcccatacgatccagcctgcttattttgaggaatggaatgaacaaatgtttttctcattctactgcatttatttcaccagcaggcaacaacatctctgctactacccttctgaatgccatgctcagatggaagtttttgcctcactgtacagtttaaaaatatcttacaattagaagyagaaataaactaaaaacaatgttgagcagagaaatacttgacagaatggaatccaacaaatatatttggtagcttacattttgctagttatgtggaagtcaa

SEQ ID NO: 521444 - DNA, 558 bp, Homo sapiens
tttctgagcctgattctccagtcttctgattcattttgaaaaagactctcatcattccaggaaagcacttttgcagctgaagttagcagtagtttgtgtattgattgggtttgtttgcatgcaacagaaaactcccaaacaactgtggcttaaacaagatagttgattttctctttgtgaaaaatgtacagaactcagcagtccaggtcccaccaggtyttcagagacccagtatccttgtgtcttggtgctctggctccgctccacgtggcacattgcctcagggtctaaaatagctgcccaagctccagccattgtgttcacattctggccaggagagaagaggaaaggttaaagaaaaacatgcccctccctttttaggaaaccacttggaagtccctcctaatcctttgcttatatctcatagctagaacttaatcacaagaccacgcttaggtacaaggaaggcaggaatgagcagtccttagctgagcggttaggtcctcaactaaaaataagagttatgttgctaaagaggaaagaaagaatgatgctgaa

SEQ ID NO: 521445 - DNA, 558 bp, Homo sapiens
tttctgagcctgattctccagtcttctgattcattttgaaaaagactctcatcattccaggaaagcacttttgcagctgaagttagcagtagtttgtgtattgattgggtttgtttgcatgcaacagaaaactcccaaacaactgtggcttaaacaagatagttgattttctctttgtgaaaaatgtacagaactcagcagtccaggtcccaccaggtcttcagagacccagtatccttgtgtcttggtgctctggctccgctccacgtggcacattgcctcagggtctaaaatagctgcccaagctccagccattgtgttcacattctggccaggagagaagaggaaaggktaaagaaaaacatgcccctccctttttaggaaaccacttggaagtccctcctaatcctttgcttatatctcatagctagaacttaatcacaagaccacgcttaggtacaaggaaggcaggaatgagcagtccttagctgagcggttaggtcctcaactaaaaataagagttatgttgctaaagaggaaagaaagaatgatgctgaa

SEQ ID NO: 521446 - DNA, 558 bp, Homo sapiens
tttctgagcctgattctccagtcttctgattcattttgaaaaagactctcatcattccaggaaagcacttttgcagctgaagttagcagtagtttgtgtattgattgggtttgtttgcatgcaacagaaaactcccaaacaactgtggcttaaacaagatagttgattttctctttgtgaaaaatgtacagaactcagcagtccaggtcccaccaggtcttcagagacccagtatccttgtgtcttggtgctctggctccgctccacgtggcacattgcctcagggtctaaaatagctgcccaagctccagccattgtgttcacattctggccaggagagaagaggaaaggttaaagaaaaacatgcccctccctttttaggaaaccacttggaagtccctcctaatcctttgcttayatctcatagctagaacttaatcacaagaccacgcttaggtacaaggaaggcaggaatgagcagtccttagctgagcggttaggtcctcaactaaaaataagagttatgttgctaaagaggaaagaaagaatgatgctgaa

SEQ ID NO: 521447 - DNA, 558 bp, Homo sapiens
tttctgagcctgattctccagtcttctgattcattttgaaaaagactctcatcattccaggaaagcacttttgcagctgaagttagcagtagtttgtgtattgattgggtttgtttgcatgcaacagaaaactcccaaacaactgtggcttaaacaagatagttgattttctctttgtgaaaaatgtacagaactcagcagtccaggtcccaccaggtcttcagagacccagtatccttgtgtcttggtgctctggctccgctccacgtggcacattgcctcagggtctaaaatagctgcccaagctccagccattgtgttcacattctggccaggagagaagaggaaaggttaaagaaaaacatgcccctccctttttaggaaaccacttggaagtccctcctaatcctttgcttatatctcatagctagaacttaatcacaagaccacgcttaggtacaaggaaggcaggaatgagyagtccttagctgagcggttaggtcctcaactaaaaataagagttatgttgctaaagaggaaagaaagaatgatgctgaa

SEQ ID NO: 521448 - DNA, 487 bp, Homo sapiens
ctagaggcctccctccctgtccgtcttcccgccgctcattgcgttagcaaggaacaaggtggggacatctacctgggggatagtgggagatagggggcagtatctacaagtcacacacagccctgtaggtcccagttaggactttgagctttggtgcacctccctggagaatatagactctataagaaaaataattacgtttgtcttactattgtatccccagtgcccagaacagggtctgtcacaaagaaggatgagaaagcagaaccagaaagatccacaggatacaggaactctcctttctcctggccttgtctcactgcacagatgaggggggaagtcatgcttaaaaccctttctgatttgaagagtaatgtgccccttaaggagtctggagaggggaggatactttctgtccttttcatactttagttaaagtgcgaaagtmgtaatccatgtccagcctgctttgtggcatcagtattgc

SEQ ID NO: 521449 - DNA, 666 bp, Homo sapiens
tttccgcctacctggagaagcccaaaagattgaccgattaatggagaagtttgccgcaagatacatagaatgcaaccaagggtgagcgccgattttgagtcccttccagatcatctgtttgcctgcctcagaacgctaattctaatttggttggggtttaatctttgtatatctgtgccaagcaactgaagcttttgtttaccgtgtgccaggcactgtgctaagggattatttcacataagacctcacagcaacctgtttatgtccctrttctacagacaaaaagattgaggaccagagaggttaacttgcccaagatcacacagctaaagcccatgctgttagcaactataaaagagtagtttcataagttgagaggagacaattgggcacctcttccctaatcaaaaacagttcccctgatttaatatatggggtagatctcaaggattttggtttttctttaattgcatactgatgagcaggttacagaaatagctacataactaataaaaaccaccaaagtacatgattttatctggggaccttttttgatgggcggttcgtgattttgtaagaagtggaaataggaaggggaacaaaccattattaaatacctcctgtgtgtgggccatgccatgggttttacatgcatttaatttaatt

SEQ ID NO: 521450 - DNA, 570 bp, Homo sapiens
tgtgtgactgtaggtgagttatttcacctctctgggcttcagtttcctcatccgtaaatgaggatgatgatattataaaacccttaccccatgaggttattcattcattaaataaataatattataatttatatagttataattcattataatgaatattattcttattcattcattgttcatctacgcagagtgctttgaacttgcctggcatgtacggtaagctattattcattcaacagtataaactggccaggtgaggtgactcaagcctgtaatcccagcagtttgggaggctgaggcatgtggatcacctgagctcaggagttggagaccagcctggccagcatggtgaaactccatctctactaaaaatacaaaaattagcygggcgtagtggcgggcgtctgtaatcccagctactcaggaggctgaggtaggagaattgcttgaacctgggaggcagagattgcagtgagccaagattgcgccactgcactccagcctggatgacacagcgagactctgacacacacacacaaaaaataaagtttaaacttcccaaatcct

SEQ ID NO: 521451 - DNA, 558 bp, Homo sapiens
aagcgcggtcctggcagtagctaatgtttaaggagcactcgctctgccagttttgccaccgttttcatggactagctccttcactcttcacagcatgcctgtaaggtaaatgtttttatcaacggtgttgcttgaaagcagaaactgagatgacggaggttaagtaacctgcccagcgtcacacagcccaggcagaagggccacagtggagtcccaggctgggtgactgcaccacctctgcccttcagggccacacttgrtggcctctcagatgtgagtgtgttgattgcaggagtgaagcagcaagctctggtcaggtcccagcctttgtacccagccctgcacggagggaggaggggagcaggagggctgactcaggtgagacagggatggggttggccgccagagagcatctgttccccatccaggttaaggcccaggaaatgccagggctttgtcaggctgctctgctcacccatagctgaggggagagcacccaaggcgtcagccagtgaggagcccacagccagcggcatgccggtctccttccccaaccca

SEQ ID NO: 521452 - DNA, 558 bp, Homo sapiens
aagcgcggtcctggcagtagctaatgtttaaggagcactcgctctgccagttttgccaccgttttcatggactagctccttcactcttcacagcatgcctgtaaggtaaatgtttttatcaacggtgttgcttgaaagcagaaactgagatgacggaggttaagtaacctgcccagcgtcacacagcccaggcagaagggccacagtggagtcccaggctgggtgactgcaccacctctgcccttcagggccacacttggtggcctctcagatgtgagtgtgttgattgcaggagtgaagcagcaagctctggtcaggtcccagcctttgtacccagccctgcacggagggaggaggggagcaggagggctgactcaggtgagacagggatggggttggccrccagagagcatctgttccccatccaggttaaggcccaggaaatgccagggctttgtcaggctgctctgctcacccatagctgaggggagagcacccaaggcgtcagccagtgaggagcccacagccagcggcatgccggtctccttccccaaccca

SEQ ID NO: 521453 - DNA, 594 bp, Homo sapiens
accttgcaactaaactgtgggaaaatgtgtaagatcttaacacagtggtagaaactaacatgtatgcagtagccactgtgcacccgacactgttctcggtgctctcatgcagcatctcgcttctcctcacctcatctggaggtgggttcagttatcaggtccatttatcagtcaggcctctggggttcaygagggtcatgcccctcactcaaggtcacacactgggaagcggttggatccaggatccaggcccaggcagtcagattccagagcctgcaccctgaaccagtaccgcaggggctggcacccccgcacattttttgccccatcaacatattatcatgtcactccgccagcatcatgaagtgcactcatgatatgtttgccccatcagcgtgtcacgagggcatttcatgatgcaggcggggttggcaggtgtgcatcgtgtaggctccacatgggacatggcatcccttatgactcttggctgcaaagtgccagaaacccagctccactcacttaatctgaaaagtgggtgtatttgttcgccagggctgctgtaacaaatttcccccagttactggcttcaaacaa

SEQ ID NO: 521454 - DNA, 614 bp, Homo sapiens
acacaggcattctcatatgtgtacacactcacacacatgcacatgcatatgtacacatgcccatgcaaatatgcatactcatacatacacagacacactcatagacacatgctcacacacatagacacactcatacatacactcatacacatgcccacacactcatgcatacacacgctcacacacagatatacgcttacatatacacacatgcccctgcatacatacatatgctcttatactgacacactcttgcacacacactgacacacgcagacaccctcatacatatactcttgcacacacatactacacacagtcatacagacacttacatgtacactcacacacatgctcactcctatatgcactctcccacacccacacacgcccacacactcacagacacagtgagtcaggtgtatttaatatgcagttcgtgcctgtgcctccccccagatccccatgtgacctgctcatcagaggaggcccagagtcttggggggaaccctagtgtcctcccacctgatctctatgacaacccatcctgayaccggtttgtaagtgtgaaagcttcagggcccacacgacctcccacgttaattcatgcagat

SEQ ID NO: 521455 - DNA, 476 bp, Homo sapiens
ctgttcactactcaatgctcccatgttatgtgaggcaacraggcacaaaattggcatctgctgtggggtgtgtgtgtgtgtgtgtgtttgtgtgtatgtgtatagtgagcttggcttgaggtttggggcaaaatagcgtgaaagatacagccaatagtaattggattacagttgttgattgctttcaaaggatttaacatggaatattaatcccaaaggtatattacatctggtgaattataaagcatctcacagatagaatgttgggtaaaaagagaaacaaacacacttgcaaatttgatgaaccctcccccgcagtcctgaaattgctggtggatggcagattgcagtctgggtatgagataattgtgagaatctgaatgtgtcccccaaagggctccccagagactggcactcatcaggccgtggaaagcccaaggcctcacacaacaggttctgggctctgccttccttga

SEQ ID NO: 521456 - DNA, 518 bp, Homo sapiens
gactgtgatgagtgtggatgggtctccctccaccacttktgaggttctgcctgcaaatcttaccagtctcaagaatttcaggccgtccttgtcctgggcgatgacaataagttgaacgatcatgactcacattcacgtgatgctatgttacatgaatatgtggatggatggactcaggaaatgtattccttacagttactctatgatgactatcgtcattctacagatgaggaaacaggcctagacaggttaaaaaacttgctcaaggtcacgtaacaggtaagtggttggcgtgcctgtgtggcagtgccaccgggtggtcatgagcacagcctcaggggccatctcatgccccctgctcctgtggcttcctgtgttcagtgcacaggttggatggggccgccttggcggtttcttccagcatcttccaggggcagcgcctcccgctcatcctgcaggtgtttgttgaacaatgcttgtgccaggcatggttccaggtactagggatgcagatgcag

SEQ ID NO: 521457 - DNA, 501 bp, Homo sapiens
ttttgtgcctggtccttaggctcctggtttacatctatgcaacggcttcctataaccagcccctccaactgtgggccaggggctttctctggctgctggggcatgctcagcccatgtagggggaagggtcaggcagttatgactctaggaaccttccacaaccagcgacagacaggagtcagtgcacaaacagcccakctcttcaagaggcccccagtgggaggaagccctagtggcccagatcagaacctccttgggtcctcggtctgtactgacttcctttcttctcctcagatacttgctctgtactgacttctttccttctcctcagatactctctactgacttctttccttctcttcagatactcactctgtactgacttccttccttcttctcgggtcttcactctgtactgacttccttccttctcctcagatactcactctctactgacttccttctcctcagatactcactctgtactgacttccttccttc

SEQ ID NO: 521458 - DNA, 549 bp, Homo sapiens
tgtattagctttctgtggctgctgtaactaattgctacaaacttagtggtctaaaagaacacatattgacactcttacagctctggaggtcagaagtcagaaatgagttttatggggctcacatcgaggtgtcagcagtggctcctcctggatctccgtggagaatgtgctccttatctcttccagcttccaggggctgccttccttgtcttcattgcgccaatctctgcttctctcaccacatcgtcttctcctctaacagaaccccttgtgattacgttgaacccacctggattatcctgaatccgggataatctccccagctcaagatgcttaatttaatcacatctgcagagcccccttctagcaagtaaggtaacatcttggcaagttccggggattaggatgtggacatctttggagggtcattactgagccctccacaatgacaattgacatgttccagggattaggatgtggagacctttggagggttgttactgagcccaccacactgacgataytgtgctgctaggccactgagactgt

SEQ ID NO: 521459 - DNA, 612 bp, Homo sapiens
aagggtgagagaatggaattgggtaaagactcctagaatcttccatcgagaaagtgctctgcggtgggagaaagctggtcttgccgactctgcctgcaacgctctcagtggccagtcatgtccctcctctgcctgcaggttcctcactagagcgggggtggcctgagatgagccctcaggattcaccaagctctacaccctaattgtctagctctgtcctaatggataggggagctgcctggggtgactgtccaggaactgggttgttggagatgggcagatccgaaggtctgaggctcgttctaggagagcatgttcaccgaggccaagcttggtgactggcttctgcgatggttcccatggccagaaaattgcaaaaaggtcctctgggctgagaagaaaaacacaaatgcaaccttagctcttaccctgaaggaacactggacaaggagtccagccgctgggttcagataccctgggccaggcagcttgtgtctgtctccctgagttctccatggaggcaacactttcagaagagtgtaccgttcattcattcatctgctctttacagagcagctcctacgtgycaggcacgctctaggcaccagcgat

SEQ ID NO: 521460 - DNA, 450 bp, Homo sapiens
tgtgttactgtgagtagaatttctttgcattccaacatctggcttctgaaatgacaaaatgcaaatagcttctcccaggtgtttcctctccccagatgccatcttcccctcggtgacctcccactctcttattccagactccagtccctgaccccaccaggaaaaggcagaggcacctgatttccccgcacctgtggagctgcagggggtgtctgggtctccaactccagtggggaatgatgttcaacttcctgttacactgggatccacctgygggtgagaatgaagggcttggagccttgaccctggatggagacatgtcttccctttcacaggagatcataaaaccagagctgacagcaaagatggtccttcctgagagtaggtattagtcgaattcaagcaaacatcccgtgctgtggagacggatccgtcccagctgggctggag

SEQ ID NO: 521461 - DNA, 450 bp, Homo sapiens
tgtgttactgtgagtagaatttctttgcattccaacatctggcttctgaaatgacaaaatgcaaatagcttctcccaggtgtttcctctccccagatgccatcttcccctcggtgacctcccactctcttattccagactccagtccctgaccccaccaggaaaaggcagaggcacctgatttccccgcacctgtggagctgcagggggtgtctgggtctccaactccagtggggaatgatgttcaacttcctgttacactgggatccacctgtgggtgagaatgaagggcttggagccttgaccctggatggagacatgtcttccctttcacaggagatcataaaaccagagctgacagcaaagatggtccttcctgagrgtaggtattagtcgaattcaagcaaacatcccgtgctgtggagacggatccgtcccagctgggctggag

SEQ ID NO: 521462 - DNA, 412 bp, Homo sapiens
ggtggctcgaggcctgaatgccgggcactcggagcggtcagtgtccccgtgggagcagggctgctcgcagccaggtgattggggtccttggatggtcagcccctgtgtgcgtgtgagggggtggccctctcctctgtctcttctgaaggcagcagtaaaggagggaggccaaagagctcagtgtcagacgagcctgggtgcaggtcccactgcctgccaggccagtgcctctragcctcagtttcctcatctgtatagtggggttaatcccaaccatgtatactgtctgcctgccatgtgccaagcccttctaacacacctttgattgcttgagggcagggactttattatccacctttagagttgagaaagaagaggcacagaaaggttaaaccgcttaccgggggtcaca

SEQ ID NO: 521463 - DNA, 412 bp, Homo sapiens
ggtggctcgaggcctgaatgccgggcactcggagcggtcagtgtccccgtgggagcagggctgctcgcagccaggtgattggggtccttggatggtcagcccctgtgtgcgtgtgagggggtggccctctcctctgtctcttctgaaggcagcagtaaaggagggaggccaaagagctcagtgtcagacgagcctgggtgcaggtcccactgcctgccaggccagtgcctctgagcctcagtttcctcatctgtatagtggggttaatcccaaccatgtatactgtctgcctgccatgtgccaagcccttctaacacayctttgattgcttgagggcagggactttattatccacctttagagttgagaaagaagaggcacagaaaggttaaaccgcttaccgggggtcaca

SEQ ID NO: 521464 - DNA, 412 bp, Homo sapiens
ggtggctcgaggcctgaatgccgggcactcggagcggtcagtgtccccgtgggagcagggctgctcgcagccaggtgattggggtccttggatggtcagcccctgtgtgcgtgtgagggggtggccctctcctctgtctcttctgaaggcagcagtaaaggagggaggccaaagagctcagtgtcagacgagcctgggtgcaggtcccactgcctgccaggccagtgcctctgagcctcagtttcctcatctgtatagtggggttaatcccaaccatgtatactgtctgcctgccatgtgccaagcccttctaacacacctttgattgcytgagggcagggactttattatccacctttagagttgagaaagaagaggcacagaaaggttaaaccgcttaccgggggtcaca

SEQ ID NO: 521465 - DNA, 562 bp, Homo sapiens
agcccctgtgtgcgtgtgagggggtggccctctcctctgtctcttctgaaggcagcagtaaaggagggaggccaaagagctcagtgtcagacgagcctgggtgcaggtcccactgcctgccaggccagtgcctctgagcctcagtttcctcatctgtatagtggggttaatcccaaccatgtatactgtctgcctgccatgtgccaagcccttctaacacacctttgattgcttgagggcagggactttattatccacctttagagttgagaaagaagaggcacagaaaggttaaaccgcttaccgggggtcacacagctgctatggcagagtaaagactccagactcaaatggagcactaagccccgccctgggtgccaacaggtgctccaggaatgtccagtgccatttatcaccctcatcacctgctgggagcgctcctcccatcgtgcaaaccccatgagcgtgaagtgaggggacacgtgcaggatcgagtgtactggcgtgtaacktaagtaaagtaataaccacaggatgatattcacaacccatattagtgcta

SEQ ID NO: 521466 - DNA, 581 bp, Homo sapiens
gttcactactcaatgctcccatgttatgtgaggcagcgaggcacaaaattggcatctcttgtggagtatgtgtgtgtctgtgtgtgtatgtggtgagcttggcacacaggtaggatgaggtttggggcaaaagagcatgaaagatacagccaatagtaattggattacagttgttgattgctttcaaaggacttaacatagaatattcatcccaaagatatattacatctggtgaattctagagcatctcacagatagaatgggggtaaaaggagaaacaacacacttgcaaatttgatgaaatttcccacacggtactgaaatcactggtggaatgggggattgcagtccgggtatgaggcattcgagagaatctgaatgtgtcccccaaagtgctccccagagactagcactgatcaggccgtggaaagcccaaggccccacacaacaggttctgggctctgccttccttgaacatggcgggtggaggggctggggagagaggcagaggctgagaatggctgaagacaaatggtcggattcggttcttttatcygtagcagggactcaaacccagggtg

SEQ ID NO: 521467 - DNA, 506 bp, Homo sapiens
aataaccacactttttagagtcagcagcgggtcttcctggtgcccctggggtgagtctttgtcactgatgactctggggcagtgtggcccctgtgagtgtgcaatcctgttggggtagctggcaactgccctcaaaccgtctcggacstgtgcgctgggcttcgcatcctgccccgtcatgccttccccacaggcccagcctctgacagacatcctgggcctgcctgctttcctggccactcccgccttttcctgcctggcgtcccgcaggcccagcacaggccagccctgtcctgagtgggccctgggccctgccgtcctgcaggagtgggagctgcccagggacggtgagtagcacgagagctggggtttcttacagtgctctcctggttctggatgttacagtggatgctcttgaggaatgacttagtttttatgaattacttccttagattgtaggggagattataattggacacccagagtaggtacacttcacagcactc

SEQ ID NO: 521468 - DNA, 537 bp, Homo sapiens
ctggaagctaacttcttttagagttgtacatactattcctatgattaagtcttgagcctgaactttcggttttgctgctgttaagttgcagataggagaggtcctttatacatcccatggagaaacactttcacagttagccttaatttaataatatatcatcctcagtctttaattatctctctccaaaacatcaatttcctctggcaacgaccatccaattctattacgttataattaccattcccctcatgtttctcaagcacctaaaacttcatgtctgctagtgcatattcttccaccagtttaccatgccagttcaggtttggcaaaagttttgacaacygcactgctacttgtgccagtagttgtttgtgctccacccatcttctcatcatcaaccagacggtgaataattcagcttcaaaaatctcctcttagtatcttctttctcagatcatatttggtaccaataattactggttggattctctagacagtagactctaagatggatatttgcattcagaaagttta

SEQ ID NO: 521469 - DNA, 558 bp, Homo sapiens
tgctatacagtaggtgctggttaaatcagctccaatttgtttgcattcctctaagtggagcatctagctgttgggcaaaataaaacattaaattatcttgtgaatttgctgtaaatatttgaaaatgattgctattggaatacataaacagtttttwaagttcccttatgaaatgagctgatgcattttgcttactaattaaatatctatgtttacataatgtcctacagtctcccatatatggaaaaatgaatatagcttagtgactgcctgctctaaaggacactgttcaagctttttagcttgccattcaatatcctgccaaagctgtcctctacttatcttttaggcatatctctttcataaatattctgcttctgctgaattattttacttataatttcttgaatatatttcttactttcctcacctctaatatttatgtctttttccctcttaaaatctatagaatgaacatttttctatcacagattgagctttctctttttacccttctcccaatccaacctcctcttgaattgctggtcactgtaactc

SEQ ID NO: 521470 - DNA, 558 bp, Homo sapiens
tgctatacagtaggtgctggttaaatcagctccaatttgtttgcattcctctaagtggagcatctagctgttgggcaaaataaaacattaaattatcttgtgaatttgctgtaaatatttgaaaatgattgctattggaatacataaacagttttttaagttcccttatgaaatgagctgatgcattttgcttactaattaaatatctatgtttacataatgtcctacagtctcccatatatggaaaaatgaatatagcttagtgactgcctgctctaaaggacactgttcaagctttttagcttgccattcaatatcctgccaaagctgtcctctacttatctyttaggcatatctctttcataaatattctgcttctgctgaattattttacttataatttcttgaatatatttcttactttcctcacctctaatatttatgtctttttccctcttaaaatctatagaatgaacatttttctatcacagattgagctttctctttttacccttctcccaatccaacctcctcttgaattgctggtcactgtaactc

SEQ ID NO: 521471 - DNA, 716 bp, Homo sapiens
catgggtatattgcacccagctactgagcatagtacccattaggtagtttttcaactcaccttcctctctattcctccctctctagtagtctgccatacccagtgtttccatgtttatgtccaygtgagcttagtgtttagctcccaattataagtgagaacatgcagtattctagaaagcattattcaggaacaatttagcacatcaaccatataggagagagctaatagaatcaggtcatatcaagtatgtgcttgtatacatgtgcatatataaattatatacttgaacatatataacttctgtcttgtcatggccatatgcaaaaagtaaagtactagaaaaaatctttaaaatatcctgaaaatttcctatgtaattttttttcaaagtttgctacagtgaaagcatatatgttcagtatctctacaaactctctcatttgttctcctttatgaggctaatgaggacactttttctagatcctcagaattgcatattatttgtcactttttagcactgaacatggaaagctcagataacaggtctttttataaaactgtggttgaaagaagatcataaagtctaagatttatggcaatctttttggaagggaaagtggtttgttagaataaatatagaccttatggtcatttcccaaccagctcaatattgctatctatgtggcactgttatttaaactcctcatgtcaca

SEQ ID NO: 521472 - DNA, 516 bp, Homo sapiens
gcctggaaatcctttctcttaatttttccattcccaggccgattagctccccagaataaggggtatctggattccccaacctacccctccctgacacctccttcctacctggttccagcccaatatctgagacccccacattccctttttagtctcactcctagaatccttctaccttcacctctcattgccagattcaactgagggtgtagcaggagggtcagagggaggcatgggggcrggaccagaacccccatctgtggaacatcttttatggaagccagcccctctccccaccccttgggacctatacagtccctaatgagcaaagtgtcaaagttggctacaacacaaaatacccaggaagctgagtcacagtttgggaagatgcccccatccctgccagccctccaactgtggggagggtgccaagagggtgaggccatatctctctccaaacacacactacagagaaccaccccagacatagtggcagggggaatggtgaaggggaga

SEQ ID NO: 521473 - DNA, 619 bp, Homo sapiens
tctccatcaggttgtctcactttgtgtatttttaagatctcagtaacataagctaaataattatccctgtgcacaagaaaaacacagttaaagaaatatccttttyacttgctatattactaaatttgaaaattcaagtttttcattaaaaaaaggattcttaaagaaatccaagctttgttagatgtctttgaagcatatcatattgtaaatgtattatggaataaagactataactgaaggttgtattttattacacacacacacacacacctctaggatttaatctaggtgggactttccataggcccacctcatttttctcatcagtcatcttagtattctgtttcaaaggtaatcctttaaaatgccataggatagaagttagttaaaattaattatgggactaaaggtaatgatgaagcttatgtttatcatttaaaagaacatgaaatgttatgtagtgtttgagtgcttgcttgcttgtttctcaatgtatgatctaaggaaaagaggatatggcaggtggtcagcagcctgggctatgttttctttttttttttcttttctttttaaaactttttttcagtaataagctttcctcatgttctttcttttt

SEQ ID NO: 521474 - DNA, 452 bp, Homo sapiens
tgttatctctggtgctaaactaacattacagctccaaagtgacctgtgctggatccagcttataccagcttgcaaaagtcaattgttaaatgttcaggaattttgggagccactgttaaaaacaaccattattaaaacttaaattgtaactaaatttacaaaataagttccattgaattcaaaggtaatgacaactaaaaacatatcacttttcattattcttctacatatcactactgttacgtaggcctttgagttattgacatctattgtatcatggttgaaataatttagaacaatgtactgctgtgtatgtcttcaactccatgttctgtgaygtcatgttgtagcttaccatggtggtaaatgctacaaatcagggctctttgtaggaggttgagagggagttgttaaagtaatcaactactattgacctcagaaatccaatgatt

SEQ ID NO: 521475 - DNA, 522 bp, Homo sapiens
atcatggtgtcactgcactccagcctgggcaacagcaagaccccatttctaaaataaaattttaaaaaattaaaagttgtggtctggcaggtgygtaatatgtcaccagcatggaaaccaaggaacctgggttttggtcattaactatctctgtcaggtagccacccacaacataagagagccaccttggaagacatcatctgagtagaatgggatagatttattttcccgtcctcctccaaaaatcttagaactgaaatcaagtcggaagtggggctctggtgggtactgatccttctgactgcaataacaaaagcatcacaaaatccaggttatccacactcctttcctcacaatccctgatttggcaatgatcagttgaggcctctatgtgctttctctcaggaagacccctttgggtctgaagtctcagggtgagccaggacctgggcatggggaaacacagcaaggagctggctctggttctgacgttaggaagaaagttgatggtgagaaatattt

SEQ ID NO: 521476 - DNA, 669 bp, Homo sapiens
gtaaagaatcctaaagatgctatgagaaaacaagaattttgagcatgcaatgaaggaggaaagccacagattcagcagcagctttatgacttgttgcaaaaagaggkcctctattttttttgcttgctttgttatgcagtgtgtgtgtgtgtgtgtgtgtgtgtgtgtgtgtgtgtgtaacttttctttcttattgtacaaatccttgttggtggtcggtttatctaacatccataggttgcacgacatcaagacaggaaagtgatctggccagaaccaaattttcgtcatttgaaaattgtgaaactgaagttaaataaacactctaggcagttggaaaaggcaagatagatatgtttttattttagataaaatagttctattgatggggcattttttatgttttttatggatgttctgaataggtatggatgaggtctgggctacagggcatgtccattgttttttctcttcagtattacctctggtattggcaacattacttcgctattttccattggggagaaactcctctcctcttgcaagatgtctactgatatctcagtacagtgcccttccctctcctaaacaaacagaacacctaagccccaggtggagcaatcagacatggaacactttgagcatttgtcatataatgtcacaagctgg

SEQ ID NO: 521477 - DNA, 625 bp, Homo sapiens
ctggtaactggtgtctggccttggttgtcttcaatataattgactattctgctgcttcttttttttttttttttttttttttttttgagacagagtctcactctgtcacccatgctggagtgcagtggtaggatctcagctcactgcaacctccgtctcctgggttcaagtgattctcctgcctcagcctccctagtaactgggattacaggcacgcactaccacgcccagctaatttttgyattctagtagagacggggttttgccatgttggccaggctggtcttaaactcctgacctcaagcaatccacctgactcagcctcccaaagtgttgggattacaggcgtgagccaccgcacccagcctgcttcttaaacccagggtcagagtgggacacattaatatcgtaacacaactgctctgttactttatgaattccagtggttttctttctagccttgcaactaacttgaaactttaatgacaagctttttcagatcttgttccaccaatatgttttttgacaaggcacaggaacttttttcaaatcctctccgaaagaccactgccaataattgtgtcatacttaagttaccaggactaatatagccacattggtgtga

SEQ ID NO: 521478 - DNA, 625 bp, Homo sapiens
ctggtaactggtgtctggccttggttgtcttcaatataattgactattctgctgcttcttttttttttttttttttttttttttttgagacagagtctcactctgtcacccatgctggagtgcagtggtaggatctcagctcactgcaacctccgtctcctgggttcaagtgattctcctgcctcagcctccctagtaactgggattacaggcacgcactaccacgcccagctaatttttgcattctagtagagayggggttttgccatgttggccaggctggtcttaaactcctgacctcaagcaatccacctgactcagcctcccaaagtgttgggattacaggcgtgagccaccgcacccagcctgcttcttaaacccagggtcagagtgggacacattaatatcgtaacacaactgctctgttactttatgaattccagtggttttctttctagccttgcaactaacttgaaactttaatgacaagctttttcagatcttgttccaccaatatgttttttgacaaggcacaggaacttttttcaaatcctctccgaaagaccactgccaataattgtgtcatacttaagttaccaggactaatatagccacattggtgtga

SEQ ID NO: 521479 - DNA, 630 bp, Homo sapiens
tcctgatttttggaaatacaaccgttacatctaaagactccttagttccataagagacctctttagatgcaacagcagagttcagattcaagggcctaagaaacttgcagttttctaccagccctgaatggtgaagaatatgcattttaagtctgtaaaataagcagattttgcagagtattgctccaatgttgtgaacatttcatcaaataattgagccaagtgtcagaaaaccttcggcatgtcaatgattgcttcactgtatgaaaaagggtgaaaaccaactagggcaaccatataagtgttccactctctaagactgctacccagaactctctcaggtcagggtggtccatacacagacttgatccaaatatactcagaacaggtagcattgagttgaagcattgtagacaccaggaaaaatactctgagaytttaggtggctttgtgctaacttatagttcaataggaccatgtgaccaagctctcagaatcattcattttggcaaatccaggtagtttgccaggattacatcatgatacctcagtgaatggtgcaaataggcaggcatagtgaaagagaactcccattttatatcttttgtaaatcagatcaaaaagaaatat

SEQ ID NO: 521480 - DNA, 653 bp, Homo sapiens
aaaacatttccagacattggtttaaacaaatattttatggctaagacctcaaaagcacagacaactaaaacaaaaatagataaattgaactatatgcaactaagagccttctgaacatcaaacgaaacagttgacagagtgaagagacaayatgttaaatgggagaaaatatctgcaaactattcatctgagaagggactaacatctagaatatacaataatatacaaacaactcaataataacaaggcaaaacaaatatttcattaaaatgtggaaaaatgacatgaatagacaattctcaaaagaagacctaaaaatgaacagcagatatatgaaaaaatgctcactatcactaatcatcagggaaatgcaaatcaaaaccacgataaggtatcattttaccccaattagaatggctattattaaaaagacaaaaaataaaacagctttctctgccatgcctgcacctctctcaaccatgctgctcctcttcctccttctccatactcaagccccactcatggaagtgctcaaaagttatctggagttgcctcaggcacatctccctgcagataacctcatgcagccttttctctcctctttgtctggccaggctgggctacaagttgagtggagggtaatcctacatgca

SEQ ID NO: 521481 - DNA, 653 bp, Homo sapiens
aaaacatttccagacattggtttaaacaaatattttatggctaagacctcaaaagcacagacaactaaaacaaaaatagataaattgaactatatgcaactaagagccttctgaacatcaaacgaaacagttgacagagtgaagagacaacatgttaaatgggagaaaatatctgcaaactattcatctgagaagggactaacatctagaatatacaataatatacaaacaactcaataataacaaggcaaaacaaatatttcattaaaatgtggaaaaatgacatgaatagacaattctcaaaagaagacckaaaaatgaacagcagatatatgaaaaaatgctcactatcactaatcatcagggaaatgcaaatcaaaaccacgataaggtatcattttaccccaattagaatggctattattaaaaagacaaaaaataaaacagctttctctgccatgcctgcacctctctcaaccatgctgctcctcttcctccttctccatactcaagccccactcatggaagtgctcaaaagttatctggagttgcctcaggcacatctccctgcagataacctcatgcagccttttctctcctctttgtctggccaggctgggctacaagttgagtggagggtaatcctacatgca

SEQ ID NO: 521482 - DNA, 636 bp, Homo sapiens
tggctatgaatgatactgaataaggaaaaattatatagtgaaagaagggagcatagaacagaggctcatggaacttgaacatttaatgtctagatgggtaaggatgaatgttctttcaaggtggctgagaaggaggggccagagagggaagagaaaaaccaaaggaatatgggcccctaacctcttaatgcttggttttgatggtatgaaggtgtttcaagtaaagaggatgtttctgataaaaagttgactccaatttcaaatgtttctgatggattgtgtgagatgaggattgaaaactgccctttgratttagtgatatggaagtcgatggtgattagatagagaggttttaatttaagaagccagaaaggagtcagttgagaggtgagaggtgacataattagacaatgaatttagactactttttcaagaaattttaataccaagggaaagggacagataatttgggagctggagagggttgtgtgtgtgtatgcatgcatgtgtgctaataggaagcttctcataatttcacctgtccccatgaaaagaaactgttgactatacataagagagctatctaaggttaactaagaattctttctctgatccatttcagaggctttgagacaa

SEQ ID NO: 521483 - DNA, 636 bp, Homo sapiens
tggctatgaatgatactgaataaggaaaaattatatagtgaaagaagggagcatagaacagaggctcatggaacttgaacatttaatgtctagatgggtaaggatgaatgttctttcaaggtggctgagaaggaggggccagagagggaagagaaaaaccaaaggaatatgggcccctaacctcttaatgcttggttttgatggtatgaaggtgtttcaagtaaagaggatgtttctgataaaaagttgactccaatttcaaatgtttctgatggattgtgtgagatgaggattgaaaactgccctttggatttagtgatatggaagtcgatggtgattagatagagaggttttaatttaagaagccagaaaggagtcagttgagaggtgagaggtgacataattagacaatgaatttagactactttttcaagaaattttaataccaagggaaagggacagataatttgggagctggagagggttgtgtrtgtgtatgcatgcatgtgtgctaataggaagcttctcataatttcacctgtccccatgaaaagaaactgttgactatacataagagagctatctaaggttaactaagaattctttctctgatccatttcagaggctttgagacaa

SEQ ID NO: 521484 - DNA, 313 bp, Homo sapiens
tgagcagttgaaagctgagccaatgctcaaagctgggccgactggaattcttccctgggatttctcaaactggagctgggacatgttcagctcttatctgaaggcaaagccatgagacatgagaaagtaagggggctgcggctagcagcacatcacctagcacgtgggggagagggtctgagggactcaggtcagtaggcacaggagcaggtaccagagcaagaatagagcrgtggcagggtcccagtcctgggttccagatgtctccagggctctccttcctgctggtggctcccttcctttgactatgaga

SEQ ID NO: 521485 - DNA, 658 bp, Homo sapiens
gctggattgcagccttgtgagaaaccctgagccacagccagccagctaagctgctcccgggttcctgtccacaggaactgtgagacagtacatgttgtttgaagcccctaagttttggagtatttgttatgcagtaatacatgattaatacaccatgatacccattctgcaagattattatgaggtttacaaagaaagtatataaatcccctatgtgcggtgtctggtatacattagtcactcaacaaatttctattattattaatattgtcttagattatagaaaaatatcaaggattgcatgagaaacctaagcctactactcaaggtgccagagttttaagaaaaacagatcagttctagataactaagtctaaggagtggggtagagataggggcagtgggtagggacttcagtctttaagtagggaggcttgtttattacagagacagggcaggcagcctgatcctcrtgaacaggtcaggccagaggccagaaaagcaaggctggggagaaggggtgaaagggcaacctttctcatgcagggagggaccacccaggaccacagtgttgctgctctcatcccctgcccgcatttgactctaccctcatggagctagaggttacaaaacctgggaaaagttagaggcagtttca

SEQ ID NO: 521486 - DNA, 533 bp, Homo sapiens
ctgtctcaaggccgaacctactaaagccatctatgttcccaaaatgatctagaaaaaagaattttgtatttcattgtcytttctaggatccaactgtcaccctttctgttgctattaaaggtcacagtagctcaccagcaaattcctcccatcccttcagcccacctcctccctacttcctcccctcagctctcagtgatcacaggccagtgcttcctgcctgagccatacacttcgacggtgacaaaattcatctggcattcccagattcttattttctgtttctttctaattgctttggatctttgaacctcaagggtgtgaagcttgcctgccagaaacctgaagtagatagagatcacgttttctatgctgattttcactcctgaagttcccaactcaaagatggacatgctgggaggaagcagagtaagctaagaggacactggttctggattcaatgtctgcttccatcctcacaagagctgcgtgcgcttgggagtttacccaacctcactgagtcgcaaattcct

SEQ ID NO: 521487 - DNA, 533 bp, Homo sapiens
ctgtctcaaggccgaacctactaaagccatctatgttcccaaaatgatctagaaaaaagaattttgtatttcattgtcttttctaggatccaactgtcaccctttctgttgctattaaaggtcacagtagctcaccagcaaattcctcccatcccttcagcccacctcctccctacttcctcccctcagctctcagtgatcacrggccagtgcttcctgcctgagccatacacttcgacggtgacaaaattcatctggcattcccagattcttattttctgtttctttctaattgctttggatctttgaacctcaagggtgtgaagcttgcctgccagaaacctgaagtagatagagatcacgttttctatgctgattttcactcctgaagttcccaactcaaagatggacatgctgggaggaagcagagtaagctaagaggacactggttctggattcaatgtctgcttccatcctcacaagagctgcgtgcgcttgggagtttacccaacctcactgagtcgcaaattcct

SEQ ID NO: 521488 - DNA, 328 bp, Homo sapiens
atcacaggccagtgcttcctgcctgagccatacacttcgacrgtgacaaaattcatctggcattcccagattcttattttctgtttctttctaattgctttggatctttgaacctcaagggtgtgaagcttgcctgccagaaacctgaagtagatagagatcacgttttctatgctgattttcactcctgaagttcccaactcaaagatggacatgctgggaggaagcagagtaagctaagaggacactggttctggattcaatgtctgcttccatcctcacaagagctgcgtgcgcttgggagtttacccaacctcactgagtcgca

SEQ ID NO: 521489 - DNA, 566 bp, Homo sapiens
ttttttaaagtatcaaataacctttcttattatgtatttgatggacagcgtttgtctttgtgaagtttggttctttcttcaataaaaattttaaaaaataagcaaaatctgttttaatggaaattgattcttaaatacaaaattaatgattatgatttttaaagggaattccattgctttctaataaaatatataaaatttattayatttaagaggctacacatgcactgagatcttatttgtcttttgtttaaaccattttattttattttattacttatgccatgtgtacatcatctgtgttatcatttatatttttatactttaaatttattaaactactgtattaatctaaatatcagcaattttttaataaaagtactcagatgattgagttgaatacgttttgaaaagagggattacttacaaaatggtggacatagcaaaagaacaaagaagataagacatgcaattactagaagtttgagaaggtaggaacaactcttggagctgaaaagcatggaaatagtgtcagtggagctgtgcgagagttaagacaaagtgaa

SEQ ID NO: 521490 - DNA, 566 bp, Homo sapiens
ttttttaaagtatcaaataacctttcttattatgtatttgatggacagcgtttgtctttgtgaagtttggttctttcttcaataaaaattttaaaaaataagcaaaatctgttttaatggaaattgattcttaaatacaaaattaatgattatgatttttaaagggaattccattgctttctaataaaatatataaaatttattacatttaagaggctacacatgcactgagatcttatttgtcttttgtttaaaccattttattttattttattacttatgccatgtgtacatcatctgtgttatcatttatatttttatactttaaatttattaaactactgtattaatctaaatatcagcaattttttaataaaagtactcagatgattgagttgaatacgttttgaaaagagggattacttacaaaatggtggacrtagcaaaagaacaaagaagataagacatgcaattactagaagtttgagaaggtaggaacaactcttggagctgaaaagcatggaaatagtgtcagtggagctgtgcgagagttaagacaaagtgaa

SEQ ID NO: 521491 - DNA, 635 bp, Homo sapiens
aataaagaaggtttggctatcaaattgaagttttaaaacttgtctcaaaagtatgttacaaaactgctataaataaataaatacacatatatgtatgtgtttataaatatatatatgaataattacttttcttccagtatttctccatcagcaggaatctaggctgctgagtaaggagggacatgatccttgcattcacagaggcactaactgttcttttgtgtgtcctaaatgatgtcactgacatgccttttacccagccacacccaggtgctgctggtgtacagttccggcttactggacaattttagttcaggtcaccaaagccaccttctggcaaatgagtctttgtaattgagagaatttccatcagtattctatgcccataaataagaggaaaccctctactctaaagggaagtaaagctcattttctaagtctgttacctgtgggtgttttaaccccttgccacctcagacaactcctaatattccaatctcactatctccttgtggctatttaaatttgaacccrctcctggttctctctgaactagaaatactgaagccgtggtgacaactttattaaactccttctccttcacctgcagagggctgtctgctgagccccatggg

SEQ ID NO: 521492 - DNA, 518 bp, Homo sapiens
ttgcacatatttactaattgattcactcattaattcaacagaaatgtatctctggcactgtgtaaggtgctatgaagcttcaaagataaaaatggtaatgtctctgcccccagtgagctttaaactttgactgtgacttgggattagattacacctaaattttccatgatgatattttcaggggctcattaaaaggggggcacagatgactgatttaaaggaggacagataaaattgaaggattggaaaatgaggactattaggaaaagctagaagaagcactattatttagcacagaaggaaaaagctgaagtgataacttaatragagtatttaagtgtatagaggatggactccattatggttctatcatccatgaatttatctaaaaccctttttgaaccaaattatcttttttaagtttgcgctagctcttggagtaatgagttccttatgtggactgcctgctgtgtgaaataacacatccttttgtgttttctgaaatttcttcctctaag

SEQ ID NO: 521493 - DNA, 603 bp, Homo sapiens
aatagaggtggattttgaagagaaagagtagcaaagtgggtaagagctcgggcactgaaacaagactgcctggatatgaaaggtggggccatcgcctattagatatatgactttggacatgttgtttgtgaacaaatttctcacccattgtccataaaattggaacagtaataccactaaccttatagagatgttgaaataattacgtatattaatacayattaaggattagaataatgcctggcacataataagtgctcagaaatgttaaacttactattaatgataatttgattaaactccctatctactagtaatgttgaagagggaccaaaccataaaaatttatcaatttcttggccttcatgaaaactgctacatagtgcaatggaaaagtcattgatttaggaattacctctagctgtgctactttgggatcattatcttacctctctaagatccagtttcttatctgtaaaatgaagtagtaatatccacctgatggagttattatgaggattcaataacaccatacataagaaacattgtggctgatacagagtaatggtaatatatgtcactcctcttccccttcccagccaa

SEQ ID NO: 521494 - DNA, 603 bp, Homo sapiens
aatagaggtggattttgaagagaaagagtagcaaagtgggtaagagctcgggcactgaaacaagactgcctggatatgaaaggtggggccatcgcctattagatatatgactttggacatgttgtttgtgaacaaatttctcacccattgtccataaaattggaacagtaataccactaaccttatagagatgttgaaataattacgtatattaatacatattaaggattagaataatgcctggcacataataagtgctcagaaatgttaaacttactattaatgataatttgattaaactccctatctactagtaatgttgaagagggaccaaaccataaaaatttatcaatttcttggccttcatgaaaactgctacatagtgcaatggaaaagtcattgatttaggaattacctctagctgtgctactttgggatcattatcttacctctctaagatccagtttcttatctgtaaaatgaagtagtaatatccacctgatggagttattatgaggattcaataacaccatacataagaaacaytgtggctgatacagagtaatggtaatatatgtcactcctcttccccttcccagccaa

SEQ ID NO: 521495 - DNA, 473 bp, Homo sapiens
tgaaaagccactcagaatgtggaatcatagaaaaagcaacgtcaccaaaagaactgggctgtgacaggcaatccgaagagcaaatgaagaattctgttcagactcccgttgaaaactccaccaacagtcagcaccaggtcaaagaagctttacctgtgtcactcccccagattccttgtctgtcttcctttaaaatccatcagccatacacgttgacttttgctgaattggtagaggattatgaacattatattaaagaggggttagagaaacctgtggaaatcatcaggcactacacaggccctggggatcagactgtgaatcctcaaaatggttttgtgagaaataaagttaytgaacagagagtccctgtgttggcaagtagtagccaatctggagactctgagagtgacagtgattcttacagctcaagaacctcttcccagagcaaaggaaataagtcatacttggaa

SEQ ID NO: 521496 - DNA, 473 bp, Homo sapiens
tgaaaagccactcagaatgtggaatcatagaaaaagcaacgtcaccaaaagaactgggctgtgacaggcaatccgaagagcaaatgaagaattctgttcagactcccgttgaaaactccaccaacagtcagcaccaggtcaaagaagctttacctgtgtcactcccccagattccttgtctgtcttcctttaaaatccatcagccatacacgttgacttttgctgaattggtagaggattatgaacattatattaaagaggggttagagaaacctgtggaaatcatcaggcactacacaggccctggggatcagactgtgaatcctcaaaatggttttgtgagaaataaagttattgaacagagagtccctgtrttggcaagtagtagccaatctggagactctgagagtgacagtgattcttacagctcaagaacctcttcccagagcaaaggaaataagtcatacttggaa

SEQ ID NO: 521497 - DNA, 654 bp, Homo sapiens
ctaaataaactagtggtgttttcaattgtgagttcaatttagtatgttttacaggcctctataaggctacattaaatatagactaattgaaaacatggtgcatagggmatactcagtgtgtgtgtgtgtttatagttaaagaatatgagtaccaaagatacatgaatagaatcaagcgttgctcataacaaagtataaaagtcaacaatactgcatatctgttgtcgataggttcattagcagaaaaatgcatttaatgcttatcaatgagcttctgccctactggagaataagaggaagacaaagtgagacagaagtctatggagctcaaatttaaagtcagataacccattcagcatatctgataagcctgtatttattctgtgaagataaaagtgataaattgccataaacatattagtgtttgatagtataaagtaagccaagttcaaactagacttgtctgaagaaggaaaaaagaaaagaagaagaggaagagaaaaaaggaagaagaaaaaagaataaattgttatttcatgaacacatataactgctaagaattgtggaacccctctttattttttatcatacatggatatgagcacctatgcactatggagaagcagcttccaaatgagttcacatatatcaacc

SEQ ID NO: 521498 - DNA, 642 bp, Homo sapiens
tgaaggtcaataccagaaaaagtaagttcatgattgctaaagatgaatctgggtaaatcatgacagttctttcatggaataagaaaaagtggtcactgtaccaatggattaaagacaaaatttttatatttttcttaacagattcagagagctatacatggaaaatttcatctaccaatatccattcatctcctgttttcttcctatgtatgtgtcatttatttatattatatactttcaggaagaaagtaatgactctgctctgagctaggtaatcagtaaaaatgatatgatggcgaggcattacttatatgataaaattataattcaggtattatcacatatttctacttagttttctcttttctgtgtagggtattgacacaatatattgcatgtgcttttaatgctatttgttgtatacatgtaaatatttacttttctaactaattctacaagataaataataatcttcctaaacataaggaaaacacacatacttaacatttgaaagtttttactcttgatacactgtttttrttttcactgcttcccttttctagaaaatgcaatttttcagcttttcacgagaagactaaacaaagaggactgcatagcactatcagtagacaatatagtaat

SEQ ID NO: 521499 - DNA, 241 bp, Homo sapiens
tctccatagtggatcgtcatctcagaacctgccgcagtcagcctagccagagagaccaggtccaggaattggaggttctgcccaaggcttgggtcacagattggggccccactcrtagggattggaggccaagaggcaaatccacgcagcctgagcatctatggggtccccagagacacgccctagagcctgggtcctctctgtgcgtcctccactttcatgctcccaacagtcccgtggg

SEQ ID NO: 521500 - DNA, 460 bp, Homo sapiens
catcagcagcaagaaggacctcaccagatgcagccccttggcaatggacgtctcagcctccataactgtaagaaataaattcctttctttgtaaattatccagattcaggtattctgttataagaaacagaaaacagactaagacacctgtcctttcttgcccaaacagtcwttctgtaaatacttcctgatgcctcttctgtacccagcccttgggaagttgacatgagaggcagggtgatacttatgcacccagacctgtccccctgccttccccacccacatgctcagcaccttcctgaaattaatcatagaatcttcagattacatgatctgaagtgctcagactctgcagaaggtgtgaattatacaagctctgagcttttaagttctcttaagctttttgtttctttttctttttttcctttttatttatttatttatttatttatttatttat

SEQ ID NO: 521501 - DNA, 460 bp, Homo sapiens
catcagcagcaagaaggacctcaccagatgcagccccttggcaatggacgtctcagcctccataactgtaagaaataaattcctttctttgtaaattatccagattcaggtattctgttataagaaacagaaaacagactaagacacctgtcctttcttgcccaaacagtctttctgtaaatacttcctgatgcctcttctgtacccagcccttgggaagttgacatgagaggcagggtgatacttatgcacccagacctgtccccctgccttccccacccacatgctcagcaccttcctgaaattaatcatagaatcttcarattacatgatctgaagtgctcagactctgcagaaggtgtgaattatacaagctctgagcttttaagttctcttaagctttttgtttctttttctttttttcctttttatttatttatttatttatttatttatttat

SEQ ID NO: 521502 - DNA, 298 bp, Homo sapiens
gcctgggggtccgaacatggtcccctgcggagggacaagtaactgtcagccaggtaaggagagaaaagaccaccccaggccaagarcacagcccctggaaaggcctagaggatgcagggtgcagaggggaacgggacatggtgagtcacagggccagagccccaggcaggggtggggccaggacaggccgtgtgggccatggggattctaaggacagtgaggggagtgggagagaggactcgagccaaggtgacaaggagcaatctgatttttagcttaggggatgttccgacagctg

SEQ ID NO: 521503 - DNA, 298 bp, Homo sapiens
gcctgggggtccgaacatggtcccctgcggagggacaagtaactgtcagccaggtaaggagagaaaagaccaccccaggccaagaacacagcccctggaaaggmctagaggatgcagggtgcagaggggaacgggacatggtgagtcacagggccagagccccaggcaggggtggggccaggacaggccgtgtgggccatggggattctaaggacagtgaggggagtgggagagaggactcgagccaaggtgacaaggagcaatctgatttttagcttaggggatgttccgacagctg

SEQ ID NO: 521504 - DNA, 298 bp, Homo sapiens
gcctgggggtccgaacatggtcccctgcggagggacaagtaactgtcagccaggtaaggagagaaaagaccaccccaggccaagaacacagcccctggaaaggcctasaggatgcagggtgcagaggggaacgggacatggtgagtcacagggccagagccccaggcaggggtggggccaggacaggccgtgtgggccatggggattctaaggacagtgaggggagtgggagagaggactcgagccaaggtgacaaggagcaatctgatttttagcttaggggatgttccgacagctg

SEQ ID NO: 521505 - DNA, 410 bp, Homo sapiens
attggggttgggatggaggggagttaggactggctgtgaggaatgaagggggtcaggggttgccagaggagctggagagaacacagatttggggacattaatgaggccaagccaggcaatgcaaagggcaagaagagcaagggggaggtcacaggagttcagatccctggggactggacaggcgggcaggcagagcccacaggcaaatagcagcccaccyggggagcctgagggcaggtgcctgcctcagcacttgcccctagcaactctgtgagaagcagacagagctgccacttctttttttttttttttagacggagtcttgctctgtcacccaggctggagtgcagtggcgagattttggctcactgcaacctctgcctcccaggttgaagcgattcttctgcctt

SEQ ID NO: 521506 - DNA, 410 bp, Homo sapiens
attggggttgggatggaggggagttaggactggctgtgaggaatgaagggggtcaggggttgccagaggagctggagagaacacagatttggggacattaatgaggccaagccaggcaatgcaaagggcaagaagagcaagggggaggtcacaggagttcagatccctggggactggacaggcgggcaggcagagcccacaggcaaatagcagcccacctggggagccygagggcaggtgcctgcctcagcacttgcccctagcaactctgtgagaagcagacagagctgccacttctttttttttttttttagacggagtcttgctctgtcacccaggctggagtgcagtggcgagattttggctcactgcaacctctgcctcccaggttgaagcgattcttctgcctt

SEQ ID NO: 521507 - DNA, 410 bp, Homo sapiens
attggggttgggatggaggggagttaggactggctgtgaggaatgaagggggtcaggggttgccagaggagctggagagaacacagatttggggacattaatgaggccaagccaggcaatgcaaagggcaagaagagcaagggggaggtcacaggagttcagatccctggggactggacaggcgggcaggcagagcccacaggcaaatagcagcccacctggggagcctgagggcaggtgcctgcctcagcacttgcccctagcaactctgtgagaagcagacagagctgccacttctttttttttttttttagacggagtcttgctctgtcacccaggctggagtgcagtggcgwgattttggctcactgcaacctctgcctcccaggttgaagcgattcttctgcctt

SEQ ID NO: 521508 - DNA, 304 bp, Homo sapiens
tcaatagaagttagacccagaatggcagaaaagcacggtgggagaggtcactgggatttggggcttggcttcaagttctggctctgctacttctgggctgtgttatttggggcagaatgcttactctttctgtgcaaggcagaatgatggcccactaaggatatccacgtcctaatccctggaacctgtgaacgtgrcaagaggacctttgcagatgtggttaagggtaaggattttgagatgaggtgatgattctggattatccaagtgggtccaatctaatcatatgaatccttaaaagcag

SEQ ID NO: 521509 - DNA, 524 bp, Homo sapiens
ctgtaatcatgtaatccattgaaagtctgtcttttctgkccaggcacagtagctcacacctgtaatcccagcactttgggaggctgaggcgggcagatcacttgaagtcaggagtcccaaaccagcctggacaacatggtgaaaccccgtctctactaaaaaatacaaaaattaaaaatagccaggcgtggtggtgggctcctataatcccggctactcaggaggctgaggcaggagaatcgcttgaacccaggaggtagagattgcagtgagccaagatcatgccactgcactccagcctgggcaacagaggaagactccgtcccaaaaaaaaaaaaaaaaaaaaaaaggtctgtcttttccatgggcccagggaatgtgtttgctttttcactaatctacccctcaatgcctagaactgtgcctggcacattgtaagtgctcagtaaatacatgttgagtgaatgaacgaccatataagtaagcccgcctcctccagccctcctgcagcaaacatttatact

SEQ ID NO: 521510 - DNA, 421 bp, Homo sapiens
ctgtcaccatctcagggagatgactctggcccctcctcaccctttctyctggcctctccttcttcccccaacttctcagcatgaaggataattacctgttcctgaaagaggtgaagaaccttgtggagaaaaccaactgtgagctgaaggtctgcttccagtacctaaaccgaggcgatcgctggatccaggtaaggagcccaggtccaggctgggaaggacatggcccccgggtcaagcaaagaagagttggcttcatgtgaactgcctggcacccagcagctctgcagatggggattcttctgtcagctcatatctgcacatgtgcacaaagacataaacatacaagtgcactacagtgctgcttcttgtagtagcaaaagattgcaaagcaacctaaatgtccatctgtggaggactg

SEQ ID NO: 521511 - DNA, 320 bp, Homo sapiens
tgaccccctctccacgtgcctggagtccgcttcttggagggtgtggggtttcaggggttgcctcagtgaaggcactggtcagctagtaaagwtcctcactgtgcccgtgtgtgccgagctcagcccagtgcttgtcatgatctcactttggcctcccagcagccccatgaagtaggcatattacttccctatttcacagtcgaggaaactgaggctgagagatgcagtagcttgtctgaggttatgtgggtggcaaggaggtagactctggtctctagagctctatccaggccctataatggcctagagacagggagtct

SEQ ID NO: 521512 - DNA, 633 bp, Homo sapiens
tgctctcaaccctcagccaggctgctctcccaaccctgccctagctgggctcatctccactgtgcctcaccatcaacagcctctccaggtccagggccggcttgaaacactgcctgatcatcctagtctgctgcattctcaccgtgagggtggcctgagtcagcgggagcgcaggagctgagaacgcctttcaagaaaaaggaaactcgtctaagctcacctcctactctctccctgggatgggaagagggaccctgaccagaaatgtcattttctgctcatttcaaagtgaataatgtggctgtcttgggctgtgtttaatctcttaatgcatccctgtttgaagagcaatgggctcaacatccctcagagacaatggggctggcattgctcattagtgcccaggccactggcctaagcatctgctttctgagcctgatgaaatcttgggtgtagtctgagctttggtctgatggacctctgtrcctactttggcaggtccttgcattatacctaatgtggacattgtccctaatcttcccagaaatcctgagagacagatgttaccaaaacaatttgatatatgaggaaagaggctcagagagctgaggtgaattgcttaaggctacacag

SEQ ID NO: 521513 - DNA, 589 bp, Homo sapiens
aaacatttgaaataaaaataattaaaaaaaamcaaacttcctccaagccttctccaaggggacctgtggccacttactagaatgactgcatttggggaaagaaagtacccagtcctttgggggattactagacattgactctgaatttatgataattcctggggttgcaaaatgccactgtggtccaccattcaaagtcttgacttagatcatcaggtgatagatatttagcccaaatgtgttcagttggacattcccccagtttctgaatgtataagtgaaattggcatactctcactgggaagagaccccattttgggtctttgtcttatggaatgagatccatcatggaagaaagggcctaaatagaagtttctggaacttcctctctttgccatgatagcaaattggaagcacttccatatccgcggggaaatttcagagattcatgaagccttgaaatatgcaggggtggtgattcctatcccatccccatttaacttgcctatttgacctatgcagaggttggaagggttttggagaatgactatattattgtatatttcattaggtggtaacaccaattgca

SEQ ID NO: 521514 - DNA, 513 bp, Homo sapiens
ctgcttgggaggctgaggcaggaggatcacctgagcccaggagtccgaggctgcagtgagccatgattgtgccactgcaccccagcctgggagacaaagccagaccctgcctctaaaacaaaatgaaacaaaaacccaaatcccactggagcccraggaagcctacaaagtttgcaatgtgggtgcctctgtatatactatacttgaccagttaagttataattatttttttattgtggtaaaacacacatataaaatttaaccattttaagtgtatcgttcagtggcattaagtgcattcacactgttgtacaaccatcaccaccatccatctttagaacctctttatcatcccaaacagaaactctgtacccactaaacaactcccaatttctccctcctcacaacccctggcagccaccattctactttctagatacctcttataagtggaatcacttattaatttgacaactctagatatcttttataagagaaatcatatagtatttg

SEQ ID NO: 521515 - DNA, 287 bp, Homo sapiens
aaaccaagggaagctttcagtcagagctcaataaagaacaaatatgcatttgatctcagtctgtccctaatgtgcttttaagcttggcaagttccctcrtgactttgaacctcagttttctcacatataaaatgggcataatatggaacatgcaggaacatgcaggcctcccaaagtgctgggattacaggcatgagccaccacgcctggccaagttctaagtttatcttcaatttgactttttttttttatgttatgagggaatcatagaaagcatgtttaaagtg

SEQ ID NO: 521516 - DNA, 540 bp, Homo sapiens
aacatacatttataaaatacaatttcatatatagataagtgttaggaagaaaaaaaagagggtggataaggaatttttaactagagagaataagtgtttttctagaaggtatagtgggaggagtcttctctgagaatgtratatttgaccagagacttgaaagagataagggagtgattcataaagatatctgaaagaagagccttcccagcagaggaaatagtaagtgcaaagactctgaggtggaaatttgtccagttttctgagaaacaccaggatgtccaatataacaagctaagagagtggcagggaagctgttcagtagataaaacacgaggtcaaaatgtacagaatcataggatcttacttggaattttgcttttattaagatctgcctcaacttttaacaagatccttttggctgttaggctgtagagactttatgagggtgccaaacttggaagacatattgaaggtagactcaacagaattttcacaatatgaaccctgtgagacagacccaaataaagatctggtctc

SEQ ID NO: 521517 - DNA, 540 bp, Homo sapiens
aacatacatttataaaatacaatttcatatatagataagtgttaggaagaaaaaaaagagggtggataaggaatttttaactagagagaataagtgtttttctagaaggtatagtgggaggagtcttctctgagaatgtgatatttgaccagagacttgaaagagataagggagtgattcataaagatatctgaaagaagagccttcccagcagaggaaatagtaagtgcaaagactctgaggtggaaatttgtccagttttctgagaaacaccaggatgtccaatataacaagctaagagagtggcagggaagctgttcagtagataaaacacgaggtcaaaatgtacagaatcataggrtcttacttggaattttgcttttattaagatctgcctcaacttttaacaagatccttttggctgttaggctgtagagactttatgagggtgccaaacttggaagacatattgaaggtagactcaacagaattttcacaatatgaaccctgtgagacagacccaaataaagatctggtctc

SEQ ID NO: 521518 - DNA, 540 bp, Homo sapiens
aacatacatttataaaatacaatttcatatatagataagtgttaggaagaaaaaaaagagggtggataaggaatttttaactagagagaataagtgtttttctagaaggtatagtgggaggagtcttctctgagaatgtgatatttgaccagagacttgaaagagataagggagtgattcataaagatatctgaaagaagagccttcccagcagaggaaatagtaagtgcaaagactctgaggtggaaatttgtccagttttctgagaaacaccaggatgtccaatataacaagctaagagagtggcagggaagctgttcagtagataaaacacgaggtcaaaatgtacagaatcataggatcttacttggaattttgcttttattaagatctgcctcaacttttaacaagatccttttggcygttaggctgtagagactttatgagggtgccaaacttggaagacatattgaaggtagactcaacagaattttcacaatatgaaccctgtgagacagacccaaataaagatctggtctc

SEQ ID NO: 521519 - DNA, 493 bp, Homo sapiens
agattgttgacagaaggtacggtagacataaaaataaatcagaaatccagatgtcttaactcaagtttgatttatggttcaaatatatgttttcttccaaaattcatatattggaacttaaaagacaakgtgataataaaaggtggggcctttaggaggtgattaagtcatgaggaaggagactttgtgaatgggattagcaatcttatgaaagggctggagagacttagctcggcccctttttgtcctccattgcatcagccatgtgaggccacaacagtcaaggtgccaccttggaagcagagatcaagcccttactagacactgaaactgctagtgcctcgactttgaacttccagcctccagaacttgaaaaataaatgtatactattgataaattacctagtatggggtggattgttattgcagcccaaacagactaagacagactgtcataaccaaataccatagcctggatggcttaaacaacaga

SEQ ID NO: 521520 - DNA, 493 bp, Homo sapiens
agattgttgacagaaggtacggtagacataaaaataaatcagaaatccagatgtcttaactcaagtttgatttatggttcaaatatatgttttcttccaaaattcatatattggaacttaaaagacaatgtgataataaaaggtggggcctttaggaggtgattaagtcatgaggaaggagactttgtgaatgggattagcaatcttatgaaagggctggagagacttagctcggcccctttttgtcctccattgcatcagccatgtgaggccacaacagtcaaggtgccaccttggaagcagagatcaagcccttactagacastgaaactgctagtgcctcgactttgaacttccagcctccagaacttgaaaaataaatgtatactattgataaattacctagtatggggtggattgttattgcagcccaaacagactaagacagactgtcataaccaaataccatagcctggatggcttaaacaacaga

SEQ ID NO: 521521 - DNA, 493 bp, Homo sapiens
agattgttgacagaaggtacggtagacataaaaataaatcagaaatccagatgtcttaactcaagtttgatttatggttcaaatatatgttttcttccaaaattcatatattggaacttaaaagacaatgtgataataaaaggtggggcctttaggaggtgattaagtcatgaggaaggagactttgtgaatgggattagcaatcttatgaaagggctggagagacttagctcggcccctttttgtcctccattgcatcagccatgtgaggccacaacagtcaaggtgccaccttggaagcagagatcaagcccttactagacactgaaactgctagtgcctcgactttgaacttccagcctccagaacttgaaaaataaaygtatactattgataaattacctagtatggggtggattgttattgcagcccaaacagactaagacagactgtcataaccaaataccatagcctggatggcttaaacaacaga

SEQ ID NO: 521522 - DNA, 628 bp, Homo sapiens
taccttcaagccagcattgtgtaatgtaactttccattgcatagaatctaaatattctctgatttttgtgctaaaaggaagcatagagattcagtgagttacccaaagttacagagcaagttattgacacagctaggacattcgccctgggactaaaacttaagataatcagtacaatgagatttatttggacacactgttcctttgagaaggcgctggatcctgtccttggaaaaactcttgaaacaattatttcccaggatcttctgccaacttattatgggaatatctactcttatcatacatatagtcacatactgggtcccagaatataaaaagaggtaggacgttatttttctccttcctaaagggtaaaattagttaaagttacaatattgggaaataacccccaagacacaaacacaaattcatacaaacacataccatagtgtgttgctatatggaagcaagacatcaatatcttgaggttctattcctgaggctacarctttaactttgttgtgacattgtgaaaaaatcaaatttttcatacctcaattcttccagttataaaatgggtttaatgatgactatctcaaaaagttattacaaatacaattaacacttt

SEQ ID NO: 521523 - DNA, 589 bp, Homo sapiens
ccctcggacttttatatggaaaaaaggtctgcagtatttatattactgttcctttgggattttcctgttaattgcagtcaagccaatccttatggatacagacaacaaatgaatatgtattaaattaaattggtcaaagtttttggtgcatggggccatgttctttctaccatactagtgtgctctttttgcatactgtctcctaaaataacaaaatctaaagtctccatgttatgtcaactctgtgttttgamtatcttctctagctctgttatcaacattggatatgaaaaggataagattatttaatttaaaaacatggtgcaaaccaagcctcaaactcataaataacttcattgtggacatggaaggtatactgaagatttagagataggctaaattactgtacataaatccagaaaattcagctgatagttgctcagatattgttttcaataaagattattctaagtgaaaatgcgtttttgagggtgcagcagttaggtatcatatgtctatctccaaggacgttatgaggttggtaaatagtttcttgttaagtgccttaagcatttaggagaaaaaaaaa

SEQ ID NO: 521524 - DNA, 589 bp, Homo sapiens
ccctcggacttttatatggaaaaaaggtctgcagtatttatattactgttcctttgggattttcctgttaattgcagtcaagccaatccttatggatacagacaacaaatgaatatgtattaaattaaattggtcaaagtttttggtgcatggggccatgttctttctaccatactagtgtgctctttttgcatactgtctcctaaaataacaaaatctaaagtctccatgttatgtcaactctgtgttttgacwatcttctctagctctgttatcaacattggatatgaaaaggataagattatttaatttaaaaacatggtgcaaaccaagcctcaaactcataaataacttcattgtggacatggaaggtatactgaagatttagagataggctaaattactgtacataaatccagaaaattcagctgatagttgctcagatattgttttcaataaagattattctaagtgaaaatgcgtttttgagggtgcagcagttaggtatcatatgtctatctccaaggacgttatgaggttggtaaatagtttcttgttaagtgccttaagcatttaggagaaaaaaaaa

SEQ ID NO: 521525 - DNA, 589 bp, Homo sapiens
ccctcggacttttatatggaaaaaaggtctgcagtatttatattactgttcctttgggattttcctgttaattgcagtcaagccaatccttatggatacagacaacaaatgaatatgtattaaattaaattggtcaaagtttttggtgcatggggccatgttctttctaccatactagtgtgctctttttgcatactgtctcctaaaataacaaaatctaaagtctccatgttatgtcaactctgtgttttgactatcttctctagctctgttatcaacattggatatgaaaaggataagattatttaatttaaaaacatggtgcaaaccaagcctcaaactcataaataacttcattgtggacatggaaggtatactgaagatttagagataggctaaattactgtacataaatccagaaaattcagctgatagttgctcagatattgttttcaataaagrttattctaagtgaaaatgcgtttttgagggtgcagcagttaggtatcatatgtctatctccaaggacgttatgaggttggtaaatagtttcttgttaagtgccttaagcatttaggagaaaaaaaaa

SEQ ID NO: 521526 - DNA, 499 bp, Homo sapiens
ctaaacctcagcccaggttacacttcttccatgaagtcttctctgatctatctacctttctctggacttccataacaacctgtacatcattatgtcatttttcataaaatattgtagtctaactgttgatgacagacattttttctccataaaagacagtgaattataaagaagaaggactacaacttatttatatatattccgtcatgaacgagaatgaggtctagcccagaagaccttaataaatgttgatttaaatgtatgcaaaattatattttatctgtataaagccatttatttcatccaataacataacttttgacctcaatcagatgatcccaattacctattttctctcaacaggctctgggaaaaccmcaaaggaatggatttattcttaagtgagactcataaacgtcttgatctgtgaacttagctgtttcctgctgctaatatttagtatacagacattttctgcccatcccattcccaaatattt

SEQ ID NO: 521527 - DNA, 194 bp, Homo sapiens
agttattctgattgctcatcaaaataattggtgaggtttttcagcatatgagtaggtggtcatatccaacccatagtctcactcagtaggtcagggataaagcctcaaatcaagtagtaatgtgagatagatagtgtggtataatataaaggtaatagggtttggagtawgacatacctgtctttgaacatcag

SEQ ID NO: 521528 - DNA, 636 bp, Homo sapiens
ttgttactctctgtgaggtttacccacgaatcaggatatgacttagattgacatttttcttttgttatttgtgtatgtgtagccttatatgggtacgtttatacatttaatgaacagaaacagcccacatatttttgaatgtggtagcttagtaacacaactctgtttttgtagtgaaatatatatacacatacatacagagagagaatattcttatttctaatagatattgagaaatgagtttacatcagtttaaccttataatttttcttcacattttttcattctttttacctgttgtaaaactataatttctttgtgatataaaattaaataattgttcccaacacaattcaataattaacttggaccttgcttagtaaatattttcaaagattattttataaagkactgagtttggtagattcctcaatcttggaattctttatcaaatagaaagtttaggttcaaaattaatatagttattttttgacatgtttcattcattcaaaagggatatcctaggcattgattgcatgtagggcaataaggagaataaaggaaaacctctaagagtctcagactcttacaatctagttgtgctgtcaagacagacccacatgtgaaatagttcaa

SEQ ID NO: 521529 - DNA, 640 bp, Homo sapiens
ggtgtaatattaattgtgctaatatttcttcttcagcttcaagacaattattgctaagttactccccaaatctctggtgaagtgtttgaatgcagaacttgttttgcagcctgacagatctaaaagctcccaaatgagcagacagtaagcaaaacaaactgttcgaactcttgcaatttgcttgctccctccctgctgaagatttctggctaccttacttcaaagggaacacagtgtgaggagagcatctgtgggaagaagatagcaagacgaatatggcaactaaagaaacttcgacttgaaacgtttttgcaaaatgccacratacttatgcactgggacatggtgtcattgggatgggtaaaaagaaaccagaacactacagttggcaatgatgtcagaacaccttaacccatctgaagtcttttctgctgcttttttcctaatctgctcttgtaccctaccattggataaagttaaagagaaaactctgacatttgaaataagtctgaatcaatcaccacttttagctttgcagtagattcagtctcaaactttactacaaatgctcaccactaaattgaggaattttctctttagctatggctaatatcaaagctagggaattgacaatgtgcaa

SEQ ID NO: 521530 - DNA, 595 bp, Homo sapiens
aggctcttctctgacctccccggccaaactccacatcattctgccagccaatggcctgccatcctgccggcatctgtcactgtgctcttccgtcagcatgctcccctcgacgtcctcttgacatccagccacttgtgtgttcttcctctgatgtgtttctctcgacgtccagccacttttgtctctgcacactagggcctcaggggattttataggcacaagatggggacagggcaggccagggtggtcttgggaaatgcaatgtttgggtaggaaaacagaaatgcctgtcctcacctaggttcttggatacaggcccgagggtggagccctagccggggaccatgcccttcccttcccagcacttccttgccccctttccatatyagaagtacttccagaggcttcttcccccaggagcactgcagagaacgggctttaaaaatgcagctccctgttttaccccagaagatgtttatgacagactcccaatgactacttgaaggctgcagttttaactaacatgcatcagagagttaaagaggcattggaacattaccctgctgccagcctgataagccgactagcacttcca

SEQ ID NO: 521531 - DNA, 563 bp, Homo sapiens
actgtgcccattgatactgtatttacaaaatgaagtaataaaaattttctgaaacaaataaaatctgaaacagtttatagccactggacctacattacaagaactgcgaaagatgataaaggaagttcttaaagctgaataaagaggacgctatttggtaacataaaagcacatgaaagtataaagctaactgaaaaacaaaagtacgttgttaaatttgagtactttgatactgtaacattagtgggtaaattaattctatctctaatatcatggttaaaaggcaaaactattaaatacaactgaagctataataatttgttaagggataaaatgtacaaaaagatgtaatgtatgaaataaaaaatataaaatgagggtgatgstggaataaaattgtagagtttatataagcaaccgaaattaaagttattaaatcaaaatagcccattataagtacaatactgttgtctcgccaatgcaccacactatagcagtctctcattgtctgagataatactcagaattctttttcttacattcaagatgattaaggagcatgg

SEQ ID NO: 521532 - DNA, 515 bp, Homo sapiens
atatatctggattcaatatttatatccccccaaagtttctatgttgaagttttcccaatgtgatggtatttggaaatggagcctttasgaaataattagggttagatagggtccgggggagggtgtcctcatgatgagattagtgcccttataagctcttaccagagagctcacttattctccctatgtgaacacagagaagaggtcatgagcacacagcaatatggtgggccacctacaagccaagaaaagaggcctcagaatgaaacctaccttgccctgcaccttgatcctagacttccagtctccagaactgtgaaaaataaatttctgttgtttaagccacccagtctgtggtattttgttatggcagcctgagcagattaagacataaagacttcaatttaaaaatttttctcccctatatgggtctttatattcctcgtttttgaagtagtcaaagaaggaatcatacccccatcctgaaggcattctctgtatggcccctttttcta

SEQ ID NO: 521533 - DNA, 511 bp, Homo sapiens
ttattggctgaaggccttgtaacaaaagacagatgaacaagagaaaaacgtgcatttttatgcaatataagttttacatgtcatgggagccttcattaggaaatgaagactagagaaagcagctaaacatgggtgtttgtatggtaggtttygtgaagaatggaaagtaatggagaaatatgacaggataaaaagaagagtctgagctaactggagaaaacggcaagatgtgtttgttcagattcttgttggcatcccttatcttggaggtaaagatgttcctttactctgggtatagggaggacacctctcacatgagggtcttatgacctgcttcaagggagaagggtaggggaaggtcagagaggccttcctgcacatgctgtttctcaaattatttcagcttaaaatgtttaatatgccaaggtgccatattttggaatagcatgtcacaaactccatcaagatccatgacataccccaccaagctgaaccccagtcaactctcaaa

SEQ ID NO: 521534 - DNA, 511 bp, Homo sapiens
ttattggctgaaggccttgtaacaaaagacagatgaacaagagaaaaacgtgcatttttatgcaatataagttttacatgtcatgggagccttcattaggaaatgaagactagagaaagcagctaaacatgggtgtttgtatggtaggttttgtgaagaatggaaagtaatggagaaatatgacaggatraaaagaagagtctgagctaactggagaaaacggcaagatgtgtttgttcagattcttgttggcatcccttatcttggaggtaaagatgttcctttactctgggtatagggaggacacctctcacatgagggtcttatgacctgcttcaagggagaagggtaggggaaggtcagagaggccttcctgcacatgctgtttctcaaattatttcagcttaaaatgtttaatatgccaaggtgccatattttggaatagcatgtcacaaactccatcaagatccatgacataccccaccaagctgaaccccagtcaactctcaaa

SEQ ID NO: 521535 - DNA, 511 bp, Homo sapiens
ttattggctgaaggccttgtaacaaaagacagatgaacaagagaaaaacgtgcatttttatgcaatataagttttacatgtcatgggagccttcattaggaaatgaagactagagaaagcagctaaacatgggtgtttgtatggtaggttttgtgaagaatggaaagtaatggagaaatatgacaggataaaaagaagagtctgagctaactggagaaaacggcaagatgtgtttgttcagattcttgttggcatcccttatcttggaggtaaagatgttcctttactctgggtatagggaggacacctctcacatgagggtcttatgacctgcttcaagggagaagggtaggggaasgtcagagaggccttcctgcacatgctgtttctcaaattatttcagcttaaaatgtttaatatgccaaggtgccatattttggaatagcatgtcacaaactccatcaagatccatgacataccccaccaagctgaaccccagtcaactctcaaa

SEQ ID NO: 521536 - DNA, 597 bp, Homo sapiens
ctgcctgccccacccatgcccccagcccatcagctcacacagacacacagcacrgcgtggagagtgttcctagaagcagccaccttggaggaggggtcccctgttcctgagaactccaaggcattccgctcccacccttcaaagggcacaggtggctgcttgtggacctgatggtgctcacacccttcacagggcacaggtggctccttgtagacctgatggcgcttggtatcctgtcctgaaaccatggcctctcattcatctataactgggttacagtctatcagatttaaaaaaaaaaactcaaaataataaccacctattacaatggccttggctccaccgcacccaccagttcagcatcgcagggtgggctgtgcatgccatgggctgctggagaccaggaggccacctgaaaggcagtgtgaccatcaggctgcctccaccactgggaccctggcattggaccacactctcacagtgggatgaagtgtttctgcatgtttctctgtcctccatccatccagatctcagcgggacctcctgcccatcctccatgtgattcagagtcctcgaatgcactccatgcagcagtga

SEQ ID NO: 521537 - DNA, 548 bp, Homo sapiens
aaggcaatatcaatgcataatgatatacatttgtcctctaagtgatggaccttgaaatttcttttgcattttctgctccccacccaatcaaaacacattgtgagtggcagtggggccagcagaacccttggggaggggagtctggctgcagccaagctggtggtccccaggaagcacacacccctgctccaccctttcccttctgccaaatgcatcgcgctagggctctgtcaccattatccggagttgcatcctccacctgcccttgatcatcccagaacaggaagtgaaggtcagccttgctttccagtctccacgctttgcagattgggtgggagggaaagcaagcaggtttgtaggctttctaaagccmcccatatggattctaagatctagaccctgaaaggcaggaagatgatgattttgagggcatagtgatcctcatgagaaagacagccacagctactctgtatctgtccacgttagccccatgcaaatggctttgtttcaggcagaatgaatgcagagcttggacagtggaggtgaat

SEQ ID NO: 521538 - DNA, 548 bp, Homo sapiens
aaggcaatatcaatgcataatgatatacatttgtcctctaagtgatggaccttgaaatttcttttgcattttctgctccccacccaatcaaaacacattgtgagtggcagtggggccagcagaacccttggggaggggagtctggctgcagccaagctggtggtccccaggaagcacacacccctgctccaccctttcccttctgccaaatgcatcgcgctagggctctgtcaccattatccggagttgcatcctccacctgcccttgatcatcccagaacaggaagtgaaggtcagccttgctttccagtctccacgctttgcagattgggtgggagggaaagcaagcaggtttgtaggctttctaaagccccccatatggattctaagatctagaccctgaaaggcaggaagatgatgattttgagggcatagtgatcctcatgagaaagrcagccacagctactctgtatctgtccacgttagccccatgcaaatggctttgtttcaggcagaatgaatgcagagcttggacagtggaggtgaat

SEQ ID NO: 521539 - DNA, 617 bp, Homo sapiens
aacgttttaggatcgtgaagtctcgtcagctcccaagacctgctgactcggaagctctggggacggggctggcagtctgggtgtgaatgccctctgaggttgctgtggagactcctgaggtaacacatgctgaagtcagcctgtcctaatggaccaggctcttggttaggagccccagcacctaggggaggccgtggttcagggttgttggggtgtgggyacagcacgtgacacccgcaccagccgctctcaccttttcactcctgccctcccaggtcacctgcatccgccaaactctgcctggggttcccttcgttatcagcagagcacatagacacatgtctggatttgtttattcattgtcttttcaaatatagtgtactcaacttggaaaacagaaggaggaggaagagaatggagaaagaaagcatgaaaactgaacctctcctccatgcccctttctcaaagcccctcctccagggggaccccgtctttctgtgcctttatcaatgtgtgtgtgggcagttttgatttacacgtagaagaccatcaaagtgcaatgcagcttgctttttcacataatgtaaatacttctggtatctgcatataaacaccag

SEQ ID NO: 521540 - DNA, 626 bp, Homo sapiens
gggctcaggagcggacaaataccagatgaggcccagacttatgatttcccaggaaacagaagttcctgagtcccagaagctgctagctgtctgcagcaaagcagccattttgcacagagaaattcacaccaaaccctgaaatctttattttttattattttattatttttttatttcaataggtttttggggaacaggtggtgtttggttacatgaatagtttctttagtggtgatttctgggattttggtgcacccatcactcgagcagtgtacactgtacccaatgtgtagtcttttatccctcacacccctcccactctttctcccaagtccgccaagtccattgtatcattcttattcttttgcrttctcatagcttagctcccacttatgagtgagaacataccatgtttggttttccattcctgaattaattcacttagaataacggtctccaactccctctaggttgctgtgaaccccattatttcattcctttttatgactgaatagtattccattatatgtatataccacattttctttatccactcattgattgatgagcatctgggcttgttctaaatttttgcaattccgaattgtgctgctgtaaacatgcgt

SEQ ID NO: 521541 - DNA, 558 bp, Homo sapiens
gggctccaggagggcagccaagagggcagcggtggttgcagcctctagggtgggtgggcccagagaacctgggaggaggccccagttcggcagacttttgctagggagaggcagggaaggcctgggctgaaatccaggcagagggggtgttgccaagacactgactggaagacgggtcggcaggacacagtcagatgattcctgccctttctggggtgactttgcggcacctggtgatggcctgagcttctccatcacctgcagtatagtccatggccccgagcatgcacactgggactgctaggtctgcagaacccattagaaaatgcagaacttaggaawctgcatctccagggttggggtccaggaatctatttttttacatcgcgaggtgattctaacgagctaataggtttggtaactgccagaagaaaggacttccaagtccctagctatgggatcctggccccagggacacaagctagatgtgcaggctctggttgtccccagggaagtgactgttctgccctcaccccagcatacctcccaagttttagt

SEQ ID NO: 521542 - DNA, 570 bp, Homo sapiens
cttattgatattctctaattgatgagacattattatcataatttcttttaactttctagttatttgaacatatttataatcgataatttaaagtctttgtctttaaattatcagttaccccttggggaccagtatcagttaccccttaaggacatttaactcttagctacctttttcttatgtatgtgtcatattttcattattctctttatgtcttataatttttgctgaatctggatattttagttaatatagtgtaacaaccatactatcagatcmtccatcaccacccccaaagtttgttgttgttgctattttctttcttttcttttttctttttttgttattgttgttttcactgcttgttaggcaagcagcaaagaggaaactaattctgaactaattcgacagtatctgtggttactgagttatcttctaggttttgttttaagttattgtgtgaccaaaacactgggggtttggtctatgtcctgcatctcaccacacagaaagccaaccaccacaacaacaaatatcaccaaggaagaaggatttaatcaggtgctgcag

SEQ ID NO: 521543 - DNA, 570 bp, Homo sapiens
cttattgatattctctaattgatgagacattattatcataatttcttttaactttctagttatttgaacatatttataatcgataatttaaagtctttgtctttaaattatcagttaccccttggggaccagtatcagttaccccttaaggacatttaactcttagctacctttttcttatgtatgtgtcatattttcattattctctttatgtcttataatttttgctgaatctggatattttagttaatatagtgtaacaaccatactatcagatcatccatcaccacccccaaagtttgttgttgttgctattttctttcttttcttttttctttttttgttattgttgttttsactgcttgttaggcaagcagcaaagaggaaactaattctgaactaattcgacagtatctgtggttactgagttatcttctaggttttgttttaagttattgtgtgaccaaaacactgggggtttggtctatgtcctgcatctcaccacacagaaagccaaccaccacaacaacaaatatcaccaaggaagaaggatttaatcaggtgctgcag

SEQ ID NO: 521544 - DNA, 636 bp, Homo sapiens
gctatcaccactacatcaaaaccaaagtctgagagcacctgcctgccccagaagattcagaatcgtgccccaaatctgcctctctcaagaaaaagataaaatgctcaaagatcacytagaatactttacccatcgtatatagtagagcaggatgaaaaatctgggttgatttatggagtggtaaatagtcccttgttgacaggataaatttgtttagaattttgatttaccaggaatgtgccatgaagcaaagctaagaggcaactgggaagttcttcaagcaggtattagatttggaagtgagaatttaacttggatgcttgtcgttgtggctagagttgggcaagacccagagaggggagccaagtgatcaactcctaatacctcttttagccactttttatgttaggagattttacagtccttttctaagactttcagcagcctaaatcactaggaaggtggttagcctggcagccatcataactgagattgtatgtgtatataccctggatttacctgtaatctgtgagctcttcgaaggcagaaatactgtgtttttcttttgtttagtaggtgcacaaagtgtaataactgtggctgaactgaactcaatggactgcttggtgtcctact

SEQ ID NO: 521545 - DNA, 611 bp, Homo sapiens
tttccagctactaacgtgaagtcacacactgtggagctgggaagagatgtaaataacagtatgccactactggtttcaaccatctgataaaggaggcttactgctgcgacaaaacagttcactgaaaaatcaacaagatctaaaaatagcaaatagtggcaaaaaacatcttctcaaacctttagtcagagttggttgttaataagtgggaaagagaaataaaacctcacagcttactcagaatagttagcttttctcccattgggaattatcattggttacatcatcattataatgataggtttgactacctctccagcacaaatagcattttccacctatgcaaatgattcatgacatttccaagatgtaataaaagtaaaaaaaacraaaaacaaaaaaaacccaacaaggtatgaacttttttctttcaggcctcatctccctctcctcatcctttggtggcaatagttaccctagtaaaccagtctacaaggaagtagcagcaaagtagataatcagttgctgtaacagcccactggcaacaaacctagcagaggggactaataattgacctctagcttggacttacggaaataagcttgaattag

SEQ ID NO: 521546 - DNA, 511 bp, Homo sapiens
tacctaaaaagagatttctttggattcttttgtagggggtggaaaaggaagctcttaggctcacaggttttacactcctatgtgacaattggctggaagtgagcagcagctactcctttagatagaccctctcccctgtccagttcagcgatttacctgcctggccttgctgctccttgagctgtagcccctcaactgtactgggaactgcctgtgaggccgctctggtacctggcatgatgctggctgggctccctgtaagtgcttggaaatgctcagccactatgggggaagcttstgatgcagcagctctagtcagtgagccttaacaacagtcctgtgacaagacttgtggctgggcctgaggtttggtccttaccccaacccagtcagagtgcagcaccctgggccccaaccatgcttccatgcactatcaaaacgcaacatcctgcccattctcctctgaaaatgttaaaaggaagccatgctctggagaacagatcaatggtca

SEQ ID NO: 521547 - DNA, 442 bp, Homo sapiens
ttttggccacatcaaaagaaacaagtggaagctgctaaccgccccttttacatcttagaccctcaaacctcttgactgaacggttctgcctaatgcagagttagcattagtttttgttctatttttctttaatgacatacctctcaayacctgtaccctgggactcagatggtatctagactggtactcactgcagatgagatgaaacaagctgtgcatggcaggacaggagctcacaagtgaatagtacaaatttgtcagccattcgttcattcagatatttatcagtttagttctgtgcatcagcattgtggaagacagaaactaataaataaagtcacaaccttcaagaaggttaggacctagctgaggtttccacagcactttggctgcctgtgcattggagagcagccctgaaagtcgacacctgagcttcagaaac

SEQ ID NO: 521548 - DNA, 543 bp, Homo sapiens
cctgctgtaggcacgctaatgttatactgaggtaaaataaatagaaaggcagtcttggctgtgacctgtaaaacaaaggaaaagagttccagtttagcttttggccacatcaaaagaaacaagtggaagctgctaaccgccccttttacatcttagaccctcaaacctcttgactgaacggttctgcctaatgcagagttagcattagtttttgttctatttttctttaatgacatacctctcaatacctgtaccctgggactcagatggtatctagactggtactcactgcagatgagatgaaacaagytgtgcatggcaggacaggagctcacaagtgaatagtacaaatttgtcagccattcgttcattcagatatttatcagtttagttctgtgcatcagcattgtggaagacagaaactaataaataaagtcacaaccttcaagaaggttaggacctagctgaggtttccacagcactttggctgcctgtgcattggagagcagccctgaaagtcgacacctgagcttcagaaacaga

SEQ ID NO: 521549 - DNA, 547 bp, Homo sapiens
tcacgtgtatctttccagccacaccctccaaggctggggacacgcacttggaggcctcttagaatggaggacagcaaacagacagcagagaatgygctgggcaaaggaaattctgttattttgttaagctattattatgataaataatcacagggctccaggcgcaagagactttttcatgttggtaggagatgttatggcttttgttgctgatatgatctcagttaaaccttacaaccaccctgtgacgaagaccagttttatgaacgtctttaatgatggggaaactgaggctgcagtcagttttcagtcagactagtcacagaacagggactgagacacacggatatgactctgtgtgacaccacacacttccaggggagaacccagaacaaggtggagcaagcccgacccaatataccactagagagagctgtgagagggagaggaaggagagagggactgaactaaaggagcactatcaaaaagtggagtggagaccccagtcctagcaccaccgtttatttcctacagaccctaaagctca

SEQ ID NO: 521550 - DNA, 634 bp, Homo sapiens
tgccaagtataagtgcaattaaaatacttctaaataatggcatcaacttaagaattatggagatttttttcataaagaataagccatttggccgggcacggtggctcatgcctataatcccagcactttgggaggccgaggcggacagatcacttgaggtcaggagtttgagatgagcctggccaacatggtgaatccctgtctctactaaaaatacaaaattagctgggtgtggtggcgggcacctctaatcccagctaattgggaggctaaggcaggagaatcgcttgaacccaggaggtggaggttgcagtgagccaagatttgccactgcactccagcctgggtgacagagtgagactgtatctcaaaaaaaawaaataaataaataaagagaataaggcatttgatatagtttctttgcataacaaaatacaaataaaaccacattctatttcatctaaacactttctcccaagtcattctctcttagcctcatccctatgccacttctaagtccgtgtcatttccagctctctcctaggggacagacatcttcagccctctttaaacttcttaatccctgggcagcaactagcccaccataatccatgtagtagttactcagttaata

SEQ ID NO: 521551 - DNA, 606 bp, Homo sapiens
acagaaaatggtggctgggagagagtagagaagacagtamcacagaagctcttgggctgtcaccctgctcctggtctttgcagcgttcccctgcagactactcccatagccacagataacctcctgagactgcctgagggtgatcactgactcaaggtgctagctatgcaagagggagatctcgaacaaggaggcgacaggggttggtagacaaatacctcagcgtccttgtcctttggcggggcaattctgaagcagcttccacgtgccttctcagaagctccccagctaaactgtgccccagttgccattagcaatcacctggttgttaacacactctttattggttttgcttcttccctgtctcacttccctactccctcatggagcttcctgggaaaaatgaactacccaataaattccttgtaaccaagtacttgtctcattctcagggtttgcttcagagagaacagaaactaagacaaaggatatgagagttcttgtgggggagggggtgtctacaggactgcaagagatgactggctggaaggagaggggtgaggcagagagacctagaacagctcctggatttctgactgcataaga

SEQ ID NO: 521552 - DNA, 606 bp, Homo sapiens
acagaaaatggtggctgggagagagtagagaagacagtaccacagaagctcttgggctgtcaccctgctcctggtctttgcagcgttcccctgcagactactcccatagccacagataacctcctgagactgcctgagggtgatcactgactcaaggtgctagctatgcaaragggagatctcgaacaaggaggcgacaggggttggtagacaaatacctcagcgtccttgtcctttggcggggcaattctgaagcagcttccacgtgccttctcagaagctccccagctaaactgtgccccagttgccattagcaatcacctggttgttaacacactctttattggttttgcttcttccctgtctcacttccctactccctcatggagcttcctgggaaaaatgaactacccaataaattccttgtaaccaagtacttgtctcattctcagggtttgcttcagagagaacagaaactaagacaaaggatatgagagttcttgtgggggagggggtgtctacaggactgcaagagatgactggctggaaggagaggggtgaggcagagagacctagaacagctcctggatttctgactgcataaga

SEQ ID NO: 521553 - DNA, 606 bp, Homo sapiens
acagaaaatggtggctgggagagagtagagaagacagtaccacagaagctcttgggctgtcaccctgctcctggtctttgcagcgttcccctgcagactactcccatagccacagataacctcctgagactgcctgagggtgatcactgactcaaggtgctagctatgcaagagggagatctcgaacaaggaggcgacaggggttggtagacaaatacctcagcgtccttgtcctttggcggggcaattctgaagcagcttccacgtgccttctcagaagctccccagctaaactgtgccccagttgccattagcaatcacctggttgttaacacactctttattggttttgcttcttccctgtctcacttccctactcyctcatggagcttcctgggaaaaatgaactacccaataaattccttgtaaccaagtacttgtctcattctcagggtttgcttcagagagaacagaaactaagacaaaggatatgagagttcttgtgggggagggggtgtctacaggactgcaagagatgactggctggaaggagaggggtgaggcagagagacctagaacagctcctggatttctgactgcataaga

SEQ ID NO: 521554 - DNA, 606 bp, Homo sapiens
acagaaaatggtggctgggagagagtagagaagacagtaccacagaagctcttgggctgtcaccctgctcctggtctttgcagcgttcccctgcagactactcccatagccacagataacctcctgagactgcctgagggtgatcactgactcaaggtgctagctatgcaagagggagatctcgaacaaggaggcgacaggggttggtagacaaatacctcagcgtccttgtcctttggcggggcaattctgaagcagcttccacgtgccttctcagaagctccccagctaaactgtgccccagttgccattagcaatcacctggttgttaacacactctttattggttttgcttcttccctgtctcacttccctactccctcatggagcttcctgggaaaaatgaactacccaataaattccttgtaaccaagtacttgtctcattctcagggtttgcttcagagagaacagaaactaagacaaaggatatgagagttcwtgtgggggagggggtgtctacaggactgcaagagatgactggctggaaggagaggggtgaggcagagagacctagaacagctcctggatttctgactgcataaga

SEQ ID NO: 521555 - DNA, 523 bp, Homo sapiens
ggaatcagacacaagctaataagttactgatataagggtcccaaggtgcttggaggggccctggcagacacccttagtgcctaggctgtgycctttgggcccctcactttgtgtcaggtgtgctggtgacccttcctcatccaggagcccaggaacagggtctgccatagagaacggtgtgtccagcctcctgtgatagtccaagacctgggctcagatgagctgtgcagctagtcaggaggagggctcccgggaatggggcttcacaggtgtggatccctgtttttccccactccagaggtgtcagttgtaaaaatgatcctgaagccatatctgatgggaggctttggctcttcaaagtacgcttacaggggaagtgactttgagtgagcaaggagttcgatcttgggaggaggaggatagtttctgttttagagaaaaggggaagaagcctgtgtgtgtcaagcggggggtgcagggccttagtgtgctcatactgcaggaacagtgacatgcagaaacg

SEQ ID NO: 521556 - DNA, 523 bp, Homo sapiens
ggaatcagacacaagctaataagttactgatataagggtcccaaggtgcttggaggggccctggcagacacccttagtgcctaggctgtgtcctttgggcccctcactttgtgtcaggtgtgctggtgacccttcctcatccaggagcccaggaacagggtctgccatagagaacggtgtgtccagcctcctgtgatagtccaagacctgggctcagatgagctgtgcagctagtcaggaggagrgctcccgggaatggggcttcacaggtgtggatccctgtttttccccactccagaggtgtcagttgtaaaaatgatcctgaagccatatctgatgggaggctttggctcttcaaagtacgcttacaggggaagtgactttgagtgagcaaggagttcgatcttgggaggaggaggatagtttctgttttagagaaaaggggaagaagcctgtgtgtgtcaagcggggggtgcagggccttagtgtgctcatactgcaggaacagtgacatgcagaaacg

SEQ ID NO: 521557 - DNA, 523 bp, Homo sapiens
ggaatcagacacaagctaataagttactgatataagggtcccaaggtgcttggaggggccctggcagacacccttagtgcctaggctgtgtcctttgggcccctcactttgtgtcaggtgtgctggtgacccttcctcatccaggagcccaggaacagggtctgccatagagaacggtgtgtccagcctcctgtgatagtccaagacctgggctcagatgagctgtgcagctagtcaggaggagggctcccgggaatggggcttcacaggtgtggatccctgtttttccccactccagaggtgtcagttgtaaaaatgakcctgaagccatatctgatgggaggctttggctcttcaaagtacgcttacaggggaagtgactttgagtgagcaaggagttcgatcttgggaggaggaggatagtttctgttttagagaaaaggggaagaagcctgtgtgtgtcaagcggggggtgcagggccttagtgtgctcatactgcaggaacagtgacatgcagaaacg

SEQ ID NO: 521558 - DNA, 640 bp, Homo sapiens
agtttggtcccattttgttttcttttataatagggcagcactgagttcaatgcttcacaactgctgtgatctccctttccccagtgcacagaaatgctctccacaccatgctgccactgccaggggttaggagaggggtggtgttggctattcaagactttttttctacctyttcggtgcctctttcagtgatatgaagtaaaaccaggtattgtaactgctcatttgatttttagttcttatgaaggctcttttatttgtgtgtacacagttgttaaattagtgtccttcctgggggagatgattgctggaggcttctattccatcatcttgctctgttgtttttatgttttctcatttatctcttttaactgaggtatttatttgcctttaaagtaattactgacatggaaggacttactattttcgttttgttacttgtctatatatatggataatacattcaatatattttaatatgtcttgtccagtggtttttgctccttttctcctttgctgccttcttgtatgttttgtactgacatattttgattctcttttcaattctgtttgtgtatacagacagtacctgaatgtaagcccagcataagataaaaagttcctatgatttacaatgggg

SEQ ID NO: 521559 - DNA, 640 bp, Homo sapiens
agtttggtcccattttgttttcttttataatagggcagcactgagttcaatgcttcacaactgctgtgatctccctttccccagtgcacagaaatgctctccacaccatgctgccactgccaggggttaggagaggggtggtgttggctattcaagactttttttctacctcttcggtgcctctttcagtgatatgaagtaaaaccaggtattgtaactgctcatttgatttttagttcttatgaaggctcttttatttgtgtgtacacagttgttaaattagtgtccttcctgggggagatgattgctggagscttctattccatcatcttgctctgttgtttttatgttttctcatttatctcttttaactgaggtatttatttgcctttaaagtaattactgacatggaaggacttactattttcgttttgttacttgtctatatatatggataatacattcaatatattttaatatgtcttgtccagtggtttttgctccttttctcctttgctgccttcttgtatgttttgtactgacatattttgattctcttttcaattctgtttgtgtatacagacagtacctgaatgtaagcccagcataagataaaaagttcctatgatttacaatgggg

SEQ ID NO: 521560 - DNA, 510 bp, Homo sapiens
ttcagactcggcccagtctgtgaggtcagtgttaccatcaaagggtgaggacatcgaggcctatggtggtgaagcaccttgtcccaggtcacagagccaggaagtggcagagccgggaagaggcccaggcagctgggatactgcctgtgttctcctaacgacagttctgcagaagctcagtaataacctgaatgacaccaccattaggggctctgtgcacatcctctccaatcctcacagaacccagaataggccatgataatcagcatctcaccgatggggaaaccgaggactcaagggaaggcaagactggcccaagatcacacgatcttgaaataacacctcactttgggggtgcctacagtgygctaggtgatttacagagagaaccttacgcttacgactttcctaaaggagtccatgattgtctctattctacagatgaagatgccgtggctgaacaaaatgaaggcactgtctcccgattctccatgtgtcccagtgggcatt

SEQ ID NO: 521561 - DNA, 424 bp, Homo sapiens
ttgcagagagggtggtggtgcccagggttggctctgaaggcacagtgatgatgatactgaagatatttcactgtttgatttagaagggagggcagacaactaatagaccaaagaaatttaaactcagagatccagtggcctcacttttcctttaattatttcaagtcagtgcaatcgccacctattttctctatgaaccgcccagcagttgctttcttgcctgtgtggcctgtgtggtgacaatgatctcgttgtcaggtggcttttgggcagtgaagaatgtcaccggtagagtaatgattggactatgttggtggaatcacattgatgacaatggaaagggccattgggcatttgagtcctgggagrcatcctcttaagagagtaaaactgtcttagaggctgaaagaagaatcttctggtt

SEQ ID NO: 521562 - DNA, 472 bp, Homo sapiens
agccacagatcatgggacaagctattagagctggcaggactaaggaatgttctctgcagccctagacctaggggctctctcttctttctccccctctgtctcctgctgtctattcatccttctcttcatttctgctctcaccccaatatgagagattgtagggtgtagtcactgattcattcaacaaatattagcatgmgctatgtaccagaactattcttggtgcttaggatacatcagtgaataaggcagacaaaactcactgtccttattaactgaagtacacatcccaattggggaggcaggcaatacacaataataaataaagtaaataagtaaatgatatagtatcttagaaagtgataaggcctgtggaaagaaatatagaccagggaaagggggttggggtaagcaggtggtgaggggctgtgagggccaaggtaagaactttggctttacttgcagtgagatg

SEQ ID NO: 521563 - DNA, 608 bp, Homo sapiens
taggtcagtgcctggcacatagtaagcacttaataagtatttgttgcatgaatgggtgagtcatttactaactagatgaactttgagaaagttacttaaattctccaaacctctgtttcttcatccgggaaatgggcataatagtcatatcacagggttattaagaggcataaacaagatagtgtataaaaatcagttggcacagtgcctaacacaaagccaattatcaaaaataactacactattgcctgaataaagtgataggaacatgtctgaatctattccattcccatggtgtaagattsaggaaatgggaaaagagttcagtgttcatttgttggtaaaaaaatttttttaagccaaacactttcaatttcagagtcataaaagagatgtgaatgtcagaatggtcatatcaaaatgtcatgcatattacaattataacaagactggacccaaattagaaggagttattctataatgtgtttattgaggagaagtattggtttgcagaaaattaccatggaccttaggaaatgaaggcgccatggtccctgccattgtatctgtcttcacagttatggctgctcatggggcccattcagaag

SEQ ID NO: 521564 - DNA, 499 bp, Homo sapiens
ggtctccctccaccagaatggaagccccttgaggagagggactccttcctggccatctttgcatccccaacaccaacaacggctcataagtgttgattgacttcctacttgaagaagctcctcctgactgtctgcaccctctccagcgtctccatctttggagtccctgaagtgctgatttggcactactcccacatcgcttacagtggaactttgcrttcagatgcgtcctggctcccaggtacattttaagtttctccatcttcagtgtctctctgaccctgccccacccccacatagttcctagcacagggcccttgcacaatgtagatactcaaaaaaaatgttattatttatctggttggctggttggcacttttatcctctcttcagtccccatctcactcctttgggctgaaagtttatccctgattgttttcctcctgtggttagtgtcacaattactccctcttattgctttgattgtgatatgaacttc

SEQ ID NO: 521565 - DNA, 620 bp, Homo sapiens
ccccttttttccacaaccttgccagcatgttattttttgactttttaaaaatagccattctgattggtgttagatggtatctcattgtggttttsatttccatttctctaatgattagtgacaccgagctttttctttttttcatatgctttctggccacaagtatgtcttctttggaaaagtatctgtccatgtatcccagtaaaattaattttgcttgtttctctgcacttttagaagtatggctactagaaaatttatgattgtatatgtggctcagattgtatttctattggacagcactgtctggactctagaagatgctctgattcaagaggatgtaaagaaattctctaagccgataagaaaaatagaagaaacccaaatgggcaatgagtgcatgggaactcactcacctcagtggaaaggagggaatggcaagccagcccactgaagcccactggggacataggacaagtctgcaaagcagagacagcccctccaggaagagcgaccaggccttgagaggacatggccttaggaccagatccagggaagacacagtcactaacccctggctcatctggcaggtgtgggaagcagccaggcccgtggcttca

SEQ ID NO: 521566 - DNA, 620 bp, Homo sapiens
ccccttttttccacaaccttgccagcatgttattttttgactttttaaaaatagccattctgattggtgttagatggtatctcattgtggttttgatttccatttctctaatgattagtgacaccgagctttttctttttttcatatgctttctggccacaagtatgtcttctttggaaaagtatctgtccatgtatcccagtaaaattaattttgcttgtttctctgcacttttagaagtatggctactagaaaatttatgattgtatatgtggctcagattgtatttctattggacagcactgtctggactctagaagatgctctgattcaagaggatgtaaagaaattctctaagccgataagaaaaatagaagaaacccaaatgggcaatgagtgcatgggaactcactcacctcagtggaaaggagggaatggcaagccagcccactgaagcccactggggacataggacaagtcygcaaagcagagacagcccctccaggaagagcgaccaggccttgagaggacatggccttaggaccagatccagggaagacacagtcactaacccctggctcatctggcaggtgtgggaagcagccaggcccgtggcttca

SEQ ID NO: 521567 - DNA, 534 bp, Homo sapiens
cccagtgccaggtcagactgagacaytttttggttttgttttaggggttctttgtgttttggagggaattgcaattttatttccttgtttgttgtggtcatctagatattaactgtctcctccccctcccaaggatgtactcaattcctaggatctggtatagacttactaatcactggtatgcatctttttgtctgcctggaggcgacaagattgtgttttgtcacactggttacaaggcgaaagggtaaaaagaaggcaattaaaaataaagttataatataaattgtactgcttctctctttgaaggacttcattagacctattaggagagctgtttgatatggttgagcagggtgtgcactgaatatttgtagaaatgaatatttattataaaaaatttcaggtagatggcagaaaaataccttaaggaagggggcatctttttctaatttgcacaaagatactgtctgggctactagaaactctccctgctgaagatggttggctgctatgaaacataacagcagtaac

SEQ ID NO: 521568 - DNA, 248 bp, Homo sapiens
aaagatggcccagtgccaggtcagactgagacattttttggttttgttttaggggttctttgtgttttggagggaattgcaattttatttccttgtttgttgtggtcatctagatattaactgtctcctccccctcccaaggatgtactcaattcctaggatytggtatagacttactaatcactggtatgcatctttttgtctgcctggaggcgacaagattgtgttttgtcacactggttacaagg

SEQ ID NO: 521569 - DNA, 542 bp, Homo sapiens
ctctctgatcctttttacttcttatttcacttcattctcttgttttctggctattactaagtgctcgtcatgttttcatttcaatctattcctccttgagtgtcttataagtttgtcttcatttatcatataatattgtctttttctttgatttctttcaaaagtttgttgaaatctttttgtttctttactttttttgtccatttctattcttagtttttgaatttttaatttatgatctcatatttggggtatatcycatatcccaaaatgtttgtttgaagatatttaatgtagcttaatgttacggttttttaaattttttttctgtctcaccattttttttttggtggaattttctttagttgaattgtttggattctcattttcattttttttaatagactacaactgtttgcgtgtctgcatttctgtaaacagaactgtcagattctagtgtttttgagatttccctagttcaggaaaatgcttctggcagtgtagcaaagtacagtttctttactggattgcaggggaaggag

SEQ ID NO: 521570 - DNA, 542 bp, Homo sapiens
ctctctgatcctttttacttcttatttcacttcattctcttgttttctggctattactaagtgctcgtcatgttttcatttcaatctattcctccttgagtgtcttataagtttgtcttcatttatcatataatattgtctttttctttgatttctttcaaaagtttgttgaaatctttttgtttctttactttttttgtccatttctattcttagtttttgaatttttaatttatgatctcatatttggggtatatctcatatcccaaaatgtttgtttgaagatatttaatgtagcttaatgttacggttttttaaattwtttttctgtctcaccattttttttttggtggaattttctttagttgaattgtttggattctcattttcattttttttaatagactacaactgtttgcgtgtctgcatttctgtaaacagaactgtcagattctagtgtttttgagatttccctagttcaggaaaatgcttctggcagtgtagcaaagtacagtttctttactggattgcaggggaaggag

SEQ ID NO: 521571 - DNA, 639 bp, Homo sapiens
tgggggtcattttactgcaaaatggctgccctttgtgtctctgggaaaagggtgctgagaaatgaatgtcgagggctgtagaaatgctgaataataagtgaacttgatcacatcgggcagcgagtctgaatgcctccctttgatttgacccagttataccttcaaggtcccaggactggtgctttggaaaaagtgactggctccagcacatctctgtgtrcctcaatgctatcagatctccatcatggactctcatctcaatagaatgttaagttttgagaataataactcaaagaatttcctggaaaaggcagaggaggtgaggggtgggattgtgaatgggcatactggagacccagctccaagaggaagattaatttagaactcagagggaggggccttggcttaagctggagccaggctgcatgggccctgatgggaataaatagaagccccaggttttgtaggtgtttcacctcattcctttattcattaagtcaatgggcaggtgtgggattaggtcagttttgctcgtattgcatttgagatgtcccatatagattgaggtttgggcgatagaggtttgggttgtgggaggaagcaattctttactcttttcccaagactgtactgaaagca

SEQ ID NO: 521572 - DNA, 484 bp, Homo sapiens
gaatggactatgaagctgtgatccttaggaaagtatattttttaagaaattatgtttaagaaatattgtaatatacrttatgtatatatatgtataatgagatattatttttaagccttatacctatctttgtatttgtaaaattttatatttaaaaaagtggtctcaatattacataaacttcaggtcccataaaacctggatctgccccagatttttatatacaatgaaagataaatgtaataggaataaaatagcgatgaaatgaaccatttaaaaataataattatattttaacagaacaaaacgtggatttttctaaactatgatgatgttaatgttgttatatttatggtagtatcttattgagaaaacatgatagaatatatttaaccattttgaaaatattagttccatactttgagatacagctaacagaaggtctgcttattttaatttaaggttgtttattttaagtttgaag

SEQ ID NO: 521573 - DNA, 589 bp, Homo sapiens
ctgcaaatcatagtatgtgcttaataaattgtagccatattatctttgctgccagaaatacagtggaaggtagrctgatggagatcatttataggaatttaccactctgcaggcacattagaactttgtgggaataagattgttttaatgatgaatagattatttagtgtcattcagcaacaataccacattcttacaggttgggctgcgtgtaggagacatacagtggtattaactacgaggcttctgactaataagtttctggcctaagagtccactatgtaaacaaacaggatgaaatagggagcagaggattttctactttatactaatgaagagtttaaagtctcaggctctagcagaaagggccagacactatttgttttttctagctttgacatccctttagggcatttttattgagacatttttttaaacactgttctttaaaagcagcccaggcagcctaatttggtgagtggtgtctggaatctttctgaaacacaggtaaaggatgataaaactctgctgttagatgcagagattttgtggatctatttgtaaagtcctttagacatttcaaagcatt

SEQ ID NO: 521574 - DNA, 618 bp, Homo sapiens
atagcagtggtcgcagggatgaggttgagaggcagaagcaggtgggaaaggagggtttgatctgcacttgactgaccttcttgtcgtagtctgctcaggctgctaaaacaaaatgccatagactgaatgtcgtctaaacgacagaaatttatttcttacagttctggaagctggaagtccaaggccaaggcactggcagattcagtgtctggtgaggacctgtttcctggttcatggttagcgccttcttactctgtcctcacactgaggaaggggcaagggagccctttggagtctcttttatagatttagtaatcctattcttaatcatcttcccaaaggtcttacctcctaatcaccttgccaaaggtcctaccccctgccttgggggctaggaatttagcatgagaatttggggggaacataagcatgaagaccatagcacccttgcatccgtaggaccattgaggtgggaggctgccctttggacaatrtctttccacattccagcaacacagtttccccactgcctgctccattttaaccacaaatactaggccaatttattaaattgagttatttaatactgaatttaaaggaaggagagttgtaacgcag

SEQ ID NO: 521575 - DNA, 599 bp, Homo sapiens
tgctcatttaaactcactgggaaatacaggctttctgaagagactgacacactatctgcatactccaatgggacagcattttccttactgccctgactggtccctgcagacatggaaacacttgccccatctcccagcaaagtcccctcccagcaaagaggggactcgggagatgtgagtcttttaaagaagattatgtggcatggattagattgatggaaatgaagctgattkaatggaattagttttttttaagtgcagcattctttttacactaaggtgcagtaacggagactggatttactctcctgcctaaaataaccaaagtgtggctaaaatatagaaaacactgttcatcactgtaacaaaggccagcgatgcctgggagatgggaaacaagccaagcgaatcctgtggctgccccagttgtttgccttgacagaccttctaggtcacaacgcagggcaggaagagccagaagacttcccgagtctttaagtccatgcagactagagtgactaaagtctgaaggacagagtactagaaaggacagagtgcacagagagagacatcattgatcagcagatcagtcaggcagt

SEQ ID NO: 521576 - DNA, 301 bp, Homo sapiens
tgtgtttattctattacccaagtattctattggaatctttatttcagagttcacctatttaacttccgagtctctttcttgttctcttattgttcctttttggtatcagcttgtttattacatgtaagatcctttttgatctctctgagtatactctgtagaatttttttaaaaattctctgctatttcctkaataatttgtcttctctgcagtaagttgtatgtttctctatgctggtctttttttatttgtcagttttcctcaaaagtctgtccatgtcatgagtgaaagattaaatga

SEQ ID NO: 521577 - DNA, 558 bp, Homo sapiens
actgcaattaccatcctcagtgtacctaaagcaaacaggcttgccaggagagcaggtarataacttgtccaaaggcaaattaattgacagagtttcaaacccaggcagttggttgccaaaactcctgtctttaactactacagatatactttcctacctaaaggctgaagtactaatatgactcatgataggaaaaccaaactacagaaaaggaatatggcttgatacagatcttgttgaacctcacaagtccttggcaccaggtacttaacaaaaaggtgacccacagacgattgcatttctcccagtgcagtttgaattttcctcttggctgaatcatccactcttgggtttgatctggtaccagcctgaccctgtctgacctgggctaggaaggaacagacatgggtccaggttggtgtgctggcaggttttggacacctgctgattcaggctgtctgcagttagctctctgctgtatgggtttgttgttgcaaacctttgtaatttttgttgttacaaaaaacctttgttgttacaaaattatggtggcagctg

SEQ ID NO: 521578 - DNA, 576 bp, Homo sapiens
gaatttgttttagataaacaactctgggataggggctcttgctgttctgccttacctctggaagggtacaggaactgaagggacgagaggacaaacccgaagtaagggaacgagtgggaaagtatggaagcaattattacaagctgagatgagccagggaatcaaggactagagagcccatcttggctcatgaaaatgagcaaactcagtatgacgttggaactgcaatccagaaacaacaatctcaacaatgcgactggagtgttattctaattgaaatatataaaagtacatcatcatcctcctcttcagctaattgttccaaagccatctattacccaactgtgttggtagaggaggatttgatttaagaagactcagaaaacatttaaaaatygtgtttgaatggaatatggtaataagccttttatgtgagagcatcaaataaaagaaagcagctcagttatgacatgtcctgcatttcctttcattgaatgcatctgaaatattttgaattttaaatataggataaacataatttcttctaaaaatagtttttgggtcttagtttttaag

SEQ ID NO: 521579 - DNA, 576 bp, Homo sapiens
gaatttgttttagataaacaactctgggataggggctcttgctgttctgccttacctctggaagggtacaggaactgaagggacgagaggacaaacccgaagtaagggaacgagtgggaaagtatggaagcaattattacaagctgagatgagccagggaatcaaggactagagagcccatcttggctcatgaaaatgagcaaactcagtatgacgttggaactgcaatccagaaacaacaatctcaacaatgcgactggagtgttattctaattgaaatatataaaagtacatcatcatcctcctcttcagctaattgttccaaagccatctattacccaactgtgttggtagaggaggatttgatttaagaagactcagaaaacatttaaaaattgtgtttgaatggaatatggtaataagccttttatgtgagagcatcaaataaaagaaagcagctcagttatgacatgtcctgcatytcctttcattgaatgcatctgaaatattttgaattttaaatataggataaacataatttcttctaaaaatagtttttgggtcttagtttttaag

SEQ ID NO: 521580 - DNA, 602 bp, Homo sapiens
gtagaagttggatttaccaaatgtaaaatacagaatgcaaagtatttgtatctaaagaaataaaagaccaaatttaaaacatgagtgaagcttaaaagcttacataaaagtatctggtaaatttgaaaatagaccacagaggattccaagacatacctagagtcttcaaagtacaactgtagaatacaaaagaaaaaaaatatattttagaagaagttagcttaaatgcaggtcacgaacagagarcatctttctctatttacaacctggtcctcctgactctcaatttagttctctttttgactttccatagttgtacaattactaaggtaaccgtttggagaataaaaaataaacaaattaacaaacggaaatgaggaggtcaaattgaaggaagtataaacaaatgtttcatttttcatagtggagtctacaaaggagtataggaacaaatataaaatactggaaaaaagttgtaaatttaattcaacaggatatgataatggtttgcagtgacaaatggaaatgcaaagaagttttaatattagaaaaatctattagtataatgtattatattattaagtgattgaaggaaagaggcc

SEQ ID NO: 521581 - DNA, 602 bp, Homo sapiens
gtagaagttggatttaccaaatgtaaaatacagaatgcaaagtatttgtatctaaagaaataaaagaccaaatttaaaacatgagtgaagcttaaaagcttacataaaagtatctggtaaatttgaaaatagaccacagaggattccaagacatacctagagtcttcaaagtacaactgtagaatacaaaagaaaaaaaatatattttagaagaagttagcttaaatgcaggtcacgaacagagagcatctttctctatttacaacctggtcctcctgactctcaatttagttctytttttgactttccatagttgtacaattactaaggtaaccgtttggagaataaaaaataaacaaattaacaaacggaaatgaggaggtcaaattgaaggaagtataaacaaatgtttcatttttcatagtggagtctacaaaggagtataggaacaaatataaaatactggaaaaaagttgtaaatttaattcaacaggatatgataatggtttgcagtgacaaatggaaatgcaaagaagttttaatattagaaaaatctattagtataatgtattatattattaagtgattgaaggaaagaggcc

SEQ ID NO: 521582 - DNA, 667 bp, Homo sapiens
agcatagggcattatgggttaagtcgttccagtctccacacacagtgtctggaattgtggatctgtgaaagcttttaacaactggtcccgggacaaaactaaaccaatgagctaataaaaaggaaacgaagtagtggagggtagtgggaggggtgataatttttcaagaaaacctccaaattagtattttgcaaatgtagttaaagtggaagaaacctttttttgagtcaaaattcataaattaaattccaagactctgcttgaggggactctggggcagccccaaacttcttccacccaccccctactccctgcagcacctgaagcatgccccagatccctgaggctctgcagaccccagctcaaatctccattcagtagaaaatcaatgtcaaagagcttttcccaggtctttcagatagtagaattatatgtgaaaaagtcacctggcaatgttagtktacgttcaaaacctcaaaggaaagacattgagaaaccaatacaaatgagaaaaaaaaaaaaaaacaaccttaattcaaacaaaaacagcaagccctgaaatctaaattctaaggcagagtgtaaatgaatgtctaaatgcaacagaaacatagtttttattataaatgtccacatgaattgccagctttaaataaaccatatatat

SEQ ID NO: 521583 - DNA, 667 bp, Homo sapiens
agcatagggcattatgggttaagtcgttccagtctccacacacagtgtctggaattgtggatctgtgaaagcttttaacaactggtcccgggacaaaactaaaccaatgagctaataaaaaggaaacgaagtagtggagggtagtgggaggggtgataatttttcaagaaaacctccaaattagtattttgcaaatgtagttaaagtggaagaaacctttttttgagtcaaaattcataaattaaattccaagactctgcttgaggggactctggggcagccccaaacttcttccacccaccccctactccctgcagcacctgaagcatgccccagatccctgaggctctgcagaccccagctcaaatctccattcagtagaaaatcaatgtcaaagagcttttcccaggtctttcagatagtagaattatatgtgaaaaagtcacctggcaatgttagttyacgttcaaaacctcaaaggaaagacattgagaaaccaatacaaatgagaaaaaaaaaaaaaaacaaccttaattcaaacaaaaacagcaagccctgaaatctaaattctaaggcagagtgtaaatgaatgtctaaatgcaacagaaacatagtttttattataaatgtccacatgaattgccagctttaaataaaccatatatat

SEQ ID NO: 521584 - DNA, 667 bp, Homo sapiens
agcatagggcattatgggttaagtcgttccagtctccacacacagtgtctggaattgtggatctgtgaaagcttttaacaactggtcccgggacaaaactaaaccaatgagctaataaaaaggaaacgaagtagtggagggtagtgggaggggtgataatttttcaagaaaacctccaaattagtattttgcaaatgtagttaaagtggaagaaacctttttttgagtcaaaattcataaattaaattccaagactctgcttgaggggactctggggcagccccaaacttcttccacccaccccctactccctgcagcacctgaagcatgccccagatccctgaggctctgcagaccccagctcaaatctccattcagtagaaaatcaatgtcaaagagcttttcccaggtctttcagatagtagaattatatgtgaaaaagtcacctggcaatgttagtttacgttcaaaacctcaaaggaragacattgagaaaccaatacaaatgagaaaaaaaaaaaaaaacaaccttaattcaaacaaaaacagcaagccctgaaatctaaattctaaggcagagtgtaaatgaatgtctaaatgcaacagaaacatagtttttattataaatgtccacatgaattgccagctttaaataaaccatatatat

SEQ ID NO: 521585 - DNA, 667 bp, Homo sapiens
agcatagggcattatgggttaagtcgttccagtctccacacacagtgtctggaattgtggatctgtgaaagcttttaacaactggtcccgggacaaaactaaaccaatgagctaataaaaaggaaacgaagtagtggagggtagtgggaggggtgataatttttcaagaaaacctccaaattagtattttgcaaatgtagttaaagtggaagaaacctttttttgagtcaaaattcataaattaaattccaagactctgcttgaggggactctggggcagccccaaacttcttccacccaccccctactccctgcagcacctgaagcatgccccagatccctgaggctctgcagaccccagctcaaatctccattcagtagaaaatcaatgtcaaagagcttttcccaggtctttcagatagtagaattatatgtgaaaaagtcacctggcaatgttagtttacgttcaaaacctcaaaggaaagacattgagaaaccaatacaaatgagaaaaaaaaaaaaaaacaaccttaattcaaacaaaaacagcaagccctgaaatctaaattctaaggcagagtgtaaatgaatgtctaaatgcaacagaaacatagtttttatyataaatgtccacatgaattgccagctttaaataaaccatatatat

SEQ ID NO: 521586 - DNA, 643 bp, Homo sapiens
ctgggactactaaaaggaaagacccaggagacctatggggaggaggagaatgaggtcagggtatttatgccctggttctttccctgtgaggwcaccttggctttctgagcctcttgacatgacaaaatgactcagtcttctccccttccaggtcctggtaatcattcacaccctcctttgggcctatggatgacaatggcctaggtttctgtagtataccttgttgtttcctcaacactctacctacatttttttttaactaatctctttgtcagtaagtattcctcagtttatcctaatttgggagtgcctcctgtttcctataggaattctgcctgataggcttagatgtagaaatcactcaatccctcctcacaagaaatgatacatcttattacggtatctggttcaaaatccagaatatccatgagataataatatctctatcatgtctgaatgcagtttctcttagttcagaaatgtatgacctataaacacattttctgctgactctccattatataatggagaagaacacaattaaccacaaaacaggaataatggaagacacaaattcaccatttgtctactcattctttctgggcagatgtttgagaacctgaagatgcagaatttttcttga

SEQ ID NO: 521587 - DNA, 643 bp, Homo sapiens
ctgggactactaaaaggaaagacccaggagacctatggggaggaggagaatgaggtcagggtatttatgccctggttctttccctgtgaggacaccttggctttctgagcctcttgacatgacaaaatgactcagtcttctccccttccaggtcctggtaatcattcacaccctcctttgggcctatggatgacaatggcctaggtttctgtagtataccttgttgtttcctcaacactctacctacatttttttttaactaatctctttgtcagtaagtattcctcagtttatcctaatttgggagtgcctcctgtttcctataggaattctgcctgataggcttagatgtagaaatcactcaatccctcctcacaagaaatgatmcatcttattacggtatctggttcaaaatccagaatatccatgagataataatatctctatcatgtctgaatgcagtttctcttagttcagaaatgtatgacctataaacacattttctgctgactctccattatataatggagaagaacacaattaaccacaaaacaggaataatggaagacacaaattcaccatttgtctactcattctttctgggcagatgtttgagaacctgaagatgcagaatttttcttga

SEQ ID NO: 521588 - DNA, 633 bp, Homo sapiens
gcttgagagaacagtgttgctgctggcagagatgcattccagagatgcactccgctctggaactcactctcagccacagggagctgcatgcaccacaggggcaatgcacctttgcaggggtaccttctggccccaacccttgactcaacggggacaactccagaaggtcattccagatccagagatccccatcgaactgaaggatcactgggttgcagacacattgcaggtcagcttcttcctctgcccagtcctgccctcactccccagtgaatcctcaattttctgtctcgttgtctgtccagataattgattctaagacatgttaggtatataaggagtgtagataaggcttcagccatgagtcaccccscagtaagccccagagtatattgaatagaaattctgcatgtgtggggagaatggacaaggacttaggaaaaagtcctcatcaaagaacagcttttttgggacaagctttacatgggtggggagggaaaatgtgaaacacattagcaataagttaaacctcatcttgtactaaaggaggacacactcagggagaagacctctgtgggcagggcttgtgggtggagcttcatcccgatgtcactcctcaactgacttaggagg

SEQ ID NO: 521589 - DNA, 528 bp, Homo sapiens
agtgctgggctcaatcccagcactttgggaggctgaggcaggtggatcacctgaggtcaggcattcgrgaccagcctggccaacatggtggaaccctgtctctactaaaaatacaaaaattagccaggtgtggtggcacatgcctgtaatcccagctacttgggaggctgaggcaggagaattgcttgaacctgggagatggaggttgcagtgagccaagatcacaccattgcactgcagtctgggtgacagagtgagacttcgtttcaaacaaaaacaaagtaagcacatataattttttaaatcattttttctaaaagagagaaaatggtagaggattcttgacagacatgagattctctcattgcataatctttttctataccatgttatgcttttttattttctctaatatgcatgaaatgtgtaagggataaaatctgcattctcgtggaaagattatttttatctagccccatatcttattcattaattttaacctagaaatcattttggagaacagccaaa

SEQ ID NO: 521590 - DNA, 528 bp, Homo sapiens
agtgctgggctcaatcccagcactttgggaggctgaggcaggtggatcacctgaggtcaggcattcgagaccagcctggccaacatggtggaaccctgtctctactaaaaatacaaaaattagccaggtgtggtggcacatgcctgtaatcccagctacttgggaggctgaggcaggagaattgcttgaacctgggagatggaggttgcagtgagccaagatcacaccattgcactgcagtctgggtgacagagtgagacttcgtttcaaacaaaaacaaagtaagcacatataattttttaaatcattttttctaaaagagagmaaatggtagaggattcttgacagacatgagattctctcattgcataatctttttctataccatgttatgcttttttattttctctaatatgcatgaaatgtgtaagggataaaatctgcattctcgtggaaagattatttttatctagccccatatcttattcattaattttaacctagaaatcattttggagaacagccaaa

SEQ ID NO: 521591 - DNA, 528 bp, Homo sapiens
agtgctgggctcaatcccagcactttgggaggctgaggcaggtggatcacctgaggtcaggcattcgagaccagcctggccaacatggtggaaccctgtctctactaaaaatacaaaaattagccaggtgtggtggcacatgcctgtaatcccagctacttgggaggctgaggcaggagaattgcttgaacctgggagatggaggttgcagtgagccaagatcacaccattgcactgcagtctgggtgacagagtgagacttcgtttcaaacaaaaacaaagtaagcacatataattttttaaatcattttttctaaaagagagaaaatggtagaggattcttgacagacatgagattctctcattgcataatctttttctataccrtgttatgcttttttattttctctaatatgcatgaaatgtgtaagggataaaatctgcattctcgtggaaagattatttttatctagccccatatcttattcattaattttaacctagaaatcattttggagaacagccaaa

SEQ ID NO: 521592 - DNA, 391 bp, Homo sapiens
cctttctgataaaactgagtatgtcttccattccacgttgctttgacatctacctatttgctgagtgcctgacattattctaataactttactccaggcattgtatttttaaagttctccaatttctatttttaatcatttctctctctccacttagaatttccatctttttgtttattataagcatgtcttcctttacttcattgagcatacagccaatagtcactttaacatcctcacctgctgattccaatgtctgggtcctctctcttctgttgtcatcttcctggtgcttcatgtactgagtaattccktattgtcttctggcattgtggtcagaatgctgtggagtgaattatcctctaagaacaatgctaatggttgtttatta

SEQ ID NO: 521593 - DNA, 599 bp, Homo sapiens
tgacatcatggtgaataaaaacattttctgccacaggtagaaacagcctttgctcatccctccatctgtcagagatcttgctttttcttttacaattgtctttaatgtactgttccatggcaagccaggtgttccattttcccagatggtcagggaagatggtatttrgacatgacaggctgtcactcagcaggatacttgcccagtttgtcagctctgatctgtgagcaaagatgcatatgagtttcacactcatctgtgaagtattggcttcactttcattaaagtcatcatagctggcattccttagatgctagaggtggatgcaaaggatcaactaaatatagcacgttttggcggcactgcctcagaaaccagacatgaatcctagcaaatgtgggcattgacactcttctctgagaggttggaggtagtgaattacccccatctcccacattctcattccataagtagatgacagcatagcctcagattccttaaggacaaatgttagaatcctagggctgtgttttctgagacagctccaccatggtgtacaccatcagccagcagcacaccctggaaactgtcttgctgac

SEQ ID NO: 521594 - DNA, 612 bp, Homo sapiens
tcctctagcattgacaacattgctccaagcaactgcatcttcccttgatggaacagtatccactttgtgcaaccttgagtttgcccgtaagacactcatgattccaacacagcttttttctgtactcatttatgcatctaccagttcactggcacacaagtaaacagttattgggtatctaccatgggccagaaactgagcttatctaatcttcctggaaaccttgtgaggcggcactgcttgaacccgtcttacagcctttgaagggtcatgtggtgcccgtggccatgtgaccagcaggtktcaggctggggtcacacccaggtgtgtatgctgttcacaccacatatcagccctgcggggtgcttacagcggaaattgtgcaggttcctgcccaagagggacatgtaaatacatctagaagtagttgttatcttcccaaacaatgcagtacataaattgaatcccagtgcactctcatcaaaactccttgagtgcccccacttgcacccagaacatttttcaatgtcactctttcagtctttttttcagtgtctttgacctacagcccctacagtcatctcccactgcttgtatctctctttccacctc

SEQ ID NO: 521595 - DNA, 641 bp, Homo sapiens
gcccctagcgtatgcctggtgtccgggtcacgtagtaagcctggctccgcggcacgcgtccctctcaggaactggtagacagcacgtgcgcaagcgcattaaagtcgcagagatggcgagcgagaasggaccttcctcaaggctgtcgctgagtaatgacgtaagccaccagaagcggagctgaggcctagatgtccactgcggttgcgcattttagtcccactgctcgcggtagctgggtgttggctgcggtttgcctcttcactcttcatatcccagctaaagtacctcggctaagaagggcaaaatagatgtccgcaccccagggcctgcccacgtaggtccagggttttcagcgtcagcctggttacgcgaaacgcgacggatccaacgatttgtgttcaatttaaccgatccccgttaagttgaggaaactcggccaacagacctattttattggtttcgcttggccctccacccccacagtactgatcttacagatgggaatcctgtaatctacccatgactgcggccgctgtactttgcaggctcccattaggcctgtatatggtcgtcaaatgaaattactccccctgggcttccagtgaactccaagaacatgactacagggacaacctata

SEQ ID NO: 521596 - DNA, 630 bp, Homo sapiens
gatgggagagaggcagtccccacaccaactccacaagcaggtgcacccccagcaggcccaaaggattccaagaggaagtgaatccagcccggtgttcggagtgaggtttactttgcaccactcttttttaggaaaattggggttgctggccctgagcacatcaccctttgccagccttttatctccccctgggttctgtggccgccagcttcttaagcagttgttaagtgtgtgttattattttactgtttaacagtgagctcctgggccccgggcctgacttcaccagaagaccaccttttgccagtgctgttctgataacttagccagaatgaagtgttaagtggaggataattgttatttgcttttaatttcctgaccttagaaaaagaaggaaagcacagtgctgatggggtggtgagtgctgaaggaagagtgctgtctctgagtttgcatggggagagcctcgtgttctcctccttcagactgagccagtgtggactccagtatcrgacacactgggtctgaatcccacctctgccattttctagctgtggacctcagtcaaatgactcagcccatctaaacttcagtgtccctcgctggcaaatggggttagtaatagtactc

SEQ ID NO: 521597 - DNA, 556 bp, Homo sapiens
tgctgccctgcagggtgtgtcatcacccgagatcaagcttagaaagtgaaagagcctcttgtcagggatccaggttgcccagggagatcgggagcctccttcctctgaggtctggaggagaaaggacaaccatctggttagatgtggcccttgctggttgtgcctgggggcagagggatgggctagctggaacagaatctttggcagaggatatacctcctcagccatcacccttctggggaatgagaggtctggggcagtaaggataaagactacgcagacacrtaggaaggcaagagggccgccagcttgccagcaaattgctggaaggcagcgtcatcaagtagaggagacagagggagacatgcagtcagaggtgcagagggcctgaggtcgacaggaggtgaccatttctccacatcagaacctgggctgctggagggtttggggtcccccaggcacccttccagactgcatctactgtgagcagcagcaaagaagccagacccttgaggagtggccaggcagagagagtgggaatggcagagggccactg

SEQ ID NO: 521598 - DNA, 623 bp, Homo sapiens
ctgcatctactgtgagcagcagcaaagaagccagacccttgaggagtggccaggcagagagagtgggaatggcagagggccactggtccacagagcggtccgcttgctaagcctcagatcctggcctcttgcctcgttctccccagccctgcacagcacgtctccgcctctgtggagggcggcacactcagaagkcttggagcctgctggtatccaggacatgaaaacaggaggagtgtggaacccttcccagagttctgattgggggtcgggcctagaaacctctggtgtcatgacttcgtagccagccagaatagccccatctgaggagggccctgctattcaaaggcgtgcatttgagatctaccttgccactttttataaccttcaaccagtcatttaacctcttcaaggctcttaatcatctgtaaggtatgcggacccaatgagttaacatatttggggggttttcttggaaacagggtcttgctctgtctcccaggctggagtgcagtggcacaatctcagctcactgcctctttgacatcctgggctcatgcaatcctcccacctcagcccccccagtagctgggaccacagatgtgccccaccacacctggcta

SEQ ID NO: 521599 - DNA, 647 bp, Homo sapiens
ttgcaatgttaagctcttttctctcctttcctctccccctttttgtgcattaaatttccatctgtttacccaaaatggaagtaaatgaaataagaatagctattgggtgaattaagtacttgtttccgtgtattccccaggctggcacatccactagcctctgaagggacttgttcacagtctacggtgcacacagggagcttcctttccactgccaggaacctccctcactrtacgctctttttgtttccttcagagcaccttcctctatctgaagtcaccttgctcatgtctgttccctccccacccctctggaatgtaagtgccctcggtctgccctgttcctgctgtgtcctcagcacagtcccaggcatgtgtagtaggcagttaaatattttgctaagttaatgaaataggtggtagaacctaatggttgggttctttggagttaaaaaggccatgatatggggtcccggctctgccatttcctagctgtgtgactttgggcaagttacgtgatttgccaagtctcagtttcccttgcttgaaatagaaaatgacttgaaatatttccagaattttttgtgaggggcgaataaggtagctacatgttaaggatgtggcagagaataaggtgtttgtgcatg

SEQ ID NO: 521600 - DNA, 568 bp, Homo sapiens
cctggaaggaccgatggggctgcctctttgggacgttgccacctctgctccagtcgggagggctgaggaaacaggttctgctgaaacaggctgattcactgtttccactcggtcctcggctgtgttggtgggcagatcacacgccagcctcrtaaactcactctccgcttgtccatgtgacgtttatagccccacagggagctggctttttaatgagcctaatttgagactgtaagtaggagtttgtaaaacaaacagcgaggggctttgggtcaaagcccaaagtttcagtttaaatacacagggtcacattagggctgtgcagacaggccaagactcctctgtgcccagggcagcaagaagaaggtgctccccagggaaaggcccaccttcccaggagagcttgctgcaggctctgtcgttcccccagaaactggggagacttagagggagaccttcctattttggttctgtgtgcaaagcactcgagagccctagttttcccatagggaggcaaggactccttcggggtaggcctatgtgcaagcccagggttagaagtcagtgc

SEQ ID NO: 521601 - DNA, 601 bp, Homo sapiens
attcgaaaacctgctccctttccttttatcacagcactccaatgtcccatggccctctctaaagcagagcttttaaccatgtagcacagccagagaagactgagaaaaccaacagggagagctgtgagtagggttctataaaaatgaggaaagaaggtagggccccttgggagaaaaatctttgtccagacagcaaattactgaagactacaaataatggcaaaggaatcaaagaacagttagaacagctatgatgccaagagaagtgctgatactctgtagctgtttggggcatatctagataaacctcaataggtggggatcacactggcaggatcccccgaagccttactgactggagataacacattggttctagctgacatccttaggacaccagcaaatcagcatatcwtgctcatggtgacatagacagcataatatagacagatttctggataaagctgccagaaggaaatcgatgagcagtgacaaaagcagatgtcacagagctcaggttaactcagctacccagaggagtctacaatttaacattacattttgtcttaggttactgacttaataacccgatttttctgga

SEQ ID NO: 521602 - DNA, 546 bp, Homo sapiens
aatatcctaatggtgttgatagggcttaaggaagttaagattggatgggggaaacagggatggggctgggggagagggagagaagatgtaccccaacgatgtaaccaagctcagtttcggggactggatctctgagaggtgtccacagtggaggacaaggggctgacacggacgctrgtgttccctggggcagagatacacaatttttatacgtggctcaaaagaaagggtggctgtgacaggcaaaagacccaaagggcaataccagagctgatgggccggccttcgggcggacgtaccgcgggccgaagggtccaggggtctcttgggggtcccggggaggtgggcgttgcctcgaggggtgggagtcaaggcctcagacggtgcccaggtcgtggggccggcaatgtggggaccccacgtcccagacgggcggcttcccctggcccccccacgggcaggctggccgtgggtctggacattacgccgccctagaggggtcgtgccaggccctagactcaccgcgcggcttcggccaaggcctca

SEQ ID NO: 521603 - DNA, 600 bp, Homo sapiens
ccctgatctagagaactgtgggataataaaggatgttgttttaagcccacttttataggtaatttgttacagcaacaacagaaaacaaaaatactgcatcatctctgtcaatttgttgttttcatttatttcatatttacctttcccaacagattgtaaacyctttcgggtcttgtcatttattattttaatctttatgccttagcatatgtttgactttctctttcccactaagttgttttttgctactgaaagtatggtcctcagccagaaacatttcggtcacctgggagcttggtggaaatgcagaatctcaactgtagtgaatatctactcaatcagaaatgccatttgagggtcccgcaatttgtgttttaacaagtcttccagctaattttttacatgctaaggtttgaaaagccttggtttgaggtaatattgatgcctgaaaaagtaatgtgtatgtggagtcaaggagagaaagagaacaagagtaaacttggaattcttcctatacttcccattattagctccaaattctgtttttaggtcggtaattgatgttattactcaaagaaagaggttcctttgttaaagcag

SEQ ID NO: 521604 - DNA, 597 bp, Homo sapiens
ctggaattgatcctggacttctgtacacttgttctcagccttaagtgcacattagattcacctggggaattttgaaaatccgatgcacaggacacaccccagggcaactaaatcagacacacaagagttgggacccaggcatcagtattttttaaacctctccatgcgagtccaaaatgcagtcaagtttgtaaaccagggctttacagtgttggcagctcttagtgactccatctgttgtctggaccattccacaaatgcatgtctcccactcayctagactgtaacctcccaagaatccatcagccccaggtctgtcaatcctagacactcaataaaaatgtaattacttgttaatctctctgaattctgaaatggccctgggccctgaagttcaccaatgtttgtcaacttgaaaattatcccctttttacaaaatctcatttttcttttcagcactcagctacatgtttatgatctatatccagactactctatttttgaaaatcaagaccattttcaacctcagagtacattctgttcaggacaaaaaaatgaatagtcagaattatcttcaagcagacttcaaaaatatcc

SEQ ID NO: 521605 - DNA, 498 bp, Homo sapiens
cttgttctcagccttaagtgcacattagattcacctggggaattttgaaaatccgatgcacaggacacaccccagggcaactaaatcagacacacaagagttgggacccaggcatcagtattttttaaacctctccatgcgagtccaaaatgcagtcaagtttgtaaaccagggctttacagtgttggcagctcttagtgactccatctgttgtctggaccattccacaaatgcatgtctcccactcacctagactgtaacctcccaagaatccatcagccscaggtctgtcaatcctagacactcaataaaaatgtaattacttgttaatctctctgaattctgaaatggccctgggccctgaagttcaccaatgtttgtcaacttgaaaattatcccctttttacaaaatctcatttttcttttcagcactcagctacatgtttatgatctatatccagactactctatttttgaaaatcaagaccattttcaacc

SEQ ID NO: 521606 - DNA, 597 bp, Homo sapiens
ctggaattgatcctggacttctgtacacttgttctcagccttaagtgcacattagattcacctggggaattttgaaaatccgatgcacaggacacaccccagggcaactaaatcagacacacaagagttgggacccaggcatcagtattttttaaacctctccatgcgagtccaaaatgcagtcaagtttgtaaaccagggctttacagtgttggcagctcttagtgactccatctgttgtctggaccattccacaaatgcatgtctcccactcacctagactgtaacctcccaagaatccatcagccccaggtctgtcaatcctagacactcaataaaaatgtaattacttgttaatctctctgaattctgaaatggccctgggccctgaagttcaccaatgtttgtcaacttgaaaattatcccctttttacaaaatctcatttttcttttcagcactcagctacatgtttatgatctatatccagactactctatttttgaaaatcaagaccattttcaacctcagagtacattctgttcaggayaaaaaaatgaatagtcagaattatcttcaagcagacttcaaaaatatcc

SEQ ID NO: 521607 - DNA, 569 bp, Homo sapiens
ttcctgcataattcactcatttgtgcctcaggataattttgaagcagcttgttgctgaaggataaatgactctacctccttaaattagacaaaatgaggttttgtactattttctgtatttgttaaagtagcaactttactgctgtaaagtcccttgaggaatttgttgatctaaaagacagttaataatgtcttaaaatttagatatgcagtaacagcaaaagaatcagcagaaacaaaaggaaggaactaagcaccatccatgatggtagaatgacatatgaagcgataacccatttaagatagaacctccaggactcataatatgcwcactcacaagtaataaaataggaagaggttagaagctttttttggaagcaacattcagaatgtgatctaatgcaatattgtaaggaaggcactatactgtgcacatctaggagagtaaatacaactttttccacagcaaggaggaggaggaactaatatttattggacacagagagatttacatatctcttaaaatgcaatcctcataaagatcattataatattaaatgatcgtcatt

SEQ ID NO: 521608 - DNA, 613 bp, Homo sapiens
caactccagttattcaactaaataaagtaccctgacggtagatgaggaaggactgtcacatcaagtgtattttatggttccatttgcttctgttttttatgtccatcagaacaagtttacttgtttagttaaattgacattgcattagttgaatgtcaaaagtaatgtgtgctaatgggtcagcccaggactttgtagagtacaattcagtgcccaaacgaggcttcctgttgtggctgaagcacaagtcttatatggaaagatcacttcttaaaaggagcattttgtttaatccgctgagacagaaatcaagatgttctatcttatttttccctgtatcgttgaygatttttaactttcagtgatccctcaactgctttctcatctgaaaaatgagttgatatttaccataataaataagtgaaataaagagagataagtaagtatccagagagataagattaatgactaggttactaccactatttttcctgtataaaaaattttggcagaacttgagggtcaacagtcagagtcttgtgaaaattactgagaattcctgaacagttataattagttcagtaacatgataaaatgggtgttttctaaagat

SEQ ID NO: 521609 - DNA, 631 bp, Homo sapiens
ccacgggtgctatgcctctgcttctggcacagacagtcagaagccaggacaggctgttcctgcataattcactcatttgtgcctcaggataattttgaagcagcttgttgctgaaggataaatgactctacctccttaaattagacaaaatgaggttttgtactattttctgtatttgttaaagtagcaactttactgctgtaaagtcccttgaggaatttgttgatctaaaagacagttaataatgtcttaaaatttagatatgcagtaacagcaaaagaatcagcagaaacaaaaggaaggaactaagcaccatccatgatggtagaatgacatatgaagcgataacccatttaagatagaacctccaggactcataatatgcacactcacaagtaataaaataggaagaggttagaagctttttttggaagcaacattcagaatgtgatctaatgcaatattgtaaggaaggcactatactgtgcacatctaggagagtaaatacaactttttccacagcaaggaggaggaggaactaayatttattggacacagagagatttacatatctcttaaaatgcaatcctcataaagatcattataatattaaatgatcgtcattgtgcag

SEQ ID NO: 521610 - DNA, 514 bp, Homo sapiens
atcaatatctctggtgtgaggtccaggaatctatttttaataacctcttcaggtgattctgaggcatgctaaagtttgagaagcatggctttagggcctcagcttcacaccatcaatttggtcccctctcarcttgttaggaaagcaagaacttagtccctaaccaatgacctatggaactagaatctgtattttaacaagatcctcagtagttcagtatgcttattaaaatttgggaaatgatgcttaagtctacagcatagcttcaatccaatctactctaacaggaactgattagatagaatatagaattaggcaaaatataaataaattattggaaaaaagggaaagccaagtagtgctgcttttacattggattgaagcaaataaagaaggaaagcttcaggatttaatactctgccatttatagggctgcttaataaaggtttgggaatgcatcaggctgaagtgaactgagttatagacagtgttctttctggaacacaattggaat

SEQ ID NO: 521611 - DNA, 514 bp, Homo sapiens
ttggctgtcagcccatctagcctccaaatgatccatgcctgagtcccccaaatcctagctaggatgctgttatactttgccctaagtgagaaagcctcccttgtttgacagggcaatgcgtattccttgggtgggaaggggattctgttcaactaagggagagcatcagggatgaataaggtagcataaagtgacccactctggcatggaggagagatgtgaggctcaaatggcaggcacatgaagtatcatgattagcctcctgtgcatgaagactgctcatgctatgggctgaaagtttgcgtcctcccaaatatcatatrttgaagtctagcccccagtgtcattctattaagaggtggggcctttgggaggtgtgattagtgcctataagaagacttgagagtgctctagccatatgaagacacaactagaggacaaccatctgcaaaccaggagactgcccttatcaaacaccagatctaccagtgccttgatcttgaacttcccagtt

SEQ ID NO: 521612 - DNA, 689 bp, Homo sapiens
ttattagtgatgatattgtagggaacattcttgacttgctcctacttctaatagcaatgccgcttatatagtgccattaggtataaaattgactattgctttcaaggtagacattttaatcatgtcatattaggtttgaattttcctattccttatattctatgattttttttcctaaaaaatggacatcaaacttaccaattacttattaatatttatccagataattgcactttcrttgacctgatacatatatttgtaatgtatcattaaataatagcattaaatagctctcattaatagcattaaataatctctttattagtgattttaaataactgtttttaatattttaatgaattacatttgctggtgtgcttgtagaatttttgtaacaatctttaaaagcaaggttagtttatagttctgatatccatatagtacatgcatactgacataaaagagatgggaataaaatacatcaaattgttagcagtggtctcttctatgttggatggtggaatactggattcattttactacttttccctaaaatttaatatacatttttatgacaaaagtgaacattatatcagttatctactgctatgtaagaaatcaacccaaaacttagtggctaaaataacaaccattctattgactcatgactctgagggccaataatttgg

SEQ ID NO: 521613 - DNA, 538 bp, Homo sapiens
acatcactgcactctagcctgggccacagaacgagaccctgtttcaaaaacacataaacaaaaaacaattacatgcaaattaaggggcaggtcaatgcaaactgaggtgccagttatttagaactttctaggaaaggggcggaggggcagtaacttccaggttgttgccatggaaaggggtggtaacttccaggtcattgccacggcatttgtaaactgtcatggtgctggctggagtgtctcatgcaatgarcaatctaggggtcactttcgttgtcatctgctggctcttgctgatttatttatgttatcctgtctagaccagatcttgtattggtcagcagggttgtgaccagaaaacaagtcctgccagtcttttgcctcatttctcactcactgtctttgtcccttcatggtcgccagatattataggacaggtgagccccaaaattgaggcttagcctgggaggattcttggctttacccaagaaagaattcaagggcgagtgatggtgttggacaacaatctgttattgaa

SEQ ID NO: 521614 - DNA, 367 bp, Homo sapiens
tgagtaattagatgcttcatttgccagaggctctatattccttgaacgaagctgcctctttccatgggcttccatgatgagagctgggtgttgagcgattgcccaaagagatcagagcctgagcatgcttcggcccagtatttttagctccagttcacatttttgtcccctccccagcagccgttattgtcattgctgtcaytgacttccatttgaaaggccgtgccagccaggcccactgactgagcagctgaggagccccagccagcaaaaggcaggatgtggttaaaactgtgctctgatcctatctctggcctcaggaaacctattagtagcttggggattttctgaaagtccttctgtccca

SEQ ID NO: 521615 - DNA, 539 bp, Homo sapiens
ggacaaaatggagggagtagcatttctcatcaacatgcccctggaaaacaatgtaaaaaattatgcagcatcctgttcatttctttgtgaatacttcacaaaatactaaatactaaatttgtggcattacaaccataatgccacatgttcctgttagatcagtcaargctttcagtcttaacttgcttcttctttatttacctttaaatctctcagggagaacttaccctaagtctgaggccaggctttgaaaagacttgttttttgttgtttttcaaagtttgtttttattcccaaacattcgcaccttccccagccctgtaccctgcaccttggggaatttctgtagctgtttctttttcttctctctgctttaactccacaaccagccgccctcttttcttctttattgtgtgggcccagtcctgttatttggttcatccttcagtaatcaacagagttgtatttcatcttccaagacttactgttaggttcttcacctcacccccgcccccaaatttttcagcagttttatccag

SEQ ID NO: 521616 - DNA, 539 bp, Homo sapiens
ggacaaaatggagggagtagcatttctcatcaacatgcccctggaaaacaatgtaaaaaattatgcagcatcctgttcatttctttgtgaatacttcacaaaatactaaatactaaatttgtggcattacaaccataatgccacatgttcctgttagatcagtcaaagctttcagtcttaacttgcttsttctttatttacctttaaatctctcagggagaacttaccctaagtctgaggccaggctttgaaaagacttgttttttgttgtttttcaaagtttgtttttattcccaaacattcgcaccttccccagccctgtaccctgcaccttggggaatttctgtagctgtttctttttcttctctctgctttaactccacaaccagccgccctcttttcttctttattgtgtgggcccagtcctgttatttggttcatccttcagtaatcaacagagttgtatttcatcttccaagacttactgttaggttcttcacctcacccccgcccccaaatttttcagcagttttatccag

SEQ ID NO: 521617 - DNA, 529 bp, Homo sapiens
ctgcctcagattctgcctgggagttaaagattttgttttttatttgctaatagtttttgagcacgccttctatgccaggctctgggctgagccctttatgtgaaggtcataaatcctttaaagttgttggattattggacccattttacaataaagaaaccacacctcacccagggctttttttttttttttaatggcagagctagatgtgagccttggggcagaatcctctggcycctgagctcccattcatttgtaacttgcaagttggggatcatcctaccctaacaagctccagcgaagtgccttaggcattttgggatctgttcagtcctagtaggagaggttgcctttaatgagatccccttttccagtatcattttcaaatagaatatgtgtcttccccaaggtgagaaaccataccagtgtgacttcaaggactgtgaacgaaggttttctcgttcagaccagctcaaaagacaccaaaggagacatacaggtttgtaggttcacttctcattgctggcag

SEQ ID NO: 521618 - DNA, 571 bp, Homo sapiens
ttatttcatgaggttgacctcaaggcacatgcatcccagaattctgcctcagattctgcctgggagttaaagattttgttttttatttgctaatagtttttgagcacgccttctatgccaggctctgggctgagccctttatgtgaaggtcataaatcctttaaagttgttggattattggacccattttacaataaagaaaccacacctcacccagggctttttttttttttttaatggcagagctagatgtgagccttggggcagaatcctctggcccctgagctcccattcatttgtaacttgcaagttggggatcatcctaccctaacaagctccagcgaagtgccttaggcattttgggatctgttcagtcctagtaggagaggttgcctttaatgagatccccttttccagtatmattttcaaatagaatatgtgtcttccccaaggtgagaaaccataccagtgtgacttcaaggactgtgaacgaaggttttctcgttcagaccagctcaaaagacaccaaaggagacatacaggtttgtaggttcacttctcattgctggca

SEQ ID NO: 521619 - DNA, 633 bp, Homo sapiens
aaaggatctaatgaaattcatagtaaataaaagatttgggrgcaacctggcttctaggagtctctaaacaactatggaggtttgtatactggaatctgtggtagagagaataaactgttagagaaatacacagtattggttagtctgttccatagaagggatgttatgcatcttgtttgatatatagggttctaggctccagacgacagaaacagcctatcttttccccacacaattacaaagtgagatagactttatcaaataggtagggttggaaacctcttttttcacaccagatgcatgtttccaaagattttttggactggtgatcgacaaataccatgaagatttggaggcctcatatcccagtggaagaagcaaagttacagggaaagtcaggaggtatagccacctgtttaggggcctgtaaaacctacataaagaaaatgggcttaagcagtgaagtccaagggaaaatactgccagggaactgggagatggactgttcctcattcccagccttctggttccactgagcctagcctctttctgacatgcagatgacactgaaacacaattaagcagaaatacaggctggagaggctgaatgcaccagggtagcagtggcaacca

SEQ ID NO: 521620 - DNA, 633 bp, Homo sapiens
aaaggatctaatgaaattcatagtaaataaaagatttgggagcaacctggcttctaggagtctctaaacaactatggaggtttgtatactggaatctgtggtagagagaataaactgttagagaaatacacagtattggttagtctgttccatagaagggatgttatgcatcttgtttgatatatagggttctaggctccagacgacagaaacagcctatcttttccccacacaattacaaagtgagatagactttatcaaataggtagggttggaaacctcttttttcacaccagatgcatgtttccawagattttttggactggtgatcgacaaataccatgaagatttggaggcctcatatcccagtggaagaagcaaagttacagggaaagtcaggaggtatagccacctgtttaggggcctgtaaaacctacataaagaaaatgggcttaagcagtgaagtccaagggaaaatactgccagggaactgggagatggactgttcctcattcccagccttctggttccactgagcctagcctctttctgacatgcagatgacactgaaacacaattaagcagaaatacaggctggagaggctgaatgcaccagggtagcagtggcaacca

SEQ ID NO: 521621 - DNA, 633 bp, Homo sapiens
aaaggatctaatgaaattcatagtaaataaaagatttgggagcaacctggcttctaggagtctctaaacaactatggaggtttgtatactggaatctgtggtagagagaataaactgttagagaaatacacagtattggttagtctgttccatagaagggatgttatgcatcttgtttgatatatagggttctaggctccagacgacagaaacagcctatcttttccccacacaattacaaagtgagatagactttatcaaataggtagggttggaaacctcttttttcacaccagatgcatgtttccaaagattttttggactggtgatcgacaaataccatgaagatttggaggcctcatatcccagtggaagaagcaaagttacagggaaagtcaggaggtatagccacctgtttaggggcctgtaaaacctacataaagaaaatgggcttaagcagtgaagtccaagggaaaatactgccagggaactgggagatkgactgttcctcattcccagccttctggttccactgagcctagcctctttctgacatgcagatgacactgaaacacaattaagcagaaatacaggctggagaggctgaatgcaccagggtagcagtggcaacca

SEQ ID NO: 521622 - DNA, 597 bp, Homo sapiens
tgcagtcaactgcagccacgcaagaacagtcccagtgttgttcaactayccaggtttacaagagtagtcagaaacttggattttcatttgaaatttcaaaatatttaaatgctagtaattaattttaattaaacactgtgtgagctaaacaaaataagtttatgggtgctcagtgtgccagttctgtaaaacagaagttatagctaaaaaagaaaatgccataccatagtttacttaccaactttacttaatagctatgtaaaatgtttagaaaagaaacataaatgtaatatgcatacttagataacatgtttgttagaaatatcttgggtaagggaagaaattttctttccatctacccatgccattgatgagtctctggttcagaaaactgattccattcaataccacctacttccccatcccagctcccattaatacaagtatagggacttaacatttcctcaatgcccacctccttgcttgctgttcagggaaatacacattttggtttatggatgtcctggggtgctgtaagagtcaaggaagttattgaaggacatttttagataatagacagcatcaatcatgctgggc

SEQ ID NO: 521623 - DNA, 582 bp, Homo sapiens
gcagtcaactgcagccacgcaagaacagtcccagtgttgttcaactatccaggtttacaagagtagtcagaaacttggattttcatttgaaatttcaaaatatttaaatgctagtaattaattttaattaaacactgtgtgagctaaacaaaataagtttatgggtgctcagtgtgccagttctgtaaaacagaagttatagctaaaaaagaaaatgccataccatagtttacttaccaactttacttaatagctatgtaaaatgtttagaaaagaaacataaatgtaatatgcatacttagataacatgtttgttagaaatatcttgggtaagggaagaaattttctttccatctacccatgccattgatgagtctctggttcagaaaactgattccattcaataccacctacttccccatcccagctcccattaatacaagtatagggacttaacayttcctcaatgcccacctccttgcttgctgttcagggaaatacacattttggtttatggatgtcctggggtgctgtaagagtcaaggaagttattgaaggacatttttagataatagacagcat

SEQ ID NO: 521624 - DNA, 505 bp, Homo sapiens
aatggtgaagaagtctgccaggttagaatgagctgaaagctttacactgccctgtctttccctgatttcagtaggatgtcagtgagatmaaaaaacattctcatgtctcctcccaccaaaggaggtctggagggcttttgtagtagcaatggcaggaagggggctagtaagcatgaagaactgcagggccagccaatgaaacagcaaggagtaaccatggtttcattttaccttaaaacttcaaccacaagatgccccaattgttgtatagcaatgcaggataacatgaagacaaaggtcaaaacctaagcaagacaagatacataggggaggcgagggacgaccaggggaccacagactggatggacaccttccttctctcaatgcttcccatgcactgagaaactcacatttctgcatatccacaagtgtattttctctttattgcttaacaatttacaattttcacaggttagagaatcataaattattacaatatcaaggt

SEQ ID NO: 521625 - DNA, 548 bp, Homo sapiens
cttctgagagcccaggctggtgacaagttgggtcagtacacctcaagtctctacacacatgcctgcacatgtggctcgggtatggtttgagagtagtacaagcaccaaaggctggctatcacaaaaccccccaccccaagcccacctaaataaacataaaacccatctcaaagcactgtctgtgaaaaacaaaatgccatttcaagacaagttctctagctatctcccacttcaacacccayattcatcctcacagaaattctgaagctgctgttttaggcacctgagaggaagctcagaaaataaaggtgatttagattgccacctttcaagaatccccaggaactggtgctgtctctattagatgtaaagtacaattcaatttacaaaaattagatctgttactacacactcagggagatgtccccacacttatctgagtaccatctgcttaaatgtttttgaatattggaagcaaaaatgcaaagcaaggttcaaacagttcaaatagacttttagttcactggagttttttggttttatccatg

SEQ ID NO: 521626 - DNA, 602 bp, Homo sapiens
actaataggatgctcccccaaatgttagaagtatgcttattttattttgttaacaccatgcacatgagatgcacagaacaaacactcattgatataaggtctctcacttttaaaacacagttgaaccaatgagtaagacagtaaataatataatttcatccagatttgtataacacttaaaatattattatcaagcctatttcaacagtgcttctatgtaaaatcataatcttgactaaattaaaatctgagatctctattacttaacttcactgaactatcttcaatgcctgctgacttaaaaaaaaatccatctcttcctccttaatgcaaattactggcaatctggtaaatttggtttttttttgtttttttggttttttttgctaagatttctttccgctagttaaagaatggaactgaatcctaaattaggatttttatttaaattcagattccatttttaaagtggatgcttattttttgaagttagaamgaaatgttatttctgatctaaatgggtttccctggatacaatctagctgcctaaaacaaagttggagaatggtattaacaaattcttagaaataattagtagttca

SEQ ID NO: 521627 - DNA, 313 bp, Homo sapiens
tgttggcaggtaaaactattaaaatcaacagcaggttattgcttaaaatatgttgaaaaattatcatagtaccaaagagaaatggcagttttgtctttagatttctaacaatttaacatcacctttaataaaatctgttactatttcataaatataaaatgaaatctttcaagcaaaaatatctattgaaataaaagatttcattcattctaggcaattatagttcagaatttaaaaagtatgcagcagtttcagctagcatatgttaaactctcagatatrgccagtagccatgacaaaaataagttaccat

SEQ ID NO: 521628 - DNA, 423 bp, Homo sapiens
tacttacttctcactgaattggttcacatataaataatttatgtgtgagtatgtttctctgcactaccaccaaaacagaacaccttgttcagcctcagtgttttcatgcagaagctgtatacatgtacgtacgtacgtatgtacacacacacacaaacacacacacacacacagaaaaaaaataccgaatcccactggcaagtttgtagattaatgaagacaaagtatctctccattataaatacatgaygccataaccatagcaaccatgtgccctgaattttcatgacaattcagattaatcatattcttctgttccataacttaaaaaccatatttgatgacttttcattcagaaaaagtaagccacataaattgggaattaagtaatggcatagcctacagggctgttgagagacttac

SEQ ID NO: 521629 - DNA, 423 bp, Homo sapiens
tacttacttctcactgaattggttcacatataaataatttatgtgtgagtatgtttctctgcactaccaccaaaacagaacaccttgttcagcctcagtgttttcatgcagaagctgtatacatgtacgtacgtacgtatgtacacacacacacaaacacacacacacacacagaaaaaaaataccgaatcccactggcaagtttgtagattaatgaagacaaagtatctctccattataaatacatgacgccataaccatagcaaccatgtgccctgaattttcatgacaattcagattaatcatattcttctgttccataacttaaaaaccatatttgatgacttttcattcagaaaaagtaagccacataaaytgggaattaagtaatggcatagcctacagggctgttgagagacttac

SEQ ID NO: 521630 - DNA, 615 bp, Homo sapiens
ctgcttccctgtccttgagggcgtcttttgggcactcaggcgactctttagaaatgagttttgctttaataattaatattaacgttataaatccaaaacctagttatacttaagtagcgtatcccctggtatgttttaaagagtcattcgaaggggatttttaaaaataatgtatagctataaactgcatttatacatttaattgttattttgttaagcgattgagttacttgacaaaatccaagtacatagttcactcacaaatctaatatgtcaaacctaaatgtggttggtaaatcttactctcataatttcaatatggtttacagatgtggttgaattctgttacacatgtctacttacgagtcagaatcgttattccatttaatattttaaaatggaattgccaagttaatccatacattagcatgttaaattattttaaccgtcrtgaatacatcaaaatagacgattccaaaatgtaatggaaaatactaatgctaatacttcaatttacttcattatttctgcccttaatcctgaatcttcctggagttacaggtgcttatccactaaaccaggggttttcaagcaagaagtcagaatgcattaatg

SEQ ID NO: 521631 - DNA, 592 bp, Homo sapiens
ctgccacttcagtccagtgcgtgggtggtaattctccagggcagcgatggtttcaaacagagggggacaaaacattccaagcagggacatcacgatctctacctgaggaatcaggaaagcctacgttgtgtcatcaacattatacttgtttggctgccatcyctgcactcccatggccatccatctccacttctctgctgccccctctgctgcgcctggagatgccctggggtctacacagcttgctgtgtgaccctggcaaaggcatcaacatgccctgagcacttggcctgtgcttgcatatcataattgctgtgtgaccagatgctataatggttgttgttactagtattgatgaaaatagcactttctggccaggcgcaatggctcacgcctgtaatcccagcactttgggaagccgaggcaggcagatcatgaggtcaggagatagccaggagatcctggctaacatggtgaaaccccgtctctactaaaaatacaaaaaattagctgggtgtggtggcatgtacctgtaatcccagctacttgggaggctgaggcaggagaattgcttgaaccctggaggcggagg

SEQ ID NO: 521632 - DNA, 592 bp, Homo sapiens
ctgccacttcagtccagtgcgtgggtggtaattctccagggcagcgatggtttcaaacagagggggacaaaacattccaagcagggacatcacgatctctacctgaggaatcaggaaagcctacgttgtgtcatcaacattatacttgtttggctgccatctctgcactcccatggccatccatctccacttctctgctgccccctctgctgcgcctggagatgccctggggtctacacagcttgctgtrtgaccctggcaaaggcatcaacatgccctgagcacttggcctgtgcttgcatatcataattgctgtgtgaccagatgctataatggttgttgttactagtattgatgaaaatagcactttctggccaggcgcaatggctcacgcctgtaatcccagcactttgggaagccgaggcaggcagatcatgaggtcaggagatagccaggagatcctggctaacatggtgaaaccccgtctctactaaaaatacaaaaaattagctgggtgtggtggcatgtacctgtaatcccagctacttgggaggctgaggcaggagaattgcttgaaccctggaggcggagg

SEQ ID NO: 521633 - DNA, 684 bp, Homo sapiens
caaatggcgaagctgggcagttgccgaagttggtcgccagattccaaagctgagcaagccctcccaacagattcactgcccccrccccacacaccttggccatcagcatcttgtaggcatatagttgcttgcctttcccctttcccaaggcaccttcatacttctccacaaattcctgggcctccctgcttagaaaaaaaaaaaaaagcaggatttcagttagcacctaaccagaggaaatctgaattatgaagcctcaaacacatgtgtgaaggcttatgtctttgtatacccctggttaaaatataaattccatgaaggcacgacattctgtctgttttatccactgaagtttcccaaatgctgagaagagtgcgaggtacataacaggcatggtaggcagaactgtggcccctgtgaccttcgtctggtggtgttccacccatgaatataatatgttacatggcaaaaaggacttttaaaatgtagttaagattactgattttattttatttatttatttatttttagagatagggtctcactgtgttgctcaggctgctcttgacctcctgagctcaagcagtcacctgcctcggcctcccaaagtgctgggattacaggtgtgaaccaccatgcccggccaagattattgattttaaaataaggagattattctgggtc

SEQ ID NO: 521634 - DNA, 492 bp, Homo sapiens
gacacaaatggcgaagctgggcagttgccgaagttggtcgccagattccaaagctgagcaagccctcccaacagattcactgcccccaccccacacaccttggccatcagcatcttgtaggcatatagttgcttgcctttcccctttcccaaggcaccttcatacttctccacaaattcctgggcctccctgcttagaaaaaaaaaaawaagcaggatttcagttagcacctaaccagaggaaatctgaattatgaagcctcaaacacatgtgtgaaggcttatgtctttgtatacccctggttaaaatataaattccatgaaggcacgacattctgtctgttttatccactgaagtttcccaaatgctgagaagagtgcgaggtacataacaggcatggtaggcagaactgtggcccctgtgaccttcgtctggtggtgttccacccatgaatataatatgttacatggcaaaaaggacttttaaaatgta

SEQ ID NO: 521635 - DNA, 427 bp, Homo sapiens
agtggcacagggatttaagcccaggtccatctgatcaactccgatggcacataattgacctctgcattgtcccgcctgcccacaggtcactgcctcagtgatccagtcccatccgttgtttagataactgaataagttatcctcgaatcatttattgtaagcctagtctctcaagtttactgtgagtcaagggctaggtcatatacctcttttgtgctcttctatatcgtggcatccaacctcttgcttgtcagcttccaactctggytcaacttaaggacttcttttcctggcatctgtcccttatatgggaggtgttcatacaattctactgattgttttcaccttacaactttttattttgaaatactctcttctaagtgttcctagtaaattttttaaagccagcaaggaaaaaaaattctat

SEQ ID NO: 521636 - DNA, 512 bp, Homo sapiens
agtggcacagggatttaagcccaggtccatctgatcaactccgatggcacataattgacctctgcattgtcccgcctgcccacaggtcactgcctcagtgatccagtcccatccgttgtttagataactgaataagttatcctcgaatcatttattgtaagcctagtctctcaagtttactgtgagtcaagggctaggtcatatacctcttttgtgctcttctatatcgtggcatccaacctcttgcttgtcagcttccaactctggctcaacttaaggacttcttttcctggcatctgycccttatatgggaggtgttcatacaattctactgattgttttcaccttacaactttttattttgaaatactctcttctaagtgttcctagtaaattttttaaagccagcaaggaaaaaaaattctatttattgccaactaattataaacattaaaacatcaatttaaaatttaaaggaaaaatgacctataataccaccactaatagcattt

SEQ ID NO: 521637 - DNA, 621 bp, Homo sapiens
gcctttctcgctttcaacaaagtacttgctggaggacttatccaaagctgagaagcaacacctgtggggactgggcaggaaacactttagtagtttgtcttggtgcatgcaccacaagcagacagccatttgccttccatttagtttctgcaactgaaggaatactgcgggattctctgccgctaggaagaagagagccgccccccccccaccatccattcttcctctctctctcttccttagtcttacccctgcacattctgattgttgtggtgaccagatcctgcagaaataaaagaggcctgagttcctatgtggctgggctgtatcctcctccttctctaataaagctatggcrttaaggaagccctatcaactgatgagctcagaatgcccatgccttttgtcacctagcctttccccatctctgtgcaaatggctactagaacagccatttataaagtgacaactatgtgttgggtgttttgcatacatgatctcattagatccatacaacattcctgcaagaaagatatctttatctccatttaacaaataaagatactgatgctcaaagaagtcaaataacttatccaatgttgacaagctaacaagtggtag

SEQ ID NO: 521638 - DNA, 355 bp, Homo sapiens
actctttttctatggctctcatgactccacattggatttctttgttgtctcattctcctctctctcctccttaaccgagggcctcattctagaccttctctcgccctcacatgctctcagatgctctcatcctstcctatggaatcagttattacctagagagactcatgccctcaactctttcctgaatatgagacatgtaatttcaactgctttctcaacattttcatttaagtatctcgaaagcatcacaaactcaactcgatgttatttttctgcattccatatcaggacaacgccatctgcttaaacattcaagataaacacttgggatcatttttgactcctcatttcc

SEQ ID NO: 521639 - DNA, 211 bp, Homo sapiens
cctagagagactcatgccctcaactctttcctgaatatgagacatgtaatttcaactgctttctcaacattttcatttaagtatctcgaaagcrtcacaaactcaactcgatgttatttttctgcattccatatcaggacaacgccatctgcttaaacattcaagataaacacttgggatcatttttgactcctcatttccctttattccc

SEQ ID NO: 521640 - DNA, 582 bp, Homo sapiens
caccagagctgggggacatttaagagccagayaccatgatctaaaagatgctaaataaaggtatctgctgaaggtaggaaagcactggctttggtctcattagttacctgtaaacccgacttgacaggtgcactcataggtatcccggctgagcatatggcatgtgccgccattcaggcaaggtcgagacacaaagcatggatgagatgtcgagtactggcagtcctctcctgtaaaccctgaggcacatcggcacgtggctttccccagcatggcctgggccacacaagtcccaccattctggcagcggttcttctcacaggggtctcgatgttgacaatattcccccaagaagccttctggacatctgtatggaaaagagaagagtccatgaaaacacctgacttcttgtaagtccaaaaaattacagtaaaacaatacagtccaatcaagaaagcacgagattgtgaatcaacagacctacaaggaccacctataaaactgcttccctttagaagaaagagtccttagagaacttaaccacatactcccatgtccttttgagtcctggcaggtgacaga

SEQ ID NO: 521641 - DNA, 662 bp, Homo sapiens
aaaccaaaaggtttagattctagagcatgtgtttaaatcatgcttacaaaattcctatagttcaaaactgaggtccatgaaaattttttggatgaagattaagattgatattaaattacagtttggaatcctgttacatgtctatagctacatagctaagtgaaacacttgtctctcagatccattgtcaaatccaaaatccccctcttttamattttgcctcaaagtgaagttaaccagataccaaaacatattatttagcagtgtgagtctacagtgtgaaagaggaatgaggactggggctgaggaagcattttaataaacttgaccatgaataccataatagggcttattggcataacctgaatcagtacgtatgtacacaaggccaatgactcattgttatggagcaatggtctggactttgccactattttcatgactgccttctcctttgttctcaagattctccatttgcaaaataaggagcttaaaccatatactttcaaaggcggcctctgacctcaacattctagggttctattttagtgaatttgtcaatgaaaatattgcttaacaccaatgcttaatgttagtctgcaacatttgtaagagtaagctaaacaaaaatctcataggaagagtttgtgtattaaggttat

SEQ ID NO: 521642 - DNA, 556 bp, Homo sapiens
tggctattttaaatttgttttatgattcacttgatggccaaaattgaactaagggatatccccacacagcaagatgaataaggactatatatatgtatgtgtgtgtgtgtgtgtgtgtgtgtgtgtatagtgacatttgaggctaggttgcactgcagaaatattgggcttgattacrgggatcagcctcagtttcctttgagattatgatttaatatatctgaacctattaacctaaaatctaagtaaaacttgaattttgaaatatatttggcctgaaaattccagatgggggattatagacctccacaactgtatgtgatcatttcttcagaatgtgcaaaacaggcatttgaatcataattgatcatattagaaggtaggtggagccatttaaaagactaaataaattacagaaattctaataagtgtacatttgtctgtcccattaattttacaaaacattttgtttgtgggtggggatggggaatcctgtaaactctttgaggtcaggggcgaggacgattttatcaccatatccctaatacgtaacaga

SEQ ID NO: 521643 - DNA, 557 bp, Homo sapiens
atgacaatgcttgcaatatagttgatataaaactatgttcaagtccgtgtgtttccattatttggtttttacttagttgatmatttattaatgacactgtttacatttgcatttggatgccttgctataattaaaataactcttgaatttatcaactgagccctaaattaaagacccatgaaaggctccacatgatggaataaattttcatattcagttgtcttagatatggacaaccatatacgtttttctgacacacgtaatgtttgacatcagtcaaaaagagtacaacagaaatattctgtgtttaaagcagagctgggggaaaagaaggctaaaacattccatattgcataaaagaaagagttagattgtcaccaaagttaaaggaaatcaatgggacgactttggagacccatttcaatctgttgttgacattgttttctggtagtaattttctcaaaatgttaacagtattgagtttgcctattgattctattatttttgaccttgcattagtgtgggctaatcttacatgccataaaatttttttttca

SEQ ID NO: 521644 - DNA, 477 bp, Homo sapiens
gatctcatcccagggggctgggaatgaaagagggccctcccctgaacttggagtcctataaatggttgaatcaccaatgtgagagtccccccgccaggarctcaatgcagaggctagttcacctaaccgtttcccttctttactctggtctgcaaaggaagccaagctcaaaggccactggatagagcttggggccagtggtgtctgtgtgcactgcctggcactctcaggattcaggtgagggcagaaggagacccaggaataattactgagtacttattacttgctggtcatggagtcatgcctttgcatgcattgctcatttcatcttcacaacaatcctttgatgaagttattagccctggctgcattttagtgagaagcagaggctcacaaaagatgagggaacttctcaagcccctatagctagtgagtgttggagctcagaattgggctagggcagtctgacacacagct

SEQ ID NO: 521645 - DNA, 423 bp, Homo sapiens
cacattaaatcgattaatattgccctatacatgttaaatcttacttcagagaagttatatatataattaaaaaatgcaatattttatgtaattayttctcctttaaaaggtgaactttgtacttctgaatgatgagatcaaaagagccactaagctctgctatcaaaggcagaaatgatgcaagggaattccctagaaaggggaagttatacagttgaactgtttttacttaacaatgcttctgacaccaaatcagaggtttcttttcacatcaacgaattatccaattctctgaacaccagctaggtgtccagtaattcagttgatctctgacaccatctacctggaattagcaacagattcaacaagttaaagggctcagacgccaattgcaaatcccaggtcacctatacttctgaccaa

SEQ ID NO: 521646 - DNA, 560 bp, Homo sapiens
tatgatacagtgacctttcaaaatttcaattccagaatcacattaaaactattcacactttagaagcatttggcttggctatgcttctatccagcctatcaaagtgtgaatgaagaggttgtattaattctgccatcttttaaagttctatttcttttttttcctttgtaaagtttttatacattttcacttatttatttttgttgtatatatttgaggagtacaacatgatgttttgatatacattacacagtgaaatgattactatgggtaagtagattaacgtatccatccccttccttatttgcctcgtttttgtggtcagagcacctaaaatctactctcttagacaatttttagtatacaatattattaactatagtcctcatgctgtacattagatatctagacttattgctcccacctacttgcaagtttgtacactttgactyatcaggtctcatttccttctcctccctgctcccgtaaacactgttctactctctgtttctatgtattcaacctattttttttttgattgcacaatttgaccttatgtt

SEQ ID NO: 521647 - DNA, 573 bp, Homo sapiens
tcaaataagagaatctgtgagcaaacttttcatttgtgagtggcaaagctatctcagacagaacaaaaaagggcagtrggagcaggagcagagatgagctatgaagctgtccagatggatttccaaagcacaggaagaccccagacggcagggggaatggaggacagaaaagcaaatactgttcgtgccggcatgaatggcaccatgacattttgctgctattgccgactctgcttctcattttcttggccatcttgcttcaggatttgagctcccctgggacagggttatgttagtcattgtccgcgaggtggacaaatgagtctctaccttctgaaaataagcttacaatttatggagctgccttggagctagagttcttgcttccagccactgtaagtatgcagagattggggtgtgcaaatcaatatgctatgtctggtacccaaacacggtttagcataaatctcatttaaaactcaacataagctgtgttttgaagatcacattcctaaaagctcgtaattcataacttcagattaaaggcttaaaatacaacttgcctgtcctcca

SEQ ID NO: 521648 - DNA, 477 bp, Homo sapiens
aattctaacccctctccccctgggatatggacctccctctgaacacccatttcctgatccccaccstctatgtttggcaaccctgacttgctctcaggtctgaaatgcgacatgcttattgcagcctcagggcctttgcacaaacaatgctttctgtttgctatgatcctccaatctgtgccctcttagctcattttgggtcattcagaatcagcttagagatgaccttcacagacagcccttctccagcggttgtctccatcatgtctcctgtttctggcctgcgtaagagaatacaggccagattctctctgcaacctcggcttttcccttgctcagctgtgttctgacttgctattacgtatctacacaggcatgtactgcccatgaagaggtgcttcctctcgctgtcagaatataggatagcccttagtgcacagagggcaaccctatcaatatttgctgagcaattgactg

SEQ ID NO: 521649 - DNA, 396 bp, Homo sapiens
tatttctcacagggaagagaaggggtctagtgtgacatcaaaatgaaaaagtgctggagcttgagccccttcttgcttttcaggatccacacagtgatgagttccgagaatgctggtttattcatgtaaaccacagttatttttatcagcagctactgtgtactggcytcccttctaggttcaaatcattctatttgagtaagatagagtgggttggtccctactcatggaagttacacaatcatagaggagatagacaataacccaataatcatttaacaaagaagaaaatttcagagagtcatcatgcactgaagaaaagacatcaggtttgtggaaagagagaattggattcacccaattttggttcatatgcttaggcagctctacctgaga

SEQ ID NO: 521650 - DNA, 654 bp, Homo sapiens
cttgtctgaatctaggggatgttrtcatttatttatgagcacagagttaattttcacagagctagtgccaatttttagttgaattaacagtatcttctcttgtctattcttttttgaagcagtactcaacaattattttccaatttttttgctgaatatttcttccattcttctaatttggaaacttagattttccttttgtttttctgtttcttattttaagtaatttcagtagattatgccctcccatgtattatcaagtacaataactgagaccagggaattgacatcagcacagagtgagaccctgtctcaaaaaaaactgaaaaacttttaattgatttatttatgcacatataaagtacaaacattaatttatttctaaaatcctgtataattttacaaacttcaacacattttattttcatcttttttatttgttttgtgttctctgttttcggtgcccattgtgttccatcagttgataagttttaatggataatgacttgacttttacctactaactgagcaaagaaatgagaacaggttgtgatgtcctactcatgctattttcctccagggatcatgtaagctgatcatgcaagagtttacctaatccatagcttcctccgttgctaagagctccagcattct

SEQ ID NO: 521651 - DNA, 577 bp, Homo sapiens
caggtacttttgatgtacacactgatggagacaaactaatccagatgaaaagacaaatgaatttttttctacatgcctggaaataatgccagatgattatagatttcaaacttcatagaaaattgaaatttcccccttttgtagggggaatgttttgttaatctagcatacacagcctatgttttctattcttattacttttaataataatttttttcttttcttttttttcagagacaaggtctttgtctgttgctcaggayggagtgtagtggtgccatagcacactgtaatcttgaatttctggactactggcatacaccaccatgcttaggtaattgtttcttattttttgtagtgacagggtcttactatgttgcccaggctggtctcaaactcctgacctcaggtgatcctcccaccttagcctcccaaaatgctaggattataggcatgagccaccatgcccagcctacttttttttttttttttttttttgagatagagtcttgctctgcagcccaggctggagcgcagtggcttcatctcagtttactgcagcctcccgggttcaagc

SEQ ID NO: 521652 - DNA, 564 bp, Homo sapiens
tttaggtattataataataaaagcagctatgctaaattttacaaaatmcatcttataagctggaagacagaggcccatccagatctgtctttggagactttcttaagttctacatactcaagatcaattttatgataatataaatacaataggagaaagagctctgcttgcaactcagtaataaaaaattcagagatgataggaaattccatatctattcttggcctagcaggaggaattttgtagcttgagaaggagctgggatatttctctaagacactgtgtaaccaagtctcaggaccatgattcaccacttcttcttctttggtgctctgcaaaatgccatgggttgttctgagtgattgcctcaccgtggcatgatagacatgagaactcaagacgagcaatgaaagtatcatgattgacacaaattccaagtatgttggcttaactattttcatgtttgttctgttaacacagaagagaccaggttctgctgctgtgtgttctttagttgcattttagtgagacttttcctctccctttatgaatataggattctga

SEQ ID NO: 521653 - DNA, 564 bp, Homo sapiens
tttaggtattataataataaaagcagctatgctaaattttacaaaatacatcttataagctggaagacagaggcccatccagatctgtctttggagactttcttaagttctacatactcaagatcaattttatgataatataaatacaataggagaaagagctctgcttgcaactcagtaataaaaaattcagagatgataggaaattccatatctattcttggcctagcaggaggaattttgtagcttgagaaggagctgggatatttctctaagacactgtgtaaccaagtctcaggmccatgattcaccacttcttcttctttggtgctctgcaaaatgccatgggttgttctgagtgattgcctcaccgtggcatgatagacatgagaactcaagacgagcaatgaaagtatcatgattgacacaaattccaagtatgttggcttaactattttcatgtttgttctgttaacacagaagagaccaggttctgctgctgtgtgttctttagttgcattttagtgagacttttcctctccctttatgaatataggattctga

SEQ ID NO: 521654 - DNA, 465 bp, Homo sapiens
gagcctccatctcaaaaagaaaaaaagaagccatggggatgccaaaggggatctcattcattcattcagtcagtcagtcatctgtttgttcctttgttcattcattcattygaaagcccattactgaggccccagtctgtgccaggcccagcctcagaaggaaagacaactctgagagggtctgccccggtctcagactctcagcagtttgacccttactgctggtcactcgctggaggtgagtccagggtgtgagagaggagggcagaaagaaggagatggcattgagctgtgccacatctgacctggggccccctgcctggtgcgctggggaaggccaagaggcagatctgagactcctggagattgagacgcaatgtgcggttttcaaatgctctctggcctgtgccctcccgagagtgtcagaacacccctgagggtgcggggcagggcagggctgattac

SEQ ID NO: 521655 - DNA, 584 bp, Homo sapiens
gcctttatttcaaatcatttgttattgagaaacatcattaaacacctactatgtgcagcatgcatgctcacagcctgacatcgatactgtctcccatttatgagtgccatcaggaaagttcagaaaggctcatttttcccagggccacagtcccagcaaagggcagagttgggatgcaaacccaggcttgtccaagcccaaaacccacatttgcagacttggcatcccagctccatctcaagttgaagacactgggcatatgttctggaagaatgtcaacttctcctttggaactcaggtgcaattcaagcctgtaaggaaagcaatgctttcaataacaaagcttcggccaaacagtacagcaatcgctttacacacagcagctcatttcatttcataaagcccttgtaaggcaaggtttgctatgtgcattttcaggtgaagaaacggaggctctgatgaccctgctgcaacctcacctgactggtctgtgcggctccttgttcccacgggttcttaatcccctcctctgagtcctgcaaagcacttygcatggggctaggctttgctctcagcagcccttg

SEQ ID NO: 521656 - DNA, 445 bp, Homo sapiens
ttcaagtttctcatccacttttctattggactatacatcttcttcttactaattataggaattcttcacrtttgctggaaatggaccttttgtggatcaagggactattcagtaacgagagtaaaggaggagagtggagagtggtggggggcctctcatcaggccatagaaaccacagaaaaagtcctcggccttagcctgagagccatggtgccctggagaagggtttttcttaccatctgactattctgttctcttcaagactgacagcactggtgtcatttgggagttcggttagaaatacagaattccggctggacacggtggctcatgcctataattccaacactttgggaggctgaggcgggcggatcatttgaggtcaggagtttgaggccagcctgacaaacatggtgaaatcctgtctctactaaaaatacaaaaa

SEQ ID NO: 521657 - DNA, 445 bp, Homo sapiens
ttcaagtttctcatccacttttctattggactatacatcttcttcttactaattataggaattcttcacatttgctggaaatggaccttttgtggatcaagggactattcagtaacgagagtaaaggaggagagtggaragtggtggggggcctctcatcaggccatagaaaccacagaaaaagtcctcggccttagcctgagagccatggtgccctggagaagggtttttcttaccatctgactattctgttctcttcaagactgacagcactggtgtcatttgggagttcggttagaaatacagaattccggctggacacggtggctcatgcctataattccaacactttgggaggctgaggcgggcggatcatttgaggtcaggagtttgaggccagcctgacaaacatggtgaaatcctgtctctactaaaaatacaaaaa

SEQ ID NO: 521658 - DNA, 567 bp, Homo sapiens
tatattttgctttatttatcgattggttgtctgcctatctccagtagaatgagggcccttcatgagggtcaggacttttgtttgctctgtccatgattggatcccagtgcccggaagagcatctggcacacagaagtgctcgacagtgatttgtggaataaatgcagacagctctctcaggtagtggttgggttgcttccatgtggcacctgcctcagtctctgatgtttgctaggattgtgctgggataattgtgtatatggatgagatgtctgcatcttaatggttgataattaacattgactttttgccttcttccggagagatccagtggctctgggcatggaaggataactgaacaaagagaactcaggcatccaaggagtgagacaagtcttcagttccacaatggatagaaaccagaggagattataatttgtggtcagacttaagggtatatggaatccggcctcaaaggaaaacagtcccagccctggaaagctcatgcyactcccatgtcagatagaggggcctggcctggactcgggagggctctgcctgggagaa

SEQ ID NO: 521659 - DNA, 536 bp, Homo sapiens
ctgtcggttcccacagctaagcaagcctgctctgctctctagggctacagagccagtacgtagtaggtctgcaatgcttatttgatgaataaatgaacataatgaaggcaagggctgtggaagtccagggcaggaagcattcatttctgtcttgcagtgtctcagaaggctttggggataagctgaccctcaaagaccaggagaaaagatcacaactggtgaaggaacagaggagggcattccaagcatggcaatcacacatacaagtgcaaagaggcatgaagccgcacragggacttcaaggaggttggtgtgactgatgggggtggacaggaaagctggggcccaatccagagagactgctgtgcttggggttagggaccatccatcggcattgctgtcctgggggccctcgtcttgccataagcaaactgggaagagaacaggctgtgccatcagaaggccctcggtttgaatctcagctctctgcagcttatgcttcatgaccttaggcagcgatttaacccctctgagcc

SEQ ID NO: 521660 - DNA, 669 bp, Homo sapiens
ttcccacagctaagcaagcctgctctgctctctagggctacagagccagtacgtagtaggtctgcaatgcttatttgatgaataaatgaacataatgaaggcaagggctgtggaagtccagggcaggaagcattcatttctgtcttgcagtgtctcagaaggctttggggataagctgaccctcaaagaccaggagaaaagatcacaactggtgaaggaacagaggagggcattccaagcatggcaatcacacatacaagtgcaaagaggcatgaagccgcacgagggacttcaaggaggttggtgtgactgatgggggtggacaggaaagctggggcccaatccagagagactgctgtgcttggggttagggaccatccatcggcattgctgtcctgggggccctcgtcttgccataagcaaactgggaagagaacaggctgtgccatcagaaggccctcggtttgaatctcagctctctgcagcttatgcttcatgaccttaggcagcgatttaacccctctgagcctcagctcttcctcacttgtaaatagggacctagtttgttcttctygtaggccctttgcacttgctgcctcccctgcaggaatgtttgttcaggtcttagcttccatatcacctccagggcagcagtgctggtcactctgg

SEQ ID NO: 521661 - DNA, 614 bp, Homo sapiens
gcttctccagtgttgagttaacatttattaaaagctcactgtcaggcctggagctgtgtggtttaatagtaacaatggcgtgtattttctgagcactgaccatgtgcagccgttggtcaaagtggtttcctgctttgacttgttcaatccctcaccatcctgtgtggcaggtcctcttatgattaactacagtgtaagtgtagaggaaaccaaggcctgctgggcagcggcagagcggggttcaaacaccctttgctgggggaarggggtctgtctacctgtggcccagcctcatttgcctggggctgcaccagggctaggggctcaatctcactgtggccaagaggaggtgcttgactctgagactcagtctccttgtctgtaaaatgggaataacagagcatggtggctgagagggtctggtaaggtcaggtaacagtgtctggcttaatgggtagaggcctacccccacctgaaggggaaggagcaaatgatggtcacagatgatcagggctctctgggtcccgtaactatatctgggacaatgactttcaaacaggtgaagacagacactcttcctgtttcgctctcatgtgctggtccacctggctccc

SEQ ID NO: 521662 - DNA, 614 bp, Homo sapiens
gcttctccagtgttgagttaacatttattaaaagctcactgtcaggcctggagctgtgtggtttaatagtaacaatggcgtgtattttctgagcactgaccatgtgcagccgttggtcaaagtggtttcctgctttgacttgttcaatccctcaccatcctgtgtggcaggtcctcttatgattaactacagtgtaagtgtagaggaaaccaaggcctgctgggcagcggcagagcggggttcaaacaccctttgctgggggaaaggggtctgtctacctgtggcccagcctcatttgcctggggctgcaccagggctaggggctcaatctcactgtggccaagaggaggtgcttgactctgagactcagtctccttgtctgtaaaatgggaataacagagcatggtggctgagagggtctggtaaggtcaggtaacagtgtctggcttaatgggtagaggcctacccccamctgaaggggaaggagcaaatgatggtcacagatgatcagggctctctgggtcccgtaactatatctgggacaatgactttcaaacaggtgaagacagacactcttcctgtttcgctctcatgtgctggtccacctggctccc

SEQ ID NO: 521663 - DNA, 569 bp, Homo sapiens
ttcccaacagcaccctagtaatggcgtggccctttccctcccctgagctccgcggagaacacaaccagcaggagacattccctgttatcaagaaatgagtttgattcccagccgagggacagcaggactggtagagaccgtcaggccacacggctgcctgcacagcactccaatacttggcagggggcaggaggggtggcaggagctggctgtccaaaggctgggcacggcagggaggctcactggaggcggcgcattttggaggggggatgtcaagggacagcgttctcttgtagttggaccacaagactccacaaggacagcatggtgactgatgcccagcgctagaggcgaggcggtcggccatgtgtaggtgtgtctatatatgagtattgatagatatttatagaacagggcagggygtacaacagaggcacaagttttcaccagtggtcacacctggatgtgtcagctcaccacgacagcagactaagtcacagatgaagggggctggctttggggctgggggagccactgttaagtcacagaacaaccgtccaggcaggctg

SEQ ID NO: 521664 - DNA, 435 bp, Homo sapiens
ttgttgctattgttcagatttggggtgatgttaataattatagtatctgacatgggcygggtgcagtggctcatgcccgtaatcctagtactttaggaggccaaggcggtcagatcatgaggtcaggagattgagacctaacatggtgaaaacctgtctctactaaaaatacaaaaaattggccgggcatggtggcacatgcctatagtttcagctactcaggaggctgaggcaggagaatcgcttgatcctgggaggcggaggttgcagtgagccgagataacaccattgcactctagcctgggtgacagagcaagactccatctcaaaaaaaaaaaaaaatctgacatgtatggagtgttttagtgccacgcactgtgctgagtcatttgtatgtattatctctttagtctttttctgttatcagcttcagcc

SEQ ID NO: 521665 - DNA, 489 bp, Homo sapiens
gctgaaaacctagctttgcaaagacaaagtcattgatgggaccctgggtacagtggcttacgcctataatctcagcacttgggcaggccaaggtgggtggattgcttgaggtcaggagttccagaccattctggccaacatggcaaaactttgtctctactaaaaatacaaaaattagcccagcgtgatggtgcatacctgtaatcccagctactcaggaggttgggattasaggaggcatgagaatcacttgagcttgggaggtggaggttatagtgagtcgagatcacaccacaccacactccaccctgggcaacagagtgagaccttgtctcaaaagaaaaaaaaagaagaaagttattgatgggagtgtagtgaaatttgtgaactcactccagctaacagttgacatggtgctcaacttagatggagtattcccacgcttccctcgaaatacccaaatactccacagtgcccctgcaaatcact

SEQ ID NO: 521666 - DNA, 552 bp, Homo sapiens
tgggtcttccctctgaggctggctgcccatcagctcctggagacagtccctcagcctaaggagctcagagtccctggtgactttcctggccctgcacttggttgctgtgcacccctggacaagggggctaagaatgctaaactcagatgtggggcagtgtatttttctttcacttagtgatatagaagatgagatgaatagatttctatgttttttctttgcacaattttgcaggaactcagattgtgggtatttgcaaagaacagtaacagttccttttgcagtaaggcctcattgagaaaatggatagctgaggtcctgagagttcaagagacttggtgatgttaccaaaatgctggggtrttggtgtgggtcctgctgctggccacacagaaggccaatcactgagataagtattgcccgggaagaagtctttagttgagtcccgcagccgaagagatgggagatcaggctcacatctatcttcctgaccaactaaactcagaggtttatatagcaggaagaaaatttaagtgcatggaagaaaactgg

SEQ ID NO: 521667 - DNA, 511 bp, Homo sapiens
gcacctactttgtccaggcctgccttgtcccagtatgttagccgcgagtcacaagtgcatatctgcatttcaatcaagttaaatttaaattaaattgaaaatgcagttcctcagtcacactagccatatttcaagygcccagtagccacgtttggctgatgataacgtgggacagcacgggtatagagcatttctcaaaaagcctatcctgttccagacagtatgctatgcactttatatgcattagtgtatgtaatgtcaaaagagagcaaacccaagaagcatcagagggaacagatgaggaaactgaggcccgaggtcacccagcaaatagcagagctggagattgacctgttgatgtttttacttacccagagtgcctcccttgatctggcaccagctatgtgctgggtcctgtttgaggccctctgcctctatttattatcccattttacagataagtactataaattgaagcacagagaagtgaagtgacttgcccaaggtcaca

SEQ ID NO: 521668 - DNA, 511 bp, Homo sapiens
gcacctactttgtccaggcctgccttgtcccagtatgttagccgcgagtcacaagtgcatatctgcatttcaatcaagttaaatttaaattaaattgaaaatgcagttcctcagtcacactagccatatttcaagcgcccagtagccacgtttggctgatgataacgtgggacagcacgggtatagagcatttctcaaaaagcctatcctgttccagacagtatgctatgcactttatatgcattagtgtatgtaatgtcaaaagaragcaaacccaagaagcatcagagggaacagatgaggaaactgaggcccgaggtcacccagcaaatagcagagctggagattgacctgttgatgtttttacttacccagagtgcctcccttgatctggcaccagctatgtgctgggtcctgtttgaggccctctgcctctatttattatcccattttacagataagtactataaattgaagcacagagaagtgaagtgacttgcccaaggtcaca

SEQ ID NO: 521669 - DNA, 600 bp, Homo sapiens
gcacctactttgtccaggcctgccttgtcccagtatgttagccgcgagtcacaagtgcatatctgcatttcaatcaagttaaatttaaattaaattgaaaatgcagttcctcagtcacactagccatatttcaagcgcccagtagccacgtttggctgatgataacgtgggacagcacgggtatagagcatttctcaaaaagcctatcctgttccagacagtatgctatgcactttatatgcattagtgtatgtaatgtcaaaagagagcaaacccaagaagcatcagagggaacagatgaggaaactgaggccygaggtcacccagcaaatagcagagctggagattgacctgttgatgtttttacttacccagagtgcctcccttgatctggcaccagctatgtgctgggtcctgtttgaggccctctgcctctatttattatcccattttacagataagtactataaattgaagcacagagaagtgaagtgacttgcccaaggtcacacagctggtaagagatggagacaggatttgaaaccagtgttagacacactattggattgcttcttctaaggtcagatggaggtggttagt

SEQ ID NO: 521670 - DNA, 600 bp, Homo sapiens
gcacctactttgtccaggcctgccttgtcccagtatgttagccgcgagtcacaagtgcatatctgcatttcaatcaagttaaatttaaattaaattgaaaatgcagttcctcagtcacactagccatatttcaagcgcccagtagccacgtttggctgatgataacgtgggacagcacgggtatagagcatttctcaaaaagcctatcctgttccagacagtatgctatgcactttatatgcattagtgtatgtaatgtcaaaagagagcaaacccaagaagcatcagagggaacagatgaggaaactgaggcccgaggwcacccagcaaatagcagagctggagattgacctgttgatgtttttacttacccagagtgcctcccttgatctggcaccagctatgtgctgggtcctgtttgaggccctctgcctctatttattatcccattttacagataagtactataaattgaagcacagagaagtgaagtgacttgcccaaggtcacacagctggtaagagatggagacaggatttgaaaccagtgttagacacactattggattgcttcttctaaggtcagatggaggtggttagt

SEQ ID NO: 521671 - DNA, 322 bp, Homo sapiens
gctggaacaggccttttggattgttttycaacctcctcaacctcaaagtggggtaactgaggtccagagaggagacggactttgcttaaatcctacaatgactctgggcagaatcaggcccagaatctagtggagcagaaggtattcaggctgccagaggatcaacaccaagagcagagaggcacagctgcccttttgcactgtgtccctgtgcctggcacattagaggcactcaggtgagaattcttgagcaagggagtgcgcagggaagagcacacagcctgggtgtctgtctcgagctggaacctgtctctgatagcca

SEQ ID NO: 521672 - DNA, 634 bp, Homo sapiens
gataatgtaaatgacaagttgatgggtgcagcaaaccaacatagcacakgtatacctatgtaacaaacctgcacgttgtgcacatgtaccctagaacttaaagtataataataaaaagtttaaaaggtaaatcatcccatgtattcattcataaccagactcttttttttttttttttcagatggagtctcattctgtcgcccaggctagaatgcagtggtgcaatctcggctcactgctacctccacctcccgggttcaagtgattctcctgcctcagcctcatgagtagctgggattacaagcaggcaccaccatgcccagctaatttttgtatttttagtagagacggggtttcaccatgttggccaggctggtctcgaactcctgacctcaaatgatctgtccacttcggcctaccaaagtgctgggattacaggcgtgagccaccacgcctggccagaagaaatttttattgcataaaatgagaaaggtgttctggagacaccaccagggcagggttgaaagtccctccataaagagattacccaaggtattaaccgcccatctcagcagaagccaggaatagggatgggtcatatctgcagagactgccagcttggaccaaaggggaa

SEQ ID NO: 521673 - DNA, 634 bp, Homo sapiens
gataatgtaaatgacaagttgatgggtgcagcaaaccaacatagcacatgtatacctatgtaacaaacctgcacgttgtgcacatgtaccctagaacttaaagtataataawaaaaagtttaaaaggtaaatcatcccatgtattcattcataaccagactcttttttttttttttttcagatggagtctcattctgtcgcccaggctagaatgcagtggtgcaatctcggctcactgctacctccacctcccgggttcaagtgattctcctgcctcagcctcatgagtagctgggattacaagcaggcaccaccatgcccagctaatttttgtatttttagtagagacggggtttcaccatgttggccaggctggtctcgaactcctgacctcaaatgatctgtccacttcggcctaccaaagtgctgggattacaggcgtgagccaccacgcctggccagaagaaatttttattgcataaaatgagaaaggtgttctggagacaccaccagggcagggttgaaagtccctccataaagagattacccaaggtattaaccgcccatctcagcagaagccaggaatagggatgggtcatatctgcagagactgccagcttggaccaaaggggaa

SEQ ID NO: 521674 - DNA, 634 bp, Homo sapiens
gataatgtaaatgacaagttgatgggtgcagcaaaccaacatagcacatgtatacctatgtaacaaacctgcacgttgtgcacatgtaccctagaacttaaagtataataataaaaagtttaaaaggtaaatcatcccatgtattcattcataaccagactcttttttttttttttttcagatggagtctcattctgtcgcccaggctagaatgcagtggtgcaatctcggctcactgctacctccacctcccgggttcaagtgattctcctgcctcagcctcatgagtagctgggattacaagcaggcaccaccatgcccagctaatttttgtatttttagtagagacggggtttcaccatgttggccaggctggtctcgaactcctgacctcaaatgatctgyccacttcggcctaccaaagtgctgggattacaggcgtgagccaccacgcctggccagaagaaatttttattgcataaaatgagaaaggtgttctggagacaccaccagggcagggttgaaagtccctccataaagagattacccaaggtattaaccgcccatctcagcagaagccaggaatagggatgggtcatatctgcagagactgccagcttggaccaaaggggaa

SEQ ID NO: 521675 - DNA, 634 bp, Homo sapiens
gataatgtaaatgacaagttgatgggtgcagcaaaccaacatagcacatgtatacctatgtaacaaacctgcacgttgtgcacatgtaccctagaacttaaagtataataataaaaagtttaaaaggtaaatcatcccatgtattcattcataaccagactcttttttttttttttttcagatggagtctcattctgtcgcccaggctagaatgcagtggtgcaatctcggctcactgctacctccacctcccgggttcaagtgattctcctgcctcagcctcatgagtagctgggattacaagcaggcaccaccatgcccagctaatttttgtatttttagtagagacggggtttcaccatgttggccaggctggtctcgaactcctgacctcaaatgatctgtccacttcggcctmccaaagtgctgggattacaggcgtgagccaccacgcctggccagaagaaatttttattgcataaaatgagaaaggtgttctggagacaccaccagggcagggttgaaagtccctccataaagagattacccaaggtattaaccgcccatctcagcagaagccaggaatagggatgggtcatatctgcagagactgccagcttggaccaaaggggaa

SEQ ID NO: 521676 - DNA, 300 bp, Homo sapiens
caggacactttccgctgggaggctgcgagtccgtgtttccatttctcctcaccctggtcctcggctccctcctttcccccctcctccgcctccctctgatattttatttaaattcttccgtcccctcctgtccataccagcgccgcgacttgggggattaaattagtcgcgtcgccacattcccccgccgcctgatggcctccgtgttgtttaaacagcaagraaattgatctcttggctcttcctttaatgatttttttttacacgattaaactctcaacagatgtcactggacatttt

SEQ ID NO: 521677 - DNA, 431 bp, Homo sapiens
tgagatggtggatttaagggagcccgccaatgctcaggcatcacggtgatgtggatttatgacgaggatggtgtttgggctcatgtgcatagaggagtgtgaatgccaattccagaaaatccccagcacagccctcctgaggagcataaacagggaatggatgrtgaaaaaaaaaaaaaacctcttctccaggatcctaaaatgtatcgatttggttttaatggggagcgaaccaaatttctcttgaagctgtttcctgcagttttagttgcaggatgggagtggatttgctcattgatgaaggaaagttacagagaatagaggagcccactacacctgggtgcccagggaaggtgtggggaggagggatgtgcggccctgagcctttatgcaggaatctggggggactcaggactgggggaaaggggtta

SEQ ID NO: 521678 - DNA, 561 bp, Homo sapiens
ctacgccctccacttcttaccagggcgcccactccagaagttcagtgtaagtcattactctcccaatgtaaggctttcaatgcaccccataaagaggggcccaggtgctggctcttyccacccctgctcccgtcccactccaacccatccctcctggctttggccatcactgtcccaccgcaacctcagggccaccatgttcgtggtccccatctgtcctcagcaacactcaactcctggactgcccccttcttcccgtggcccccggctcccactgttccccaccctccttcccaggctccatggccaggtggcccctctgcccatcctgagcctctgctctctggttggccaccccagcacgtgactcacctgggctaaatgcccttcagccgcatctctccctgagtactgtgcgtggccatcagctccttcttgtcacctctctggactctcagtgggcatctcaggttcaaataaaagtccccactccctctcccccaagcagcccctcccctgtcctctatctggttgtctacagcaaagccctgggcagcagtc

SEQ ID NO: 521679 - DNA, 449 bp, Homo sapiens
ctgcgggtccctcttcaagcagcaactcacaggtccatctcttcggggtgccctccaggcctcccagggaggggactgcattgctgggtcccttctcagggaccctcattccatcctcaccaccctggcctcatccctcatctctccctgctgtggcagaacacttctgcctcccttctctccgacagaagacgaagcttctatacttgcttccaatggcttcttgaaaagcggcatggcccagtccatcaggcttgtgaaaggaaaataaatctcggggccccagatcactaagctaaagggaaaagttgagctgggaactgcttagggtcaacctgcctcccattctattcaaagtcacccctctgctcactgagataaatgcatatctgattgcctcctttggagargctcatcagaaactcaaaagaatgcaaccttttgtctct

SEQ ID NO: 521680 - DNA, 542 bp, Homo sapiens
ggagattggcattaataacccagagagcaaatggaaaatacctgcaggtgggggcaggggaagtggtagcagggatgatagatgagatgttggactatagaagggaaaggaacagaaaaaaattgataattttggataaattgcatgaataccctgcttttagtgattaaaagaacacttatttttggcggggtgagacggttcacacgtagcactttgggaagacaaggcaggtgcatggcttgagcttaggagttcaagaccagcctgagcaacatggtgaaacccatctctaccaaaaatacaaaaattagctgggcatgktggcatgagtctgtgatcccagctacttgggaggctgaggcaggaggattgcttgagctcaggagcagaggttgcagtgagccgaaattaaaccactgcactccagcctgggtaacagagtgaaactccatctcaaaaaaaaaaaaaaaagaggaacacgtgtttttgtaaaaaaaaagaaaagaaataaaccagagagagggatacaatgctgggag

SEQ ID NO: 521681 - DNA, 579 bp, Homo sapiens
gtatgagccaccgcaccggtccaagaaattctaatatactttttatctaaattcatcagttgtttattttctatccctttggcccacttgctttaacatttccctcctgtctcgtatatatatactttatactttatgtattctttgtatatattacatatgatatgtgtaattgcaatatataataattatccaaatctgaagatgaaacatctaaacaatgctrttatctaattcacagtccatattcagatatcatcaattgtcctagtgcttattttatagctatttttcctaatccaggacccaatccagcattatgcattgcatgaagtagtctttggtctcctttaatctggtacatgtcctcaactttatttttgtttttcttcacgttgacatttttttaagagctcggaccaactgggtgcagtggctcatgcctgtaatcccagcactttgggaggctgagattggcggatcacttgagtccaggagtttgagaccagcctgggtaacatggcaaaacgctgtctctacaaaaaatatgggcatcatgtttgtgtgtgtctgcagtcc

SEQ ID NO: 521682 - DNA, 510 bp, Homo sapiens
atattggtgttgacatccgatagtctgtgatccatctctgctcactcacttaatatctttgcatgtaactctctcatttcgagtttacacttagaaaactgaaataataacaacaccaaacttactgagttgcagtgactattaaatggggaacatagtgaagtaccttgaacactgatgaattacagtgatgctcaataaaygttgacttttctccattacttatggacacttttctttctaaggcttggaaagcatttagcacagtgtgtggcacagggataccagtcagtaataatattagctaaccgtttactggtacctacaatgtgcttggctccacattgcatgctctgcaggtggcatctctctaatcctcagcagtgtcctgtgctgacggtgccatgtctgccctcattttggagagagtagctgggtggtttccatctggtaagcaatggagttggagttcaagctcagaatccaagctctgagtcagcgattttgcca

SEQ ID NO: 521683 - DNA, 510 bp, Homo sapiens
atattggtgttgacatccgatagtctgtgatccatctctgctcactcacttaatatctttgcatgtaactctctcatttcgagtttacacttagaaaactgaaataataacaacaccaaacttactgagttgcagtgactattaaatggggaacatagtgaagtaccttgaacactgatgaattacagtgatgctcaataaatgttgacttttctccattacttatggacacttttctttctaaggcttggaaagcatttagcacagtgtgtggcacagggataccagtcagtaataatattagctaaccgtttactggtacctacaatgtgcttggctccacattgcatgctctgcaggtggcatctctctaatcctcagcagtgtcctgtgctgayggtgccatgtctgccctcattttggagagagtagctgggtggtttccatctggtaagcaatggagttggagttcaagctcagaatccaagctctgagtcagcgattttgcca

SEQ ID NO: 521684 - DNA, 539 bp, Homo sapiens
aataatcataataatgatagttaaaaataagttactaaagtttgctgaactctatgtgccagtcactgggttaagtttatttcatacattatgacatagaatccttgttactgccctctatggcaaaaactaggattatcaccgttgtatagatgaggaaacygaggcagggagaagttcagcatggccagtactcagtacagtccacagtcttactgtgtcttaagagctcgtgcttttaactgttgttggtctagatgctgcagctcgtgctgtgtgcacataaggggttgagtggattgaaatgtgggtttagcatttggcagacagttttcatgactgaggagctcttgtcaccttcaggccttttttgctctccttcccctcccagttcacagagccttctggcacaccctgctaccctggcagcactgcctgcctttgttacctcaccatgccctctagaccacaagttatctgcaaagttgtctttcttgattcatccagctcacttctgaccttgtcctttggaatctcag

SEQ ID NO: 521685 - DNA, 539 bp, Homo sapiens
aataatcataataatgatagttaaaaataagttactaaagtttgctgaactctatgtgccagtcactgggttaagtttatttcatacattatgacatagaatccttgttactgccctctatggcaaaaactaggattatcaccgttgtatagatgaggaaaccgaggcagggagaagttcagcatggccagtactcagtacagtccacagtcttactgtgtcttaagagctcgtgcttttaactgttgttggtctagatgctgcagctcgtgctgtgtgcacataaggggttgagtggattgaaatgtgggtttagcatttggcagacagttttcatgactgaggagctcttgtcaccttcaggccttttttgctctmcttcccctcccagttcacagagccttctggcacaccctgctaccctggcagcactgcctgcctttgttacctcaccatgccctctagaccacaagttatctgcaaagttgtctttcttgattcatccagctcacttctgaccttgtcctttggaatctcag

SEQ ID NO: 521686 - DNA, 539 bp, Homo sapiens
aataatcataataatgatagttaaaaataagttactaaagtttgctgaactctatgtgccagtcactgggttaagtttatttcatacattatgacatagaatccttgttactgccctctatggcaaaaactaggattatcaccgttgtatagatgaggaaaccgaggcagggagaagttcagcatggccagtactcagtacagtccacagtcttactgtgtcttaagagctcgtgcttttaactgttgttggtctagatgctgcagctcgtgctgtgtgcacataaggggttgagtggattgaaatgtgggtttagcatttggcagacagttttcatgactgaggagctcttgtcaccttcaggccttttttgctctccttcccctcccagttcacagagccttctggcacaccctgctaccctggcmgcactgcctgcctttgttacctcaccatgccctctagaccacaagttatctgcaaagttgtctttcttgattcatccagctcacttctgaccttgtcctttggaatctcag

SEQ ID NO: 521687 - DNA, 539 bp, Homo sapiens
aataatcataataatgatagttaaaaataagttactaaagtttgctgaactctatgtgccagtcactgggttaagtttatttcatacattatgacatagaatccttgttactgccctctatggcaaaaactaggattatcaccgttgtatagatgaggaaaccgaggcagggagaagttcagcatggccagtactcagtacagtccacagtcttactgtgtcttaagagctcgtgcttttaactgttgttggtctagatgctgcagctcgtgctgtgtgcacataaggggttgagtggattgaaatgtgggtttagcatttggcagacagttttcatgactgaggagctcttgtcaccttcaggccttttttgctctccttcccctcccagttcacagagccttctggcacaccctgctaccctggcagcactgyctgcctttgttacctcaccatgccctctagaccacaagttatctgcaaagttgtctttcttgattcatccagctcacttctgaccttgtcctttggaatctcag

SEQ ID NO: 521688 - DNA, 643 bp, Homo sapiens
ccagccagtgcctgaatctggtctgcagtcttcctgccaggttttttagccacattgtgaacactttcagtgacacaaaactcattcttctagcagcttcttctactgtagataatcctttctctcctgggaaaccgcaggagccatcatgcttctgccctcacccccacccagagagatgggcagtcatccttttgaaacctttggtatcaccacgtcacatctctgctcagaactcggcaatggcttttcgtcatgcctagaataaaatctgaactccttacaacagtcctcaaggccctatatgctatctttgtcccctccctctctgatgtcacctcctaccacttttcctctggcttattttcctgcagcgacactggcctcctcactgtccctctgatatcctacctttaccctgcctcagcgactttgcactgcctgttttgtgcctggaatacagttcccttcctacacagttcccttcatcactttcttgggggctctgttcagatgtccttgtcttggaggacttccttgactcctgcctaaaatagtttcttgttacaccacccttggcactctttctttttttccctgcctctcyctcaaccctggccactcttgacctgctgttttttct

SEQ ID NO: 521689 - DNA, 375 bp, Homo sapiens
tcacattaaggaggagaaaactgagtcccagagaggagaatgaaggtctttcagtcacagagtgctccgtagcctwgctgggcctagaactaagatgtagcgctaacttcctaataaggtcactttgatggatccacttgatctgggccatgaaaggtggtccattggattgagcctgacagcctagagtgatggaacagcataaggtaatgtgtgaaagcaaaaacaaagagaagacactgcagatggaagcaatctggctgagataattttctacaactctgtgacaagtcagctattctcagtggaattttcagcacccccttattctctcattttaattatcttaactttctgtattttttattcttatct

SEQ ID NO: 521690 - DNA, 629 bp, Homo sapiens
tgctgcagtcctggacactcatcactgccacccatgactctggaattgggtattgctgtggacaacaatactactttgttctgggaaagaatgccccttcatccttgcttctttgagtcactcaatggagattcaaggtgacatatgggaacattacatttgctgagcatgtttgtgcagccctaggcctcaggggtgaaggaaagtgccccctgttttgttctgtttttgcagtaggaacccagctctgtcactcagcaagtctcaaagatggccttaaatagggagatcccacaacataacaagggagttccacatagtggacagtcaaaagcatggacacatctcccataccgtggatcttcctagggttccaaactccccttgaaacttacacattggcaggtataaagtgaacagcacaattgttcacctctggaaatagaagggccactccctaatcaccatggaaatattcctaagaatgtgccttttcttattgggcagaaggccasatatctttttttatcagttttttcaatggcagtaatttatttcacaaggtcacctttaatgggcctgacccatttttctgcctatattttaatcacaggctgtatcttcagctt

SEQ ID NO: 521691 - DNA, 462 bp, Homo sapiens
ttgcattcttatgaaggatatcgaacacattcatcacactattcaagaacaaagagttacagcagattagatctgtcagatgagttatatagtcaataattgttttctagatatcatcgaagaataaaggattctcctcttttacaaaagaggaagctgaggcagaaagcagttcagcggttacaccacttgctcagagtcaaagtcattagtaagtgccaaatcccccattcaatccccaagaattgtcattagtgcagtttaccaaatatttatggatctctgcttccaggcacatggtatggttgcacttcctstctcccctgtgattgggagggaccgtgggtctagcagtagccaatcagttccaagcacagtgacatgtgcacctttctggataaagcatgtaagtgctactgcaagactctccagagctctttccttctgcccctgcaattggca

SEQ ID NO: 521692 - DNA, 518 bp, Homo sapiens
acaggtgtgagctaccacactagggcctgatttacttttttattttttttcactgtcaataggacttgcgcgagaaggtcgtgagcagactttggcctttattcaggaaatggctatcactgtctctggagattgtgtcaaactgagttgagcaggaaagggcccaatgtttctaatgttgcatccactgccacctttttgttgtcacctatgcacaaaaggacacccagtttgttgtttaaagtatatatatatttatatatataaaaatatctgtatatatatatttatatatataaaaatatctttatatataaaaatatctttatatatatttatatatatttatatataaatatacgtatatatatttatatatwttttatgtatatatataggcacctgtgttttagcccctagttctccatgtagacatttagaaatttgctaaatattctcctgcaacagtttttgtgtgacttgtgccagaccaaaaaaaatcacaggctcactatatt

SEQ ID NO: 521693 - DNA, 583 bp, Homo sapiens
agtgagagagcttgctctccaatttcaatctcagtatttgagatgtgagattcaggaagcccggatcatttagacgaggttcagataaagatcctaatgtttggattcttttgmacctctttaattcaacacctccatctaacgtgggagttgggtgtttgtggataaagcctagagattgttttagagatggactatatagataaacatcaaggttgctggcaaagagtacttttcagtaatttttataactaaaaatacaaatggcatcatcatcttggcttgggaacccctagaatattataaacaaccctgttatgtaaccagaaaaattaaaggcagagaatgccaaaagtagcttaccctaacgaatcatcacaaagtggtaagtaaccaggcaaaaggtagtacaagcgcaggaaggccaggctcaaatgcttacagatgacagacagttcaatgtggacaaatgaaatgtaattgtgactttgatgagtcttcatgccacaagacaatgctttgtaagaaataaaatatgagatttttttctgaaggcatgaaaaaagtctccggagacaaatag

SEQ ID NO: 521694 - DNA, 644 bp, Homo sapiens
acaagtgttaatggctcaattgtgtattcacttcaccaaatctgaaaacttgagagaacacaaaacaaaagacgactttggaattayaaaatcctagaaatgagtaatagacttcaaaggactggagaatctttcaatgcgggggggggggggggggggtggggatttgtcctgcattctctcagatttgataagcctaaaattggaaaataatgatgcttacaagatttccctaatgacagcattttagaatatgttatttcctctttcttttctttttttttccccttctccttgtcaactacaatcaatccttcaagaggcaaataagggcaattcatatttatgttgaattcagtgactatttggtggtcataggaccaaagccaggaaaaggcaaaggtttgatctagaataatggttcttgacctccagaaaattttgcttcctaggagacctttgacaatatctagacacatgtttgattatcatgactggtgggggtgctactggtatcttgtgcatagatgcacacaagggtggtgctaaacatcctattatgtttggggaagtttccctgtaatagagtcatcgagctcaaaatgtcagtagaacagaggctgagaaaccccagactagacctt

SEQ ID NO: 521695 - DNA, 510 bp, Homo sapiens
taaacataacagataaaagtaaaactgtctatgtaatgtctagcctagatactccacctgctctattgcttctttctaccttccttcccactgacattactattcatgataattctgcagttaattaactagttgagaaagataaggttagcagatgctcaggaaagctagataggatgaayacacacatctctaccttatcaggggaaatacttctttttttcttttcttttctaacatttagttcccatttgttctttattaatattcagtaaagatttggggaacttccagagtaattcagttttaccaataggcaattaaagggagggatttgggtttcacatgtgaacatcaacataaaagattggcatgtacagctaagggacgcaggtgatgttgaggagtagattggctgcagtcactgaaagtaggaaaaccctaagaggaagacgttatctgtggtaagcagagtcagtgatctctctctctctggcagttacccttgct

SEQ ID NO: 521696 - DNA, 510 bp, Homo sapiens
taaacataacagataaaagtaaaactgtctatgtaatgtctagcctagatactccacctgctctattgcttctttctaccttccttcccactgacattactattcatgataattctgcagttaattaactagttgagaaagataaggttagcagatgctcaggaaagctagataggatgaacacacacatctctaccttatcaggggaaatacttctttttttcttttcttttctaacatttagttcccatttgttctttattaatattcagtaaagatttggggaacttccagagtaattcagttttaccaataggcaattaaagggagggatttkggtttcacatgtgaacatcaacataaaagattggcatgtacagctaagggacgcaggtgatgttgaggagtagattggctgcagtcactgaaagtaggaaaaccctaagaggaagacgttatctgtggtaagcagagtcagtgatctctctctctctggcagttacccttgct

SEQ ID NO: 521697 - DNA, 654 bp, Homo sapiens
agaaatatttaataacataagtaataaaatgcagataccattcatatactaaagaaaaaaaagaaaaaatctataatatcaagatgaagtttaatctggaaaagtgcaaagaaaacaactgttaaggagaagtacacaaggcccaggagtggtagaatgaacatgaatttttgttgggacattaaggaaatctgagaaagtgatgctatagctatgagagataatgatgtaataactagacatttatagattatgatatacaaggaagaggaaacaattccatagctgtatttcacactgctttgtccatcattataagcatgtggatgtctccacatccacattttcttgttattaatgattctaacttacccattcaattatttagatatccattttgattaattcttcttcttctataattgcatagtttgaatctcactgttttgaaatatgttaaaagtagtagcatgaaagtggtaaacttctagaaggtagaagaagagacattagggttgctgctgaatcagaagaaggttgcaggtataggcataggaaatacatgttttattttccataaacacrttttacagatggtgacccgttgtcagcatatcctatatcttaactagtttatccgtagttggtaatgaa

SEQ ID NO: 521698 - DNA, 612 bp, Homo sapiens
tcagctgcatctagaaaagcatgataaccgtctacccagatgtaatagaccctattcagttttcttctttcttccttttctattttggttactttttttcaggtaatcttcccagtaaaatgacatgtttgtctattccagatattacagtggaaaccakggagaaacacttttggtggttgtgcttatttattttctcgttgctcacagctctggagctgtcatcatttgagagaagaaagagcctttatctgagttccttgatggacaagatgttgtctttacttgttttcccccctttggcaactgatactgtgtctgactttcttcttaacccatctgtcttatgctttcttgttttgccagaaaaaagaaaaatttgacatcctcacaaaatggtatttatattgccctaactggacagagtaaaaaacacatgactgatgaatatctgaaggaattaaactgttattgaatatgttaaaatacttcttaactatattgtgaaagatagattttttattaataaacaatcatgttaacttgggccatagtaaacaaacataccacaggttgtaaaaatagaagaatcttctggcagaagagcctagt

SEQ ID NO: 521699 - DNA, 604 bp, Homo sapiens
ctgagttttgcaactttgatgactcagagttagaagaggaaacagaggcagtcatgtctagcagaggacacagcatagagaagacataatagcctgaggagtttgggaaacaaaatatagctgtgattaccttatgaagtgtgcttaaggagtctgtgagtaaatcaagctaaaatggatcccataacttctcacaattcctgttttccgtagcactgtggtggtccctttcttctgggatcaatgatttaattccgactgaaggcaagaaaaaaccataagactttcgcccagttgtccgcattgggtcaacatttcaataaataacccggtcacagccatcttggtctaagggctatgattaattagacgtcatccaaaatacactaatattggctaattttacctgcaggtgaaaatatgttaatatgcggctcaaagatggcaagacaagtgttagtccagaaagtattacaatatatttaaaattttaaagctcaatattaaatagtcctataaattgcaataaaacrtcacatctgatttaaacatacatattttctaaattatggagatgagaaattgcatactaggtgtaaaagca

SEQ ID NO: 521700 - DNA, 548 bp, Homo sapiens
tggggccgccctggctgcgcggtggcggaggaggagaggagaagcgctctcgggacrttgcggcggcgatccccgcagagggtgaagccgggcgctgcgcagggagcagcaacatgagggcgctcttgcccaggacaagcagagctgtacgtttgggtagctcatattggctgatgccaagaaaagtgacttcagaaccttggctggcgcgcttccctaccttttccctttcttcttaatcttctgtgtgccaccacctccccccaaccttttttcccctcccaaagttgtttccttttgtttacccggtgcggtttcagatctcagcacttctcagctagtagataaaattatttgctctgtaatggacatctcttctcctctccacttgttaccccactcgcccttcgctttctaccccattttgcttctctctgcccaagcctgtggtccaaggtgcagggatctcacaggaaaacaggtagcctcggggtgggaattcccagagcactgaaggcgccggttgttggccagagggaggccgggac

SEQ ID NO: 521701 - DNA, 647 bp, Homo sapiens
ttcactggtatgcttctagtagaggaaaataaagttatgagtaaatggacaatgaaatatacaggactgatcctcacttaattcatcagttttatgttgcttaaccatttatttcacctttattactagaactgttgtcatgtcacttcctataaaagaacaaatttcttccattttttcccgtattcacaagtaatcttcccttcattatctcaaattataattagaggaagaaatgatatttctataagaatgttcaacctgaccaagtgcaggagccagaatctttcaacacaattgacaaaggactacaatccatctccttactgtacagtttatgctacttataatctgtgttaataggattgtttcactaaggctcatttagttgtgtggcagaagcgtttactacacactgcaatccatgtgagccccacctttcagagccctcctgcagtttgacratactattgaactaactctggacaacagactgtgtacaaaaatgatgtgtgtccactccagactgaggcatttaaaagccaatgtatagcccttctgctccctttctctgctgtggcagcagtggaatccatttattgagaaggcaaagtcacaagattaaaacagccttgagctctaggttt

SEQ ID NO: 521702 - DNA, 631 bp, Homo sapiens
tgccaccctccatcagggaggaaggaaatgcagttcacaccatttgcttctatctttggtctccatacgtgccaagcctagcagtgaacaactgctctcctgagacctttttgtaaggggaagaaaacctccccggaggcctcgtgrtccctgtctgccttcacttctgtcattccttccctctcagcatcactgggtcacttttgcatttacacacatgcatcatgccatctcggcatgtccctgtgcatctcctgtcattttgtgcccaggttttgtgtccaggctccactctgcctggattctaagcagctctgacaagactgtaagccgcttcagaatgagaattgagttgtgtacttactttttttcttggcatttagtaggtgcttgattaacacaatgaattgaatttaaaagttaccatgaatatgtaactcatttccaaattgttaaagcatcaaaaacttttttaccatccctgaattttatcttacagatttactttagaaatcctgaaagaagtgatagatgcaggaggcagataagggggagggtccccagagaatctccgatccacttgcgcaccgggagaacaaggtggagccacgggaagtcacaccttgtgcaa

SEQ ID NO: 521703 - DNA, 490 bp, Homo sapiens
ccaccctccatcagggaggaaggaaatgcagttcacaccatttgcttctatctttggtctccatacgtgccaagcctagcagtgaacaactgctctcctgagacctttttgtaaggggaagaaaacctccccggaggcctcgtggtccctgtctgccttcacttctgtcattccttccctctcagcatcactgggtcacttttgcatttacacacatgcatcatgccatctcggcatgtccctgtgcatctcctgtcattttgtgcccaggttttgtgtccaggctccactctgcctggattctaagcagctctgacaagactgtaagccgcttcagaatgagaattgagttgtgtacttactttttttcttggcatttagtaggtgcttsattaacacaatgaattgaatttaaaagttaccatgaatatgtaactcatttccaaattgttaaagcatcaaaaacttttttaccatccctgaattttat

SEQ ID NO: 521704 - DNA, 655 bp, Homo sapiens
tctgttaggattaataaacctggtgaatgggccacacaaatttgaaatatgaatcatcaaagttgctttaaagaaaaaacagatgcaggcaaggagctgaagatcccccacctaacccatatttcctactgcccggcttgacaacctactggaagcctttcctttgggtgcagttgattataatacttcagatagagccaaagcaacagaaatccatagcctagggccgggtggtgtctcgcgcctgtaatcccaacactttgggaggccaaggcgggcggatcacttgaggccaggagttggagacaagcctagccaacacggtgaaaccccgtctctactaaaaatacaaacattagctgagcgtggtagtgcacgcctgtagtcccagctactcgggaggctgagccacgcaaatagcttgaacccaagaggcagaggttgcagtgagckgatatcacgccactgccctccagcctgggcgacagagcaaaaccctatctcaagataaaagaaagaaagaaaaaaaagtccgtagcctaaattagccgtcctgtgatcttctagtaccaagaccgttgtagaatatagcttcagagctagaaagagcattaggtgcttacaattgctaatccctatgttgccatgtggaggg

SEQ ID NO: 521705 - DNA, 655 bp, Homo sapiens
tctgttaggattaataaacctggtgaatgggccacacaaatttgaaatatgaatcatcaaagttgctttaaagaaaaaacagatgcaggcaaggagctgaagatcccccacctaacccatatttcctactgcccggcttgacaacctactggaagcctttcctttgggtgcagttgattataatacttcagatagagccaaagcaacagaaatccatagcctagggccgggtggtgtctcgcgcctgtaatcccaacactttgggaggccaaggcgggcggatcacttgaggccaggagttggagacaagcctagccaacacggtgaaaccccgtctctactaaaaatacaaacattagctgagcgtggtagtgcacgcctgtagtcccagctactcgggaggctgagccacgcaaatagcttgaacccaagaggcagaggttgcagtgagcggatatcacgccactgccctccagcctgggcgacagagcaaaaccctatctcaagataaaagaaagaaagaaaaaaaagtccgtagcctaaattagccgtcctgtgatcttctagtaccaagaccgttgtagaatatagcttcagagctagaaagagcattaggtgsttacaattgctaatccctatgttgccatgtggaggg

SEQ ID NO: 521706 - DNA, 563 bp, Homo sapiens
gggaaaaaaaaaaaaatctctaagctaagccatacactcttcagccaacataggtagaaagaaagaaacaaatttttaaaaacccacaagccagccaaaaggcatttttttcatttctgtcgagaaaatcaaattgttttcctgcacccaatactgcataacttgaagaaggtcctatagtgtgctgagatttacattaaaatgtaatcaaaccaagttgctgaataaggtcagggaaacattaggcgaacaagagtgtcttagcaaagggaaaactaacttgcccaatcaatgagtcctaatgaaaaatactagaatatgcctttcaacaggatttctcaaatatcagagrattttgctatcaaaggaggagcctcagctcaaggtgtccttgtgggggccacgtgagacaattgcctgatctcccacatgcctttccctatgatagatctgccctgcccccaacacactgtcacctgggctctgcatggccaaaggcacatgtgcctgaaactggctaaatgaattcttggccttgtaacaaaacaaggataaccaaccac

SEQ ID NO: 521707 - DNA, 513 bp, Homo sapiens
gggtagaaactggcttggacagaaagacaatggattttggttttgacatgtcctgtattctagtgcagcttatcttctggaaagccagaagaagccatactaaatgacagaagaaaagggaatagcagcagcaggaaayatgggaagggccaaggaaagcacacggcagatgaacacttggaatttgtcctttaaagtaccttgaaattgcttctctttattaactgtcccattaccatagccacaaacacagcatccactgaagcctgtggtcctttctcgccattagcccctcggtgggtcctttacaggagcacagggtttagtggctttggaatctcatcgaccttacctcaatttccaccactttcagctaggtgaccttgtgcaaatcagctcatctttctaagcttcaatttctcttctgtaaaatggagagagaacatatcacctgctttgcctggctgttgtggggattgtgggttaatataaggtaactgcccagcacaacag

SEQ ID NO: 521708 - DNA, 280 bp, Homo sapiens
cagttttccccaatcctggttaggcagttaccgcactgtttctcctggagatcagatgttggcgtctgggaaatgaaaggcggattagacaggagaggagcggtccgaagtctgacagttgggaaggtgggggaatgtaaacccttcctcctcgaggattcctttttccagwgaagaggaagcaataagtccttgaagacattctcaggagaatcactttattgtgtctatcttgaattatggtggcaactatcatgatttttctagtgtttgagtgttc

SEQ ID NO: 521709 - DNA, 589 bp, Homo sapiens
tacttctatgataatgacattaaatctattgatgagggcagagccccatgacctagtcaattcttaaaggtcctacttctccgccaggcacagtggctcatgcctataatcccagcactttgggaggctgaggcaggaggatcgcttgagcccaggagttccagatcagcctggacagtatagcgagaccctgtctctacaaaaaatacaaaaattacctgggtgtggtggctcacgcctgtagtcccagctacttgaaagactgaagtgggaggattgcttgagcccaggagttcgaggctacagtgagccatgatggtgcgtgccactgcactccagcttggaagacaagagtaagaacctgtctcaaaaaawtttttttaattaaataaataaaattaaaggttttacctctcaacactgttgcattggggattaagtttccaacacatgaactttgagaggggcacatcgaagccgtagcatatctctttaaaatctccagcacagttttagtacttagtgagttttcaatgagtagttattgaattgacttcagttcatttcagaaaacttccagtgtctctca

SEQ ID NO: 521710 - DNA, 589 bp, Homo sapiens
tacttctatgataatgacattaaatctattgatgagggcagagccccatgacctagtcaattcttaaaggtcctacttctccgccaggcacagtggctcatgcctataatcccagcactttgggaggctgaggcaggaggatcgcttgagcccaggagttccagatcagcctggacagtatagcgagaccctgtctctacaaaaaatacaaaaattacctgggtgtggtggctcacgcctgtagtcccagctacttgaaagactgaagtgggaggattgcttgagcccaggagttcgaggctacagtgagccatgatggtgcgtgccactgcactccagcttggaagacaagagtaagaacctgtctcaaaaaattttttttaattaaataaataaaattaaaggttytacctctcaacactgttgcattggggattaagtttccaacacatgaactttgagaggggcacatcgaagccgtagcatatctctttaaaatctccagcacagttttagtacttagtgagttttcaatgagtagttattgaattgacttcagttcatttcagaaaacttccagtgtctctca

SEQ ID NO: 521711 - DNA, 627 bp, Homo sapiens
ctgcagatgttaaggaaattgctgagtgatggtaacctcatattttgtctgtagattctctgaattcatcttttcttcaacaagtattcatggtatttacctgckgtgtgccaggagctagaaattcagagatgagttagctcaaaataaggaagaagggcatttaaagaattatagtcagtgaactttggctagtagaggtatgtgttttgctttcttcccagtgataaaggtaatgaaaactaagagtctagaatgcaccaagatagtttttcagaagtgttatggaaacacagaatgacttgtgtgcctggggaggtgaagtcaatgaaaatgtcacagaaaagctgttttcttaagaaaagtttttacttttgagagaccaggtctcactctgttgcccaagctggagtgcagtggtgcaatcatagctcactgtagccttgatctcctgggcacaagcaatcttcctgcctcagcctcccaagtaactcggactacagacacgcaccaccatgcctggctaattttttccttttttttttttgtagagatgggggcctcactatgttgcccaggctggtcctgaacttctggcctcaagcaatccccttgcattggcttccc

SEQ ID NO: 521712 - DNA, 591 bp, Homo sapiens
ttattttcatttccttctggagattcactatgcttcttcagtttggaaagtatgcagtcattatcacctcaaacgtttctttcccattctctctcttgtctcttggaaattttgtcagatatctactgggccttatctttctactctgcatgcctcttcaactctcttccatatttcccattgctttctctctgtgatacattctgtgaaatctcctcacttatcttccagtgaactaaagtatctcttcatcttctgtttaattatgtgtttagcttatccactgagttttttatttcagtgactaaattttttatttcaatggctatattttttatttccagaagttgtgtttttttccccaaatctcactcttccttttttatggtgtcctgcttttttcatgattgttccttctcctttatcastagctttcttgatttggagcacaggcaaatccacacccacctcatctagaagtctgaagtgctttagtaatatctaaaatagtaaaatctaaaattagaggatagatgtagtagataaattgggggatggatttatgtgggaagatttgagtcagggagagca

SEQ ID NO: 521713 - DNA, 623 bp, Homo sapiens
cagtggctcacgcctgtaatcccagcattttgggaggccgaggtgggtggatcacttgaggtcaccccggccaacatggtgaaaccccgtctccattaraaatacaaaactcagccgggtgtggtggcgcacacctgtaatcccagctatttgagaggctgaggcacaaaaattgcttgaacccaggaggtggaggttgcagtgagccaagatcatgccactgcactccagcctgggcaacagagcaagactctgtctcaaaaaaatctccaacttgaattccctgttgaaatgatcacttgaacccgggaagtggagactgcagtaagccaagatcgcaccactgtactccagcctgggcaacagagcaagaccctgtctcaaaaaaaaattaaaattaaattaaatttaaaagttcatctcttaaaagcaaaaaatggaatatgatggttcactttttcaagcagtaggaattggaacattattaacagcagccagatgatcatgcagctactgcatcactttcctagaaacgtgtaaaagaatgcaaatctagtgaacagaatggaagggagcaaaagataattgttttatttgggtctcactctgttgcccaggcctgg

SEQ ID NO: 521714 - DNA, 444 bp, Homo sapiens
acctgagctatgcatataaagatattcatcatgctttatttacaaaaccaaaaaaaatyggaaatatgaatttctaacaatatgggttttaagtaagcctttaagagtatttaacatccttaaaaatcacgtttcttaaaaatattttatgaaggctgggcacagtggctcacacctgtaattccagcactttgggacgccaagatgggcagatcagttgaggtcagtagttcaagaccagcctggccaatatggtgaaacctcatttctactaaaaatataaaaattagccaggcgtggttgtgtatgcctgtaatcctagctactcaggagactgaggcaggtgaattgcttgaactcgggaggcagaggctgcagtgagccaagattgcactccagcctgggcaacagagtgagtctctgtcttaaaaaagattttttaga

SEQ ID NO: 521715 - DNA, 444 bp, Homo sapiens
acctgagctatgcatataaagatattcatcatgctttatttacaaaaccaaaaaaaattggaaatatgaatttctaacaatatgggttttaagtaagcctttaagagtatttmacatccttaaaaatcacgtttcttaaaaatattttatgaaggctgggcacagtggctcacacctgtaattccagcactttgggacgccaagatgggcagatcagttgaggtcagtagttcaagaccagcctggccaatatggtgaaacctcatttctactaaaaatataaaaattagccaggcgtggttgtgtatgcctgtaatcctagctactcaggagactgaggcaggtgaattgcttgaactcgggaggcagaggctgcagtgagccaagattgcactccagcctgggcaacagagtgagtctctgtcttaaaaaagattttttaga

SEQ ID NO: 521716 - DNA, 444 bp, Homo sapiens
acctgagctatgcatataaagatattcatcatgctttatttacaaaaccaaaaaaaattggaaatatgaatttctaacaatatgggttttaagtaagcctttaagagtatttaacatccttaaaaatcacgtttcttaaaaatattttatgaaggctgggcacagtggctcacacctgtaattccagcactttgggacgccaagatgggcagatcagttgaggtcagtagttcaagaccagcctggccaatatggtgaaaccycatttctactaaaaatataaaaattagccaggcgtggttgtgtatgcctgtaatcctagctactcaggagactgaggcaggtgaattgcttgaactcgggaggcagaggctgcagtgagccaagattgcactccagcctgggcaacagagtgagtctctgtcttaaaaaagattttttaga

SEQ ID NO: 521717 - DNA, 444 bp, Homo sapiens
acctgagctatgcatataaagatattcatcatgctttatttacaaaaccaaaaaaaattggaaatatgaatttctaacaatatgggttttaagtaagcctttaagagtatttaacatccttaaaaatcacgtttcttaaaaatattttatgaaggctgggcacagtggctcacacctgtaattccagcactttgggacgccaagatgggcagatcagttgaggtcagtagttcaagaccagcctggccaatatggtgaaacctcatttctactaaaaatataaaaattagccaggcgtggttgtgtatgcctrtaatcctagctactcaggagactgaggcaggtgaattgcttgaactcgggaggcagaggctgcagtgagccaagattgcactccagcctgggcaacagagtgagtctctgtcttaaaaaagattttttaga

SEQ ID NO: 521718 - DNA, 599 bp, Homo sapiens
ggtggccagtagattttagattttaggcaattacttgtatttgtgcatgctcaagtacgcacataaagagttttaaatgctgctgctcagattttacaaactgagaaagctgtaagagcaaacatttctcatgcacacagcacaattcccattctgttaattggattgacattaggtgcttaatattttccaaagctggtcaactaggtttaagaaactacctttggtgattgtgtatgaattttgcactagacaatacaggtataatcttatcaaacttacctttaaaatcactttaataaaccaatgttttgctggatgtgaagtgtctttaaattatctggcacttctgaataactagccctgctatgctaaatgacaaggatgttactgggcatcacctatcatctatctctctctctctctctctctctcwcacacacacacacacacacacacacacacacacacacacactctcacaccccagatctgtgcctcagccaattggcctgcccatttccaagtgggccaagttgaaagaattgattacctagagagaatttaaatgccagcatttagtaagaccagatttgcct

SEQ ID NO: 521719 - DNA, 392 bp, Homo sapiens
acccctctcctcccaaagacattctggctttaagagtaaatactaaagtctcggtgcgcaaaaagtttaattcaaactttctcattattttcaagagctgctttcctaagatagcacagtttgtgcatcatatttgctactttcaccactggcaggacayctgctataaacatttaaaataacaaatgacaactgtttttttactttttaaaaattattttaggtttataaaatattgtaaaaccaaaaatagtacactttaaccacactcaccttttcttaatatttcaccccatttgctttatcatttatgaactctatctacctgtctgtctatgtatctgtctctctatcagtctatgtatttatctgttttttacttttctgaacca

SEQ ID NO: 521720 - DNA, 626 bp, Homo sapiens
ttaagaagtggttgtgagtgttaaatgagacaatatataaatgaagactgcttaaaatagggcctgcctactaagagctcaatatattttagcagtcagcattagaattctaaagcatgaaactgtastttcaaaaaagcattaacatttaataaagcagggttatagtaaatagataaagcaaattccttggggtttcacctactttggtgagttgtatgatctctaggaactgaattatctattaattggatcattgacctgcttactacctagataaaaccataagagaacttttttccctcccaagactaggaaaaaaggagatagtcagtatacctcccaagtttgccctttgacctgggaaggaagagctcttttggggtggtaaaaaccaagtcccagattattaagggtgggtcttcactttcaggctacttttcctcttttgagcaaggcggcacaccatttacttcgagtccattttctactccaacttctgtctccatgaccttcttttgtaaaccctctttttacctcttgtttctccaaaattattgcattatgagtgcacacacaagtgtacacacacacacatatacacacacaattagaccttcatttaa

SEQ ID NO: 521721 - DNA, 482 bp, Homo sapiens
tgtaatctcaggaagtaagttttctttgcctgagactatttataaatttaggtttttttgattgagaagattcctttcaacgctagccttcttgtgattctgtaagagctacctttttccattggtaaatttttcaattatagatgtcatttaatttctttaaacagcactttcagcttggcacaaaattttaagtagatcagccaatagccaattctgtataccaggatttatgtttccctcatcgaaaatgatactgcaaaaggaaagaagcatcttttgaactaaaattgcagtgttcttgcctttagcacacggtagcagtctttctctttgtacccatttcctttctagcattrtaatattcagcacagacactggcccaaagagggaagtaaaaagtcttcccatttatgaatttcagcctggatagccatactgataacgtgaatatatttttactggcttataaattaacagag

SEQ ID NO: 521722 - DNA, 427 bp, Homo sapiens
ctgtggggatgggaagccaaggggcaggtaggagtgggagtgggaaggctggaggccctgcctttgctctgaactggagcaggaaagcagcctggaagccatgtgacagcaggagatgtggggctcccagagggtggggcaggcagcacccaaaccatgcttgacccactgctcagcctggcctggggccagagraagcacaagcactttttttcagttcaatttattctccaaagcaacaaacctcaggatatgaacgacagaggaagttcagtttaaacaaaggcattcaccaagcagtatgggtcccctgcaatgacaaatgaatccctggcaaagggacagccaacattggctagattggaacgttatgattccaggatgatctttctgacctgggtttagaagctccttcacttggctttct

SEQ ID NO: 521723 - DNA, 580 bp, Homo sapiens
aattatgtccagttattctgacgacatacagactgtcccacctaaagacacataagcatgctgtgtccttcctgtcccatgctcagcgtccgcatccatcacctctcctaaggcaagctggccatgcccactcacgataaatgacagagccaccatggccagaggcaggacaaacacatgcctcccctttacaaggctgtgagggatacagaaacattaatatcatggctcatgcccttagatggcccacaatcaccccacatgggtgacagcaaatggctagtgctgtcaatcaggcatgggtgcccacaccaaggagagacctgactttggtaagtgaaacaaagttagtccaaaaaagaagcgcaatcacattttttattctgggggaaaaggagtatgtcaccagaaagttcctttccagaatattctttgaaactgtgtcatatcaccttctccagtgcctccacgacctcagcttgataaagaactgctccccacctgcctctggtctcactctgagcatgctgctcagacacagaraatgctattccccacctgcactttctgaggagcgctg

SEQ ID NO: 521724 - DNA, 579 bp, Homo sapiens
agaggatttctaggaggacatacaagacataccttcaaatcaagatggccctgtagttcctcaagctcaattttatcaattccagttaccctcatttccagttcactttagcgaatcactatcatggccttagactcgttgtttgagaattcagtggtcaagattcttaactcagactaccccaatttgtatcttgtwatctgttatcctgttagtcttcccttcagttgtctccaacttagccttggctgcaatttggaattacctatggtggcttcaaaatgctgatgcctgggtctcaccccccaaacattgtgaaatcatgatttcaagcctttcagccactcattctctgaatcctctatcctcatgaagatacatttttctccctaaccaatctagacccaattcatcagacatttcaaaaattctttgtatgccccgctagtctctttattaatagtcttttggtttctgttactctcgcctcaccaatcccagtcagggaaacactcactattcttattcttaccagtctagattattgagattcaggaaagtataatgaagctattgact

SEQ ID NO: 521725 - DNA, 592 bp, Homo sapiens
caacatatgcaaatctgagctcatttccatcccccatccccaaacccacttctcactcctttgtttgtggtcccagtgactacttcagcacccacccatctgcctaattagaaatgggagtcattctgactgctccctctctcctttacatcccttaattcatcaaggcccatcaatttggcctcccttgaaacatctccagtttgtatacttaaccttctctccaaaccacctccctggttccagtcctcatcattttattacctagatagctccaactaccttgggctggtcttccaacttccagttttgtgttattccagcccgtgatccacattgcagccagacagtggtacaaaacacacatctaatcctactgcttctcaactaaaaactattcagtggyttcccattgcctttagggtgaagtccacactcttcaacacagtgtacaagacttacaggatatgattcctgctggaatcactctgaaaagagatatttagtttatatgtttctccaatagtatcaggaggagttcctagagatgcttaacagatgggctcctaatgggcttattaatcactgaaat

SEQ ID NO: 521726 - DNA, 195 bp, Homo sapiens
agctgtcaatatacctggactgttatgcctcaaggttatactggaagcccaactatttttcaaaatattaagggctgagatggctgagctaaattttgaggaaattccactctagttcagtatgtggatgatctcttgttatgcttttycattcttcatgattgtaaaaaacacaccctgtaattgctggaacaa

SEQ ID NO: 521727 - DNA, 620 bp, Homo sapiens
atctactgttgtggtatggcagtgcatgtgttcaagttactgttattttacttcataaaggttgtacaacataacagtarttatgctgacaaattgttataattgttttattttagtattaattattgttaatctcttgctgtgcctaatttataaattaaactttgtcataggtatgtatgtatagaaaaaaatagtatatatagagttcagtactatccaccaattcagttatccactgggagtctcgaaacatatttcccatgtataatgggagactactatagttacgctgctgtttctaggcaaagttgtcatgaacttggaggctattagctcaattgatgcagatttaaggtcctttaataaaacaggagatgaaagctaaaactaacatttgagtggcacagccattttcttgcaacctgcagtggcatgaccatagccattggttgccactgttcgctgctctccccgctgtttcagttccagtgcaaatctgtgagggcagcactcctttgaaagacttaatgaatcacatataattataacagccgatagattttaaggggtagccatttttatctttcagatagacttaatctagcatttttatatta

SEQ ID NO: 521728 - DNA, 600 bp, Homo sapiens
gctgctctgttggcaagtagagttctgtgtgatccttgggaagacaaaatatataacatttcaaagaggggccactttactgttatatcaatacctgcaagtcttgaatgagttgagtggtggaaacaaagtcttaattcattgtttgaaaaaactagaatctctgtcttaccagaagttgagagaagactaaaactgaaagacagatgtgtggccaattaggtatgtcaggctatttccttcatttttatgtcatacgtgagttcatagttttctaaacccattcaaaattaatggacaaagaagacaatgtacactcgactattgaaaactgttgttagagcagagctgagcagttactttaggctagttgggaaagcataacmatctacaattatttgaagctataaatattgaggcaggagagaaggcatttaatagagtagaaaagaattcaataatgagaagtgaagtaatgcttacagcctggccattttattaggaatcactacatgacattaaaagctcctgaaaaatgggatgttcttgtgaagaaagctgtggaaacctcacatttgccaagttcaccactgaattcag

SEQ ID NO: 521729 - DNA, 625 bp, Homo sapiens
aaaaattaagcactgtgtttgtaaattaacatctaggaaattactttcttgagattgtctaatgtttccataacagagtgaactctggtagtaaaacataacagaaaccttctgctctcaattaccacaacaatccttttattctgttgttctgcatctgaaacacagacacagggaaatgaggatttactgaaagakatctttgggttaaaggttcaatcaataaacaaaaatttattgtgtactctctaggaaactcagtaaattttttttagaaattgcttctgaaatacagatttttttgatgagtaaaaggaacccaattaatacatagggccaaagccacaatgactgaccataaagagatacagcagtagagagatttgtaggttaaatgtagctctcaaatatcccagtggaagcaagaaagtcttttatagaacttggtgttgaaaaagttatgttacattaggtgtatctagtgggattagtatcatagttacatattttgtactatgtgcatcaattcatggagtatttaactggcagatgggctagattggaaggcacagtatggcttaatttgcatgtctggtaccttggtagggaggctggaaaaaagggc

SEQ ID NO: 521730 - DNA, 478 bp, Homo sapiens
tctgacttttcattgattgacagatgaccccagtatatctgagcagctgctgtttggtaagccagacaacaagccatctgaaagcaggaaagacgcctttgcattcaccactgtgtccccagagcccaactcggcctggtgtattgattacggatattgaatcagtgttgtcttgcacggatgasttgaaatagacccacatcaatgaagtaaaggcactctccgctcctcttttctcaatttgtaccctttatcctaaaaaatgctttcaggagtcactgaagcaagacttgaaataatgtgaccttctgggtagtaatattacagaaaaaataataatgaaaagcacatcacgtggcaatatccaaaatgagatggctttagagaaaaaaatataattcaaaaaacgaagaggaaaaactgcaaaaatgtcatgttttgtataccaaaataacctatagcttcaactaaaagaaaa

SEQ ID NO: 521731 - DNA, 478 bp, Homo sapiens
tctgacttttcattgattgacagatgaccccagtatatctgagcagctgctgtttggtaagccagacaacaagccatctgaaagcaggaaagacgcctttgcattcaccactgtgtccccagagcccaactcggcctggtgtattgattacggatattgaatcagtgttgtcttgcacggatgacttgaaatagacccacatcaatgaagtaaaggcactctccgctcctcttttctcaatttgtaccctttatcctaaaaaatgctttcaggagtcactgaagcaagacttgaaataatgtgaccttctgggtagtaatattacagaaaaaataataatgaaaagcacatcacgtggcaatatccaaaatgagatggctttagagaaaaaaatataattcaaaaaaygaagaggaaaaactgcaaaaatgtcatgttttgtataccaaaataacctatagcttcaactaaaagaaaa

SEQ ID NO: 521732 - DNA, 509 bp, Homo sapiens
attttttaatttttaaaaaaaatttttaatatattttttatttttatttatttatttattttttaaagaggaaacaaagaagttaagtgttcagaaagctgaggcaggacctaacctggtcactggtcatatcaccgacatcccagcacckggtacaaagagttcagcaaatgtttgctgttcaccagatgttgcttctctagaaatgtccttgctgtgggtttggctgatgccttatctttatgagtaaatcccttttcctttcataaataagtcaccattttgcaaggaggggaagagaagcgttgaacaggaagggtggggaggtaggagcagaaaagaaggggctgagtaatggaactcgaggtgtttttataaattaggaaccacccagcttgccactgacccaggcatctttatcaatttgctcctccaggccatgccagcctagcacaataaagcttcctgtccatttcaggcttaatcacacagaatgtaaatccctcagc

SEQ ID NO: 521733 - DNA, 538 bp, Homo sapiens
ttggtatcttgaccgcaatctgcatgaagctaaacggttatgtgatgacatactggtttatctttattcttagctaattgctttaggatacctgcccccatattattctgcattttcatggttctcttgatagggacctmgatttttttttctgcgaatgatgtaacatgtctaatttgagctttagggtatatggatactggaattgagagggcacatcagaatccaaaatatttcaagttccttaaagtcaaggagtgattggaaacacctgcagccaggctgacttcgctgagttgtgacttgagatattccatgtaaagttcttgcacagagcttggcacaaaaaaatgtaacattattgtccttatcatttttgagtctctgacagatacatagacagggttttagatcacaaagccttgaagggcagggtacacatttaggtattattttctagactgtggggagccactgaagattcttggggcggggatgttgagcacagttttgtgtttttggggcttttaactctagc

SEQ ID NO: 521734 - DNA, 543 bp, Homo sapiens
ttcttggtatcttgaccgcaatctgcatgaagctaaacggttatgtgatgacatactggtttatctttattcttagctaattgctttaggatacctgcccccatattattctgcattttcatggttctcttgatagggacctagatttttttttctgcgaatgatgtaacatgtctaatttgagctttagggtatatggatactggaattgagagggcacatcagaatccaaaatatttcaagttccttaaagtcaaggagtgattggaaacacctgcagccaggctgacttcgctgagttgtgacttgagatattccatgtaaagttcttgcacagagcttggcacaaaaaaatgtaacattattgtccttatcatttttgagtctctgacagatacatagacagggttttagatcacaaagcctkgaagggcagggtacacatttaggtattattttctagactgtggggagccactgaagattcttggggcggggatgttgagcacagttttgtgtttttggggcttttaactctagcag

SEQ ID NO: 521735 - DNA, 538 bp, Homo sapiens
ttggtatcttgaccgcaatctgcatgaagctaaacggttatgtgatgacatactggtttatctttattcttagctaattgctttaggatacctgcccccatattattctgcattttcatggttctcttgatagggacctagatttttttttctgcgaatgatgtaacatgtctaatttgagctttagggtatatggatactggaattgagagggcacatcagaatccaaaatatttcaagttccttaaagtcaaggagtgattggaaacacctgcagccaggctgacttcgctgagttgtgacttgagatattccatgtaaagttcttgcacagagcttggcacaaaaaaatgtaacattattgtccttatcatttttgagtctctgacagatacatagacagggttttagatcacaaagccttgaagggcagggtacacatttaggtattattttctagactgtggggagccactgaagattcttggggcggggatgttgagcayagttttgtgtttttggggcttttaactctagc

SEQ ID NO: 521736 - DNA, 598 bp, Homo sapiens
tttcaacatgaggtttgaaggacacaaacatccagactgtaamcacatggttcatcaaacaacaatagccaatgcctccttaaataagactggactatctacgggtaacttgggatcatcaccatggacatttgttgactatataggaatacacactgatgcccccaggacctgctgaaatgtttaagcctgtttacccctgtatggttggctccagatagatctcattgagttattgtgtctgtttttaattggttttatttttttgtctctgtctttgctgtcaatgtttttaaatgctagatctgagagagacttcaaagatcattcatgagtagatcttcagagcacataatcactaggcactagttagatgctgggaattcagggttagataagaaatggtcctttccttcaaggtgggagcaagttctggctccttattttacagatgtcaaaccaatttggcaagatttctcagcagacccattaagatatgggaaatacaagaagctaatatataatgacagcaaagtatttcttcaagatgggcaggtgtggatccaatctgaacctttattgcaccttctgggcccca

SEQ ID NO: 521737 - DNA, 570 bp, Homo sapiens
tgctgctttccaggaggggacagtggctgccagcaatagcaggtaacatttatggagcactcactttatgccagactatgcattagctagctgtatcatcaccacaccctacagggtagattctattcttactctcctttaagagttagtagcttctctcacatcacacaactaagcccacctttttacaccttacagaataatattccacttgacattcaaggagtgccttttgtgtgccaggcactgtgacaggtgagttataaatgtgctctgctttaatccgcccagcaacttggaaggtagacattattttataaataaggagatmggctcagagaggtaaagtggctccctcaaggtgacacagctcatgtgtggagaacctagagtgtaatataagtcactcttacaagtatacgagaaggaaacaagcccaagttataccccagactgttaagacttccaagagaagtgttaggcatgatgtagaaatgcacgagtgagtccaacttgggggatgtgggaggcaattgtggagaagttggtgtctgagcagggcctggaagg

SEQ ID NO: 521738 - DNA, 594 bp, Homo sapiens
taggcccaaacgatggttttattgcataccatgcagcaaaacacctaataaattaaacacttctttagcctgccaggatgcttttgccagtcacctgtccytcagacatttctaagccatggtgctctttcctctcctcttttaaaaataattcagaataatttctatctttgacctctgttggtctgggagcagctttccctctttaaccaaggctctgctgtccacagattgctggtgcatattcttttgcataatgtttggactcctgcttacttcagccctcaaagtgctcatctgagccgctctttggcacacatagtacctccctcatatcagttgctgagaagtcaaatgtttcttcatatgttacacaaaaataaggctactgcccttttgggtcactgtttcactcactcactcaccagccttatagccagttagtgttttcagatctactcaattttgaattattttccaacttgcgaaagctcatgtttcagaatttgctctagtcaggaccacagtcttcctgacttgcaggaatgtgtgtagtgtggtattggatccctccatggggatgggcaccccaac

SEQ ID NO: 521739 - DNA, 630 bp, Homo sapiens
gaggtaactcaagcttacagagtgagtgtgacttggaaatgccagaagtttcaaaggagctgagtgcaggtctttctgatgccagaactagcacttttaaccctcttattacaccacatgtatgtgaatgtgtgtgtccacactgcacaagggggagcatcacccttggcttatgaaaaaaatgaaggcaaagggcaggaaagatatttatccaggtagagattrtggtttttcaagcacattgctgcaaaagaagccaaggccagtcttcagtgggccacactctgatgtgctaattataagtgaactcttagctgttcattaaagatagatctttttctgttcctttatttccctgcaagcagtcttgacagcattgcttttaaaaatattctgtaattcagagcgttacacttcactaatttaccccctgcatctcttcattacatcacaggcaccccttgtcttctcatcttcccctatgatccctgagtggggttatccctatcctcagtcagtgaacatatttagctgaaccctaaatcccaaggattaaaggcaattaaatgagataatgcatatggcgtcactttaaaaccataaagggccgcacagatgcgaagggttatt

SEQ ID NO: 521740 - DNA, 587 bp, Homo sapiens
atactgattgatgtgtttgtgtgggtttcaaatcatttctaagtaacgcaaatctgcttagactcccggtgctgactgcagtttgcttccggacatctggggtggcataccctgttgggcacggaaggacaagtggaagccagacttggcacagacagaccaggcctggcaatgggagcaccccagggcacacatctatgcagcaaggcactctgggacccasaagacctggagacccttgtgctctgagggcactctgctgggccctgcctgcttctgagcacagggcagatggcagactcacatgagacctattttcccaggccccagagtgtggctgataaggcaggtagctgcagccacagccagtctgggtggtctctttccctctcagacaccctgtgggtcccagtgatgtcacaagttcaattatgtacctgcttatgtttgtgttttgaagcatttggagctttgaagagtggcccccccacaccccgcatacttccctgtctcccctcccataccattttttttagatcatcaggtaagccttcagcagaggggcagtggcatgaacatttgaaaaa

SEQ ID NO: 521741 - DNA, 510 bp, Homo sapiens
tgtcacctggataaaaggtgagtctgtctctccatgacccgcctcctctgaccccctactgaggccacttagagatatacactrtagaaaaggaatcgttttaaagaagttctctagacgacgagttagtgggtgcagcgcaccagcatggcacatgtatacatatgtaactaacctgcacaatgtgcacatgtaccctaaaacttaaagtataataaaaaaaaaagttcttcccaacacaaggtacattgcttttcgggagtattccagtgagcaggtgtgcttaacgtggcggtacaggtgagcctccagcatcaccatcttctggtcaccttttatttttttatgaagcaaataaaaaggcatttcttaaatctttggaaagttttcccccagtttttgtgatacgttctccttcaggttggatcaagaacctggtttatcacctctttccattcttgtttcaaactcatgcattcttttgatgacttaatcttttgctgactaaca

SEQ ID NO: 521742 - DNA, 630 bp, Homo sapiens
gaggtaactcaagcttacagagtgagtgtgacttggaaatgccagaagtttcaaaggagctgagtgcaggtctttctgatgccagaactagcacttttaaccctcttattacaccacatgtatgtgaatgtgtgtgtccacactgcacaagggggagcatcacccttggcttatgaaaaaaatgaaggcaaagggcaggaaagatatttatccaggtagagattatggtttttcaagcacattgctgcaaaagaagccaaggccagtcttcagtgggccacactctgatgtgctaattataagtgaactcttagctgttcattaaagatagatctttttctgttcctttatttccctgcaagcagtcttgacagcaytgcttttaaaaatattctgtaattcagagcgttacacttcactaatttaccccctgcatctcttcattacatcacaggcaccccttgtcttctcatcttcccctatgatccctgagtggggttatccctatcctcagtcagtgaacatatttagctgaaccctaaatcccaaggattaaaggcaattaaatgagataatgcatatggcgtcactttaaaaccataaagggccgcacagatgcgaagggttatt

SEQ ID NO: 521743 - DNA, 517 bp, Homo sapiens
ttgtatcggcatttagtgttggctggaacgcacgcccccatctgttttcctgtcacaattttctccattaggagctagctgcctacatggtttgtcaggagccatgttctgccaaggataggctgggygtaagcattgctgcaagctgcttactctgcatgcatggatcccagatccacatactctccaccccactggtcaaccaccctcttgctcttgcaccctatgctagggctctcagtgggattttagtaaaacaggaccccttaccatccttcttactgtctattgggtaggctcaccaagtattttcaacaaaaatatgagatggcaggactcctgttcccaaacctgagcaggaaattaatatcttgacacataggatgagcttaggacatgagtagaacttctcccatgaatcactttacatcaagtccattttttatccctagatcaaaagcctggttggacatctggcggccctctatgggtgttggcagaatcccatttcagatta

SEQ ID NO: 521744 - DNA, 517 bp, Homo sapiens
ttgtatcggcatttagtgttggctggaacgcacgcccccatctgttttcctgtcacaattttctccattaggagctagctgcctacatggtttgtcaggagccatgttctgccaaggataggctgggcgtaagcattgctgcaagctgcttactctgcatgcatggatcccagatccacatactctccaccccactggtcaaccaccctcttgctcttgcaccctatgctagggctctcagtgggattttagtaaaacaggaccccttaccatccttcttactgtctattgggtaggctcaccaagtattttcaacaaaaatatgagatggcaggactcctgttcycaaacctgagcaggaaattaatatcttgacacataggatgagcttaggacatgagtagaacttctcccatgaatcactttacatcaagtccattttttatccctagatcaaaagcctggttggacatctggcggccctctatgggtgttggcagaatcccatttcagatta

SEQ ID NO: 521745 - DNA, 517 bp, Homo sapiens
ttgtatcggcatttagtgttggctggaacgcacgcccccatctgttttcctgtcacaattttctccattaggagctagctgcctacatggtttgtcaggagccatgttctgccaaggataggctgggcgtaagcattgctgcaagctgcttactctgcatgcatggatcccagatccacatactctccaccccactggtcaaccaccctcttgctcttgcaccctatgctagggctctcagtgggattttagtaaaacaggaccccttaccatccttcttactgtctattgggtaggctcaccaagtattttcaacaaaaatatgagatggcaggactcctgttcccaaacctgagcaggaaattaatatcttgacacataggatgagcttaggacatgagtagaacttctcccatgaatcactktacatcaagtccattttttatccctagatcaaaagcctggttggacatctggcggccctctatgggtgttggcagaatcccatttcagatta

SEQ ID NO: 521746 - DNA, 517 bp, Homo sapiens
ttgtatcggcatttagtgttggctggaacgcacgcccccatctgttttcctgtcacaattttctccattaggagctagctgcctacatggtttgtcaggagccatgttctgccaaggataggctgggcgtaagcattgctgcaagctgcttactctgcatgcatggatcccagatccacatactctccaccccactggtcaaccaccctcttgctcttgcaccctatgctagggctctcagtgggattttagtaaaacaggaccccttaccatccttcttactgtctattgggtaggctcaccaagtattttcaacaaaaatatgagatggcaggactcctgttcccaaacctgagcaggaaattaatatcttgacacataggatgagcttaggacatgagtagaacttctcccatgaatcactttacatcaagtccattttttatccctagatcaaaagcctggttggacatctggcggccctctatrggtgttggcagaatcccatttcagatta

SEQ ID NO: 521747 - DNA, 641 bp, Homo sapiens
atgaggtaagagctcctgttgtaaagactcagagagcattaataatattttcctctgctcatgacaggctgagctcaccctgtaaatggggtggggtggggagaccccctgggggtggtggtgttggctccggagatttcctgggtaaaggaaaatgttcaaattcctgggcacyggtgccccatctcatccaagccttgccacatccttgtcccatgggatcttagggaagtcatccccatccataagcctcaatttcttcctgtgtgcactggcctaagacctattcactgtcctgctttagagaatggttgggttgtgggaaaataaggggatgagctgggggaaatcatcactggcccttgctgggttaccccaacatggcctgagattttttttttttgcaagtttgtttctccctgaagtcacaccttaaattcctaccatttaaaatgataaaagccactgtcttttgtatctgccagctatttcaccccttcctgagcagaaaaaaatcttaggatttgtgttaaatagctctccctccaccctcatcctgtctggatgtaccaagatctaagaaaatagcatacagcaggcagatttgccatgctacaggctccttgcaggctggggaaggc

SEQ ID NO: 521748 - DNA, 641 bp, Homo sapiens
atgaggtaagagctcctgttgtaaagactcagagagcattaataatattttcctctgctcatgacaggctgagctcaccctgtaaatggggtggggtggggagaccccctgggggtggtggtgttggctccggagatttcctgggtaaaggaaaatgttcaaattcctgggcactggtgccccatctcatccaagccttgccacatccttgtcccatgggatcttagggaagtcatccccatccataagcctcaatttcttcctgtgtgcactggcctaagacctattcactgtcctgctttagagaatggttgggttgtgggaaaataaggggatgagctgggggaaatcatcactggcccttgctgggttaccccaacatggcctgagattttttttttttgcaagtttgtttctccctgaagtcacacyttaaattcctaccatttaaaatgataaaagccactgtcttttgtatctgccagctatttcaccccttcctgagcagaaaaaaatcttaggatttgtgttaaatagctctccctccaccctcatcctgtctggatgtaccaagatctaagaaaatagcatacagcaggcagatttgccatgctacaggctccttgcaggctggggaaggc

SEQ ID NO: 521749 - DNA, 617 bp, Homo sapiens
ttcagagaactgctagaaactttccttctgggtcagaatcaaacatgcattaagcattgctattttggaatttaaagcacatgctattggctctggcttcaccatctattccctctaagccaggaaggccttggaaagtgtagctgggatttaatgaastggttaccatactaatcttgtgagccattgagcatagtatttcatttttatctccaccaggcagaggccatcaaaacaaatcaacttccaaggtctgggagaggattgtgtcctgggctgcccagatacattgtttacaggcttctggcaaagggcttggaatgggacatgtgtctcacaaaagcacctggagacttggtttactcagtcgggaactatgggcatgaactggtctaggtcaagaagaggatagaaaagataggtggatgaataaaaagagtgcaagatctgaatcagataacaagtggaagaggggtcaacactagaccatgcatgccttagagtcattgaatttcagaaccgaaagtgacctcagaacctgtctaatttaaccagctcattttacaggtagggaaactcagatcatagaaatgaatagacttgcccaaggtcagaga

SEQ ID NO: 521750 - DNA, 617 bp, Homo sapiens
ttcagagaactgctagaaactttccttctgggtcagaatcaaacatgcattaagcattgctattttggaatttaaagcacatgctattggctctggcttcaccatctattccctctaagccaggaaggccttggaaagtgtagctgggatttaatgaagtggttaccayactaatcttgtgagccattgagcatagtatttcatttttatctccaccaggcagaggccatcaaaacaaatcaacttccaaggtctgggagaggattgtgtcctgggctgcccagatacattgtttacaggcttctggcaaagggcttggaatgggacatgtgtctcacaaaagcacctggagacttggtttactcagtcgggaactatgggcatgaactggtctaggtcaagaagaggatagaaaagataggtggatgaataaaaagagtgcaagatctgaatcagataacaagtggaagaggggtcaacactagaccatgcatgccttagagtcattgaatttcagaaccgaaagtgacctcagaacctgtctaatttaaccagctcattttacaggtagggaaactcagatcatagaaatgaatagacttgcccaaggtcagaga

SEQ ID NO: 521751 - DNA, 617 bp, Homo sapiens
ttcagagaactgctagaaactttccttctgggtcagaatcaaacatgcattaagcattgctattttggaatttaaagcacatgctattggctctggcttcaccatctattccctctaagccaggaaggccttggaaagtgtagctgggatttaatgaagtggttaccatactaatcttgtgagccattgagcatagtatttcatttttatctccaccaggcagaggccatcaaaacaaatcaacttccaaggtcygggagaggattgtgtcctgggctgcccagatacattgtttacaggcttctggcaaagggcttggaatgggacatgtgtctcacaaaagcacctggagacttggtttactcagtcgggaactatgggcatgaactggtctaggtcaagaagaggatagaaaagataggtggatgaataaaaagagtgcaagatctgaatcagataacaagtggaagaggggtcaacactagaccatgcatgccttagagtcattgaatttcagaaccgaaagtgacctcagaacctgtctaatttaaccagctcattttacaggtagggaaactcagatcatagaaatgaatagacttgcccaaggtcagaga

SEQ ID NO: 521752 - DNA, 581 bp, Homo sapiens
cagcacagagcatgtcctgtctcttccaaggttagattagaaatgtctatgcatctatgtagcctacatcctagtacyaggcaaacaattttgcatatagtagctgctctatgcaatggtgatgatgaaggtcaacttcgggaatggtttgcctcctattactacttagattggagcctaaaatactatggttaaccttctatattagtcagggttccttagaggggcagaactaataggattgatgtatatatgaaggggagtttattaaggaatattgactcacacgatcacaggcgaagtcccacagtctgcaaactgaggagcaaggaagcctatccaagtcccaaaacctcaaaagtagggaagccaacagtgcaatattcagtctgtggccaaaggcctaagagtccttggcaaatcactggtgtaagtccaagaatccaaaagctgaagaacttggagtctaatgtgcaagggcaggaagcatccatcacggaagaaagatgaaggccaaaagactcagcaagtctgctcatttcactttcttctgcctgcttttattctggccacactagcag

SEQ ID NO: 521753 - DNA, 581 bp, Homo sapiens
cagcacagagcatgtcctgtctcttccaaggttagattagaaatgtctatgcatctatgtagcctacatcctagtaccaggcaaacaattttgcatatagtagctgctctatgcaatggtgatgatgaaggtcaacttcgggaatggtttgcctcctattactacttagattggagcctaaaatactatggttaaccttctatattagtcagggttccttagaggggcagaactaataggattgatgtatatatgaaggggagtttattaaggaatattgactcacacgatcacaggcgaagtcccacagtctgcaaactgaggagcaaggaagcctrtccaagtcccaaaacctcaaaagtagggaagccaacagtgcaatattcagtctgtggccaaaggcctaagagtccttggcaaatcactggtgtaagtccaagaatccaaaagctgaagaacttggagtctaatgtgcaagggcaggaagcatccatcacggaagaaagatgaaggccaaaagactcagcaagtctgctcatttcactttcttctgcctgcttttattctggccacactagcag

SEQ ID NO: 521754 - DNA, 647 bp, Homo sapiens
gcatccatgttgctgcaaaggacatgatttcattctttttttttttatgactgtgtaatatttcrtggtgttggaattttctttctccaatccaccatattttctttatctaatccatcactgatgagaacctgggttgattctatgtctttgctattctgaatagtgctgtgataaagatgcgagcacaggtatctttttaaaacactgtatctttacactatttgctcattctggaccattttcctcctttcttgcttctttcactatcttgcctacacccttcacacccaatttctctttctagtgaaatcctagccattctttgagaccaaataaaataccatcatatcctaagctttcctgcattcctggtggttagaatgtactgttccgtacttgccacataaatctttgctgaattagcaaactgttcccatttgactgattgcatgacatcttatttctgtgcctgttatagcactttcttcttgctaccttttaatctttttagttgtacagacctgtctgcctgactacacaacttgatgacaatgaactagctacatattagtcatttttaaacatctcatagtttccaactaagtgcattgggcactgttgtgaatcaaattgaatttaactga

SEQ ID NO: 521755 - DNA, 647 bp, Homo sapiens
gcatccatgttgctgcaaaggacatgatttcattctttttttttttatgactgtgtaatatttcgtggtgttggaattttctttctccaatccaccatattttctttatctaatccatcactgatgagracctgggttgattctatgtctttgctattctgaatagtgctgtgataaagatgcgagcacaggtatctttttaaaacactgtatctttacactatttgctcattctggaccattttcctcctttcttgcttctttcactatcttgcctacacccttcacacccaatttctctttctagtgaaatcctagccattctttgagaccaaataaaataccatcatatcctaagctttcctgcattcctggtggttagaatgtactgttccgtacttgccacataaatctttgctgaattagcaaactgttcccatttgactgattgcatgacatcttatttctgtgcctgttatagcactttcttcttgctaccttttaatctttttagttgtacagacctgtctgcctgactacacaacttgatgacaatgaactagctacatattagtcatttttaaacatctcatagtttccaactaagtgcattgggcactgttgtgaatcaaattgaatttaactga

SEQ ID NO: 521756 - DNA, 647 bp, Homo sapiens
gcatccatgttgctgcaaaggacatgatttcattctttttttttttatgactgtgtaatatttcgtggtgttggaattttctttctccaatccaccatattttctttatctaatccatcactgatgagaacctgggttgattctatgtctttgctattctgaatagtgctgtgataaagatgcgagcacaggtatctttttaaaacactgtatctttacactatttgctcattctggaccattttcctcctttcttgcttctttcactatcttgcctacacccttcacacccaatttctctttctagtgaaatcctagccattctttgagaccaaataaaataccatcatatcctaagctttcctgcattcctggtggttagaatgtactgttccgtacttgccacataaatctttgctgaattagcaaactgttcccatttgactgattgcatgacatctyatttctgtgcctgttatagcactttcttcttgctaccttttaatctttttagttgtacagacctgtctgcctgactacacaacttgatgacaatgaactagctacatattagtcatttttaaacatctcatagtttccaactaagtgcattgggcactgttgtgaatcaaattgaatttaactga

SEQ ID NO: 521757 - DNA, 522 bp, Homo sapiens
agggcatttctcctactgccacctataaatagcacaggagcggccatatgtgctgctggaaccaggctttctcacagagagccctgggcacattccagaagtgagtccttctgctaacctagcaccactcagtcccaaacatgaagtgtcccgttaatgccctgccagtacagggtatcccagctccagyaggcctttacgaagaaaaaggcaatcacactaccacaaaaactgagaacctcctacctctggacttcctgcagtgcttgttaaaactaccgattctggggctcccttcagaattcttgaggtgggtccaggaatccgcatccctgaccacttccgcaggtagttttcatgcatgcaagctcaagtttgagaagcgccaatgtggaggtattttgctcaacagtctcctggcagatctgctgccagctttgtggggcattagctgtttaccagatgatttgctgttttgaaattgaaaaaaagaaaagattcacaaaactactcctagaatat

SEQ ID NO: 521758 - DNA, 462 bp, Homo sapiens
tgaatctgacagggcagcagttctggaaaatgagtatgatgagtcaagaaagggaccaggaagtggaaactgtgtgtgaggcagtgatgctgatgaatgactgtggaaaacaatggaggtgaggagggagtggatgttgagtggctaggggacagtgaaaagggagtaggatccactagcttgctgcttgtctcttataattaggatcaagagcttctgccgtcttctaggcattctgctgcttcaagggagtctctgagattgggttctgcatggatgtattgaaacatgcacctaggtgtgtttggagtcctgccagagacctgctttctctttattcttatcctgaggccctttaggaggctcagatggaataatttttatggtttcttaaaacccaagtgggttacctaagccatcmtagttctgccccctgttccctgagaggaccacgggagcacc

SEQ ID NO: 521759 - DNA, 603 bp, Homo sapiens
ctttccccttcatggctttgaagatactgccccactatatattctaaaatccaytgctgctaatgagaaattctggtgtcactctgactcttatttctttcatatcacttggcattttcttccgagaaaatattacttatcttcagaatgatgaaccttctctatcatgtctctaggtgttagggcttctttcatttaatcctgtaggtcctcaataggctttttaattaaagtctcattttattcgggctctgtgaaattttttgttatgttttggcttctttttctcttttgttgtctctcttttctccttgaatgtctttctgatagatatagcattcccattatctatcatgtctttcagattatcctacatttttctctttgttttctttttctaccatgtttagaattctcttacacgtaagacatcacttactagatcttcagtcatatcctttttattattcagtctgtgcatttttaattttcaattttggcaaccacatttttaatttctaagaatctattttgctaatagtacttttgtcctgaaactttttatatcctgcaatatttagaaagagcacacccttatccaca

SEQ ID NO: 521760 - DNA, 603 bp, Homo sapiens
ctttccccttcatggctttgaagatactgccccactatatattctaaaatccattgctgctaatgagaaattctggtgtcastctgactcttatttctttcatatcacttggcattttcttccgagaaaatattacttatcttcagaatgatgaaccttctctatcatgtctctaggtgttagggcttctttcatttaatcctgtaggtcctcaataggctttttaattaaagtctcattttattcgggctctgtgaaattttttgttatgttttggcttctttttctcttttgttgtctctcttttctccttgaatgtctttctgatagatatagcattcccattatctatcatgtctttcagattatcctacatttttctctttgttttctttttctaccatgtttagaattctcttacacgtaagacatcacttactagatcttcagtcatatcctttttattattcagtctgtgcatttttaattttcaattttggcaaccacatttttaatttctaagaatctattttgctaatagtacttttgtcctgaaactttttatatcctgcaatatttagaaagagcacacccttatccaca

SEQ ID NO: 521761 - DNA, 520 bp, Homo sapiens
ttgaatctgacagggcagcagttctggaaaatgagtatgatgagtcaagaaagggaccaggaagtggaaactgtgtgtgaggcagtgatgctgatgaatgactgtggaaaacaatggaggtgaggagggagtggatgttgagtggctaggggacagtgaaaagggagtaggatccactagcttgctgcttgtctcttataattaggatcaagagcttctgccrtcttctaggcattctgctgcttcaagggagtctctgagattgggttctgcatggatgtattgaaacatgcacctaggtgtgtttggagtcctgccagagacctgctttctctttattcttatcctgaggccctttaggaggctcagatggaataatttttatggtttcttaaaacccaagtgggttacctaagccatcatagttctgccccctgttccctgagaggaccacgggagcaccctgaaatgggttttccactctgccatcccccacttgcctgcttgggtgttgacctca

SEQ ID NO: 521762 - DNA, 492 bp, Homo sapiens
ctgacccttttccaaggtggaatccacgtttgattctctgatcttgtactggcttagcacagtgctcggcattcagtaaataaggttaaggaaggccagtgatatasagtagtagaaaacagcagttaatgaaggcttgctttctgtcacaggttcctctcctccaggactgcagcatctctgtctttctgtcgtagcatacaagacagcatctctgtctttctattgcaacttccaggtgagaagccctcccacaagcatatacaaattttatggaaacagacaaaaatttgtagggaagcaaatcccttcaaggttgagtctttctggtcttctagaaggtaagcttggtgatggggcagtcacagccctagtgcttatggaacttggccctttggggacagatctcagttaactaaagaaatgctatggcacagagtaccttgaatctcctctaatttatgctgtacagggaattattcacactttatt

SEQ ID NO: 521763 - DNA, 494 bp, Homo sapiens
tgattctctgatcttgtactggcttagcacagtgctcggcattcagtaaataaggttaaggaaggccagtgatatagagtagtagaaaacagcagttaatgaaggcttgctttctgtcacaggttcctctcctccaggactgcagcatctctgtctttctgtcgtagcatacaagayagcatctctgtctttctattgcaacttccaggtgagaagccctcccacaagcatatacaaattttatggaaacagacaaaaatttgtagggaagcaaatcccttcaaggttgagtctttctggtcttctagaaggtaagcttggtgatggggcagtcacagccctagtgcttatggaacttggccctttggggacagatctcagttaactaaagaaatgctatggcacagagtaccttgaatctcctctaatttatgctgtacagggaattattcacactttattgttaataacacattacatgggggaacaccaga

SEQ ID NO: 521764 - DNA, 494 bp, Homo sapiens
tgattctctgatcttgtactggcttagcacagtgctcggcattcagtaaataaggttaaggaaggccagtgatatagagtagtagaaaacagcagttaatgaaggcttgctttctgtcacaggttcctctcctccaggactgcagcatctctgtctttctgtcgtagcatacaagacagcatctctgtctttctattgcaacttccaggtgagaagccctcccacaagcatatacaaattttatggaaacagacaaaaatttgtagggaagcaaatmccttcaaggttgagtctttctggtcttctagaaggtaagcttggtgatggggcagtcacagccctagtgcttatggaacttggccctttggggacagatctcagttaactaaagaaatgctatggcacagagtaccttgaatctcctctaatttatgctgtacagggaattattcacactttattgttaataacacattacatgggggaacaccaga

SEQ ID NO: 521765 - DNA, 515 bp, Homo sapiens
gaaccagggggcagaagtatgagcagctctgatgactgttgcctctgktgtcttatttgaggaaattgcttacctcacaacatcaagctctaagtatcaacattcttaatccccagaaagggaaaacttacatcaggggacacaagagaaccagtgaactttctgtcatggctgccaaccaggaacttaattaagcgctttgtgtcaaggggctggcaagcaagttaggaaagccagcattctggcagggataattgactctgatcatcaggaagaatcaaggctgctgttaaagttgagggaaaagaagaatatgtgtggtccccatgtgatccatcgacccatgtaggtgacaataaaaagtcaactgcaatagacagccatagaagagcaaggcgagtggaagctcaaacccctcaggtatataggaaggccacttagaccaacagaattactagctaagggtgaggaaaatagagaatgtacagtagagggaattgatgatatttagttat

SEQ ID NO: 521766 - DNA, 528 bp, Homo sapiens
cctggacctctccttgtttctcctgctacccaaaacttcttgggtgctcaccaattcttcagttctcctctctttggacccatagcacctagattgcctgggttctaatcctggttctaacactggctagttaccttggccaagttctgtgacttcctggagcctctggttccttgtctgtagagtgggaatgttaattgaacttttagcatttacttgttatgaggattaagggaatcccaagaacagtatcaggcccatgaggtgtaaattttggacaaaggcaactactattattgttatttggtgatggccttgtggtggcactagaatgtcaaggacatggtgcctgccctcaagaaacatatcatgtagctcatgcttgaatccagtcaatatcttccggctgactctggaataaaatccaaatgctccatggtagcctggaggaccctatgtgatctsctccctgcccacctctttcacctcatcttgtctccctctcctccttatctcttgttcaacatc

SEQ ID NO: 521767 - DNA, 602 bp, Homo sapiens
tgttatattccaaattgctcctgttcatatagtcatgagccatcagaggagtttccactacaatgcctaatgcgtaacacattaatagggtggctgaagattccgctaaactcctagtgttccccgtgtcagattagactgcacccgctgggagaaagcagtggatgcagctctgtccatgcacactcagctttgcttactgagggtgtgagaaatacagatggaagttttggaagagcartgcaagacggaaagggcatactgcctaatcttggttggtttgcagatggtggggtttgtggtagtgccggatcaactcaacccaaggtgaggaaaagccagggggttgggaaaatctcagtgctgaagtcctgggagaggagtacacaccaaagccatcagggcaaggaatctctccagagagccgcgaaagcaccaggcactcagaagccactcaagaaatattagtttcctccctattttacaaggcttggtagcactgatagttttgtgtcaggttccaaggagacacccactatttgtgtgcctaagaagtagctcagccagacccagccttgaggcagtggggcaactaacagctt

SEQ ID NO: 521768 - DNA, 609 bp, Homo sapiens
agaaaaggaaaaacagcaaccagcagaggaatcactcccctgttaaggttaaccaggaggagaggcttatataaggcatgaatgtgagtgggtatgagagtccagctttcccactgcacttgctctggttatggagcagactgccatcttctggtgccatttactattcaagttgctttggtgtttttttgtttttgttttttttttttttttttttttacaaccaagtggattgattgaaatgctttgattcttcatttgaaatgtttctattccatatacccattatcttttatcctcacaaaagcccttaacattgtttcctttaatctttggggttcttaagcatcatttccaccaacagagatgtacctacccacagttgtctcagagcatggaggctgaaagtctgtgaggrcaagagtgaaatggagcagaggataggctgtggtttggaagcggctctggaatacgctgggggtggcggtggggctgaaggttggttatgggatgcttcctgggctccggaacatctgtgccaaaaactggaggacccatcctcggctccagccagacgcttggggtgctatgtattctgaaccatagcac

SEQ ID NO: 521769 - DNA, 633 bp, Homo sapiens
gtaatattctgtctctactaaaaatacaaaaaattggccggggaatggtggtgtgcgcctatagtcccagctacttgggaggctgaggcaggagactcgcttgaccccaggaggcggaggttgcagtgagccgagatcatgccactgcactccagcctgggmgacagagtgagactctgtctcaaggaaaaaaaaagaaaaaaaaaaaggttccaagcacaatgcctggcaccatagttgtcttctagtaagtggtaattactattagttcctaaatttaagcaataagacaaaatgagtagttttttccatatgtattattttaagtttgtttttataaattactattttcccattactggatctgtagctaaaattagatttaagaaaagactctgaattcacctatgatggaaacaacaactcctcacattaaaaacaaaaacaaaatataaagaaatagaaaccagaaatgtcaaaatccctaaattagttacatcaagagcttgcccaacaccttctctaaagatcatataaaatgatcatcagcattttataacagtagcctagttgcattaagatgtgatttggatttaaggtcttctgaaatgtaaataaacatggtagctaaat

SEQ ID NO: 521770 - DNA, 527 bp, Homo sapiens
gggcaaaagaacaagaccctatctctatttaacttgtaatggagtataacttgtaatgcctcccacaacgaaaagtgtgtctaaaatgaacttacagcaaacaacagagctatataatatttatttcagaatcacaattgtaaagattaggccgggtgcgggctcacgcctgtaatcctaacactttgggaagacaaggtgagtggatcacctgaggtcaggagtgcaagatcagcctsgccaacatggtgaaatcctatctctacaaaaaatacaaaaatcagccaggtgtggtggcacccgcccgtaatcccagtcactcaagagggtgaggcaggagaatcacttgtaccctggaggcggaggttacagtgagctgagattgcaccactgcactccagcctgggtgacaaagtgagactctgtctcaaaaaagccagtagaggcaaataaagattggagcagagatcaatgaaacagaatagaaaaaaaaaattattgaaagcaaaagtcaaatctttgaaaag

SEQ ID NO: 521771 - DNA, 564 bp, Homo sapiens
tctcttcaggccttattggtatgtcaaaatgagatattggcaacgagaaaggagactattactcactttctcttaaagccrctaatcaagatacacatgagaaggtcatggaaaaccttagggtcctgaagcccctcaccctgctaggaaaccagcattgtcttggtgagcattactgtcacagtcatcacagtgtgtctgttctgtgttatcaaaagtctggtgaaactatgtgccagtctcattatcaactcttggatattaatgactacaaagtaatcctggttaatcttttcaggtctgttatttaatgttgttcctgactttaattgtgggctttaacttacaacaaaatttgcttagataacttccccgggggtgaaacgttaatgcattctagttaagcaaagattgaactgcaggttaaaatacttcagttctcattcagttctgctaccacccagttatgtgcacttggagggcaaataattttaactcctctaatttaactgtttttactttcccatttgtaaaattgtgataaccactttgacagacctacag

SEQ ID NO: 521772 - DNA, 564 bp, Homo sapiens
tctcttcaggccttattggtatgtcaaaatgagatattggcaacgagaaaggagactattactcactttctcttaaagccgctaatcaagatacacatgagaaggtcatggaaaaccttagggtcctgaagcccctcaccctgctaggaaaccagcattgtcttggtgagcattactgtcacagtcatcacagtgtgtctgttctgtgttatcaaaagtctggtgaaactatgtgccagtctcattatcaactcttggatattaatgactacaaagtaatcctggttaatcttttcaggtctgttatttaatgttgttcctgactttaattgtgggctttaacttacaacaaaatttgcttagrtaacttccccgggggtgaaacgttaatgcattctagttaagcaaagattgaactgcaggttaaaatacttcagttctcattcagttctgctaccacccagttatgtgcacttggagggcaaataattttaactcctctaatttaactgtttttactttcccatttgtaaaattgtgataaccactttgacagacctacag

SEQ ID NO: 521773 - DNA, 598 bp, Homo sapiens
tatctgctgttcctaaaaagtttattccaatatcagagtacaaagacaatgaccataaaaaatgagacagctactattactactatgartaataagcctgatgagtttaataagcctgagagtttgtgggtggtaggcacaagattccaagccagatttccaaagactactatcttaacttctgccttctttccacctcaatcctttctcttcagactagtacacagtcttctgtaaagctgcctagtaagtgtatcacccaaacatatttctccttttcacagttatccctactccaaacccccggcatctaatgtgttggatttctttaatgtggcatagaaaataaggtagatagacacagttatgctacatattgaaacagattgaagcttcaattcttgcttcagtgcagtagggttactgccagctgtaggggatgaaaattttgaaaattccttccaaaccctatggttaacttgagattccctgagttcatttccaggagcatatatgtactgatgtctgcctttgaagggcataaactagaagacattcaaattattatagactgtggctgcttggagagtaccatgga

SEQ ID NO: 521774 - DNA, 564 bp, Homo sapiens
tgttcaaatttctgtattttacttgaggacaggaactgtgccctgttcaatttcatttccctatcttaaggtgggtcctaagtaagttttaagttggaggggtagatgatgtaatagtcttgaaggcagggagaattggttgggaagatcatagggtacactgagatgacccatggaagggcagcttaatgatcaaccacttcacttttgtaataacctcagggtctttcaatacatgtgtacagacctaggcagttgcagggctagatcttagctgtagctcaccgtgatccatcaaagtggcctaattaatggtatgagtatgggaatgtgtgaattaaatgtgtctaaatcacatcattttaaatatagatgraactgcattgtgtcattgtgtaaaatgctagttttgaatcagacagagcagggtttgcggcatttattaggctgtgccatcttattgtctctgtccttcagggctggcctcaggcttggcggatctgctacctttgatctgagccccaaggagtctgaagcctcactatgtctgcttttcctgctttt

SEQ ID NO: 521775 - DNA, 622 bp, Homo sapiens
aagacctcgaatgaggctttaaatttgctgatgcttttttctgtggggtttgtcgcggctcacccagccagatcgattcgatgtgtcgtgctggggtggaggaaaaggtttgtggctcttagagtattagcaagttcatttcacgctgatgcagcgacagaggccggggaaggtttacagaagccgcattcatcaagccagctggtcacccacgacctccctcgggcttggaacagagaggcagagaagggaggggactgcggctggcaattcacagagaacactgtagctttctttggcagtgggggcaggcagtgaagaggggacaggatttggaggctyggatggctcccttaggactgccgtgggatgttttcacagcctgcagagaggagccagatgtgggcagtggcctcgttcacttcagccttcaggagctatttggggctaagggcttctcctttcccagagagtttgtggcagattgactacaaaaatggccctaatctttcatccctcccacagcatttgcaatgtgacttgatagttcctctcatcaaggggttcagcctattaccctgttctttgaatctaggctgccttgtcatttactttgaccaat

SEQ ID NO: 521776 - DNA, 605 bp, Homo sapiens
gctggcactaaaagcctgaagcttgtatacacatgtgagaaaagcaacccacaagaccagtccgtcccttccccaaatagactgccagcaaaaaggctgctgtcgtcattcacattcgctcagtttaatttcttcttagggataaaggtcatgatttccaagacaaccagccagctttagttccaggaytctggacaacaccaccttttttttttttttttttctgtaatggatgggcaaatgtccatctggcctccacctccccactctgcctctgagtcactgaaccgtttggattaagtggcaggggccagccatttcaagccaaaaacataagtgtatctgtcttagttttctgtcactgtcataacaaactaccacaaacttggtggcttaaacaacacgaatttattatctaagtgttctacggatcagaagtctaacctgggtctcattgggctgaaatccaggtgtcaccagggctgcattcctttctggaggctccaggggaaaatctgtttccctgtctttccagcttccagaggctgcccttcttccttggctcatgacctgtttccttcattgccaaagcctgcaacagtgga

SEQ ID NO: 521777 - DNA, 624 bp, Homo sapiens
gtctgcagcctggaagagggcccttaccacaacccaaccgtgctggtatcctgagctcagatttcccagcctccagaactgtaagaagtaaatgtttggtgtttaagcccccmagtctatggtaattggttatatcagccggaatggactgagatagggctataggcacagcctctcaagccactgcccttagccatttgaagctcattgttccaggggagagggcttccaggctatgcaccagcaatcagtgactcataggatggcaaacccctctctttggaacctaacactttctcctttcttgctccccacaaaagactgttctagggagactcctgctttctagaacttatgctttggattccaacaactcctctcaaactcttgccctattcccacatttagggctcctcaaaaaagctcagtgtccccaggagagtctgtgcataccacatgtgacttggacaataaaagcaagcctccctcattgacaccgtacaaggttctgcccattcttttggattttgtcccagaaataagcctcagcccaaactgaatggcagattgtcaatgacgactaggaagtgtcccaaccagtcttcttatactttgtcttcagtg

SEQ ID NO: 521778 - DNA, 624 bp, Homo sapiens
gtctgcagcctggaagagggcccttaccacaacccaaccgtgctggtatcctgagctcagatttcccagcctccagaactgtaagaagtaaatgtttggtgtttaagccccccagtctatggtaattggttatatcagccggaatggactgagatagggctataggcacagcctctcaagccactgcccttagccatttgaagctcattgttccaggggagagggcttccaggctatgcaccagcaatcagtgactcataggatggcaaacccctctctttggaacctaacactttctcctttcttgctccccacaaaagactgttctagggagactcctgctttctagaacttatgctttggattccaacaactcctctcaaactcttgccctattcccacatttagggctcctcaaaaaagctcagtgtccccaggagagtctgtgcataccacatgtgacttggacaataaaagcaagcctccctcattgacacygtacaaggttctgcccattcttttggattttgtcccagaaataagcctcagcccaaactgaatggcagattgtcaatgacgactaggaagtgtcccaaccagtcttcttatactttgtcttcagtg

SEQ ID NO: 521779 - DNA, 493 bp, Homo sapiens
tcctctggaatgtgtgtgcatggggtccagggcactgcctgccctgttaaacactgtccccagcacttggcctggcacatatctcatgctttgggaatacctggtggtggagytgaatggatgaaagttagtgccaatgagtccatatttaggatgagctcagtgagggccttttcagcaacgttgcagcacagttcagaaattttccagcaaagctactgtaataaactttacaaaacaggctgtaaagttagtatttacaaaaaaaaaaaaaaaaagtccaattaattttaaccattgataacaaaggaatcaatagcaggtgagttacgagctgcatgtgaaatgtgggtctctcacagggtgaatgatgtggtagagacagaggactcgtcggccagaatacttacagaaggttttccagtcgaggtagggctagacctggccagaattgtctaggggagagggggagagcccccctatttaatttatc

SEQ ID NO: 521780 - DNA, 493 bp, Homo sapiens
tcctctggaatgtgtgtgcatggggtccagggcactgcctgccctgttaaacactgtccccagcacttggcctggcacatatctcatgctttgggaatacctggtggtggagctgaatggatgaaagttagtgccaatgagtccatatttaggatgagctcagtgagggccttttcagcaacgttgcagcacagttcagaaattttccagcaaagctactgtaataaactttacaaaacaggctgtaaagttagtatttacaaaaaaaaaaaaaaaaagtccaattaatttyaaccattgataacaaaggaatcaatagcaggtgagttacgagctgcatgtgaaatgtgggtctctcacagggtgaatgatgtggtagagacagaggactcgtcggccagaatacttacagaaggttttccagtcgaggtagggctagacctggccagaattgtctaggggagagggggagagcccccctatttaatttatc

SEQ ID NO: 521781 - DNA, 581 bp, Homo sapiens
tgttgggtttttttgttgttgttgttgttttattcttgcttctgaagacagttgggcaatgggtaatggctctgtggaaagaatgtgtggcctcccaccttgcccccaagctctgatttttaatttctacagatttttttggattaattatttgatttcctccctccctcacaccatatcccttatcttttttaatgtcttatgcctatgcctgaataaaataacctttaaaaaagcaaaataagaaggaaaaattccaggaggagaaaaaaaaaaaaaaggaagaagaagaagagaccagagttagggatgttaaaggaaccagtatcttctccctcctaacagttgatgcccaaaattgaatactgcaaatgacagctaaccaatgtagtaactctgtggcatgcagttacaaataaataaacacactatccctaagygagcctcacgtgcacactggctaatggtcacatacatcaagcatgggtctgaatgcagcctttagccaaccaaatcatcagggtcaatgtcaccagcacttcatgtccgcctccttcatacttcttccaataagtttttac

SEQ ID NO: 521782 - DNA, 556 bp, Homo sapiens
taatacctaatatgatacctacacatcatttcatttgtttgattcaacatagtactaggcacacagcaagtttaagttttgctttttggaactttgtgtaacttttttcaactggatatttttgattgaatacacagatgcggaacccacagatatggaggwctgattgtactttataaagaactatgcagaaatactggaatgtccttaatgtaagctccacaagggaggcgacttgtgcctgttcattgctctatctccagcaaacaacacagcatctgaaacataaaaggtgttcaataatactcattgaatgaatgagtgtacttggcaggctgctgatactagatcccaagaaagaaaaagggactctggctacaatggagaaagtgaagcatttcacaggaaaaggctgggctggtgtaggtggggaggggagtgttgatgggcacgtagaaacagccacttcctctttggcaacagacaaaactctctatgaaaatatttactatggaggggattgatggggtagtcagaggtgactttcaaccaatac

SEQ ID NO: 521783 - DNA, 607 bp, Homo sapiens
caccttcactaaatctttctgggaccttgggaatgttccataaactccctgggactcagtttattcacctctaaaatggggataatgggaccccaacagaagactaagaattaaatgagtcaatgtgtgtgaagctcagagagagagcacatgagagtgtaatttaagtgtctgttgytgttattttgctgaagcaattgaagatactgtgctaccccttttattttatatttgtatggcacactacatgaccttcacaagtgtccttcgatcctcataaaaactgtgtgatctgtagcaagtaggtaagtgttattatcctcattttagagttgaagtggtgaaataaatattgggtaaatggcttgcccaaggccgcacagaacccaagaccttgatccccactacaacccccttcccacccagcctacaccttttggaacagaggccatgtgaccatatgacaagccagttcagcctgggcaggtattggctgtgagtcaagggaactggattcacacttgtcattgcagaatggagttgtggaccaacacattcccttcagctttatgaagcagtttgctctgaaatatgaggttttccactt

SEQ ID NO: 521784 - DNA, 607 bp, Homo sapiens
caccttcactaaatctttctgggaccttgggaatgttccataaactccctgggactcagtttattcacctctaaaatggggataatgggaccccaacagaagactaagaattaaatgagtcaatgtgtgtgaagctcagagagagagcacatgagagtgtaatttaagtgtctgttgttgttattttgctgaagcaattgaagatactgtgctaccccttttattttatatttgtatggcacactacatgaccttcacaagtgtccttcgatcctcataaaaactgtgtgatctgtagcaagtaggtaagtgttattatcctcattttagagttgaagtggtgaaataaatattgggtaaatggcttgcccaaggcygcacagaacccaagaccttgatccccactacaacccccttcccacccagcctacaccttttggaacagaggccatgtgaccatatgacaagccagttcagcctgggcaggtattggctgtgagtcaagggaactggattcacacttgtcattgcagaatggagttgtggaccaacacattcccttcagctttatgaagcagtttgctctgaaatatgaggttttccactt

SEQ ID NO: 521785 - DNA, 640 bp, Homo sapiens
tttccctttctgtgtccatgacagacatcactaatcaatctcagctctttctgaactatctgcgcctgcatcctctctgtactccacctcctgctccaggcagacaatcctgattgatagactacagacaaccagttggctctccctctccagtttgctatcctgctctatgagatggcccatctcatctttccaacattacttctcattgcacccttctctccatggacatcacattccagcagcatcaaatgagtctttattttcttgaacacctaaagccctgtgtatggctggtcaggttgttcactgtatacgagggctcccagccaaggggtgggtagggcatggcatatggcccaatgcccgttcatcaagctgtacactttagactgaggatgcctgcactgggttcaaggtagcttttgttcagtttacacaaaggcattatatattctagtagtgatctgcgaacagtctccggccctttgtgtatgcaaatccttctgcctggaatgccctttccctaccattttgtcctcaytctttgagacctgcttcaatccctcaaaccctgtccaggtctagtggcaaacactgcaatttcccttgcgtctctcagccatggctcagctcacag

SEQ ID NO: 521786 - DNA, 656 bp, Homo sapiens
ctggtggctgctgcttcagctcagaatgaatttttatggttataagccactgagatttgggactgcttgttactgcatgttgcttagcttaagctgtccaatatagaagacttcacagaggaggcacatctgacccagtcgctgaaggatgaaccatggttttaccaggctgctggaatgtatttgcaaagaaacagaggcaaggcaatgggagcatgagttaattaggatataagctgactttctgtttgcagagagctaatatactgatagctcagacagaagagaggtttatttctctcaggctcggcaaaatcagttcagggctggcatgatggctgcatgatgtcaggtcctaagctccccctgttttgttgctggccctctcttagtccactcccatgtctacgtgctagtccacaggaaaggggaagagataaactcccttattcctagaggtgggacatatagattgcaagcctcacctccattccttagtcacatggccatcctgagcagcaaggaaggctgggaaatgtagtttttattgtgagagmcatgtgtccacctatgaaggcagagagactgagactgtaggacaaactgccccagtattttgaggactggggaatagtcagtgcccttttaaatgatag

SEQ ID NO: 521787 - DNA, 536 bp, Homo sapiens
cagggtcacactgccagaaagttggtggagcagggagggaatcccagaagtgcagggaagaccagcggattattcaacgtcagccagcacatcagtaatgggcaagcactttgatttcctggttcccagccaggacttgatctactagtccttccttctgtaagggccagagagtaaacaccaggctttgcggcagggccacgtcttgacttttgtgggtccttggcacttttaccttcttgrgtccctttcttggtaagaaaatataaaaaatattacaacatattatacaatttttacaatattttgtctatttacaataaagacaaagatagcctaggttggatttcttattattatattcatgtttttcttcctattttaaagtaaattagaattaaaacatttttgtgagcccctaaaagtaactgaggcctgaggcactgtgtctggtgggcccagtggagtgctaggccctgcttgtctggcaacctgctctccccttttcctacccatctctgccgctatatggcaac

SEQ ID NO: 521788 - DNA, 614 bp, Homo sapiens
ctgtgtttcataagagtgataacttatttaccttttcattatgattaaatgtttgagtactgagtgcccaaggcatattgagcaaataaatatttagcaactagcaaacaagatgatcaaattagaaatctttcaattgtatattagcaggttatatacacaaatggacaaacatttaggtatgtatctggttctgttgattgttgtatcagttttttgaaatttaaaaaataaaacagaggggattaagagggcataactactatcagctatatgtgggcccattatactacatgacataaaatttctttctttcaatttcttaagattatgtgtattgaatacatattgttaactcataataacttttctctgaaatgaactataaatggtgatgataccaaaataacattaaaattattttttttacaaaaaaaagytaaaaggggagataatattctgaaaataaatgttagttctctgtgtaacaggaacttaacacacagtgacatcaatcagaggaacggtttattctagaaccccaaattataggcacctgtaatgaggcagttgccctttctgttgtttgtggtgccattcaaagctagttattt

SEQ ID NO: 521789 - DNA, 494 bp, Homo sapiens
cctggctcccgaccgctgcaggcaccactgcgcacctgactcctccctggcccccttccggcacctgcaaccttgcctcttgcccacccgctccaggcagctgaggtccgctggaggcgcgccttggcagaggggcgccctcactccagctgcggctcctactgccgggccagcgtgctgctgggtgcgccccctgcccaggacccccctcctcctgtccctcctccgcttccccaagctccagtcaaaccccaccacccgctccgtgctgggaagcagaggtgggaggccgctgggatgaagasagagagaccagggagaggtgaatggtggattccagggctggggcggggattcggggccttaggcacaggtcccctcttgcagtcacggccaggggctcgctctcgcgcaatccccgccctcactgtctcgcctgttgcgcccggagtgagggcgacccgggggacgcgggattagcttagcccgcagcc

SEQ ID NO: 521790 - DNA, 499 bp, Homo sapiens
tgggtgttttgggggccggacactttggtgtggcgagagcctgggtgggagactaggagaggtgagagcaggagctacgggagggcagagccctgrggtctagtccgcctaccagggccacagggagccatggatggtgctaggcagggaggaacctggtcagatgggtgggttaggaagacggttctggatctaagagggaaatagctcaggaggcaggggagaaggtgtgagggaaaatgcaagggccagtgcaggcctgagaggcgcttgtctggagtccaggggtcactcctggctctcagagcaacgacagtggggtgagcagcttcctgtgttcccagctctgggaaaagcttctgctttccgtctctaggtcagtgtcttctcccagctccagattcacatggccacctgcccggcagccaccccacccataaacagtgaatgggtggttagctcctaacctggcccctcaagctcctcatctccccagcct

SEQ ID NO: 521791 - DNA, 528 bp, Homo sapiens
ccactgggaaaaggcacttctttctttcagaataagggccaactratgtattatgaatgacccaacaaccctacctcttaaaacgctgtctgagagcctgagcaaactggacctcgccagtggctggtgagagctctgtgttaatggtgctggattcctgcgggggcctgtgattccccgctccgtagagagtaggacagcaccccgcctcctccggacattgctgcacagtgggtgagccacctgctgccctgaacaggaagggaaggaggagccgtcggagcttggggctaaggactctcaagaagacccaccggcccaggatgctgcagccacccacggccataaggcaggggcggggccccctcgctgctggacctcctcctcggaggatctcggtgggcctggcccccaccccagcctccctgggaagctcccaaggtcgcctgggcatcctcagcagcctcagtgccccactcacagtggttcctccgcatctcccaggctttggccccagcgtggaactca

SEQ ID NO: 521792 - DNA, 528 bp, Homo sapiens
ccactgggaaaaggcacttctttctttcagaataagggccaactgatgtatyatgaatgacccaacaaccctacctcttaaaacgctgtctgagagcctgagcaaactggacctcgccagtggctggtgagagctctgtgttaatggtgctggattcctgcgggggcctgtgattccccgctccgtagagagtaggacagcaccccgcctcctccggacattgctgcacagtgggtgagccacctgctgccctgaacaggaagggaaggaggagccgtcggagcttggggctaaggactctcaagaagacccaccggcccaggatgctgcagccacccacggccataaggcaggggcggggccccctcgctgctggacctcctcctcggaggatctcggtgggcctggcccccaccccagcctccctgggaagctcccaaggtcgcctgggcatcctcagcagcctcagtgccccactcacagtggttcctccgcatctcccaggctttggccccagcgtggaactca

SEQ ID NO: 521793 - DNA, 541 bp, Homo sapiens
ctaaaaatgtgttgagaaagaagattctctgttcacactggccctctgcctgcttccactttggggttctgggcagacttttagaagcaaacttctcaccaattaccaagagcaaaacaactcccagaagatctgagccagtgccaggcagagcaaggaacaaaccccttttgcaaagagtttccgctcggtctctggaaatcccaggagatgcccctcacattggcaccagctgcatccacagccgaccaagtccctctccaccctgcccccgcccaccccagcccctcggctgtcagcagccagcaccagctccccacggacatgcaggtccagcaccccgcactgagcaggcagggcagccacccwgggatgcagtcgccccccatccctcacagtcactgcaactcttgggattctgggcaccagggccagggctccgccccacgccatgcaaggacggcatgtattctgggacacggtcttggaggaagccagagactgacaaggagaggaaggctccagaaggcgaatctttcct

SEQ ID NO: 521794 - DNA, 541 bp, Homo sapiens
ctaaaaatgtgttgagaaagaagattctctgttcacactggccctctgcctgcttccactttggggttctgggcagacttttagaagcaaacttctcaccaattaccaagagcaaaacaactcccagaagatctgagccagtgccaggcagagcaaggaacaaaccccttttgcaaagagtttccgctcggtctctggaaatcccaggagatgcccctcacattggcaccagctgcatccacagccgaccaagtccctctccaccctgcccccgcccaccccagcccctcggctgtcagcagccagcaccagctccccacggacatgcaggtccagcaccccgcactgagcaggcagggcagccaccctgggatgcagycgccccccatccctcacagtcactgcaactcttgggattctgggcaccagggccagggctccgccccacgccatgcaaggacggcatgtattctgggacacggtcttggaggaagccagagactgacaaggagaggaaggctccagaaggcgaatctttcct

SEQ ID NO: 521795 - DNA, 481 bp, Homo sapiens
gggttgcggaggccttggtgagacttcattgcagctcagcctccccctctgcaacatctgcttccttcctttccttcctggcccagaaaagccactgccagcccctcacagacccgtcgggtaagacggcaccagcctcatggttctcatcaccccccaccccggcccrggtccaccccatgccccacaaccccctagcggctggattttctccccctgactcactgaggtgtaaagtgaactgcctgagccgagctgggcagctccttggccaatttcagtggcgtgtgctgcataaacattcccgccactaatgaaggcctctgaagaggcctgctcccgggggacccccggcttcctgctcctcgggtgtggtgtgggaacaggaacatctctcgggcgtcctcattggggggcagctggagtccacggcagcggagcaggccgtggctgagcaggccaggcagtgggggcaggccag

SEQ ID NO: 521796 - DNA, 324 bp, Homo sapiens
ttcacctggatgacccttaagggcctcgagtcagcatttccaacacagacacgctatccatcccttctgacctggcagtctctgctagttaggtgctacaatattgtttccaacaccactcttgataccaaatcctgtattctttaggaatgcctttggctacaaataacagaagtctcagtgaataacgagtggcttcagcagagtggtttgtttttctggcataacaaggagcctgtgggtcggtgcttgctgrcatgggtctcccgacctgaggccgggccctattggcttcttctggccttagcttcattgtttcaagat

SEQ ID NO: 521797 - DNA, 677 bp, Homo sapiens
gctgggacattgctcttctctggcctttggacttaacactgaaacactggctcttcttgggtcttgagsctgctggttttcaaactgaaacttacaccaactgcttccctggttctcaggactttggacttgggccggaactacacatcagctctcctgggcctctagcttgccaactacggacactgtgacttttcagccatcacaattgtgtaagccaatgtcttataatctctctctctcttattagtgcttttgtttctggaaaaccatgactaatacatcctgtatatatttttaattcccctcttccccatctatatccaattaatcactaagctttgtgaattcagcttccaaaatatcaggcatcttttcaaaccagattttactgaattaaagatatcattaatttttaaaaacaattcacaaagtgtcttattttgttcagttgctcacaaacctgtgtaacaagtgggccaacaattgactaaaaatatgttttattaaaaatagctagctttttgtcaagatgaatttttaagattttttcctggcatgcactccatgaagttaagacacaggactacactatatattatttaacttatgcttacaaagtattatacaaggtattcattttgtatttaaagtgaaaggacattggggaggaaaaa

SEQ ID NO: 521798 - DNA, 605 bp, Homo sapiens
cccaggagctgtgctgagcaacatcatacatgattttgtttaatctctccctatgaccttcatgccatccccatgacatctactccaactcctacataacttccgattgctgagctctgggggagaaggtgcaacaattacccccacttcacagataaacraagaggagttttgataaagaaatctagccaggcacagtggctcacgcctgtagtttcaacactttgggaggccctggtgggaggattgcttgagcccaggagtttgagaccagcttgggcaacacagtcagaccccatctctacaaaaaaatagaaaataattagccaggtgtggtagtatgcacctgtaggcccagctactccagaggccaaggtaggagaattgcttgagcccaggagttccaggctgcagtgacccgtgatcacaccactgctctccagccggcgcatcaaagtgagatcctgtctaaaaaagaaaagaaagaaaagaaaaaattgcccagggtcacattaagtgacaaaccaggatgggaaaccaggcctttgcactccaaagcctgctctcttaatcactatgcatatattgtctcaagcaaaaaagaa

SEQ ID NO: 521799 - DNA, 587 bp, Homo sapiens
tattcttccacaggcgaatctgaggacagggattttatattccaggggtggaccagtaactaagrccaccagatcaaggagttttcaattatatgatctgggggtgggggagcgtggacagagttcattcccaagtaactacaacaccaagccatgaaataacagacagccgggatgtgcagagaaggccaatgggaagcccaggcagagacttcacagcactttggagggtcatggaaggctgagggagaggagagctttggaaattctttctgaagatggagagcaattttgacagagggccaactttgatgtggaagaaggctcagtgagaaagtggtgattcttttagacgtggtgattcttttagacatggtcattctgtacctctataaaccactttgccacctttcagatccctttcacatgccttgcctcctctcatgtttgctcattaccatgagcagtaaacctccctgttcaatctgccacaaaacctgtgagatggatagagacacaatatatgcacgttgtttccttatcttcagttaaaaactcacgtttctttctgtatgaaacgtgtatct

SEQ ID NO: 521800 - DNA, 283 bp, Homo sapiens
acatctttttctcatacccccagctagggctgggccacccctgccaacatgacacccatttcttccgtctctcttttctgctgtcttcagggtgyaatgtgaattggggcgggacagtctgatgtcgggtgagcggccccagcactcagcactgggctctgagctcccggggtggacaggcagaaagaactggatccacctcccagccctgcgcctgaattgttgctggacttcagcacttaattcagatcaaaggtgctcagcactgaccccctcttgaccc

SEQ ID NO: 521801 - DNA, 624 bp, Homo sapiens
tgaaagggaggctgcagcctcgggagctccgagaggaacatctgacagatggggagggcggaaagtgacttcctcaaggtcacacggcaagggaacaggagaagggggctggtggccgggggcagtgcttcatgcctaaaatcccagcactttgggaggctgaggcgggtggatcacttgaggtcaggacctcaagaccaccctggccaacatggtgaaacctcatctctacgaaaaataaaaaattagctgggcgtggtggtgagcacctgtagttcccgctactcaggaagctgaggcacaagaatcgcttgaacccaggaggtagaggttgcagtgagccaagactgcaccactrcactccagcctgggcgacagagcaagactccatctcaaaaaaagaaaaaagaaaaaaaagaaaagggggctgggatcaagtagccctgaatgtcctgttttctgcccaccggggagaaccctctaagctatcagatgggcatcacaccccactgggaaagtggaagatgccctttggggcctagtgggccttatctggatttaccaagtatccttcccccacccacactcacaaaaatctccccaaaacacacattgaacctgaca

SEQ ID NO: 521802 - DNA, 620 bp, Homo sapiens
ggcatctgaactcactctgcttggtgtctccctgcgctcagtggcatgttggagcagggcgcacaggcctgcgttccagcctgtggggtgggaggatgcacccagggttccggaaggcctgctggcaagtctgagagatgcttcgagagcaggtcccctggccaggaaggcagccccagggcttactgyccctcaaggcccagcctctgtcagtggcccgtgcagtttcacttaaggtggaaatgtgcccgtcggggaggccttccaccttgaagaacctgggaaggtgattgtcttcagaattttttcagtcttgctaattgtgtggaagaagaagaagggctcagcttggtgctaatgtttttgtttttgttcttgagggtctcccctctgccatcatagctcactgcagccttaagctcctgggctcaagtgatcctcccacctcagctcccgagtagctgggactacaggcacgcgccaccacgcccagctaatttttgtattttttgtagagacgggtctcatcgtgttgcccagggtgttctagaactcctgggctcaagtgatgcacccgccttggcctcccaaattgctggattacagacatgaaccacagc

SEQ ID NO: 521803 - DNA, 582 bp, Homo sapiens
ctggcatctggggagagtgtaacccagggactggtcccagagttggcaaggcaaggggtacagacacatcrcggactagtgaggggatggcattaccaccccagtgttgcaggggcacgtggagaaactgtggcgggagccctgtgggagctgagcttggctgaagccacagagcaaaggaactggggtagtgacgtcatgtggcaacctctccaggcacagggcctcagaggaagaatcccaaggggtggagaaggcatcccgaggggtggaggagggatcccagtggatggaaggggatcccaaagggtaaggttgagcccaaaacaaagagcaagaacgcgggagcccaccatgccgtgcaccttatgtacagtggttcacttcatcccccaggatgcttcaaggtaggagacatttcccccttttatagatgagaaaactgaggctcagagaggttaggagccttggccaaaggataccagcaaagagtcatggcgtcaatcacgggacctccatctttaacatctttccactccctctcgtctcaccttcacagcagacggcgagagggatcaccag

SEQ ID NO: 521804 - DNA, 582 bp, Homo sapiens
ctggcatctggggagagtgtaacccagggactggtcccagagttggcaaggcaaggggtacagacacatcgcggactagtgaggggatggcattaccaccccagtgttgcaggggcacgtggagaaactgtggcgggagccctgtgggagctgagcttggctgaagccacagagcaaaggaactggggtagtgacgtcatgtggcaacctctccaggcacagggcctcagaggaagaatcccaaggggtggagaaggcatcccgaggggtggaggagggatcccagtggatggaaggggatcccaaagggtaaggttgagcccaaaacaaagagcaagaacgcgggagcccaccatgcygtgcaccttatgtacagtggttcacttcatcccccaggatgcttcaaggtaggagacatttcccccttttatagatgagaaaactgaggctcagagaggttaggagccttggccaaaggataccagcaaagagtcatggcgtcaatcacgggacctccatctttaacatctttccactccctctcgtctcaccttcacagcagacggcgagagggatcaccag

SEQ ID NO: 521805 - DNA, 427 bp, Homo sapiens
atgcagagtcagtgcagtgaggagggaacagtagggatgctgccctcaggttccccatagtggacgcttcataaatggctcttagatgagtgagcacctaccttgtgcctgtagggtgctgtccagggaaggtgccctgcacagagtcagatgccccaacagagcatggcagtgtgattactgccagtggctctaggcaacagaacctggcgttgaattctgtcttccctgcttgttagctgtgtgatcatggagaagcattgtccttttcaatcttgttttccaactgkgtttggaaaaaaaaaaaaaaaaaggattggtggggcacaatggctcatgcctataatcttaacaatttgggaggcccaggctggaggactgcttgagttcaggagtttaggaccaatctgggtaacatagtgagacc

SEQ ID NO: 521806 - DNA, 656 bp, Homo sapiens
cacgccacattccaagtgtcccctgggccctttctctccctcacccccctgtctgcacatgagtagatgcctccaygcagccctcccaggacgctcacctctatccacagatgcttctccaaaacccaccaggccctcccatggaacgagctcacctacagggtaaaatcaggtcacggtcacatatagcctgactactcccctcaggaccctcattcacagccactgtattaatttgctggggctgccaaaacaaagtgtcctcatctgggaggctgcagtagatttgctgaaattgatttgctagcgttgctgaaattgattcaagcttgattctggagcttgaatcgaagatcaaggcaagtgcagggctggtttccctgaggcctctccccttggtttgcaggtggctctcctctccctatgtcttcacatggtcctcctctgcatgtgcctgagttctaacttcctctcctctcctcatctccaccagtcttatagaattagggccccccaatgacctcattctaacttaataacctctttaaagtctctatctccaaatacagtcacattttgaaatattgagggttaggacttcagtgtatgaattttgggaggatgcaactcagccaggctcactcttatcattacag

SEQ ID NO: 521807 - DNA, 656 bp, Homo sapiens
cacgccacattccaagtgtcccctgggccctttctctccctcacccccctgtctgcacatgagtagatgcctccatgcagccctcccaggacgctcacctctatccacagatgcttctccaaaacccaccaggccctcccatggaacgagctcacctacagggtaaaatcaggtcacggtcacatatagcctgactactcccctcaggaccctcattcacagccactgtattaatttgctggggctgccaaaacaaagtgtcctcatctgggaggctgcagtagatttgctgaaattgatttgctagcgttgctgaaattgattcaagcttgattctggagcttgaatcgaagatcaaggcaagtgcagggctggtttccctgaggcctctccccttggtttgcaggtggctctcctctccctatgtcttcacatggtcctcctctgcatgtgcctgagttctaacttcctctcctctcctcatctmcaccagtcttatagaattagggccccccaatgacctcattctaacttaataacctctttaaagtctctatctccaaatacagtcacattttgaaatattgagggttaggacttcagtgtatgaattttgggaggatgcaactcagccaggctcactcttatcattacag

SEQ ID NO: 521808 - DNA, 422 bp, Homo sapiens
tcattcacagccactgtattaatttgctggggctgccaaaacaaagtgtcctcatctgggaggctgcagtagatttgctgaaattgatttgctagcgttgctgaaattgattcaagcttgattctggagcttgaatcgaagatcaaggcaagtgcagggctggtttccctgaggcctctccccttggtttgcaggtggctctcctctccctatgtcttcacatggtcctcctctgcatgtgcctgagttctaacttcctctcctctcctcatctccaccagtcttatagaattagggccccccartgacctcattctaacttaataacctctttaaagtctctatctccaaatacagtcacattttgaaatattgagggttaggacttcagtgtatgaattttgggaggatgcaactcagcc

SEQ ID NO: 521809 - DNA, 656 bp, Homo sapiens
cacgccacattccaagtgtcccctgggccctttctctccctcacccccctgtctgcacatgagtagatgcctccatgcagccctcccaggacgctcacctctatccacagatgcttctccaaaacccaccaggccctcccatggaacgagctcacctacagggtaaaatcaggtcacggtcacatatagcctgactactcccctcaggaccctcattcacagccactgtattaatttgctggggctgccaaaacaaagtgtcctcatctgggaggctgcagtagatttgctgaaattgatttgctagcgttgctgaaattgattcaagcttgattctggagcttgaatcgaagatcaaggcaagtgcagggctggtttccctgaggcctctccccttggtttgcaggtggctctcctctccctatgtcttcacatggtcctcctctgcatgtgcctgagttctaacttcctctcctctcctcatctccaccagtcttatagaattagggccccccaatgacctcattctaacttaataacctctttaaagkctctatctccaaatacagtcacattttgaaatattgagggttaggacttcagtgtatgaattttgggaggatgcaactcagccaggctcactcttatcattacag

SEQ ID NO: 521810 - DNA, 656 bp, Homo sapiens
cacgccacattccaagtgtcccctgggccctttctctccctcacccccctgtctgcacatgagtagatgcctccatgcagccctcccaggacgctcacctctatccacagatgcttctccaaaacccaccaggccctcccatggaacgagctcacctacagggtaaaatcaggtcacggtcacatatagcctgactactcccctcaggaccctcattcacagccactgtattaatttgctggggctgccaaaacaaagtgtcctcatctgggaggctgcagtagatttgctgaaattgatttgctagcgttgctgaaattgattcaagcttgattctggagcttgaatcgaagatcaaggcaagtgcagggctggtttccctgaggcctctccccttggtttgcaggtggctctcctctccctatgtcttcacatggtcctcctctgcatgtgcctgagttctaacttcctctcctctcctcatctccaccagtcttatagaattagggccccccaatgacctcattctaacttaataacctctttaaagtctctatctccaaatacagtcacattttgaaatattgagggttaggacttcagtgtatgaattttgggaggaygcaactcagccaggctcactcttatcattacag

SEQ ID NO: 521811 - DNA, 630 bp, Homo sapiens
ctttacattctctgagtttttccatgttcttcaatgagtatttaataagcagataaaaactaatacaacaaaggattttttctgtgtgcttttttgacctttggaggaagagattagagctagtcccataaccaggttatttgagtaggtctaacaagcccgtattaccagaaattatcatctggtcatttccagtccgagaacagaacacttggttgtcctggcatttcccaagcagkgggaggagttctctgcaggaataaataagcctcagcattcatgaaaatccactactccagacagacggctttggaatccaccagctacatccagctccctgaggcaggtaatccatgatgttttacatcctgggagcggaggaatctgtttttccaggagagttttaggcagcagcctggagtgtgtggagtgtgaggggtaagcagaggccaggaggaggtgtactcaggtgttaggggccaggggtctgttcttggctgccactgattccctgtgccttttttagaggcatcctctgtgtctgggttttcacacctgcaaagggtggaggtgccctggggcctctatggtcatttctgccttgatacttacagattcggatttgagtca

SEQ ID NO: 521812 - DNA, 596 bp, Homo sapiens
cctaattccaggacacccaccctaattccaggacacccattgcaattccaggacacccaccgcaattccagggcacccaccccaattccaggacacccaccgcaattccagggtaccgcccactttccgcagctccttcttctccacacacggatttccacatcacccaaatggagggcagattgctttcctctgttggcttttgccaagggtggacattgagccaagggcagccttattcagtctgattccaggacacccaccacaattccaggacacccaccgcaattccagggtaccgcccactttccacagctccttcttctccactcaaggatttccacatcaccctaatggagggcagatygctttcctctgttggtttttgccaagggtggacattgagccaagggcagccttattcagtctgtgttactcccagaaatccagcccgtcacaaccctccctgcagggacgcactttttcaagggccattaaacctgccgaatctccccacctcctccaaaagctcacggaaagcattgactttcaggtgagttgggggctgtgggtggagctagatccccagctcccca

SEQ ID NO: 521813 - DNA, 520 bp, Homo sapiens
tggatgaagccctttgactcacgtgccaccagcccaaaggagttctttgtagatgagcacagcgctgtgtgggtgcccatgatgaaggagaaggccagccaccgcttcctgcacgaccgtgagctgcaatgctctgtgctgcggatggaccacgctgggaacaccaccaccttcttcatcttccccaacaggggcaagatgaggcakctggaagatgccctgctgcctgaaacactgattaagtgggacagtctgctcaggaccaggtagcctgcacacagcagagccccggggaggccgggcctcgccttctccctcagccaccgtaaagtgtccccagggcacagtcacctcaaaagcattgtcaccccagggcactgtcatctccagggcactatcacccaaggtcactgtccctattcaaagcactgttctctcccaggatgctgttacatcacccaggacatctcacctccaggacaccgtcatccctcaggatattgtcaccctctcagagtac

SEQ ID NO: 521814 - DNA, 638 bp, Homo sapiens
catgttgagcagcaggttgctaaatgcacttgcccccatgatcctcagagaggttaagttggtgtggcctgcagggcaggggagtggcactggccccttaatctatgtgtggggctgagaaaaatatgagcaacacctttttgaagcctacagacaaagcctgttttagggttacctattaatgagtagaaagggaaaaatgagtatcctgaagattttttgcccagtctagacacacagtgggtatttgtaactgtctgtacccactgtattagtctgctctcatgctgctaataaagacatacccaagactgggtaatttatatatatatataaaagaggtttaatagactcacagttccacatggctggggaagcctcacaatcatggtggaaggtgaacgagaagaaaggcatgtcttacatggcggcaggcaagaatgtgtgtgcaggggaactgcccgttatgacaccatcagatctcatgagacttattcactataatgagaacagcatggraaaaacctcccgccaggtccctcccatgactcatggggattattacaattcaaggtgagatttgggtggggacacagggccaaaccatatcatcctccatgtaagttactgcaactgtg

SEQ ID NO: 521815 - DNA, 554 bp, Homo sapiens
acccaccttctagagggtcatctgcttcactcaaatctaccaatttgaaagttaatctcttccagattggagactattattctaagtgaagtaactcaggaatggaaaaccaaacattgtatgttctcactcataagtgggagctaagctatgaggatgcaaaggcataacaatgacacagttgactttggggactcggggaaagggtgggaagggagtgagggataaaagactacaaattgtgtgcagtgtrcactgctagagtgcactaaatctcacaaatcaccactaaataacttactcatgtaaccaaacaccacctgtttcccaaaaacctatggaaattaaaaaaaaaaagttaatctcatctggaaaataccttttcagcaacatgtcgtctggtatttggccaaatatctggttactgtgacctagtcaaggtgatgtgtaaagttatccatcacaaacagctagattcattccacctacacttcaagggatcgccttgaagaagtcagtatttttgcagagatgcgtctccacccaaaggtcct

SEQ ID NO: 521816 - DNA, 626 bp, Homo sapiens
ctattaaattcctgctttgactcttgcccccttcatccattctccatacagagcaattttaaaaaacatgtaaattgaatcatgycactgtatggaaaatggataaagggggcaagagttgaagcagggaatttaatagagagatggtaatctctaaaggcttcccacttcaattcaaataaaatgcaggctgagtgtggtggctcacgctggtaattccaagactttgggaggccgaggcaagcagatcgcttgagcccaggaattcaagaccagcctgggtaacacggcgaagccctgtctctacaaaaaatagaaaaattagccaggtgtggtggtgtgtgcctgttgtcccagctacttgggaggctgaggtgggaggatcacctaagcccagggaggttgaggctgcagtgagccgggattgcaccactgcactctggcctgggcaacagagtaagctgtgtctcaaaaaaaaaaaaaacaaaaaaaaaaacaaccatggccaaggccccgaaaaatcactcctgtgcccaaatctctgttctctacttctgtgctccaaccacagacctttctatagctcctaggactaccctagtccctgtcatcacagactataatgc

SEQ ID NO: 521817 - DNA, 571 bp, Homo sapiens
tgtggaatgaatccattgtcacgtagataaccctaagcagggaaggcagcttatgcttccgtaaggcttagcaaagtcttctcatgtgagagctagcaaataatttgaagatccaaaatatcagggtccattttgaaagctggggcaatagcggaggggatgtcgaaagtcctagtgtataaagggtgggtcacttgaggtgcagtccaaagtccatgaataaacagaggttaggggcagaggaaagaaggcacctgaggtagcccctgttttccttatttggttatttgtctrtagctaccccaccctcattgccctccccaccacactcccccacctcccaccaaaaaaaaggaagaatagaaacttttgaacccatgtggggatttcacaatcatgtctttttttcttggtaatgttctgctttgacataataacaaatctgtttatgtttgcaaaggattagctatggaccctgcttctggagcaaaactcagacaaggatttagtaaatcttctaaaaaagattaactcctagaagccaggtaagaaaaaaaaatcaccgctaatc

SEQ ID NO: 521818 - DNA, 571 bp, Homo sapiens
tgtggaatgaatccattgtcacgtagataaccctaagcagggaaggcagcttatgcttccgtaaggcttagcaaagtcttctcatgtgagagctagcaaataatttgaagatccaaaatatcagggtccattttgaaagctggggcaatagcggaggggatgtcgaaagtcctagtgtataaagggtgggtcacttgaggtgcagtccaaagtccatgaataaacagaggttaggggcagaggaaagaaggcacctgaggtagcccctgttttccttatttggttatttgtctgtagctaccccaccctcattgccctccccacmacactcccccacctcccaccaaaaaaaaggaagaatagaaacttttgaacccatgtggggatttcacaatcatgtctttttttcttggtaatgttctgctttgacataataacaaatctgtttatgtttgcaaaggattagctatggaccctgcttctggagcaaaactcagacaaggatttagtaaatcttctaaaaaagattaactcctagaagccaggtaagaaaaaaaaatcaccgctaatc

SEQ ID NO: 521819 - DNA, 560 bp, Homo sapiens
tgtatagctcattgttttgcctacattttggtgttaaatgttctgaagtagaaygtaatgggaatatacgaggagccactttctccgtatctttgactggagaagagtcatggtagaatgtgtattcgtttattaaatttttttttttttttgagacggagtcttgctctgttgcccaggctggaatgcagtggtgcgatctcagctcacctgcaacctccgcctcccaggttcaggtgattctcctgcctcagcctcctgagcagatgtgattacaggtgcacaccaccatgcccagctaatttttgtatttttagtagagatggggttccaccatgttggccaggctggtctcaaactcttgacctcatgtaatatgcctgcctcggtctcccaaagtgctgggattataggtctgagccactgtgcctggccaatttttaatttttttttaacttttatttattttgcttaaaagttttgttttgatagaagcatgaatattattagggtgtgaaatataaggacaggctgggcgtggtggtgtacacctgtaatcc

SEQ ID NO: 521820 - DNA, 624 bp, Homo sapiens
ctaagattatttcatagacataagtagacagcctagtgtttttaaaaataaaagtatataagttttggtgtcagaagtcctagtttccgatacagtctttggcactttctggctatatatgctttggaaagtgacaacctcctggggcttcaatttcctcatctgaggaaaatggaagctttatcccctgccgtacctaccttacaaaattgtcagaatcagaagacgtcatgcccaagaaaggactttgtaaagtattgatttcactcattatttcattactataatagtggtaattttctaatatttatcactttcatttcataactaaagatgataggaaaaatctagaagtatcagagttagcataaaaaatgataggaatgataaaaagcacttgtgaaaagatttgagtgatttgtagtgattatgcatgagaaagagaaggctagtaggtaatccaataattgtcttaaagcacttgaaaactactccagtgagctaatactgatgaccagactaggaragttcagcatgagttatttaggctaactaaaccaaataactttccagtagtgaggttactacaaagtagaattggcctctggggaggctgtggaatcc

SEQ ID NO: 521821 - DNA, 264 bp, Homo sapiens
aaatgcaccaaagcccaacctggcaataacattttaatcctctgctagtgtacttctgctaacatactacttgtcagcaaaagtcacatggccaagcctaataacagtgaggaaggaaaatatcctttgattccagtggtaggttatgcaaagtcatataacatatggtatagctatgggaaagagtattagaaacaataatgcaatataccatgttccaccttctagatcacaattattcrcatgccacccacacacaaaata

SEQ ID NO: 521822 - DNA, 566 bp, Homo sapiens
agccaggactggaagggtccatatcgtagagaaaagggaagcacatggagggaagctgcacctgccccttccatttctcacttcagtgaatttttcccttcacagcatagcacatagaggccaaactgaagaaagtagcatagagctttgggattttttagaggcaagtctaaggttcctgagtcagtcaaggcttagggaccaaaatcccagagaaaatggaactttctgcaaaacagtctgtatagtttttgctcttgaattgtttgctgaatcccatgtggcaaaagactgagaggctcagaaaccaatttctggtttgaaagcagtaccctataatgcaaatatttagccaagaactaaaagacatrgcctttaacttaaacatacttaaccatctcattgaaaagggcctaacactggcacaagaaatggcattaaaacaacaagacaaaagaaattaatacagaaatgaaacacaggcacggatgaaacaacatcttcagggttcttcagcctgtgattaatcggcatcgtacttttaagcctctgtgatttctgttcca

SEQ ID NO: 521823 - DNA, 566 bp, Homo sapiens
agccaggactggaagggtccatatcgtagagaaaagggaagcacatggagggaagctgcacctgccccttccatttctcacttcagtgaatttttcccttcacagcatagcacatagaggccaaactgaagaaagtagcatagagctttgggattttttagaggcaagtctaaggttcctgagtcagtcaaggcttagggaccaaaatcccagagaaaatggaactttctgcaaaacagtctgtatagtttttgctcttgaattgtttgctgaatcccatgtggcaaaagactgagaggctcagaaaccaatttctggtttgaaagcagtaccctataatgcaaatatttagccaagaactaaaagacatagcctttaacttaaacatacttaaccatctcattgaaaagggcctaacactggcacawgaaatggcattaaaacaacaagacaaaagaaattaatacagaaatgaaacacaggcacggatgaaacaacatcttcagggttcttcagcctgtgattaatcggcatcgtacttttaagcctctgtgatttctgttcca

SEQ ID NO: 521824 - DNA, 566 bp, Homo sapiens
agccaggactggaagggtccatatcgtagagaaaagggaagcacatggagggaagctgcacctgccccttccatttctcacttcagtgaatttttcccttcacagcatagcacatagaggccaaactgaagaaagtagcatagagctttgggattttttagaggcaagtctaaggttcctgagtcagtcaaggcttagggaccaaaatcccagagaaaatggaactttctgcaaaacagtctgtatagtttttgctcttgaattgtttgctgaatcccatgtggcaaaagactgagaggctcagaaaccaatttctggtttgaaagcagtaccctataatgcaaatatttagccaagaactaaaagacatagcctttaacttaaacatacttaaccatctcattgaaaagggcctaacactggcacaagaaatggcattaaaacaacaagacaaaagaaattaatacagaaatgaaacacaggcacggatgaaacaacatcttcagggttcttcagcctgtgattmatcggcatcgtacttttaagcctctgtgatttctgttcca

SEQ ID NO: 521825 - DNA, 620 bp, Homo sapiens
tgtaatgcaaagatccttataaaagatcatttcagtaaaaggacatttactattagggaaataataggttctgctcagcctcttcctcaactctctttcagactacacattagagcggtgtgcttatgtatgcaagttttcagttatagctgatactttgtttttttatatggartgtctttttctagtttaaatttttatagtttttattggtgggttttgagggaaagaaatagaaaaaaatgcttttacttagtcatttttaaccatcactctcagataatatttcttaaaccaaaaataaatgaaacccttggttatagaattggggtagaatctggacataggtaaataacctagatattagaatgataatcattaaatgacaaaatggaaagaagtcaatgcccatgggaattaccagaacaaagaagtttttaaaatgcagcatattcaggttacagcatttttttaatctgaggaatgatgtggtggaaaaaacaatcttcaaaaacagtaaatgtaatttatactcttgatttagctttttaaacagcagatagatctccagtaatattctgaaggggtcttggacttgccgcacaaaaagcatgaggggt

SEQ ID NO: 521826 - DNA, 620 bp, Homo sapiens
tgtaatgcaaagatccttataaaagatcatttcagtaaaaggacatttactattagggaaataataggttctgctcagcctcttcctcaactctctttcagactacacattagagcggtgtgcttatgtatgcaagttttcagttatagctgatactttgtttttttatatggaatgtctttttctagtttaaatttttatagtttttattggtgggttttgagggaaagaaatagaaaaaaatgcttttacttagtcatttttaaccatcactctcagataatatttcttaaaccaaaaataaatgaaacccttggttatagaattggggtagaatctggacataggtaaataacctagatattagaatgataatcattaaatgacaaaatggaaagaagtcaatgcccatgggaattaccagaacaaagaagtttttaaaatgcagcatattcaggttacagcatttttttaatctgaggaatgatgtggtggaaaaaacaatcttcaaaaacagtaaatgtaatttatactcttgatttagctttttaaacagcagatagatctccagtaatattctgaaggggtcttggacttkccgcacaaaaagcatgaggggt

SEQ ID NO: 521827 - DNA, 665 bp, Homo sapiens
tcaaaggcagggtattagcctattctttattaataaagacagcaattccttgcaactgtaaaaaaaaaaaacactttgaaaaaccataaaactaatttttgaatttcaaatcccttatgtgctcatttatacttgagtttcaaaataatcctgtaagataggccagtacagtcttttaatattcacattgtacagatatgggaaatgggatacagaaatatttagtgataagctaatggtaccctgagattagaaactaggtctagtgttctttttgcaaccaacagctccacatttttcatatgacaatatctttcaaatatttaaaaattcaagggcaccaaaaatgattgtggttgcactgaatttattgtctacctaacctctagtacctaccttctaactttgaagacccatctgatatccaatcaagtttgctctgcctgtcatatctctttcaacccccaagccctcacaatactcagtctcccagctctggttcttcttggcagaccctctcccactgacacctaggactcttgtaatataaatcttagcttcacttcaaggaacaacctccttctcaatgtccacctacatcttgacattcyggactaacgtgttgcctgtccctgggaaaagggattcctgtaataggttgtaaa

SEQ ID NO: 521828 - DNA, 594 bp, Homo sapiens
ctactttttagaatactggtagggaagacaaagtcactctattccaggactgcaaatgacacagaggctactagatggaaagttaaggagagataatgctggggtggggctgggggttgaactagcaaactattctagcattgtggaagaataatatgttgctggagggagttaacaatgttagctaacaacataatggaatctgaccattttgagaagcaagaaaatatatcataacatttggttgattattcacaaatggcaacattcagtcacattcraacaaatgagggcaggtaaagataaataagtttccctagtaggcattttggtccatcattatttcttcctataaagtttttacctatatatgtggtgaatctaatattgccttattatcactgtcctaatgaataattcttcccaaaccatgatgccttgctgtaacctatcctgtactatgacagacagacaagactgtgaaatagctgagcaactcatttacttacataatttttagatattcatcattttcaacatttattgatattcaggatctttaaaagcaactgatatctcattccacataaggtg

SEQ ID NO: 521829 - DNA, 639 bp, Homo sapiens
gcttatccacgttgactttctcatctgggacactggcctacgtagtacgtgattccagcaaacagggcagtatgttgagctcttgaaataagtatgttgtgacagcctttgttacagcattaaaagaacagtctaytctcaatggctgaccctttatttgtatgctgacgtcaaaaacaaaacaagactgcagacacactcttgccaatgctagaaaggatgcatgtttgaagtggatttttttctatttttttgcttggagaggagggtgtgtggacaccaagctggccatggtccaagctgacctatttgccagccgacccctgtctgggctgccataacaaagtgccatcatgaactgggtggcttataaacaacagaaatttatttctcacagttctggaggctaaaagtccaagatcaaaggcaccagtagatttggtaaactaggaagcggtgagggcccacttcctggtttatagactgatggctgtcttctcactgtgtcctcaaatggaagctgatgtttcacaaatattttctgggtaaatggatgggtgagtgaactcatgaagggatgctccattagatgaacgcttggataaagggcgttagtggagggacagaattgcagctccg

SEQ ID NO: 521830 - DNA, 425 bp, Homo sapiens
cactggagaccaagtacttacagccttctgctctgtggcccctcctcactccagggatgctgccttgggtctggaaactgttagaggaaaccccaagaggtgcaggcactgagcctctcaggacaatgacctggggtcccagctcccctggaggggcctcctcatggtaagtgaatgccaagaggttaagttggcctgtgtttccgaggtggaaattccaggtcgctggcttcatttgtcttctcttttagattgtttgggggttgatcacagaccaagagtgacgagtgatgtcaccctgtgactcatggcyggaccttcttgcccctattgtctcagcacaacattattcgacttttccctcagcgtgggtgggcagaggaaaagccctgtggctctggggacttgggatccagagttgaaga

SEQ ID NO: 521831 - DNA, 484 bp, Homo sapiens
gatgtgaccacctgcaggctccctgacacctgctcctccttcctttacctctgttgcagcccaccctccaacccctaccacatacactgccatgctggatagtgcctgccgggtgagcttactcaggaaggastggggactcagccaaggatcccatgaacaagcaaagcacagacaccctgaggggtgtgcagcctcaacaagtcctaacccacactcaagacaaattagatgagggacctcagagatgggtgactcctcccagagctccagaaagggtggaagtgcctatccttggcccagaaggtaattttgagaattgagagcttgagtgtgaaaggttgtaaaaatcaggccgggcacagtggctcacacctgtaatcccagcacgtgggaggccgatgtcaggcagatcacctgaggttgggagtttgagaccagcctggccaatatggtgcaatctactaaaaatacaaaaattagt

SEQ ID NO: 521832 - DNA, 602 bp, Homo sapiens
acacaaacacacacacacacacacacacacacacacacacagacataggcacaacttggctgagatgcaacccagtagacctggcacaacttcccagtatgaccagtgattattcagctgtgcacccaactcccaattattgactagaaatgtggtaaattagccacaatagtgggggttttttttgttttgggtttattttttaggattttacttttcagcatcattgccmtcttgctttgcattttgcattaggtacctaaaacctgtgcttaagttttaatagtagtagcagtagtggccacatatactgagtcccgtgttctgcatactctgagtagctaaacaatagatcaatgcatgcccaccaacaggagtggaccatacttaacattctaaggtacttcctttcagtctcatgtgtatgtagtgtgcacatgtgtgtacttccttttctggtcttttttaaaattttttttattatactttaagttctgggatacatgtgcagaacgtgcaggtttgttacataggtatacacgtgccatggtggtttgctgcacccatcaacccgttatctaataaatatattattagagtca

SEQ ID NO: 521833 - DNA, 428 bp, Homo sapiens
tatgcacagtaatgtcaatactaactagcgccagacgtccatggagtccttaggatcctaagtacttaataatatctctcacttcagcctcataataaccctcttaagcagatagcgttggtctcagcttacagatgaggaaacagtcttagaagacaagcacatagctaataacaaagtcaaaaacttccaatccagctctgtggacatcaccactcgtgtacctgaccgtcacgtaaatgacctccaactgtgtatctttccttgggtgaaatgggtttatgcctgtaggtgcttctaccttctcctcaaacattcakcctcaaatgctctcattaagatacctaaatatgtagctccataaataattgtaggtggctcctttctacacatttttcacagccaggatgtccccattggccggcacc

SEQ ID NO: 521834 - DNA, 478 bp, Homo sapiens
cattctaagggcaaagggcagtggcccatcagcttcatcctgggtgtaggaaaggagaatggtgtacggatgccaccttttgcaatctaggccgtgtcgcacctctctgtggacagagtgagagtttgtagcgtgacttcaaaggctaattaatgccctgctacctacggaatatctctgcaccatggtgtgcatgtgcctgccaccttcccttcaatctacattgaagttcccaccattaaagtccctctcttgaggtagcaaagaaacatatgagtaatgactccaaggatagactctggagaatcttctctccttttgttccatgwtcatcttcacatggatttattgtcaccttggagggtgaggcacaagatatacgttcattaggggcagaaagaaaggagaagttgtgtatgtgagcaatcatcttgaattccagggggatcgtgactccagaggaaggagccaagtgtta

SEQ ID NO: 521835 - DNA, 562 bp, Homo sapiens
caacaacccaggttgctgggccaagctccagagaagggcacaaccccatgtctggttcccatcaccttcttaactactcactttctccctcctctctctcacatcctctctactcaccactcatttctaacccactacctttcactacagtcttggaaatatttctctcttaatctcaggcaatttcttttccctcccatttcatgtataagtaaacagcacaacctacaacaaaaacaaagataaaaattaaaagtctagagtgttcagggaaattgggcttaataataataagcatccagaggttttcttcggaatctctataaaaaccacatcgtaggtaaagcctggactttgaaaccagacaaactggtgttctattcycagctccaactcttaccactactgtgttcttggaaaaattacaaaacctgagactctttttttcctgtactattaaagtaagaaattaatgagataattcacataaagcacttggtacagtgcctacaaggtaagcatgccatgaacattagctattattcatatgattctctctctc

SEQ ID NO: 521836 - DNA, 414 bp, Homo sapiens
aaatattgaattcatatttatgttgtctactggcaaatattatataaaatttgtgataatttaagattatatttayagttaagtgtcactgatgtttttaaaagatcacacaaccatatgaacgtctctgcagcagcttagtgatgctgtgccacaagatggcctcatgcaccacttatggggtcagctctgtgctgccacagacactggggtgccaggaaggctacagggcagatgctcatggacatcacaaaggtgaaataggaaagtctgagtgaatgaaacagggaacatcaaaacaaaagtattcaaaatgtatttctcttctttaagaaattacaactttaaaaatcaaatttgggaaaagaaatgtatgaaatgcaaaacagaatcttacataggatcgatcctgag

SEQ ID NO: 521837 - DNA, 414 bp, Homo sapiens
aaatattgaattcatatttatgttgtctactggcaaatattatataaaatttgtgataatttaagattatatttatagttaagtgtcactgaygtttttaaaagatcacacaaccatatgaacgtctctgcagcagcttagtgatgctgtgccacaagatggcctcatgcaccacttatggggtcagctctgtgctgccacagacactggggtgccaggaaggctacagggcagatgctcatggacatcacaaaggtgaaataggaaagtctgagtgaatgaaacagggaacatcaaaacaaaagtattcaaaatgtatttctcttctttaagaaattacaactttaaaaatcaaatttgggaaaagaaatgtatgaaatgcaaaacagaatcttacataggatcgatcctgag

SEQ ID NO: 521838 - DNA, 414 bp, Homo sapiens
aaatattgaattcatatttatgttgtctactggcaaatattatataaaatttgtgataatttaagattatatttatagttaagtgtcactgatgtttttaaaagatcacacaaccatatgaacgtctctgcagcagcttagtgatgctgtgccacaagatggcctcatgyaccacttatggggtcagctctgtgctgccacagacactggggtgccaggaaggctacagggcagatgctcatggacatcacaaaggtgaaataggaaagtctgagtgaatgaaacagggaacatcaaaacaaaagtattcaaaatgtatttctcttctttaagaaattacaactttaaaaatcaaatttgggaaaagaaatgtatgaaatgcaaaacagaatcttacataggatcgatcctgag

SEQ ID NO: 521839 - DNA, 414 bp, Homo sapiens
aaatattgaattcatatttatgttgtctactggcaaatattatataaaatttgtgataatttaagattatatttatagttaagtgtcactgatgtttttaaaagatcacacaaccatatgaacgtctctgcagcagcttagtgatgctgtgccacaagatggcctcatgcaccacttatggggtcagctctgtgctgccacagacactggggtgccaggaaggctacagggcagatgctcatggacatcacaaaggtgaaataggaaagtctgagtgaatgaaacagggaacatcaaaacaaaagtattcaaaatrtatttctcttctttaagaaattacaactttaaaaatcaaatttgggaaaagaaatgtatgaaatgcaaaacagaatcttacataggatcgatcctgag

SEQ ID NO: 521840 - DNA, 606 bp, Homo sapiens
acatatcacaactctatctcagttgagcaattttcctgtggcttctcttcattcccattgcagtctgattcacttgtgtcattctcataattttctcatatgctcccktagttcttttccacccaaattattgttccattctatgcatccacaacttatgcaatctttatgattttctttttgcatttgtatacccatgaattttgttcctttaacagctatttattatctactctgcaccaatcatcagatgtagtggtgaaaagatggacaaaatttctactctcagcttacattttggtgatgggagatggacaatcaacccaggtcaatgacagatgctggagcagaacacatagacatacaggtgggggccactgcttatctagggtttccagtttcactgaggccctcagcgatactcatctatttatattgtctttgatctgcattttctcctgttcctttcagcaaatactctttactactcatgccattatcttgtcccatcatgtttaataatagcagataatctttgcttatacttctctggtaaaaagaggttatcagtcatggactccattaatttcacaactcctctccctc

SEQ ID NO: 521841 - DNA, 606 bp, Homo sapiens
acatatcacaactctatctcagttgagcaattttcctgtggcttctcttcattcccattgcagtctgattcacttgtgtcattctcataattttctcatatgctcccgtagttcttttccacccaaattattgttccattctatgcatccacaactyatgcaatctttatgattttctttttgcatttgtatacccatgaattttgttcctttaacagctatttattatctactctgcaccaatcatcagatgtagtggtgaaaagatggacaaaatttctactctcagcttacattttggtgatgggagatggacaatcaacccaggtcaatgacagatgctggagcagaacacatagacatacaggtgggggccactgcttatctagggtttccagtttcactgaggccctcagcgatactcatctatttatattgtctttgatctgcattttctcctgttcctttcagcaaatactctttactactcatgccattatcttgtcccatcatgtttaataatagcagataatctttgcttatacttctctggtaaaaagaggttatcagtcatggactccattaatttcacaactcctctccctc

SEQ ID NO: 521842 - DNA, 606 bp, Homo sapiens
acatatcacaactctatctcagttgagcaattttcctgtggcttctcttcattcccattgcagtctgattcacttgtgtcattctcataattttctcatatgctcccgtagttcttttccacccaaattattgttccattctatgcatccacaacttatgcaatctttatgattttctttttgcatttgtatacccatgaattttgttcctttaacagctatttattatctactctgcaccaatcatcagatgtagtggtgaaaagatggacaaaatttctactctcagcttacattttggtgatgggagatggacaatcaacccaggtcaatgacagatgctggagcagaacacatagacatacaggtgggggccactgcttatctagggtttccagtttcactgaggccctcagcgatactcatctatttatattgtctttgatctgcattttctcctgttcctttcagcaaatactctttactactcatgccattatcttgtcccatcatgtttaataatagcagataatctttgctyatacttctctggtaaaaagaggttatcagtcatggactccattaatttcacaactcctctccctc

SEQ ID NO: 521843 - DNA, 445 bp, Homo sapiens
tctaacttcattacccatcttttctcagatacattctctacatatcagtgagtagatgaagaaagatgtcccagaattttatgttgacttacaagaaaaaaggcgcatttttttcttcttggtcctatgtcagtgattcccagggcaggctggctggccaaatgcatggcccctgtgacctgctgtttccatctgtgcctccactgtcttggttgttgagtttgcccttgacaaagaatgttaaggcatcttatgtaaattagatggggaacttaaaactcgagacaaagtatgtgcaattctcaagtttttctctacttttgctttgtgytgtggcagtgacattgaaaattgatgagattattcttgccccaaatctacctataattttgtataattattccaaattctgtgccacagaactgaatttttggggtaaatgtgt

SEQ ID NO: 521844 - DNA, 626 bp, Homo sapiens
tctatattctcttatatttcactgagtttctttaacattattattctgaattctttttctggcatttcatatattttcttatgattggggtctctcactggacaattattattttcatttggaggtgacatatttccttgcttttttgtggttgatgtccctatgttgatctctctgcatctggtggaaaatttgctccttccsattttatggagtgagtttgcagggaaatattttttgtataattgggtcttgggatgtcagtttgatggggtgtttcagccttggttctagctgaatacagtagtgtattcttagtgtaatttcttcagttgtaatccacactagtggcatttgcgacgtctcagtggcctaggctgagatagtttgtggcaacactggtgcagattttccaggggtaggctcattgggctgtttcttaggtcaggggcacatgcatgtgcacacaataggttggccaaactggggcctggctcactgggattggggccacagggctgttactctggcagagcacatgggcatgtagttgcttggctggcctggaggcatgtccacaaggggcagcccacagggctgtttctcaggcccaggacatggtcaca

SEQ ID NO: 521845 - DNA, 626 bp, Homo sapiens
tctatattctcttatatttcactgagtttctttaacattattattctgaattctttttctggcatttcatatattttcttatgattggggtctctcactggacaattattattttcatttggaggtgacatatttccttgcttttttgtggttgatgtccctatgttgatctctctgcatctggtggaaaatttgctccttcccattttatggagtgagtttgcagggaaatattttttgtataattgggtcttgggatgtcagtttgatggggtgtttcagccttggttctagstgaatacagtagtgtattcttagtgtaatttcttcagttgtaatccacactagtggcatttgcgacgtctcagtggcctaggctgagatagtttgtggcaacactggtgcagattttccaggggtaggctcattgggctgtttcttaggtcaggggcacatgcatgtgcacacaataggttggccaaactggggcctggctcactgggattggggccacagggctgttactctggcagagcacatgggcatgtagttgcttggctggcctggaggcatgtccacaaggggcagcccacagggctgtttctcaggcccaggacatggtcaca

SEQ ID NO: 521846 - DNA, 546 bp, Homo sapiens
tattagcaatatcatgatatgaaaacatgacaactggttttaaaatgtgattatgcaatatgtgtggttgcaggatgattctgtatatctgtaatttgcacaataaattcatcagagattaggacttgctctttccagggcctggaaggaatgtttggatttagttttattgagaaagataaccgtaccagtgcatgctttcaaaaaaacctccttttgttcaatcacccagggcaggaaccagacagaaatggatggccgcttgttggtgaaggactcacagtgaggcaaggaagatctcttcttcatcatgttccccgtcactgacttcatcatgttcaccgtcactgatttcccttaactctatgcctgatcagaacccacaaaccaaggagacacacctggtcctgttggtccatttgctatttcgtagttgaatttcacctcagcattctatayagaagatttgtatttttttcaatcacatgccctaatgtaaatttcatgcattcaagacagttgattggtttccaaaaaattaaatac

SEQ ID NO: 521847 - DNA, 546 bp, Homo sapiens
tattagcaatatcatgatatgaaaacatgacaactggttttaaaatgtgattatgcaatatgtgtggttgcaggatgattctgtatatctgtaatttgcacaataaattcatcagagattaggacttgctctttccagggcctggaaggaatgtttggatttagttttattgagaaagataaccgtaccagtgcatgctttcaaaaaaacctccttttgttcaatcacccagggcaggaaccagacagaaatggatggccgcttgttggtgaaggactcacagtgaggcaaggaagatctcttcttcatcatgttccccgtcactgacttcatcatgttcaccgtcactgatttcccttaactctatgcctgatcagaacccacaaaccaaggagacacacctggtcctgttggtccatttgctatttcgtagttgaatttcacctcagcattctatatagaagatttgtatttttttyaatcacatgccctaatgtaaatttcatgcattcaagacagttgattggtttccaaaaaattaaatac

SEQ ID NO: 521848 - DNA, 504 bp, Homo sapiens
atctgaggtttttctttctagggtacattaatttgctactttaaagggactacaagggtgattatatccatatttaagattctttgcaatgccacaatctttaatagtaataaaaataaaacatatcatataaagaattcaaattctatacatttttattcttgtaacacataagcctgtgtgaagaatctaaaatcttacaaacccattaaactgcaagaayaattcaagcaggaaagattagtatggaaggaaggttctagaagctaggctccaaatgtacagtggttctcaacctgggctgcacactggaatcacatgaggaattttttaaaataccaatgccctctacccacccatgaagattgtgacataatcggtctgggggcagcctggacattaaggattttaaaatctcaccaggtgattctaaagtgcatctaaggctgagaatgacctctttaaagaaaagtcaacaggagtatcgaagacaatcatctattc

SEQ ID NO: 521849 - DNA, 505 bp, Homo sapiens
agctgccctctttggtttatgtgttgttccttcatggaatcaatgcttgaatctgagatatacaatttttaggtgcctcatccgaccagtcccagtgctatttcgtcttttagccttggcaccccagttacacttcctcttgcgcttggcagggtagccacgtttgccacaggttgacwtctgaaggtggtaggccttggagctgcagtggtggcacaacatgcgcatcttcttgtgacgctttcccaacgacattcccttcatcttgttgcttctgtggtcgacaccaaagagatgggaagagcagatccaattttaatggaatcttcaaagttatgcagaaatgtttataatatgtaaagcccttagtgcagtgtctactcataattgaaggcttggctaatattagttgctgttgtgttgctgttattgttgatattgttgtacaatgaagagccataggagacttttaggagatgtgccacagaaagcagtgctttataaa

SEQ ID NO: 521850 - DNA, 580 bp, Homo sapiens
cctgatgtgattatcacatcctgtatgcctacatcaaaatacctcatgtatcctataaacatttatatctactatgtacccacaaagattaaaaatttttttaaatttacactttttaagttgcgataaaatatacatataaaatttacttggaagtcctagccagagaaatcaggcaagagaaagaaataaaaggcatccaaatgggaaaagaagaagtcaaactatctctctttgctgacagtatgattttatacctagaaaaccctaaagactccascaaaaagctcctggaactgacaaataacttcagtaaagtttcaggatacaaaatcaatgtacaaaaatcagtagtatttcttttttttttcttttttttatgtgttttttttaaattttattattattatactttaagttttagggtacatgtgcacaatgtgcaggttagttacatatgtatacatgtgccttgctggtgtgctgcacccattaactcgtcatttagcattaggtatatctcctaaagctatccctacccccctccccccaacccacaacagtccccagagtgtgatgt

SEQ ID NO: 521851 - DNA, 517 bp, Homo sapiens
tcagctacagaggagacctctgtgggcagaagagaaccacagaggagttagcaagtagcagtagagccgagcgaggaatgggttccatttaactcggtgtcaagtgcactcctcattagggagatgtacctccctcccttcttaacctgccagcaattgtttcctcccggggaaacacccggcacggcaagctttgtatgtggtaaggtggctgagaacatgagccctggtgccattgatttccattctagctgtgccacttacttgcttagtcagtttcctcacctgtagaatrggaatggtgattgtgtctacctcaagaattgtctcaccaattaagtgagttaatgcatgggaagggcttcagaagagcctggcacagagtaagtgatttataaatatgagtgcatattctatactctggttctacagtaatcctaagactttcgaagaccctgaacgctcttccttttggagatttcaacccacattttatcaaacatactgaaagtcaccc

SEQ ID NO: 521852 - DNA, 549 bp, Homo sapiens
aataatatttcatgtatgtgtgtatatcacattttgcttatctatttacctactgatgggcattagggttggttgtaccttttggccattgtgaataatgttgctatgaacatagtgtacaaatacctgtttgagtccttgctctcagttcttttgggtatataccctgaaagggagttgttggattatgtgataattctatgcttaatattttaaggagctgccaaaccattttccacaggggctgcaccagttacattccaaaaagtagtgcataaagggtccagtttttcgatatccttgctgacatttaatattttctgtttatgtgttgaatatttaaagtgtttgaaattcatttgagggtctttgttattaccaaaatattataaaaagtttttcaaatagagcaatatgctgtaatataaatcrtcttacttgtttcttggtgccggtgatctattttcacagtaagaagagaaacttctctccacccatcctcagtccactgcacccaccctttgctgcgtcaggatgtgcaggggagag

SEQ ID NO: 521853 - DNA, 480 bp, Homo sapiens
ctggaaaagtcacatggtaacatttgctaggatattatgaaccttattagaaagcaaattttagtagattttgagtatttggagtattgactcttaatggtttttcttgactctcatgtcttttttgagaaagtcattgaagawgtacataaatatttgcttcccaggttattacagtaatgttatttttaggagggaaaattggaatcactgacctttgaaatgatgttaaatgaattatggtgtatccataaaatggaatactatgtactctataatgtttttaaataatttgactctcatagaaatattcttagtgaaagtcagtaagtaatcacctaaatgtgattctggctatgtgtagatggggtaatacttctggaggaggggattatgtactgaatactgtagtgtgggtttcagtcccttctttcaattctgatggcagtaatttccccagctgctgcgagtgttcgagtc

SEQ ID NO: 521854 - DNA, 480 bp, Homo sapiens
ctggaaaagtcacatggtaacatttgctaggatattatgaaccttattagaaagcaaattttagtagattttgagtatttggagtattgactcttaatggtttttcttgactctcatgtcttttttgagaaagtcattgaagaagtacataaatatttgcttcccaggttattacagtaatgttatttttaggagggaaaattggaatcactgacctttgaaatgatgttaaatgaattatggtgtatccataaaatggaatactatgtactctataaygtttttaaataatttgactctcatagaaatattcttagtgaaagtcagtaagtaatcacctaaatgtgattctggctatgtgtagatggggtaatacttctggaggaggggattatgtactgaatactgtagtgtgggtttcagtcccttctttcaattctgatggcagtaatttccccagctgctgcgagtgttcgagtc

SEQ ID NO: 521855 - DNA, 480 bp, Homo sapiens
ctggaaaagtcacatggtaacatttgctaggatattatgaaccttattagaaagcaaattttagtagattttgagtatttggagtattgactcttaatggtttttcttgactctcatgtcttttttgagaaagtcattgaagaagtacataaatatttgcttcccaggttattacagtaatgttatttttaggagggaaaattggaatcactgacctttgaaatgatgttaaatgaattatggtgtatccataaaatggaatactatgtactctataatgtttttaaataatttgactctcatagaaatattcttagtgaaagtcagtaagtaatcacctaaatgtgattctggctatgtgtagatggggtaatacttctggaggaggggattatgtactgaatactgtagtgtgggtttcagtcccttctttcaattctgatggcastaatttccccagctgctgcgagtgttcgagtc

SEQ ID NO: 521856 - DNA, 269 bp, Homo sapiens
gtaacattaattccatctgcactcttaatatcccccttcctctgaaactgtgctgtgtaacctaggacgtgagcaattggtagggggcattactttggccaccacagtgaccaaaaggattggtgggggacaggttaaagayacagggaagttggaggaagaactgacaagtgaggttccagaaagggcaggtgaagaggggattccagtagggaaattagattagcactttcttttctttttttttctaagacagggtctcactctgt

SEQ ID NO: 521857 - DNA, 269 bp, Homo sapiens
gtaacattaattccatctgcactcttaatatcccccttcctctgaaactgtgctgtgtaacctaggacgtgagcaattggtagggggcattactttggccaccacagtgaccaaaaggattggtgggggacaggttaaagacacagggaagttggaggaasaactgacaagtgaggttccagaaagggcaggtgaagaggggattccagtagggaaattagattagcactttcttttctttttttttctaagacagggtctcactctgt

SEQ ID NO: 521858 - DNA, 295 bp, Homo sapiens
attaaagtttctgatcatatgaacatggttcttaatctgtgtctcctaaaagagaagaatcacttttaagctacaacactgtcaaagaaatgtagaaattattaatctctagaaataytctgacatttttgctcataatataggtatgtaatggtattacatgcacacatcaaatgaatgtaatcaatatttgtcaattgttttaaagtaaagtacctattatcatagaatcatacgtaagggaagatttaacagagtaaacaaacttatcattggaagaatactttttacactt

SEQ ID NO: 521859 - DNA, 295 bp, Homo sapiens
attaaagtttctgatcatatgaacatggttcttaatctgtgtctcctaaaagagaagaatcacttttaagctacaacactgtcaaagaaatgtagaaattattaatctctagaaatattctgacatttttgctcataatataggtatgtaatggtattayatgcacacatcaaatgaatgtaatcaatatttgtcaattgttttaaagtaaagtacctattatcatagaatcatacgtaagggaagatttaacagagtaaacaaacttatcattggaagaatactttttacactt

SEQ ID NO: 521860 - DNA, 295 bp, Homo sapiens
attaaagtttctgatcatatgaacatggttcttaatctgtgtctcctaaaagagaagaatcacttttaagctacaacactgtcaaagaaatgtagaaattattaatctctagaaatattctgacatttttgctcataatataggtatgtaatggtattacatrcacacatcaaatgaatgtaatcaatatttgtcaattgttttaaagtaaagtacctattatcatagaatcatacgtaagggaagatttaacagagtaaacaaacttatcattggaagaatactttttacactt

SEQ ID NO: 521861 - DNA, 571 bp, Homo sapiens
atgcagtcatatttaacaaaggaaaatatatattcaaaatcatattctaaagagccacaaaaatgcaggatataattcaagagcaaatgaacatcaagtattcaactgagcattgattctgagtaaatcagagtcttgttatttttgtctgctattctctttagagctccaccagtaaaaagaatgggactacatacatcattgaaggatacatagggatagattggaaatcatgggtgtgtctgtttataatcaataaattgataaaatattaaaagaaaataaagcagtactctataataaaatatagcacaacttctaaggaaatttttaatatttaattgcaaaatcaaaagacaacagtttgcaaaatgtctttgaaaacaaacaaaccaaagctatttcaagtaattaccctatattttggtgtctcacattttctgagtattacttatgtgatgaatgcaatcaaccaccaagatctctcttcaagaaaggacttttttcctccagctttcatctgtcatccacytcagggaatccctttgctgcaaagagacaaattgttcaa

SEQ ID NO: 521862 - DNA, 543 bp, Homo sapiens
tgtgtctgtctagaaatcagtattgggaaatcgctagactgattgccttatgaaatckcttccaattcaaattctatgattcagttaataattacaaaacatatcatatttgaagtaaaataatttcctttttatcttccattcaatgatcttataaataactcttcgccaagtcacctttgcagttctctcagctatagggatctaaagcaacattttgacaccctcatcagtttcaagggcctattctcccaacttttcagagagccaagagcatttaccataaacatatctctcagcacaaaagataatagctggttcaactgttctctgtcagcctgaatgttggtgaagacctcagtaatcacactccactctgcacaaatccaaaatcacaaatgcagattaatttatgagaacagaaggaaggaattgaaagaaaaaaaaggctgtcttgctggaagaaagaaaaacacaaaagaagtcccactggctagctcatttggatatttttatttctaaagtgttcaagcatcctgatat

SEQ ID NO: 521863 - DNA, 616 bp, Homo sapiens
gaggaattgaagaaacacggaacaaagttaaacgctgctgaaaaagttgaaatttgcttgcagagtactaaaaaagaggaaattatgacattccaaaatggtcacaacttagcagtaaagaccagaccctaaaataagagcaatgccctaggactatggataaaactaayagtcttgcccaaataaagaataaaacctagaattacaggataaaaagagcagaaggtaatttaatttcctgacaaaaacaaaagttaaaagcctttaatggacgatgatatcatctagacatcttaaaaactatcatttacaatacagtattccttgatatctcttgggaattgattccaggacccctgcaaataccaaaactcacagatgcccaagtccctttcataaaatgacagtacagtcagcgtccccatatctgtgcattctacatccacagattcaatcaactgcagataagttttgttggttgaatctgaagatgtggaacctgcagatacagagggctgacagtgttgagatattgaaaatttttaagtcataagaagtatgataagatggactgtaattttaaaaatggactgaaataagcctgagttaccagata

SEQ ID NO: 521864 - DNA, 616 bp, Homo sapiens
gaggaattgaagaaacacggaacaaagttaaacgctgctgaaaaagttgaaatttgcttgcagagtactaaaaaagaggaaattatgacattccaaaatggtcacaacttagcagtaaagaccagaccctaaaataagagcaatgccctaggactatggataaaactaatagtcttgcccaaataaagaataaaacctagaattacaggataaaaagagcagaaggtaatttaatttcctgacaaaaacaaaagttaaaagcctttaatggacgatgatatcatctagacatcttaaaaactatcatttacaatacagtattccttgatatctcytgggaattgattccaggacccctgcaaataccaaaactcacagatgcccaagtccctttcataaaatgacagtacagtcagcgtccccatatctgtgcattctacatccacagattcaatcaactgcagataagttttgttggttgaatctgaagatgtggaacctgcagatacagagggctgacagtgttgagatattgaaaatttttaagtcataagaagtatgataagatggactgtaattttaaaaatggactgaaataagcctgagttaccagata

SEQ ID NO: 521865 - DNA, 279 bp, Homo sapiens
ttcaagtcccagctctgccgcctcagtcagtgtgacctgagttggggcatcactgcctccttggcctcagtttctctacctgtaaaatgagggcgtctggagtggtggctgcctgggttttttccccagtcactcattcaatcattcatrtattcatttttcccctttcaatcaatatgtgttgaagggcactggagttagcctaaactggatttggatttcagttgtgatgtttactcgctgtatcaggcttgactgatgcaccttctcaggtgtgct

SEQ ID NO: 521866 - DNA, 655 bp, Homo sapiens
ggagggactgacattaaccatttaawcacataaatatgatttttcacacagtaataatagctatgaagattaaaaagctagatcataagatacgtggctataagagaactccctgatagggtgacattttagataagtctcaaagggtgagaataaactgtctacatgaagaacaagaaaagaacctttcagtcaaaggaaatagcaagtgcccagaccctactgaggaaggcctggggagcgcccaagaatcctgtgttaatcagggttctccagagggacagaactaataggatagatgtatatatcaagaggagtttattaggagaattgactcacaattgcaaggtgaagtcccacaataggccatctgcaagctgaggagcaaagaaatcagtccaaatccctaaacctcaaaagtagggaagctgacagtgcagtcttcagtttgtggccgaaggcccaagagcccctggcaaacaagtgttgtaagtctaagagtccaaaagctgaagaacttggagtctgatgtttgagagcaggaagcatccagcacaggagaaagatgaaggccagaggactcagcaaatctgctctttccatcttctcctgcctgctttattgtagctgtgctggcagctgactagatggtgcc

SEQ ID NO: 521867 - DNA, 399 bp, Homo sapiens
taatttttttttttttttttttttgtagagattgggtcttgctttattgctcaggctggtctcaaactcctggcctcaagtgattctcctgcctcagcttcccaaagctcccgggattacaggcatgagccactgtgccctcaatttataacttcaattaattcttttatttgctcctccctcccccggacccactggaccataagccccagggacagaagccttgcattcctccttccagcacctggccgcacctaagagttaaagaatatatgaacggcccyttggtactggcgggtgagggctctggtgacctcacaatctgaataaaaaccagagactgttgtctgaccagaacaaatgctctttggggaacaaagggacagaatacctgaaatt

SEQ ID NO: 521868 - DNA, 660 bp, Homo sapiens
ggggcgggggaagctcagggagggagggggagggagccactgaaagccattagtctgtgggggcccatttgcctcctgaaaacaactcactgycatttgtatcgcaaacctcgtgaccagcttgatggttttttcttgttctttgctcaggcccagggaggggccatgggatgaccagaactgcaggactggcccacgttaccttgtagcaatatattagggaaggtcaaggcaccataaatacctgtcttagagttaagtgctaggaagtggagccactgcagggacagacactactagaccctaaaagcaagtcattgaacagccaggcatccccgagagccagggagaagtccctggggctgggctggtgggatgggggccttagtctggtccaaggtgggctccctggaatggcatcaggagggtggtgtggagcagctcagccctgttgccagagctccaggcatgggcatttggccacctcctagacatcactccatgagtgttccgcagtcccctcagactctgcacatcccaagctgaactctgcatctcccaatcatctcctccatgtacctgatgctccagccaggtggagctccttcttcttcctctaagtgaatcaggcccctacagacttttgtgctattctctttc

SEQ ID NO: 521869 - DNA, 660 bp, Homo sapiens
ggggcgggggaagctcagggagggagggggagggagccactgaaagccattagtctgtgggggcccatttgcctcctgaaaacaactcactgccatttgtatcgcaaacctcgtgaccagcttgatggttttttcttgttctttgctcaggcccagggaggggccatgggatgaccagaactgcaggactggcccacgttaccttgtagcaatatattagggaaggtcaaggcaccatmaatacctgtcttagagttaagtgctaggaagtggagccactgcagggacagacactactagaccctaaaagcaagtcattgaacagccaggcatccccgagagccagggagaagtccctggggctgggctggtgggatgggggccttagtctggtccaaggtgggctccctggaatggcatcaggagggtggtgtggagcagctcagccctgttgccagagctccaggcatgggcatttggccacctcctagacatcactccatgagtgttccgcagtcccctcagactctgcacatcccaagctgaactctgcatctcccaatcatctcctccatgtacctgatgctccagccaggtggagctccttcttcttcctctaagtgaatcaggcccctacagacttttgtgctattctctttc

SEQ ID NO: 521870 - DNA, 603 bp, Homo sapiens
ttcacaccttatgtccagtgcatgcaagcctggcatttttctggagggccagcagatcttctaagaagctgggcacaccgagtttctccttgaacgtgaagagactattgaaacctgtctgctatcttttggtaggtccctcatatttggcaggtgagtccagtattactatatgttcaccaaacttcacagagyccttctcatctcactcatgagcgtctggtaattataactttaaaaaggttttgttagggctgggcgtggtggctcatgcgtgtaatcccagcactttgggagaccgaggcgggcagattacctgaggtcaggagttcaaaaccagcctggcaaacatggggaaaccccatctgtactaaaactacaaaaattagctgggcatggtggcgggtgcctgtagtcccagctactcaggaggctgaggcaggagaatcacttgaacctgggaggcggcggttacagtgagcccagaacatgccactgcactccagcctgggcaacagagtgagactctgtctcaaaaaaaaaaaaatgttttgttagaagttttaggcagggcccaggcttctgtagtggggggccacatat

SEQ ID NO: 521871 - DNA, 603 bp, Homo sapiens
ttcacaccttatgtccagtgcatgcaagcctggcatttttctggagggccagcagatcttctaagaagctgggcacaccgagtttctccttgaacgtgaagagactattgaaacctgtctgctatcttttggtaggtccctcatatttggcaggtgagtccagtattactatatgttcaccaaacttcacagagcccttctcatctcactcatgagcgtctggtaattataactttaaaaaggttttgttagggctgggcgtggtggctcatgcgtgtaatcccagcactttgggagaccgaggcgggcagattacctgaggtcaggagttcaaaaccagcctggcaaacatggkgaaaccccatctgtactaaaactacaaaaattagctgggcatggtggcgggtgcctgtagtcccagctactcaggaggctgaggcaggagaatcacttgaacctgggaggcggcggttacagtgagcccagaacatgccactgcactccagcctgggcaacagagtgagactctgtctcaaaaaaaaaaaaatgttttgttagaagttttaggcagggcccaggcttctgtagtggggggccacatat

SEQ ID NO: 521872 - DNA, 302 bp, Homo sapiens
tcaagtattttcagagattaatttgcatagttataaattagatgtcccaaatattattttatgggtaacgtgtattttgcaagatgatttccttagagagagagagagagagagagagagagwgtgtgtgtgtgtgtgtgtgtgtgtgtgaattagctgttgccaggctatttttgttgctacatggttgttatgggccaaaatcttatattcacttatctttaactagtttagtctgttgcctatcttcatatataaaacatattctgcttcagatctgttgtagtatgtgggtttacttg

SEQ ID NO: 521873 - DNA, 364 bp, Homo sapiens
atgaatatgttaagagaattaagctgcacctcctttattagtgtgacagtaccctggctagttggctatattaaaatggcagacacagtgaccctgttgaactcttcatgttgataggcagtcagaaaataatggctttatagttctgcatctgctcagatctttccagatttgctaaaatttccaacgtctttgtctacttattatgacagcttgttctctcctgattkgggtctttattggcatgtgagcatggcagcattatattttggcatgtctgtgtaatactgcagaaatcaccttacttcaaacttatttcggtgcctgtccttcctgccttgaaaaaggtggatagcagtataat

SEQ ID NO: 521874 - DNA, 629 bp, Homo sapiens
ctggtctaagtggaatgttcaggtcttggtttgtaggtatatgataccttggttatttccatttatttttaagatcttattgtctgtgtgcatgcctgccttctgcagacacaaatcaaaagcttgcaagatagcacagctttttttttttttttttttttttttttttgtctcttgatagaattaggacaaagatctgtacatggaatagacctgaggctgggcaaggtcttcctccrcctatctcaccatctttgtctttgctctgtgccctacccaaacccaccttcttttagttcttcaaatactccatacctgcatcaaccagaagttttttgttgcttcccatgtcgtcttgaccacctagaatgcttgtcacctggttgcctcctgcttctcctgcagttattatctggtaatgtctggagatatttttgtttttcacattagggggtaagacactactcaaatcttgtgggtagaggccaggtgtcttagtccattttgtgttgctacaaagaatacctgaggctgggtaatttataaagaaaagaggtttgtatggctcacagtttggcaggctctacaagaggcagggcaccagcaaatgctcagcctcagatgagggc

SEQ ID NO: 521875 - DNA, 600 bp, Homo sapiens
ttagatgaggaaactgaggctctgagaagggaagaccagcacacctcagaagatatcttctcagcattatgtcaggcagattgggattcgagcctgctttgctactcacctgctgtgcgaccttggacaagtcagtttccttctctgaacctcagttccctcatccagaaaacaagcatctctcccctccctccactaagccactgtgagtagccaaagacacagtggacaggaaatgagaatgattaatacttacgagcacccattaggagcctgtgtccttagctactcrtcttgcccacaatcctccttatgagcaggatacttaagtaaaagatgggttgatgaagggaaagggggtttgtttgattttttggtattgtttagaatggagaaagatctcagagatcttctaaaggaccctcagatgggtaaagtgaggattggacaggcaaagtgacttatccaaagtcactcagttggtaactggggaagctgggatttgaactcagttgacctggctccagagcccatgcccctaactactaaacaaaggccattcacaaaggagtgtccccatagagtcccaaactcacccca

SEQ ID NO: 521876 - DNA, 600 bp, Homo sapiens
ttagatgaggaaactgaggctctgagaagggaagaccagcacacctcagaagatatcttctcagcattatgtcaggcagattgggattcgagcctgctttgctactcacctgctgtgcgaccttggacaagtcagtttccttctctgaacctcagttccctcatccagaaaacaagcatctctcccctccctccactaagccactgtgagtagccaaagacacagtggacaggaaatgagaatgattaatacttacgagcacccattaggagcctgtgtccttagctactcatcttgcccacaatcytccttatgagcaggatacttaagtaaaagatgggttgatgaagggaaagggggtttgtttgattttttggtattgtttagaatggagaaagatctcagagatcttctaaaggaccctcagatgggtaaagtgaggattggacaggcaaagtgacttatccaaagtcactcagttggtaactggggaagctgggatttgaactcagttgacctggctccagagcccatgcccctaactactaaacaaaggccattcacaaaggagtgtccccatagagtcccaaactcacccca

SEQ ID NO: 521877 - DNA, 657 bp, Homo sapiens
ccttaccctaagcgtgcaccaaccttgctctgtctgcctcacctctgagccctctgattatccagtgaggcctggcttccctgctggaggggagggaagaaaacagcacacagacacgcgcacacactcatgcacacactcacgagcacacactcacacgcacgctgacacgcacacacattcatgtacacacaaacgccaagctccaatgctgcccgctttggaaaaccaaatgcaacttaactctcccttcctgtctctgtcttggtctccctctttccctccacccccatcccctgccccccaagtctaagatctcaagtttcagtcccgctgccatccccttctctccccgctgcaccttcctccctctggttccatgttagcgcttggagtacaagtgacccccggagagagcagagggaggggaggaggcagaggggtgaggctggggagggcccagcgaatccactttgcytctggagacacagaaaatccttccaaggtggggcaagtgagcaacccagctgggagttgcttcctgtcctctcttctccctcagggccaggggaaagtggtatgccccaggatggccctggcttggttgcttgtaacagtaatgagaagttgtcatgtcctggggcagattgtcctggg

SEQ ID NO: 521878 - DNA, 472 bp, Homo sapiens
ataacaaaatacacccccatatagtcatcactccaagtgggcccatgttaacattttgcatatttgtcttcgattgttaaaacaatgaaatattacaggaaatgtcagtattcyttataactccttcttggtctcattttctctcccaccctgcccataggttcatatctaggtatataaataatgtataatatttttgtgttctcaaaacttaagtatatgctgttatactgaatgcgacgtcctgcttatattatattttccagattgatataaatgacacatatagatcttgtgaccaaggacattttcttttcactgctgtgcagcattgcattatgtaatttttaactctttatccagtttttggcagatggatatttaaattaattcagttatcttgttattcctgacaatactgctattaccatcttatatgggaatacttgtgcttacaagcaagggctcctct

SEQ ID NO: 521879 - DNA, 596 bp, Homo sapiens
ctgatactaaaccatccaccagatttgtgagtgaggccatcctagaccatctatctagcccagccaaactggtgcggaccagaagcaaagtccagttggcctgcagagatgtgaaaaataaatgttttaagccactaaattttagaggtggtctgttagacagcaagcctgatacagttccacccagcattttctttgctcaaccagttactggctgggaaccttgggcaagttgctgagccttagttttctcctcagtacaatgggggattacatacgcactcctcaaagtcgttgtgaagattggatgagatggcacctgtcagtatcacatggcggggaccccataaccaggggttcctctttcacatcacggtggtcttagatgtgacctgtgacctttcttattgcttcttggttctccctgctgcctctttctcaaaaatgtactcatccttccaagttttctggagagtatcaacatgtaagtgtaaatcacaatccctagtgctctccaagacttgcrggtatctcctccttccagggccttccctcttgaaattaggcatagtggctgtgtgcagtggctcatgcct

SEQ ID NO: 521880 - DNA, 571 bp, Homo sapiens
aattatgtttagctatttagggatctgtgtgcctgtccttgatttggagtgtcagaattaattttattcctcaaaactggcccttacaatctcatgtgatagtccctgggcatggaggaattgaatagtttcaaattttggaggtaaaacaaaacataaggcattaacaacattttaaacaaaaggtcataagccctgcctagttttgagagtgacaggaaaggaagttcacaggtagctaaacatttaaattatttagtatcaagacatagaataaattatattatttcagataaaggcaaaattattaaatgagtcttaatgtttttgaatacaggactgcctctgtgtcttatggaagcagtttattttgattgtcacttttgtctaggtctaaagatgagactttggtcaacttgagtttggtgtcagatactggcagaagtcartgccttcttcttttttgggacagagtctcactctgtcacccaggctggagtgcagtggcatgatcctggctcactgcaacctccacttaccagctttaagcaattctcatgtctcagccacg

SEQ ID NO: 521881 - DNA, 567 bp, Homo sapiens
ggtctcattgggatagtaactgggcacatggccacccaaacaaaagactacatttcccaccttcccttacaactagatatggtcatgtgaccaacatctggccaatcagatgtaaggtaaagcagcatgtgacacttcaagaaagctgccttaaagggcaggggtgtgccccttgtcgtcccctcatcctttctgttgggtggaatgtgaacgatggctggagcacaagcagccatttcagatcatgaggtggaaactatgtcccgtgaggcggtggaaaaatcagataaaaagcacctgggtgcctgaggaaggcagaactgctgtaccagctctagcctgcctgtgtagactgttacatgagagagaaatcaacatctatcttgcttaaatcactgttatttgaagttttccatcactcacaagcaaacttaatctttaccaaagtaatgtgaatttttgagtgtgtgtgggtgcacrtgatgagtggggtggggtgagaccctcaccctcctgctgggttcctgaacaatactcagcaatactccatttctcactgtcaccatc

SEQ ID NO: 521882 - DNA, 635 bp, Homo sapiens
aagcggagtttatgtcctctaagactatatttcccaggccctttgcagctatatgtggtcatgtgcttatgccctgaccaatgggatatgagcgggcatgccctgtacagccccttaggaaacgctgkcactgttctcctcccattttcccttatgcctgcaggagtgcaggcttaagagtggagccatggcagatccaggaggcagagggatcttatagaaagacagcttggcgtggctgtattaacccagggctgcccaccgccgagattctttcctggggaagggaggaaagcattgcccatcttgtttaggtcactgggcctttctgacgcacacattgactgatgatgtcgggttttccgccatgcaaggcagcacagagtcatatcagtggagaccaagttgccctgcgctgtgccttggcgctgtgtaagcccactgggcctgagaggcgaccccactaccaaagagcaaggggaccctcagttgacttgtggtgatctttatcacctggcagaataggacttcaaattacaaattaatttaaattacagaaaaacaaagtagcatttcctgaaaaacgaatctgtggacacagactcacaccctgacatggcgttgctgcccatttt

SEQ ID NO: 521883 - DNA, 635 bp, Homo sapiens
aagcggagtttatgtcctctaagactatatttcccaggccctttgcagctatatgtggtcatgtgcttatgccctgaccaatgggatatgagcgggcatgccctgtacagccccttaggaaacgctggcactgttctcctcccattttcccttatgcctgcaggagtgcaggcttaagagtggagccatggcagatccaggaggcagagggatcttatagaaagacagcttggcgtggctgtattaacccaggrctgcccaccgccgagattctttcctggggaagggaggaaagcattgcccatcttgtttaggtcactgggcctttctgacgcacacattgactgatgatgtcgggttttccgccatgcaaggcagcacagagtcatatcagtggagaccaagttgccctgcgctgtgccttggcgctgtgtaagcccactgggcctgagaggcgaccccactaccaaagagcaaggggaccctcagttgacttgtggtgatctttatcacctggcagaataggacttcaaattacaaattaatttaaattacagaaaaacaaagtagcatttcctgaaaaacgaatctgtggacacagactcacaccctgacatggcgttgctgcccatttt

SEQ ID NO: 521884 - DNA, 582 bp, Homo sapiens
ggtcatgtgcttatgccctgaccaatgggatatgagcgggcatgccctgtacagccccttaggaaacgctggcactgttctcctcccattttcccttatgcctgcaggagtgcaggcttaagagtggagccatggcagatccaggaggcagagggatcttatagaaagacagcttggcgtggctgtattaacccagggctgcccaccgccgagattctttcctggggaagggaggaaagcattgcccatcttgtttaggtcactgggcctttctgacgcacacattgactgatgatgtcgggttttccgccatgcaaggcagcacagagtcatatcagtggagaccaagttgccctgcgctgtgccttggcgctgtgtaagcccmctgggcctgagaggcgaccccactaccaaagagcaaggggaccctcagttgacttgtggtgatctttatcacctggcagaataggacttcaaattacaaattaatttaaattacagaaaaacaaagtagcatttcctgaaaaacgaatctgtggacacagactcacaccctgacatggcgttgctgcccattttgca

SEQ ID NO: 521885 - DNA, 635 bp, Homo sapiens
aagcggagtttatgtcctctaagactatatttcccaggccctttgcagctatatgtggtcatgtgcttatgccctgaccaatgggatatgagcgggcatgccctgtacagccccttaggaaacgctggcactgttctcctcccattttcccttatgcctgcaggagtgcaggcttaagagtggagccatggcagatccaggaggcagagggatcttatagaaagacagcttggcgtggctgtattaacccagggctgcccaccgccgagattctttcctggggaagggaggaaagcattgcccatcttgtttaggtcactgggcctttctgacgcacacattgactgatgatgtcgggttttccgccatgcaaggcagcacagagtcatatcagtggagaccaagttgccctgcgctgtgccttggcgctgtgtaagcccactgggcctgagaggcgaccccactaccaaagagcaaggggaccctcagttgacttgyggtgatctttatcacctggcagaataggacttcaaattacaaattaatttaaattacagaaaaacaaagtagcatttcctgaaaaacgaatctgtggacacagactcacaccctgacatggcgttgctgcccatttt

SEQ ID NO: 521886 - DNA, 635 bp, Homo sapiens
aagcggagtttatgtcctctaagactatatttcccaggccctttgcagctatatgtggtcatgtgcttatgccctgaccaatgggatatgagcgggcatgccctgtacagccccttaggaaacgctggcactgttctcctcccattttcccttatgcctgcaggagtgcaggcttaagagtggagccatggcagatccaggaggcagagggatcttatagaaagacagcttggcgtggctgtattaacccagggctgcccaccgccgagattctttcctggggaagggaggaaagcattgcccatcttgtttaggtcactgggcctttctgacgcacacattgactgatgatgtcgggttttccgccatgcaaggcagcacagagtcatatcagtggagaccaagttgccctgcgctgtgccttggcgctgtgtaagcccactgggcctgagaggcgaccccactaccaaagagcaaggggaccctcagttgacttgtggtgatctttatcacctggcagaataggacttcaaattacaaattaatttaaattacagaaaaacaaagtagcatttcctgmaaaacgaatctgtggacacagactcacaccctgacatggcgttgctgcccatttt

SEQ ID NO: 521887 - DNA, 612 bp, Homo sapiens
gccagtttctaaagaggatctaaggaggattggccagcagtgactggggcagggtagggcacggcatgcccccaactcccaagcccaggtgggctcatggtttggaggggagaagctatgaaccakagggaaacaggcattccatcccttgattgaactcactcttgttgatctgccctgtgtccattgggagtgagtggagaatgaatgagaaatgcaaaaggggtggggtctggcagaggcagcctgcattgccaccatttgaccaatttcctgtcaatttcctatatttggtcaagtggacattgaaggaggctcttgagcttaatctaagccatggttttccagcccaaaggggcatgaggctgttgaagtggggatggggtagtgaggaagctagggtgatctgaagaggtcaagctcgtgctccttgctcagtaatcacacctgtgtaccaattaggcacctgccacacgtgggagaaaggggagggcatggatggaggcagaggaacatttagtcccagtccctccctgctgctcactggtgatggccccagagttttctaacaccgggaattgtggaggccacagcagcatcagggtagtgaca

SEQ ID NO: 521888 - DNA, 612 bp, Homo sapiens
gccagtttctaaagaggatctaaggaggattggccagcagtgactggggcagggtagggcacggcatgcccccaactcccaagcccaggtgggctcatggtttggaggggagaagctatgaaccagagggaaacaggcattccatcccttgattgaactcactcttgttgatctgccctgtgtccattgggagtgagtggagaatgaatgagaaatgcaaaaggggtggggtctggcagaggcagcctgcattgccaccatttgaccaatttcctgtcaatttcctatatttggtcaagtggacattgaaggaggctcttgagcttaatctaagccatggttttccagcccaaaggggcatgaggctgtygaagtggggatggggtagtgaggaagctagggtgatctgaagaggtcaagctcgtgctccttgctcagtaatcacacctgtgtaccaattaggcacctgccacacgtgggagaaaggggagggcatggatggaggcagaggaacatttagtcccagtccctccctgctgctcactggtgatggccccagagttttctaacaccgggaattgtggaggccacagcagcatcagggtagtgaca

SEQ ID NO: 521889 - DNA, 414 bp, Homo sapiens
gtggagaatgaatgagaaatgcaaaaggggtggggtctggcagaggcagcctgcattgccaccatttgaccaatttcctgtcaatttcctatatttggtcaagtggacattgaaggaggctcttgagcttaatctaagccatggttttccagcccaaaggggcatgaggctgttraagtggggatggggtagtgaggaagctagggtgatctgaagaggtcaagctcgtgctccttgctcagtaatcacacctgtgtaccaattaggcacctgccacacgtgggagaaaggggagggcatggatggaggcagaggaacatttagtcccagtccctccctgctgctcactggtgatggccccagagttttctaacaccgggaattgtggaggccacagcagcatcagggtagtga

SEQ ID NO: 521890 - DNA, 569 bp, Homo sapiens
ttaacacatattttgtacattatatgttaygtgtattatctactgtattcttacaataaagtacactagagaaatgtcatgaagaaaatcatcaaaaagaatatgtatttaatattcattaagtggaagtggatcattaaaaaagtcttcatcttcatcttcatgtttagtaggttgtggaggaggaggaagaacaggggctagtggctagtcttgctgtcgcacaggtggcagaggtagaagaaaatcgatgtataagtggaactgcgcagttcaaacccatgttgttcaagggtcaactgaataaatctctctttatatatagtctgaattaattttcctatttgtttattttgatctttctcatagtactgtgtgctttccccaaaggtcagattatttttggttggttgttaatatttacagtgaataggaaatctagtcaagttttgctgtgggataagtaggctttagatagatagcctgaggttattttggggaaccagggtgagaagtaccttatcattagatggtaactgtcctatttccttcagttcattcaatttaag

SEQ ID NO: 521891 - DNA, 589 bp, Homo sapiens
tcagagaagttttccttgatttcccagagctggtcaggaatttttttctgtcagtgccttaatatcactaggtttccctccattacagtatatctcattttataattatatagtcgtgtgaagaaataggaacaaataccatccagcatctgaagttgcaatgargcattcagaagaaaagtaaaggcaattctgcaagcttggaaaaagcatgttcttcactgtaagattgcttgaagaggatagcaaaatgacttattaataatgaaccacgcagaagtctccacgaaacattttcttctccctctgaaatttcccaacctttttcttttctcatccagggatattcggcattatgctacactacttcttcctccctccagagtgcctatttccacacctccctcctgcaaatggtgttctttccttctattctccattgtggtctataccaagccattctagactggttggaatgtttggcagctctatagttcttcacctatcaaactacgttctctagctttattttcctcatagggaatttttagtgagtatactatgtcgttacatatgtgatatttggtta

SEQ ID NO: 521892 - DNA, 579 bp, Homo sapiens
ctggctctattccagtcatcccccaacatacatccctctactctactacatacactctacttatggattaattttttttttttgagayggagtttcactcttgttgcccaggctagagtgcaatcgtgtgatctcggctcactacaacctccacctcccagattcaagtgattctcctgccttagcctcccgaatagctgggattacaggcatgtgccaccacatctggctaattttgtatttttagtagagacagggtttctccatgttggtcagcctggtctcaaactcctgacctcaggtggtctgcccgcctcagcctcccaaagtgctggtattacaggtgtgagccaccgtgcccagcctatggattaatcttctaaatcacaatatttctgacacctttaatggcatcccaaggcctaccaatgacctcagactccttgaggccttccagtttctaaagctaatcttcctgcccagacatctctcccgccactccccattatgaggcacatgctccactaaacctgatgtaattgctactaacctactttaatgtcccctgaaaactcctgg

SEQ ID NO: 521893 - DNA, 604 bp, Homo sapiens
gctctattccagtcatcccccaacatacatccctctactctactacatacactctacttatggattaattttttttttttgagatggagtttcactcttgttgcccaggctagagtgcaatsgtgtgatctcggctcactacaacctccacctcccagattcaagtgattctcctgccttagcctcccgaatagctgggattacaggcatgtgccaccacatctggctaattttgtatttttagtagagacagggtttctccatgttggtcagcctggtctcaaactcctgacctcaggtggtctgcccgcctcagcctcccaaagtgctggtattacaggtgtgagccaccgtgcccagcctatggattaatcttctaaatcacaatatttctgacacctttaatggcatcccaaggcctaccaatgacctcagactccttgaggccttccagtttctaaagctaatcttcctgcccagacatctctcccgccactccccattatgaggcacatgctccactaaacctgatgtaattgctactaacctactttaatgtcccctgaaaactcctgggccttttcaccatcacacatgtgccttt

SEQ ID NO: 521894 - DNA, 565 bp, Homo sapiens
gggggactcagaataatgggggtctccccctgcttgtccagatacactgtacctcaatcctctccttccccaagcctctcctcctttaactcactttcctccctaggcccccagcttcccgtgttggtgcaacctttgccctrcacaggttgtgtcccctttattccccaataccttgttgggctttactgcccgctgcagattctcaatccatttgtctctttcggccgcagaccgacaggcaaagcattttgttcctgatgaagttgttacctagaaaggagtgtggagttgagggaaagggctacagaggggaggagactctgctaccttctcttcctccctggcctaccctttcctccagtcccagaagtttctgtttccttgatgtccccacctgtgccactttctctagacctctctgccccccaccttccatcacccctgtcctttggccctccccagcccaccagacccagtacctcaaaacagaactcctggcccaggatggagctgtgcactggcttgataatggaatcttcatccaagttgagctccaatgcct

SEQ ID NO: 521895 - DNA, 394 bp, Homo sapiens
atttggaaccactttagctgtgcattacctagaggcagcattctcttcctcgatgctgaatttaaaccattcctgtcatttcagactctctaatgaaatctgtttctcacaggatgtctctgtcttggaaatggcatgtggtctccttgcaaaatgaaaaggaatttaaagcatataaatcacctgtttttcttcctctctcaccctacacacacacacacacacacacacacatacacacagacacacacacacacacaccctttytgttaaaaaaatttcagaacagaagaagaaaagcatggaagtgataaaggtatgcttctcagaacagggaatggtgagggaggagtggctactgcctgtcaatagctcacaagcagcaatgctgact

SEQ ID NO: 521896 - DNA, 410 bp, Homo sapiens
tctttctcattttcctgtttctatcacaggagaggagcaactccaggggccatgccagtccttcaaggacaagagctaaaactaccgtgaaagctgcttacacattagcagggcacacacataaatccatcacatctattttttaaatctggatgaataaaacagatacaggccrggcacacagtatatcttggagctgtggaaacagcttatggagtaactcaatagagtgaaggattctcactctccctctctctctctttcgaatccctatcgccaagcagcagtgaattaaaattgcctgagaaatcaagcaggtggtaatcgcttctctgtcagataagttatccgaggacagacttttttctgaggcggttacgctgtcttcctcagctccatgatgcagaaac

SEQ ID NO: 521897 - DNA, 556 bp, Homo sapiens
gctgttctctactttcttgctgaatgagcaaatgctctaaagagaagtaacagaagaaaaagatggttgtgccattgaccagatgccgttctcgttgcccattcatttcctgcccgccctgcacacatcctgcccctaggaagcctgctcctgaaacaagtctctacccggtcagtgattcattgagatgtccctgaaatcacttgcttgactccatgtcaacagaaagaaaaaggggctattcatgaataagagtgagaagcacctgaagrtcttgctactttgtttttatggagaggattccataatcatattttcatgggcatcccacagtgttgcttgcgaaaaataagagcttaggcctaagctcttggttttggctccaaacgtgagcttactccctccataacgttcctcccaaacctgacccccattcactagccagataaatgggaaagcaaagtgctgtgcatgtttttttttttttttttttaattattaaccttttgtttcttcatagcatcctgttgcttgtgtgctttttggtttggtgggg

SEQ ID NO: 521898 - DNA, 555 bp, Homo sapiens
tcacatttataactaatagcaaagaattattccaaaacatattcctgagatgaatttttggtcaaaatttaaactgaagcaaatttgtaagtttgcaaagacatcaagttactttccccacactcataaacttcttgaattcagttagcactagacgtagcatattacaagaaaggctgtttgttttgctgtttacagcccaaaaagtactggatatctcccaggraattccaattttaggaggattccaacaagcatgaagaactgagtggttcagatttaggcacagattggaatcataacatggacattattccaagtccaacgtgtctgatctttgagattcagctttcattcatgcaggttccaacagtgaggcatttataaataaaacctggagataaaacaggattcaatatgtcaatatataatcttcattactggcataataaaaattaaaatgtaccactttcacataagcaaaaaagtaatttttgttacttttttctaagatagatggcagttacttataggtttttttttaatttatgctgt

SEQ ID NO: 521899 - DNA, 374 bp, Homo sapiens
ctattgttcataccacttactcatcattagctgtaaagttcaaggtagtgagagaggatattggctagattaaacaaaaggtaggaagagaggtgtgctgtgaagagaaatgggagagargcagacttcactgttgaaacttcactgtgtttaatgacactgcacacaagtgaaagtgcattcctcaaaagccagcccctcctcccttgtaggacctcatttcacagcagagttgaccctcagttaatcataaaatggtataaataaggagcctgaatctcccaatcatgtctgttaatttgagcattaccctgcccgcccctgttggctctttggagtcgcccccttttagaaactatttcagattcttaggc

SEQ ID NO: 521900 - DNA, 374 bp, Homo sapiens
ctattgttcataccacttactcatcattagctgtaaagttcaaggtagtgagagaggatattggctagattaaacaaaaggtaggaagagaggtgtgctgtgaagagaaatgggagagaggcagacttcactgttgaaacttcactgtgtttaatgacactgcacacaagtgaaagtgcattcctcaaaagccagcccctcctcccttgtaggacctcatttcacagcagagttgaccctcagttaatcataaaatggtataaataaggagcctgaatctcccaatcatgtctgttaatttgagcattaccctgcccgmccctgttggctctttggagtcgcccccttttagaaactatttcagattcttaggc

SEQ ID NO: 521901 - DNA, 534 bp, Homo sapiens
ccctgaatggtgtgaatttcctctccaggcagtccaaaaacacagataatgaccacgttgtactggagaggcctggcctgctagctttgagaccagaaataaaatcatacattgtattcctttttgaggaggtcaacttgctttatgcacactatcaaatcaattctcaaagcattccattgaaatgagcaagaggcagctacaatattcactttacagatgaataacctgaggctccaaaaggttaagcagttttccaaggtcacgttaggccaattccacataactgcaattacctgggcagtgcaggcaaaaagcaacaaacacagagcatagaaggcttttgcttaaatagaggtacagtacctgcatcactaacgaaaaacaaggactgggtcagatttatccaaataagctggcctatatgcccagatgattgacmattttctattctacttgcaactggaaacagctaggcagagagagaacaggaatgaggtcacagatctgctatttataggataccagccacca

SEQ ID NO: 521902 - DNA, 592 bp, Homo sapiens
ctggagtaatttcttcttcaccattgtctctcaaatctatctattaaatctgtatctatctaaaaacattaaggcagacatacagaaaatagttcagtgtcccatgatctctagctttcaaactggtattcttacttacaattgttctctcatcttcaaaacaacctagctggtttggagaacagtctttycatcgttaaaatgtggccatgtacatttcaattcaaaattattcagtggctctccatattctgacacattatattaaaatgcaaccttggactcaggcctcatataacaatcgcttgaaccatgcagacatattcactgatccaaccaaacttgtgaccttcccccttgaccccttgtatttatgctgatgtgaaatgccattgttgttatgtatcctgtaaggatcatctcaaatataaaaatgtccttaagtatttcctgctctcctttcttactggtcgtccagagcattttatttgtaatttcttgatgatatactcatttataaatatgacatatatacatgatatatatatatatacatgatatatatatatcatgtatatatgatttgataatt

SEQ ID NO: 521903 - DNA, 588 bp, Homo sapiens
acaggctagtttcaaaagggctggaacttcacagaagaaatggtccaacaccctctgtccacatcttggggccaccactgtgagagtggactggacaagggagttagcaaagccactgatccaagtgccagcagccatgtggatacagcgtctatggttcatgatgactgggtagtgaaggggcttgcawatggcagcgtaacggtcaaaggccatgatggctagaagtatgcattcagtagaacccagggccaaaaatatatagagttgggcaacacaacccccatagctaatggtcttttctggtccccggaggttgaccagcatctgtgggacagtgctggtggtatagcagaggtccagaaaggatagattagagacaaaaaagtacatgggactgtcaagctggggatccagatgggaaactaggataatggagatatttccaaatagggaaaagatgtaggccaccagaaagattacagaggggtgtctctagccagggacggtcagaaaatcccaataggataaaatcatctagcgagctttgattgttgatccacatgttagcactgggaggtgaaattc

SEQ ID NO: 521904 - DNA, 508 bp, Homo sapiens
cttctcccagacttcctacaaatctactaatgtatttcattatattagaatacaatgtatttcactctattagaatgccacacaatgacttatcaatttccaatttttacctcttaccacagagtctaacacattataagtattcaatagacatatgttgactgactaaatgaaaaatagcttttgttcttctctgtgttaaacagttctaacttaaagaaaatggaagttatctattgtggacttcaaattggttgactagaagcatttcacgctcacctcctccacttaaaagatccaaaatagtgcgtaatcatacttcaaatacattatccaagagataacactggaattcaactgaaaaatgacaggaagaaacaaaagcaagggaacaaaaaaagagagacagcctgcttggctggtatgagctggaagccaggaggaactgmccaatgtagggaatgagtaagtgagagattcccagcatctcacattcccagcatggaat

SEQ ID NO: 521905 - DNA, 559 bp, Homo sapiens
tgtttccatttgccccactattgaatgggtgcattggtttgggtctctgacaagcaggcaccaggatggggtgagatgggcgagaggcctcttgggggagaccctgggcagattaaccaggagagggaacaggagcaggcagagagggctccaggccagggtgcaggtatgacacctccactgtgctggggaagggagggtaggaagaaacgggcagggcctgtggcctccagggaaacgtggtggtggatccagagagctggcrctcagttgctgtgctccaggcagcatctcctgaaggggagctgcagggccatctccatggctgctacctggaggtcccagtccccaccttgctgtgcagtgggactatggatgatctgctgcataagctgggaagtgctgtccccacaggagccagtgcgtactccatgcaggggagaagtctagggtgccggattgggcaaaggtgaggaagggagggctgtcccccatcagcctgggagactctgggactggttgatcctcatgccacccctccagccacactgggaaggct

SEQ ID NO: 521906 - DNA, 432 bp, Homo sapiens
actcatggacacctgatctgttatggttcatagtgcccataagatgtagacaaattactcaaggaatacacaattattcctgaccctaacattagaaagtctcccacagaagactttctaatatgatgaatatctcttcctatatgttaagttcacaaaagggccctcacccactgtagaccgaggcattgtgacaaagcatttctacaggccccagtacaatacakgccaattactagacagcagagcagtttatcatgttttccattttgccacaaagttcaaaaccaagttatctttgtcctcagagggagcacatggtttcctcttcctgatttcctgtttccatatatattttgctggctttcttgccattttgttataacccaccttgggtcctttcgtatacttgatcttaaccaaaaggtgtag

SEQ ID NO: 521907 - DNA, 588 bp, Homo sapiens
aatgggtacacaagatgtggtatacccatacaggggaaacttactcaactataaaaagggatgaagcactgatacatgctacaacatggatggaccttgaaacctaatgctaagtaaaagcaatcacaaaaggccacatattgcattactcattttttaatgaaatgtccagaataggcaaatctagagagacagaaagtagattagtggttgccagaggctgggggtagaggggaatgggaagcaactgctactaggaaaggagtttctttttggggtgatgaaagtattctggaattagataatggtgtcagttgcacaagctgtatatatactaaaagccacastgaaatggtaaatttaaaatagtaaattttgtggcatgtgaatcatatctccgtttttcaaaaatgctcagaagcccatggaatgcatgacaggtgtgaaagtacatgatattctctgttcagataaagagaaatgaactgtgagcgtaccctgggacctcagcctgatggtactcacttgtgggcacaggcgtcttcagcagaaatgtggagcccacatgctggcctctctaggtagcac

SEQ ID NO: 521908 - DNA, 554 bp, Homo sapiens
tggatataagattaaagtttagagaagtggaataacttggccgaggtcatatgaatggtaaagggtagaggcctcctaagctctttttaaagttcttttcttygtgttcactttttggaagattataaacacacagaaacatgctgctcagtattactacaaaactccaatttacttttctttctatgccaatgttaaggggaaaaacaacctttacagttattttacctttaaaaacatttatctattattacatgtttaagaacataatttaagcttctaaattggttattcttactgagagagccaaaaacaatctgtccccataaaatttgctatatttagtactttttatctatgaacagttttacttataaaacaaacaaacaaacaaacaaacaaacaaaacagtagctccagcttcattctctctcttttaactacttttaattacatcaaaaagtaatccattggctttattggttctctgtggccccaaagtgtagatgcttgccagattcttttctttggtttccttgtctcaggtaaacaat

SEQ ID NO: 521909 - DNA, 606 bp, Homo sapiens
atatctccttgatatgaactatatccatgcctcttatatgactcttattatattatgccttttataagagttgtaaataagacatatccatggtgttgtggaaagagcataaactttggaatcagtcgatcatctgaaacctaaattttccacttaatggttggggacctcagataaactcaccctccctgagcttcagttttctcatctttaaaatgaggctaatgatgtccacacaaaggcacaacatggacgagtgattaagagcaggactctggkgtcagacaaatctgggtttaaatcctggctttgccaattactagctatgtaagagagtggtcaaattatttagctactctaagcctcagtttccctatatggagaacaagagttggacctacctacctcagtgtctttgtattaggagacaatgtatgtaaagtgcctggcatataggagcactcgatgcatgttagtttctcccttccccctatgatttacttgtttcttggggggctaaaagcatgtctggtcaatttctgaatcactgagagggacccatcataagacattttattttgcttgcttgcatttagtttgcttgca

SEQ ID NO: 521910 - DNA, 671 bp, Homo sapiens
ttgctcataatccattatctatgtagaaatttgaaaaccatatattttatcaggcaaatttattctccagagttggagccaagcataccaaccaattgcgccacacaaatgcaaatttattctcataaataaatgtaccaaatgacatacagataacacaggggaacagtgagccaagtcatggacaggtggaatagatttgccttattaatgtagttcttttcacctatattttaaatacctttgaggtcattaccatctatgtgtattctactaatgagctttagcctccactgaagttctatcacttagcattgattagaaactgactgcttaatttcccaaccattaatgaggcacactttctctcattaagttgaatcttccttttgttagtgmtactaatccattgatgactctttagcatatcctggtgaaggctgcttgcccgtaaaaccaaaatatggcacagaaactcaacggaagctataccagcagtgctgtggcccttggatgtaactgacaagtaactgacactaataacctcccagagaattccttttgtctacatcttttcacacacattttatgtgtgtgtacactgacctaggggcagctcttgtcaaagaactaacactggacagcttgccctttccaactaccagaaagtg

SEQ ID NO: 521911 - DNA, 634 bp, Homo sapiens
tagattctatctactatggagggaaatatggctctcaaactcaaatttggaaaggacctcaatagttacctagtccaactttcaaccaatcaagaaatcctttttacagcattcctatatctagcctattctcaagcacttctgtcatttgaaaataactgcataaagtggcagccaagtctgttgttagccctaaccattagaatcagaggtagaaataaagagacacagagactgaaaccaacatagccaaaggcacacaagtaagaaaacagagatagcaaaagatagagtcaggtggataggacacagaaagggagggaaaaaaatcgtagaggagaaagagaaaaaacatgaagaagcagagagagaaaaaattagaagtggagactcaaaaagttgacatagcaaaaaaggggaatagataagaggaatagtgagtgatgaaacattgagagacagcagaagggactatctcaggagagaatgcaaggagaagcaagtataaagaaaaaaactggcataagtaactatagggtttctttttgatttctrtagtgatcatagtccccagctttgggctccatacatagtccacaaaaatgaaaatttcatttcacagcctccctagcag

SEQ ID NO: 521912 - DNA, 539 bp, Homo sapiens
cacaatgttgtgagcaagactgatttttttttaaaaccacraagctttgagatagcttatcacacagcaaaagatgacagtgagtatcattcttatttaagaggtgagaaaatggctgctaagagggaaaggactgttctgtttaccccagaatcagaacccagggcaggctaggtcccaaagcactgtttaaatcatggtacaaatttacaatttatttatgtttattattgtagaataatttaaaaaaatggaaataaggaaacacaaagtggggagatcatttgttgtcaacaccacaagtgatagtaactgttagcccgtggctgtgagtcctctctctgactctttccctgtgaagatatcaagtgagttattgaaatgtggagattctacagatatttagagacagcagtggatggcaggaaccctcaagcccagtctctcatcagatgtttttggtgactttgcttttagctgtcattatatatttccaagatgggcaggggtagggaagagggatcaggcctagaattcac

SEQ ID NO: 521913 - DNA, 539 bp, Homo sapiens
cacaatgttgtgagcaagactgatttttttttaaaaccacgaagctttgagatagcttatcacacagcaaaagatgacagtgagtatcattcttatttaagaggtgagaaaatggctgcyaagagggaaaggactgttctgtttaccccagaatcagaacccagggcaggctaggtcccaaagcactgtttaaatcatggtacaaatttacaatttatttatgtttattattgtagaataatttaaaaaaatggaaataaggaaacacaaagtggggagatcatttgttgtcaacaccacaagtgatagtaactgttagcccgtggctgtgagtcctctctctgactctttccctgtgaagatatcaagtgagttattgaaatgtggagattctacagatatttagagacagcagtggatggcaggaaccctcaagcccagtctctcatcagatgtttttggtgactttgcttttagctgtcattatatatttccaagatgggcaggggtagggaagagggatcaggcctagaattcac

SEQ ID NO: 521914 - DNA, 539 bp, Homo sapiens
cacaatgttgtgagcaagactgatttttttttaaaaccacgaagctttgagatagcttatcacacagcaaaagatgacagtgagtatcattcttatttaagaggtgagaaaatggctgctaagagggaaaggactgttctgtttaccccagaatcagaacccagggcaggctaggtcccaaagcactgtttaaatcatggtacaaatttacaatttatttatgtttattattgtagaataatttaaaaaaatggaaataaggaaacacaaagyggggagatcatttgttgtcaacaccacaagtgatagtaactgttagcccgtggctgtgagtcctctctctgactctttccctgtgaagatatcaagtgagttattgaaatgtggagattctacagatatttagagacagcagtggatggcaggaaccctcaagcccagtctctcatcagatgtttttggtgactttgcttttagctgtcattatatatttccaagatgggcaggggtagggaagagggatcaggcctagaattcac

SEQ ID NO: 521915 - DNA, 539 bp, Homo sapiens
cacaatgttgtgagcaagactgatttttttttaaaaccacgaagctttgagatagcttatcacacagcaaaagatgacagtgagtatcattcttatttaagaggtgagaaaatggctgctaagagggaaaggactgttctgtttaccccagaatcagaacccagggcaggctaggtcccaaagcactgtttaaatcatggtacaaatttacaatttatttatgtttattattgtagaataatttaaaaaaatggaaataaggaaacacaaagtrgggagatcatttgttgtcaacaccacaagtgatagtaactgttagcccgtggctgtgagtcctctctctgactctttccctgtgaagatatcaagtgagttattgaaatgtggagattctacagatatttagagacagcagtggatggcaggaaccctcaagcccagtctctcatcagatgtttttggtgactttgcttttagctgtcattatatatttccaagatgggcaggggtagggaagagggatcaggcctagaattcac

SEQ ID NO: 521916 - DNA, 516 bp, Homo sapiens
ctgccgaattctggcactgggtgcctgtcaggctggtgatggatggcaacaacacatcatcccagcggcagcccggctgtgagctatgggggtcatatatcacagcaggcctggctggtcttccctgtacaccgtggaggccacagttggcaggcagcttgggctctgtctggggttgggggtgaagaggggcataggctagcccgggaggcccttccctatcttcttatggttcagatgaggaagctgggggccagagtgggctgtggtcagccccacacctattttctcctgcctccaataccctcaccatccaacccctcactctggaagacattgagaagcctaacttgagtctacccttttccccacttctttggtccaacccatcatcaacattcctgttgtttctgccccctaaatgtctccagaattaatctacttttctactcatcatgatcrccatccttgtctaagccaccacctctccctctctcttgctgtgctctcctactg

SEQ ID NO: 521917 - DNA, 565 bp, Homo sapiens
tcgtgccctggctcctatgggccggcatctcacatgcgatgtctcctttcatctttgaagcagttctacaaggtttggattgtggtcccatttccaggaagggaaaactgaggctgtgaggggtaaagagactcacccagggttcctgagtggtgcagccaggactgtcctgcaggcttgaatccgaaacctgtgtgtgccctctccatctccaagccaggagacctcatgacagaaactctggaaacattggcattgccattcatccctcatggacaactcacagttcagttccacagacaactggacgaggcgatcctcaaatttcctgggtacttcccttccgatgccaaacagattctgaccatgcagattcttctctcatctcatccatcacctcctgcaatccacaatattgcttcctctcacttcgctccttgccttggttaaatgtatgttccagaccctcgcaccatgcacaggcaagataatttctgcrgtgatggaggctaatcagtgtataatccctggctcttgcaccctcctctccttgcactggaacact

SEQ ID NO: 521918 - DNA, 641 bp, Homo sapiens
gaaggcaccaggtgctcagggcactttcagacacgctcctcaaagcccagagacatctggctcccaggacctcctagcagaggcccctgtgtgatgccaagctccccgggcccatctccccatttacatgagagcagcagggatggggagagacaccatggatgggagccctagcagggaaggaggaagcagaggtgcctgcgtttatcaggagcaccctatttgagaaagggtaagccttggcaaattgaaattcaaaattctttttggtgggggaaggcagaaagaagggagagacagagatgaagatagagatacagatatacacaagtatatatatacatacacacatatgtctggctgtctatctatccatccatctatctgtcaagagaaagacagagacagggaaacagggagaaacagagacaagagagacagagaaacagaaaggaaatgaacatattctcaacagctcaaggcacattatgttgaaaagtggcctgagcttggcctcccaggagccagccctgtccctggccagagggtgatcttgaagagactctctctttcttggaacctgggtcccctcattaccaactcgtasttcccagcacagtctgaagataaagggatgagag

SEQ ID NO: 521919 - DNA, 607 bp, Homo sapiens
ttagcttttattattactatgagaatcataagacaaatgaactactattatacttcctacctgggttygggggaaaggatattttggttggggttttgaggaatgagtaggagtttgtcaagcttacagaggaacttccttccaaggttggtggtacaacatgagtcaatgtcattttatagatgagaaaatagaagtccagagaggggaagtggaccttagtcataattacaaatcccaaagaagagtgtggcaaacctataggtttatgtcaatggtcactctgatcctggccctgcgacctcaggaacaaaagggttaatggattgtttcattcttgtgggaacacaatggtctctgcttctcttgcttctattcaatgtgtccctgttccctaagctgtgagcacagagtcagccatcccaaagactgggataaggatggacctggagttgcagggacagccagccactggcaaatctacacagccctttctccaactgaagcattcttggcccgaaagcagcttgcagatgctggaagaaatgaggaaaatgttcctcggatcagctgattggtatttagatctctccagatccaaaagtcg

SEQ ID NO: 521920 - DNA, 577 bp, Homo sapiens
tgctcggccccagccccgcttccatcaggtgtctgttctcactctgggtggggggctcctctgtggctgcaaatacagccggggttggggcctggtggtcccgggtgggggcttcctagctggtttaggaccctctaggtggcatgtgctttggagctaaaggtaggggatctggcaaaggcgatgctggtggaggcagggaggcagagggcagcccccaaattaggtgagtgtgtgaagggcatgagyaggcctgcaagaaaggtgcagaagagaggggaagggctttaggagcaaaagggaggacaaggagacaattgaggtaagggagagagaatgatggagatggtgtgggagggaaaaggaggtagagaaatgaagaaagagagagtgagcccctgagaaagagacagagagagagtcttaggagtaggggcaaggagaggaaggattaaggagagaatttttttaaatggagagagacaaacagagaagagcaagtaagggccagaaaaaaaagaaaaccgaaaaagatcctgagatgattttccggaatcctaacaggaggaggtcggaa

SEQ ID NO: 521921 - DNA, 618 bp, Homo sapiens
aaataaatgggacaaagaaaattattcttatacttttgcacacactgtccagcgattgttcatgtgtccctaacgagcccacagtcttcatattcttagtagaacttgtttaactctgtaatcaacaatttttcatctttacactttattgtgctctttagaaaatgaaggccgggtgcagtggctcatgcctgtaatcccagcactttgggaggctgaggcaggtaaattgcctgaggtcaggagtttgagaccagcctggacaacatgatgaaatcccatctctactaaaaatacaaaacttagccaggcgtggtggcgggcacctgtaatctcagctatttgggaggctgaggcaagagaattgcttgaacccaggaggcagaggttgcagtgagccgagatcatgccatgacactccagcctgggygacagagcaaaactccgtcaaaaaaaaaaataaaaaaagaggttcatgtgactgtaattgcagaaaatttgcacagtcctgcttttcttcagaatgaatatgaagtgaaactagctgaaaacgctccgctacataccctggtgataggggttaaaactacggatgggggttttggtatttatggtcac

SEQ ID NO: 521922 - DNA, 598 bp, Homo sapiens
ctgggataatggtggtgatggaaggctggatttattggaggtaccaaggatttgaaattatgatccccattgtctgaaaaccttgcatgcactctgcaggagtccatctttgctacagagatcccttgcccataccacaaacccctatcccacacagcctcaccactcatcccatggagccagttccttcatccaacaaggcttcaggtaccagcaagacagamctggtcactgctctgaaagagtctatagtctagaaaggatgttagagaagtaaacagaaaaataagaatttcagatggagatatatggtatggagaaaatattaccaggtcatgagacgaacagtgactagaagcggtaaggggaggtaagttttcaaaatattttttcgtagataaaaatcacttggttaaaaattctaaaagtattaaaaataagtataaaaccttatgaaagtcaatctcctgcccttgggccctaaggatctagttaccctaccctctgaaaaccctgacaacaaatgtttggttatcaggacatcttatgtaatctttagagataatttatttgtatgtgtgtgagagagaaaatgtgt

SEQ ID NO: 521923 - DNA, 598 bp, Homo sapiens
ctgggataatggtggtgatggaaggctggatttattggaggtaccaaggatttgaaattatgatccccattgtctgaaaaccttgcatgcactctgcaggagtccatctttgctacagagatcccttgcccataccacaaacccctatcccacacagcctcaccactcatcccatggagccagttccttcatccaacaaggcttcaggtaccagcaagacagacctggtcactgctctgaaagagtctatagtctagaaaggatgttagagaagtaaacagaaaaataagaatttcagatggagatatatggtatggagaaaatattaccaggtcatgagaygaacagtgactagaagcggtaaggggaggtaagttttcaaaatattttttcgtagataaaaatcacttggttaaaaattctaaaagtattaaaaataagtataaaaccttatgaaagtcaatctcctgcccttgggccctaaggatctagttaccctaccctctgaaaaccctgacaacaaatgtttggttatcaggacatcttatgtaatctttagagataatttatttgtatgtgtgtgagagagaaaatgtgt

SEQ ID NO: 521924 - DNA, 514 bp, Homo sapiens
ttgaagtcttttcctctctgttgtgattgtaactgttataaatagacaaccgtaagrgattcaaaaggggaaaccttttaaaggcttactccagggcttgataccctccccactttatttttcttagccctaatgctgaaggaaaacaaacacttatcgacatactaatggtgtttatttcccatctgtcttggaatggtggcaatgtgccaagccctgagacagttcaccacagcgccaagtgagctgaaggcagcccctccattcactgtacccatggcttcccctttgggggccatggaaaagttcaggatcttgaatttattttccccacctgtttcacactctgtacctttgccacacctaagccaattttcccaggcccggtgtagatcaaatcacttccattctgcttatgaagtcacagccaccttcatgcccctctagaaacaggtccattgaagtcagtcgaggaaactcagaaaggctctttgctcctgctttgcccagagtc

SEQ ID NO: 521925 - DNA, 605 bp, Homo sapiens
tttttacctttgcactttctggatactcttccggggttcggtgcagcaagacgtgccctttgttggggatatttagatatatacagtttgctgctatgtcatcaggcacagtgagtttgtcgtagcggtggtcactcatctgttgcatgatctataaagagaaacaaagcaggcctaagaagagtaactccccacactttcaaacagaaggaaggcartgtggtaggatacaagcttggaactgacactttaggctgttcctctgttcaaattcccatctattacctccagtcacttagaaccagaaaaggaaaacttgattaagctatgagtctttggaagaattgcaagggtttttgttgctctttaaaagtatgtgtttgtctctcttttcttttaaggttttaaaaccgtctattatttttctagtctttgttcgtaagacttatcagtaagatgcaaaatggccacatgtaaggcccagcaggggttttgatatctttggctgagtaagcagggctgcctcctctataggaaagaagggccataccagtaatcagaatagtcaataatgtgaatctgattaatcagtaacaccacacgtg

SEQ ID NO: 521926 - DNA, 581 bp, Homo sapiens
gagatgtttagggaatattcaaagcacatttttgggtcactcataattgatctttatattcatatatgtatrtatatatatataacataatgtacccatcttaacatatcaaagctaaaccagtattaaaaacaactgactatggtctattgatacaatatatgatgcccaagtacactcttcattgctactgcatatctaaaatcatttatttatttatccatccatcaagagtgtattgagagcctgacaacataccagcatcaagccctggaggtctttttaaggctgagccaatatagctatggataacattctaaaactgatagcatattttcatgttttatagtctttccacagactagttcaaaatgaacactgcctgagaggggctttaagatgactgactagaggtactggacacctgtttccccagcaaagaagagccaaaatagcaagtagataatcatactttgaatagacatctaagagagaatgctggaattcagcagagaagtgacagaaaacacctgagatactgaaggagagggaggcaaggtagacagcctggctggaatcag

SEQ ID NO: 521927 - DNA, 518 bp, Homo sapiens
ctgctaatcctctgtatctcccagacacctatccttggtgtttccaaactgcaaaaatatatttaatctctctgagaggtttatttaaagcccackctccctggacttgaagtgaaaaaggtaacatatcccatcccacaaatttaatgtagagaaattagaaagtatagataagtcaaatagaaccattaaaaatctttgtaatcccaacacccatgcatagataacacttactgttaataatctatcacacaaacttcaacacattcctattaagtatttttatgagaattttttttttgctcatactgttataaaattatactataagcacaaacatagttaaatagaacacagggtactattataaaccaatttaaaaataaattcatactatttaaattgagattgctttaaattagattttctgaaaaaaattatcttctgaaaacagtcttttgttgttaggtaactgcaaataaaataagtaaagctccttgtattgaattttagagtac

SEQ ID NO: 521928 - DNA, 643 bp, Homo sapiens
tgtcccttctcaaattcatctcacacactggagccagagtaattctgccaaaacaacagagagctcattggtttaaaaacccaagcttacctaacattgtctgttacatttttcttttaagtgtatgaagttttctttttctttctcaatcttctccttgaagccttatacaattttgtgaagttggtattattcttcctatttaacagatgatgaaccaggccgtatgacattaagtaatgtttagtagataatttaaaaacttataaattctgttatgtaaaaatgtaacttcattttcttataagtagataatccgggtaaacacagtcaagtccagtaatttctcaattatttkaaattccaactcagttaaattcaggtccatcccctcctttccactgctttcttcctaggtgacattcacaatgagcatttacccagcattttgtgctggcatcttccaggatgtacaagcatcccaacatagtctcagattcttggtccctggcactggcagagctgaaatggtcatattcccactggcctctggttacatgatccatgctgccttctgtagtcacatattatttgtgataacaaacaaggtaaggatttgtaaggatcagaggtaaggcaggca

SEQ ID NO: 521929 - DNA, 499 bp, Homo sapiens
gcttgggaggctgaggcaggaggatctccctagcccaggaggtcaagcctgcagtgggccatgatcatgccactgcactccagcctgggccacagagmaagatcttgtctcaaaaaaaaaaaaaaaaagaaagaaagaaaatacatcctgtgtccccaccccaccccaacttcacacatacagagagctattaagaattcagtcatacttgcaaaacacctatacttcatctgcaaagttatcatattgatgtaatgtacaaacagttttcctacttctaaaaataagtctgagatccgtaaggattcaagacccacaggtaagaatcaaatactctatgttggtggctcataaggcatcttgaactgccagagagatatgcctggaagcggacctcagctaaagagggatggggttgaggggtaaatacccagctccccctttccttgggagggacacctttgaggcatgttctgcgccgtccccagagttcccaggg

SEQ ID NO: 521930 - DNA, 499 bp, Homo sapiens
gcttgggaggctgaggcaggaggatctccctagcccaggaggtcaagcctgcagtgggccatgatcatgccactgcactccagcctgggccacagagcaagatcttgtctcaaaaaaaaaaaaaaaaagaaagaaagaaaatacatcctgtgtccccaccccaccccaacttcacacatacagagagctattaagaattcagtcatacttgcaaaacacctatacttcatctgcaaagttatcatattgatgtaatgtacaaacagttttcctacttctaaaaataagtctgagatccgtaaggattcaagacccacaggtaagaatcaaatactctatgttggtggctcataaggcatcttgaactgccagagagatakgcctggaagcggacctcagctaaagagggatggggttgaggggtaaatacccagctccccctttccttgggagggacacctttgaggcatgttctgcgccgtccccagagttcccaggg

SEQ ID NO: 521931 - DNA, 474 bp, Homo sapiens
tcactgcaacctccacctcctgggttcaagcaattctcctgtctctgcctcccgagtagctggaattacaggcacacgccaccacgcctggctaattttttttgtacttttagtagagatggagtttcaccatgttggtcaagctggtctcgaactcctgacctcaagtgatctacccaccttggcctcscaaagtactgggattacaggcatgagccaccatgcccagccctctcccagattttttaatgtagtttttgaattgtttgaaaataaattgcagacctttagccctgaatatttcagtgtgtatttcctgaaaacaaggacatcctctttcattcccacaatataatcaaaatcaacaccttttaaaaactttgccatttgttctaataatgttctttgtggaaaaaatgggggtaaattttttttatttctggtcaagatccaatccagatacacacgttgaat

SEQ ID NO: 521932 - DNA, 497 bp, Homo sapiens
attcatgagatcctaggtaacatgatcattgtttttggcctttggcttcaatactttcagccttgcaactcattttagagtttctgaatggggttaacaagggactttgctatatacacatcattaaactgttggcatgtgtcctggcayggaaatttacactgtatcaataaacccatatatttgcaaggatgtgtgtgtcttcaatgctgttcttactttgatcaatttttcctacttccctggagtttcacccagatcagatttttagagtatgtgccaacatgagatgactaaaatattcgagacagaaagaaaaatctgagccccagtttagagattctcaatcttcctccagggatgatcataagactggcttgatggatgaggggcaaatgtcaccatgcacatcactctgaattcccttcattgcagtagcaaaagcatgtttcccagtttggacatagaattaaacagcccatactcttccagtgccc

SEQ ID NO: 521933 - DNA, 632 bp, Homo sapiens
agctgaattattcatgagatcctaggtaacatgatcattgtttttggcctttggcttcaatactttcagccttgcaactcattttagagtttctgaatggggttaacaagggactttgctatatacacatcattaaactgttggcatgtgtcctggcacggaaatttacactgtatcaataaacccatatatttgcaaggatgtgtgtgtcttcaatgctgttcttactttgatcaatttttcctacttccctggagtttcacccagatcagatttttagagtatgtgccaacatgagatgactaaaatattcgagacagaaagaaaaatctgagccccagtttagagattctcaatcttcctccagggatgatcataagactggcttgatggatgaggggcaaatgtcaccatgcacatcactctgaattcccttcattgcagtagcaaaagcatgtttcccagtttggacatagaattaaacagcccatactcttccagtgcccaaagtttttgaatgaattgattcttccttataactgtcatttagacatgcctcctctcctgaccttctcctattctcattgctttrgtttgccccaaagaaaaggaagaaaagaaaagcagataaa

SEQ ID NO: 521934 - DNA, 618 bp, Homo sapiens
ggcagtaattgcagtgatcagtgattcagacttcttaagcaaagggtcttaagtaggtttcattattaaaatttccaaaggttttattattgaaataaacctgagatagaacagtatgcctccatggggcagtcatactaatgattcttaagttatgaagggatgtcacattcatcatcaatgttgcactcrtgaatacgagtaattgggaatttatcaaccaacaaaaccaactggcattctaagaatgaagaataataatctcattttaagtagcatatgcagtgctgtgcgaccctttaaaaagctgcctttgttcactgaagtattgcttgtaatagcaaatactggaaacaactcaagtgcacatttgtaaggaactgattcaataaagtaggaggcagccatccacacaatggaatactatgcagctctgatatacgaatgagaaagctttctctgtaccaacaaggaaagatccccaagacatactgttaaggacaaaatagtacacaacaggttagataatgatttacctttcatgtaaaagaacgtggaggggtaagaacatatattcatatctccttttacttacataaagaaacactgcacagatat

SEQ ID NO: 521935 - DNA, 618 bp, Homo sapiens
ggcagtaattgcagtgatcagtgattcagacttcttaagcaaagggtcttaagtaggtttcattattaaaatttccaaaggttttattattgaaataaacctgagatagaacagtatgcctccatggggcagtcatactaatgattcttaagttatgaagggatgtcacattcatcatcaatgttgcactcatgaatacgagtaattgggaatttatcaaccaacaaaaccaactggcattctaagaatgaagaataataatctcattttaagtagcatatgcastgctgtgcgaccctttaaaaagctgcctttgttcactgaagtattgcttgtaatagcaaatactggaaacaactcaagtgcacatttgtaaggaactgattcaataaagtaggaggcagccatccacacaatggaatactatgcagctctgatatacgaatgagaaagctttctctgtaccaacaaggaaagatccccaagacatactgttaaggacaaaatagtacacaacaggttagataatgatttacctttcatgtaaaagaacgtggaggggtaagaacatatattcatatctccttttacttacataaagaaacactgcacagatat

SEQ ID NO: 521936 - DNA, 581 bp, Homo sapiens
tgccatggcagtaattgcagtgatcagtgattcagacttcttaagcaaagggtcttaagtaggtttcattattaaaatttccaaaggttttattattgaaataaacctgagatagaacagtatgcctccatggggcagtcatactaatgattcttaagttatgaagggatgtcacattcatcatcaatgttgcactcatgaatacgagtaattgggaatttatcaaccaacaaaaccaactggcattctaagaatgaagaataataatctcattttaagtagcatatgcagtgctgtgcgaccctttaaaaagctgcctttgttcactgaagtattgcttgtaatagcaaatacyggaaacaactcaagtgcacatttgtaaggaactgattcaataaagtaggaggcagccatccacacaatggaatactatgcagctctgatatacgaatgagaaagctttctctgtaccaacaaggaaagatccccaagacatactgttaaggacaaaatagtacacaacaggttagataatgatttacctttcatgtaaaagaacgtggaggggtaagaacatatat

SEQ ID NO: 521937 - DNA, 315 bp, Homo sapiens
gtggtgcacaattgtagtccctgctacttaacaggctgaggcaagaggatcacttcagcccaggagtctgaggttacagtgagctatgatcacactactgcactcaagcctgggcgacagagcaagactctgtctcataaaagaaaaaaaaaaagtaaaatgcaaatgaatcatgtcactcccctgcttaaaatatttccatggttccccactggctttaagatacaaatgcaaattatgtggcaagaccactatagctcttatcacaccttcccacactctcrcagtagtagactgtgagctctaagtggtaag

SEQ ID NO: 521938 - DNA, 632 bp, Homo sapiens
aaaaaaaagtcaagaggaaaatcaataaacagacccacagataatgtcaatgttaaaaatagcaaacaagaatttttaagtaattgccaactatgttttaaaaatatccatacaataattkggaggctgaaggggaaggatcatttgagccccagagttcaagcctagcctgggcaccacagcgagaccccatctctaaaaaaattagccaagcatgatggtacacacctgtagtatcagacacatgagaagctgaggtgggaggatcacttgagcccaggagtctgagggtagggtgagctatgatcacaccactgtactccaacctgggtgacaaagtgagtctccatctcaaaaaaaaaaaaaaaaaaaaaaaaaaatctgaaataaaaaaaattcattggatggcatttatagcatcttaggtgaacaaaagaaagaattggttgttttatttatttatttatttatttatttatttatttatttatttattttttgagatggagtcttgctctgtctcccaggctggagtgcagtggcacaatctcagctcactgcaaactccaccttccgggttcaagtgattctcctgcctcagcctcctgcaaactccaccttccgggttcaag

SEQ ID NO: 521939 - DNA, 632 bp, Homo sapiens
aaaaaaaagtcaagaggaaaatcaataaacagacccacagataatgtcaatgttaaaaatagcaaacaagaatttttaagtaattgccaactatgttttaaaaatatccatacaataatttggaggctgaaggggaaggatcatttgagccccagagttcaagcctagcctgggcaccacagcgagaccccatctctaaaaaaattagccaagcatgatggtacacacctgtagtatcagacacatgagaagctgaggtgggaggatcacttgagcccaggagtctgagggtagggtgagctatgatcacaccactgtactccaacctgggtgacaaagtgagtctccatctcaaaaaaaaaaaaaaaaaaaaaaaaaaatctgaaataaaaaaaattcattggatggcatttatagcatcttaggtgaacaaaagaaagaattggttgttttawttatttatttatttatttatttatttatttatttatttattttttgagatggagtcttgctctgtctcccaggctggagtgcagtggcacaatctcagctcactgcaaactccaccttccgggttcaagtgattctcctgcctcagcctcctgcaaactccaccttccgggttcaag

SEQ ID NO: 521940 - DNA, 636 bp, Homo sapiens
ctgctacagctccgggggaggtgatgagtgcccactgagatgttctgggcagagaatgaactattctgggaccagtcctagagtcagcaaaatcaaggctacagttcaccractgaatgaaaatacagtactattgtcactccagagacccaggaaaccaagagcactttctctgtcccagcttctttgaattccattgattcttgtcctcacacttggccccatcttgtctatttccaagggtatgacctcagtttcagcccacattaacctcaccactggactcctttcttaacaggtcctcctccttccagtctctctgctccaattgatcatatgcatcgttgccatagttacccttcgaaagcacagccataattatgttccttgctcaaaaactatcaatggtcccccatgcttacagaataaagcccgaaccctgtcgcctggcattcatagacctctttaatcttctggcccctatcttttccaggtttatttcactatcacatttataattactgttcttcagcaaaacagataagttatccatcagcctttgttctcacttctgttagccttttctaatactgctctatctaaaatgcttcctttcccatcttttcaccttctttc

SEQ ID NO: 521941 - DNA, 636 bp, Homo sapiens
ctgctacagctccgggggaggtgatgagtgcccactgagatgttctgggcagagaatgaactattctgggaccagtcctagagtcagcaaaatcaaggctacagttcaccgactgaatgaaaatacagtactattgtcactccagagacccaggaaaccaagagcactttctctgtcccagcttctttgaattccattgattcttgtcctcacacttggccccatcttgtctatttccaagggtatgacctcagtttcagcccacattaacctcaccactggactcctttcttaacaggtcctcctccttccagtctctctgctccaattgatcatatgcatcgttgccatagttacccttcgaaagcacagccataattatgttccttgctcaaaaactatcaatggtcccccatgcttacagaataaagcccgaaccctgtcgcctggcattcatagacctctttaatcttctggcccctatcttttccaggtttatttcactatcacatttataattmctgttcttcagcaaaacagataagttatccatcagcctttgttctcacttctgttagccttttctaatactgctctatctaaaatgcttcctttcccatcttttcaccttctttc

SEQ ID NO: 521942 - DNA, 543 bp, Homo sapiens
cataccctgcccccctccaccctggaccccatattccaaggtctcagagagtaatagccacagagcccctacttgaattgctggtccttggtgctgcrtgtcttggccaggaagcgttctgccagcttctccaggttgcgggagtagtccatctcaatctctgccttctttcggaagaagtcctggaggtcctgcaacagttgcacccgaagctcacactgctggtccaggcatttcatctgctctgtgagctgagcacggatctctacaacaaaaacaagagaagacagtcagaaagacagccctaaataaaccaccatgcatgccaatattcacccaccttccacttacttattccccgtgccctgggaaattgaaagccctgaacaaaaaagcctaaagtctaaactggccataggatgtgaggcacctccaaaaatgccaaccctttttacaccattaaagaacattgtgaaccaggaatctgctgaatcacttatgagaagctgcttattaaaaataataacattcctatctaccatt

SEQ ID NO: 521943 - DNA, 543 bp, Homo sapiens
cataccctgcccccctccaccctggaccccatattccaaggtctcagagagtaatagccacagagcccctacttgaattgctggtccttggtgctgcatgtcttggccaggaagygttctgccagcttctccaggttgcgggagtagtccatctcaatctctgccttctttcggaagaagtcctggaggtcctgcaacagttgcacccgaagctcacactgctggtccaggcatttcatctgctctgtgagctgagcacggatctctacaacaaaaacaagagaagacagtcagaaagacagccctaaataaaccaccatgcatgccaatattcacccaccttccacttacttattccccgtgccctgggaaattgaaagccctgaacaaaaaagcctaaagtctaaactggccataggatgtgaggcacctccaaaaatgccaaccctttttacaccattaaagaacattgtgaaccaggaatctgctgaatcacttatgagaagctgcttattaaaaataataacattcctatctaccatt

SEQ ID NO: 521944 - DNA, 438 bp, Homo sapiens
agcacatccagccagcaaggaattccagcctgattttgcaggtgcctcaatgagggcagcagagtatatgctgcatcacaggtactccctctggaaccctgaagggatgggagcatgtgtttattgaatacattttataggcctttctatgtatcatctcatttaattctcacaggtagtctgtaaggtatccacaattatcctgattacactaaggagaaaactgaagtaagactctttaagtaatttaccaaagggtcaacaattatgcaacaggagctggagctaaattaaggtttgtctgacttgtcaaagaggttaatagtaggtcagagaaacaaaaacaagagaaatagaacaccagtttggagtctctgaaartatctctgtgtaaatcacagtgaccatgactcttaactcctggaacatcgccttttc

SEQ ID NO: 521945 - DNA, 518 bp, Homo sapiens
ctgccaatgcagatgacacagtcctctgaaaactgccctcacttcagagaacatccagggaattcaccartcagcagagtacagggggtgagggagtgggggtgttcagcctattgctttcaatccagagatccctttctttcctcctttcaaaattcatcttcttcttcaggaattttctctgattaagtcatgaataccacatttctaaggagaaaatgggggaggaagggcaggccaggagacagatgtaatctttcaggagagtcacacaggcatgtccttcctttctccttgatgtgccagcacccagggggcaggagctgcatctcccacaggctctgttgccagcacgtggagcagatcagcccgcgctccccattgggaacctggtctgactgccagtctttttccacccaatctgcctcacctgcttttagccccttcacaaacacatgaagtcacctcagccatctcaggaatattaattcctagtacctttccagagaatgttacat

SEQ ID NO: 521946 - DNA, 512 bp, Homo sapiens
attccactgcatagctatgcttttgtttattcaaccrgtctctttttttggtggtacctgccattgtttccaattttttgctgccataaacaatgctgtaatgaatgtagatgtgggtgtatctacagaataaagtggtagaaggaaaccagtaagtcaaagggtatatacattttaaattatttctaatactgcccattcaacaatataggagacttcttgctactctgtactcagaatgcaatgtatgagcaaatgttttttatctaatatgtgaaaaatgactacatactgtacttgcaatttaatttgtattcctctattatgaataagacctggcatcattcatttcctatgttcataggtttccatgttgcaataagtctttgcgggtgttagtaagttatttagttagtctgttttaaacaacagttcatgttctttactcattttttctttggattactgatcttttttgactttttgttgactgtgtgaacactttataaagg

SEQ ID NO: 521947 - DNA, 512 bp, Homo sapiens
attccactgcatagctatgcttttgtttattcaaccagtctctttttttggtggtacctgccattgtttccaattttttgctgccataaacaatgytgtaatgaatgtagatgtgggtgtatctacagaataaagtggtagaaggaaaccagtaagtcaaagggtatatacattttaaattatttctaatactgcccattcaacaatataggagacttcttgctactctgtactcagaatgcaatgtatgagcaaatgttttttatctaatatgtgaaaaatgactacatactgtacttgcaatttaatttgtattcctctattatgaataagacctggcatcattcatttcctatgttcataggtttccatgttgcaataagtctttgcgggtgttagtaagttatttagttagtctgttttaaacaacagttcatgttctttactcattttttctttggattactgatcttttttgactttttgttgactgtgtgaacactttataaagg

SEQ ID NO: 521948 - DNA, 452 bp, Homo sapiens
tgactccatttgagtttcaatttattaacctctagtagttatttctgagtcccagggatcccatggagamctcttcttatcctagaatcccagagaatgaggtcagtgctttgtagatctcaggttttctgagtcagagggctgcaaagcaccttgggagttcccaccatcactggtgcccagaaatcttggattttctctggtatttaagataagaaataaattctaagaacagggggaacttcagactgaggccatcataaatacatggcatacagttagaactagtggagacttaagaactccatggcagtttaatggtcattgtgttggataatttaatatgttatttgattatcctgagtattagctcttttctgtcaacctcaatcttaaaaggttttttttctgtgaaaatggaatctgatcatgtataaattaatttttttgta

SEQ ID NO: 521949 - DNA, 564 bp, Homo sapiens
gtgtggggcacaggtttccctggtgacccagggaagggatcaaattgctgtgtccactttgcaacaccagcatctaccaggtactgcgaggcagaagctcaaaaccatgcatgactttccttggctttttttttttttaataaacctctgttcaaaaataaacttaacacgtttttctgagcagcctgaacctgttcccaatttcttgtccacacaataaaaaatatacaagtgcattattttaagggtgactctagctgacctttctgtggggagaaaaacggcacctgcctggagccagaagcgtgttcggagagtttgatggcgtttgatgttaaggcaggggccacmtgggtcggcctgtcatcgaatgacgttttcacaccagtccccaaaacaggagatctggaaaatctgacatccaaggttttagatcttggcttagaaaaacagacattccaagatgcctgaagtgtttaagtggctattgctaattggatagtgttgactgtggaagtaatggatcccaaattgaaatgggagattagatgattagacgtattc

SEQ ID NO: 521950 - DNA, 403 bp, Homo sapiens
cgggaggctgaggcagaagaatggcacaaacccaggaggcggagcttgcagtgagccgagatcgtgccactgcactccagtctgggcgacagagcaagacgccgtctcaaaaaaaaaaagaaaagaaaagaaaagaaaaactgcccactgcctacctgagaagcaaagatgccaggtactaactttataagggagttcagatactgtgtagccgagaccgaaaatcagattcttgagtatttaatatagtcaatatacacagaagaacagcacaatcaattgcacactaattcaaaagttggtatttcaagattttaatgtgtttrattggtatctgctaaactcaatgaacatgtgacttcataaatgaagactgcttttacatccttcagttccaccctcc

SEQ ID NO: 521951 - DNA, 564 bp, Homo sapiens
tttacttggtcttccatgcccaagacccttttacttttcatcgcttaatatttcatggccaaaaactgttggttcttccaatcttgtaaggccatttatctttgatcttgctccattcccttccatttttgcttgagaatcattcagttcttgcctgatctcacgtctttctcgcaacaccttactaatgactgccagagtgtccactacacactatcggtctcatttgaccacttccccaggcatgtagcctacctgccaagttctttcacagcagatattttgcagtgttgtaagagggctccctagcttgctatgttttcttactacctggcattaggaagtaaacatttttcatggcagtattcacttctagtaccaatttcttttttaatctacatgggctaactgctgtatcaaacagccatcaaatcccaatgttaattgcaacttacagtacrttgtgatgtttctgtctgtatactcattcagacacacagagtttaagtaatttgttcaagatcacaaagttagtaaatggtggcatcaagatttgaacccagg

SEQ ID NO: 521952 - DNA, 564 bp, Homo sapiens
tttacttggtcttccatgcccaagacccttttacttttcatcgcttaatatttcatggccaaaaactgttggttcttccaatcttgtaaggccatttatctttgatcttgctccattcccttccatttttgcttgagaatcattcagttcttgcctgatctcacgtctttctcgcaacaccttactaatgactgccagagtgtccactacacactatcggtctcatttgaccacttccccaggcatgtagcctacctgccaagttctttcacagcagatattttgcagtgttgtaagagggctccctagcttgctatgttttcttactacctggcattaggaagtaaacatttttcatggcagtattcacttctagtaccaatttcttttttaatctacatgggctaactgctgtatcaaacagccatcaaatcccaatgttaattgcaacttacagtacgttgtgatgtttctgtctgtatactcattcagacacacagagtttaagtaatttgttcaagatcacaaagttagtaaatrgtggcatcaagatttgaacccagg

SEQ ID NO: 521953 - DNA, 626 bp, Homo sapiens
tgcaaagcttgggctcactgcctgttccacacctgtctatggcaaagctgcctgcccaagtgtcagccgttcattacagttgtaaaacccgaacttgattcaactaccacatccggtttctaaatgtgttcatcaatgttgcaaacggcccattcagaattatcactggaggacgtgggaccgagggaggccacctacatgggagcagtgctggcccagaggcatatctgtctggatcaagtgattagagactgcctggggtaaactgaggcaggaagtcacaggtaaaagagccctgcagtcccagtgaaacaggtagggcaagtagcagtaacgagctgtggaaatggggtccaggcctcaggaaatgcaggggtgaacytttgtgtacgtagttgatatagacgaggacaataacatccttaggttcaaagggacaaagtgcgtatgcatagctcccattcgaggatccataaaattaatcatgggcatccaggtgctatttttaatatttcaaaagcacttaaaggaaagtatatcttttcctttgaaaaggctgcacaatttaattgaaatgtcaagtcgctttgggcagaaattgtatcaactcgtttgataacattggt

SEQ ID NO: 521954 - DNA, 564 bp, Homo sapiens
ttaggtaacaaggggatgtaaagaaactgatctagataagtgagtttacttaggccccagaacctggcctttaatcgtctgcgagcaggactgctctgggtggtggggggagggtgaccatgttaattatccacaagtgtgttgactcaaagcstttgtcattaaatttgtgctgaataaatgcctgcggcaccagccagccgtggctgctgactctttacagtaccctccttggggtctgtaagcggcccggttccctaacccactctttcactagatatctgtgtctgagtgcatttgttcatccatcatttggccagggtctgcgggtctgacccaagagtggtgggagcagagcctaggctggcaaagctgtaaatatcagtggatgcagccagagtttggcttctcagctttgccggcatcctccagacacgctccgtgttctttcagtctggcaaccacatgtgccctaggactctgaggtcagcaagcacccagttgaaaggaaaaaatatcagtgtgttccctttatttttctttaatggttgaaggaaggactgg

SEQ ID NO: 521955 - DNA, 564 bp, Homo sapiens
ttaggtaacaaggggatgtaaagaaactgatctagataagtgagtttacttaggccccagaacctggcctttaatcgtctgcgagcaggactgctctgggtggtggggggagggtgaccatgttaattatccacaagtgtgttgactcaaagcctttgtcattaaatttgtgctgaataaatgcctgcggcaccagccagccrtggctgctgactctttacagtaccctccttggggtctgtaagcggcccggttccctaacccactctttcactagatatctgtgtctgagtgcatttgttcatccatcatttggccagggtctgcgggtctgacccaagagtggtgggagcagagcctaggctggcaaagctgtaaatatcagtggatgcagccagagtttggcttctcagctttgccggcatcctccagacacgctccgtgttctttcagtctggcaaccacatgtgccctaggactctgaggtcagcaagcacccagttgaaaggaaaaaatatcagtgtgttccctttatttttctttaatggttgaaggaaggactgg

SEQ ID NO: 521956 - DNA, 631 bp, Homo sapiens
tccagcctaagtccaaaagctttaattaaaaacagtctgtctgcattatgaacgggaagtaatgcatacttctgaaatgataaggttcacttaatctctctttactcttttggagtagaactgattgagaacaacatttgctaatttgtaaggtcaagatatctttatttgcaggatgaatgaagaaatatacaggacttaaaaatagttaaaaaaaaaaaaatagttttaaaagtacctatgagaatatactaacttcttgtagaattttctattttgaaagcaaagkgcattttcattgatgacagatatttttcttaatcatcctggttaggaaactgtacatttaaaccttcaatattattgatgaagacagttgcacattgtctgtaggatggagagccccttctcagatgaatgccaggcctcctctctgcagggggtgactttcttctgcccacctgcccccccccacctgtgcccatcagtgccctctgaaatgtggggcagatgagtttgcggtgcctccagatgtgcttccagagcagaccctgcagtgtcggggcacaggaggattgacagcattgagtcccaattcaggatgcataagttcagatttctccaggtacca

SEQ ID NO: 521957 - DNA, 577 bp, Homo sapiens
atgggatgctgcccatccattctggggaggccatctgcttttctcaactcaaatgctaatccagaaacaccctcacggacacaaccagaaataatgtttagccagatatctgggcaycccatgattttgtcaagtggatgtataaaattaaccatcacaggaagttaacagtgagtcaggttagaaggctctttaagtccaagccattccagcatcttccagattcttcctcttgtaaggactctgggatgtgtccataatggagctcagcctgctgacattagaggaaagttccaattcaaactctgtgtctgtgggattgtaaatccctgctgtcctttacacaccaaactctcaatggccagagtgtaaggagggtgcgcagcagtgccttccattgccaggacagccctgactgaatggaaaggcaaagacaagacagtaaaaagtctggtagagagagtgggggactcacaccaaggcacagagtggtgtctccctataatgacctcatgttttaggatccaccttacagtgtaatcactggtggcatggggaagttagagcatggaatttc

SEQ ID NO: 521958 - DNA, 578 bp, Homo sapiens
aatggagggagaaggaaagagtttaacttaggccaaatattgttattaaaatcatacataaagtgaaatcctttgcagtttaataaaaagtccaagttgttaaatacattaacctgacagataaagtctaatatttctgactcatctggagacaaaacttgcctgacatgcaytcttggtggcaaatcctggcatgaactgcagtgaggctgtttatatccttgatttatcccactaagtatgaatattcatatatttcaccacagttgtatccatgtgttcgattagaccctgctgtgggtctacataaaatatggcctgtactctgtattaccttcctaaaatctgaaaagttctggaacctcagatttcagatacgagttaggaacccacattcatattctcatattacagggaaggaaacaaagacacagagtggtcagagacttcgccaaagtcgaaggtccggtgtcagagctaggatttcactccccagaggctgctgcacttgccaccgccacatgtattagtctattctcatgctgctaataaagacatacctgagattgggtaattta

SEQ ID NO: 521959 - DNA, 435 bp, Homo sapiens
ttgggctcactgcctgttccacacctgtctatggcaaagctgcctgcccaagtgtcagccgttcattacagttgtaaaacccraacttgattcaactaccacatccggtttctaaatgtgttcatcaatgttgcaaacggcccattcagaattatcactggaggacgtgggaccgagggaggccacctacatgggagcagtgctggcccagaggcatatctgtctggatcaagtgattagagactgcctggggtaaactgaggcaggaagtcacaggtaaaagagccctgcagtcccagtgaaacaggtagggcaagtagcagtaacgagctgtggaaatggggtccaggcctcaggaaatgcaggggtgaacctttgtgtacgtagttgatatagacgaggacaataacatccttaggttcaaagggacaaagt

SEQ ID NO: 521960 - DNA, 623 bp, Homo sapiens
tctttgagaagtcaatgggagaccctcttagagacagtaaaatcctagagaactaatagttttttgaatcctggaaaaatgcatacttttgtctgatgaggataatgaacaagtactgtgatctatagattaaataaagtgtttaaggtcacttccattaaaatgccactgggttgtagtgtttttataagtttaagaacttcccaggcgtttggaggcctttacctgtgttgtctctgaatataaattactatacttcatcaaatctgagtcattgttrattagaaaatgcaccattatttcatgtgccatgaagagaaaaaaaggattccagttaaaatctgacagttgtttcattttacctaaaatttgcattttatagttatcaagaaaactgttaggtctgtttagacacagattttttttctctttctttttaaaaaaatttatatacggtgctgctccatgcctttctatgtgcacaataattttatttcaatgctgaatcatagtgtgttctttttgaagacattttaaaaggcaaataaatgcatataataataattacaactcaaagagatgacacatgaacaactatgattatctttgagcttgtacaggca

SEQ ID NO: 521961 - DNA, 623 bp, Homo sapiens
tctttgagaagtcaatgggagaccctcttagagacagtaaaatcctagagaactaatagttttttgaatcctggaaaaatgcatacttttgtctgatgaggataatgaacaagtactgtgatctatagattaaataaagtgtttaaggtcacttccattaaaatgccactgggttgtagtgtttttataagtttaagaacttcccaggcgtttggaggcctttacctgtgttgtctctgaatataaattactatacttcatcaaatctgagtcattgttgattagaaaatgcaccattatttcatgtgccatgaagagaaaaaaaggattccagttaaaatctgacagttgtttcattttacctaaaatttgcattttatagttatcaagaaaactgttaggtctgtttagacacagattttttttctctttctttttaaaamaatttatatacggtgctgctccatgcctttctatgtgcacaataattttatttcaatgctgaatcatagtgtgttctttttgaagacattttaaaaggcaaataaatgcatataataataattacaactcaaagagatgacacatgaacaactatgattatctttgagcttgtacaggca

SEQ ID NO: 521962 - DNA, 623 bp, Homo sapiens
tctttgagaagtcaatgggagaccctcttagagacagtaaaatcctagagaactaatagttttttgaatcctggaaaaatgcatacttttgtctgatgaggataatgaacaagtactgtgatctatagattaaataaagtgtttaaggtcacttccattaaaatgccactgggttgtagtgtttttataagtttaagaacttcccaggcgtttggaggcctttacctgtgttgtctctgaatataaattactatacttcatcaaatctgagtcattgttgattagaaaatgcaccattatttcatgtgccatgaagagaaaaaaaggattccagttaaaatctgacagttgtttcattttacctaaaatttgcattttatagttatcaagaaaactgttaggtctgtttagacacagattttttttctctttctttttaaaaaaatttatatacggtgctgctccatgcctttctatgtgcacaataattttatttcaatgctgaatcatagtgtgttctttttgaagacattttaaaaggcaawtaaatgcatataataataattacaactcaaagagatgacacatgaacaactatgattatctttgagcttgtacaggca

SEQ ID NO: 521963 - DNA, 522 bp, Homo sapiens
ctggcactggtcatatcctgtcttgtatcrtaacttgtcttttttatgtggcttgttttgccaacaagactgtaaatttactgaggatggtggtgtttgccttatggttctttgtgttctcagcggggtccagcatggcaccttgcccagagccgactctcctcaaattgttgctcagtgataagtaggagcaaaagcagctagaaatggacaaagtatcccttgatttccaccaacacccgtttttctgctgtagcacattccacccctcactcgtatgactggggagagtcttgggggctggaggttaataacatgtgctgtggttggaaggtttgtgtcctctccaaaattcgtgttgaggccaggcacagtggctcatgcctgtaaatctagcactttgggaggccaaggcaggtggatcacttgagcctgggagtttgagatgagcctgggcaacatggagaaaccccatctctacaaaaaatggaaaaattagccaggtgcactacaggtgcatgc

SEQ ID NO: 521964 - DNA, 522 bp, Homo sapiens
ctggcactggtcatatcctgtcttgtatcataacttgtcttttttatgtggcttgttttgccaacaagactgtaaatttactgaggatggtggtgtttgccttatggttctttgtgttctcagcggggtccagcatggcaccttgcccagagccgactctcctcaaatkgttgctcagtgataagtaggagcaaaagcagctagaaatggacaaagtatcccttgatttccaccaacacccgtttttctgctgtagcacattccacccctcactcgtatgactggggagagtcttgggggctggaggttaataacatgtgctgtggttggaaggtttgtgtcctctccaaaattcgtgttgaggccaggcacagtggctcatgcctgtaaatctagcactttgggaggccaaggcaggtggatcacttgagcctgggagtttgagatgagcctgggcaacatggagaaaccccatctctacaaaaaatggaaaaattagccaggtgcactacaggtgcatgc

SEQ ID NO: 521965 - DNA, 628 bp, Homo sapiens
gttggaaaaaaattggcagtcacttttgaaccaagcctctctcctttctccaagccaagtaagttagcactttttccttttcaaagggaacttcaggtcagagggagcaagaagactacaaaacacttaacacacacacacacacaaaaagaattgtaattaggataaatacctattttttttgtctttccatgtaggctgtttacaaaaccaaggtagtatttttcttttaataggtaaataattatgcaatctggtataatctggaatattttgatattgtttcctgaattgtatttgctccttccaaaattaatagaaagaagaaaggggaaaaaagcaattaaattcatattatgtacaaaactagtaaatgttgaaagttcagactggttaagtcataccctccatggaaaaagtaagagaaatcaaatgtaaaagtatatgagccttggctagagaggattggagatttttgtgtgattatgccacattttataacataaataaatacaagcattgctatttaactatgctgaatctttctcaagaaatatctgggtttctcaagtggacccaataaygggattggaaaaggggcagaaagaggctgccctagtttcctggg

SEQ ID NO: 521966 - DNA, 531 bp, Homo sapiens
gaaatgttctgccttgaagagcttatcgtgtggacactcaagttgagctatgacagtcgacaagcacacaaaatgagtggattctctgggggcagcgtatggcaactgaaagcttcccatgtcctgttggacatgagcttcatgtttggagttgataatgaggttttgcctggacacttcctgtgaagaaagcattgtgttgaaggcagcaaaaagttcaagagagacatgaccgcaatttctctaacaatcggactttctctgagcctctcagttatttatttctccttgttgaggactagaaagaaatgaaagaagataacccttaacatcttcctttctcctctatgtccttaatatgatatttgatatatacaaaagaatatgtgtgacctctttatgagtcataaagtgtccacaatccaagaattactacatcgccaaaaattagcctccactgkgtattctttcctagccctccctctctgcctcccccaacccaggatgaccaggatccaaagtcttatgttt

SEQ ID NO: 521967 - DNA, 561 bp, Homo sapiens
tgtgtcacaaggccaatcaataatcaaagagtagagaaataracccagacctcacctcttgatgggaggggcttcaaatagcacggatagaggagaggcaaagaattgggatcataattacaatctatctttggtcttatggcatagagcaggagaatctctgaccctctctagcacctctccctgaaggtgagactattccccaagggagatgggtttttgggaaactatctacatgtatatattcaaatatctttgtttcatatatgtatatgacacaaatacacacacatataacgccacttcctttaatactgtcttacaaacagctcgtttcaatgtaccctccaaagatgttgagtgaggtaggcttcaagcccagtaaaatgagatcataaggaaaatgtaacttgggtctattttggcagcatcaccacgatgacatgagaggctgaagtgtacatgggtgaagagcactccatcatctctctacctcagtctccagaacttgtctggtgtcttaagttatttattttccactttagctttcccttccccaac

SEQ ID NO: 521968 - DNA, 561 bp, Homo sapiens
tgtgtcacaaggccaatcaataatcaaagagtagagaaatagacccagacctcacctcttgatgggaggggcttcaaatagcayggatagaggagaggcaaagaattgggatcataattacaatctatctttggtcttatggcatagagcaggagaatctctgaccctctctagcacctctccctgaaggtgagactattccccaagggagatgggtttttgggaaactatctacatgtatatattcaaatatctttgtttcatatatgtatatgacacaaatacacacacatataacgccacttcctttaatactgtcttacaaacagctcgtttcaatgtaccctccaaagatgttgagtgaggtaggcttcaagcccagtaaaatgagatcataaggaaaatgtaacttgggtctattttggcagcatcaccacgatgacatgagaggctgaagtgtacatgggtgaagagcactccatcatctctctacctcagtctccagaacttgtctggtgtcttaagttatttattttccactttagctttcccttccccaac

SEQ ID NO: 521969 - DNA, 593 bp, Homo sapiens
ctgctcgggaggctgaggcaggagaatcacttgaacttgggaagcagaggttgcagtgagctgagatcgcaccactgcattccagcctgggcgacagagcaagactccgtctcaaaaaaaaaaaaaaaattgtacttggggaataacagagattcagtgactgacccgaggccccagccaatggtgtgtcaagctggatttgagccgagtctgcctgcctccaccgcccttgctcttctctgcctgccttggttgcctccaggtgcctgtggtggctgatggtttgtttggtcctaaatgcaactattctcttttttcaacatataaaagacttattttttaaaagtctagaagtatatatacaaaaacattaatagtgattatctctgcatggtgaaattatgaaggatttttgttttccatactttgtatttctgaattttatgaaatgagcatttattactttttataactagaaatggcactctttctataacagcagtaatttttgtttcccatccacmgtactattgttgggcatttaatgaagtttattgcttcccaccttcccccatcacgttaatggaaaattt

SEQ ID NO: 521970 - DNA, 436 bp, Homo sapiens
ttgacaaaatgtgttgtatgcaggccacggtaatcattctgtggatctgtgaacctgtaaaataccccaagatgatgccttggaactgttcttttttttccatctgacctttctaagctttattctgagtctcttctctcacagaagtcttcttggttcctcctagacaaattttcatcccttccatggtctgaaatgacttgatctgttggttaatttcactctatatttagaggtaacatagagagttgttcacatacataccttagatggataaggacatagaagttccctaaaatatattgtttttttaaaatttasttcaattcagctcaacaatttggttttatgtttcaaggccagcaatttatcaggttccagatgaaagacaccaaattgactattgggttcaaagaaaggagactaaaactgaaca

SEQ ID NO: 521971 - DNA, 496 bp, Homo sapiens
gaaaaagcctatatagaaaaatataacatcaattcttatacacactagcatagggagaaagtatggctctccacccatcagtatgtactgagcacctactaaatacccaaaattatgctagagtggaaagaaggcagaggacagatctgccaactccatttccctcttccaggcctcctcccaaatggagagaatcctcctgattttaaaccataagtacagctctctgaatttttattttatctccaaagtagcagaaacaagaaggatatttaaaaatgaaagaaaacagcttgtggaaataaaaatgaatatttcttgaccacctgttacrtgctaggcatagtgttgggagctagattctggggtaaaatgctttacaaaaatattcagtagttaggttaaggaaatttatttcacctttatctctgagtgggaagttttgttttcctttaattattaatgtattaactgtttcttacttttagtgagaact

SEQ ID NO: 521972 - DNA, 496 bp, Homo sapiens
gaaaaagcctatatagaaaaatataacatcaattcttatacacactagcatagggagaaagtatggctctccacccatcagtatgtactgagcacctactaaatacccaaaattatgctagagtggaaagaaggcagaggacagatctgccaactccatttccctcttccaggcctcctcccaaatggagagaatcctcctgattttaaaccataagtacagctctctgaatttttattttatctccaaagtagcagaaacaagaaggatatttaaaaatgaaagaaaacagcttgtggaaataaaaatgaatatttcttgaccacctgttacatgctaggcatagtgttgggagctagattctggggtaaaatgctttacaaaaatattcagtagttaggttaaggaaatttatttcacctttatctctgagtgggaagttttgttttcctttaattattaatgtattaactrtttcttacttttagtgagaact

SEQ ID NO: 521973 - DNA, 553 bp, Homo sapiens
tttttcctacagctctaaactaaagacrccaccagtgccttgttcccgcagtttaccacccagtgaaggagacagggaaactatgaaattaggaacctaagtaaatatgcacaattaggtgtacttataatatttctaaatcatgaagactaagatggcaatgcacctcatggtgcatacgtatgctaaaagtagcacacagttctgaaaagttcaggaaatagctttttcccatctttttaggttgccatatttatctccagtgtagctaacatttctaggcacgtacctttatttaaatattaaataaatgtattaatatttaataaattatttacattgtaaaatatttaaatatttttagaggagcaggaaaatctatgtttttgccataaactaagaaataaaagcaataaaatttgaaattttaaagatgtggcattttttcttgcctacccactgtatatcaatcaaaacttgctaggtagccactttctgaagacagagaggaagatctaaagaactaaagatactatctgcacctttatgcaca

SEQ ID NO: 521974 - DNA, 473 bp, Homo sapiens
ctgatacaatttttaaatttcactttgacttaacattgttaaaaatcaaaccatactgatttttatgtagagtggtttctcaggctgtttggaatagatttgggagtggttttaaaaagagaakttcttgacttacagagccaaggatggcctttcatttagagaaattttcaaattgtgatataaaatcaacattttatataagaacttcatgtatgctactacatcatgggcatagaaccactatgtctcctgcctatctttatctatagtaaagtatcgacatggggtaatttaggtgacatttcgaaggagagttgtctaagtgaagtgcatcaataattggaaatgaaagattataattacattgatgaaacaaagcattgttaaaatagccacatctgttgagtgttattacccggaaaaatctgtaatcctattcaatttggacatcttagagggggaaaacttgg

SEQ ID NO: 521975 - DNA, 598 bp, Homo sapiens
atactgagacaaattagcctggcagtgtttcaataaaactttatttataaaaccggagattgatcccttactatatagcaatgaaaacaaactagaactacctgcaataacatggatgaatttcacaagcacactactgagtgagagaagccacgtacaaaagaatacatgctgtgtgattccatttatctaaaatttcagaattggcaaacgtaagctatgatgttaaaagtcaaaatagagtggttatcttggtagagtggtgcctagtagggggcccagagggtgtcttctgggctggattgctttattatttaatgtgagactgtgttcactttgtgaaaattaatctgtatatttacagggcttgcacattttttcctgatgtaaggtttacttcaatgaaaaggttaccataaagaaatataaatatttcagtgtctcactctgtagaatccgagttsttggccaggggtgtggcttgaggatctatcctaagcctgccttgaagaagtaaagtgagctgcctaaggtcacgttattggcagagctgagacagagagcaagctcttacagtgttgggcatggagtgagtcag

SEQ ID NO: 521976 - DNA, 604 bp, Homo sapiens
gtgtaaatttttccgtaaagactggacttggcttcattcagttcgactatcagattcttcacagtgcctcagaggtatgctcttactgctgcaaaaaaaagctgggggaggaaagtattttaaaattattgaatgatccttgcttaaacttgcaaatttacagtggccaggagccactgtaccacaaaatcatggtaaaaaattttcctcctactagtacttttaatgaatttattacaatattatttcaagcccaactagagaactggaatagaatgatacatttcatcctgtttgctatacagccggtttttattacaaaaatcttgtttttactttagtttcatttttaaggcaaatatttggcccctggttgagggagtagcgtgtcagccctcagcatttgaaaagggaattgcatgttggtggggccgtgctccctcccaagcctgtgggagaggagccttgcttgtctcatccacttctagtagccctgggcattccttgatttccagcacaaaacttcagtctctgcctsttgtttacatggccatcttctctgcgtgtctgtgtcttcagacagtgtcctctctgtgtgttattt

SEQ ID NO: 521977 - DNA, 534 bp, Homo sapiens
agaggtatgctcttactgctgcaaaaaaaagctgggggaggaaagtattttaaaattattgaatgatccttgcttaaacttgcaaatttacagtggccaggagccactgtaccacaaaatcatggtaaaaaattttcctcctactagtacttttaatgaatttattacaatattatttcaagcccaactagagaactggaatagaatgatacatttcatcctgtttgctatacagccggtttttattacaaaaatcttgtttttactttagtttcatttttaaggcaaatatttggcccctggttgagggagtagcgtgtcagccctcagcatttgaaaagggaattgcatgttggtggggccgtgctccctcccaagcctgtgggagaggagccttgcttgtctcatccacttctagtagccctgggcattccttgatttccagcacaaaacttcagtctctgcctcttgtttacatggccatcttctctgcgtgtctgtgtcttcagacrgtgtcctctctgtgtgttattt

SEQ ID NO: 521978 - DNA, 625 bp, Homo sapiens
actcaatttaagctcttcattttatgaaaatcttggcaggctatagaatgtgttcaagcattttttcctttgagtgtgtggggttatattttatggtcctcgccacaaagaataaacatagattatagtttggtcacaaacttttcccctataattctgttagttgcttcattgtctttggcatgtagagttttaaagaactcctctgaggttagttggatttcagtttcttcataggtgatttcctctacctctcctcttcctcttcttctttttcttctttttcaatacaggttggatatttttatctttatcttctaactttataattacttgttcctcaaggacaaatttattcatctttgtatayctagtatcttgcagagcacgtggcttatagtgagtagggagtgaacactgcatgaatacacacatgaaaaaaaagacataaatgaagttcatgcaaacttaactattctttctctacttttctgtcaatcccaaatttaactggcattggtgtggcttaagagaagtcaggcccccaccttgcgttcctgcagaattatcaagtcctgaaagttctggagagccaacgtgaacatgcaggatgcttcaccactat

SEQ ID NO: 521979 - DNA, 571 bp, Homo sapiens
tggtaggaaatagagccacgtccaactcttagctcctctctcattcttgtatatgatgtcaaccttcttgcttagtttctttccttaatccagggcatttctgctatagagtagtggggatttccctcgagtcttagttggttttagcagctcccagcaattatcttgagaccaacggagaatgcaggtaactgttttgggtgggtatacaggagtttatttatttcagggggcatttttgttttcctggagacctctagaagaccaggaaaatatttttccaagaaattttgctgccccaattgctccaaatcataaataacccactctccatttttattccccacaaaacctcttatcagcctttttccacttgcttacatgtattatctctattaacagtagccacaacccaaatcatgaattgtattaccccattctacagatgaggaagggactctgaaaggttgaattacagacctaaggttaccagctaggatggggaggaacagattattacattcagatctttctggcactggaagcycatgtttttcctttgcagtactca

SEQ ID NO: 521980 - DNA, 572 bp, Homo sapiens
gaagatatccaaaatacatctgtagttgaaccaaatggtgttttgtgggaggtttacttttcccctctgataaggtgtgagagcctgggagtaaacagtgagtaatatagacgaagacacagactgggtgttcatgtaggtcccttgytggctcccacctcccctattccctggttgtcatgaaaagcagaactgctgctcccacctccgctttcctcttaacccagcctttcagagcagcagtaggagccagcaccacctctgtcatcattctcagtgacaaaggatgcaaagtgtagaacatttcttagctcccatctccagcctctgccctggcaattcttcacccttgaacctctgacccacaagcagaacacctagtgtttgcagttcactccagtgtataacctctggcaagtcttctaagcttcctttaccttacatttcttcagttgttaaatgttgctaaaaataaccaactaacaagatgcttttgaagaaggagacatcccaaccagccagaactggagagaagctcaaatgggacccagcaaggagggccagagctgaac

SEQ ID NO: 521981 - DNA, 660 bp, Homo sapiens
atactttgtactaaggagacttttgttggctagcayttacttttttactaaatcttcatgatatctgtggaagataagtgatattaatatccccattttacaaataagaggactgagttttctgtgtagctcaaaagtttgtccaaattagcaaatctggttaaacagttccctaaaccacctgcccacactaactcaatgtcagttatgtaatggaaaaataaaagagccatagaaccttctattactacaaagattattttcatcataatgtctgaaattccatctaatttttaagattaagaaagcctttgaaattatttggttgattacattttattaacagagtgcttgtatgtttaaccattaactctgcaaagtgtgtaaaggaaaaccaatctaatggcattcattttccatgaccgaacaactggatttggttctggtcaattaaaatggcctgtccaggactctcaacaggacagtgattgatgtcaagaaagagcccttattgagacctactggctgttttgtaaagaaaagtcacaaggatcccattccttagtggtgtttggatgagggggacacagtgccattggcaaccagcaggatgttagggaaaaaaaacaaaaagaaaaggcatgtattgtttaatagaga

SEQ ID NO: 521982 - DNA, 571 bp, Homo sapiens
accagcttattgagatgtctgtctcaatagggtataaacatgacatgttttgcatttattatactcattatttttcaatggaccatatatatgttctgtcacagtcacttaaaattgtcttgagtggattccataactttcttatcagtcgaatttaacattgcaattttgtactggattcaaagctttcctgtcctctgttggcacaacatgtggcttaagagagagagaatgagaggaggatagtggtctgcttttccattcctcttccatcttcaccttctggaggtggccctacaggatggaggtagagaagagcaatagggaagacaaagttttaatttgtaaaattaccatactgcrtgtggggtggaaccctatgtgacactggcttggtcctattttatcacattttattgctctccattgatggagtggtctccatcaatatgctgttctttgtgaaagaatgagcatttgtctggggcactactcaaccccacatccattccatccattaattaagtctctgtctgcagagctgcatgtgtagcagtgcaggcagcagtgg

SEQ ID NO: 521983 - DNA, 612 bp, Homo sapiens
gggaacctcttcaactttagacctgaggtatcttgtttctctcttgggataatttttatgatcttcctcacttagttacactcttctattatataataacttttagaatggcacattactaatctctttctacagctcaactgtaagttgtgtgcagacaatgttttggctcacacattttatcartagagtacctgccatgtactgattactcagtaaatatatgcttagtgactaacagagacatacgatctattattaggtacacatatccagttatctgtctactttattttctaagaaaaaattataatgttttttgaaatcttcatttaaaacaatttattaataggtattttatattttctgttgctactataagtggaagtattcccactttattttcaagtgaggtttttttttattcaaacagtgttttaattgaatttcttggaagagagatttttttaacataataacttctgaaaataatagtgatagtttccctctttatttcaaatagctgtttgtcttattaggttttttcttgagtattggttaaagcttccaggaaaaaatattcaatgatagaagtaattgtgggaattctta

SEQ ID NO: 521984 - DNA, 612 bp, Homo sapiens
gggaacctcttcaactttagacctgaggtatcttgtttctctcttgggataatttttatgatcttcctcacttagttacactcttctattatataataacttttagaatggcacattactaatctctttctacagctcaactgtaagttgtgtgcagacaatgttttggctcacacattttatcagtagagtacctgccatgtactgattactcagtaaatatatgcttagtgactaacagagacatacgatctattattaggtacacatatccagttatctgtctactttattttctaagaaaaaattataatgttttttgaaatcttcatttaaaacaatttattaataggtattttatattttctgttgctactataagtggaagtattcccactttattttcaagtgaggtttttttttattcaaacagtgttttaattgaatttcttggaagagagatttttttaacataataacttctgaaaataatagtgatagtttccctctttatttcaaatagctgtttgtcttattaggttttttcttgagtattgkttaaagcttccaggaaaaaatattcaatgatagaagtaattgtgggaattctta

SEQ ID NO: 521985 - DNA, 259 bp, Homo sapiens
aaatcccttgagatgttatcactaatgaaaakaaactacacaaatagaaatctacatatcataattatatttatttattctgtgatattgttcaggaacaggagagaaataaataataaatatatttgtatgtcacatacatgaaattatatgaggatctttgtaagtgctcttaaacaaataggggatgagaagagtagaagtcaaataatgtgcattcattttctggtcttgcctcttacaactgtgaagtttaact

SEQ ID NO: 521986 - DNA, 259 bp, Homo sapiens
aaatcccttgagatgttatcactaatgaaaagaaactacacaaatagaaatctacatatcataattatatttatttattctgtgatattgttcaggaacaggagaraaataaataataaatatatttgtatgtcacatacatgaaattatatgaggatctttgtaagtgctcttaaacaaataggggatgagaagagtagaagtcaaataatgtgcattcattttctggtcttgcctcttacaactgtgaagtttaact

SEQ ID NO: 521987 - DNA, 469 bp, Homo sapiens
gctagcataatttagaaaactcaagagtagaagaaaattttatagatagaacatttttgctctcttgttttttcttccttcttgaaactccaagattcctgcttttattatggattgctgtttaaaaaattgtctttaataatacttttgggggatgtctgctgatgacaaattctgttcatttgccttcatgtgagaatgttgtggttttccttcatttgtaaaggatagttttgttaaaaatacaattctgtattgaaatttctttttcttaaggagatcactcctgttcaattcctttccccccaccccacccatataatgcattgcttctctcagactgcttccaagaagttttctttgtccttagttttcagaagtttgtctatgatgtgtttacatgtgaatttctttgggttatcttatgtgaaatttactcrgcttttacatattgaaaacatatgtcttt

SEQ ID NO: 521988 - DNA, 467 bp, Homo sapiens
tgttactgtatttaacctttcgctatattctagaaatgttattcaaagtacctcagtctctacagcccttcaaactagttgttattttattttcatttgctcataggaaagctgaagtgaagtgaattgaaatcattttccaggattatacaacttgtcactatttaagctcagatttggacataaatttatctaatttttwaatacattacttttgatgttacactatcttaggatttaataacatttaagcatgtaagaataaagttacaggccttttgtgagttaatgattttatattagactaaagcaattctaaacatataaaaatataatatgtagcagggagaaaataagccttttcacaattactctatcaagagtaaatatgctattatgatgacatactatttttgaatgtacataataagattatgtatctctcagtttattaatgaaaatattct

SEQ ID NO: 521989 - DNA, 447 bp, Homo sapiens
gaacaatcctaataagccaactatatgccaatacattcgatctctccagcacacmactcaaattctgaatttctttcctttctcctaattaactcctgaaaccatacccctcttgcaagttacagttaaaaatttcattgccttttctgtatatagtctaataaatgctccaccctccttcaaccttttttggtacctatttattacttggggcattttctattttccatcttagttgtttgtgtatgttttacatctacagttagggttcatactcttagaaaacaagttctgcatgcccatcactgtggtgtttcctaacaacaccccaaacccccgaagaaacatatgcattattaaccagaagactgtgaaagtaataaccacttaatcatttttcttcaaagaaaataatcgaattttgtttggaaaaaggaaatttatgtt

SEQ ID NO: 521990 - DNA, 629 bp, Homo sapiens
agcaagtatcatctcttttccatataccaatccagtcactatttggaaaattgtaactctctgaagctctactaaccttcctcaaatggtttcaagtttcttcataatatgggcaattctctgaataggggtcaaaagatctttatcactttaaaaagaaaaactaaaacactaaatatgtgaacacatttattgtacacgtttacgttctcttagcaggaacttttattctcattattctaattctaatgtagatactatcccaaaaatggacatgaggaaactaactactagaggaaacagatcttcaatttgtctttcacaaccacttggttgtatatatttagaccattctatgaaaattctaacttcacatatttttccacactctgacctcatgttgtgatatttggaggggcacgctacacccctaaactgaagaagtgaacacaggccatcactggagatgctctacactagctgagaagttactcggccttcttgtgtgccgctatgtcattatcatgacctacctcttgggctagaccttcttggtacactagacttggtgctatycctgacctggaagtaacatatgagagggagaggtagtccttgttatttttctc

SEQ ID NO: 521991 - DNA, 581 bp, Homo sapiens
cagattgttgttctgctctagggaggcattaattaaacaattatttggcctttctcgtgtaataccctcttgcctcactgtacccatgtcttccccatattttctagctacaataccactctcaagaaaattttaaaacatttctcaggaggacatgttcgtttggaaaacagtctgaatgtgcatgtttggtgtcatctgtgtagttaaaaagtagcaatataacaaaaaggtgcatgctgttttcaatgtatgccactatgacagattatttcagtttgctcttccagagtcaatttctagcttgctcctgcatgaaatatgccaggaaagctgacctatcttactacatcaatggggcccctctgcgctctgtattttagactatttggcccaaagggaagtcctagcaggagctgggagggaggcaagaaaatgtgatcagaataatattcattcttgtcagtccccgtctctgaggtcacatcaagatggctgcattccttgatagaagtcactwctcctacatatccttcctcttgctttgttccctgggcccagggatggtaatagcttgtcag

SEQ ID NO: 521992 - DNA, 527 bp, Homo sapiens
tgaactttgaaacttggtgtgtctgacttttaaatcctctccacagaaatacaacagcttaactcaaacccacttccacaaaaccagcagttaagctctctagttcccatctgtgtaacacggcagaggcactctttctggagttgcagcatattaaccatgtgttgtaattaaatctctgtaacraggagaaacaccttaaattacttttgggaatagcctttagattgtgaaatacatttgatagcaaaaatattagtcctggggcatggtccaaaagtttaaaaaataatattatgaaagttaattgttcttcatatgataaaagaaaataaattgagttgctagagagctaggggttaagggtttccggaataatgagttgagaacagattatagggagggcacagaagttagaataaggttgggactgaatccaagagcagatctttaagatttgaggtaagagtagtcaaggtatttctaagatcgaggatagctaatatatatttatatttacatctttg

SEQ ID NO: 521993 - DNA, 527 bp, Homo sapiens
tgaactttgaaacttggtgtgtctgacttttaaatcctctccacagaaatacaacagcttaactcaaacccacttccacaaaaccagcagttaagctctctagttcccatctgtgtaacacggcagaggcactctttctggagttgcagcatattaaccatgtgttgtaattaaatctctgtaacaaggagaaacaccttaaattacttttgggaatagcctttagattgtgaaatacatttgatagcaaaaatattagtcctggggcatggtccaaaagtttaaaaaataatattatgaaagttaattgttcttcatatgataaaagaaaataaaytgagttgctagagagctaggggttaagggtttccggaataatgagttgagaacagattatagggagggcacagaagttagaataaggttgggactgaatccaagagcagatctttaagatttgaggtaagagtagtcaaggtatttctaagatcgaggatagctaatatatatttatatttacatctttg

SEQ ID NO: 521994 - DNA, 616 bp, Homo sapiens
tatatttggtaaggttaaaagggaagcatgaaagtgagccattgcagatagaaacagatgttttcccctagctaattactaataatgtgatcttaagatcacatctagcaacaaatgcacatgcctagttaaaactataagaaatagtttaaattttagtactggacttttcttattcctgatgtatgactattatttactgagattttattttgtttcattatgctgacacagtattactaggataacggcattattattgccattttaaggataaggaaatgagaacggtaaccaggccttgtagatcccaaagtattacagtattttaaatatcaactatatttacaatattttaatcacatmaaaaaaataaaaacaaatgaccttacttcaagtaaataattttggtgttaagaagtgacaccttttcctgagaatgtattattagagaggaattttaattttttaaaaaacttacatagaatgagaaggagaaagcctattaatgtataccatatttcccccatatgattataagtgctgttgtcatccatatactgtatgtttaagattaattgttagtgttttcaatttaatgctaaagcataaacta

SEQ ID NO: 521995 - DNA, 495 bp, Homo sapiens
ctgcaaaacttcagagactacctcaaggcagttagtcagcaacccagctattrttgatatgtcagccgcactccaggtagactacagctagatacagccaccagaacaagacatgcagatcttatactcaggcacccttcccatatgcctcccagtccaagtcccatttttaagaccctcttcccagcctcaagtctgaagcagtttctagaggagtaagcctgccactcctagctttggaaataaaagtcattttcctttcactgaacttcatccttgttattggctgtgcaagtggcaggcagccgatcctgcactcaggagcacaatgaattgctgctgaaagactgggcactacacttcctatatgtaattagcactctggacgatccaagaccaaatctataaatataagtgaaaattatttcactggcacatgcctttcaaatgccaagttaagaagttatcattaggaaactataaataatagaatat

SEQ ID NO: 521996 - DNA, 639 bp, Homo sapiens
ttccaactgtaatttattcaatatttgttttctatgcctaataactttttaaaaaaatattcaatgcccatgaatttagtgccatgtggaatggtacataaaaggaaactttacattctggttttactccaggtaagaattttccagattccctttgttctatagtttcctaaatgaggagctcttggcctcttaggcactggctcagcctttctcttaaacactgaaaagactccttggaccgaaataagagcattcatggagatcattttactgacttcctttcctctacccttactcctgcccttaagctttcagcatcttttgttttgcttctgatatataccrttcagtatgattagactggggaggatactaataaccagttatgttatcaaactgtagggaactacatttcttgactttccttgaaaaatatggacttaatcttcctgagtaaagaagcatccattgttatgtagtttattttatgctatgacaatggcattttactgtttagacttcaaatagaaattttcttcagcagtattgcttaatgtaacaaaatattggcctttagaatatcttcaaacatttgtagagatggaaaaaaattaaaccatttattcaccttaggtt

SEQ ID NO: 521997 - DNA, 596 bp, Homo sapiens
gacaaatggagttaaattagaacaagtgggtgttaaaggcgtgcccaggattattttcaactcagttttaaaatgtttcagtcaatgtctaaaaaaggtagagttggcattaattctcatcaatgattataaaatatagaaaaaaaagtctcaggtggaaattttcatcttgcaaggtaactattgtaccactgcaaacttttttttaaagagaagtgactaatcctggagctttttaagtactttcagcttcaccacacttgaaaaacatgctaatattttaaaatctagaagacctgttaagtctcaggaggcagatttatttttctctcagcatattagccagaaaattaacttacaggtctgagccacacaggttaaccttgattacaaagcttttgatgctgacgtggagtgcacctcaaggtatatttgctgagctgcaggtggttgataagaaccaggacataagtatgcactaattccttttcccstatatacctctgtgctccgtgaactacctgtgtcagagtcatggggctagggtagggctgattaaaagtgcaatttttttgcctccactccagacctactgc

SEQ ID NO: 521998 - DNA, 560 bp, Homo sapiens
tcctgacactaacatcccaggcgggtgagcccccgaggcggttgcagggatttgttcacctgaagctacagttagctggttctctctcttcttgagactgaaaacagaatgatctcctctttttaaatttaaattttattaaacaacacgtgtatgtagtttaaaaagtcaaataagactaaaacatttaaaatgcagaagacaacattcctttgactttttccttccgctgaccaaagcccccacttgtactattttagataattctttcggtatttacctccacattctaaatattatacaactctttttatttttttttaaatgataatattttgactttatggaaatgaaagataaacatttagctctggcagagctctcctgaccctctccarctctccctttccccatcctctttgtagatttagatcacgatttttgaaagtcagtgtttacactaatgtgatttgttcacagatgatgacagttctgctcttgtgcaacatttgtagacacaggggcaccatgtgatgaccaaggcagagatttcagtgaag

SEQ ID NO: 521999 - DNA, 560 bp, Homo sapiens
tcctgacactaacatcccaggcgggtgagcccccgaggcggttgcagggatttgttcacctgaagctacagttagctggttctctctcttcttgagactgaaaacagaatgatctcctctttttaaatttaaattttattaaacaacacgtgtatgtagtttaaaaagtcaaataagactaaaacatttaaaatgcagaagacaacattcctttgactttttccttccgctgaccaaagcccccacttgtactattttagataattctttcggtatttacctccacattctaaatattatacaactctttttatttttttttaaatgataatattttgactttatggaaatgaaagataaacatttagctctggcagagctctcctgaccctctccaactctccctttccccatcctctttgtagatttagatcacratttttgaaagtcagtgtttacactaatgtgatttgttcacagatgatgacagttctgctcttgtgcaacatttgtagacacaggggcaccatgtgatgaccaaggcagagatttcagtgaag

SEQ ID NO: 522000 - DNA, 270 bp, Homo sapiens
tggaaggctttggatattacctttagtaaacatttgatagaaaattgaagcagttacctacataatacttgttatgtgtacttgagaccaactcttttttcctctgaactatccagagacttttctgagagtaaacatagcctgtggctcacactttgataccaacacagtttgcttagttttyttttcccaacatagagaagctttaaccaatgtgaatagttaaaatgaaaggtaacatttgcacaatgagattcttgagtttcctag

SEQ ID NO: 522001 - DNA, 552 bp, Homo sapiens
gcctattaaggaataatggaaggctttggatattacctttagtaaacatttgatagaaaattgaagcagttacctacataatacttgttatgtgtacttgagaccaactcttttttcctctgaactatccagagacttttctgagagtaaacatagcctgtggctcacactttgataccaacacagtttgcttagttttcttttcccaacatagagaagctttaaccaatgtgaatagttaaaatgaaaggtaacatttgcacaatgagattcttgagtttcctaggaaaattgagttttccttagtaggaatttcctgggatttgtagtaaacagtttgagaaactattggaataaatctttcctcaaattgacatgcaaagattagaaartaagaggccatcagatgtgatttgattattcaagtttttaccataaattaaaggcatcaggatatgtagtctaatctaatatataactaatatgtaaagtataatattagatataatattatgtgacataatgtaaatgctttacagatgtgagtatatg

SEQ ID NO: 522002 - DNA, 505 bp, Homo sapiens
actttgtatcttttttgcacctattggagccaaataatattaaatgtcctcacttataytgagctattcaagtgtgagttctttgctgtaatggtattctatgtgtataattaagtgttatttgatatagttttagagttcgaacaaatgagcaagcaacaattataccttattatgatcttctctagtgcatagccatagggttgctctcagtgcattaccaaatgcatagcaccagccaggcagcagttcctgttatcaacttttttcaccctttgcgccatgcataatttagagagttttattaattttgaagtggtttaatgtatgtgcatgttctaaagatctaggtagattgtatgactaagtttagctttcatagagcaattgtttatgtatgtaaatgtctgaaaaatattttccctcaaatcttaaaaagctatggtttcatttaaatagattaactgacacattgcaccttcttccttacctgcaaggaaaaatt

SEQ ID NO: 522003 - DNA, 505 bp, Homo sapiens
actttgtatcttttttgcacctattggagccaaataatattaaatgtcctcacttatactgagctattcaagtgtgagttctttgctgtaatggtattctatgtgtataattaagtgttatttgatatagttttagagttcgaacaaatgagcaagcaacaattataccttattatgatcttctctagtgcatagccatagggttgctctcagtgcattaccaaatgcatagcaccagccaggcagcagttcctgttatcaacttttttcaccctttgcgccatgcataatttagagagttttattaattttgaagtggtttaatgtatgtgcatgttctaaagatctaggtagattgtatgactaagtttagctttcatagagcaattgtttatgtatgtaaatgtctgaaaaatattttccctcaaatcttaaaaagctatggtttcatttaaatagattaactgrcacattgcaccttcttccttacctgcaaggaaaaatt

SEQ ID NO: 522004 - DNA, 581 bp, Homo sapiens
tgtgagttttctttctatttcctctttcctaacagtttccaaattaggaagaaggctttaagaggattgcttgtagagattgtctgtcaaaagaagagactggcctctcactctctggttgaacatgtacttacattactcgcagtgcctttttgagtagaaagaacagagcgagatggcaaggtgaggagaagactatacaagtggccttactcccaccatttggtctggcaaagatggctgggttctccatggatcaaatggacacaaaggacataattagctgaacttaactcaasagtgagaggacactggaatcaagacatagtggggtgtattcctagagaagaaagtaggggcattggaagagatgagccaagtgagcctcaaaagtcagggcacggtgcagtgggacatgcaacatccctgcaaagtctcctaaagagcaagaaccctcattgtcgaacacctggaacaccttcatctcatgagagagacaggatatggatacctgccacccagagggtcattcctggccaggaaagcagagacagctgacaggcccatggctacacccaggt

SEQ ID NO: 522005 - DNA, 581 bp, Homo sapiens
tgtgagttttctttctatttcctctttcctaacagtttccaaattaggaagaaggctttaagaggattgcttgtagagattgtctgtcaaaagaagagactggcctctcactctctggttgaacatgtacttacattactcgcagtgcctttttgagtagaaagaacagagcgagatggcaaggtgaggagaagactatacaagtggccttactcccaccatttggtctggcaaagatggctgggttctccatggatcaaatggacacaaaggacataattagctgaacttaactcaacagtgagaggacactggaatcaagacatagtggggtgtattcctagagaagaaagtaggggcattggaagagatgagccaagtgagcctcaaaagtcagggcacggtgcagtgggacatgcaacatccctgcaaagtctcctaaagagcaagaaccctcattgtygaacacctggaacaccttcatctcatgagagagacaggatatggatacctgccacccagagggtcattcctggccaggaaagcagagacagctgacaggcccatggctacacccaggt

SEQ ID NO: 522006 - DNA, 683 bp, Homo sapiens
cttaaatacctccctgctgcctgagtggagttattcatttgaattttggttcctctgtttttcaatctataatgggaaaatgtttaataatttcttgcaatttactcatcttattttaaactcttatgtaacctgaatacttgatattatagtataaccactttgtgtttttctatcatataattgatcaatggatttcccaataaaaactatttgttcagagattaaagaaaaagagaaacccgacaaggagcattaatttgatgaggaaatctatttccacaattatctattttatattatcaactgcttcatcaccagggcacctaacacatagatatctgacaaatattcattgatgcattattctaagcatactagrtactaatcaaatattctttatcagcctatgataattttcatctctggtataagaggtggccaataaggtttaattgatatagaaatcacaaagttaaatctcaaaaatcatataaagtttcaagaaattgaaggatggaataaaagtaggcattaaaaagatgctagtaaaacattaaatgtcatacctttgaaattaccttgtttcttaattagaattcttcaagcatatcaattgaacttgtcttcaccgagaaccacaccctaggcaaattcaaagtatggaagggaattattttcta

SEQ ID NO: 522007 - DNA, 611 bp, Homo sapiens
caaatactgatagaaaggcttcccatgctctggaactgacaataacagctctgrtatgaagccgtgatctgtaacacacagactatagagaacctgaacagcgtggaacacagaaaaaaaattcaataagccagctcgatacaagaagagtagccaactagaacaggacagaaaccattaccttagctacacctggaaccatactgggtatgcactgtagatttgaatatttattgatagttaagttcattgtacaacctgtagggtaggaaggaggagtgtgcttgccatattacaaaagtccatgaagacttaagagcctgcaggatgttcagccactttttaaggagagtctactaaactgtgttttatcccccctcaaaagctggcatgagatatgcctccagcttcaagcaaaacaactctgccactttagcaactgcagattggagaagagtttgatataggaaccaaaggcaacctaatggttgagccaaactttgtttaaatggagcattcttttttgactggtggtaaatccacacaatcgtttcttatgagaacaaagatgtcgtgagcaagggtgagctgcagttctgcttactgagaga

SEQ ID NO: 522008 - DNA, 622 bp, Homo sapiens
agccctgcatactcatggtacccacttcaattcacagtcaatgaagagaaatgagcctcatacctcttcctgagaacccatcatttagattcagtcaatactctgggttatctagtgatattcagttttaaggggcaagctgagctaaaaatctatacatgaatataggttcaaaagttgatatctcacttacatgcagccccataaattttcaagattaaaaaaccagcatcattaccttcaagaagttttgtggattcacatcagaatgccaactaggaaatcaatattttagcaacagtaaaacctgaaacagtggtcccctaaggagtgctgtgagggctgggtgaagcagtatctgaaccagttgtttattggctatgaagayaatagtcaacaaagaagatatttattagaggctgccattatttcttaacaaaccaagtccacttatgttgaattacggagatacccacagaagcaggatgattaaaatagtaactggactattttacattacaggaataagtactcaccatgattttgcttatatgaagacagttcctaggataaaattatggatagcttccatgaattgtttgaagtttggacttcttgtgga

SEQ ID NO: 522009 - DNA, 640 bp, Homo sapiens
aatgtttatggatgtttccattaggttctgagagcattgagcgttgggatataataacaatagcacaattctagtcccagtcttcctgctgtagacctggctctgacattgatagatcttgggcaagttactcacttctctgaccttcagtttattcatttgtaaaatgaccagtctcagctagatgataagtgcagaattgcagtcccttactgctctaaaatccatattacattgatagtagaatacctttgtgatgctgatatgaggagctggatttactaataggaagtgctctggccagattttattatttgaagtaatgcatcatggatatagccagatatgggcaataataggatagatacaaatatggttttgttgtaccctcttctcctaaccaatatttcaagcttaaataaaaatataactaatgaatgaaaaaatagtgaatttaatttctatgactttgaaatatatattgtagccarttttaagggatagtatggaaaacatatacacacacatacatacacacacatatgtcctgaatttgttgcctcaaaaacagaactctaggtaagcattcacacaggtctcctccagtcactccagaggcactgatggctctccaccattc

SEQ ID NO: 522010 - DNA, 485 bp, Homo sapiens
ctgggttgaagggcatattacatattaggatgctgcatagctcatttttgtagcagagacttaaagtttcagagatgagcaaattttggccagaacaattagtgaaggtggaagtggtgatggtgacaatgagatgaaccccaagcccaccaatctattcgggagaatcccaagcctctcctacgccatcatctttgtgaagatttttaacaagggattggtttattctgccttgatggagtaggattcacagaggagctgacatttaggctacatcttgaaggaacagaagaaaggcatcccagcsaggggaagcagaataaatgaaagtgtggagctatgataatatgtggtatatttgaagactgggcaagagtctaatgtatgaatgactagactcatgactatgactaggcaagagtctacagtatatggtgtgcagtggaagtaaataactcccaatgcttacacacctggcatcactt

SEQ ID NO: 522011 - DNA, 592 bp, Homo sapiens
cacggcaagccatctcaacatgaccatgggccagggcaggccacaaggcacagcaatacaacagaaacttggactggcactggtttatttctaagacacgtttttccattttctctgcaaagttttctctcacatctagtcagctgaaaaagtacgagctggcaagcagcactgaggcccttctgcttgaggaaggcttcggagtcctggtcccctgccaagaacacctcctattcctcacttcccccatcagctcttctgaaagaatgctggctgtggcygagtccctactgtgtcttgctgcacagatagaggctccttctccagggccctggtcaggtcgccttgacacctttctgttctgttgggaggtgtggtgtccctcccagcacacgaagagtgtgtccacagaggatgcccagggagaggggattgtgtctgaggggaatggcgggctcatgaggaactggatgagggaggcattggacggtttcctgagggtgacaacatacagccactttcagtattttgccaaaacaatattccatagctcaaggaatgtcacggccttccaagccaaccgcctcacatg

SEQ ID NO: 522012 - DNA, 592 bp, Homo sapiens
cacggcaagccatctcaacatgaccatgggccagggcaggccacaaggcacagcaatacaacagaaacttggactggcactggtttatttctaagacacgtttttccattttctctgcaaagttttctctcacatctagtcagctgaaaaagtacgagctggcaagcagcactgaggcccttctgcttgaggaaggcttcggagtcctggtcccctgccaagaacacctcctattcctcacttcccccatcagctcttctgaaagaatgctggctgtggccgagtccctactgtgtcttgctgcacagatagaggctccttctccagggccctggtcaggtcgccttgacacctttctgttctgttgggaggtgtggtgtccctcccagcacacraagagtgtgtccacagaggatgcccagggagaggggattgtgtctgaggggaatggcgggctcatgaggaactggatgagggaggcattggacggtttcctgagggtgacaacatacagccactttcagtattttgccaaaacaatattccatagctcaaggaatgtcacggccttccaagccaaccgcctcacatg

SEQ ID NO: 522013 - DNA, 574 bp, Homo sapiens
acacagcaatgacttcatgcagggccttgggtgtgtgtctgagaggggccatcttttcactgatggcctgcaaagccctgagagtcaggtcacacacaaatgtagggtcccagtcactactgggcacggtggcaggtcactccagactggggccttcccaccctgtccttctgtggccattgctctgttgggacattggccctgtctagatcttattctctgcgtttttctcttttcttttcttttctctttcttttctttcttttcttttctttcttttttttctgttgcccaggctggagtgcagtagtgctcaccatagcctcaagctcctgggctcaaacaatcctcctgccttagcctcccgagtagctgggactacaagtgtgtaccgccacacctggctaattttttatattttgtagaaatgcggtcttgctctgttgcccaggctgatyttaaactcctgggctcaagctatcctcccaccctggactcccaaagtgctgggattccaggcatgagccatcaggcccagctttccctgcattttctgcaaggcctgctctaccag

SEQ ID NO: 522014 - DNA, 574 bp, Homo sapiens
acacagcaatgacttcatgcagggccttgggtgtgtgtctgagaggggccatcttttcactgatggcctgcaaagccctgagagtcaggtcacacacaaatgtagggtcccagtcactactgggcacggtggcaggtcactccagactggggccttcccaccctgtccttctgtggccattgctctgttgggacattggccctgtctagatcttattctctgcgtttttctcttttcttttcttttctctttcttttctttcttttcttttctttcttttttttctgttgcccaggctggagtgcagtagtgctcaccatagcctcaagctcctgggctcaaacaatcctcctgccttagcctcccgagtagctgggactacaagtgtgtaccgccacacctggctaattttttatattttgtagaaatgcggtcttgctctgttgcccaggctgattttaaactcctgggctcaagctatcctcccaccctggactcccaaagtgctgggattccaggcatgagccaycaggcccagctttccctgcattttctgcaaggcctgctctaccag

SEQ ID NO: 522015 - DNA, 672 bp, Homo sapiens
tgtggttttctcaattaaatttataacccaggcattttagcaagtttttgcacctgtgtcttttgctctttccctgcattagggtttatttggaaccaagggtgagcagatagagttgcaggaaacatttggtggttgcgccatctccttcctgcaccagaagcacaatgctttsgcttcttgacctcacagaccacgggcaggtgccccgcaccttcctccgttcccacaggtcagggtgctgggctctgctcttctgattctgctggtctccagaagaaagtctctgctcatgaagaaggagcaactccccattacaccatgatgttcccttttccccaaaggaaatcacttcctcacagaacattctgtttcttccatttcttcttcaaacagccattgtcctcttccatcacttgtcatcactggccatgaattgactcgcagagcttaaatcactcacccaggagcctaaatactggaacttactacacagatagattaggatacccaagttcaaaatcaatcatgtttttctttctttcttttttttttagggtgaggaaaacatcctgtgagtccatctatggctagtttaagtttttttccagtaagttgcacttgagatcatattggccagggttgatattagaacattcatcttttactcaa

SEQ ID NO: 522016 - DNA, 586 bp, Homo sapiens
tggttttctcaattaaatttataacccaggcattttagcaagtttttgcacctgtgtcttttgctctttccctgcattagggtttatttggaaccaagggtgagcagatagagttgcaggaaacatttggtggttgcgccatctccttcctgcaccagaagcacaatgctttcgcttcttgacctcacagaccacgggcaggtgccccrcaccttcctccgttcccacaggtcagggtgctgggctctgctcttctgattctgctggtctccagaagaaagtctctgctcatgaagaaggagcaactccccattacaccatgatgttcccttttccccaaaggaaatcacttcctcacagaacattctgtttcttccatttcttcttcaaacagccattgtcctcttccatcacttgtcatcactggccatgaattgactcgcagagcttaaatcactcacccaggagcctaaatactggaacttactacacagatagattaggatacccaagttcaaaatcaatcatgtttttctttctttcttttttttttagggtgaggaaaacatcctgtgagtccatctat

SEQ ID NO: 522017 - DNA, 612 bp, Homo sapiens
cttcctgctgtggtgtagagcccgtgtgcgtagatggtgattcttagctcagagaacaatggaaaggagaatgcagtggcaggagcccyggatcaggcaggcagagagggccagagaggggacagctctcggaggtgctgtggacccggagctcatcccccatctgggaactagtgtttgtgatattaccttttggtttattctgaaaacacacaatcaaaagtgaacctcaaactatctaaactaggaaaacctactgagggtcttgcagaaacttctacacattgacagtggcagggtgtgataaccttcagccaagacagagcaagaaggactggatttgccttcctcccaaaagcaactaacagaccagacagaccaaatgtagaaaatgatggttttagacatcgtagaccagggagtgaagcgatcttggagggttaccagagggagggaaacagacagagtcctgtgatgccccagctttctgccttgagagagtgcagggaggggtcctgggggagctggtggactccctgactttgggagatagagtgtagattacagggaggccaaggtggctagagtttgagggaagattactagaaatga

SEQ ID NO: 522018 - DNA, 584 bp, Homo sapiens
cgtagatggtgattcttagctcagagaacaatggaaaggagaatgcagtggcaggagccctggatcaggcaggcagagagggccagagaggggacagctctcggaggtgctgtggacccggagctcatcccccatctgggaactagtgtttgtgatattaccttttggtttattctgaaaacacacaatcaaaagtgaacctcaaactatctaaactaggaaaacctactgagggtcttgcagaaacttctacacattgacagtggcagggtgtgataaccttcagccaagacagagcaagaaggactggatttgccttcctcccaaaagcaactaacagaccagacagaccaaatgtagaaaatgatggttttagacatcgtagaccagggagtgaagcgatcttggagggttmccagagggagggaaacagacagagtcctgtgatgccccagctttctgccttgagagagtgcagggaggggtcctgggggagctggtggactccctgactttgggagatagagtgtagattacagggaggccaaggtggctagagtttgagggaagattactagaaatga

SEQ ID NO: 522019 - DNA, 541 bp, Homo sapiens
cactgattcagcctcgcacaataacaggctgccttaatgacagccacgcgaacgacacacaccaaactcacttcttaccaggcggagggaggccgagggggatacccgggagagaggggccgagacccggggaaggtggcggcggccgaggatcctgtgggggagggcgcgtgtctgtggggggagttgaaggccaggttctcctggctccggggatatgctgtccggcccccgggccccyactcccagtggccgcggaccacgagaggacaccgaaggcgcggggatgcgggtgtcccagggggcgtcccggccccgcccgcgcgtcggctctgcactccccgaggctcagtcgccgtcctgggccaggaggtgtccccgcctcggacctccccaaacttcccgaaactgccgcttcgctctggcagccctcggcccaccgctccgcccgcccctttcctacgatgctccccgaatcgccacccccgcctccgcccccaagagactcctccttaggaagcgcctgccccgaagaaggggc

SEQ ID NO: 522020 - DNA, 611 bp, Homo sapiens
tcgtcagtgggggggttggggtcaacgcagacattttaacatcccaggctgtgtttatccactatcggaactgcctttcttaatcagggaggattttagagacagggccaggggtcaggaagtaaagccagtgctacccccagggtgtgtgtattagagagggagaggaggaaggaagggaggaacacagagagagcttgtgtgtcaggggcaccatttcaacccgagttcccagtgctggaacagcatcacactgggaaacgttccattttctctctggagctggtgtgcttgacctctctggagcaaacgcctttccggatactccctgtgacacgcactgtctatgctggccagagagcaggctttcactcctgtgggctgctgaggccaggtctccaaggcctgtgtgggcgaggggtgcacagccccgtctggcttgaatgctcaggcagcaccttgtctggaraagcaatgtcttcccaatagtgacagaggctctacctgcctcttattaggtattgatgtgtcaatgtcatggcaggcaggtgactagggcagggttggggccgtgctggctcctggttctggctcatggggacctcaggagc

SEQ ID NO: 522021 - DNA, 502 bp, Homo sapiens
gcccccctcagcccaggcctccctcctgtgcttccccacaggcaagaccccaaaggcaagccccacaaactcctcgaatgcaaatctgtctcctggggaacccacctgaggcaggcaggctsaggacgctcctggtgtctggtgctgagcaacggggtgttcccatctcccctgcaccttcactttgcagacccctcagagttccaacccaggtggagcgaggtgagccgtgtggccacggcacctgcctagaactggcatgacagagatgcctcatggtggtcagtgccagcagacacaggtggctggaggacggcgtcttggctgaacagggagggtggggtgcccagcctcagaagggtgagaggagcccctctggcagagaacccctgagcccaggcatggaggtgaaggaggctccacgtggcactggccccactcaggggagtgggctggggccgtcccatcctagcgcccattttgaggagggtctcagttgggg

SEQ ID NO: 522022 - DNA, 502 bp, Homo sapiens
gcccccctcagcccaggcctccctcctgtgcttccccacaggcaagaccccaaaggcaagccccacaaactcctcgaatgcaaatctgtctcctggggaacccacctgaggcaggcaggctcaggacgctcctggtgtctggtgctgagcaacgggrtgttcccatctcccctgcaccttcactttgcagacccctcagagttccaacccaggtggagcgaggtgagccgtgtggccacggcacctgcctagaactggcatgacagagatgcctcatggtggtcagtgccagcagacacaggtggctggaggacggcgtcttggctgaacagggagggtggggtgcccagcctcagaagggtgagaggagcccctctggcagagaacccctgagcccaggcatggaggtgaaggaggctccacgtggcactggccccactcaggggagtgggctggggccgtcccatcctagcgcccattttgaggagggtctcagttgggg

SEQ ID NO: 522023 - DNA, 502 bp, Homo sapiens
gcccccctcagcccaggcctccctcctgtgcttccccacaggcaagaccccaaaggcaagccccacaaactcctcgaatgcaaatctgtctcctggggaacccacctgaggcaggcaggctcaggacgctcctggtgtctggtgctgagcaacggggtgttcccatctcccctgcaccttcactttgcagacccctcagagttccaacccaggtggagcgaggtgagccgtgtggccacggcacctgcctagaactggcatgacagagatgcctcatggtggtcagtgccagcagacacaggtggctggaggacggygtcttggctgaacagggagggtggggtgcccagcctcagaagggtgagaggagcccctctggcagagaacccctgagcccaggcatggaggtgaaggaggctccacgtggcactggccccactcaggggagtgggctggggccgtcccatcctagcgcccattttgaggagggtctcagttgggg

SEQ ID NO: 522024 - DNA, 502 bp, Homo sapiens
gcccccctcagcccaggcctccctcctgtgcttccccacaggcaagaccccaaaggcaagccccacaaactcctcgaatgcaaatctgtctcctggggaacccacctgaggcaggcaggctcaggacgctcctggtgtctggtgctgagcaacggggtgttcccatctcccctgcaccttcactttgcagacccctcagagttccaacccaggtggagcgaggtgagccgtgtggccacggcacctgcctagaactggcatgacagagatgcctcatggtggtcagtgccagcagacacaggtggctggaggacggcgtcttggctgaacagggagggtggggtgcccagcctcagaagggtgagaggagcccctctggcagagaacccctgagcccaggcrtggaggtgaaggaggctccacgtggcactggccccactcaggggagtgggctggggccgtcccatcctagcgcccattttgaggagggtctcagttgggg

SEQ ID NO: 522025 - DNA, 501 bp, Homo sapiens
ctgcaggtgcctgtgggagagcgaggctgcaggctcccgacggccactcgagctcagcggtcatggtcccctcatgctctgctccyagacggggtctctgttctcctggctggagacaggaagctggtgctgagtgccactgcctggggagacgccctccctccctgagcctgcagtcaccccctcagctcactggccttcatcaatcattctgtatttgctccctgaaacattcatgttgagaggaagtgaatgtaatggcactttaaggagaagtcccattgaaggaagccatgggatcgtggataagggaggggtggcttggggatccgccagcccctgacagtctgggctgcagcaggacttccacccatcgctgctttcagcctcacggggatagtggctgcagagaccccctttatcacagttgtggatgtgtgtgggtggcggggacacagcttcctcgttccctttatcctggctgtgcgtggtcaagaagta

SEQ ID NO: 522026 - DNA, 352 bp, Homo sapiens
tggttgaagtctcccctcccgacccagattctgaaatctttcattgtggttgaagtctcccccccccacacccaggttctgaaatttttcattgtggttgaagtctccccccagattctgaaatctttcactgtgattgaagtctccccmtgagattctgaaatctttcattgtggttgaagtctccccctgagattctgaaatctttcattgtggttgaagtctccccctgagattctgaaatctttcattgtggttgaagtctccccccaccacaccgaggttctgaaatctttcattgtggttgaagactccccccgctacccaggttctgaaatctttcattgtggtt

SEQ ID NO: 522027 - DNA, 342 bp, Homo sapiens
ggattcactggcctctccatccgccccgacttccagaagggcctgaaggacgggattattttatgcacactcgtgaacaaactgcagccgggctcagtccccaagatcaacggcttccgtgtagaactggcactagctagaaaacctctccaacttcctcaaggcaatggtcagctacggcatgatcccgtggacctatttgaggccaacgacctgtttgagagtgggaacaatatgcaggtgcgggtgtctcttctygccctggcagggaaggccaagactaaggggctgcggagcggggtggacatccgtgacaagtactcaaagaagcagaacttcgac

SEQ ID NO: 522028 - DNA, 655 bp, Homo sapiens
gctacacttttaaagttagatttctttgtgtattaatacaaacaccagagaagatggtcaataaagtaattactgtacaatgcctatcataatacttaaacctggaagaaaatcagtaaatgttaagtgaatagaattggtgaattkcttccattttatacaattttttgttcattttagggcttaccaaaacttgcagctctgaataaggtccaattatttactccttcaaataaaacaagactgcaagaataagggtgaatgctttgttgtgttttgtttttcactgaaatattccagtctgtagcagctccaaatcacactgatctttctagagtctgatacaggtcctggtctcaaggccagtgttaccataatcaccatcttttgtgcttcaaggttgagccctcctaatttacctgcatgaaattggaaaagtcccgtttcatactttaagcaacctagatgtctctttcactgaaagtggtattcttcttgtgtgtgtgttttttttttttgcagcaaatgatgtcaacttctacctacacctgacatctcaattaatttttgacattttcttcttcacatttccatttcaaatcaccaagtattgtcagattttaccttctctctatttcttgaatgaatttttctc

SEQ ID NO: 522029 - DNA, 655 bp, Homo sapiens
gctacacttttaaagttagatttctttgtgtattaatacaaacaccagagaagatggtcaataaagtaattactgtacaatgcctatcataatacttaaacctggaagaaaatcagtaaatgttaagtgaatagaattggtgaatttcttccattttatacaattttttgttcattttagggcttaccaaaacttgcagctctgaataaggyccaattatttactccttcaaataaaacaagactgcaagaataagggtgaatgctttgttgtgttttgtttttcactgaaatattccagtctgtagcagctccaaatcacactgatctttctagagtctgatacaggtcctggtctcaaggccagtgttaccataatcaccatcttttgtgcttcaaggttgagccctcctaatttacctgcatgaaattggaaaagtcccgtttcatactttaagcaacctagatgtctctttcactgaaagtggtattcttcttgtgtgtgtgttttttttttttgcagcaaatgatgtcaacttctacctacacctgacatctcaattaatttttgacattttcttcttcacatttccatttcaaatcaccaagtattgtcagattttaccttctctctatttcttgaatgaatttttctc

SEQ ID NO: 522030 - DNA, 655 bp, Homo sapiens
gctacacttttaaagttagatttctttgtgtattaatacaaacaccagagaagatggtcaataaagtaattactgtacaatgcctatcataatacttaaacctggaagaaaatcagtaaatgttaagtgaatagaattggtgaatttcttccattttatacaattttttgttcattttagggcttaccaaaacttgcagctctgaataaggtccaattatttactccttcaaataaaacaagactgcaagaataagggtgaatgctttgttktgttttgtttttcactgaaatattccagtctgtagcagctccaaatcacactgatctttctagagtctgatacaggtcctggtctcaaggccagtgttaccataatcaccatcttttgtgcttcaaggttgagccctcctaatttacctgcatgaaattggaaaagtcccgtttcatactttaagcaacctagatgtctctttcactgaaagtggtattcttcttgtgtgtgtgttttttttttttgcagcaaatgatgtcaacttctacctacacctgacatctcaattaatttttgacattttcttcttcacatttccatttcaaatcaccaagtattgtcagattttaccttctctctatttcttgaatgaatttttctc

SEQ ID NO: 522031 - DNA, 655 bp, Homo sapiens
gctacacttttaaagttagatttctttgtgtattaatacaaacaccagagaagatggtcaataaagtaattactgtacaatgcctatcataatacttaaacctggaagaaaatcagtaaatgttaagtgaatagaattggtgaatttcttccattttatacaattttttgttcattttagggcttaccaaaacttgcagctctgaataaggtccaattatttactccttcaaataaaacaagactgcaagaataagggtgaatgctttgttgtgttttgtttttcactgaaatattccagtctgtagcagctccaaatcacactgatctttctagagtctgatacaggtcctggtctcaaggccagtgttaccataatcaccatcttttgtgcttcaaggttgagccctcctaatttacctgcatgaaattggaaaagtcccgtttcatactttaagcaacctagatgtctctttcactgaaagtggtattcttcttgtgtgtgtgttttttttttttgcagcaaatgatgtcaacttctacctacacctgacatctcaattaatttttgacattttsttcttcacatttccatttcaaatcaccaagtattgtcagattttaccttctctctatttcttgaatgaatttttctc

SEQ ID NO: 522032 - DNA, 630 bp, Homo sapiens
tgctacaagaatacgtttgctgaataaattagcacatttattgatataattgatttgcatactgtggcagcacttcatggaccaaaccctaagtcccatgaaaaattgaatagaattatttgacagttaagtatcattggaaaagcctggctctagttctcaggaagcaatctggttgattatgtgttttcrgtgtgtagtcataatacaactgtatatcactagtgtacattagacactttgtgcactctacatatattttctcatttgatccttcaatacatgcataacagaagaaatagacgtggatttaattgctccactagggtcaaagaccaaaaacctcattacaatgtcaatgttagaaattcttcttccaattaaaataaagttaccaaagacaattgctcctgccataatgagaaaatatcggatgaactttaaaaaattatttttttttgtttaaagccatcaaaaaattgtgggcctaaagtgtcaatgtactaaatttcagagaaaaacaagcccttccttggtgatcacagattagcagcagagcccatctctgaggacatttgctggatctggggccttgagtaggtagaagaacaagcctacaatgtgcagaca

SEQ ID NO: 522033 - DNA, 449 bp, Homo sapiens
atgtgttttcagtgtgtagtcataatacaactgtatatcactagtgtacattagacactttgtgcactctacatatattttctcatttgatccttcaatacatgcataacagaagaaatagacgtggatttaattgctccactagggtcaaagaccaaaaacctcattacaatgycaatgttagaaattcttcttccaattaaaataaagttaccaaagacaattgctcctgccataatgagaaaatatcggatgaactttaaaaaattatttttttttgtttaaagccatcaaaaaattgtgggcctaaagtgtcaatgtactaaatttcagagaaaaacaagcccttccttggtgatcacagattagcagcagagcccatctctgaggacatttgctggatctggggccttgagtaggtagaagaacaagcctacaatgtgcagaca

SEQ ID NO: 522034 - DNA, 629 bp, Homo sapiens
tgctacaagaatacgtttgctgaataaattagcacatttattgatataattgatttgcatactgtggcagcacttcatggaccaaaccctaagtcccatgaaaaattgaatagaattatttgacagttaagtatcattggaaaagcctggctctagttctcaggaagcaatctggttgattatgtgttttcagtgtgtagtcataatacaactgtatatcactagtgtacattagacactttgtgcactctacatatattttctcatttgatccttcaatacatgcataacagaagaaatagacgtggatttaattgctccactagggtcaaagaccaaaaacctcattacaatgtcaatgttagaaattcttcttccaattaaaataaagttaccaaagacaattgctcctgccataatgagaaaatatcggatgaactttaaaaaattatttttttttgtttaaagccatcaaaaaattgtgggyctaaagtgtcaatgtactaaatttcagagaaaaacaagcccttccttggtgatcacagattagcagcagagcccatctctgaggacatttgctggatctggggccttgagtaggtagaagaacaagcctacaatgtgcagac

SEQ ID NO: 522035 - DNA, 629 bp, Homo sapiens
tgctacaagaatacgtttgctgaataaattagcacatttattgatataattgatttgcatactgtggcagcacttcatggaccaaaccctaagtcccatgaaaaattgaatagaattatttgacagttaagtatcattggaaaagcctggctctagttctcaggaagcaatctggttgattatgtgttttcagtgtgtagtcataatacaactgtatatcactagtgtacattagacactttgtgcactctacatatattttctcatttgatccttcaatacatgcataacagaagaaatagacgtggatttaattgctccactagggtcaaagaccaaaaacctcattacaatgtcaatgttagaaattcttcttccaattaaaataaagttaccaaagacaattgctcctgccataatgagaaaatatcggatgaactttaaaaaattatttttttttgtttaaagccatcaaaaaattgtgggcctaaagtgtcaatgwactaaatttcagagaaaaacaagcccttccttggtgatcacagattagcagcagagcccatctctgaggacatttgctggatctggggccttgagtaggtagaagaacaagcctacaatgtgcagac

SEQ ID NO: 522036 - DNA, 528 bp, Homo sapiens
aataagtcagtccatgctgtccagatgcagttctgttctgtagagatgaagaataagaatcaycaaagtggaaaaacctctgtcctgctccaaattctggtccacacaggagtagtactactggagagaaaagccatacatgtcccaaatgaaggaaagcctttacgttatcagtcatttcttatgagacatatgaaacttcacactggagagaaaccttatgaatgtaacaaaagtgagaaaggctttagatattccctacaccttaataaacatttaagaaagaacattctggagaagccctatggatgtaaggaatgtgggaaagccttcagcaaggctcaaaacatgcacatataaggagtcacactggaagaaaccctataaatgtgacaaatgtgaaaaagactttgcaaagtcaccagaattaaaagccatcttaagattcacaatagtgagaagccctgtgagtggcagggaaatcatcattaatttttcaccttactgaacatgtgaggaggacatact

SEQ ID NO: 522037 - DNA, 528 bp, Homo sapiens
aataagtcagtccatgctgtccagatgcagttctgttctgtagagatgaagaataagaatcaccaaagtggaaaaacctctgtcctgctccaaattctggtccacacaggagtagtactactggagagaaaagccatacatgtcccaaatgaaggaaagcctttacgttatcagtcatttcttatgagacatatgaaacttcacactggagagaaaccttatgaatgtaacaaaagtgagaaaggctttagatattccctacaccttaataaacatttaagaaagaacattctggagaagccctatggatgtaaggaatgtgggaaagccttcagcaaggctcaaaacatgcacatataaggagtcacactggaagaaaccctataaatgtgayaaatgtgaaaaagactttgcaaagtcaccagaattaaaagccatcttaagattcacaatagtgagaagccctgtgagtggcagggaaatcatcattaatttttcaccttactgaacatgtgaggaggacatact

SEQ ID NO: 522038 - DNA, 528 bp, Homo sapiens
aataagtcagtccatgctgtccagatgcagttctgttctgtagagatgaagaataagaatcaccaaagtggaaaaacctctgtcctgctccaaattctggtccacacaggagtagtactactggagagaaaagccatacatgtcccaaatgaaggaaagcctttacgttatcagtcatttcttatgagacatatgaaacttcacactggagagaaaccttatgaatgtaacaaaagtgagaaaggctttagatattccctacaccttaataaacatttaagaaagaacattctggagaagccctatggatgtaaggaatgtgggaaagccttcagcaaggctcaaaacatgcacatataaggagtcacactggaagaaaccctataaatgtgacaaatgtgaaaaagactttgcaaagtcaccagaattaaaagccatcttaagattcacaatagtgagaagccctgtgagtggcagggaaatcatcattaatttttcaccktactgaacatgtgaggaggacatact

SEQ ID NO: 522039 - DNA, 558 bp, Homo sapiens
ttgtatttcatacccagatacatccccctcccaagctttatcagcaataattgtgttttggcctccatctacactcttttgttgtatttctcttaccttcagaactcaggtagatatgggagtagggaaaggagtatttccttcatccccttctaaacttcatcaacgtgtagtatttctgccaagcccaacattcagaattttaatgcaatcagattagctttatttgcttttaaaaggcagtaagaagaaaggaaagaactgatttatttgtcatgttccattaaccaactctaataactttctatatgctccctaaacaatttaaatgcatttctgcaaattgacctgcctttaatctctttgatacatatctgttaactgggaggtttatatctacatagacacctatacctccctgtatttaaagggtgagtaaaattatacagctttaatacttattttgtaaatttatttacctctcatttcattttaaacataaaaattccatttartcatatgctatatccataaaccaatatgttttaaacttagtct

SEQ ID NO: 522040 - DNA, 588 bp, Homo sapiens
aacaagagcacttgttaagtactgtktgatcttttatagaggctgttccatcagctgaatagtcaagacgctgtaaagggtttcagtttaaatttacaaagctatacataataaaaatcatttgctaagcaaagtagaagaaaagtcaaaacataaaaggatttaattgtttttggcaaaatggttgagagcacagactctggagagaaaaaaaatctggattccaatgcttgttctgtatgatctgggacaaagttctcaggttttattctgaaccttttgtttcctcagctatataatgcaggtaataatggtttcttcctcataactttgctctaagataacatgagtacaaatccctgggaatatgcttagcatgtaagtcctaaataaatgctaacaatattaattatattatcattatttaacaaatgttgaactttgtgaactcatgtctaaaatatcaaaattttaatgtgtaatttggacctttcatctacagtaaatttgtcttttttgtttttaaaatatctatggaaaccatcttttgttatagaatgcaatgctgtcttccatttaaatagcatg

SEQ ID NO: 522041 - DNA, 588 bp, Homo sapiens
aacaagagcacttgttaagtactgtttgatcttttatagaggctgttccatcagctgaatagtcaagacgctgtaaagggtttcagtttaaatttacaaagctatacataataaaaatcatttgctaagcaaagtagaagaaaagtcaaaacataaaaggatttaattgtttttggcaaaatggttgagagcacagactctggagagaaaaaaaatctggattccaatgcttgttctgtatgatctgggacaaagttctcaggttttattctgaaccttttgtttcctcagctatataatgcaggtaataatggtttcttcctcataactttgctctaagataacatgagtacaaatccctgggaatatgcttagcatgtaagtcctaaataaatgctaacaatattaattatattatcattatttaacaaatgttgaactttgtgaactcatgtctaaaatatcaaaattttaatgtgtaatttggacctttcatctacagtaaatttgtcttktttgtttttaaaatatctatggaaaccatcttttgttatagaatgcaatgctgtcttccatttaaatagcatg

SEQ ID NO: 522042 - DNA, 601 bp, Homo sapiens
taacgaactctcatcagatctttcatcacagccatttcatactttttgtcatttagatattatttccccctgatgctttcctgaaagctcctgcaatcaactacaggtcagaatgttcgtctccaagacaggactccctctgagactcacagaaaagactatgacaggtactctggttataggcttctgatgatattgcttaaataactttaagaccatacacttgactcagttaaggtctccagaagtccggttgggaamctgatgggttcatgacactgctaactcaagatccacaagactggaattgattacatggcactgaatgaactgatgaaaattgattataattgtatagctttttggagcattgctggttaatattctagtttctggatttaagaaatctctttctcttactctaactgtaacttacaacaatttagtagattatacttttgtaaacagaaatgaagcgtttatctttttttcttgcctgatttttccagaattttgaaatccttactgaatactcttatttccacgatgatatagttgttagcaaaagtccaataagaatctattcaccttataacaggac

SEQ ID NO: 522043 - DNA, 540 bp, Homo sapiens
gagatttggttgaggggacttatctctgacaacagcctcttgttgatcttcccagacagtgacaataccctcccctcccttgggctggacccctctctacagctaggagccaatggcagaagacaaaaccaaaccgagtgagttggaccaagggaagtatgatgctgatgacaacgtgaagatcatctgcctgggagacagcgcagtgggcaaatccaagtatgttgggagattagggaataaataccagccccagagagggtccaggtcatttaaaaagtcctccagaggcagaggagcatggcttcttggggctggtgaaggagcagtcttggctggagcccagatgttcatgggggaacgaggggaatcacrtgacccgttgtgtgtgtcgggtggagggggcaggtcataaggactgaggaatttgaatgtttcctctgagccctgagagaacgtgtggagcaactgaggacattgtatgtggtttgtgggctgagggatggcaagggcggggagtgggaatggaaagacaaaagt

SEQ ID NO: 522044 - DNA, 540 bp, Homo sapiens
gagatttggttgaggggacttatctctgacaacagcctcttgttgatcttcccagacagtgacaataccctcccctcccttgggctggacccctctctacagctaggagccaatggcagaagacaaaaccaaaccgagtgagttggaccaagggaagtatgatgctgatgacaacgtgaagatcatctgcctgggagacagcgcagtgggcaaatccaagtatgttgggagattagggaataaataccagccccagagagggtccaggtcatttaaaaagtcctccagaggcagaggagcatggcttcttggggctggtgaaggagcagtcttggctggagcccagatgttcatgggggaacgaggggaatcacatgasccgttgtgtgtgtcgggtggagggggcaggtcataaggactgaggaatttgaatgtttcctctgagccctgagagaacgtgtggagcaactgaggacattgtatgtggtttgtgggctgagggatggcaagggcggggagtgggaatggaaagacaaaagt

SEQ ID NO: 522045 - DNA, 483 bp, Homo sapiens
agaagcagagaagcactccatttcttttttcttgtaatctctagcatgttcacatgcatagtttctgagtcagtagcaaactaagaacttcttgtgtgattcaagctaacycctcgattatcagaagcagatgtttcaaacgactgaagatcagtgaggcatatcttatttacaggttaataattggctactagatgcaggtgcaccaaatggtcttagagacattagataggagagacaatgtcagtgctccccctaccctgcctcccctaatctaaagcctactctgtttcttttatcaagtgattggctgtatgttaacagagcctggggcactttcctgttgaaatgcctttaatcccaagcaactggattgattttttttttttttttttggatggtttagattggacgactgattattggacagaatggcatcttgtcgacacctgcggtctcctgcattatcaggaagatcaaggc

SEQ ID NO: 522046 - DNA, 483 bp, Homo sapiens
agaagcagagaagcactccatttcttttttcttgtaatctctagcatgttcacatgcatagtttctgagtcagtagcaaactaagaacttcttgtgtgattcaagctaacccctcgattatcagaagcagatgtttcaaacgactgaagatcagtgaggcatatcttatttacaggttaataattggctrctagatgcaggtgcaccaaatggtcttagagacattagataggagagacaatgtcagtgctccccctaccctgcctcccctaatctaaagcctactctgtttcttttatcaagtgattggctgtatgttaacagagcctggggcactttcctgttgaaatgcctttaatcccaagcaactggattgattttttttttttttttttggatggtttagattggacgactgattattggacagaatggcatcttgtcgacacctgcggtctcctgcattatcaggaagatcaaggc

SEQ ID NO: 522047 - DNA, 406 bp, Homo sapiens
aaggccctgagacacaaggagcctagaaccacggctcgaagacaaccrtctggctggggcatggctcgtcttacagatcacattaaggaacaaataattatgttaagagttatgggctgccattaaggatttggataagagagtcttacaatcacatctgtgttttctaaaggcctgacactgattggtacatggagtacagcctgaagggaacaagacttgttagaaaggaagctattgactgggtgtggtggctcgtgcctataatcccagcactttgggaggctgaggtgggcagattacttgaggccaggagttcgagatcagcctggccaacacggtgaaaccccgtctctactaaaaatacaaaaattagcaggttgtggtggtgagcacctataatccc

SEQ ID NO: 522048 - DNA, 585 bp, Homo sapiens
ggcagacgctggtgttccctaaacaggttttaagatgtgggaakattccatgtctcttggctctgccttctgggcttctgcctctgggtcatccttcttttctcacgaaagatccacgtgtttgcagccaagtagttttatcagccttcttcttgacagcagagtttgggggctctgacagtcttctttcattttgcactctgtcccctacagaccaatctgccagcactgtgggtgaaacagctttcccaaaccctttgcctgtcctccgtgggtttcagtggggctcatagtcgatttgtcaagagccatacccatgaatcttttagagataaactctacctttctaccttcagctcctgccaagatggcccccagggtaactcactgaagcttcccaggggccctaaggtttggtggagaggttctgcatggtacacccttataatctcttgcaacagacctctgtgtgactcattgctactcccatcctttgatctttatgcataatcacaaaagactgtacagttacaccctatgccacatgctcagaagccatttgttaatttcagcatcttttgccat

SEQ ID NO: 522049 - DNA, 585 bp, Homo sapiens
ggcagacgctggtgttccctaaacaggttttaagatgtgggaagattccatgtctcttggctctgccttctgggcttctgcctctgggtcatccttcttttctcacgaaagatccacgtgtttgcagccaagtagttttatcagccttcttcttgacagcagagtttgggggctctgacagtcttctttcattttgcactctgtcccctacagaccaatctgccagcactgtgggtgaaacagctttcccaaaccctttgcctgtcctccgtgggtttcagtggggctcatagtcgatttgtcaagagccatacccatgaatcttttagagataaactctacctttctaccttcagctcctgccaagatggcccccagggtaactcactgaagcttcccaggggccctaagktttggtggagaggttctgcatggtacacccttataatctcttgcaacagacctctgtgtgactcattgctactcccatcctttgatctttatgcataatcacaaaagactgtacagttacaccctatgccacatgctcagaagccatttgttaatttcagcatcttttgccat

SEQ ID NO: 522050 - DNA, 166 bp, Homo sapiens
tttgatgggaggaaaaataagtgggaggtgaggagtaactcctgggctctgatgagtattmtaggcaagtacagatctggaaagcctgtatgcaaaggaggaactcactgaaaagtgctggcctgaggagggcagaagggagggctggggaagccagcagggggag

SEQ ID NO: 522051 - DNA, 425 bp, Homo sapiens
aaacatttgcttctgctcacaagtgtgcaggttgaccagtagtacttggggactcatcttatctggaggctacagcagccacccagggcaagttcttctcatggcactggcaaaagcagaagagaaataagcagtgacagcccttagagcctcagcttgtaactagcaacctgtcatatccaccttccattggccaaagcaagtcaactgaccaaggccaaagccaatggaccagaaaagataccttacccccagtgaacaatggcaagagtggagagggaggaaaaacttaggacatacaatacaatctcattaatccaaattagtgtgagaggtgaaacagaaacygggtctccggacaacaagctcagtgcctctgcctcaggccacgctgtctccacattgtctggaagccaacaagctgg

SEQ ID NO: 522052 - DNA, 623 bp, Homo sapiens
ctgttgtgttttgttttctctctcaaaggggtgcacggtgtggcaatcactttgttcatatttttgaatttcttgtgagtaaaatgaattcagggcacttcattaactttcttagcagaagaagtcaatatggttacctgtaagtaattagtcaacctggagaacagttcacggctgattgaccagcaagtgaaagatttaacataatgggcaaaaagagtactagggcagcagtcctgggggcctgggctcagatttcacctctgtcactcactctgtgtctcagtacagatcccaaccatatacctccactgctctgagcttcagtttcctcacctacaaaattcaaggctgggagaataatatttatgtcatgagcttataagggttttttgagaaataaatttaaaatatatataaaactggcccggcgcagtggctcatgcctgtaatcccagcactctgggaggccgaggcacgcggattacgaggtcaggagttcgagaccagcctggccaacatgatgaaaccccgtgtccaccaaaaartttaaaaaattagctgggtagggaggcgcgcacctgtagtcccagctatccgcgaggctgagacaggagaatcgg

SEQ ID NO: 522053 - DNA, 451 bp, Homo sapiens
gtgatgagcagaaacagggaggaatggagcccccaggtgagcggcgaggcttggatttagggaagagcagcctggggatgtggatatggatggaagaggctctgagatttgggatctgaacttgggsatcaaggcagcagttctttctttataggaacttcctattaaaacacattttttaaaaaaaaaatttaaataaagaaaggaaagggccttataggaaaggccacagtagctcaaaaattatcagtataagttaaggtttctgtgtctgtttacttttccgattttaataaaataaaatatctgactcactagagaaaatacataaaacgtgtactcgaagcagaaagagaattaaagaatcccagcatggccattactcatcttaagaaacagagcagtatttaccttagcctccttctgtgggccaccacccccttcaccaaac

SEQ ID NO: 522054 - DNA, 534 bp, Homo sapiens
ggctcccaaatgctgagattataggcatgagccactgtgccctgcccaaacttctaaaacatacaaaacacactacacaaaacatcaaaaaaccttaggtggcatctactaaaacatatgtgtataaaccttatgaccaagcaattctaattcaggtggatactcaagaacactacgtaattagagcatcaaaacacayacatactgtaatgttcacagaagcactattcctatctccaaagctgaaagggtccaaatgcttataaacagaaggttggatagatacattttgcatttccatactatgggatactatgcagcagggagaataagtcaatcagtgctacccaccacaaaataaatgatgctctcaaacatcatgttgaacaaaagaagccacaaccaagtataccctctctgtgaattcattcatataaaatacacaagcaggcaaaattaatatatgttgttgagcatcaaaacaggagttcctattccaagtcagatcttccactaggatttcataagtaatga

SEQ ID NO: 522055 - DNA, 525 bp, Homo sapiens
ttgtgcacgtcttatattgcatatgtgtgttctcttgggtacatacctagaagtagaattgctggattatagggtatccatatactaaactttagtaaactaccagtttccaaaatggttagaccattttatgctcccaccatcataggatgagagtttcagatgctctgtgtcctcatcaacacctggtattgtctatggtgttttgattttgccttatcttcttatttgttttttggcattctagtggatgtgtaattgtacctcgttatggttttatttggcattttccaaatgatgaatgaagttgagcacattttacacatatttattggccatttgtgtatcccttttgtaaagtgcctattaaagtgtttcatatatttttaaactttttaatactgtatttttaaagttttttattaattaaaagatttaagtttttatgtragactagaattggagagttggtcacactttaatggacttttctatcacttgtcctgattttataataactataaa

SEQ ID NO: 522056 - DNA, 607 bp, Homo sapiens
cgtccccatgcagcagagacagagcactgcggggacagcacctgggcgcaccatcagcttttctgggcaccagagatgctggccgcagagctgctcccccgatggcacagggtgatgggagagcgtcctgctgtccgctgctgtgacaccagcatggccaccagcccagagttcctctcatcccagcccctggctgcccatttgaccagtctcatctcttgaacatcccgttggcaattcagccttggcgccctcaaacagggcacctcttcgtcccccaaacctgctccctctggttcattgtcagcaccttctttgaggcatttgagcccaaattatggagttgggctgggcgcctcgtctcctctgccctctcacacctcacatgccagctcatgtcagaatctgcccaggtctgcctgacctccaccgccaccattgcctcccacctggagtcttgcaacgcctcccctctggtctctctgcccccatccacctagagaccactctccaatgcagtcaggggattgtgtaaaagcgtcccccaggccctcctggagcayctgtctgagaaaacatcagcatccttgcagcagctcaaggggct

SEQ ID NO: 522057 - DNA, 603 bp, Homo sapiens
ctcacatctgttagtggttttagaaactgtttcttttttctttttgacagtacttgatgcactttgcacagacagggtgtgttgaataggcattattttataaggaaaagaagtctgtggtgactgttttgaaataagtggtaatggtgatggagggcagttcttttggatttgcctgctgagaaaaagtaatacacatttgctaattaattttcagtgtacaatttcataaaatataagatgctattatgagatgacattataatcagggaatttttctgaaaaataaatccctttttacaggcttttttccctttacatttgtgttaccatgcatactatattatttcactcatcaaacattgacatggaatttgttctagtaaaacgcctatcaggaacagttgcgaataagctgcttacttagtgctgatgggagacggcagaccacaagcatttkcaggagatgatgaccatttataacactcagtgtatgatgatagacgcttcttggcaatagggattaaggcctgtttgtccatttctgatttctgaacagataaacacagtatggtaaattactaacaaacaattcttttactg

SEQ ID NO: 522058 - DNA, 513 bp, Homo sapiens
atgacactgcctgcaaatagaggaaaagagaacttggtcacttaaaaatatagcattctaattttttcttccactaggttagaaaatatttatttgattaacaaactgtagtagtatatatttatggggtaccatgtgatgttttgatatatgttgacattgtggaatgattaactcaaactgacaaatccattacctcacatacttaatctttttcgtgttgaaaacatttaaaatctactcttttaactacttaactttttgtggtgaaacatttaaaatatacaatgcrtaattatttattacagtcaccattctgtgaaatagatcactaaagcttattcctcctgtctaactgaaactttgtatcctttgatcaacatctcccctttccccgttcctctagattttaactaagtttgttcactacatgggctaaaaagtgcgatatattctttatctaattaactaaataataatccccagtagaatgtaaagaaaatgtgatttggc

SEQ ID NO: 522059 - DNA, 513 bp, Homo sapiens
atgacactgcctgcaaatagaggaaaagagaacttggtcacttaaaaatatagcattctaattttttcttccactaggttagaaaatatttatttgattaacaaactgtagtagtatatatttatggggtaccatgtgatgttttgatatatgttgacattgtggaatgattaactcaaactgacaaatccattacctcacatacttaatctttttcgtgttgaaaacatttaaaatctactcttttaactacttaactttttgtggtgaaacatttaaaatatacaatgcataattatttattacagtcaccattctgtgaaatagatcactaaagcttattcctcctgtctaactgaaactttgtatcctttgatcaacatctcccctttccccgttcctctagattttaactaagtttgttcactacatgggctaaaaagtgygatatattctttatctaattaactaaataataatccccagtagaatgtaaagaaaatgtgatttggc

SEQ ID NO: 522060 - DNA, 588 bp, Homo sapiens
ttttgtgaagctttcatgagttgctctacctattttccacactttgcacggtgatgcctccagaacagaagctaaagaaatgtttgtagaatgaatagatgaatttatgaatattaatcttgtgaaagtatatgcttacagaattgccctctgtttgggtcagtctaaaggtaccagagtttaatttggtagctaattgtcaaagcctaattagtttctctatcaaatacttagactcagcmtatctccattcccctggcattttcataaaatagaggctagacattgatgggaagctgggaaaagcaccttctaccacagtacacattttgcagagatagagatattttaggggggtcagattgtccctaaatatgaaagataaatgagggtaagttctagtcaaatataaataaattttactaaataaggagtcattaaaatggacaagtacatattggatcagtatttaaatattattgagacatgtacatgtaagtgcttgaaaaaaaagtagaattctctgaactacttatataaacccctgcccaaaatagaacaataagtaactagggcctaactttttta

SEQ ID NO: 522061 - DNA, 516 bp, Homo sapiens
tggtataaagtctgagtttttcattgctcaacaaaccttctcttcagtacctaggattcctggggaagtgtagctgcaaatgtccacacaggatgggattctgacacatttaaactcactgttgtaccatcacctctttatatgtggtattatgtcattcagaaagaacttgcacaatatatatggttttattttgactcattctcaccatcaaaaaggttctgccctcattaacaatgtgaatacccaagtgcccatgcaatatctgcccccatgttcccagtagccgagaaagtacacagatctgagttaatatctagactcagatggacctgataaaaatttgtctgaggatcgtaatcgtacatgcattttccacagcacagcccctgacccttggtagattttgatatctagctacartggtttgtactggtgccccaatctaatgacatattatataaaacttgtttcttgcttacttcatgttgtcctcttaagcattaccatggactt

SEQ ID NO: 522062 - DNA, 598 bp, Homo sapiens
ccttgtcaaatatcatctaccaatttcaggagagctgctgggaacatttctcaggatgttcttcaggcaaagagatgttaattttcatcagctttagccttcttaggaacacyctctttgatggtgcaggcttagagagtaggtgagagctttgccagagacttctgagaattgtagttattcctggtggatttgtggggacttcccagttttgtgcttcagctaagatatttagtgattttatttttctccaatattcctgctgctttccaaactttgtttctccatgccatcctacatatatggaaacttctgtttacactgaagagttgcacaccatcattctgccacattctagttgtcaagcaagttaaggcgggacgaggtgttttcatttcgtgaagaagaatgcctaacaggaacaatggcttttcattaaaaagatgcagccagatgacgacaactacacaaagagggagccaaaatacatactctcacttccctcttttctccctatctcttgatactggtcctattggcccaactagacaggaaaatacatccatacagatcagccacaacaaggtcagtctctcag

SEQ ID NO: 522063 - DNA, 598 bp, Homo sapiens
ccttgtcaaatatcatctaccaatttcaggagagctgctgggaacatttctcaggatgttcttcaggcaaagagatgttaattttcatcagctttagccttcttaggaacactctctttgatggtgcaggyttagagagtaggtgagagctttgccagagacttctgagaattgtagttattcctggtggatttgtggggacttcccagttttgtgcttcagctaagatatttagtgattttatttttctccaatattcctgctgctttccaaactttgtttctccatgccatcctacatatatggaaacttctgtttacactgaagagttgcacaccatcattctgccacattctagttgtcaagcaagttaaggcgggacgaggtgttttcatttcgtgaagaagaatgcctaacaggaacaatggcttttcattaaaaagatgcagccagatgacgacaactacacaaagagggagccaaaatacatactctcacttccctcttttctccctatctcttgatactggtcctattggcccaactagacaggaaaatacatccatacagatcagccacaacaaggtcagtctctcag

SEQ ID NO: 522064 - DNA, 650 bp, Homo sapiens
tttaaaaaagtttaaaaaaaaatgattgagaaacttgtacagattgaaaaagattaaagaaatatgacaatcacaatgcaacgtgtaattctgaaatgaattatcttgctataaagtttgttactgagacaagttgtaaaactcagatgggatctcaggattagatgatagaaatgcatcaatgttaatttcctgatttgatggatatgttgtgattatgatacatggttaagagaatgtccttgtttgtataaaatacactaaaatatttgaaagtgtgggggaatcaggytagcattttactctcaaatggtttgggaaaaaaatacttgcaccaaactttcgataatcaacagacaactaggttctgctagagttatgatctcaggctgattagccatgcagatatctgaagtctagttaagaaaggacacagaaaggcagtcagaaacatgaatatgagaaaattaaaagtcaagtacgccttatatttcaaagccagggattcccacagatgctacatcagtgcagggtttcaaaggttagcttaaaaccagtgatcgttcttgttgaagttccagaaagtgcaatggtggagcagacattgctggtgccctgccatcctagtgctccccagcagtccttcaaca

SEQ ID NO: 522065 - DNA, 642 bp, Homo sapiens
cccatgaaaatagttgccataagcatgtataataaattaaacatgaattttaaattattcattaccttcctgagggattgtgatgctgtagggataatgaaaatgcaatgttaataagcaatcagttgtaattttaaaaaggaggtgaaaaagaagggtccatctacatttcacttttgctgaagaatgagttaaaaggacagctttaaattagcactaattaatgtaaacttgcaacgaaagctattactttattttattttatgatttttattttttattttttgagacagagtctcgctctgttgcccaggctggagtgcactggtgtgatcatggctcactgcaacctcaacctcctgggctcaaggagttctcctgcctcagcctcccagatagctgggaccacaagcacgcaccaccatgyccagctaatttttttatttttggtagagatcaggtccatctacattgaccaggctggtcttgaagttttgatcatcatgcctcaggctttcaaactgttgggattacagggataagctaccatgcccagcctactttattttatatttcactgaaatgttattcgtctatattgtcacaaatttaatcataaaacagagctaggagagaaaaata

SEQ ID NO: 522066 - DNA, 536 bp, Homo sapiens
acccccactctttgttcgaaggagtgacactgcttgaaggtcttctccaatctcatgccacgcaaggctggacaagggctatggccaagcagagggtcctgtttaattccttaagcaaatattgattacatgcttatcatacaccaggtactgtggtaaggttttgtcctatggggtcgaagttagatattgaaatatatgtctataatcactgtgatatgctgagggaagaaagattccaaatgctattggagcctggaagaagggcaggtgagccagtgatcagggaagattccagagaaggtgggatttgacctgagactgaaagatgggtatgagtttacctggtggataggggaaggcattttaraaagcatgtgcaaaatagaaacagtatatttgaggactcctaaatagagtatgatggacagggggtaagaagaaagcaggttggatgccaaagaaagagaggtgaagctggcacagtagtgcatgcctgtaatcccagctactcaggaggctgagacaggaaaatt

SEQ ID NO: 522067 - DNA, 427 bp, Homo sapiens
gtaatatggatttggttggggaaccaaaatgggagaccagtcacaataattttttcaagaggtagtaagtctgaaccaaggtgttggcagggagagtagaaaagatttgggtaaggttgcagaagtagaagcacaagatttgacagctcattagatattaaagaagaccaatgaatcaggagatggtaatgccaagatttagacccgctggaacgatgatgagttggtggtggtgagagtaagtagtgagcataatgatatgttgaaatcagtaggaagattgtgtttgaggaaaatataaggtatccrtccattcattctttatttattcctgttaatctttaaaaagctcaaagtatagtacacaaaagaaaaagttaaaccatggatcatacaacaatgtaataagtgcagtaacagaacttca

SEQ ID NO: 522068 - DNA, 580 bp, Homo sapiens
ggtaagggaaatttatggaggccatggtccaaatttgaatgggtttgtcacagtaagtgtgttttttcctcctttccacactgcctcctactctgatttttctttttattttttgagacagggtcttgccctgtcacccaggcyggagtatagtggcatgatcacagctcacagcagcctcaacttctgggctcaagtgatcctcttgcctcggcctaccaaaatgatgggattacaggtgtgagccaccatgctaggccctgattttttttctctttgtttttctagagaccgagtcttgctctgtcatccaaactggaatacagtggctcaatcatagtagcttactgcagcctcaggctcctgggctcaagtgatcttcccaccttgctttagcctctccagtagctgggactatgggtgcatatcactaggcttggctaatttaaaaaaaaatttagagacagggtctcactatgttgcctaggctggtcttgaactcctggtctcaagcaatcttctcactttagcattccaagttgctgggactacaggcatgagccaccacaccccatacctc

SEQ ID NO: 522069 - DNA, 580 bp, Homo sapiens
ggtaagggaaatttatggaggccatggtccaaatttgaatgggtttgtcacagtaagtgtgttttttcctcctttccacactgcctcctactctgatttttctttttattttttgagacagggtcttgccctgtcacccaggctggagtatagtggcatgatcacagctcacagcagcctcaacttctgggctcaagtgatcctcttgcctcggcctaccaaaatgatgggattacaggtgtgagccaccatgctaggccctgattttttttctctttrtttttctagagaccgagtcttgctctgtcatccaaactggaatacagtggctcaatcatagtagcttactgcagcctcaggctcctgggctcaagtgatcttcccaccttgctttagcctctccagtagctgggactatgggtgcatatcactaggcttggctaatttaaaaaaaaatttagagacagggtctcactatgttgcctaggctggtcttgaactcctggtctcaagcaatcttctcactttagcattccaagttgctgggactacaggcatgagccaccacaccccatacctc

SEQ ID NO: 522070 - DNA, 580 bp, Homo sapiens
ggtaagggaaatttatggaggccatggtccaaatttgaatgggtttgtcacagtaagtgtgttttttcctcctttccacactgcctcctactctgatttttctttttattttttgagacagggtcttgccctgtcacccaggctggagtatagtggcatgatcacagctcacagcagcctcaacttctgggctcaagtgatcctcttgcctcggcctaccaaaatgatgggattacaggtgtgagccaccatgctaggccctgattttttttctctttgtttttctagagaccgagtcttgctctgtcatccaaactggaatacagtggctcaatcatagtagcttactgcagcctcaggctcctgggctcaagtgatcttcccaccttgctttagcctctccagtagctgggactatgggtgcatatcactaggcttggctaatttaaaaaaaaatttagagacagggtctcrctatgttgcctaggctggtcttgaactcctggtctcaagcaatcttctcactttagcattccaagttgctgggactacaggcatgagccaccacaccccatacctc

SEQ ID NO: 522071 - DNA, 630 bp, Homo sapiens
agatatttgcatccttgcggtcccaggtaaatgcagcattgccccaggtacaggttgaacagaaagcagtgcttctgacggttctgacggttctgcttttgctttacaactctttctgtgcttttcrtaaaattttagtttgaagtactgacgaatatacaatttagtgacacatttttgctagtgctgcctttctcaggaaacgaatgtttcattttcctaaaggaagctactcaatgtaaacattgatctgcgttttaatgttttgtctttttattagtttgctgaatatactgatgttaatatcctctcttctgttctgaagccttgactttgcttgatactgccacctattttagtttgtaatctctgaagatatctagaccaaaactttttttttattaggttatttgtttatagctgctgtgtttgacttgttcttcaagaaatagctgttagcttttatgtgtgaaacctcagaggtgaagggacagtgagggacagatatttcacagcctttgtctacttgagttagcatataagattgaatgaagctactgtccctactttgcccagaatgtgcttttgaattatagtttcaaaaacgaactctgaaagagaagagagatt

SEQ ID NO: 522072 - DNA, 414 bp, Homo sapiens
aacccagccgtggtcctgaggcaggcatgtgacagctgggaccagagctcgggcttctcatgccctctccaacactctttccacttgccacctcttctccttggccccacaccttactgcctgaatctagcagaaatgkgtcctattgcataaacacttattgtggttacatttctgagagacaactctgtagaattactatatgtggacatgagagttttcccataaagaaggcagaagccaaaatccttgtatctttggagttaatagcatattgtcgattgtcatgccatcagacgagtgtgaggtgaggaatgaatgtgttctgtgatgccagcgattgttgggtaatgaaaggcttgacttttctagattattctcatgtcaaatgtgacatctctttatgtattattt

SEQ ID NO: 522073 - DNA, 636 bp, Homo sapiens
gtcacctctggctcccagcctggaaggcattgcaggcttcatgaagagagctcgtctttagctgctatttctaagcatgattgcttgttggaggttggcagtggtagatgctcctagcacacgtccacaccttcagggcaaacgctctgtccccagacactgtccctgtttagttagtttcctaaactatgatcactcagcaacctcraggatagtcactgtattattacatacaggtgcagccctcttacatacctgtgtgtgtgtccagccccactggacacatgcctcccacttgcccacactcttccccatcccgctttaaagcttcaaatctgaaaagacagtggcgctgcgtggctgagagccacgaggtggactttaggtgaagggctgcccaccggcacaaccagatcagtggccagctcggggcgtgcacagtgcactcagagggagagccctgtggcactgcgttattttcctcctagagctgaagccagaaacctgatagggaaagggggcgttttcagggctggagtagttcagcacagtcccttcctcactgtggactccttttctaaatctgcaagtcacaggtaacctgggtgcatccaacaggtcccacagccctggaaa

SEQ ID NO: 522074 - DNA, 627 bp, Homo sapiens
ctgcctcgtcctgcgcattcttctgtacctgtggcctccctggctgtggacccacagcctctgcaggggactgcagtctctgaaagccaggctgagaacacagttgcacagtgctcacccagcctcagagggtcaggcaccggacggtgcactttacaacaattagctcttctggaaaaagttgtttcggttttttccctgatcctttgcatgaaaaaccctctgaaggtacaaagcaaattcctgaactgactgtagaaggagtgagagagacctgggctgccgcacagggctggcrtgcgggcccctcacagccttcctctggggcttgccactgtccgtcctcatgctgcctccagagggagttctcaaatccattttatgtgtatttaaataacgtatgcacagaatcaatagtcagccctctctttcttctaccgctgctttttttctcctgccttgagttcccatttgtttggcgttctgggttcctcctgctaatttttcctaagttccctgatagaattataaaaccctttcctgtgcaaacacaccaggcatcagttccctgttgctaacctaaataggtttctctccaggctgctggggccccctctcctgaattta

SEQ ID NO: 522075 - DNA, 575 bp, Homo sapiens
actcacctcctctgagacgcctcccctccccgctagacaggccaggcccttgctcatctgctctacagttccctattctcttcttccccagcacttgccataatttgcaattagacattgatttgtgcaactagagcagtggggaggaatgtgctgtagaatacctactctgcctccagtgggagcttggggaggtgtccccatccccaaggctgtgttcatccacacaatcatctagagatgtatcattaacccgtgccatagaggaactgactgaggctgggaacaagagaggcggtgtgagtcatctactgctgcctaacaaattatyccaaagcttagcaaaacaatgaccatttattatcttattcctatgggccagggatctggtcatggctgagaagggtcctttggctctgggtctttccagaggctttgatcaaactgttagccagggctgcagtctcacctgaaggatcgaccagggagaatcagctcccaatttcactcacacagccattggcagatgaggttcctccctggctgtttgactgaaggcctcagttctttgccag

SEQ ID NO: 522076 - DNA, 529 bp, Homo sapiens
cttcacctctgcggcccaggcttccccatgtagcagtgctgctgggaatgcttaaaaactggcycaagcaagggcagagaagggggaaaggactctggtttgtagcatttgcctatttccccatgtaaatattcccccatggccaattttaagctatcaatgtgaggtcagtaaacacagagttgggaagaggtgtgcagtcggttcctgagaacaggcacgagctggctctagcacacctctgcctctagccccggctcgtctgtctccacaggagccatgcagctcttcggcatgctctttcatgatgtcatgaattcacatgtctgtgcttcttcccttcctccagattgctccttgggaacttaagcctctctcttctcactcagagtatctagcacttagtaattgctcaataactgctagttcttatcattggtgctatttgtgttattgtaggttttccttgcatgcttgctaattgcctgggaggttatccttgcattcctgtactcccggaaatattcat

SEQ ID NO: 522077 - DNA, 529 bp, Homo sapiens
cttcacctctgcggcccaggcttccccatgtagcagtgctgctgggaatgcttaaaaactggctcaagcaagggcagagaagggggaaaggactctggtttgtagcatttgcctatttccccatgtaaatattcccccatggccaattttaagctatcaatgtgaggtcagtaaacacagagttgggaagaggtgtgcagtcggttcctgagaacaggcacgagctggctctagcacacctctgcctctagccccggctcgtctgtctccacaggagccatgcagctcttcggcatgctctttcatgatgtcatgaattcacatgtctgtgcttcttcccttcctccagattgctccttgggaacttaagcctctctcttctcactcagagtatctagcacwtagtaattgctcaataactgctagttcttatcattggtgctatttgtgttattgtaggttttccttgcatgcttgctaattgcctgggaggttatccttgcattcctgtactcccggaaatattcat

SEQ ID NO: 522078 - DNA, 536 bp, Homo sapiens
caaaggcaagggaagggcaccgactatgaaccaggagattgatgtgtttgttgagttttcatggctgatgtcttaatcctcattatcaaccctgccagggaactgcccttagctacacttcaagggtgaggaataggaggctcagagcttactgatcatgatgattaatcataaaatcacagtaattggcttgggttgcacttcagcttcaccccttttggctgtggggtcttcgtcaagtcacttagtcaacctgtgcctcagtgtcctcatttgtaaagtaggcrtaatagcaatatccacctcattatgaaggagttaatacagaagaagtttttgaaacattattagcatttaataagaggtgagtaaactattttcaaggctgttggcatggatttcgtattcattttgctacccccagcacttcagagaatgtcctgtacatagtaggtgtccactaaatgctttagaaccacttggtgagcattattgactccccagggaagtcccacgtgggtcttcttgttgccgag

SEQ ID NO: 522079 - DNA, 624 bp, Homo sapiens
ctggagggtaactgctctgagcttcacttttcaccctaggccttgctccccaggtgtactagtctattctcatgcttctatgaaggaatacccaagactgggtaatttataaaggaaagaggtttaattgactcacagttccgcatggctggggagacctcaggaaacttacaatcatgatggaaagtaaaggggaagcaaagaccctcttcacatgatggcaggagagagaatgagtgcccagcgaagaaagaagccctttataaaacaatcagatctcgtgagaactagctcactatcatgagaacaggacagaggaaaccgctccatgattgaattatctccaccccgtccctcccatgacatgtggggattatgggaactacaattsaagatgagagttgggtggggacacagccaaaccatatcaccagggaatcccaagtgactagtgatgagcatcgcagaggtgtcagccagacccttggtgaggaaggccggcattctgggtgggagtcagggctgagatgcagggttggctcaagggtcctgatgacctgaggctgggccatctctccttttccgtgcaggtagaaagggatggggcaggcaacgcccatttac

SEQ ID NO: 522080 - DNA, 624 bp, Homo sapiens
ctggagggtaactgctctgagcttcacttttcaccctaggccttgctccccaggtgtactagtctattctcatgcttctatgaaggaatacccaagactgggtaatttataaaggaaagaggtttaattgactcacagttccgcatggctggggagacctcaggaaacttacaatcatgatggaaagtaaaggggaagcaaagaccctcttcacatgatggcaggagagagaatgagtgcccagcgaagaaagaagccctttataaaacaatcagatctcgtgagaactagctcactatcatgagaacaggacagaggaaaccgctccatgattgaattatctccaccccgtccctcccatgacatgtggggattatgggaactacaattcaagatgagagttgggtggggacacagccaaaccatatcaccagggaatcccaagtgactagtgatgagcatcgcagrggtgtcagccagacccttggtgaggaaggccggcattctgggtgggagtcagggctgagatgcagggttggctcaagggtcctgatgacctgaggctgggccatctctccttttccgtgcaggtagaaagggatggggcaggcaacgcccatttac

SEQ ID NO: 522081 - DNA, 525 bp, Homo sapiens
agtgggcaggagacaaacgtttacttatcaagataaagcagggaatgccacctccacaccctctggtccctgcayacagtaggtgttgaatggagttgatgcaaagctgggagtccctgctgcagggtcagcacagtggactgtcgggaaaccaaggcagcaacaaccggttgggaagggtccatcagcggcccagcttatccaagttcagggcagttgaagccagcacagctcatgtgcctttaacagagctttacagaactcgggctctggtgctgggcgatgcagtcggaaagaagcgcttccagctttcatgtgccatagtcctgtaggattacagacaattcgttgtcatgtaagccatagcaaccacaagcatccttcactcaggcctgctgtgtgctgagtccattcaagtcacaggagatacagagacagaaagctgtgaaagaactcccttcccttctggagctcacctggatggggcaaacaataaacagacaaaatttaaaaaaataagacagg

SEQ ID NO: 522082 - DNA, 557 bp, Homo sapiens
acagctgacttcccacctgaagttgtcgtttaaaactaataacctgaaaatgcagttctgttctatacattcttcctaaaaatggcacaggtaggcatgctgaayaaaggtatttggatgcaaatactgatggctgacaaatgggtccaaaggtgtttccaatttgtgatttaacatgacaatatctcatcaacaaaacttatcttcaaagagaactatgtggaggaaagtaaattttatttcatgtttcctacttgtgttagaagagatttggaataccttgatttaaacatgcttaaacaacagtgttttaacattctgttttaaacaatgttttaaaatacctatttattatcttacagcaatatgagatataaagtagatgtaggaaaatagagctgatatgtgcatagttactaaaaaaaaccaacagatttacattttaacatagtattcataaaattaaacattcttaaaaggtcattttagtgcactttaaaaaatttttcttgtgctctttaaatattatttatggaataatttaattcattataaaa

SEQ ID NO: 522083 - DNA, 557 bp, Homo sapiens
acagctgacttcccacctgaagttgtcgtttaaaactaataacctgaaaatgcagttctgttctatacattcttcctaaaaatggcacaggtaggcatgctgaataaaggtatttggatgcaaatactgatggctgacaaatgggtccaaaggtgtttccaatttgtgatttaacatgacaatatctcatcaacaaaacttatcttcaaagagaactatgtggaggaaagtaaattttatttcatgtttcctacttgtgttagaagagatttggaataycttgatttaaacatgcttaaacaacagtgttttaacattctgttttaaacaatgttttaaaatacctatttattatcttacagcaatatgagatataaagtagatgtaggaaaatagagctgatatgtgcatagttactaaaaaaaaccaacagatttacattttaacatagtattcataaaattaaacattcttaaaaggtcattttagtgcactttaaaaaatttttcttgtgctctttaaatattatttatggaataatttaattcattataaaa

SEQ ID NO: 522084 - DNA, 557 bp, Homo sapiens
acagctgacttcccacctgaagttgtcgtttaaaactaataacctgaaaatgcagttctgttctatacattcttcctaaaaatggcacaggtaggcatgctgaataaaggtatttggatgcaaatactgatggctgacaaatgggtccaaaggtgtttccaatttgtgatttaacatgacaatatctcatcaacaaaacttatcttcaaagagaactatgtggaggaaagtaaattttatttcatgtttcctacttgtgttagaagagatttggaataccwtgatttaaacatgcttaaacaacagtgttttaacattctgttttaaacaatgttttaaaatacctatttattatcttacagcaatatgagatataaagtagatgtaggaaaatagagctgatatgtgcatagttactaaaaaaaaccaacagatttacattttaacatagtattcataaaattaaacattcttaaaaggtcattttagtgcactttaaaaaatttttcttgtgctctttaaatattatttatggaataatttaattcattataaaa

SEQ ID NO: 522085 - DNA, 557 bp, Homo sapiens
acagctgacttcccacctgaagttgtcgtttaaaactaataacctgaaaatgcagttctgttctatacattcttcctaaaaatggcacaggtaggcatgctgaataaaggtatttggatgcaaatactgatggctgacaaatgggtccaaaggtgtttccaatttgtgatttaacatgacaatatctcatcaacaaaacttatcttcaaagagaactatgtggaggaaagtaaattttatttcatgtttcctacttgtgttagaagagatttggaataccttgatttaaacatgcttaaacaacagtgttttaamattctgttttaaacaatgttttaaaatacctatttattatcttacagcaatatgagatataaagtagatgtaggaaaatagagctgatatgtgcatagttactaaaaaaaaccaacagatttacattttaacatagtattcataaaattaaacattcttaaaaggtcattttagtgcactttaaaaaatttttcttgtgctctttaaatattatttatggaataatttaattcattataaaa

SEQ ID NO: 522086 - DNA, 650 bp, Homo sapiens
ttcagccagaagccactgcacacacctcggctctcactcaaactccaactgcctgtggcttcttcctattgacttaagctgggttttggcttctgttagcctccagcaagttcataaatagtacttaataaacaaaggtagaacatttctaatggatgtcttcagtatctcaaatactcatagacaactttatattctcaaggtttctgtcttttacaaagtggtaaatattttgttgctgatggacacaaatatcaaaaaaagagacgctagaacaataaagaaggaaggattaaataatcaaaattatcattacctggtccaagtctcataatcttgggaagcaggcctttgtacaaagctaaaatcctgtaatgggaagggaaagagaaacgttcttattctgaaaataaatggagttgtaccttagctttattgagatagggrcccagcatttaaaaaaataaattatttggaattacacacatctcaaagcagacagcatcttagtattctctgcagcaaactggatgcggggaaagagttaatgaattctttattacccaactgtgctggtcctgtccaatcagaaacatgactttcatcagtgagatggtttttgctttcaagacaggtcttactttcaagac

SEQ ID NO: 522087 - DNA, 563 bp, Homo sapiens
gtcctgcttcagttcaccctccgtgggctgcacccactgtccaaccagtcccartgagatgaaccaggtgcctcagttggaaatgcagaaatcacccgtcttctgagttgatcacaatgggagtgcagactggagctgttcctattcggccatcttggaacaccccaccaagttccaccaaaatttaatacaataccacctcaagctatcctcctaccacagcctcccaaagtgcgaggattacaggcatgagtcactgtgcccagaccatgccaacttcttgatgtaaaaataaaacacattcttcctcccttcctttccatccccttcttccaacaaatcccccacaatctatttgtgcacagtctttggctgcatttaagaaaggtgtgtgttcatgtcacaggaatgcttgatcctagtgtactctgcatttgatcaatgaaaaactgcagtattctgtttagatctgacattgatatggacaaatgtgatgcactatagtaggacagatgggctgctcagaggactggaagccatgtcaccagaagagtgaatgggca

SEQ ID NO: 522088 - DNA, 451 bp, Homo sapiens
tttgagaaaagtcctggcctttactagaatataggggatagctgggcaaaaacaggtacaactaactttactgaagagtctrgttagccatactagaaatagttttatgactaaaaaaaaaagcccttcaatacttttctactaagaaaaatgaagaactggacctctaagggaaactgcctgctcgtgaaaaatgttaccccaactggtacatccaggactgcagttttaactgcaagcaagcaatttgatggtagggaaaaattctgtgatactatggcttaaaagcacatcctgtgctacttttatattgtagacgttgaaaaaggctgcttgcatctgtaagttaccattaaaaaacgttattattatgattatttagaaataaggtcttacttggctgggcgtggtggctcatgcctgtaatcctggcactttgggaggctgaggc

SEQ ID NO: 522089 - DNA, 612 bp, Homo sapiens
atctaagtaattgaaaccaattgaagtaaaagatgaactctcctaggcaaaaataccttttcacaataaattcttaaataaaagtagtgctggataaaaaaataagttgcattcctttggtttccatccctccatgatgctagcatcagataagagaaataaatcatgtaactgtacctggctatgaagttgctctggattatgagtccaccacacaacacctatgtaacttcaagcaagttacttaacattcctacatcagtttcttcattaatagaataasgatcataatagcctctcatagattatcatgaggatgaaataaggtaagagatgttcttagcacaatgccttgcacagaggatataataataattattactataagccttcttattgagatatttacatgcaacatttaagcaattgttcagataactaattctatgcatggaggggtagggaaggagaggacaataacttatttcctcctcagcaaagtagcaataatgatgcctttcctttctcttccttgagtctaatgttaatccacaagtattttgagatgttcagtaaaaagagaatgctattgctgtaggcaacaggcaatga

SEQ ID NO: 522090 - DNA, 438 bp, Homo sapiens
tctctgatttcccactgaaagcctctgagttatttccctcactaagcaagggtcagccaggcgcagtgactcacgcctgtaatcctagtactttgggaggccaaggtgggcagatcayttgtggtcaggagtttgagatcagcctgggcaacatggcaaaaccctatctttacaaaaatacaaaaattagccagggatggtggtgcatgcctatagtcccagttactagggaggctgaggtggggggatcatttgagcctgggatgtggaggttgcaatgagccaagatcgtgccattgtactccagcctgggtgacagaacaagaccctgtctctctcatttttttaagtatagcaagggtctttgtctgaaagcctagccaagtcttcagaagctaactataaagtagggagccacagaattccttgtaacatggt

SEQ ID NO: 522091 - DNA, 631 bp, Homo sapiens
gtgaacaagtgtggagtttagactttaaagatttccttccatgacagactttaatcaggaattagataatttttctaaagatctagatagtcatcctgtgatcaatctccgctcaccagagtcaggtctcttggaagataagactagtagcatagcaacaatcagacacaaaaaggtgccttacacaccagacttgaaaataattggattctttattgccatccagctaagatgatgcctattaatatggaaaaaattaaaatatttgataatgcccagtttgacgagaatggggagataacagcactcacatactctgtactgagaacaaaaattggagggaagtttggaagtatctgtcaaaatgtaaaaccaaatgtgtttggcccatcaatttctcctctaggacaaattgtgcagcaagtttgtacacatacacatacatacttacattcacattcacatatatatatatacaaatacacacaatcacatgcaaacatgcagacttatacacagatacacacacgtgactctagatgactagtccattttacagggtgctcaytgaagcatggttggtgatagccaaaaaaaaaaaaaactgcaaacaagttaaatatcgccagta

SEQ ID NO: 522092 - DNA, 602 bp, Homo sapiens
cttataagtgactggctcattcaacacagaggcaatatgagattccagatagaattaagattcagcatgctccataatcaagatatctcatagaatttatgccatcatttgccctaaattcttcccagataacaggacggtggcagggtcaacttccaggcccaaatatacaattgtctttggctaatccaaaagttgtaggtagaatgaataaataaattgttaaatggttatcgactacctctatctattctccttaatcctgtcacctagtttggagagaggcagggggatagtcaagatgctattaatctggagaaatattctacccatcccctgaatctaattttaagggtagttactaccaatgacattataagaccctgatcatgatccctgtaaagtgtttttgtgaactcttctcaactttatttgggaamgtgagaaaagccgtaggttaatacaggcattacaatgttacctaagttagaacactttttaaatggcctaatcatctctaacacttgggtacatctcccctaatgttagatgtaatatcagatgtaacctcttgagagagttgtaattgagaagatgtgttg

SEQ ID NO: 522093 - DNA, 400 bp, Homo sapiens
aatgcttttaatgagaattgtcaaggtgaatcaaaggctcatattgccatttaaatcaggagttgcaaagttctctgttctcactggctagctgcttcttgtcattcagagctcagctttaatctcatctcctgatagacaggtccttcctgaccatacagtctaatctagccattctccctcacgtcattctatcttaagtctctgcattacactacacttgctcatttatttacttgcacattgtctgtttcacctcaagctctgtgagaatagagaccttttctgtctggcttacttatctctctccagtgtcaaaaaccatacattatgtgttcccagtaaartttgattgaattaatgagttatgaatcaaaatcataatttggattgtctttag

SEQ ID NO: 522094 - DNA, 559 bp, Homo sapiens
catcccttccctggctacccacccccacctcagcaacgcctcccagaacgctccaaagctttctcaagtccccgctcccaggttagggccctgtagccagttccaaggtctttttcaggagcgcgcttcccaaataaagttgaragggggcggggggaatgagggagccccagatccacctcagagtggtccccagagggcttgggcccctttctccggattgttcagtgggaaggagggccggctggtgcctcaggcccgcgggactgtgacagccggcgacccctgcgacctccctttctacccgggcgcccccaccttgagatagtcgttctccgagcgcagctcctccagctcccgcaccaagccgctgggcccgcagtccagcatctcctcggtgaggtcggagaaggcaagcgaggcgctgagcggcaagcggctgctgcccaccgacgacgcggccaccgacggctcgtccggggaggcgggcggccgcgggggctgctgcgcggagggcgcgggctgggccggctgccccgtacggacccccgccgggccc

SEQ ID NO: 522095 - DNA, 559 bp, Homo sapiens
catcccttccctggctacccacccccacctcagcaacgcctcccagaacgctccaaagctttctcaagtccccgctcccaggttagggccctgtagccagttccaaggtctttttcaggagcgcgcttcccaaataaagttgagagggggcggggggaatgagggagccccagatccacctcagagtggtccccagagggcttgggcccctttctccggattgttcagtgggaaggagggccggctggtgcctcaggcccgcgggactgtgacagccggcgacccctgcgrcctccctttctacccgggcgcccccaccttgagatagtcgttctccgagcgcagctcctccagctcccgcaccaagccgctgggcccgcagtccagcatctcctcggtgaggtcggagaaggcaagcgaggcgctgagcggcaagcggctgctgcccaccgacgacgcggccaccgacggctcgtccggggaggcgggcggccgcgggggctgctgcgcggagggcgcgggctgggccggctgccccgtacggacccccgccgggccc

SEQ ID NO: 522096 - DNA, 643 bp, Homo sapiens
tacacccgtgtgataaacggcagagtcagacacacacgcgcatcccctcactagcttcctcgtgcccctttcctgggagagggtgcttgggacccctgtgctatccttacaactctccatgaatcatgattacatatttcaaaataaaaagttaaaaagcagaacttgaagaaaaacaaacaaaagcaaaaagcaaagaaggcaaaacaaacaaaaaccccaaactgaggctcccctgcctgcccccgaatggacccaggaacctttgctggactggagtccaggtgatctctgcaygccgaggggtggatcagaactggcagaggctgctgcagtctttgcaggggaccatcaggggaggtgagtggcccggccctggtgcagctcagggagggtgggcccccagctagctgccctccatgcagcctggtggtagaatcttcctgcaaagcctggcattctaccgcccctgtggaggcttcctgggcttccctctggggttcaggcacctggtgcttcacagtgacggagcgactcaggagtctggggcaccaggggagggcgtggaactctggagcctccaggcgctgggagaagagcaggtgggacgggcagccttgtctcctgccttccatcctaggcc

SEQ ID NO: 522097 - DNA, 643 bp, Homo sapiens
tacacccgtgtgataaacggcagagtcagacacacacgcgcatcccctcactagcttcctcgtgcccctttcctgggagagggtgcttgggacccctgtgctatccttacaactctccatgaatcatgattacatatttcaaaataaaaagttaaaaagcagaacttgaagaaaaacaaacaaaagcaaaaagcaaagaaggcaaaacaaacaaaaaccccaaactgaggctcccctgcctgcccccgaatggacccaggaacctttgctggactggagtccaggtgatctctgcacgccgaggggtggatcagaactggcagaggctgctgcagtctttgcaggggaccatcaggggaggtgagtggcccggccctggtgcagctcagggagggtgrgcccccagctagctgccctccatgcagcctggtggtagaatcttcctgcaaagcctggcattctaccgcccctgtggaggcttcctgggcttccctctggggttcaggcacctggtgcttcacagtgacggagcgactcaggagtctggggcaccaggggagggcgtggaactctggagcctccaggcgctgggagaagagcaggtgggacgggcagccttgtctcctgccttccatcctaggcc

SEQ ID NO: 522098 - DNA, 550 bp, Homo sapiens
gttggaaacaagctccaaagagcaagaagtctgtagagtcgatggctccacaaagagctgtggactgcatgcccagctcaagaatcaaattcaagggctcaagtagaaagcagtgaaggggaacacagccaatgacttccccacatcatccctctgcttcttttaccttcttgaaattaattatttccctagtggtttaggtatccagttcactagatcttttttttttttttttcttttgaagccttttttccagattttgtttttggaaccacatcctagattctgcacacagatggacagtttataaatgactaacaccactgtggaggtgatagaagaaaagcatactccacacagagacaagcatgtgtctagggcgatattaggaggtgagaagattgttacctggcacttggggttcctccactgactgacctacgcacacggccctgrgccagatctggcaagaacttctgcaccacttggagatgagctacttcagaaactcagaatgaagcctcccagctcactctgcctggaaggcagc

SEQ ID NO: 522099 - DNA, 561 bp, Homo sapiens
tggggtattggggaatctgtactggggaaggtggaaggtgcagccaggctggccaggaggcagaaaacaaatccaggcagagggtggtgaggacgatgtggggacaggcacaatccttgtataccccaaggtgagcggggcttgcaaagatgccaaggaaaaggagcgcagrgggcacagaggcaagaggtgggtgcagggtggagggaacagaccttctgggccaagggttctcagtctgtagatcgggggatggaacccagggctctgtgaacttggacgaccaacaaattcacctcttttattcccctcttacttaatgtttccttctgttatgaatgtgggcaccacgccaggaaaacagcagcctcctgtgagtgctcatctcccagcacagttgcagatgatctgacatttagtttatagttggcaccaccttgaaatcaccacatttatcaggcccactgaaggctcttgttactaatcgcgttaataaagatgctcctacctcacagacttgtttttaatgttttgataactacatgccaatatgattatttg

SEQ ID NO: 522100 - DNA, 530 bp, Homo sapiens
tattttctataaagaagaaagactcttgtcaaagagtcagccatgggtgctgggctgactgtcgcagatcgggagagagtgccctccttcgggtgtgagtagacgcctgaacctgaccctcctgctgcaggtgcaggaaacgccagggctgcccccacccactgggccatcgcagctccctgtgatcacgagcaaaagtatatttaaatctcccatcagaggactcagctcaggcttgtattctaggtgtctcctcctttgtcgccaactctaggccactggccccatccccatccattcctgtctctggggatctccttgaaggagacttctctgtccycctccccccacccatccctccacgtccatctccctacagcagccagaggaaccacaatcgtttaagctcctgtgcttcctgttgctcctgaaataacaaggacaggctcaactcccctctgtccggggagcccaccgagtccttccccacccagggcctgtgtgctcaccctgcctgagactccctctcc

SEQ ID NO: 522101 - DNA, 526 bp, Homo sapiens
gaatcattttgtccctgggccctaacctccccgcgctcggcctggaaccctgcctcargaagcaggactgcagtttccgacgggatgacccaggactaagagctctgcaggaagacccaggcctcagattcaatgttatcttggtcaaactgatttggaaactaattttaaaatccagcaggctgtgcccctgctgtccctcacttagtgtgggcaggcgtcccaggggctctgggaatgaggaagatggtagaaaccagacggcagaggtggagaaagaaagagcatcccccttgacagtgtccacctgcccggccctgtccagtcactcagtggccccccttcaagcgctcagccttcctcaccttccccgtgggtttcccactctcccctgccccgagcctggaggcttcctccttgtcctccccactgggctctcttggattctcggcctttcttcagcacttggatcaatggtactgatgctgagaagcagtgcccaccatttccagcctctgctgacatc

SEQ ID NO: 522102 - DNA, 560 bp, Homo sapiens
gaaggagcggagtcaaaatggaatcattttgtccctgggccctaacctccccgcgctcggcctggaaccctgcctcaggaagcaggactgcagtttccgacgggatgacccaggactaagagctctgcaggaagacccaggcctcagattcaatgttatcttggtcaaactgatttggaaactaattttaaaatccagcaggctgtgcccctgctgtccctcacttagtgtgggcaggcgtcccaggggctctgggaatgaggaagatggtagaaaccagacggcagaggtggagaaagaaagagcatcccccttgacagtgtccacctgcccggccctgtccagtcactcrgtggccccccttcaagcgctcagccttcctcaccttccccgtgggtttcccactctcccctgccccgagcctggaggcttcctccttgtcctccccactgggctctcttggattctcggcctttcttcagcacttggatcaatggtactgatgctgagaagcagtgcccaccatttccagcctctgctgacatccctcctctgacctg

SEQ ID NO: 522103 - DNA, 462 bp, Homo sapiens
aaattaaataatgtgcctcagtggattattttttgaactgttatttaattactctctcactctgtctctctctgtgtgtgtctcttgtctctccataacctggtgacttttccaagggcaaacaggatggtgattgagagtgtgatctatagtcccaggtggcctgggtttagataccagctctgccactcactggctgagcaaccctggtaaagtcacgctgatcaacttcctgtgcctcaagttttttgtctacaaaaggatcaaatgaaggatcaaatgctgcttaattttccttcagaaaatgtgctaagacctgggtgggctactgtaagggcatctgcctttgagttacctcacgtccagggtctcccataccttaacaccccctcaggcactccctggctggaggccacagaaacacaataactgtggaagaygtggtgccctagctggttatgg

SEQ ID NO: 522104 - DNA, 570 bp, Homo sapiens
tggttcttacctgaaagtgccacctactgtcctgtcctggatatcagtccacacagcccgttataactgctgacacaatagcacagtactctggaatgagaaaagcttctagtgatcgctgctatccctatcaccattgcctttctggctgctcaggaggttgtgagcctgctcacacacttggcacactgctactatacctgccatttgataaagcaccacactaggctatttacagccaaggaaaccatatagagtctttgccactgaatatacccagaaacaaagccaaatggccttacctagcatacatcatagttatatcttcaagtgaaaaaagatcccccttcacatttataaaagcaaattaaaaaatgagaaraagtgactattactcaagatgtgaataaagcagcgtaaaggtatagaaaagatgaataaaaggtaacatcatcttcaaatgatcataataattctctaccaataggccctaaccaaaaagaaatctttaaaatgccagataattaaaaatattgattgtaaggaacatcaaggagacgcaagagaaat

SEQ ID NO: 522105 - DNA, 582 bp, Homo sapiens
agttgtggtgaagtatggagcccacctacaatttcccactcggcctgcccatctctgtccagccaagtctccctccatccccaggaaaagtctgtctggcaaagagacttccaagttcagagcctggggagacacagccttccaaaatgaagccctaagattcctgggccatgactgtgtctgcccttctcctcccagagggcgaggatgacagattctggggccctgggaatattgggaggaaggattccagacactggaaatagagttgccaacagaggcactctgggcactaaaaagcccaagtctaggcctggcaatgtcccccaggtccccagaagacatcgtgggggtcacattgctccagctttggggtctttttcaagctcactcatcgactattcccaaggcctgcaatccttcagcctcctgccacccctcccsacccaccagttttggttttcgccttggctgcaggtccctggggttccaggcccctggattccatccctgtggttctcaccgtgagtcatggtggctctgctgtgccgtcctcgctatctcggggaaccggagatcccc

SEQ ID NO: 522106 - DNA, 303 bp, Homo sapiens
aaatcccgtctctactaaaaatacaaaattagccgggtgtggtggcgcatgcctgtaatcccaactacttaggaagctgaggcaggagaatcgcttgaacccggaaggtggaggtttcagtgagccaagattgcaccattgcactccagcctgggcaacaagagtgaaactcwgactcaaaaaaaaaaaaaaaaaaaaactgtttgctagataaaataattctaaatgaagtctatagaatacaaggtaaaagtaatcctttcagttgatcctctaccctcagacactgagtgctcatttata

SEQ ID NO: 522107 - DNA, 413 bp, Homo sapiens
ctgctatgctgttcattggtaccctgaccctgttcttacccaaagcagtcagcagcctgtcctcttggcctgacctgcagcctgaagctaggtaaggcagccaaggctccagagggagaagaagtgctgccccacccccagctcccaccccaccccctctctagcgcagccatgtcgttacttggactcataaatcctgaaccagtatttgatcccacaaagcaagatygtggttatctgggtggataggcctgtcacggggcctgtagacaaaccacagccaggctgggccgtactggatcattagtcaccaggacagaagttctgccccgggtcaaccccagggccagtccagctctggcctcagacagggccccaggaggacagctcattattgttctcaggaactcaaa

SEQ ID NO: 522108 - DNA, 548 bp, Homo sapiens
cctaaaagtacagtggcttaaataatgtagaaatttatttttctctcatataaagttccaaggtgtgtggtctaggtatatggagcagctctgttccatgtagccattcaggaactcaggctcctgtactttttttttgttgttgttgttgayacagagtctcactctgtcggccaggctggagtgcagtggcacaatttcggctcactgcaacctctgtcttccgggctcaagcaattctcttgcctcagcctcctgcgtagctgggattacagacgtgtgctaccacgcctggctcatttttgtatttttagtagagatgggatttttcaccatgctggccaggctggtctcaaactcctgacctcaaatgatccacccaccttggcctcccaaagtgctgggattacaggtgtgagccaccacgcctgcgttttctactttttaaaatctgtcatcccttaggatatagtcgttgtctataatgaagaaacgcctttgccattctgaattccagttcgttggaaagagaaagagaggaagtctgg

SEQ ID NO: 522109 - DNA, 638 bp, Homo sapiens
tgggctgtattttttttttwaaaaaagataaagtctcactctgtcttttaaagagactcaacctgtcgcccaggttggagtgtggcatgatcttggctcactgcggcctccacctcctgcaccccacctcctcccaagtagctgggattacagggacccgccatcatgcccagctaatttttgtatttttagtagagacggggtttcaccatgttggccaagctggtctcaaattcctgacctcaggtaatccacctgccttggcctcccaaagttttgggattacaagcgtgagtcaccatgcccggcctgagattttaattctggcagtatgactttggatactctttattgcctttcctaagacaatctctaaagcagcgctgtcaaacaggactataatgtgagttacaaacgcaagccttgtatgtaattttaaaatttctaatagctattctgatgaaaaaagtagaaaggaccagttgaaattcattttaatatattttatgaagactaatatatctaaaatattaccaatttgacaactactcaataaaaacatggttttctttttttagtaagtctttgaaatacaatttatattttacacttacagctcgtctcaatttggccctgct

SEQ ID NO: 522110 - DNA, 638 bp, Homo sapiens
tgggctgtatttttttttttaaaaaagataaagtctcactctgtcttttaaagagactcaacctgtcgcccaggttggagtgtggcatgatcttggctcactgcggcctccacctcctgcaccccacctcctcccaagtagctgggattacagggacccgccaycatgcccagctaatttttgtatttttagtagagacggggtttcaccatgttggccaagctggtctcaaattcctgacctcaggtaatccacctgccttggcctcccaaagttttgggattacaagcgtgagtcaccatgcccggcctgagattttaattctggcagtatgactttggatactctttattgcctttcctaagacaatctctaaagcagcgctgtcaaacaggactataatgtgagttacaaacgcaagccttgtatgtaattttaaaatttctaatagctattctgatgaaaaaagtagaaaggaccagttgaaattcattttaatatattttatgaagactaatatatctaaaatattaccaatttgacaactactcaataaaaacatggttttctttttttagtaagtctttgaaatacaatttatattttacacttacagctcgtctcaatttggccctgct

SEQ ID NO: 522111 - DNA, 376 bp, Homo sapiens
tgcttttcagctttggccaagcactgctacatgtgaatgtggaaccagagttcctagattatgtgatttttcataagagcactgaaaacaatattttttaaacataaaatctacctatgctgaaatgttagctcaaaatggagacagtgctggtaaaataaaacaaggcagccagcctttaacctatcaattktataaatcaaactccctcaaaattgcttctacctcaaaattgccttggcaaaacaatttggatcaacagaatgatacattttggcctctatataattgattctggcttgcaattatttcaaataatttcattttatatgtatcacagggacataatatttgtctgcattatgaaagaatatat

SEQ ID NO: 522112 - DNA, 504 bp, Homo sapiens
aaagatgtttgagaatagttatactctcatggctccataattttactcacagtgtaagttttcagagaagtttgttaattaaaaagatttcaaatcctgcatttcttctaggatatgacagaagtttacttagtttacttagttctaaaaaatcattctgattttaaagaagattgtcttcatttaaattgttaataatttgctgctgtagaaaatacactggactgagactgtrttttaagatctaatctaggggggaagggcagaatagaaccaatagtagtgcatttcagtaacacagaatagtaggtaatagggtacctactattttaaaaaaaaacatgtttttgttttctttttatgttgctaaatattttagaagaactgtagctttttaattttggtcatattaattcttgaaatacctggttttgaagtggttagtgttggaggtaagtaagctcttactggtagagctcattcacatacttagtccttaattat

SEQ ID NO: 522113 - DNA, 638 bp, Homo sapiens
gagtcagggatactagagctagaaatatgccctgggaggacacaggatttagtgtkccttctcaaatcctctccctctccttgtttctcttttcctcccaaatatattctactaaattcttggtgaaaatttttacaatttatgtgcaagcagttttagaaactgaacattcatgagttgattaaataaactagagcaaattgctgcaattagataatatgcaatgattaaatataaatattgcatttaatagcataaaaagatgttccaaatatgttgtaaacaaaaagaaaaaatttagtttaagctccaattttctgtttaaaaaatatgcaactgtgtagtagagtatgctaccttctgggtagtttttaaaaacaggatttttttttttctgattttttttgttcgtgtatatttttaaattttcctgttaataatttaaataaaattattgaataattaagttaaacatttcagaggcatttggtcaaacatatattttaaggggctacatgtgagtttttattaataatagttgcattggatttacaagcaaatttgagggtttttttcgtttttagctttatatacgtaatagcttttctgacatttgtcaaatattctgttaaataatc

SEQ ID NO: 522114 - DNA, 638 bp, Homo sapiens
gagtcagggatactagagctagaaatatgccctgggaggacacaggatttagtgttccttctcaaatcctctccctctccttgtttctcttttcctcccaaatatrttctactaaattcttggtgaaaatttttacaatttatgtgcaagcagttttagaaactgaacattcatgagttgattaaataaactagagcaaattgctgcaattagataatatgcaatgattaaatataaatattgcatttaatagcataaaaagatgttccaaatatgttgtaaacaaaaagaaaaaatttagtttaagctccaattttctgtttaaaaaatatgcaactgtgtagtagagtatgctaccttctgggtagtttttaaaaacaggatttttttttttctgattttttttgttcgtgtatatttttaaattttcctgttaataatttaaataaaattattgaataattaagttaaacatttcagaggcatttggtcaaacatatattttaaggggctacatgtgagtttttattaataatagttgcattggatttacaagcaaatttgagggtttttttcgtttttagctttatatacgtaatagcttttctgacatttgtcaaatattctgttaaataatc

SEQ ID NO: 522115 - DNA, 638 bp, Homo sapiens
gagtcagggatactagagctagaaatatgccctgggaggacacaggatttagtgttccttctcaaatcctctccctctccttgtttctcttttcctcccaaatatattctactaaattcttggtgaaaatttttacaatttatgtgcaagcagttttagaaactgaacattcatgagttgattaaataaactagagcaaattgctgcaattagataatatgcaatgattaaatataaatattgcatttaatagcrtaaaaagatgttccaaatatgttgtaaacaaaaagaaaaaatttagtttaagctccaattttctgtttaaaaaatatgcaactgtgtagtagagtatgctaccttctgggtagtttttaaaaacaggatttttttttttctgattttttttgttcgtgtatatttttaaattttcctgttaataatttaaataaaattattgaataattaagttaaacatttcagaggcatttggtcaaacatatattttaaggggctacatgtgagtttttattaataatagttgcattggatttacaagcaaatttgagggtttttttcgtttttagctttatatacgtaatagcttttctgacatttgtcaaatattctgttaaataatc

SEQ ID NO: 522116 - DNA, 571 bp, Homo sapiens
tggcttacacatcttgtttggctatgaagaaaatcagggttggagctttgattctaggtttcagagtttgatgtaattcttagttttgctcaatgggaaatgaaaatcataatataaagtgtaactttcttagaattgaagggcatcaatagatccaaakgggaaagacaaaactaggaaattgatggagatttcaaaatgtttgaagtaatgttaatctaaaagtagttcatgtttctccaaagaacaacagtttgtaggcacaacagaacagaaacaacgtagaaattgttaagtacttcttccaagaaaacacagggacctgggcacagtagctcacacctgcaaccccaacactttggtaggtcaaggcagaaggattgcttgagcccaggaattcaagaccagcctgggaaacataatgagaccctgtctctacaaggaaaaagaaaagctaggtgtggtagcatgtgcctgtagtcccagctacttgggaggctgaggcaggaggatcacttgagcctaggaggtagaggctgcagtgagctatggttgtaccactgcactccag

SEQ ID NO: 522117 - DNA, 476 bp, Homo sapiens
aattaaatagaaaacttgaggggctctgatgtatccatatcattatttattagtaaagtgttttagctgagccccttactaccaagacacagggaatgagagttactctctgttttccagaactcaactactgccttatcaatatcgcaagattaaaataagaaactatcttggaaatagtaataaataattattattgtttgctctgccragagctcacacacattttcatacagtagattatgtcagactgtataaatctgaatcctgactctaccatttttaactatatgaccttggcaaattacctaactcttctctacctcaattactgcatctataaaatagaaattaaaataatgcccatcaaatggataacatttgccaagaacttagaatactacctggtatacattaaggcaatgttttcaactttgcctctacaagggacatttgacaatgtctagtgatgtctt

SEQ ID NO: 522118 - DNA, 476 bp, Homo sapiens
aattaaatagaaaacttgaggggctctgatgtatccatatcattatttattagtaaagtgttttagctgagccccttactaccaagacacagggaatgagagttactctctgttttccagaactcaactactgccttatcaatatcgcaagattaaaataagaaactatcttggaaatagtaataaataattattattgtttgctctgccaagagctcacacacattttcatacagtagattatgtcagactrtataaatctgaatcctgactctaccatttttaactatatgaccttggcaaattacctaactcttctctacctcaattactgcatctataaaatagaaattaaaataatgcccatcaaatggataacatttgccaagaacttagaatactacctggtatacattaaggcaatgttttcaactttgcctctacaagggacatttgacaatgtctagtgatgtctt

SEQ ID NO: 522119 - DNA, 629 bp, Homo sapiens
ttggaataattgtacaactattaaaaatatttactgctactgtgggtatcaatgcaaggaagttttcaacgctacaatagaaaacttcatctatgagtatcacgtaggaacactcatacccaaatagagagggtcatgaaatcttctaatcctrtgatgctatgaaaatagaaattgaacattaaatttatgcaacttaatatttgcatagtgttcatcaacgtgttgaacaatcatctggttgttaaaatagacaccaggacaaagtcagaagggaaatattcttgttggccttagctctagatttcttaaggaccaagattctgtttcagtgtgatttatcccaggccatgttcaggtcaatcattgcttattgagaaccttctaaatgccaatctccatgctaggtatcagttatacaaaaatgaatgggacaaagtttctacatcatgcggctttttgtcagtcagatgctctatttcccattacaggggcacctgttttcagcctatctaagcagattcatctcacataaaacctcttcaggtctctgccttacccagatataagaaaagtacaactagagtacatctccatagaaatacgcttcccctttccttcctcattca

SEQ ID NO: 522120 - DNA, 611 bp, Homo sapiens
ctgctggatgttcccaaggctttacatgaattgtgtttcgctaacccaggaactcccaggttttacttaaacacattgtcctagcaccagctcatccatcatgccagtctctaaacaaacgaaggccagcctgcccaggcagagctgaacaggaggcaacaactggaggattaagaccaattccaaattgtacttgcaatacatttcaaatattaactcagtttttgacagtatttttcttgaatctaatatttcttttcttagatcctttcatttctagacctatttacccaaaagaagagcaaatcaattaaaaaaaaaacaaagcctcagaaagaaatgcctgatagctcatatagttcttctatgactcaaacacaagagggaaggagataaatggaaaatcacaaggcaagtatgaatttccacaaaatgctaagatttttcatttcaaaatatytgacttctaaattaaacacacctcagcatttctgtaatgattatgaataaagcttttatttttgacatcctaattacttttgttgacaggtttttttttgttttttttctgttttgtttgtttaaatcaaaagaaaaaaataaagcactca

SEQ ID NO: 522121 - DNA, 612 bp, Homo sapiens
catcatattgtatgtgtgtgtaagtgatatattctctattcacaaatacttttctttcactctaacatgtgaatatcttggctgggtctatgactcttaacttataatctattgatccctcttcttagtataattttaccttttttctaacattcagtgtagaatataagagtccaagccagttgaatggttttttttctcttaaattaacccatgcttaatttctcttaaattaactcatgtgttctgtcttcttctagaataaaattgttctctaaaaactacaaactaatgtatttggggtttggagggcagatgagcaagtgtagcttcttatttaaatagaccaggcatgttggttgttggcaagtgagaagataggatgtcatccatgataataggaggaatagcccttgtccaacaattttgcagttttctctgaacattctagtagcaggaagtacagagactgaaayagtcaaactgtcccatatctatggatgtctggaataagttaaggggtcaagattggacaaaaaaagcaaaaagaccatgggaaaaatacagttcacaaaactttaaattctgcagctgctattcctgctattcgat

SEQ ID NO: 522122 - DNA, 606 bp, Homo sapiens
ttttttggttaagaaagttggtatgagattaatcacatatcacataagacttgatgtaaatattccttttgtcacatttctacctacttttaccaccaggctctatccacaaacttgtcatttatttgtggaatattttatccacaattagcttttctgttttataaatgtacaaacataagtcagtacctttttttmttttcttttcttctttttttttttttgagacagaatctgagaacctgagtctagctctggctctgtcacccaggctggagagcagtggtgcgaactcggctcaatgcaacctccacctcctaggctcaagcacttctcatgtctcaggtggaattataggtgcccaccgccacgcctggctaatttttgtatttctagtacagatgggtttccaccatgttgatcagactggtctcaaactcctggcctcaagtgatccacccactttagcctcccagagtgctgagattacaggcgtgagccaccgtgcctggccagtaagtcaatatcttcaaaagagatcagatgtcttgctagtttaaaaaggtggagcatcaggatattggcatcatacagagtcagtaaaag

SEQ ID NO: 522123 - DNA, 647 bp, Homo sapiens
ttttttggttaagaaagttggtatgagattaatcacatatcacataagacttgatgtaaatattccttttgtcacatttctacctacttttaccaccaggctctatccacaaacttgtcatttatttgtggaatattttatccacaattagcttttctgttttataaatgtacaaacataagtcagtacctttttttattttcttttcttctttttttttttttgagacagaatctgagaacctgagtctagctctggctctgtcacccaggctggagagcagtggtgcgaactcggctcaatgcmacctccacctcctaggctcaagcacttctcatgtctcaggtggaattataggtgcccaccgccacgcctggctaatttttgtatttctagtacagatgggtttccaccatgttgatcagactggtctcaaactcctggcctcaagtgatccacccactttagcctcccagagtgctgagattacaggcgtgagccaccgtgcctggccagtaagtcaatatcttcaaaagagatcagatgtcttgctagtttaaaaaggtggagcatcaggatattggcatcatacagagtcagtaaaaggagcaagtgttagagaatgtgtcagtgccacctgaggaagg

SEQ ID NO: 522124 - DNA, 606 bp, Homo sapiens
ttttttggttaagaaagttggtatgagattaatcacatatcacataagacttgatgtaaatattccttttgtcacatttctacctacttttaccaccaggctctatccacaaacttgtcatttatttgtggaatattttatccacaattagcttttctgttttataaatgtacaaacataagtcagtacctttttttattttcttttcttctttttttttttttgagacagaatctgagaacctgagtctagctctggctctgtcacccaggctggagagcagtggtgcgaactcggctcaatgcaacctccacctcctaggctcaagcacttctcatgtctcaggtggaattataggtgcccaccgccacgcctggctaatttttgtatttctagtacagatgggtttccaccatgttgatcagactggtctcaaactcctggcctcaagtgatccacccrctttagcctcccagagtgctgagattacaggcgtgagccaccgtgcctggccagtaagtcaatatcttcaaaagagatcagatgtcttgctagtttaaaaaggtggagcatcaggatattggcatcatacagagtcagtaaaag

SEQ ID NO: 522125 - DNA, 647 bp, Homo sapiens
ttttttggttaagaaagttggtatgagattaatcacatatcacataagacttgatgtaaatattccttttgtcacatttctacctacttttaccaccaggctctatccacaaacttgtcatttatttgtggaatattttatccacaattagcttttctgttttataaatgtacaaacataagtcagtacctttttttattttcttttcttctttttttttttttgagacagaatctgagaacctgagtctagctctggctctgtcacccaggctggagagcagtggtgcgaactcggctcaatgcaacctccacctcctaggctcaagcacttctcatgtctcaggtggaattataggtgcccaccgccacgcctggctaatttttgtatttctagtacagatgggtttccaccatgttgatcagactggtctcaaactcctggcctcaagtgatccacccactttagcctcccagagtgctgagattacaggcgtgagccaccgtgcctggccagtaagtcaatatcttcaaaagagatcagatgtcttgctagtttaaaaaggtggagcatcaggayattggcatcatacagagtcagtaaaaggagcaagtgttagagaatgtgtcagtgccacctgaggaagg

SEQ ID NO: 522126 - DNA, 647 bp, Homo sapiens
ttttttggttaagaaagttggtatgagattaatcacatatcacataagacttgatgtaaatattccttttgtcacatttctacctacttttaccaccaggctctatccacaaacttgtcatttatttgtggaatattttatccacaattagcttttctgttttataaatgtacaaacataagtcagtacctttttttattttcttttcttctttttttttttttgagacagaatctgagaacctgagtctagctctggctctgtcacccaggctggagagcagtggtgcgaactcggctcaatgcaacctccacctcctaggctcaagcacttctcatgtctcaggtggaattataggtgcccaccgccacgcctggctaatttttgtatttctagtacagatgggtttccaccatgttgatcagactggtctcaaactcctggcctcaagtgatccacccactttagcctcccagagtgctgagattacaggcgtgagccaccgtgcctggccagtaagtcaatatcttcaaaagagatcagatgtcttgctagtttaaaaaggtggagcatcaggatattggcatcrtacagagtcagtaaaaggagcaagtgttagagaatgtgtcagtgccacctgaggaagg

SEQ ID NO: 522127 - DNA, 647 bp, Homo sapiens
ttttttggttaagaaagttggtatgagattaatcacatatcacataagacttgatgtaaatattccttttgtcacatttctacctacttttaccaccaggctctatccacaaacttgtcatttatttgtggaatattttatccacaattagcttttctgttttataaatgtacaaacataagtcagtacctttttttattttcttttcttctttttttttttttgagacagaatctgagaacctgagtctagctctggctctgtcacccaggctggagagcagtggtgcgaactcggctcaatgcaacctccacctcctaggctcaagcacttctcatgtctcaggtggaattataggtgcccaccgccacgcctggctaatttttgtatttctagtacagatgggtttccaccatgttgatcagactggtctcaaactcctggcctcaagtgatccacccactttagcctcccagagtgctgagattacaggcgtgagccaccgtgcctggccagtaagtcaatatcttcaaaagagatcagatgtcttgctagtttaaaaaggtggagcatcaggatattggcatcatacagagtcagtraaaggagcaagtgttagagaatgtgtcagtgccacctgaggaagg

SEQ ID NO: 522128 - DNA, 565 bp, Homo sapiens
atgatagaaaaccagaagttacacaatcatacatgcattaatgtggtagtgacctagaggatagaaaaccttagtgcatgtcttcaatgatcttatacaactaataagaatgatcttatacaactaatggtcttgatttcttaccacctgtgcaaatgatactactaatccttgtgttgactacctcagcaaacaattgtagtcatcacgtgagatcatccatatggaaatatattatacaaaagaattamtaataccttaaaagggaattcattattatttccaagcacttaccagaaaagttggctcctgtgagaatctcagttaattataagtgtatttacaatgtggtctctagatagcaaacctgctcttttaactattcaaactgattctttgagggactcagacatagatctagggattctgattcacacaatcttagatgatgccaaggcaagggtaatttgtaaaagcaacctttctccacccccaatatgatgtggtatagttgataagtaatcctaacacagtgtttttcaaacttgcctccactttggaatca

SEQ ID NO: 522129 - DNA, 565 bp, Homo sapiens
atgatagaaaaccagaagttacacaatcatacatgcattaatgtggtagtgacctagaggatagaaaaccttagtgcatgtcttcaatgatcttatacaactaataagaatgatcttatacaactaatggtcttgatttcttaccacctgtgcaaatgatactactaatccttgtgttgactacctcagcaaacaattgtagtcatcacgtgagatcatccatatggaaatatattatacaaaagaattaataataccttaaaagggaattcattattatttccaagcacttaccagaaaagttggctcctgtgagaatctcagttaattataagtgtatttrcaatgtggtctctagatagcaaacctgctcttttaactattcaaactgattctttgagggactcagacatagatctagggattctgattcacacaatcttagatgatgccaaggcaagggtaatttgtaaaagcaacctttctccacccccaatatgatgtggtatagttgataagtaatcctaacacagtgtttttcaaacttgcctccactttggaatca

SEQ ID NO: 522130 - DNA, 342 bp, Homo sapiens
ctgctgtcacctttgaaactgatttcctggctctwacttcaaacctttattcacatacaacaaatcaaaatttacataaaaggcaaattctgcttttatttactgtgtgattatcaccattgcaactgctgatttctccccaaagccttgtaactacagttgcctagatttcatatagatccctgagggcagaagagagccaataaatccaaaggaaataagtgaaatggaatacgttacccttgtctgttttagccaggaatgtaaaattatgtttcaagatgtcaattaaaggagcagctacaattttccccactagagaatgttaccttgatgaaaatt

SEQ ID NO: 522131 - DNA, 545 bp, Homo sapiens
gttggaattttcagttgttttcatatgtttgttattattctaaaaacttcaggaaatatttatgtgtgtattgattttttatttttaagtaattttgtcagaataaatcctgaagatatatattatttagacaaagggtatgagcttttcaacaactcagtatgtgttctgttttttgtttcatgaggtatttccattaactaagaaatagcctattattttgccaaagtagagatgctattggcagcacttactaattgtttaacactcgaatatattggatgataaacattggtattgaattgtctgtgggcttttcatctagtgtatctatttactcttcctgattatcttgcatacctcctgagtacaggtcttgtccttgcatgattcatacggtcagcccctaagtcaggcatctccaatctctggagtcrgagatctgccccctcattgtggtagattatcttctgaagttttcccacagacacttttaggaaagaaatttgactggaaaaatggaaacgttccacttgctttcccag

SEQ ID NO: 522132 - DNA, 620 bp, Homo sapiens
tctcactagaatacatctttagttacagtttcattgtatattttctcagcaaagcacatgccacctggtggctgaaagaagtatgtaacataataggtttccaaaatactgtggaaaaccaaaggttccacaatatcattttgaatccgtttctaaaccagtagcaaacgtgtattttggggcaagacgcaccacagtggcaaatcttacacsttcaaaagttaacacccagtggagtctgtgtcaaatggagacacgaaacagcaatactccattttaagtattttttaaaatctttccagaattgttttgcattttgaaatatgtttgcttctttatgtcatgtccattttactaacagaagtaaaattgtttacatgcagaattgcttgtcctggtacacacctagaaaacggaggtaaatatctattttttccttcaactaactaagaagggaggtgattagccaatgtgggaggcatttttttcttccagaatttttactggagtaggccctatgtgttagattccatgctaacagagggtaaggtgatagagaggaatctctggaggaactctcattgtattgaaattcagaaaatctggcttccggctcacag

SEQ ID NO: 522133 - DNA, 484 bp, Homo sapiens
aaatatacatttccactggcaaaatgataaaattagtgcccccaactcacttgaactttttttgcacatatattacaaacaataaagctatatacacgttggttcatttttttcctttcctttctcttttcctgtttgcttccctaaaaaaaaaccagtgataagattcagaaaaagatatttttaacattctctccagggccattatgaggaactttgttgcaataatgataatacccacttttcgtgggtctgacatgtagaggatgagattctaggttagtctggcaagcaaggcacgtaagattattttaaaaaatagtaatggagtctgcaatcctcaattctacagagattgttgttaaaattaacttttaaaaaaactaataatatgtgaaatragaatagaaaagtaagtaaaggataccaggtggggtaagaacaggtggatttatttttaaataatagttctagcttttgaaat

SEQ ID NO: 522134 - DNA, 626 bp, Homo sapiens
ggtaggaggaagtggtgaataactgctgatggatgtggaacttttaggggtgataaataaattacattgattgtggtgatagatgtacaattctgtgaatatactaaaatctctgaattgtataaaagggtgaatttatggtgtgtgaattatatctcaataaagttattcaaattctagtgttctgtagtactgtaagatgactatagttaacagtaatatataatttcaaatagctagaagtagtatagtgactgttcacaacatgaagaaatgataaatgtttgagatgatgagtatgctgattaccccaatctgatcactatacattatatgtattgcaatgtcactgtgtaccccataaatatgtccatttttatatgccaattttaaaaackctacaaaaatattaaaaagattaaaaattatagtgttggagtttactcaataagctaatttagacctgcagtctatgctatcttaattcatgtatgctatcttcatactatattttaattcacacgctatttctttcaagacagaagcagtgaatttgtgcttcattttattttgaggccctagtaatctctctatatgatatacttcagtaaacattcgtttaatga

SEQ ID NO: 522135 - DNA, 651 bp, Homo sapiens
actgggaatataaagatgaaacaatagacattctgcctttaacaaagttttagaaaaatagaaggtaactatatagaaaatgaaataatgaccataagcaagaaggccacaatgaggaacaagcatgggcatatgccagatattttttcagaggcagaccgtagataaacagatcctactagtgggtcaattaagttattgtattttgtagattatacagctacttaaaatcataggaggccaggtatggtggcttatgcctgtaatctcagcattttgataagccaaggtcggaggagagtatgagcccaggagtttgagaccagcctgggcaacatggcgaaacccgtctctacaaaaaaacttacaaattagtcaggtgtggtgatgcacacctgtggtcccagccactcaggaggctgaggcaggagtattgcttgagcccaggargtcaaggctgtagggagccctgtttgcaccactgcactgcagcctgggtgacaaagtgagaccccatctcaatctgcctgcctgcctatctatctgtctgtctgtctatctatctatctatctatctatctatctatctatctatctatctatctatctatctaccattaatcatctatccatctattatatgtatgtaca

SEQ ID NO: 522136 - DNA, 358 bp, Homo sapiens
ctcccgagtagctgggattacaggcgcccggcaccatgcccagctaatttttttgcatttttagtagagagggggatttcaccatgttggccaggctggtctccaactcctgacctcaggtgatccatctgcctcggcctcccaaagtgctaggattacaggcatgagccaccaygcccagcctacaagtatttgaatacctgttttcaattattttggttatatactctccatagaattttaattccctcaagctgggagaatcatccctgccctgccttactcttgggctggtgtgaggatcaagtatgacagtggagaaaaaatagtcgtagcagtgctaacaactccacggcct

SEQ ID NO: 522137 - DNA, 553 bp, Homo sapiens
ctcccttcttttcttctcctctgtgcctattggatgataagccctcaccttccaagatgaaatttcagtggaattaagaaagataaacccaggctatcttggatggtggatgatgctgggggcaagaattctgggcaggagacaaccaaagttgagggtggtcagctccactcaagggtttctagaggcagagacccttgaactgaatcttgaaaacagaataaattaaggagcgtgctctaggcagaggaacctgaatggcaaagacacagtggcttgattcagcatggagcaggttcagggtcctccttctcaatgcaaggcctagggcctctgtcttcctgttcataaagcatcarcctaagggcccctgcactggtgctgtgaacctaagggctctaatggagacaggattgccatgtggcctagcatcctggagatttcattgatccatccttggacccagtaccctcgaggcctgtcacctcctctgccccattctgcccaaatgccttcccacggctgcagaccctgcatcctcctccctgcccca

SEQ ID NO: 522138 - DNA, 641 bp, Homo sapiens
gtctttggaaatctgccatagatattcatggaattaattaaaatatactggatttaaatggagatagatagattgattgattgatgtacatgatttaaggtatagagtcagccctccatatccctggttgtgcatttgcagattcaatcaacagcagatcaaaaatattcagsaagaaacattaataaaaataaaacaacaattaaaaatagtacaaatagaaaacaatacagtataactaatcacatagcatttacattgtacttgttatcagaagtaatctagagacaatttaaaatatataggaggatatgggtaagttataggcaaatgttaccccgttttataaaagggacttgagcattcatggattttggtatctgagtgggtctcaaatatgcatatgattgtatgggactgtattcacaatggcaattgacgatctgctgaaagcaactcctctgggttgagcctccactcaacaaattaccccattccaaagacttggcataagggaataggtgggagttgttctccttatcggatcaatcttatttagtagcatcccagcaaaggcttagagaaggaagaaaaagaatgcagaaggaagaaacgaaggagagggaaaaaggagaagggaa

SEQ ID NO: 522139 - DNA, 607 bp, Homo sapiens
ctcaatgtacgaacatgtgtgcacatgttactaagacaattaccatgttaatgaaatattcaatttgaaaaagaaaaggaaattaagtgtttaatactgaattttcctttcaatatgattttagctctatctcatcacttgacacatattgttttcctttttttcctcaatctggctcgaaatggcaatttygacttactcttgttctcaaatggagttgaagagggggttttaaatttttcatgtggttgggtttttgtctcatttctacttttgttttaatttctggttttattgcttggtggtcagaggcctctactatttctattatagggaaagctactaatattttctttataaccatagtgtatttgtccattttcacactgctataaagaaatagccgagactgggtaatttataaaggaaagaggtttcattgactcacagttctgcatggctggggaggccttaggaaacatacaatcatggcagaaggcgaaggggaagcaagcttggaccttctcacatggtggcaggagagagaagagtgaggagtgaagggggaagaaccccttataaaaccatcagatcttgtgagaactca

SEQ ID NO: 522140 - DNA, 607 bp, Homo sapiens
ctcaatgtacgaacatgtgtgcacatgttactaagacaattaccatgttaatgaaatattcaatttgaaaaagaaaaggaaattaagtgtttaatactgaattttcctttcaatatgattttagctctatctcatcacttgacacatattgttttcctttttttcctcaatctggctcgaaatggcaattttgacttactcttgttctcaaatggagttgaagagggggttttaaatttttcatgtggttgggtttttgtctcatttctacttttgttttaatttctggttttattgcttggtggtcagaggcctctactatttctattatagggaaagctactaatattttctttataaccatagtgtatttgtccattttcacactgctataaagaaatagccgagactgggtaatttataaaggaaagaggtttcattgactcacagttctgcatggctggggaggccttaggaaacatacaatcatggcagaaggcgaaggggaagcaagcttggaccttctcacatggtggcaggagagagaagagtgaggagtgargggggaagaaccccttataaaaccatcagatcttgtgagaactca

SEQ ID NO: 522141 - DNA, 302 bp, Homo sapiens
gctggccaacatggcgaaaccccatctctactaaaaatacaaaaattagctgggcgttgcggcacatgcgcatagtcccagctacttaggaggctgaggcacaagaatcacttgaacctgggaggcagaggttgcagtgagccaagatcacaccactacactgcagcctgggcaacagtgaggctgactcaaaaaawaaaaaaacaaaaaacatgagaaaaaaaaaaaacaaagaatgcctggcagaccattaatgtgccaaattcatcaagacaggcttaccagcgtgatttttgccccaa

SEQ ID NO: 522142 - DNA, 558 bp, Homo sapiens
tgtccccaagtggtggatgtttagtttattgtcctaagaaatgatccagcaggggccgagtgtgatggctcacacctgtaatcccagcactttaggaggctgaggcgggaagatcacttgagatcaggarttcgagaccagcctggccaacatggtaaaactctgtctccactaaaagtacagtaattagctgggtgtagtggtgtgcaactgtaatcccagttaatcaggaggctgaagcaggagaatcatttgaacccgggaggcggaggttgcagtgagccgagattgcgccattgcactccagccttggtgacagagtgagactccatctcaaaaaagaaaaaggaaaagaaaaagaaaaagaaaaagaaatggtccagcaggtaaaagtagtgtccttatgtgaataaaaccaatttggcaatcatcattatcatcatcaaaatggccaaaatttatcagacatcatgctattaatttgtattaaatctgtacaaccacccactaggtcattctcattattgtccccagtttgcatatggaaaatctaaggct

SEQ ID NO: 522143 - DNA, 616 bp, Homo sapiens
tgctggtgctagttttataaacgcaaataccattcccattctcaggcttctttcctagtgtgaaggacagaygtaagtgttaccagcacagggagctcagggagcttgtaatgggtgacaaaactagtctagaaagccagagaggtgatatttaagcagagaacctgaaatccaggtaagaaagactagccagacgggagaaggaggaccagcatgtgcatgggtcgatgggggagcttctgaaagcccaggacatgaagctcaaattctttatcaagagaaaccttggtccctaaagggagaccaccatgagttcactagactttcaaagcaaatcacaagggtgacgaaatggtttgagcacagggctgagaactttgatttcttttcaattcacaaaattactaagctcatattttgagcagctacatccattttcccttcttcccatagtcttgccctgctatattgactaccattcagtctcagaattaatgtcatttccacaaagaagcccccaggagcacctagccctggttcccctaaattcctatggaaaggactcttggtatcactcagcactttcatgcttcccatggtctaccgggtgccacat

SEQ ID NO: 522144 - DNA, 465 bp, Homo sapiens
aatgtttattcctgagtgctgctgaagtttcatggtggtttggaattacaggattaatgtggcaagaaataactaatacacagattgaagctgctctgttggcctgcacctggagtacagaagatgtaggacagagctacagcaagcaggcacaaggcacaaagcattaacaagaaagaaacattcatgtaagccactgagatatggagtctatttgttacccagagtaacctagcccatagtgactgatataccaactgacatgcctaactgtgcttgattcctcaatttctcatttctttttttctygctggttgatttcttttctatgctttctatttcatagaaactgcggttgcacagatctcctgtgacatggacatgcaacctcttctttcttggttattcatcctgaattttccctgactttggtcctatttctttaatttttttaaattttaattt

SEQ ID NO: 522145 - DNA, 523 bp, Homo sapiens
gcccttcatcagtcacgtgactgattctggccaatggaatgtggccagaagtgatgaaggtcacttatctggcctaatcactgctttctgaagcatggttttttattcactctctctctttctccctctttctctctctctctctagaagcaaatggccccgagatggcaaagccataccatgaaaagcgactggacctctgartcacctctttgagcagagagagccagaagatcctcttcactcacactgaacagtggcacgtgggtgaaatcacactgtgctgagtttctggaacctcaggaatctttggtacagcaaagatgatactttgattaatacgccaaactccaagcttagaaaatctggatgtacagcctgtgttcttaattgcaatgttattttttctcttccttcttccttttctgaataataatacttctaagattgctgaataaatccgatattgattgagataatataagtgtggtaactataatgcgtttgtagcatacctggtatt

SEQ ID NO: 522146 - DNA, 349 bp, Homo sapiens
gcaaatgcagcaacagctcctggaagcacgtgtgctatggaggggaattgatttttctcctccttggggagatggaaatgctcatactttagagagagcaaaagtaatatgctgaaaagcttaggagtgggggaattttacattaaatgacctgtttttgtattaatgttctatggtgagaacacatttgtttgtgagtgatttcagagaaaaaacggccatgggctctatgtgcttgctatagatgattaggctacaattacaagtattgggccaaaataagaagattaaaaatagagctttgattatggtgaaatttctttayagtaaaactgaacccaatgtaaaa

SEQ ID NO: 522147 - DNA, 524 bp, Homo sapiens
gcttttctttgtaccaggcaggggacctattttacaactggctttgaggagcttgccatctgaacagtctttagtagtatgataattacagagacacttcgtacaataatcaaatccacagccttctcgtttgcaggttgcccgttgtaaatagcaatcatattttgcaggtgaattacagcgaatacaggctttgaggctttcgttctttttcaatgtcttggcaacctaaaaagaaaaaaaaaacccattaacaaatttcagcaagaattacatgtactttagttaataaaaccaaggacacccttgcaccttccccaattcatgtatgaaatatcactgtcacacatacgataactactgccctaactattgccctttatctatgcaktatctgatagatgctcaataaatgctttttgaataaatctgtatgttgcattagtcattatggcataaaatttaagaatagttttattatgtaggatttatatttactgatcaacatgaatcagaaaatattc

SEQ ID NO: 522148 - DNA, 601 bp, Homo sapiens
ccaaaaatgaaataaagtgagaacttgtcaaagaaataaattgaaactgaaataaaaaatgaaataaattgagaacattgtcaaagaaatattctatccaccactttcccatcactttccaaccccagaggtcctagatttaaaaaaagaaatttccaaagcttctgtttcaagttttctacaaacaaatcagcatttaaattcaattaatattcaattaaattgttacagagattaaagatataaattatagtccagcatccttgcttcaatggggaactgctcttcttccaattcacaagcatataacgaaccacagtgagttggtctcaaagtgaccaacgagaatctttcttcaagggttttgcagaggaattaaaaaaaaaaagaaagtcagttcrtttttaacaatagagaaatgagtctaaagagctgatggtggccatgctttcaactagactatgtctaaatactaaaacattatatggatatttatatatttatatgtattatttttatatctgtgcctatatctgtatctatctatcctaatgtgaatagtgaatataaggaatcaaaactctaaataaaacattaacta

SEQ ID NO: 522149 - DNA, 601 bp, Homo sapiens
ccaaaaatgaaataaagtgagaacttgtcaaagaaataaattgaaactgaaataaaaaatgaaataaattgagaacattgtcaaagaaatattctatccaccactttcccatcactttccaaccccagaggtcctagatttaaaaaaagaaatttccaaagcttctgtttcaagttttctacaaacaaatcagcatttaaattcaattaatattcaattaaattgttacagagattaaagatataaattatagtccagcatccttgcttcaatggggaactgctcttcttccaattcacaagcatataacgaaccacagtgagttggtctcaaagtgaccaacgagaatctttcttcaagggttttgcagaggaattaaaaaaaaaaagaaagtcagttcgtttttaacaatagagaaatgagtctaaagagctgatggtggccatgctttcaactagactatgtctaaatactaaaacattatatggatatttatatakttatatgtattatttttatatctgtgcctatatctgtatctatctatcctaatgtgaatagtgaatataaggaatcaaaactctaaataaaacattaacta

SEQ ID NO: 522150 - DNA, 619 bp, Homo sapiens
ccatcccccagaaaaaattaacattatttgcaaagatttataaaatgtcaaagaataraagcaaaacttatttatgttatctgaattaaactcagaattgctatttcagccgaatgtaatatataaagtaatttaaataaatactgatgaaattatctcttaaagagatactggccttaaagatgtaactgtacagctacctaatataatttggcttgcttctcagctttctaatatatctcctttttataattggttctttttattaaaaatgaattgttatccatgtcttcagatgtggatcttaatttaatcaaatgtgaagttttaggttaattttgagcatattcaaactcatccccaattcagtaagagacatgcagaaaatggttttgctgttgatttttaaatctccaaggcagcattcagtgctcatttttgtgactaccactttaaggggaagcattttggaaaaggcctcctgagagcatttataataaatctttcctgactttctttaaagcaggaaagaaaaatccatttaagacaatgctttaaggcaaaatgttacctgacttcagattcaaacttttcatttattagggaagaagttaaagtc

SEQ ID NO: 522151 - DNA, 619 bp, Homo sapiens
ccatcccccagaaaaaattaacattatttgcaaagatttataaaatgtcaaagaataaaagcaaaacttatttatgttatctgaattaaactcagaattgctatttcagccgaatgtaatatataaagtaatttaaataaatactgatgaaattatctcttaaagagatactggccttaaagatgwaactgtacagctacctaatataatttggcttgcttctcagctttctaatatatctcctttttataattggttctttttattaaaaatgaattgttatccatgtcttcagatgtggatcttaatttaatcaaatgtgaagttttaggttaattttgagcatattcaaactcatccccaattcagtaagagacatgcagaaaatggttttgctgttgatttttaaatctccaaggcagcattcagtgctcatttttgtgactaccactttaaggggaagcattttggaaaaggcctcctgagagcatttataataaatctttcctgactttctttaaagcaggaaagaaaaatccatttaagacaatgctttaaggcaaaatgttacctgacttcagattcaaacttttcatttattagggaagaagttaaagtc

SEQ ID NO: 522152 - DNA, 496 bp, Homo sapiens
tcagttctctccagaatcagccttatcctcagctacattttctggagcatttctcttctggctttgaaccatctgtcatttggcagataagctgtattccgagacatctatattcaactgccacttttcaaaccctgtgagtatggactaattcaagacgagactatgatggtctattttaacattttgttttccttagtttcattcaaaatcctatcacrtaagggaaaaatttagaaaacttcaatggcaaaatgtagcataattgcttctaggaagtttcccttaccttctgtaagcttttagtggcaattcaataaattttcaagccttgcaaagaaggagaataccatactattacctctagtcaataatgaagattcgctggggattcagctaattcagaagccttacaggtttccagcatctgtagtatttttctccttagctacatttaatcccagtcctgaatacaatattttaattagttatgacc

SEQ ID NO: 522153 - DNA, 621 bp, Homo sapiens
tgctgcataacagccaaaagggtgaatatacaaatatacagtgtaattgagggaaggagaagaacagagataaaactgagaaacacactgctatatgctggtatgacctttttcagtttgtcccttccttatcagtgtctttctaattgagacattatgaccttagtataaaacacccaggtttcattctatcaaatctaaagcctaccaaccagggcamaaaatagaccatcagcctcattagcaaatagggcctagaattgatcacgttgctatagactcaatatctgttgggcttagagtggagtctggacatcgaaataataattgagttggcactcttcagtgcatttggtcagcatatatcactgtaccactgccaccaaggtttgcagttgtacattgctcctcatctggaatgggaatgccacccactgatatggagtctagcccttctgagtctagcctttgccagatcttgtccttggaataaggacctcacttcccttactctgagctcttggctgagatcttccatggaagggaagctttggggttaattcctctaacctgctgggcttcaaacacttatcgttcatatgtctactgctaggccccatc

SEQ ID NO: 522154 - DNA, 644 bp, Homo sapiens
tactgaactcaactgcagaggaggaaatcaaatcccaaagaaataaaagtgcttgcccaagaccacagaactagttagtagcagagctgaaaccagatcagtgcccttgcccagattaatcagattccttgccatggaccatgtggtttgtgggaattttgcatgaaaacacaaatgttaattcctcacctcagttggcaggatgctgtacgccaatctgtctatgtctggtagtataattatttatgtcactaatgtttcratatctttgtatgtattcaggttataattattgaggaataaaatatataaaagtaaaatactggtgtacctacgcgaggaggtactccagtctaggcagagaccagcaaacatattaaaagctataacagttatcttccttcctctatcacattataaaatctttaagggcagtcttagtttctttagagacattcctattgcctagcacagaaaactgccttccaataaaatgtatttaaaataaattaactctagcaaatctttccaaaatttttaatttccctatactctagtaagaatccatagcttttcataatttatacttgcctatcattatagaatattaggcccacacctaagatttgctcaccaggcaacag

SEQ ID NO: 522155 - DNA, 644 bp, Homo sapiens
tactgaactcaactgcagaggaggaaatcaaatcccaaagaaataaaagtgcttgcccaagaccacagaactagttagtagcagagctgaaaccagatcagtgcccttgcccagattaatcagattccttgccatggaccatgtggtttgtgggaattttgcatgaaaacacaaatgttaattcctcacctcagttggcaggatgctgtacgccaatctgtctatgtctggtagtataattatttatgtcactaatgtttcaatatctttgtatgtattcaggttataattattgaggaataaaatatataaaagtaaaatactggtgtacctacgcgaggaggtactccagtctaggcagagaccagcaaacatattaaaagctataayagttatcttccttcctctatcacattataaaatctttaagggcagtcttagtttctttagagacattcctattgcctagcacagaaaactgccttccaataaaatgtatttaaaataaattaactctagcaaatctttccaaaatttttaatttccctatactctagtaagaatccatagcttttcataatttatacttgcctatcattatagaatattaggcccacacctaagatttgctcaccaggcaacag

SEQ ID NO: 522156 - DNA, 645 bp, Homo sapiens
gctgaactctcagactgcactgaaaactacttacttttctcttctccaagcagtccagaggaacaggagtgcactttcacagagctcctctggggcggtgatgtgtacaaatgtatgcagcaaggttcttttcmagtagattaagtgaagggaaaagtttaacaagtgctcagcaattctgctaggatctcacttgcaaacagccatgaaaaaaaattctgtagcagggaatgggttgctgcttactgtctgttgcagggcacctcagaagcagcaagggagaccacagacttggccaaggattgctgtgtcttaactagcttccctggggactgttgcacctgatattatctggaaattggatggaaaatgatgagctcataacactccttcacaggtatatagtgtttttcatattcagaactctttaatgtttcccttaggagccttgggagataagagaagagtgattatatcctcagtttgtgaaagggagaatcaaagctgaagggtcaagtaatttgcacagaaaataattggagtcagtgtccaaccaacatcaggcctcagggattcctagtattgaagccatagctcagaaaaaatgagacccagagcttgggtctgaaaagtttatatcaaagg

SEQ ID NO: 522157 - DNA, 582 bp, Homo sapiens
ttctccagctgaactctcagactgcactgaaaactacttacttttctcttctccaagcagtccagaggaacaggagtgcactttcacagagctcctctggggcggtgatgtgtacaaatgtatgcagcaaggttcttttcaagtagattaagtgaagggaaaagtttaacaagtgctcagcaattctgctaggatctcacttgcaaacagccatgaaaaaaaattctgtagcagggaatgggttgctgcttactgtctgttgcagggcacctcagaagcagcaagggagaccacagacttggccaaggattgctgtgtcttaactagcttccctggggactgttgcacctgatattatctggaaattggatggaaaatgatgagctcataacactccttcayaggtatatagtgtttttcatattcagaactctttaatgtttcccttaggagccttgggagataagagaagagtgattatatcctcagtttgtgaaagggagaatcaaagctgaagggtcaagtaatttgcacagaaaataattggagtcagtgtccaaccaacatcaggcctcagggatt

SEQ ID NO: 522158 - DNA, 587 bp, Homo sapiens
ctgctgtgttgagtccctgagctcagagaaggcttaagccctctttaaagccctagaattaagtaagtcaggcccaacaatgatagtatcccttttgattcacctgaagtaactgacatgtgactataatcacattgacagaattccttcacagcagcacctagattagtgtttgactgagtaacagggagaagagaggtgtgagtcataaaatggtcatcgccgcttcctaagttatagcccacactacctagaaacatagtagatatagaattttagggactgtagttcagtctagccaagttaacacaacaaaaggccatcacagagctaatactaaaacttgtctagattcatcaatgctgaaaatgtgtattggtaattatataaatggaagagttgtgttactaaatgccataacwttctggaactcagacagctttgaaatggaactctctcatgcatttccctcattgagcattatgcaagaaggacatttttcttctaacattgtaagagtaatggcaagggctatagccacttagctccagctctgttgccaattaactggactccagctcaggcag

SEQ ID NO: 522159 - DNA, 587 bp, Homo sapiens
ctgctgtgttgagtccctgagctcagagaaggcttaagccctctttaaagccctagaattaagtaagtcaggcccaacaatgatagtatcccttttgattcacctgaagtaactgacatgtgactataatcacattgacagaattccttcacagcagcacctagattagtgtttgactgagtaacagggagaagagaggtgtgagtcataaaatggtcatcgccgcttcctaagttatagcccacactacctagaaacatagtagatatagaattttagggactgtagttcagtctagccaagttaacacaacaaaaggccatcacagagctaatactaaaacttgtctagattcatcaatgctgaaaatgtgtattggtaattatataaatggaagagttgtgttactaaatgccataacattctggaactcagacagctttgaaatggaactctctcatgcatttccctcaytgagcattatgcaagaaggacatttttcttctaacattgtaagagtaatggcaagggctatagccacttagctccagctctgttgccaattaactggactccagctcaggcag

SEQ ID NO: 522160 - DNA, 635 bp, Homo sapiens
tcagttctctgctcttaggatcttgatgagcttaggaatcaagctgaagagaacacttaatctaaatgcactctagtgttccacacaaatgggatcattgccattaataaagacaaaaggaagatttttgtgagcttacctagaatggttgtttctgccctttacactgcctgctgtgacattttgacttccatcttctwgatcttctttctctcttcctcttatttaccattccctaccttattcctgtgccaggctgaacaaagcagaagagaaggtatatcaagttgtttagcaataaatgtatctgataatttttgaaaatctattgatgtttcataatttttttacatttattgcccacagatatgcatattatttattttgaatcattcatataaatccataaaccaaactctcagtgatcacacatatctggccattaagtatgtggagtttctatgtatgatttattgtgtgcttggatgagtaaggactttaggcacttatttgtactcaaagaaaaggcaaagtttcaggttctcagccacctcttgctgatagcaggcactgagagcctacaggagcccctcttagctacatctatgtggacttgcagcaatcctaaaccaatg

SEQ ID NO: 522161 - DNA, 625 bp, Homo sapiens
aagatagcaggagaggaaaagaagaacaaaagaactgcaagatcaacagaaaataactaacaaaatgacaatagtaagtccctcctatcaataattactttaaatgtcaatgtattaaccacccaaatcaaaagagatagagttgctgaatgaataaaaaaataaaaacaagactsaactatatgtctacaagagacttgttttagatttaaggacacatgtaggctgaaagtaaaaagatgttctatgcaaataataaatgaaaacagggatggctacacctgtatcagaattaaaatagacattaagtcaaaatgcaatgtagatttcattattccaaacactggctagatcatatctaacaaataatgccagatagttaatattagtgtgccgaggaaaagtacaaaagtgaaatatttcctgggcctttaggatcttcaatcaattgtaaatcaaatttatatagcttaaaattactatttgtttcttattgaaaaaacaagtacagtcagcgctccatatctatgggttctgcatctgtaggttcagccaaccattgatgaaaaatatttttaaaaaacccacaacaatatacatagtaacagtacaataaaaaattata

SEQ ID NO: 522162 - DNA, 494 bp, Homo sapiens
tatggctctagatgataatgattgtaattatttaagatagaaaccaatggagggcaagcttcttgcttatcactgtgcctgatttagtaacatgctggtgtgcaggaagaactgagaagaggaagcgaatgataacaggcaaaaaagaaatttgttcacattcagtaattcatttggggatttgtgactatttcacttgggacaaaaacaaaatcgttaagtgacttgacaaacatagatcattagaatctattacactctgaacatcatctaaagtatatacactttccagtccatagtttctttttttwaaaaaaagtcaattttatttctaaactgtctcattttacctatttccatgttaaatttaatgacagttgatactgaagatttaatgtgatacttctcatcagtttgcagataattgttttgtagaatattacagtgtcctttggctttatccataccttatacagcctgttgttgaccttctt

SEQ ID NO: 522163 - DNA, 447 bp, Homo sapiens
aagcatttaaagcattggtatttcaattaggttttccatttatttaatcawtttatatttattaagtacccactctgggctaggtgctgtgctaactgtgggtgcaaaacattcaacacaacaagcatgacctagaagacacgaaatacataaatgtgattagctttatgagaaaaagaaatgcagtgttctgtaggacagtgtcacagggaccaaccaaggctgcaggtacaggaagcaggggcaaaggaagtttccccaagagaatggacacccaaatgggacctgcaagatgtgggacagtcatccaggttgggaggggcagagtatggtaggtgggagaagtatttccagttgagggaattgcccaaagccctaaagggctggtggactaagggaggagagaatttttgagaaggtggcttgaagaggtaggcaggggttaga

SEQ ID NO: 522164 - DNA, 644 bp, Homo sapiens
tccttaatttgtcttggacatatctctatagaatcagacagaatttagagatgatactagattttgaaagcattccacattttagtctaggcccagatttaattgataacataaatgttgaaacaattcaactktttttttaattgcagagaagccttaaaacataacattattttagtctaggcacagatttaattgataaaataaatgttgaaaacattcaacttttttttaaattgtagaaaagctttaagacataacattttttaaaatacaacagcgtgaaatccagtaggattttatggtttgaaaccaggaaagacatctaacagctggagaacagaaattataaaaatattctcatattcccagaaagggaatcatagttattgtattactttaaaataagtaatttataatgttatttatattaatactttgttggttatcatagtttcttagtaagtacaaacttttttgagacttgttatattagaaataaagaatcataatgcccattgtaaagatttttaaaaatgatgccctaggattaattagaagtagtaggaagagctatacacttcttttatacctttcataaagtattgagactctttgataatgtgccaagaaaaagcatatgt

SEQ ID NO: 522165 - DNA, 640 bp, Homo sapiens
cagccagcatgcatttaatgatgttattgatcactatttgtttattagagattcttgattgagaaatattgagttgtttaaagatatcgatgcttcataattatgttgtattttaatttaaattctgcttaaccttgtgaagaagaaagctgtagttttatcaggtatttgctttatgcaagggcaaccaagacactgaaagtttgtgtctgtccaaagtcacattcttaaataaacttggaaagaatcatgatgccttccctgttaggctagtagtgattattttcccaatacatttcactactgtatccttaatttgtcttggacatatctctatagaatcagacagaatttagagatgatactagattttgaaagcattccacattttagtctaggcccagatttaattgataacataaatgttgaaacaattcaactttttttttaattgcagagaagccttaaaacataasattattttagtctaggcacagatttaattgataaaataaatgttgaaaacattcaacttttttttaaattgtagaaaagctttaagacataacattttttaaaatacaacagcgtgaaatccagtaggattttatggtttgaaaccaggaaagacatctaacag

SEQ ID NO: 522166 - DNA, 599 bp, Homo sapiens
agatgatgtatatcagagacatttatttaaatgaatagatggatctatgaaaattgattcaaaayatgataaaattagtcaatgctgtcattaatttatgatggagaagtgatggggaagatggcaaggatagaaagagagggagagtaggagattgagtaacagacaaaacatctgcttcctctgataccttgtacagttaagaaagagcatacttctgaagtgggtttttcttttcctcagaataattttggcattatgataataacatctaccacaactttcttctccctgctttttttttttttattgagagggatacagtatattttcatgggggaagtgaagagctgccaatgcatcagtacctcccatccccagtacaaagaatcttcacaaaaaccccatggatattccctaacttttgttctctccaaaggatgtgatgagaaaagagacaattccagtctggaatagacacaggtctcctgtcaaaagagcttgaaatcaaatgaaggctttccgtctgctgcacagtgctccttgtttccgtgcgagtatgtttgtcctcccctttgctttggtgtcacactctaggg

SEQ ID NO: 522167 - DNA, 619 bp, Homo sapiens
gacccatcaatgagggttcatagaagagtgaagagtgtgacatggccagatctgcactttaggaaaacctccttggcgttgagttgctggaggatggattgcaggaggtgagtctgcaggcagaaatccaggtgagaggtggtgagggccttccctaaggcaggagcaggggaaggaggagacagatacgagcagtgttaaggaggcagaccatacaacaaacctaaattacacattagagtggtcaaaggagggaggagatttggaagktgccaagatttctggcattggaaattgcatcagaataaggtacacatgcggataaagtgataaggtaatgacaagctttttgtgttggtttccagtgctattgccaggacaaagttacaattacaagtctggggcttgaagacacagactagggaaccatcagagaattagtgacagtgaactagtgatgagttagtaaaagtagatgaagtgtttacaataagcagaaaagagggtgagttttgggtcctgggaacccccaccatttatggagcaactggagaaagaagagtccaggaaggtaatagagaaacagtcagagaggagacaggagaaccagggaggagct

SEQ ID NO: 522168 - DNA, 533 bp, Homo sapiens
tggggagtgtgggagaagggtggacgaggaaatggggtgactttccaccacgggccagtcaggacctctctgtggccagctcaccaggcctgtcctggcccctctcagccaggatgttaattccaccaggtcagggctggaacaggaggggatgcattmgtataatctgcacctgtatctctgctcttgccatcggccaaacaataaaagacacaatatttacacaacttaccgggggaagcaatattgggccattgattttgtgtccctcggattttcatggtctaaaccttaatggtttttaatcataaaatattagtgctgcagggcacttagcactggcaccttgctggtgagggatggcctcctccccttcacggctccaaggggagcaccccttggaggaggggccgatatcgccctgcacacacacccagggcagcagagcctcccacgtgcctggtgtggaattggcccaggcctgggcacagcgtgggagcccctggaggacagagcatcctaccagtcagtcc

SEQ ID NO: 522169 - DNA, 646 bp, Homo sapiens
ttccctagcttagctgacggggagggcactgctatctcttactgagtgcctgctgtataccagatgatttcctacatgtttctaaccattctagtgctacctggattaaatgccacctcctccagggaggcttccctgggtgggggtgagtgctggtctttctcttgctgctgtgaactcctgtgctcttttcactcctgtatgtacccccttcagagcaatggcctgttcgtgcctcccacctcccagcagactgtaaacagctccctgaagacaaagattggggtctggttcaaatctgtacctaccatttctagcacatggaagacactggctccaaaaatgagtgcagcttcccgttagccccatacagactcaggactcaggatgggacctagagtgggaggttcccctccccaggccctgcgttctttagaatggggacaactctaactgscttcccccactttccatcctgtcccagccaacagatcttgcatagatatccaggtggtctcagaaccttgtcagagagagtggtgagtttctgcatatccttgtcatagtttgaacatctttttggatgggaaactcaccaccactcacataaccccttcctgtctgctaagaaagccttccttgcaag

SEQ ID NO: 522170 - DNA, 384 bp, Homo sapiens
aatggtgagaatttttcatatcctttgcagcagactcccggccccggggctgggccctcagcaagctcattcctgtggctgggaaggctggggaggcagagctggcttcctagcagcctggggtttcctcgggtggtttttgtgcaagttaaatatgctaagaaagtttggttgtaggatcagtgcctgaccagatgcctttgccttttactggctggtgctgccacacacacacacacacacacacacacacacacacacacacccctgmtgctgtgagacttggcagctacaggctcactgggcatccttccctggagaactgcccgaggctggcagaaccacctggctccaaaatgcctggaggcccagcttcctccactc

SEQ ID NO: 522171 - DNA, 431 bp, Homo sapiens
gggctgtctctagagatcctggtgagtaacaaccatacagagccagagagcatctcargaaacttaaaataacagcaataagaacaaagtgtccttctcataacgtggttctcaaatgggcgcactggttccatagaacttatgtttatggtttcttttgaataaacacagaaattgatcctcccaatcttaaaacttgagaaacttacatttgtctaacctgagttcttttttctcaggacaccagccatcaggcctcccagatagagtcaaggaatggaaacttacccagtcaccacatctgggaaacaccagaccccttgcccatcatgattgcctaactgctgcctgtggatcagctcttcttccttatcccctccctcattcctgttttcccacacttagttgcatttcttccctgctatatagac

SEQ ID NO: 522172 - DNA, 589 bp, Homo sapiens
tggtgctggaggcagatgatggcaggtatacgatgcaatgctatttgtgtggcaaacacggagacatgtatatgtctgcatgttctttgaccactstcttggtccacttgggaggctataacaaaataccagaaactaagtggcttataaacaacagaaatttatttctcagaattctggaggtcacgaagtccaagatcaaggggccaacagatctgatgtcgggtgatggcctgtttcctgcttcatagatgccaccttgacactgggtcctcatatggtcgaagtggctagctagcacttttgggtcccttttataagggcactaatctcaatcatgagaggtccaccctcatgacctaatcatttctcaaagggcccatttcccaacactatcattacttagggctttggttagaatttcaacatatgaattttgggggcatacatgcattcagatgatagcaaccacgttggagggaaatcacaggaagagggtgactgtgcctgtctcaggagagagggctacagaacagggtagaagatctgcttttcattgtgtacttatttgttccttttaaatttagtg

SEQ ID NO: 522173 - DNA, 589 bp, Homo sapiens
tggtgctggaggcagatgatggcaggtatacgatgcaatgctatttgtgtggcaaacacggagacatgtatatgtctgcatgttctttgaccactctcttggtccacttgggaggctataacaaaataccagaaactaagtggcttataaacaacagaaatttatttctcagaattctggaggtcacgaagtccaagatcaaggggccaacagatctgatgtcgggtgatggcctgtttcctgcttcatagatgccaccttgacactgggtcctcatatggtcgaagtggctagctagcacttttgggtcccttttataagggcactaatctcaatcatgagaggtccaccctcatgacctaatcatttctcaaagggcccatttcccaacactatcattacttagggctttggttagaatttcaacatatgaattttgggggcatacatgcattcagatgatagcaaccacsttggagggaaatcacaggaagagggtgactgtgcctgtctcaggagagagggctacagaacagggtagaagatctgcttttcattgtgtacttatttgttccttttaaatttagtg

SEQ ID NO: 522174 - DNA, 589 bp, Homo sapiens
tggtctggccagtggcaacaaagctgtaaatcagttgttcagcatttcttccagagatgggacacttcacaaccatggttatcttctaaggccagttcctggaattctttaagtaaaaggcatggttaaacattatggtggcagtgatgtagtggtgtggggtttgtggtcagcaggaatgctctgtggggggtgagctgaagccaagttctgcctctcctctgcctcatgccacactgagacattttatcctccttcttcttaaggaaaaagggcagcagtctagtcttctggagctactttctgctgaacagggttgtygtcctcgcccaaccctagaggccacaaaaatcttttgatttaatgttttataggggcttggctcttgctgggatgggagggtttggaatccttgcacaactatcagcttgacatggaatgttgaagcctggaagacacaaacttttataactgtctgcatccctgttgaatataagaaataattatttaaaaatcaaatcctatccagtgataattaataaaacgctaaagcccagtttaataatgcttataagaagagatcagatgc

SEQ ID NO: 522175 - DNA, 505 bp, Homo sapiens
ctgctacattagattgttttaagggctgtgtgtgtgcagcaatttcctccttcctaaaatgggtatggctatttctctcccggaaaagaagtgtgccgtatagttaaggtaatgcatgcaaagtgctaggagcttgcctgtcacctaaccgtggggtcaccatggagccacagagggaatttacaaatgcaaaagaagctgattggccactggggttaatgctcaggattctcggctctgtccttcctgtttctctccaggaatgcggtagttgttcaagcaataatactcccatctccattaattatcttaaaagctaatcagaagataccaggaaatgcagcattctctgcgtgcctaacctttgctgaactcttaaatgcttttgtttgagagaaagttgtattaactcaaatctattcagtcttccagtttctaccttctctgtttcaccmgagagtataattattctccagcctgggagggagcacttgaaaaaagctgg

SEQ ID NO: 522176 - DNA, 654 bp, Homo sapiens
cagtaagtctcttagaaccccaaacctggggcataggcctaggggatgtggtttattgggttaaagaaggattgtctgaaacggtgatatacatcatcctaggggctggcatgccctttctggaggggagaggagcctttgttctgggcttctggagtcttgtagattcctcatcctgagagctgctgcccacagccaccaccccacgtaggtgtatccagtttagaaacaaaagggggactctggcaggctggctgctatgctgtatttgtggtcattattactattattattattattattwtttttttttttttgagatggagtttcgcttttgttggcccaggctagagtgcaatggtgcgatctcagttcatcgcaaccgctgcctcctgggttcaagcaattcatctgcctcagcctcctgagtacctgggattacaggcatgcgccaccacgccccgccaattttgtatttttagtagagacgaggtttctccatgttggtcaggctggtctcgaactcccaatctcaagtgatctgcccacctcagcctcccaaagtgctgggattataggcatgagccactgcacccggccttgtggtcattatttttaaatactgtagtataagtaatggaatatgtgtgtaaa

SEQ ID NO: 522177 - DNA, 555 bp, Homo sapiens
cagcaactctctcttgcctgggtatttctgctgttttttttggggggagccggaggttgcaaggagagagatagagagagagagagagagagacctctcctcttagcaaggttttaaaagattaatataatctggtatctaacaaagatccctgcatttgatgaaatgtggtctgagctgagacttgcatttattgcaacagctccacttggtagcaagctaatcagggtggggacctacagtctctacttgtgtccaaccacaggaggtgactgatattttttatggtgagatcatggcttactgatgcagaatcaagcatgccccaagagttctgtttgcatctgttcacctcctcactggacctgacacatgctgaatgattagttgggtgtagtaagagcrtctgtttctccttgcacatttgaaaatgaagttctcaagtaggtagtgtaaagtcatgaatctaattcatagttcctctctctcagtctaccatgcacccttcagcaagcactctcttcccactggtctttgagcctcattcagccccag

SEQ ID NO: 522178 - DNA, 666 bp, Homo sapiens
ggtagtcctgttatttgatcagggcttagctcttttcaaaggaactttccttaagaattctgtctcttaataccacttctcttgatgactggttcaccttccatgataccgttacatcagaggagagcctggaagaattggggtggattttgtgtgcatgtgtgtgtacgtgagcagtgcatgattcttatyggcttgtttcctcataattcagctaaaggaaagcgtatggtggcgttgatctaactggtgtttattatctaccttatatttccaagaaatcagaatattctcttgagttccatttaccaaagtaagttttaaatcatcctaatatagagccaaaacatagttacttttcaaaattgcaattccataaattttagctttattttccaagatgagagaaacaatagaggaaaattctcactcacaacctaactcagttatcaacagaacattcaaggctggatctcctaatcaacattgaaaaagtatcccctacattaggaaaatactctggttctgtctttacttcatactgggttattcacagattggaaaggtatataagtatggcgattgaatctattcccttccccacatatccctccctttgtagtgaggtcaagcttggctctttcactgtgttcatgtcagcatttt

SEQ ID NO: 522179 - DNA, 597 bp, Homo sapiens
ctgaatgccgtgtatgtatgtttgtgtttgtgtgtttatacaccaagtgtaaaataaaataaagtacaagtcataaaattggacatgttayggatagttttgtattgtcataaacacatttacactcaataaatgtggaacgaataaatcaaaggacaaaaagctttgaatacctaatggaacctgagggtgttcatcctgaaggtaactagaagatataagttatttctctctttgtggccagaaaggctagaattccttttatagacagagcaatgttactagttttcagacagatgggaattgaaacaacttttatctttaaagacaaaatcctacccaacattgtacatatttaaatttatgtgaagttgcccacaggcagtggaatgagttaatcaaatgataaagaaatgtcaaaacatcttatacttgtatataaacctggtagttcagtatcctataaagtacaaccaatccatctgtccgaaagcctaataccactatttttggtgacactaaatgctttaaattttgtcagcaagatttgaggcaatgtcaaatgctagagtgatcaatatcaaatactagagtgat

SEQ ID NO: 522180 - DNA, 550 bp, Homo sapiens
gcgataagactgacatcagtttatgacttttataaagagattatcaacttatattgtggagattgtaccaaacaggaacagattgatagcagggccaattatacaaaaatgatactgatctattatttttttagcagaaaaggaagccatgggtttttctaggaagagctctcttatatgtaactaattagcattggttttactgctagattacaataaaatatataaakattagagaatattgttcatacttaatttttttcattttttattttcaacaagacagtttatcaagatagtttatataatgatttgaatacatcttcatttttttcatactttttaaaataatttttttcacatgttcaagttactgttcatccatgtggttgacagaggcccatgaggttgataaatgaactccactgtaaccaaaacaactgtttttaaaaataaatacatctcctttaccaagattttgaagacatctgaaagcaaaagcaattgatctgttttaccttccttacctgacacttcctgcaaagcaaac

SEQ ID NO: 522181 - DNA, 629 bp, Homo sapiens
gcatttatgtaaattagtattctgctagtcttgtgctttttagaagagaaaaattgatatttaacaattaataggcttaattataaatgcattaaaagccctaataatgaacaaccttaatctaccagaatgagttccaaaaatggacaattatatggaaaatttgggctttaaaatggtgtattttgttgaggctacacttgtatcctgcagaccagagagggcataggcaagatgctgaccttgccttgtctaggaaatactagggatggctggagggttgccgatttcaaaaggaagcagcaggattatatttaaaygaggggtctcaaatgggtactcatgcctgtaatcccagcactttgggaggctgacacaggcggatcacctgaggtcaggagttctagactagtcaggccaacacggtgaaactctactaaaaatagaaaaattagccaggcatggtggtatgcacctgtaatcccagcaactcaggaggctgaggcaggagaatggcttgaacctgggaggcggaggttgcagtgagcttagattgtgccactgcaatccagcctgggcgacagagtaagactctgtttcaaaaaaaaaaaaaaaattaaatggtgggg

SEQ ID NO: 522182 - DNA, 629 bp, Homo sapiens
gcatttatgtaaattagtattctgctagtcttgtgctttttagaagagaaaaattgatatttaacaattaataggcttaattataaatgcattaaaagccctaataatgaacaaccttaatctaccagaatgagttccaaaaatggacaattatatggaaaatttgggctttaaaatggtgtattttgttgaggctacacttgtatcctgcagaccagagagggcataggcaagatgctgaccttgccttgtctaggaaatactagggatggctggagggttgccgatttcaaaaggaagcagcaggattatatttaaatgaggggtctcaaatgggtactcatgcctgtaatcccagcactttgggaggctgacacaggcggatcacctgaggtcaggagttctagactagtcaggccaacayggtgaaactctactaaaaatagaaaaattagccaggcatggtggtatgcacctgtaatcccagcaactcaggaggctgaggcaggagaatggcttgaacctgggaggcggaggttgcagtgagcttagattgtgccactgcaatccagcctgggcgacagagtaagactctgtttcaaaaaaaaaaaaaaaattaaatggtgggg

SEQ ID NO: 522183 - DNA, 532 bp, Homo sapiens
tctagctttgtcagagggatgcagtgagtgcaaagaattatcttgcctaagaaatctaacatcctaartggaaaggcttcaaatatcaaataaacccgatgctactttatttgatacctccttacaccatttcatttaggcttttcttttttctgcttcctaactcacatgctcagacttctcgaaaccttcaggcactgggaaggaaaagagaacaaggaaactagaagattttaagcatgagctatgcaccaggtccaataggaggtgcttggccattttgggctgcatctttagcattagaaatccattcttttcctcaatgatctctttatgtaattctccaacagaacagagctttctcaccaaggccagggacgtttggagttattgtgtggatttcagggggtcagtaaaaacttggaaaatatatatattatatatttctacatttctataatttacaatcatatttaattgttcttataaacttttatttgtaaaaaatatgtttagcttaatgaacaagaca

SEQ ID NO: 522184 - DNA, 532 bp, Homo sapiens
tctagctttgtcagagggatgcagtgagtgcaaagaattatcttgcctaagaaatctaacatcctaaatggaaaggcttcaaatatcaaataaacccgatgctactttatttgatacctccttacaccatttcatttaggcttttcttttttctgcttcctaactcacatgctcagacttctcgaaaccttcaggcactgggaaggaaaagagaacaaggaaactagaagattttaagcatgagctatgcaccaggtccaataggaggtgcttggccattttgggctgcatctttagcattagaaatccattcttttcctcaatgatctctttatgtaattctccaacagaacagagctttctcaccaaggccagggacgtttggagttattgtgtggatttcagggggtcagtaaaaacttggaaaatatrtatattatatatttctacatttctataatttacaatcatatttaattgttcttataaacttttatttgtaaaaaatatgtttagcttaatgaacaagaca

SEQ ID NO: 522185 - DNA, 560 bp, Homo sapiens
gaaatgcagagtggaagaacaacatcccagggagttggaacagcaagtgctaargccttaaactatgtaaatatcatgctagatgattgtgtgtaaaagagaattaagttaaatccagaaagaaaatagggccagtcattgtcaagttcttcctgcagtcacagaaaaagatgagaataacttgaactatggtggtggttgtacaggtggagaggtatgaatgatttagtgatatacagtgggccctccgtatctgcgggttctgtatctgcaaattcaaataacctctgatttgatacaatagggtgaatatagtcaataattgtgcatttgaaaataacttcaagagtgtaattagtttataactcaaaggataaatgcttgaggtgacatgctattctcatgacgtgcttattccatattgtatgcctctatcaaaacatctcacgtaccatatatatatacacacacacgtatatatatacatatacacatatatatcatatatacacaaacaccccatgtacccacaaaaattatatacacacacacatacacac

SEQ ID NO: 522186 - DNA, 560 bp, Homo sapiens
gaaatgcagagtggaagaacaacatcccagggagttggaacagcaagtgctaaggccttaaactatgtaaatatcatgctagatgattgtgtgtaaaagagaattaagttaaatccagaaagaaaatagggccagtcattgtcaagttcttcctgcagtcacagaaaaagatgagaataacttgaactatggtggtggttgtacaggtggagaggtatgaatgatttagtgatatacagtgggccctccgtatctgcgggttctgtatctgcaaattcaaataacctctgatttgatacaatagggtgaatatagtcaataattgtgcatttgaaaataacttcaagagtgtaattagtttataactcaaaggataaatgcttgaggtgacatgctattctcatgacgtgcttattccrtattgtatgcctctatcaaaacatctcacgtaccatatatatatacacacacacgtatatatatacatatacacatatatatcatatatacacaaacaccccatgtacccacaaaaattatatacacacacacatacacac

SEQ ID NO: 522187 - DNA, 560 bp, Homo sapiens
gaaatgcagagtggaagaacaacatcccagggagttggaacagcaagtgctaaggccttaaactatgtaaatatcatgctagatgattgtgtgtaaaagagaattaagttaaatccagaaagaaaatagggccagtcattgtcaagttcttcctgcagtcacagaaaaagatgagaataacttgaactatggtggtggttgtacaggtggagaggtatgaatgatttagtgatatacagtgggccctccgtatctgcgggttctgtatctgcaaattcaaataacctctgatttgatacaatagggtgaatatagtcaataattgtgcatttgaaaataacttcaagagtgtaattagtttataactcaaaggataaatgcttgaggtgacatgctattctcatgacgtgcttattccatattgtatgcctstatcaaaacatctcacgtaccatatatatatacacacacacgtatatatatacatatacacatatatatcatatatacacaaacaccccatgtacccacaaaaattatatacacacacacatacacac

SEQ ID NO: 522188 - DNA, 276 bp, Homo sapiens
cagcccaaatggccacctggtgcttcaagacgtgaagtgtgaatacatgtttcacttggaataaaataatatcttttctwatttacatccagatttcaaactccattttaccttgaacacaaagtaatgtgatttagtgtgaggaaagaaaggaaagctttttctatgaaaatgactattttatggtattttctaataattaggtcttataaaacttccccaatgtttttactacaatgctggtagaccacagccagtctgtcttgctccaggatt

SEQ ID NO: 522189 - DNA, 276 bp, Homo sapiens
cagcccaaatggccacctggtgcttcaagacgtgaagtgtgaatacatgtttcacttggaataaaataatatcttttcttatttacatccagatttcaaactmcattttaccttgaacacaaagtaatgtgatttagtgtgaggaaagaaaggaaagctttttctatgaaaatgactattttatggtattttctaataattaggtcttataaaacttccccaatgtttttactacaatgctggtagaccacagccagtctgtcttgctccaggatt

SEQ ID NO: 522190 - DNA, 276 bp, Homo sapiens
cagcccaaatggccacctggtgcttcaagacgtgaagtgtgaatacatgtttcacttggaataaaataatatcttttcttatttacatccagatttcaaactccattttaccttgaacacaaagtaatgtgattyagtgtgaggaaagaaaggaaagctttttctatgaaaatgactattttatggtattttctaataattaggtcttataaaacttccccaatgtttttactacaatgctggtagaccacagccagtctgtcttgctccaggatt

SEQ ID NO: 522191 - DNA, 554 bp, Homo sapiens
agcctctaagactggttctcattstgggctacacattagcatcagccaggaagctctgaaaaacaaaacaaaacaaaacaaaaaaaacctcctatggcaggcaggcccttaggctcagagatttaattggtgtatatatacatatatttaaaagcttcccagattgatgctaatgggcatctggggttgagaaccactgccttaaatccatgttaaataataatgttagtaagcatcaagaatcttgttcttgattttaattaaatatttccagtgttttgacatttaaaataacacttgttgttggtttttagtaaatatccttcgttttgtttacatagtttccatctagccctgtttaagttttgattaggaatggttgcttttagcacctattaatatgattatgtggttttgagaaaagaagaatagaacagtctgggctatgtgtggtctgcaggcccagaaagacacgaatatgggactttcattcctccctgctccccctctccccatgcctgggggcaattgtttaaagtcattttgttcccaac

SEQ ID NO: 522192 - DNA, 561 bp, Homo sapiens
tctgcaacttgtgataacattttaggtcatttatcagctagtctggaaactacaggtaaggaaagaaagaagaaaatgcttttaaacaattgcctgggtgcaggtatgtatgtgtgactgaagtatactcatgactckctgggtgtgatacattttgcaaacctcacatagctcagactgctctaagctacttctcattctcaatgtacagggatttcttcccacatataaccaagcaattattattattattattttttagacagtcttgctctgtaacccaggctggagggcagtagtacaatctcagctcactgcaacctctgcctccagggttcaagcaattctcctgcctcagcctcctgagtagctgaaattacaggcgtgcaccactatgcctggctaatttttgtatttttagcagagatgggggtttcaccatgttggccaggctggtctcggactcctgacctcaggtgatccacctgcctcagtttcctaaagtgctgggaatacaggcatgggctactgtgcctggcccaagcaattctttagcagagt

SEQ ID NO: 522193 - DNA, 479 bp, Homo sapiens
atgaaagacttaacaccttaaagatgtcacattttctcaaatgcaagtaaacatctaaatgtrtttttcactgagctcaacagagtaatctgaaattctgacagatgagtgaatttctgaaaataggaactttttagagcagaatcaggtgggaggtccaaatatattataaagctgtagtcattggaaccatgtgatattgacaaagtggctttataggcaaacagaacagaatggagaggccagaaacaaaccctttatggtaacttggtgtataacaagtcactgtttcataaaacagtgaacaaatgattgactagttggcaaatattttcttaaagggacagatagtaaataattcaggcattgagaaccatagtgtctctgtcacaaccacccagctctgctgatgtagcacaaaaacagccaatgtagaaacaaatgaggagagctgtgttccaggaaaactttatatacaa

SEQ ID NO: 522194 - DNA, 572 bp, Homo sapiens
ttatcatctccacgactgaaaagatgtgaaagccaacagacaaatatactaatctcactttgaacaaacaatctaagatgtgctgagaaaaaaagtcactgcttctctcagtagtttgtggaaactttcttccttggataactttttagagctgttccaggaatagtgcagctactatgggccacaagagctgaaatatccagaaattcctgtgttgctggtgaagcttcatctgttcaccttccatttcatattagttttaaagcatacctgatgcttgtgcaagaaaaaaatcattctttgtttgcttttactcacttttaccaaagattaaagagggagaagaggggtcrgctcttcatatatttcaagttgtaggcataagattgtgtttctagttcaactgtatttggctatagatcctagtgaattcttgttttttttgttttgttttgttttactccacactatataatattttcattgctcactcatgtctggaataggttctctctctctctcctgtgttatccaggatggctcaagctatcaccaactctccctgagaatca

SEQ ID NO: 522195 - DNA, 685 bp, Homo sapiens
atcattgaatcatagcacttttttggaggacgtgtctgtcttctcaatcgctcagttttcttttggaaaaaggcaggttatagagcaattcattaatcatttgctgtcccaatgttccttcctgcttttaatagcaaaaatgagtcaagacctgatcttctgaacacatcacttgctgcctacatgaggcagtggagacttagagtacccctgtggcctgctcctcctacatctcttcttttgatccctagtccttgctgaccttctgtagaggcttattcacccagctkgtgggttgaggtgatgctttcttcctatttactgagagcttccccacctctccctagatactgcataaatgcaaggaaatttccaagaggccccttcaagtataaccacagcttttcaatcatttgacattttggtcatagagcagaaccaaattatgtagtcaactatagacaccatgcctgattgaaacttgtatcaaaaatcccaagaactccaataactcttagttttactttgtactgtttttaaggaggctgatttacagcagccttttttctgaattttatttgaggaaaaatatgccctcctgccatcattccagctcctgtgacactgaggcctttggttcccttacttatatcagggtatctggggcttggttgttaatttggtg

SEQ ID NO: 522196 - DNA, 524 bp, Homo sapiens
ctgcagcattatagcatccctttctgtacactggatttactctaccaggcagaaaaaatgggagagaccacaggaatactggcagtggtggggatgggcaatgaactaggagtgcttgggaaaagtaattttctgtctcaaatagctgacagtagcacctgctataattccagagagktttgcaggaaagcttttatttgctacacaagaaaggctgggcaagtagattcctagctgggaagtagattcctagcacctacagaaggtagatactgggtcagtttttacttaagatggcagtgctttacattggaaagctaaaggaatttggattcaaaggattctggtttttttttttttgcttacaatttttggaaccataattcagcactactagattaaggcatgttccatcaaactaaaaatcaaaagctttcctatggggaaagtctcaatgttatagctgaaagaggtgacagccgcattactgccatcaaaaataatttattaaccttgtctgtgca

SEQ ID NO: 522197 - DNA, 602 bp, Homo sapiens
gctgcttctctctcctttggctgaagcagtcatttttgagagcacattttcccaggaggtgtttagagcctccactcaacaaatctagcttgtgttttgtagaaggataaaggattcatgagtgtatgtgtgaacatattcaatggattgaaaatgagtctaccctgaagaccccagatttttgatctgctcwtttgatgcagttgatagaataatggagtgtggtatacctccaacccttgtatgcgttgggagaggagggggactacacacggtaggggtatttcatgttctttctcaattgatttccttgtgtaccattccggaggtctttaaagaaaagcccaaggtaattatttctacccctctatgctctcttcctacattccgtggacgggaatggcagcctgtttaataagtaatgattattgacagggccctcagccccaaggaaaagaggggaaaaatctgtaaatggtgtcaatgttcacatagacatataagcagtatttgttgtatttgtatcttagtttcagctctttctcttttttaaacctttacaagaagttgaattaaggtatgtaatacaagtatgcaaaatc

SEQ ID NO: 522198 - DNA, 596 bp, Homo sapiens
ctgcttctctctcctttggctgaagcagtcatttttgagagcacattttcccaggaggtgtttagagcctccactcaacaaatctagcttgtgttttgtagaaggataaaggattcatgagtgtatgtgtgaacatattcaatggattgaaaatgagtctaccctgaagaccccagatttttgatctgctcttttgatgcagttgatagaataatggagtgtggtatacctccaaccyttgtatgcgttgggagaggagggggactacacacggtaggggtatttcatgttctttctcaattgatttccttgtgtaccattccggaggtctttaaagaaaagcccaaggtaattatttctacccctctatgctctcttcctacattccgtggacgggaatggcagcctgtttaataagtaatgattattgacagggccctcagccccaaggaaaagaggggaaaaatctgtaaatggtgtcaatgttcacatagacatataagcagtatttgttgtatttgtatcttagtttcagctctttctcttttttaaacctttacaagaagttgaattaaggtatgtaatacaagtatgca

SEQ ID NO: 522199 - DNA, 596 bp, Homo sapiens
ctgcttctctctcctttggctgaagcagtcatttttgagagcacattttcccaggaggtgtttagagcctccactcaacaaatctagcttgtgttttgtagaaggataaaggattcatgagtgtatgtgtgaacatattcaatggattgaaaatgagtctaccctgaagaccccagatttttgatctgctcttttgatgcagttgatagaataatggagtgtggtatacctccaacccttgtatgcgttgggagaggagggggactacacasggtaggggtatttcatgttctttctcaattgatttccttgtgtaccattccggaggtctttaaagaaaagcccaaggtaattatttctacccctctatgctctcttcctacattccgtggacgggaatggcagcctgtttaataagtaatgattattgacagggccctcagccccaaggaaaagaggggaaaaatctgtaaatggtgtcaatgttcacatagacatataagcagtatttgttgtatttgtatcttagtttcagctctttctcttttttaaacctttacaagaagttgaattaaggtatgtaatacaagtatgca

SEQ ID NO: 522200 - DNA, 596 bp, Homo sapiens
ctgcttctctctcctttggctgaagcagtcatttttgagagcacattttcccaggaggtgtttagagcctccactcaacaaatctagcttgtgttttgtagaaggataaaggattcatgagtgtatgtgtgaacatattcaatggattgaaaatgagtctaccctgaagaccccagatttttgatctgctcttttgatgcagttgatagaataatggagtgtggtatacctccaacccttgtatgcgttgggagaggagggggactacacacggtaggggtatttcatgttctttctcaattgatttccttgtgtaccattccggaggtctttaaagaaaagcccaaggtaattatttctacccctctatgctctcttcctacattccgtggacgggaatggcagcctgtttaataagtaatgattattgacagggccytcagccccaaggaaaagaggggaaaaatctgtaaatggtgtcaatgttcacatagacatataagcagtatttgttgtatttgtatcttagtttcagctctttctcttttttaaacctttacaagaagttgaattaaggtatgtaatacaagtatgca

SEQ ID NO: 522201 - DNA, 619 bp, Homo sapiens
attttttatcttagttgacacaataattgtacatatttatggcatacaatgtaatcttttgatgcttgtatacactgtataatgaacaaatcaggtaattagcatagccataacctaaaacatttatcwtttatttgtagtgaaaacattcaaaatcctcttttctagctattttgaaatattctttgcattatttttaacgatagtcatcctagtatgcaataagacaccaggttttattcctcctaagtataatttcgtatccattgactaatctctcctcttttcccctatacccccctccccagtccctagtaactactgttctattctctacttctataatatcaactttttatgttccacatataagtaagatcatgcagtatttgtctttctatgtctggcttatttcaactaacattatgtcttccaggttcctccattgtaacttttcaaagttccactggagctcctgatacgaagttagcgttggaatccattgcctaccattttctctctccttcaaaacagctaatatttttctgtactactcacaaaagatgggttgatctccattcccttgtagagattttccattatcagttttctaacatga

SEQ ID NO: 522202 - DNA, 619 bp, Homo sapiens
attttttatcttagttgacacaataattgtacatatttatggcatacaatgtaatcttttgatgcttgtatacactgtataatgaacaaatcaggtaattagcatagccataacctaaaacatttatcatttatttgtagtgaaaacattcaaaatcctcttttctagctattttgaaatattctttgcattatttttaacgatagtcatcctagtatgcaatargacaccaggttttattcctcctaagtataatttcgtatccattgactaatctctcctcttttcccctatacccccctccccagtccctagtaactactgttctattctctacttctataatatcaactttttatgttccacatataagtaagatcatgcagtatttgtctttctatgtctggcttatttcaactaacattatgtcttccaggttcctccattgtaacttttcaaagttccactggagctcctgatacgaagttagcgttggaatccattgcctaccattttctctctccttcaaaacagctaatatttttctgtactactcacaaaagatgggttgatctccattcccttgtagagattttccattatcagttttctaacatga

SEQ ID NO: 522203 - DNA, 619 bp, Homo sapiens
attttttatcttagttgacacaataattgtacatatttatggcatacaatgtaatcttttgatgcttgtatacactgtataatgaacaaatcaggtaattagcatagccataacctaaaacatttatcatttatttgtagtgaaaacattcaaaatcctcttttctagctattttgaaatattctttgcattatttttaacgatagtcatcctagtatgcaataagacaccaggttttattcctcctaagtataatttcgtatccattgactaatctctcctcttttcccctatacccccctccccagtccctagtaactactgttctattctctacttctataatatcaactttttatgttccacatataagtaagatcatgcagtatttgtctttctatgtctggcttatttcaactaacattatgtcttccaggttcctccattgtaacttttcaaagytccactggagctcctgatacgaagttagcgttggaatccattgcctaccattttctctctccttcaaaacagctaatatttttctgtactactcacaaaagatgggttgatctccattcccttgtagagattttccattatcagttttctaacatga

SEQ ID NO: 522204 - DNA, 619 bp, Homo sapiens
attttttatcttagttgacacaataattgtacatatttatggcatacaatgtaatcttttgatgcttgtatacactgtataatgaacaaatcaggtaattagcatagccataacctaaaacatttatcatttatttgtagtgaaaacattcaaaatcctcttttctagctattttgaaatattctttgcattatttttaacgatagtcatcctagtatgcaataagacaccaggttttattcctcctaagtataatttcgtatccattgactaatctctcctcttttcccctatacccccctccccagtccctagtaactactgttctattctctacttctataatatcaactttttatgttccacatataagtaagatcatgcagtatttgtctttctatgtctggcttatttcaactaacattatgtcttccaggttcctccattgtaacttttcaaagttccactggagctcctgatacgaagttagygttggaatccattgcctaccattttctctctccttcaaaacagctaatatttttctgtactactcacaaaagatgggttgatctccattcccttgtagagattttccattatcagttttctaacatga

SEQ ID NO: 522205 - DNA, 481 bp, Homo sapiens
tctgttagattatttaaagtcataacttcttctataacatttctgataattgttcaacctgtctgttttagagccattagattccaggtaaagtcgggacatgtggagctagccatgccccttggttatgctgggaaaagtcagacatcrtctgaagctctgttctttgctctggctctgcaccagtacataattaaaatagcctatctcctaggtttttcactaaaattaaaagttactaagagttaacattgtagtatatgtaattataactactggagaaacagttttacatgcagaggtaaaatttaattttctcttttggacaagattttcatgtaatagtgacagataatgaaagaattttgtttgccttttgagtaaagtgtaaaaaaaatgaagtggggacggagggagagagaacagactcgaattcagttgacctcatgatgtcttaattgggtcttgttctttggaaagt

SEQ ID NO: 522206 - DNA, 493 bp, Homo sapiens
cctctattaaagaaaaggaaggtattagctaccctatttttatactacagagaacagatccttcatacatttagcccttaaataaatcttttccagtagttgactggttaacatcctagacttaaactgatttaaaggtggcaaagtggcttacacccaacagtttgctaacctatracatggctgtgccaaaaatttaaaaaaaagtaactattattatcaatctttatagaaaggcacattaaacaaaactgtcaattatgtgctaaaggttacagagctagaaaagaaaacagagcagagcttctgactaccagagctccgttccaactgctaatccattctctttcatgtcttccataggtgcacccacagaatataccttattctgctcaacttgagtcttcacagcttcagtatctgtaggtgcaggtgtctgctgccattttgttgcagttttgttcattttctgtaaccactgcatcattgcact

SEQ ID NO: 522207 - DNA, 493 bp, Homo sapiens
cctctattaaagaaaaggaaggtattagctaccctatttttatactacagagaacagatccttcatacatttagcccttaaataaatcttttccagtagttgactggttaacatcctagacttaaactgatttaaaggtggcaaagtggcttacacccaacagtttgctaacctatgacatggctgtgccaaaaattwaaaaaaaagtaactattattatcaatctttatagaaaggcacattaaacaaaactgtcaattatgtgctaaaggttacagagctagaaaagaaaacagagcagagcttctgactaccagagctccgttccaactgctaatccattctctttcatgtcttccataggtgcacccacagaatataccttattctgctcaacttgagtcttcacagcttcagtatctgtaggtgcaggtgtctgctgccattttgttgcagttttgttcattttctgtaaccactgcatcattgcact

SEQ ID NO: 522208 - DNA, 493 bp, Homo sapiens
cctctattaaagaaaaggaaggtattagctaccctatttttatactacagagaacagatccttcatacatttagcccttaaataaatcttttccagtagttgactggttaacatcctagacttaaactgatttaaaggtggcaaagtggcttacacccaacagtttgctaacctatgacatggctgtgccaaaaatttaaaaaaaagtaactattattatcaatctttatagaaaggcacattaaacraaactgtcaattatgtgctaaaggttacagagctagaaaagaaaacagagcagagcttctgactaccagagctccgttccaactgctaatccattctctttcatgtcttccataggtgcacccacagaatataccttattctgctcaacttgagtcttcacagcttcagtatctgtaggtgcaggtgtctgctgccattttgttgcagttttgttcattttctgtaaccactgcatcattgcact

SEQ ID NO: 522209 - DNA, 495 bp, Homo sapiens
ctgctcaggatgaaatctcatttggagacagaggtatttacagaggtaatcaaattaaaatgaggggcgggtgtgatggctcatgcctgtaatcccagctcttagggaggcagaggtgggagaatagcttgagcccaggcaggtcaaatgaggtccttagggaagaccctaatctaatatcactgatatccttacaaaaaggggaagtctggaaacagagagctacagggagaatgccatgtgaccatgaagatggccatctacaagccatagagggaggcctggaacatatcctgccttcgcagccctcagaaagaaccagccctactaacaccttgattccagacttctagactgcagaactgtgagataatacatytttttgctgtttaagccacccagtttttggtattttgttacagctaccctagagaactaatacagttacctactttacttttttttctataaatgaaagtcaatttttgacatacc

SEQ ID NO: 522210 - DNA, 541 bp, Homo sapiens
tgggattggtgctgcactctgggcctcctggcccctggatggcggcaccttctggagtgaacgttggccctgtcctgagcgctgggccccaggaggtgtgtgcttctctggaggattgccactttgccacctcccctgccagagcttgctggtcctcaggaagggtggttgccctcaggcacatgccccatgccatctgcattgctaatccgcaggctatatgtatgtggctccacagccctgccctgggcgtttcctaatgccccccaccaccccacccccggctccacatgttgatgtccagtggggcctctccgctgagccctgccccgcccctttagccactgagattcaagcctcagccctcacagcatggactgtgccttccatctgccactctcccaccagactttcgtagggtcttgggggtgaaaggagcatgcttgtgtggaaagttgtgtgtcccgcggtgcccgcttggtgccctctaccccgtccttgccctctgtgggtcatttyacagtaagaggacactggggcc

SEQ ID NO: 522211 - DNA, 499 bp, Homo sapiens
acttcagagcccagctaccccccattcccctccatgccagtcttgctgggctgcgttttctcgaggcaggcracatgggcatcccgagcctgtggccctccctgtcccttgtcacctgctaggagtggggaagggcagttccagcaccctgagggctcctcagccgccttcctgacttcctggatccagcttctgtttggggtgggaggtaggagaagccggggagcctgcaggtggccccctgggggcaaattctcgaggaccagagcccacagggccatctgagcagtgtagacccctccctcagggagtctgcccagcttcatgacagagcctgggcttgggctggccctgacctgatggtcccctgtttctcttctgagaacccccactgcaggaggctgtcttggccactcagccctctctgatccctacttctgccaagccctctgtgtgttggggtccccggagacctgccctgcccttggtgggctgccag

SEQ ID NO: 522212 - DNA, 526 bp, Homo sapiens
cgatcattctggttttcactttcagtacagtgttcaagaagttacatgagacattcaacactttattatgtagtagactttgtgttagatgatttggcctaactgcagtctaatgtaagtgttctgagcaygctggaggtatcctaggccaagctgtactgtttggtaggttaggtgtattaaatgcattttcaacttacaatattttcaatttaccatgggtttattcggacacagccccagtgtaagtcaaggagcatttgtaattggttctaccaggatgaatgggtttgtattttaacaggggtttcccagagacttttagctggagacgaccctaagagggaatgacaggagggctgagggcctggatgagctctcgggagcaggtggaccgttggcggagacgtgagcagttccttcccagcactgagcagcacattttgtttatactgggaggctttctgacttcacagcgagagtattttgggagaaactgtctctcccacatctggattggggcaga

SEQ ID NO: 522213 - DNA, 600 bp, Homo sapiens
gacttgctaagagcggatgaagagctgtgaactaacccctcttagtttaaccgctcacatcaagccatcaaataagctttggaagaatacctattacgtatttactactgagaagggatcaagacacacgaacagacaattctgtgaagtgcacatctgtgccttctctcctgatgtttccctccccaagggctccacaacattcttcagcttggagcacaaacctggagttcctatgaactttcactggaaggatattgttaacaccccctgctcattagtatttctgccaggtgtgacccttgaagaagcttcattcattaggcagatgtatcaataatccagatatatctttcaggcaatttttttttgttttttgttttttaatgaataagcatttattctctttaaggccctggaaaacatggrctttggtgctagagcattcagcttacgcaaaacaccgtgaatgctaaaatttgcttctttttgatttagtctcttgctagcttgaaggactggattttataacaggtcaatttcagaccatttgatattgatatatgaagatccttagggattattgaatgcatttttcat

SEQ ID NO: 522214 - DNA, 600 bp, Homo sapiens
gacttgctaagagcggatgaagagctgtgaactaacccctcttagtttaaccgctcacatcaagccatcaaataagctttggaagaatacctattacgtatttactactgagaagggatcaagacacacgaacagacaattctgtgaagtgcacatctgtgccttctctcctgatgtttccctccccaagggctccacaacattcttcagcttggagcacaaacctggagttcctatgaactttcactggaaggatattgttaacaccccctgctcattagtatttctgccaggtgtgacccttgaagaagcttcattcattaggcagatgtatcaataatccagatatatctttcaggcaatttttttttgttttttgttttttaatgaataagcatttattctctttaaggccctggaaaacatgggctttggtgctagagcattcagcttaygcaaaacaccgtgaatgctaaaatttgcttctttttgatttagtctcttgctagcttgaaggactggattttataacaggtcaatttcagaccatttgatattgatatatgaagatccttagggattattgaatgcatttttcat

SEQ ID NO: 522215 - DNA, 586 bp, Homo sapiens
cactagcactctctaagcactgtgattatgtgtgattgcctatataattttatctgattgctgtgttgacctcacaaggtgggttttctagcatcagttttacagttcagcaactgaaggctcaggtcaaatgcattgcccaggagcacccggctaagaggtgaagaaggcgtcaaccgcagtgtggtgaggttcacaagcttgtctgtcacctccaagcttcgctgtccccaggggcctytgggacctgctgagctgcaatgctttgtggttcttctgatgccttcagaaggggtatgtgagaccacacgttcaggggctggggggctgcctcccgttataactcatgagagttcctttctgaccctcattttaagttcgttttacatcacgagtgttttaaggtttttggtgtgtgttttttttttttttttttttttttttttttgtagagttaaaacacactttcccaaggttggcggctcaaatgtagacttttagacactgtttggcttggcacagcttccaaacgtctcccagccactgttgctctatatttctttttgccaggacatagatcagaaat

SEQ ID NO: 522216 - DNA, 453 bp, Homo sapiens
gatacttttctaaatgctctactgccctgacttatttaatcctcatgctggccctgcgaggtggagactaagattggcatcttcccattttacagatgaaggagaaaggggcccggagccgcacagtgattgcccgaggtcaccacccggcccctgagtggtggggctgggcgcctggctcagagcctgaggtcctggcctctcttccaggcttctgtttcgccccytgggtagaagctgctccttcacctccaccactggcaggagcagagaggcccaaaccagggctgcttgtcaaagggatgagggagggctggaatggcctttgctggggcggcgctcacagtgattagagtctggggtgatgtggcaggcagggaggtgaggacagagagagtggggagctgatgaggctgggggtggtgggcccttggctggggcagggcctggggc

SEQ ID NO: 522217 - DNA, 410 bp, Homo sapiens
ggcatgaaagcttaggtcactctgtcagcgaagccacccaggcctccagstcatcccagcccttgccctgcagggaccccacacaccccacacccctccttgaatgccccacactcaccatccttcgtgacatcctgatgatcgcgggaaagtaggagacaaaaaattcccataaataaagtagactcccccaacccccacccaaaatcttatcatcagggttgaaattttgctgtatttacttcctgacttctttctcctctttccctctattttttcatttttcaaaacacagattcgggcacactctggtgtaacctgcttcgctcgttcgcgggatgggtggtgagcatggagcccattttcccatgtggcatttcagcaacaggacttggctatttgaaactccc

SEQ ID NO: 522218 - DNA, 355 bp, Homo sapiens
tgtagtcaccctgcccttggatggtcgttacagcaactctggtggttggggaaggggcctcctgattcagcctctgcggacggtgcgcgagggtggagcycccctccctccccaccgcccctggccagggttgaacgcccctgggaaggactcaggcccgggtctgctgttgctgtgagcgtggccacctctgccctagaccagagctgggccttccccggcctaggagcagccgggcaggaccacagggctccgagtgacctcagggctgcccgacctggaggccctcctggcgtcgcggtgtgactgacagcccaggagcgggggctgttgtaattgctgtttctccttcaca

SEQ ID NO: 522219 - DNA, 553 bp, Homo sapiens
tccaagtaacttagtaacactccagaataaactcaagggtatttataggattacagatatacccagtaaaagaaaattttccaatgaaaatttactaagcatgaaaaaaagcaggaaaatatgatgtaaggagaaaaatcaataaatcaaacctgactcagaactgacacatatgttagaatgattcaagttatggcattaaaacaattatactgtttaccatatgttcaaaaatttagagacgaggaagatactttaaaaaatcaaacttctagagatgaaaaccacaacgtttaaatatacataatacctaaaagcactgaatgtaattcatartacactaaacattgagaagtcccatgatctgcagttggcatgctggagttcctgggccttgggaggaggctctgtgcaggcctcccagggccagtcccctggggtctgctctatacaggtcacccgaggcgttagggtgacctcggagcctgccactcccgacagccagacccagggcctgcgttctgctctatccagggcctccctgaaagcccct

SEQ ID NO: 522220 - DNA, 553 bp, Homo sapiens
tccaagtaacttagtaacactccagaataaactcaagggtatttataggattacagatatacccagtaaaagaaaattttccaatgaaaatttactaagcatgaaaaaaagcaggaaaatatgatgtaaggagaaaaatcaataaatcaaacctgactcagaactgacacatatgttagaatgattcaagttatggcattaaaacaattatactgtttaccatatgttcaaaaatttagagacgaggaagatactttaaaaaatcaaacttctagagatgaaaaccacaacgtttaaatatacataatacctaaaagcactgaatgtaattcatagtacactaaacattgagaagtcccatgatctgcagttggcatgctggagttcctgggccttgggaggaggctctgtgcaggcctcccagggccagtcccctggggtctgctctatacaggtcacccgaggcgttagggtgacctcggagcctgccactcccgacagccagacccagggcctgcgttctgctctayccagggcctccctgaaagcccct

SEQ ID NO: 522221 - DNA, 664 bp, Homo sapiens
tctgactaccttccaaatgtccatttgaccacagcagactaaagcatccttgttargccaaataaaaggagtcttccaccacaaatgctgcttctgtttgcttgccaagtgccattcatgtttctcccttcaagaacataagccggtaggctaggtaatcaagtctgctgtgtaatagatacccacttacagaatagcatgcccttataggcactgctcgatctctgtgactgattcccttagaacctccttcacatggttcacttgggtgagggttcgaagcactctttttacaatggagggtaaaagccacaactctgtcatataacaatgataacctgcttcagtggattcttcttgactctcaatcttttgcaaatatagactgcttgggtgtggtggagtgaaagtttagatggaagagccagttctgctaattcttagaaatcctgtgggaatatgctttatggttttctttagaatgtgggtggaaaaattctaaagaattttctttagaatagctagaatctttatagctatttggccaattctgagtcaaaaggaaaaatactgtttagcattttggtacccaaataagccaaattcccttactattttattctgtcaaaggtgtgtattaaaaccctaactgtagatgatccca

SEQ ID NO: 522222 - DNA, 325 bp, Homo sapiens
tttgctaagcaacttataataactcataaagaataagatttggagaatctagacaatgatttggagagctatctgtcaaaatatcatccatcaaaatgagaactgtaaattgctggccttgtcaaacacagagttcttctcaaattatgttarataagagtagataggtcatgtttcagggttatggggcagcaaagaatacatttagaaaatcttactacaggatctcactatgtaggtttgttttccttttttgttctttttataaagtgtgcttgtgttacacattgaagcgtatagaactgtgcatgcattacgtaaggga

SEQ ID NO: 522223 - DNA, 329 bp, Homo sapiens
cacatacacatgtacacacttgcacacacagcctgctctcaggaaacggctgtgmcttcttggaggaaataacgccattggccttctcaccaccaaatctgtgccaggatcagcctcaatacccatctcttttgccctcctgttttgtcccaagggaagagggacccttccctgcctccagagctcagctctcccgtgctcctgccctttattcccatagcctcactaggctcacctcttattggccctttcctgttagcatttaattatgcttagatccttctcatcttaaaacaataggagcagaagctcttcctaacccatatttt

SEQ ID NO: 522224 - DNA, 561 bp, Homo sapiens
tgaaaatgttgacacatgatacatggagtcacttccctgatttctaaggaagaggaggtgtaggtatcctgaaggaactgccagatggaagaaaggccttgcacaattcctgtggtactggcttagaagctttcaaccccgaaaggtgaaaaacctggccttctggcaaaggaatcaggaagtctgtggcgcagatgcttagagcgggatgaatgactgcagaacaatggatttcctgcctcagggctggcagcctggggacctgcaccgtggtttctctgatggatttagcctctgccttggcaccctgcccttctttctcctgcccttgctgcttcctctctgcagctctcttctccaaattccacaagttctactaacaaccatttttccaagtctgtagaacacaatcaagcaaaagaatttacccaaagcatttggaactgaatgaatgacctgctctcataaatggtygcatattcaaagcactctggaaaaggatgagacggaaaggaaataatcaacaatggcagaatttctaactttaagaaactaaaattc

SEQ ID NO: 522225 - DNA, 593 bp, Homo sapiens
gattcgatagctgaattgaytggtaaatttttttttgtgttggcttttgttttactaggctttgatcaagagcccctctcaggatgagatgctccctacatacctgaaggatctttctattagcatagacaaagcggaacatgaaatcagctcttctcctgggagtctgggagccattattaacatccttgatctgctctcaacagttccaacccaagtaaattcagaaatgatgacggtgagtttgcttaacctttgcaggagttttgggtcttaccttttcacccctcagaatttgtattcaagaaacgtaattcctccccattgcagcttctctgtcttttccagagcagtgctcaggatagttctgccagctatggcttttaggatattaggaaatgtttccagtattcattttgagaccttaagaatatttattagtgaatctctgctttattttcttcattaaaatggaataaattcatacttgctttccagaaaaactaggaattaaaggttttcagaatatacaagatgatattctcaaaggtctagcactaaatgtgaactttaaaggaatcgtgggaggatag

SEQ ID NO: 522226 - DNA, 593 bp, Homo sapiens
gattcgatagctgaattgattggtaaatttttttttgtgttggcttttgttttactaggctttgatcaagagcccctctcaggatgagatgctccctacatacctgaaggatctttctattagcatagacaaagcggaacatgaaatcagctcttctcctgggagtctgggagccattattaacatccttgatctgctctcaacagttccaacccaagtaaattcagaaatgatgacggtgagtttgcttaacctttgcaggagttttgggtcttaccttttcacccctcagaatttgtattcaagaaacgtaattcctccccattgcagcttctctgtcttttccagagcagtgctcaggatagttctgccagctatggcttttaggatattaggaaatgtttccagtattcattttgagaccttaagaatatttattagtgaatctctgctttattttcttcattaaaatggaataaattcatacttgctttccagaaaaactaggaattaaaggttttcagaatatayaagatgatattctcaaaggtctagcactaaatgtgaactttaaaggaatcgtgggaggatag

SEQ ID NO: 522227 - DNA, 449 bp, Homo sapiens
tgagtattgcattacttttgctgccatttgtcagagtatcaatttaaaaaaatgatactattccttaattcagaaacatggctatttttcagcagtgtttattaaataatagccttgaaagtcaacaaagattcataatgaccatagatatcccatagcatagcaaataagctcatggcttttctggattctagtgtgtgtataaacatatatatatatataattatatataattttttaaaagaaaacctcatgcagtgcttttacttatttatttatttatttatttatttatttatttatttatttatttattttgagatggatggtcacccaggakggagtgcagaggtgtgagctctgctcatcgcaacctttgcctcccggattcaactaattatcttgcctcagcctcccgagtagctgagatgacaggtgcacaccaccac

SEQ ID NO: 522228 - DNA, 355 bp, Homo sapiens
cccaaggggcccagagtggtgggagtgagaggccaccctaaggcacactgaccagagaggcatggagggaggaggctgacttgccctggggacccctgctaactgagacccacccttcccctccaccctgcttctgtatgtgggagacgaaaccaagagtcaytgggggcagcaggcatttcccagggttaaggctgatggaaggtccctatcccagatgggagatgggggcttttcctatgactccccccatcccccagctggaagacgtggggaggggtgcatagccttagagaggtagaatgaggggaaatactcctcagtgcccagaggtggggagttgagagcagctgtt

SEQ ID NO: 522229 - DNA, 516 bp, Homo sapiens
aggatgagttcatgtcttttgcagggacatggatgaagctgtaaaccatcattctgagcaaactatcacgaggacagaaaaccaaacactgcatgttctcactcataggtgggaactgaacaatgagaacagttggacacagggcagggaacaycacacactgggtcctgttgtagggtggggggctgggggagggatagcattaggagaaatacctaatgtaaatgacgagctaatggatgcagcaaaccaacatggcacatgtatacctatataaccaatctgcatgttctgcacattaaaaaaactatatccctagtcaagagagaacaagacaaaatgctgcatcaaggggaatggcagagataagtgacaccctcaagggtctaaagaatgcagcaatagtgtccccatgatatttctgtttaaatcaccattctgtcccctcgggatctggctgctcttggtggatgactctagaccagaggtccacaactacagattctgtgcccaaat

SEQ ID NO: 522230 - DNA, 624 bp, Homo sapiens
tctgttacccaagctgagtggagtggcacaatcacagctcactgcagcctcaacctcctggggtcaagcaatcctcctgcctcagcctccgagtagctgggactacaggcacgcactactatgcctggctaaatttttattttttgtagagatggggtctcacaattttgcccaggctgcaaagttttaaacagagtttttttktgtgtgtgtggttgcactgctgcaaatggcccagggcacctcatcagactttcacttagttgatctgtctgtgaatcagatcctgttagcctcaggaatctccatgtatcaaggcaagtgccatatgcaaaatcccagggggcagcatggcatagtggcaacttctttttgccatagcttccagtctgcataattgtcagtccctggcattcaaaaggcccattaggcctgatcggcccaagtgtgatggcactctgtatagcccgttggatttttttattcagagcactgccatctctattaggtttttgtttaatacagtgatcttctccacacccctcctccatcttgtgttattttactgatacctcgtggctgggtggaggaagccaggtggactcctgcttgtgttctatccca

SEQ ID NO: 522231 - DNA, 624 bp, Homo sapiens
tctgttacccaagctgagtggagtggcacaatcacagctcactgcagcctcaacctcctggggtcaagcaatcctcctgcctcagcctccgagtagctgggactacaggcacgcactactatgcctggctaaatttttattttttgtagagatggggtctcacaattttgcccaggctgcaaagttttaaacagagtttttttgtgtgtgtgtggttgcactgctgcaaatggcccagggcacctcatcagactttcacttagttgatctgtctgtgaatcagatcctgttagcctcaggaatctccatgtatcaaggcaagtgccatatgcaaaatcccagggggcagcatggcatagtggcaacttctttttgccatagcttccagtctgcataattgtcagtccctggcattcaaaaggcccattaggcctgatcggcccaagtgtgatggcaytctgtatagcccgttggatttttttattcagagcactgccatctctattaggtttttgtttaatacagtgatcttctccacacccctcctccatcttgtgttattttactgatacctcgtggctgggtggaggaagccaggtggactcctgcttgtgttctatccca

SEQ ID NO: 522232 - DNA, 624 bp, Homo sapiens
tctgttacccaagctgagtggagtggcacaatcacagctcactgcagcctcaacctcctggggtcaagcaatcctcctgcctcagcctccgagtagctgggactacaggcacgcactactatgcctggctaaatttttattttttgtagagatggggtctcacaattttgcccaggctgcaaagttttaaacagagtttttttgtgtgtgtgtggttgcactgctgcaaatggcccagggcacctcatcagactttcacttagttgatctgtctgtgaatcagatcctgttagcctcaggaatctccatgtatcaaggcaagtgccatatgcaaaatcccagggggcagcatggcatagtggcaacttctttttgccatagcttccagtctgcataattgtcagtccctggcattcaaaaggcccattaggcctgatcggcccaagtgtgatggcactctgtatagcccgttggatttttttattcagagcactgccatctctattaggtttttgtttaatacagtgatcttctccacacccctcctccatcttgtgttattttactgatacctcrtggctgggtggaggaagccaggtggactcctgcttgtgttctatccca

SEQ ID NO: 522233 - DNA, 637 bp, Homo sapiens
ggaatcactgagctaagagataaggccatctcttgctctgaggctatttagagttgataatgtaatattggatgcccctccatttataacctatttattcatttctttaccctcagctattattcttccttttctccactttttacccaaatttttccatctttgggagagacactaggttcagccactatgctggtccaggttgctggtagcagtactagtctagtgagtgctgccccttagtccatttccactcatttacagtagggtcacatacgttcccaactagtsagcctggttttgttttgtttgtttttttagacagagttttgctctgtcaccgttacccagtctggagtgcagtggcaggatcacagctcactgcaacctctgcccctgggtttgaatgatcatcccacctcagtcgcctgagtagctgggattacaggcacctgccaccatacctggctaaattttttttgtgtttttgtacagacagggtttcaccatgttgcccaggctggtcttgaactcctgagctcaagcattccacaggcctcagcctcccaaagtgctgggattacacgcgtgagctgccgcacccagcctagtgagccatttttatcaccaggcaata

SEQ ID NO: 522234 - DNA, 659 bp, Homo sapiens
ctggctctgcaaatttaagcaagtctgcttaaattcttctaaacctttgttcccattctaaatacacaggtaatgtacctctcacagtttttttcttctttttgagaattaaaacatttgtaagataacctatgacatgtaataactacatatctactgtttttattttaatcatataaattcttgccgatttttgcaggctatgttgaaatgtagttttaatttgatttttggcattattattttatagtcttgcctacgtactttttatgtgtttgtgcttaagggatttataggaaattactttcatattaactcactttatcttttgattactgtttatggataatcactctggtgactggttgacttttctgaacgttattattaccacagtcaacatgattcgtataatttcctaggaaattaaaagcttactaaartgtaagctgcttgagagcagaaactgctatatccatggttatagccatctcttatgcacatggatctagcatattgtacaagcctaataaatattgatgaagtcaataaatcaatatatttgggaaaaaaaaaaaaactagacctgtatcatgcccaaactaatttcaaaaggttgatagtatatatatatttcatacaatgcactaataatttct

SEQ ID NO: 522235 - DNA, 612 bp, Homo sapiens
caggggtgggctaagagtgttatttcttttattctgtgggttatgggagataaggtggaaggtgaagggtccctcatctaacttaaagaagagtccaaagaataaaaagggcaaatggtatcatgcagataagaggatggaattyagataccaggtagatacagaaatgttctctctgttcttttccagcactgggtttgaatgtggtaacatgaactagatgcaagggagcatgtaaaacaataattcaagcaataccttatattctcactctgttgcctaagttagaatgcagtgggaagatctcagctcactgcaacctccactcccaggtgcaagcaatcctcctgcctcagccttctgactagctgcaattacaggcgcatgccaccatgcccagctaattttttgtatttttagtagagatgtgagttcgccatcttggccaggctgttcttgaactcctgacctcaagtgatccgctgacctcggcctcccaaagtgctgggattataggtgtaaaccattgcacctggccgtgataacttttaacaatttatctaaatatttttgcattgatcttcatattcaatctgcacagctcttcgaagt

SEQ ID NO: 522236 - DNA, 612 bp, Homo sapiens
caggggtgggctaagagtgttatttcttttattctgtgggttatgggagataaggtggaaggtgaagggtccctcatctaacttaaagaagagtccaaagaataaaaagggcaaatggtatcatgcagataagaggatggaatttagataccaggtagatacagaaatgttctctctgttcttttccagcactgggtttgaatgtggtracatgaactagatgcaagggagcatgtaaaacaataattcaagcaataccttatattctcactctgttgcctaagttagaatgcagtgggaagatctcagctcactgcaacctccactcccaggtgcaagcaatcctcctgcctcagccttctgactagctgcaattacaggcgcatgccaccatgcccagctaattttttgtatttttagtagagatgtgagttcgccatcttggccaggctgttcttgaactcctgacctcaagtgatccgctgacctcggcctcccaaagtgctgggattataggtgtaaaccattgcacctggccgtgataacttttaacaatttatctaaatatttttgcattgatcttcatattcaatctgcacagctcttcgaagt

SEQ ID NO: 522237 - DNA, 612 bp, Homo sapiens
caggggtgggctaagagtgttatttcttttattctgtgggttatgggagataaggtggaaggtgaagggtccctcatctaacttaaagaagagtccaaagaataaaaagggcaaatggtatcatgcagataagaggatggaatttagataccaggtagatacagaaatgttctctctgttcttttccagcactgggtttgaatgtggtaacatgaactagatgcaagggagcatgtaaaacaataattcaagcaataccttatattctcactctgttgcctaagttagaatgcagtgggaagatctcagctcactgcaacctccactcccaggtgcaagcaatcctcctgcctcagccttctgactagctgcaattacaggygcatgccaccatgcccagctaattttttgtatttttagtagagatgtgagttcgccatcttggccaggctgttcttgaactcctgacctcaagtgatccgctgacctcggcctcccaaagtgctgggattataggtgtaaaccattgcacctggccgtgataacttttaacaatttatctaaatatttttgcattgatcttcatattcaatctgcacagctcttcgaagt

SEQ ID NO: 522238 - DNA, 612 bp, Homo sapiens
caggggtgggctaagagtgttatttcttttattctgtgggttatgggagataaggtggaaggtgaagggtccctcatctaacttaaagaagagtccaaagaataaaaagggcaaatggtatcatgcagataagaggatggaatttagataccaggtagatacagaaatgttctctctgttcttttccagcactgggtttgaatgtggtaacatgaactagatgcaagggagcatgtaaaacaataattcaagcaataccttatattctcactctgttgcctaagttagaatgcagtgggaagatctcagctcactgcaacctccactcccaggtgcaagcaatcctcctgcctcagccttctgactagctgcaattacaggcgcatgccaccatgcccagctaattttttgtatttttagtagagatgtgagttcgccatcttggccaggctgttcttgaactcctgacckcaagtgatccgctgacctcggcctcccaaagtgctgggattataggtgtaaaccattgcacctggccgtgataacttttaacaatttatctaaatatttttgcattgatcttcatattcaatctgcacagctcttcgaagt

SEQ ID NO: 522239 - DNA, 596 bp, Homo sapiens
cactattagggccactttccacctgcactttrtttcagcaaatgcctgttaagcacccgtggggcatccctttgcctcccactgtgcttggcaaacaggacaacatgaatagatggtcctcaccacaagccttagtctagtcagagagacagacacctcaatagatgactacacagccctgtgttaaatgtgacagcagaggcacgcacaaaataggaccgcagtgtctcccctcaacgtcagtttaccatccgctcacttggagagttatctaggggatgtcccagcttgcaagtggggacagcagtgctggcatcagcagtgtgagcagacagaaactcagaaagccatggagtaggcgtgtttcttgctgtgctttgggaagcgtcatcagcatctggagagcagagtgtaaacggggacacagaagtgctcactttttcccctaaagatatgcacaattttgtaatttaaatatttacttctgttagtgcttagctactacagaatgcaaaataaatccactctaaagaagctaagatccaggtgtcttagtcaatttaagctgctatgacaggaaactatgatttgggtgg

SEQ ID NO: 522240 - DNA, 610 bp, Homo sapiens
atcattcaagggactatgtcactcaacttcatttgctggaacaaatctggagggagagcccctaaaacttctgagtgaggctgcccagcagattgtacccatgtaggggaagcagaggagagaaaatggtagccatttttacactggcattgttttgtatagtatttattgattcaagaaacataaaattctgaataaaatgacttggaaactgcccyttaaaaataaagaaattagaaaaacaacaaaaaaagtggctaaagttataagagcattgtgcttaaagaagatgaaaaccttggcttttacatagaattaccatacaaagcagcaattctactgttgggcatatatccaaaaaaattaaaagtaggaacctgaacagctatttgtacacccatgtttacagcaatgttatgcataatagccaaaggtgggagaacctaaacgtccatagacagatgaacagataaacagaatacagtctacacatacaatggaatattattcagccttaaaaaagaagaaaattctgacacatgctacggcatggacgaatctcgatgacattacactaaagaaacaggccagtcagaaaagagacaaatgt

SEQ ID NO: 522241 - DNA, 610 bp, Homo sapiens
atcattcaagggactatgtcactcaacttcatttgctggaacaaatctggagggagagcccctaaaacttctgagtgaggctgcccagcagattgtacccatgtaggggaagcagaggagagaaaatggtagccatttttacactggcattgttttgtatagtatttattgattcaagaaacataaaattctgaataaaatgacttggaaactgccctttaaaaataaagaaattagaaaaacaacaaaaaaagtggctaaagttataagagcattgtgcttaaagaagatraaaaccttggcttttacatagaattaccatacaaagcagcaattctactgttgggcatatatccaaaaaaattaaaagtaggaacctgaacagctatttgtacacccatgtttacagcaatgttatgcataatagccaaaggtgggagaacctaaacgtccatagacagatgaacagataaacagaatacagtctacacatacaatggaatattattcagccttaaaaaagaagaaaattctgacacatgctacggcatggacgaatctcgatgacattacactaaagaaacaggccagtcagaaaagagacaaatgt

SEQ ID NO: 522242 - DNA, 610 bp, Homo sapiens
atcattcaagggactatgtcactcaacttcatttgctggaacaaatctggagggagagcccctaaaacttctgagtgaggctgcccagcagattgtacccatgtaggggaagcagaggagagaaaatggtagccatttttacactggcattgttttgtatagtatttattgattcaagaaacataaaattctgaataaaatgacttggaaactgccctttaaaaataaagaaattagaaaaacaacaaaaaaagtggctaaagttataagagcattgtgcttaaagaagatgaaaaccttggcttttacatagaattaccatacaaagcagcaattctactgttgggcatatatccaaaaaaattaaaagtaggaacctgaacagctatttgtacacccatgtttacagcaatgttatgcataatagccaaaggtgggagaacctaaacgtccatagacagatgaacagataaacagaatacagtctacacatacaatggaatattattcagccttaaaaaagaagaaaattctgacacatgctacggcatggacgaatctcratgacattacactaaagaaacaggccagtcagaaaagagacaaatgt

SEQ ID NO: 522243 - DNA, 652 bp, Homo sapiens
tggtactggataaagaagaaaagtggtcaatgcctttcaataaytcacttgtggtgatggagacacgtgtgcaaataattataattcagtgggataagcaaatgttataatagaagtgtgcatgaggaattataagcatcagggtgaagaagtactcaacctgccaaaaaaatacatagaaagctagagcagatatatatttgtccatttgaaagtcacttaaaaaaatcagactagttttttttcaagactatattttggtcttctttcctgaaactttcacatttggtttctgcctaggaagccccacctgctttttcatattaagggcttctcaaatctttgactctgcaaagaacgtctgttttacttacatccttgttttgctcagtagcaagctttttagaaacccttaactgttctgtaatatttaaggtatagaaataaggttttaatatcccagttcatgtcacgtgctagatattgaactttgaatctccaggaactactagaaggaactgacaaattcaagaatttgactttgtctctctgaattgggtttgaattttgcttttgccactcactatgtgaccttgggcaagtcctatacagtctccaagctttgtaagtgctttgtaaagatcttgctgag

SEQ ID NO: 522244 - DNA, 652 bp, Homo sapiens
tggtactggataaagaagaaaagtggtcaatgcctttcaataactcacttgtggtgatggagacacrtgtgcaaataattataattcagtgggataagcaaatgttataatagaagtgtgcatgaggaattataagcatcagggtgaagaagtactcaacctgccaaaaaaatacatagaaagctagagcagatatatatttgtccatttgaaagtcacttaaaaaaatcagactagttttttttcaagactatattttggtcttctttcctgaaactttcacatttggtttctgcctaggaagccccacctgctttttcatattaagggcttctcaaatctttgactctgcaaagaacgtctgttttacttacatccttgttttgctcagtagcaagctttttagaaacccttaactgttctgtaatatttaaggtatagaaataaggttttaatatcccagttcatgtcacgtgctagatattgaactttgaatctccaggaactactagaaggaactgacaaattcaagaatttgactttgtctctctgaattgggtttgaattttgcttttgccactcactatgtgaccttgggcaagtcctatacagtctccaagctttgtaagtgctttgtaaagatcttgctgag

SEQ ID NO: 522245 - DNA, 612 bp, Homo sapiens
ctggtactggataaagaagaaaagtggtcaatgcctttcaataactcacttgtggtgatggagacacgtgtgcaaataattataattcagtgggataagcaaatgttataatagaagtgtgcatgaggaattataagcatcagggtgaagaagtactcaacctgccaaaaaaatacatagaaagctagagcagatatatatttgtccatttgaaagtcacttaaaaaaatcagactagttttttttcaagactatattttggtcttctttcctgaaactttcacatttggtttctgcctaggaagccccacctgctttttcatattaagggcttctcaaatctttgactctgcaaagaacgtctgttttacytacatccttgttttgctcagtagcaagctttttagaaacccttaactgttctgtaatatttaaggtatagaaataaggttttaatatcccagttcatgtcacgtgctagatattgaactttgaatctccaggaactactagaaggaactgacaaattcaagaatttgactttgtctctctgaattgggtttgaattttgcttttgccactcactatgtgaccttgggcaagtcctataca

SEQ ID NO: 522246 - DNA, 571 bp, Homo sapiens
actgcaaaagagtaatcacacccatttctttctttatttatttctttttcttcttttcttcttctttttttttttttttttttttttgttttgaggcagagtcttgctctgtcgcccaggctggagtacagtggcatgatcttggctcactgcaacctccgcctcccaggttcaagtgattctcctgcctcagcctcccgagtagctgggactgcaggcatgcaccaccatgcccagctaatttttgtatatttagtagagaaggggtttcaccatgttggccaggatggtctcaatctcttgacctcgtgatccgcccgcctcagcctcccaaggtgctgctgggattacaggcatgagccaccccgcccggcccacgcccatttctaaagatgaaatagttcaatgggacagaattaaggaatttctcttttataaaacacccaattagtgacagtgatggaatcaggaccaaaatctgtgtttaggtaagatacaggtttggctgctgtgaaaaagacctaaaataccatgctagaagayggtcgacattttagatcttatataaaag

SEQ ID NO: 522247 - DNA, 649 bp, Homo sapiens
acttatctcattcagaatagatttagagacttgagtttgaagaataattatatatatatatatataaaattatatataaatatatatataaaattatatataaatatatatatatatatattcagataaactttggcatgggagatgtcctaaggacaggcacattaacaacaagaagagaacgctgtaacacatgacaaaggcagagagaaaaagaaataagtgtaaaaataattgtaaaaaatttcaagaaagcataactccaaatatcaacagacctgaaaaacacctcagtgacaacagttgtaaataatgaccatgagtcaaaaaggcagataaaattaacctcagtacactccgattaggaagacagcgtggtaatagtttggaaataaaaacatgcttttgattatttcaggtgttaagtatrtgttctcatctggaacaaagtatctcctagcaaagtcagagtattgaaatgcctatagctctacaagccacagcccttgatgtgcccacattctactgagacatgtaaaaaataatggtgtgatacgtgaaactataagtacatagaaaatatggttttaacatagaggagagaatgattgagtcagttgggagaagagagagattattacatagagag

SEQ ID NO: 522248 - DNA, 660 bp, Homo sapiens
ttgtctatatatacttgtatctctctgagtttccttaagatcattattttgatctttttaggcactttgtaaataactttttctttgggatctgttactggagacttattgtgttgctttggagggttcattttcttgctttttcatatttcttgtgtctctacrttgatatatgcaatctagtgaaactgtcactttttccaatttaatggaatagttcagccaagaatacttcatccagcaaagtaatatttcagaaataatgcagacacaacgacattccccgacaaacaaaagcagagggaactggtcatcactacctcagccttacaagaaatgcttaatgctgtaatacaactgtaaagaaatgatgataatgtatgtaaatatagacttatttatgtggatggagaatattggttgggtatggtgcattgactgtggtactggatggacacagtagcatggtctttgtacagtttcttcagcattaataatcaccagcaatgtctgtgattgcctcagtagcttagactgcaagaatttgtgacaatgatggtgtgattttgctgaaggtggggttgctggggtgtttgtcaggctaggcacatataggcccatgcatggcaagatgagcaactgtatggtgattttataggg

SEQ ID NO: 522249 - DNA, 602 bp, Homo sapiens
ggaggaaggagaggaggagaaggcagagrccagcttggaggaaggagaggaggagaaggcagagaccagcttggaggaaggagaggaggagaaggcagaggccaccttggaggaaggagaggaggagaaggcagaggccaccttggaggaaggagaggaggagaaggcagaggccagcttggaggaaggagaggaggaggaggcagaggccaccttggaggaaggagaggaggccttccttggaggcccctgcatcctcccttgctctgctctcactgctcctgcagctcccccactcccctcggagactccaccagatgtctgggtgaccaaggcagtctcacatgtgatcggaatgagattggctctctcaaatcaagagcctgagctagggataccataccctgagccctgccatgtcccaccagccatgtctgtctcaaacccaacctcagaacctgacacttgcacggaggccaggccccaccaggcctacaggtgatgctgcctactcaacagtgtccttgaggcctcgagacccctgccctcctcccagggcccagccagtccattgaatggaaggacaaacacatggaaggatg

SEQ ID NO: 522250 - DNA, 337 bp, Homo sapiens
tggtaggtggcaggtgggacatgcccctgtgctcccccagagaagtgaatgaggccaccctgggtgtgagagacagcaaaaygggaagcaagggccctgtccacctatttcttttttccacctcatttctttttcttttggaatcttatgcatgtgtttgtcacactcaccactgcgaagtctttcaggcgtctctgcagtttacagattgatgatcctagggagatggggttggggagcagtttccccggggaggcaagggctttgggacactctcaggggtgtggtctggcctcagcctccctgagggtggacaagaccctcctggggcttcatg

SEQ ID NO: 522251 - DNA, 516 bp, Homo sapiens
cctggacgggggtggtgacaggggcgcccctgagtcacccgccctgcccacccgggccaagcagacggggtgctcccacaccatccgacggggcagcctcgcagcaccccccccacgcaccgtctggcgcccgcgtggcacccaccagatgaggcgcttgtccatcatggcatagggcagcccgcgcacgggcgtcccagagccgcgcagccgctccatctctgcctcccacagctcctccggctccggcaccccaggggcccgctccgatgacaccgaccgcggcagcagcatctcggcgggcacgggtagaggctggggcgccgggctgccggtgggggggatatgagtccccggttggatgagccttaaggccttggctatggcctctgtgcacgctgggctgggggcgggcccttccgtcccctctgcgccggcgtcggggcctgggctcctgcagccctagggttcacttgcccgrgtctgccgctctgccacctccggggctcagaaatg

SEQ ID NO: 522252 - DNA, 465 bp, Homo sapiens
ccagctggcacatgctccctggctggcgttagcttggttggtggccataggaggccagtgggtgaggactgtcaccttctgtgtgcctcagagaggagactgaggcatagaggccgaggccctcgtagaggttgcggggccaggaggctgcagagccgggcctcgtggaacattctctgcctttctggggttctgtgcttcaaggagctcagagctgtgacctgtcatgagccattccgtgtaggggggcttctggtcactgggggccacccacatccacagggaacaggaaaggacctctgagcaaggcccctgccccagcgggcagggctggggaggtgggtggagaggggttgaggcaggcctcgggagtgaacgccagcccaggcacaggggcctctcggcagggggactgggtcctctctgygcctggagggagggccctcagcagatgaaagggcaggt

SEQ ID NO: 522253 - DNA, 578 bp, Homo sapiens
cctgtgtgtgtggaatgtgccagggtacgtgtgtgcatgtgtgtggtgtgtgtcagtgtgcgtgtgtgcatgtgtgtggtgtgtcagtgtgcgtgtgtgcgtgtgygtggagtgtgtcagtgtgcgtgtgtgcatgtgtggtgtgtgccagtgtgcgtgtgtgcaagtgtgagtgcctgtgcatgtccagtgtgccagtgtgtgtgtgagtgtgcttgtttgtgtgcatgcctgtgcatgtgtgtgcctgtgcgtttgtgcatgtgagtgcctgtgtgtgtgatgtgtgccagtgtgcgtgtgcatgtgtgtggtgtgtgccagtgtgcatgtgtgcatgtgagtgcctgtgcatgtggagtgtgccagtgtgcgtgtgagtgtgcttgtgtgtgtggtgtgtgccagtgtgcgtgtgtgcaagtgtgagtgtgcgtgtcgtgtgccagtgtgtgtgtgagtgtgcttgtgtgtgtgcatgcctgtgcatatatgtgtgcctgtgcgtgtgtgaatgagtgcctgtgtgtggtgtgtgccagtgtgcgtgcgtgcaagtgtgagtgcctgtgcatgtc

SEQ ID NO: 522254 - DNA, 459 bp, Homo sapiens
cccccagtatggaccttccacaactcccagccataagctgaatgtttctctttaaaggatggagaaaacttctgtctgtctctggcaagaattgggggactgttgactgggattgtgggctgggcttggcttctaactgctgtgtgacccaagacagccacttctcctccctaaccttggttatgtcttggcagcacagtgagcaggtcggactaggcgaacagttttggattattgtgtttttagatgtggaattattttttgttatataaactcttatgtgtaaccccaatatagaaactarattaaaagggagtctctctggttgaaaggggagctgagtaccctctggaactggaggcacctctgaaaaaagcaaactgaaaaccagtgccctgggtcactgttactcctataagacagtttaaagtgagacctggaaaaacatttgctttacct

SEQ ID NO: 522255 - DNA, 559 bp, Homo sapiens
ggtattttgaagttgggagcattctgggttctccagggaccaggcaaccctgtctgtctccagtcctcatgtccgcagaatattataagtggcctgcccatgccagacagtgaggctagagaatcatcatcttgctccctgctctctgcccctctgcccacatccttgggagcttcaaagggtgtttgcaaaagcaccacgtataggaccagcacatcgcaggtgttcaatgaccatcttggaagtgtttacactcgttttggagtaaaccaagatatgcctgtggcagaggtggaggaagccattggattcagcctcggattacactaatgtgtgggcctctctgtcttgccctagaaagtgagggcagggacaatgtctgatacatttctaaccccccagtgcctgattcacagttggtgctcattaaagcacaaacattagatccrttgaaaccctagtgtcaaaaacccacctatcaaataaacaaatgactgtataaatgaagttgctccccagcggacacttctatgctcctctctgctcttcctcaccccca

SEQ ID NO: 522256 - DNA, 627 bp, Homo sapiens
ccgaggtgcaatctgactatgcttcatgagaacgtaagaacttcttgatctatactgagtgtctttttctgcctgtctaaactcactgggatatttgatcattgttttctaattttttctcatttgttgatttattcattcaataaatactgcccttccttcaacaaatccttattggagtcctacagtgtgctgggcattatggttggtttgaggaagagactcctaggtaaaaatagacctgattcctgctctaatagagaaagatccattaatcaaataattgcactggtggaagtgcaattacaagcggaagagagtagtctaaaggaaaggaatatggttttatgagaacatataagaaaggaatctgatgtagacttggggattggggtcagagtgaactttctgagaatgtgtagtttgagctgagatctgaaggatacccagtggsggggaggaggggaagagctctccaaatggtgagggggcatcatgtacaaaggccctgcagtggaagggagcatggcaggttcaaggaaagagctctctgaaaacagcatccagtttgggagagatgatgttgaattgcctttgaatatggacgtggtgacgtagagtaggcag

SEQ ID NO: 522257 - DNA, 553 bp, Homo sapiens
ttccgtttcttcattggtcacatggggacagtggatagagctattcaaggacttaatgaaatgatgcctgtagagcttgtaacacagagcttggatatcatcagtgcttggtcagtggtggttcatataactatgactgagaacagaccacttcaaggccagtgttcttgttggtgatgcttttaaattgacaaagccagtttataaaatgagattaaaatggaggcagaaatctaatgtaaatgtgggaatcccagcctctytatgatgttctttgaactggggtgtttttaaaaataatctgagggaagatagaacgcactggtctggccagtgtttgtggaagatgtaaaccaggggttctgaaaatggggcctagacctccacactccatatcttggccctcccgctgagctgtgccctgtgtcctggtgccgtggtggggctggggctgcgtggactcactgtggaggtttcccttgcagggcccccagatcaagggatggcattactgctctgaggacacattttcagcagtgatggggctggggga

SEQ ID NO: 522258 - DNA, 597 bp, Homo sapiens
ctactcaaaggggacagaggcagggtgaagggcctcacggaagtgccatttggacaaaccgatgcaaactttggaagcaggaacagagttgggagtggggaggctgttggaaaaccccattggctgagagaaatccccttaagtgtcacaattcagagagagagactgattctgagaagggcactgggcaacctgccaacatggggcatcaccgagtccagcagaagggcacacaggtgaggccgggtgtggtggctcaagcctgtaatcccagcactttgggaggccaaggtgggcggatcaggaggtcaagagattgagaccagcctggtcaacatggagaaactccgtctctactaaaaatacaaaaattagctgggcgtggtggcgcatgcctgtaatcccagctactcaggaggctgaggtaggagaatcacttgaacccaggaggtggaggttgcagwgagccagggtcatgccattgcactccaggctgggcaacaagagtgaaactccgtctcaaaaataaataaataagaagtgcacacaggtgaagtgtgctgtttccataccctgttgcaaggccacactggaatc

SEQ ID NO: 522259 - DNA, 388 bp, Homo sapiens
ttgtcctcttttttttttcaatctaatttggccattttagttaccccagtatcttcrtctgaaataatgaggtaaccttttagtttttagtggaaattatgaatggtttggtagttgactttaattctaacacatgtcctactttttttttctttagggattggggaatttttctgtaaacacttctaagggcaatacagccaaaaatggtggcttgcttctgtaagtatacaattggatgtgctaaattgaacaaaataggttcttgtgctattttacttaggtttctctttttttccccacacatagcagtaccaatatgaagtgggtacagttttcaaacctacacgttgatgttccaaaggatttgaccaaacctgtggtatgt

SEQ ID NO: 522260 - DNA, 388 bp, Homo sapiens
ttgtcctcttttttttttcaatctaatttggccattttagttaccccagtatcttcgtctgaaataatgaggtaaccttttagtttttagtggaaattatgaatggtttggtagttgactttaattctaacacatgtcctactttttttttctttagggattggggaatttttctgtaaacacttctaagggcaatacagccaaaaatggtggcttgcttctgtaagtatacaattggatgtgctaaattgaacaaaataggttcttgtgctattttacktaggtttctctttttttccccacacatagcagtaccaatatgaagtgggtacagttttcaaacctacacgttgatgttccaaaggatttgaccaaacctgtggtatgt

SEQ ID NO: 522261 - DNA, 257 bp, Homo sapiens
tgagattgccacttaacttttttttaattaaaaaaaatgatgttctgggtgatgggacataatatttagacatgttgagctgacagttgatgagtgtgttgtcaatacaccrtcaccacaaatcatgttcccagggttgatcagaaggagatttgtgtgcaaatgcatgtgtgtgctcacacacttggatgatttagagtgatttagagcaacttctcaaaagcagttgctggggagggctggccacaggcgagggg

SEQ ID NO: 522262 - DNA, 502 bp, Homo sapiens
tatgaaatcatctaccaatttccttttgtgagctggaagatctaatttgcttagcatagcagrtgttctctgcctatctctctctctctccccctgacttgggattggtacccttctttatggtattccctactctttgcagtgtagagaacattctctttacggagacaatggaaaccaaataaaatttgccgagccctgccttttcatcctcttttgttaaatattacatgacttgctctaaatacggatctatccacttctacttctttttccttctatgaacatagcgttactagctccttttattaacttgggcattcccctaagggttcagctccttttgcagcctagccttcctgatctaatttcattttcagaactttacacaaagccccaaataactccccaaatgcactgagcctctgattgtcggaccaaatccacctttccttggcacttcaaaaaaatctgcttttctaaactccagggaatgtggctg

SEQ ID NO: 522263 - DNA, 502 bp, Homo sapiens
tatgaaatcatctaccaatttccttttgtgagctggaagatctaatttgcttagcatagcagatgttctctgcctatctctctctctctccccctgacttgggattggtacccttctttatggtattccctactctttgcagtgtagagaacattctctttacggagacaatggaaaccaaataaaatttgccgagccctgccttttcatcctcttttgttaaatattacatgacttgctctaaatackgatctatccacttctacttctttttccttctatgaacatagcgttactagctccttttattaacttgggcattcccctaagggttcagctccttttgcagcctagccttcctgatctaatttcattttcagaactttacacaaagccccaaataactccccaaatgcactgagcctctgattgtcggaccaaatccacctttccttggcacttcaaaaaaatctgcttttctaaactccagggaatgtggctg

SEQ ID NO: 522264 - DNA, 612 bp, Homo sapiens
agtgaggtccagggagctgcgggatgctgccaggggaggtggtggaggggtgctctaaactaagccctaggggcaccctcaagggagccagagatgagagggacaggtacaaccacaggctcctcagagcagartgaccacttaatttgtttttaaaggaatatttgccctatctcttctctcatgttggccttcgtcaggagtgcctgtttcctgcccatccagccgtctgtgaatgcaacaaacattcacagcacaccaacgacatgccaggcaaaccgcagtagcacctgttcctaaaccacttcgaggattaaataagaaaatgcacaaaaggtgttcagcacggttcctgactcggatagccttcactgagcagatagcattataatgattttgagatatgctaaaatatagagatggtaatttttttaaagataagaatcaataatttacctgccaggcttactatatgcattttgtttttgtttgtttttgtttgagacggagtctcattctgtcgcccaggctggaatgcagtagtgcgatctcaatctcggctcactgcagcctctgccttcccagttcaagcaattcttgtgcctcagccca

SEQ ID NO: 522265 - DNA, 612 bp, Homo sapiens
agtgaggtccagggagctgcgggatgctgccaggggaggtggtggaggggtgctctaaactaagccctaggggcaccctcaagggagccagagatgagagggacaggtacaaccacaggctcctcagagcagagtgaccacttaatttgtttttaaaggaatatttgcccyatctcttctctcatgttggccttcgtcaggagtgcctgtttcctgcccatccagccgtctgtgaatgcaacaaacattcacagcacaccaacgacatgccaggcaaaccgcagtagcacctgttcctaaaccacttcgaggattaaataagaaaatgcacaaaaggtgttcagcacggttcctgactcggatagccttcactgagcagatagcattataatgattttgagatatgctaaaatatagagatggtaatttttttaaagataagaatcaataatttacctgccaggcttactatatgcattttgtttttgtttgtttttgtttgagacggagtctcattctgtcgcccaggctggaatgcagtagtgcgatctcaatctcggctcactgcagcctctgccttcccagttcaagcaattcttgtgcctcagccca

SEQ ID NO: 522266 - DNA, 300 bp, Homo sapiens
cgaatcccgttacttaataaggttatcactctgagcaaaagctgcaaattacacgttctttctctccaggctgaagacaacatccttaacattttacatttataagtaatatctcgttagcagaaacagggtaaacagaagcacatggaatatgtcttttgtgtgtaattcaggatgatatttttattcagaaatttcaaagtcatgtaaacctgcccccctgccaaactcctccrttatttggtgctggtttggactgtgtatcctaaagaggtaggaaaacacaccttttttcatcat

SEQ ID NO: 522267 - DNA, 491 bp, Homo sapiens
gctatgtacaagtatggccatactggcaattaaagtattaaartacttctctatcagttgataaatagttacccgctaagccctctatcaccttggtcaccctggttgcttccccagcagactcctggacctctcccaatccagcaatttaaaaggataactcatggcttggcaaggggctctagttccctgctataatgctgcagccagaggccattcagataggtgggccctactgtgctggttgatacacattttgaatgtccttcctggcattaggttgtaaagacataaggaagatgtgattcctgtttcaaggttcacatgctagtctttctttaaataatgttattgtaccccacgcagcctttgagtggagttgaggtacttagtgcatcagtagaaagaagccctatttaaaggtaaatagttaaagggggatcgaccttcctgaaatatttgtccgggggttgagaatttacatttatacc

SEQ ID NO: 522268 - DNA, 644 bp, Homo sapiens
tatgcttgtaggctttaaaatatatttagtcaatggtgggtagaaattttattttagcttaaaaaattaatcttataaaatgcctgctgacatttcatgtaagaattcttttactcaattcatgtttttctcttcttccctgtggagtatatttattgactgcagatggaagcacattgctaaggaatggaaagctgcaagatagaacatgcccttcacctgcgtggttgcatagaaaccagtcgtttgtccaaatcttaaagaactcaagtggaaagcatacttaaaaatgtaaaggttagaatcacaaactacagtttgaattgaaatgactgaaagattgtttcaagaatataagaattctatctaaaagaagtgaatgaaaggtatattctggtaagtcctttataattaygattttgaacaaactgctttaaattatgctatagcatgaactgagaaggaaaaaagtgaatagaaggatatcaggattgctgaagcacagaacccagaacaacagtccaaaccaatgatggaggtgaaactaagatagcagccacaaccagaagttgattcagaaagaattaattcgggctgggttgtggtcatttatacctgtaatcccagcactttgggaggctaag

SEQ ID NO: 522269 - DNA, 453 bp, Homo sapiens
cttgaactttccagctaccacaattgtaagccaaaggaacctcttttttaaaataaattacccagcctcaggtagtctgttatagcagcactaaatagaygaagacaatgtgctaataagaaatttccaagattttcaagatacctcatgtgaataaatatatcattaagtgaaaacaagacacaaaacaatatgcagagtataatttatttattcacatatccaacaaatacttttgagcatctgctatgtgtcaagcatcacactagacacttgggataaatctataagtaaagtagtcaaaggtctcaaccatagtggagcttacactttgttaagggagatggtcaataaacaacaaacatgcacaatatatagtatattggaaactggtaagttctatgattaaaagaaaaagtagagcaggccatgggagatccaggggctgcctgt

SEQ ID NO: 522270 - DNA, 468 bp, Homo sapiens
caaaggtattcattgaatacctaccacatataagatactgaatttttttttttaatggagtctcgctctatcacccaggctggagtacaaaggcacgatcttggctcactgcaacctcaaccccccgggttcaagcgattctcctgcctcagactcccaagtagctgggattacaggcgcgtgccaccacacccggataatttttgtatttttagtagagacggggtttcaccatgttggccagggtggtctcraactcctgacctcaggtgatctgcccacctcagcctcccaatgtgctggtattacaggcgtgagccactgcacccacctgtactgaaatttttaaaaaacctacacgatgtggtctcttcttcaacatgataatgtgttgaatctgaatgtaaatctaaatcggccttttagaactaattagttgcaaaagttacaccttattaggattagcaa

SEQ ID NO: 522271 - DNA, 667 bp, Homo sapiens
tggccctttatccctccaggtggagtagacagatcactcctagaccacatacccttacggggcaggcacagatcctcgttctcctggtgcccgcccatcacaaaggctagcccactgccacactggaggttggcttcgtaactgtcgatcattaaattaacttactagtttttggttgcatttttacctggttgtggagaactctctactaagaatcttgtcataactggtattagagttccatctttaawcctctggaagacagaataaaaattgggaagtaatctcaagtgaaatacccatccccagtaggctttggcattaggagacggtgaagttttacctttgtaagtaattaaaacaatggtgaagaaaaacttacacaccaccaatacagaatttatcccaaattcccaactttaaaacctttcacctccttgatctgaagtaagaacctatcatgtgggaccttaaaatagatcctgcttattctgaatcatctgaataattttatatggctattaaaatgaaaaaacacaatccagactactaagaatagttttacaacaggtggagttccctctcacttaactgaggaggccctaaaggtacacacagaggaaatgtttacgctgttgccaccagaagcctgaagtgtcatgtctga

SEQ ID NO: 522272 - DNA, 650 bp, Homo sapiens
tgcaaaactggtcatagaacagcagttgcccctaaatgatttgaattctttagtactacagttctaattactcctgaaactagtatggaatttgggagtggtgattttgtcattcttcaaattgcttttcctattctttgatagcatgcagaattgacaacagttttcttctagagaacccaatcttgcaaacattaaataaagacagtaattattctgcattcacaattagtgactttgaggccttagaaagagcacctcatgacaaagatactcggtgaatgtcgtcaactgacttcctgcgtggctgtcggactgattttttcaaattctaagaaagagaatgagagattcagatgattcacctccccaaaagatgtccccagggctttttccacctctccatcttgatttgagatcttcaaaatcacttcascttcagattattatcccatttctctcactggcactagctccaactctctcaggcaagaaagtttgctcatgtgtcatgattatttggttgggtcacttatttagtggccattttccatttacttcaagtatcagaagcaaaaccaagtcacatggctcttcgagggagtacattttgtgtttgttccctctcttaaatccccatttcaccatca

SEQ ID NO: 522273 - DNA, 632 bp, Homo sapiens
gtgtgcctcacttatcttcctctgccacatcagctctggactgttctttaaacatttcaggcatacacctttctccagtcttggctgttctctctgcctggaatgcgtatcttccctcagattacatatcaaagcataaaggacttagcaaaagcagtttttagagaaaaatagccttaaatgtttgtgttaagaaagaatgagtaagttgtgcatgcaacttcaaaagtctgcaaaagggccgggcgcggtggcttacgcctgtaatcccagcactttgggaggctgaggsgggtggaccacaaggtcaggagatcaagaccatcctggctaacacagtgaaaccccatctgtactaaaagtacaaaaaattagccgggcgtggtggtgggtgcctgtagtcccagcgactcaggaggctgaggcaggagaatggtatgaacctgggaggtggagcttgcagtgagccaagatcacaccactgcactccaacctaggcaacagagcgagacttcatctcaaaaaaaaaaaaaaggaacaagacaaaataaattgtaaggaagaatatgataaagttaagagcaaaattcatggtctcaaaaacagaagtacaataaatagaatctataatg

SEQ ID NO: 522274 - DNA, 632 bp, Homo sapiens
gtgtgcctcacttatcttcctctgccacatcagctctggactgttctttaaacatttcaggcatacacctttctccagtcttggctgttctctctgcctggaatgcgtatcttccctcagattacatatcaaagcataaaggacttagcaaaagcagtttttagagaaaaatagccttaaatgtttgtgttaagaaagaatgagtaagttgtgcatgcaacttcaaaagtctgcaaaagggccgggcgcggtggcttacgcctgtaatcccagcactttgggaggctgaggcgggtggaccacaaggtcaggagatcaagaccatcctggctaacacagtgaaaccccatctgtactaaaagtacaaaaaattagccgggcgtsgtggtgggtgcctgtagtcccagcgactcaggaggctgaggcaggagaatggtatgaacctgggaggtggagcttgcagtgagccaagatcacaccactgcactccaacctaggcaacagagcgagacttcatctcaaaaaaaaaaaaaaggaacaagacaaaataaattgtaaggaagaatatgataaagttaagagcaaaattcatggtctcaaaaacagaagtacaataaatagaatctataatg

SEQ ID NO: 522275 - DNA, 643 bp, Homo sapiens
gagatccaggagaggaactgagaccaagtgttcaactaagatcrtgtgccttgtgttggtggtaaagcaatatcagagccccggtatggtaattctcaatctaatgcctgtctatgtgatcaggcttctccccttgttgtcctcccagggccctctgcagaccagctacctccaccagttgctaataagcactcctggccgggtgcagtggctcacgcctgtaatcccagcactttaggaggccgaggcgggcggatcacaaggtcaggagattgagaccatcctggctaacatggtgaaaccctatctctactaaacatacaaaaaattagccaagtgtggtggcagacacctgtagtcccagctactcgcgaggctgaggcaggagaatggcatgaacccgggaggcggagcttgcggtgagccgagatggcgccactgcactccagcctgggcgacagagtgagactccgtctcaaaaaaaaaaaataaaaaaaaataagcactcctgccagggtccaggtgctgttttgacaatcatcagtgtgttctggctagaaacaggctggattgccctaagagattgctctggtggggcaccatacaatgccaaatctagttacaccatttgtttcctaacaca

SEQ ID NO: 522276 - DNA, 643 bp, Homo sapiens
gagatccaggagaggaactgagaccaagtgttcaactaagatcgtgtgccttgtgttggtggtaaagcaatatcagagccccggtatggtaattctcaatctaatgcctgtctatgtgatcaggcttctccccttgttgtcctcccagggccctctgcagaccagctacctccaccagttgctaataagcactcctggccgggtgcagtggctcacgcctgtaatcccagcactttaggaggccgaggcgggcggatcacaaggtcaggagattgagaccatcctggctaacatggtgaaaccctatctctactaaamatacaaaaaattagccaagtgtggtggcagacacctgtagtcccagctactcgcgaggctgaggcaggagaatggcatgaacccgggaggcggagcttgcggtgagccgagatggcgccactgcactccagcctgggcgacagagtgagactccgtctcaaaaaaaaaaaataaaaaaaaataagcactcctgccagggtccaggtgctgttttgacaatcatcagtgtgttctggctagaaacaggctggattgccctaagagattgctctggtggggcaccatacaatgccaaatctagttacaccatttgtttcctaacaca

SEQ ID NO: 522277 - DNA, 643 bp, Homo sapiens
gagatccaggagaggaactgagaccaagtgttcaactaagatcgtgtgccttgtgttggtggtaaagcaatatcagagccccggtatggtaattctcaatctaatgcctgtctatgtgatcaggcttctccccttgttgtcctcccagggccctctgcagaccagctacctccaccagttgctaataagcactcctggccgggtgcagtggctcacgcctgtaatcccagcactttaggaggccgaggcgggcggatcacaaggtcaggagattgagaccatcctggctaacatggtgaaaccctatctctactaaacatacaaaaaattagccaagtgtggtggcagacacctgtagtcccagctactcgcgaggctgaggcaggagaatggcatgaacccgggaggcggagcttgcggtgagccgagatggcgccactgcactccagcctgggcgacagagtgagactccgtctcaaaaawaaaaaataaaaaaaaataagcactcctgccagggtccaggtgctgttttgacaatcatcagtgtgttctggctagaaacaggctggattgccctaagagattgctctggtggggcaccatacaatgccaaatctagttacaccatttgtttcctaacaca

SEQ ID NO: 522278 - DNA, 650 bp, Homo sapiens
ctaaaactaaaaatgagtgtgcgtcccagaacaaagaagaaacatggttacccaaactaggacatgaaacaagtcatcacgggggttgattctgagtcccagagggtcaggktcttcaaatggctaccactcaggccacagtaagatgggtttccttggtggggctgggagtgcagctgtgagggtgcagacgctggtttccttattcacactaagccagcctgacccaggaagtttggacaggccattttcttcccttggccttggtttttccatctgtaaaataaagaggctagatcagttgctcttcagatgcccttctaggtgtgaaaaaccgtagctcctgctccacctggtcccactgtgaagcagtggcacaaaccagaagaggtaacacccaggatggctgtgagagcctcagaaggacagatcctggaacttgaatgaaggttgtttgtgagcagggactcaaaaaaaaaaaccaaaaacgagaatcttccatctttctcaaaaaaaaaaattcatcaacaaaacagctaaaaaaaaaatagaccctgaaacaccaatgacatcttcttgtgtctcttatttctttgaccaagattggccaaaaaatgacatttgttgagtttgagggtggaacatcctgt

SEQ ID NO: 522279 - DNA, 650 bp, Homo sapiens
ctaaaactaaaaatgagtgtgcgtcccagaacaaagaagaaacatggttacccaaactaggacatgaaacaagtcatcacgggggttgattctgagtcccagagggtcaggttcttcaaatggctaccactcaggccacagtaagatgggtttccttggtggggctgggagtgcagctgtgagggtgcagacgctggtttccttattcacactaagccagcctgacccaggaagtttggacaggccattttcttcccttggccttggtttttccatctgtaaaataaagaggctagatcagttgctcttcagatgcccttctaggtgtgaaaaaccgtagctcctgctccacctggtcccactgtgaagcagtggcacaaaccagaagaggtaacacccaggatggctgtgagagcctcagaaggacagatcctggaacttgaatgaaggttgtttgtgagcagggactcaaaaaaaaaaaccaaaaacgagaatcttccatctttctcaaaaaaaaaaattcatcaacaaaacagctaaaaaaaaaatagaccctgaaacaccaatgacrtcttcttgtgtctcttatttctttgaccaagattggccaaaaaatgacatttgttgagtttgagggtggaacatcctgt

SEQ ID NO: 522280 - DNA, 632 bp, Homo sapiens
tcaaaattatttcttaaaaataaaggtgagaatttaccaccaacatacttcaccaaagaaacgtataaatgatgtacataattgagaagggaaaagatgcagcaatgaggtctgagatacaagaaggaaccatgaacaagattggaaaacacaaaaggaaaatctaagcaaacrccaattgagttcaacaataataatgctaatggatatgattaaatataatataaaactacgtttctggaaaacaacagagtagagtggctgcttccatcctaaggatgtcatcttcctgtgtatcctcttggtaggtaaagaccagctagagaggctcaagattttatagggaaaacaacattcagtaggctcagaagtaagacacaaactatgggaaaccttacacatatttgtgtgtttactgaaatagaacgcattttgtagatgaagacatctaaataaagaaaagagcagtgaaagtttgtgttacttgccttagcaataattggtactttactagtcaggtttcacaaaatgaaagccccatgaggacagcagggactgtgtctcgctcccatctacattccagttcccaggcaagaagctggcaaagtcagtgctcaaaaggtgtttctgaa

SEQ ID NO: 522281 - DNA, 615 bp, Homo sapiens
cacttaaacttgtcccaggatttcgagagtcgcagccctgggcctatgagctctgcttgtctctgcagctcacttcctgcttctgtctgccttggtgctcctgcatgtaaatgcaatacctacccctgcctccacccccagccccagtatccagtcatgaagaatacttgctccctatttttaaaataatccacttgtgtcttctatcataggtagaataatgtccctcccaaacatatccatgtcctcatccctagaacctgtgaatgctacttcctatggtagaatgaactatgccgatatgatcaagtcaaggatcttgaggaaaaagatcctgatggtctgggtagacccagcacaatcatgagtgtcgttatataagggatgaaagaagacacaggctcagacagtaggagttgtgacaatggaagtaagcagtggtccgagtgatgcgaggtggggatcttgagccaaggaaggcaggyggcctctagaaactaaaaaaggcagggaaaaggattctcacctgaacctccagaaggacccatccctgctgacaacttgattttagaattctgaccaccagggctgtaagagaataaatttgtgttgttt

SEQ ID NO: 522282 - DNA, 504 bp, Homo sapiens
tcataggatatgtatattaatataaaaatccataattccttggctggaacctttggggcagatggtttcatatttcagaagttttttagattttagaaatgtaatatgatccatgtactggatatgacttaacagccccagcaggatctgaagcagcaacctgtaattaaacacatgaatatttctgctacagaagacatgaatattcacacgaagagggccctgataacgactataaatagcctcacttcagtttaggtcaaggtctgctgccaaacgagtgtgccacaaacttttcttaaaatgtgattttcggaactgttcagattttggtattgctgataagggattgtggatcaacagtagtttgggggaggtttaagatatttaaaawaattataagggatagatagacctcagaattgaactctctttagttacctacacaattggctaaggcataaaaataaacagttaaccatcttccttgttaccctccctaaa

SEQ ID NO: 522283 - DNA, 624 bp, Homo sapiens
ctggagctgcctgcctctctcttagaaaggccatcaggatccccaaagtgaacgttacacatgccacagagctcgagttttctgtccagccaccccaagcgcagtgcgtaggaatctggccatttttgcttgatatggtgacagagaaagaaaatgtgaaatttattatatagttttatttatacctccattatattctacaaaatatcaaaggtggtataagcaagatgtagacctagatggctaatatatcttctttgttccagagggttttatatttcatttattttcaaactgaacatgatcaggtsattatataaataataaagatgtgttgtatcatttatttgaagaataactgatctgtgatcattttggtattgattaaattaatagaataagcacttacgtaccttactacaaacctgtatattaaaaatatgccttaaaatataagccagggtctggaaaaaggtttgatctggagtagtgggagtgagctcatttgacctcagctttgcttcccaaactagaagacactgagaacaggctactggcctcagggtctctgttctttttcaaacagcaagttggcctaccattcttactaaatcattgccattc

SEQ ID NO: 522284 - DNA, 534 bp, Homo sapiens
gaggggctcaccccacctggtgggcattctktaacttgtggcctgctgtgtccagcaggtgctgctattgaacctttgaaattgagaaactgccctttcaattttatttaattaaattccagcagacacacgcagctagtggctaatgtctttgacggccaagctcagactccaggcactgatactcaacgctgatccttcacactcccagaaagctttaattaacacacatgtccacccctctgccccccaccgacccccagcagagaaatcaaagtagtctggggtggagttggtgacctacatggtcaggaggcctctggttgagcctgaaacctccaggtgagcctgatggctgcacatgtgcctagcactctgcgaggttggcaagctcctaagacctgctcacccaccctgctccctctgctgcgtggagctggggagtgttcagtggcccctctcactctgcgtgtggagctggggagtgctcactggcccctctcactctgcatgtggagctggggagtgctcact

SEQ ID NO: 522285 - DNA, 534 bp, Homo sapiens
gaggggctcaccccacctggtgggcattctgtaacttgtggcctgctgtgtccagcaggtgctgctattgaaccyttgaaattgagaaactgccctttcaattttatttaattaaattccagcagacacacgcagctagtggctaatgtctttgacggccaagctcagactccaggcactgatactcaacgctgatccttcacactcccagaaagctttaattaacacacatgtccacccctctgccccccaccgacccccagcagagaaatcaaagtagtctggggtggagttggtgacctacatggtcaggaggcctctggttgagcctgaaacctccaggtgagcctgatggctgcacatgtgcctagcactctgcgaggttggcaagctcctaagacctgctcacccaccctgctccctctgctgcgtggagctggggagtgttcagtggcccctctcactctgcgtgtggagctggggagtgctcactggcccctctcactctgcatgtggagctggggagtgctcact

SEQ ID NO: 522286 - DNA, 534 bp, Homo sapiens
gaggggctcaccccacctggtgggcattctgtaacttgtggcctgctgtgtccagcaggtgctgctattgaacctttgaaattgagaaactgccctttcaattttatttaattaaattccagcagacacacgcagctagtggctaatgtctttgacggccaagctcagactccaggcactgatactcaacgctgatccttcacactcccagaaagctttaattaacacacatgtccacccctctgccccccaccgacccccagcagagaaatcaaagtagtctggggtggagttggtgacctacatggtcaggaggcctctggttgagcctgaaacctccaggtgagcctgatggctgcacatgtgcctagcactctgcgaggttggcaagctcctaagacctgctcacccaccctgctccctctgctgcgtggagctggggagtgttcagtggcccctctcactctgcgtgtggagctggggagtgctcactggcccctctcacyctgcatgtggagctggggagtgctcact

SEQ ID NO: 522287 - DNA, 436 bp, Homo sapiens
actctgcatgtggagctggggagtgctcactggccctgctcactctgcgtgtggagctggagagtgcagtgtccagtttgcctcttgcagcctcttgcttccccttccctctccagagtcctccctgtggtcccagagctccctgatctagcctttcctaaagctgactcaaccacctcctggattcccaggctggaatctggggccagagatggtgcatctcatgttttcaaatgatgcccagaagctcacagatagcagggctgttcggtggatgtctgggctctgcaggattgcgggaacagaggcctgctgctctcatcctcccgccctccccattaatacaggccttctgtccatccctggccctaggtggcctctcagctcaacttcrcaagccacaggggcttgggaagctgcaggaaggagccaggca

SEQ ID NO: 522288 - DNA, 575 bp, Homo sapiens
cagtgtgaggatggaggaggggccacaagccaagggatgcgggcggctccagagggtggggtggcaggaagcaggttctctacgggaggctctggaaggagccagccctgcagacagcaagattttagcccagtgagacccgctctgacctccaggacaggaagacgacacgtcgtactgttttaagggctcattttgtggtttgtggaggcagccactggttctgacaccaatcgaccctgattcctccagtgagtccaagagcacagaacagactcccactctggctgaggacacggtgagggaactgtggtgaccccagttccgttcatgtggctgtcactccaggaggatggctctagagcagggaggggccaaagaaggcgaaagcagacaacgggtagcccatgctgggaggggttgcatgtgtggcagccacctctgagcgggggacacctgagctgggacctgtgcggtcatctgggagctgaggactccaragaccatgtcaggttgaagccatccagcaggagtgacctcagacccagaaggcagcagtgaggctggactgggga

SEQ ID NO: 522289 - DNA, 559 bp, Homo sapiens
tgatccaggagcttttgatgcaaggttcatcttgggatctagacacagacayaggtgggaatggtgggttagggctgtgctgtacctggccactctggaccatgccagggagtgctctcacaggtgccccatggccacctctgttgcccccacagcccaaggaaggactctccctgtgccagctttgaccaacactgccttggctgtgaaccaaactggacagaaacagtgtctttgccacaagttcacgcctggtgagggagagaactgagacacgtggagtccctgatgcaaggatggtgcagggcatggacagcaggaaggtaccttgaagggaaggctgggaggggtggggccacagaaggagaggcccgagaggcatttgtggccaagagtaacaagggccccccacttggactttactcacttctcatgggcactccacggcgggtcctcaggccctggaatgtggcctgctgatccattttccagatggagggactgaggctgagggccaggtggggtgtcggatgcactagaattcagacttcaactcctg

SEQ ID NO: 522290 - DNA, 559 bp, Homo sapiens
tgatccaggagcttttgatgcaaggttcatcttgggatctagacacagacataggtgggaatggtgggttagggctgtgctgtacctggccactctggaccatgccagggagtgctctcacaggtgccccatggccacctctgttgcccccacagcccaaggaaggactctccctgtgccagctttgaccaacactgccttggctgtgaaccaaactggacagaaacagtgtctttgccacaagttcacgcctggtgagggagagaactgagacacgtggagtccctgatgcaaggatggtgcagggcatggacagcaggaaggtaccttgaagggaaggctgggaggggtggggccacagaaggagaggcccgagaggcatttgtggccaagagtaacaagggcyccccacttggactttactcacttctcatgggcactccacggcgggtcctcaggccctggaatgtggcctgctgatccattttccagatggagggactgaggctgagggccaggtggggtgtcggatgcactagaattcagacttcaactcctg

SEQ ID NO: 522291 - DNA, 559 bp, Homo sapiens
tgatccaggagcttttgatgcaaggttcatcttgggatctagacacagacataggtgggaatggtgggttagggctgtgctgtacctggccactctggaccatgccagggagtgctctcacaggtgccccatggccacctctgttgcccccacagcccaaggaaggactctccctgtgccagctttgaccaacactgccttggctgtgaaccaaactggacagaaacagtgtctttgccacaagttcacgcctggtgagggagagaactgagacacgtggagtccctgatgcaaggatggtgcagggcatggacagcaggaaggtaccttgaagggaaggctgggaggggtggggccacagaaggagaggcccgagaggcatttgtggccaagagtaacaagggccccccacttggactttactcacttctcatgggcactccacgrcgggtcctcaggccctggaatgtggcctgctgatccattttccagatggagggactgaggctgagggccaggtggggtgtcggatgcactagaattcagacttcaactcctg

SEQ ID NO: 522292 - DNA, 360 bp, Homo sapiens
atttctcacccaacgaaagcctggccctgccctgaggcccccgtcaaggggcaggggcaggggctgctcccaccctcctgtcaaggcgactccattcctgggccattctccmtcctcctccccaaagtcctcgcctcccgggcccaggctctgccacctgcctggctcagcctccagcccagccccccgccttccatctccccttgcccaccagagggtggggccccagacatgggctcttgtccctctggcctgcctggcccccccacatgcacacagggtgaggcggggcagggaagctgggccttgggtatccagccctggggaagagccaggccagggtgaggctgagggtgctca

SEQ ID NO: 522293 - DNA, 563 bp, Homo sapiens
tgccacccgtttttctaaggagtcctctttttcttgctgattcagagtccttcatattctggttttgagttcctgtgagttttatgaatgaccgcaccttcaccctctcccgtgtcttctgagaaacaaagtcatgtgtgctgatgttacccgcttccgctgcagcaaaggctcttgggggccttgtctgtraggtcatcaggatggggctctgggtcaaaagtgctgccctctgggcatccacctggggggatctgaatgccgtgggagtctactttccttttttcccacgtgggcacctgactttcctggcaccagaacaagagtccaaccttcccccaataacctgcaacgccactcccttcatcacacatccgcgtgcgtgggcacgagcacaggcccccctcggtgcccaggcggtgtcctacctcgtgggtcagcggccaagccccccgccagcagctcctcgtgctctgggcaactgcggccccataacacgtcccacttgccatccgctgttgcaccgtccacctgctcctcaggagggtctgggctgctcccag

SEQ ID NO: 522294 - DNA, 625 bp, Homo sapiens
ttctggccctgccagcagctccttcattccatcatttatcccagtgttttccaagcacccaggatgcaccaggctgggacttgcccccagtcccacaaagctctgcactcctgggttccccagtaccccccaggaagactccatgccacacaggtggcaccaccytgctgggctcacgtggggaaaggatgagagagccgcccacctgggcagacaggtgcctgagccgggtgggaggtgggaacggagcccaggaccacacagggggtgccgaggagcttgcacacccaggaggctccctggaagaggaaggtttcaagcagctgccctcaggcaccccacgcgtgttgacagccaagcgtgacttcttgtcaagggcatcgttaaaggagaacatgaggcctgctcgggggctgagaggagagaggtgccagggcaggcgccccccgcacataccctgccactgccatgggatcccggcactgcagcctcctggtgaggcccatgtccagctggggttgcagagggtgcggtggcttcacaccccggattgaactcaccaccctcctctttccctcaagctttggtggctggagaatgacagtcgatggccagtgcctggttt

SEQ ID NO: 522295 - DNA, 625 bp, Homo sapiens
ttctggccctgccagcagctccttcattccatcatttatcccagtgttttccaagcacccaggatgcaccaggctgggacttgcccccagtcccacaaagctctgcactcctgggttccccagtaccccccaggaagactccatgccacacaggtggcaccaccttgctgggctcacgtggggaaaggatgagagagccgcccacctgggcagacaggtgcctgagccgggtgggaggtgggaacggagcccaggaccacacagggggtgccgaggagcttgcacacccaggaggctccctggaagaggaaggtttcaagcagctgccctcaggcaccccacgcgtgttgacagccaagcgtgacttcttgtcaagggcatcgttaaaggagaacatgaggcctgctcgggggctgagaggagagaggtgccagggcaggcgccccccgcacataccctgccactgccaygggatcccggcactgcagcctcctggtgaggcccatgtccagctggggttgcagagggtgcggtggcttcacaccccggattgaactcaccaccctcctctttccctcaagctttggtggctggagaatgacagtcgatggccagtgcctggttt

SEQ ID NO: 522296 - DNA, 597 bp, Homo sapiens
ccttgccccactgcagcccctggacacagtacagcacagggcggagtgagggctgggagggcctttgtggagtcccactggcttcaggtgaagatagtggccctggctgaccccaagcctgatccccagtgggcctgctcctctcttctcaccccgccacttctctgggccttttccaagccaaactctgctccctcattcaataaaatctctcccgcaagccagcyccctgggcctccacccgcccatggcctccgcagtggccaggagcctgcgggagaaggtggcatctcttcccttccgtaaaatctccccgccctatttacaggagaaacaatgctctgtggctcccagccagccctgtctcccctgaccttgagcacctttgtctaaagggatgccctccttaattctgtgctgagctggattaatttttaaagatgaagctcctggctcgtgtgtgctgctatttgtggtggcgaggtcaggcagagtgccggcccggggagcaggaggtattagcgggcactaattccctggggacagcaggccgggattatcgctgtgtgcccagcccttgccagccctgctggctgc

SEQ ID NO: 522297 - DNA, 601 bp, Homo sapiens
gctggaggggctgcgcgcgtgggtgcaggagggccatgtgaggggctggagtgtgtgggagacaggcgtttccttgggtctccgtgtggccgccgggcgcagggcacggtcgagggcgctcgatggctgmgtccgcgtgagccgaggagcgcgcggggcgggacgcggtgcgaatgcgcgggaggcacgaggcgcgcagtgcgtgtgtgcgcgtgtgcgcggcgcgcgtgccccgcagttctcaaggacacctcggggaggcagcggcggggccggtgtccgggtgacgtcaccgcgcgccccagtgataatcggccggtgccggagcggagcgcggatacgcgcggaggcaacggcgacggcggcggcggcggcgggcgcggggacagttgcatcggggccgggccgggctagcaggagctgggcgcctgcagcgtggaccccgtggacactcggctcgcagccggcctgcggcgctcggggacttgcctggctcccttctcggggttcccgcgcccttctccgcccagggcagcagcgcgcggggcccccgggagccgaagagcaggcgggaactggcggcggcgcgggaggcgcaggg

SEQ ID NO: 522298 - DNA, 600 bp, Homo sapiens
ctggaggggctgcgcgcgtgggtgcaggagggccatgtgaggggctggagtgtgtgggagacaggcgtttccttgggtctccgtgtggccgccgggcgcagggcacggtcgagggcgctcgatggctgagtccgcgtgagccgaggagcgcgcggggcgggacgcggtgcgaatgcgcgggaggcacgaggcgcgcagtgcgtgtgtgcgcgtgtgcgcggcgcgcgtgccccgcagttctcaaggacacctcggggaggcagcggcggggccggtgtccgggtgacgtcaccgcgcgccccagtgataatcggccggtgccggagcggagcgcggatacgcgcggaggcarcggcgacggcggcggcggcggcgggcgcggggacagttgcatcggggccgggccgggctagcaggagctgggcgcctgcagcgtggaccccgtggacactcggctcgcagccggcctgcggcgctcggggacttgcctggctcccttctcggggttcccgcgcccttctccgcccagggcagcagcgcgcggggcccccgggagccgaagagcaggcgggaactggcggcggcgcgggaggcgcaggg

SEQ ID NO: 522299 - DNA, 601 bp, Homo sapiens
gctggaggggctgcgcgcgtgggtgcaggagggccatgtgaggggctggagtgtgtgggagacaggcgtttccttgggtctccgtgtggccgccgggcgcagggcacggtcgagggcgctcgatggctgagtccgcgtgagccgaggagcgcgcggggcgggacgcggtgcgaatgcgcgggaggcacgaggcgcgcagtgcgtgtgtgcgcgtgtgcgcggcgcgcgtgccccgcagttctcaaggacacctcggggaggcagcggcggggccggtgtccgggtgacgtcaccgcgcgccccagtgataatcggccggtgccggagcggagcgcggatacgcgcggaggcaacggcgrcggcggcggcggcggcgggcgcggggacagttgcatcggggccgggccgggctagcaggagctgggcgcctgcagcgtggaccccgtggacactcggctcgcagccggcctgcggcgctcggggacttgcctggctcccttctcggggttcccgcgcccttctccgcccagggcagcagcgcgcggggcccccgggagccgaagagcaggcgggaactggcggcggcgcgggaggcgcaggg

SEQ ID NO: 522300 - DNA, 512 bp, Homo sapiens
taattccagcactttgggaggctgaagcaggtggttcaccagaggtcaggagtgtgagaccagcctggccaacatggtgaaacctcatcgctactaaaaatacaaaaattagctgggtrtggtggcacatgcctataatcccagctactcgggaggctgatgcaggagaatcacttgaatccgggaggcagaggttgtagtgagccaagattgccccactgcactcaagcctgggcgacagagagactcaaactaaaaaagaaaaagaaaataatgactcatgagagccaatccaacatctgaagggaatctctgtcattaagactgaaacacgcatataatttttttaagctaaaggagataatctaagcaattactctgcaaaatcaacagcccacactgatttaaccactatttagcatctaaaagatagttgcacagtctgatataaagaactcagaaggactaattcaaatataacaattattctatctctacagaagagaaaaaga

SEQ ID NO: 522301 - DNA, 512 bp, Homo sapiens
taattccagcactttgggaggctgaagcaggtggttcaccagaggtcaggagtgtgagaccagcctggccaacatggtgaaacctcatcgctactaaaaatacaaaaattagctgggtatggtggcacatgcctataatcccagctactcgggaggctgakgcaggagaatcacttgaatccgggaggcagaggttgtagtgagccaagattgccccactgcactcaagcctgggcgacagagagactcaaactaaaaaagaaaaagaaaataatgactcatgagagccaatccaacatctgaagggaatctctgtcattaagactgaaacacgcatataatttttttaagctaaaggagataatctaagcaattactctgcaaaatcaacagcccacactgatttaaccactatttagcatctaaaagatagttgcacagtctgatataaagaactcagaaggactaattcaaatataacaattattctatctctacagaagagaaaaaga

SEQ ID NO: 522302 - DNA, 164 bp, Homo sapiens
ggcaaactgaggctccagagttcattcacttgcccaagatcatacaacttgtgggccttggaaccaggatttaccccacccacccaggtgtctggttccagagccaggaggcctcatgaccatgggartgaggggtcttgagggggacaggggaggaatggggg

SEQ ID NO: 522303 - DNA, 559 bp, Homo sapiens
agctgggtgggcagggcagggcagggctgggctgggctgtgggtgatgagaggcgtttaccccggggccatttcttgcagaggctgggcgggggctcctaagtgtgcaagctcccccagccacatggcgcacagatggtgcccggctcacacctggctctgcctgtcaggggtcttctctgtatggcaaggagctaggctgcgtccctgtttcagaggccaggggactctgaattaggaagtgagtggtctgcccaggctccccagttggggaggtgttggtgggggtctgccctatgggacaacttctgtctgaagctgagaccgtgggggcaccgtggcccttgttggggcagtgagaacagtggggggctgttggtgggggtctgccctacgggacagcttctgyctgaagctgagaccgtgggggcaccgtggcccttgttggggcagtgagaacagtggggggctgttggtgggggtctgccctacgggacagcttctgcctgaagctgagaccgtgggggcaccgtggcccttgttggggcagtgagaacagt

SEQ ID NO: 522304 - DNA, 501 bp, Homo sapiens
gcataggtgatttccagagaaatgtcacccagtcctgkctggggaagcccaaacagggacagcctgggattgagggggaggagggcaagtcgggtgagatccctacttggagaggtagcaccccgaccctcacccctcccagcatgcagcaggcccgtttctgcctggagcttttccaggggcagcacagggcagcagggatgaggtctgcccatccgagcggcctgcaggaggagcctggagcccgcccgccctccccagccagccccgcactgcatctaagagccacgcgctcctggcttgggtaccacctaacggtgtgatgatttacctgtctgttccctttcacccaggagaacagagcatatttcagggcaggaatcaggaggcagaccaggaggaagggaggaaagattggaaaacttctaataaaattccatttcctgaaatagccgtaactgtgatatcaatatatcaatatttgcagtcttatcggttctg

SEQ ID NO: 522305 - DNA, 501 bp, Homo sapiens
gcataggtgatttccagagaaatgtcacccagtcctgtctggggaagcccaaacagggacagcctgggattgagggggaggagggcaagtcgggtgagatcmctacttggagaggtagcaccccgaccctcacccctcccagcatgcagcaggcccgtttctgcctggagcttttccaggggcagcacagggcagcagggatgaggtctgcccatccgagcggcctgcaggaggagcctggagcccgcccgccctccccagccagccccgcactgcatctaagagccacgcgctcctggcttgggtaccacctaacggtgtgatgatttacctgtctgttccctttcacccaggagaacagagcatatttcagggcaggaatcaggaggcagaccaggaggaagggaggaaagattggaaaacttctaataaaattccatttcctgaaatagccgtaactgtgatatcaatatatcaatatttgcagtcttatcggttctg

SEQ ID NO: 522306 - DNA, 501 bp, Homo sapiens
gcataggtgatttccagagaaatgtcacccagtcctgtctggggaagcccaaacagggacagcctgggattgagggggaggagggcaagtcgggtgagatccctacttggagaggtagcaccccgaccctcacccctcccagcatgcagcaggcccgtttctgcctggagcttttccaggggcagcacagggcagcagggatgaggtctgcccatccgagcggcctgcaggaggagcctggagcccgcccgccctccccagccagccccgcactgcatctaagagccacgcgctcctggcttgggtaccacctaacggtgtgatgatttacctgtctgttccctttcacccaggagaacagagcatatttcagggcaggaatcaggaggcagaccrggaggaagggaggaaagattggaaaacttctaataaaattccatttcctgaaatagccgtaactgtgatatcaatatatcaatatttgcagtcttatcggttctg

SEQ ID NO: 522307 - DNA, 617 bp, Homo sapiens
ataggtgatttccagagaaatgtcacccagtcctgtctggggaagcccaaacagggacagcctgggattgagggggaggagggcaagtcgggtgagatccctacttggagaggtagcaccccgaccctcacccctcccagcatgcagcaggcccgtttctgcctggagcttttccaggggcagcacagggcagcagggatgaggtctgcccatccgagcggcctgcaggaggagcctggagcccgcccgccctccccagccagccccgcactgcatctaagagccacgcgctcctggcttgggtaccacctaacggtgtgatgatttacctgtctgttccctttcacccaggagaacagagcatatttcagggcaggaatcaggaggcagaccaggaggaagggaggaaagattggaaaacttctaataaaattccatttcctgaaatagccgtaactgtgatatcaatatatcaatatttgcagtcttatcggttctgacatgggtattgcgtgttagtgaacgtcttccacgtgagtgcccctcccgccttcygtgccacactcccctgttgatatttatttatctcgcgggcttcgctggaatcttgagggtcc

SEQ ID NO: 522308 - DNA, 601 bp, Homo sapiens
gtgctcatcccaaccaagccatccagagtggtggttccttcagaggcttgtgttctgggagcatgactgttgggatggaacagtgtctggagaggaacctgccatcccagtcagcgagcctgagtttaaaccagacatgaacagacacatttatcagagaatcccctggcctcccagggcctaatgagaccttcagggcacctccagtcctggamacacaagcaaacagtggcccctctctgaaaacagctcccttctgtggctgtccctggtgcctgtccctggagagtctctcaactgtgactcagaaatcagctccctgatgtgtgaccaggcccaggattgcaggcaaagagagaaggtgcatgtttccgagacccaaacaatatctgatgagtggggagtaagcccgggctgtgaaactgcatccttggggtccagatcttgggtcttgtacatagtagctatgtgtctttgaagcaatccctgaacctctccaagtctcagttttctggtttgtaaagggtgtttgtaacactgcttcagggatcagagatgatttctgtaagtgattgagataatttcattatatttaccaagc

SEQ ID NO: 522309 - DNA, 517 bp, Homo sapiens
gtctggagaggaacctgccatcccagtcagcgagcctgagtttaaaccagacatgaacagacacatttatcagagaatcccctggcctcccagggcctaatgagaccttcagggcacctccagtcctggaaacacaagcaaacagtggcccctctctgaaaacagctcccttctgtggctgtccctggtscctgtccctggagagtctctcaactgtgactcagaaatcagctccctgatgtgtgaccaggcccaggattgcaggcaaagagagaaggtgcatgtttccgagacccaaacaatatctgatgagtggggagtaagcccgggctgtgaaactgcatccttggggtccagatcttgggtcttgtacatagtagctatgtgtctttgaagcaatccctgaacctctccaagtctcagttttctggtttgtaaagggtgtttgtaacactgcttcagggatcagagatgatttctgtaagtgattgagataatttcattatatttaccaagc

SEQ ID NO: 522310 - DNA, 601 bp, Homo sapiens
gtgctcatcccaaccaagccatccagagtggtggttccttcagaggcttgtgttctgggagcatgactgttgggatggaacagtgtctggagaggaacctgccatcccagtcagcgagcctgagtttaaaccagacatgaacagacacatttatcagagaatcccctggcctcccagggcctaatgagaccttcagggcacctccagtcctggaaacacaagcaaacagtggcccctctctgaaaacagctcccttctgtggctgtccctggtgcctgtccctggagagtctctcaactgtgactcagaaatcagctccctgatgtgtgaccaggcccaggattgcaggcaaagagagaaggtgcatgtttccgagacccaaacaatayctgatgagtggggagtaagcccgggctgtgaaactgcatccttggggtccagatcttgggtcttgtacatagtagctatgtgtctttgaagcaatccctgaacctctccaagtctcagttttctggtttgtaaagggtgtttgtaacactgcttcagggatcagagatgatttctgtaagtgattgagataatttcattatatttaccaagc

SEQ ID NO: 522311 - DNA, 401 bp, Homo sapiens
ggcacctccagtcctggaaacacaagcaaacagtggcccctctctgaaaacagctcccttctgtggctgtccctggtgcctgtccctggagagtctctcaactgtgactcagaaatcagctccctgatgtgtgaccaggcccaggattgcaggcaaagagagaaggtgcatgtttccgagacccaaacaatatctgatgagtggggagtaagcccgggctgtgaaactgcatccttggggtccagatcttgggtcttgtacatagtagctrtgtgtctttgaagcaatccctgaacctctccaagtctcagttttctggtttgtaaagggtgtttgtaacactgcttcagggatcagagatgatttctgtaagtgattgagataatttcattatatttacc

SEQ ID NO: 522312 - DNA, 528 bp, Homo sapiens
tgaggcagccacactgcaggaggggccatggctctgcttcacagacatgtctctagctccctcgatcattgcttgctgctccacgactggccgatggcagagcgggacttggggagcaagcactaaascaggagaccaggaagctggcaaagcccctgggcccagtgtccctgtgtgagggtccctgggtggagccacgccgggcattgcctgagggcccccccagccagtgccaggacccaggtgccctcagcaacaccctcacgatccatgagagtagcacgctgattgcctctctcttttctcccacagcaagaatcatcaagaccaagcagtggtgtgacatgcttccgtgtctggagggggaaggctgcgacttgttaatcaaccggtcaggctggacgtgcacgcagcccggcgggaggataaagaccaccacggtatgtggccctcggctttctcgtgggtgtgctggggagggggtatgtgtgtgcgggcctccgacgccacccgggctccgcggggaca

SEQ ID NO: 522313 - DNA, 618 bp, Homo sapiens
tgcattcttgcccttgagatcttacctgtatataccattaacatccctcttcctcttaaaattaagctgtttttagtgggatcttgttatacgcaatcaagaatcttaatataaaaatcgcagggtttctttggcagggagcagagactataagtaagaaaaagctaggagataatgagcagaaaatggaaaattatcaatatctagaagagatcagagagtttgcatccaaaaacaggaatacactgagaaaccccatgtagccaaagaagttagggtaaatgctcctctgagctgcctcattctatccaatgttccaattccagttcagaggttttcctaaaattcttgctaatgttttcttttggtaattttagaagagaactgttttaaacaaagcaaagcgattaactgaaaagttttcaattgcagggcaactgaagtggaggaaagcaagcatkcaagtgcagggcaactgaagtggaggaaagcaagcattcaagtgcatagatgcccttcaatttgcctgtgtccatctatcaaattggataaagaaaccacaatagcatgcatgcttgattagcagtctccaagtaaatattatgcttagatatactc

SEQ ID NO: 522314 - DNA, 580 bp, Homo sapiens
cccaacagtgggtactagaaatattgctgcatctcacttttcaatatcattagctgaaacccttcctgtctctcctgtgaaatattcagaacagttagtgataccattatgaagggtataaaattctcctgttgatgagccacattttactcttattttcagggtaaatttcaagrcagtaatgatacagttagctcatttaactccaattctcttgctcctgctctactaccattagcttaattagccagtgttgaattctggttgaatggttgaattctcgtctcccacaaagatgtggtgaagtcctactcttagtacgtggaatgtgaataatttggaaatagtgtctttatagaaataatcaggtttaaatgaagccagtagggtggaccctagtccaatatgactagtgtccttataaaaaggggaaatttgtaaacagatacatgtaaacacacagagctggcagaggatgtgaagagacacagggagaaaatggccatgtgactggagtcatggattcacaagccaaggattgttagcaaacatcagaagatagaagaggtaagaaatgatg

SEQ ID NO: 522315 - DNA, 580 bp, Homo sapiens
cccaacagtgggtactagaaatattgctgcatctcacttttcaatatcattagctgaaacccttcctgtctctcctgtgaaatattcagaacagttagtgataccattatgaagggtataaaattctcctgttgatgagccacattttactcttattttcagggtaaatttcaagacagtaatgatacagttagctcatttaactcyaattctcttgctcctgctctactaccattagcttaattagccagtgttgaattctggttgaatggttgaattctcgtctcccacaaagatgtggtgaagtcctactcttagtacgtggaatgtgaataatttggaaatagtgtctttatagaaataatcaggtttaaatgaagccagtagggtggaccctagtccaatatgactagtgtccttataaaaaggggaaatttgtaaacagatacatgtaaacacacagagctggcagaggatgtgaagagacacagggagaaaatggccatgtgactggagtcatggattcacaagccaaggattgttagcaaacatcagaagatagaagaggtaagaaatgatg

SEQ ID NO: 522316 - DNA, 503 bp, Homo sapiens
aataattattgagaaaagcagcataaacagtctaggttcacgaatgtgccaggagcttttctccctgtggccagagttagactcattgtgggtcctcaagctgagtcttcttagtagattattgactgcgtctgtggagtcctcctgccccggcaagcagcctayaccctccgcaccctccctttctactattctgtggctgatctcgcatttataaaaaaagaagtcaggctgtagacatgttaactatgtaaatgattaattatccataattgcatttaaagacctgtggcataaacttcagctttcacagagacttgaaaattaagaggcacaaccttaatccctaaagtgtaagtgaagcctgtgcaggagccattcatttagtgtttggcgtggggaatgtggcttaattcaatggttttattgtttttttatttttctaaattaatgtattaacattattaccatttgtttattcctttttagaagaatattctata

SEQ ID NO: 522317 - DNA, 503 bp, Homo sapiens
aataattattgagaaaagcagcataaacagtctaggttcacgaatgtgccaggagcttttctccctgtggccagagttagactcattgtgggtcctcaagctgagtcttcttagtagattattgactgcgtctgtggagtcctcctgccccggcaagcagcctacaccctccgcaccctccctttctactattctgtggctgatctcgcatttataaaaaaagaagtcaggctgtagacatgttaactatgtaaatgattaattatccataattgcatttaaagacctgtggcataaacttcagctttcacagagacttgaaaattaagaggcacaaccttaatccctaaagtgtaagtgaagcctgtgcaggagccattcatttagtgtttggcstggggaatgtggcttaattcaatggttttattgtttttttatttttctaaattaatgtattaacattattaccatttgtttattcctttttagaagaatattctata

SEQ ID NO: 522318 - DNA, 592 bp, Homo sapiens
tggtaggtctgtgttcaccaccagatgtcaaattcctatttctggaagtaattagtttgagatacctgtgaaacgttcaagttgagtgttcccagtggacttggaccatagatttagtcttagaaataccagtgacaatctcgaaagatatttagagccaagggaacagtggagatcatatggggagaggatatatatagcagaaagccctaggacaaagctttggggagactccagcatttagaggttgagtagagaattaggccaagtggtatgagcaaaactaggagagtttggcatcatggagcaagagktcagctctgttaggagagttcaaaatggaccttctggctttcaacagtccatttccactgtgaccaccctagcccaggccctcagcatctcatggttggtttcacttgtccgggtgcggtgactcacacctgtaatctcaacactttgggaggtcaaagcgggaggattgcttgaggccaggagtttgagaccagcctgggcaatatagtgagacctcatcgttaataaataaataatttttaaaggagacaaaaaatgtggtgagcatcaactgcct

SEQ ID NO: 522319 - DNA, 658 bp, Homo sapiens
cacttcctctaagacatcagcaagcagagtaagttgcttcctcttcctagctycacccaccaccctttgttcctctgctgcttttcttgcaggccctaggactggtttgtttacctgtctgccttcctgggcagactgcagctccttgagggcagggccatctttccgtgccgtctctcccggtgatatgctgtgtgcacacagcgtaggatgcctgttgatcatataaacgatacttttgtcaagtaacaaaggtcactcctcacactagaggagagcttgctgctttcttgtgccttgagagattttcccttcgaactgtatgaattatattgaaaattgacaatgatgagtcatatctcagcaagggtgaaattcaaaaacgcaaagcctccactactggagtaggaggttgcagactggtcttaaaaggctaagtctggcccttcactgaatccgcctggcgggtctcaaacacagggagtgggagggaccctctgcccggtgggcaggtgatttattggctgggaagcttccgcggtgatttagttgtgaagcggcggccggggaagtgcaggctaatgcctgggccgccagggagaggccgcccacaatcgcgggccggaagggaccgcggggggcgtcggggccagccccc

SEQ ID NO: 522320 - DNA, 597 bp, Homo sapiens
tcctctgctgcttttcttgcaggccctaggactggtttgtttacctgtctgccttcctgggcagactgcagctccttgagggcagggccatctttccgtgccgtctctcccggtgatatgctgtgtgcacacagcgtaggatgcctgttgatcatataaacgatacttttgtcaagtaacaaaggtcactcctcacactagaggagagcttgctgctttcttgtgccttgagagattttcccttcgaactgtatgaattatattgaaaattgacaatgatgagtcatatctcagcaagggtgaaattcaaaaacgcaaagcctccactactggagtaggaggttgcagactggtcttaaaaggctaagtctggcccttcactgaatccgcctggcgggtctcaaacacagggagtgggagggaccctctgcccggtgggcaggtgatttattggctgggaagcttccgcggtgatttagttgtgaagcggcggccggggaagtgcaggctaatgcctgggccgccagggagaggccgcccacaatcgcgggccggaagggaccgcggggggcgtcggrgccagccccccgtttcgca

SEQ ID NO: 522321 - DNA, 567 bp, Homo sapiens
tttatagctctttcgcccttgccattaagaacattttatagacatcagctcagcagtcatccccataagtctacgggggctgccagtatcattccacatgcacaggtggagaaactgaggcacggtgatactaaaaatggcaccctcacaggtcttgtccaggtcatggggtggggatgagccaagaactagggccttgagaggtaggcttcccccacagagcttctgttgcaagtgcttgcatctgggacaagatttgctttttatagaaaaaaaaagtggrattttattatcttagacattctttgttcacagtaggattccttggccaccttataaagtataaatgtatgtgcttcctttgtatcctagagctgttgagatgcgaactgtctcataaggtagcagaaagcactgtgatggaagcttctgtttcatcggtgtcctggaatctgctccatccccttctctaggcagcaatatggtcctgcttccttctgggtttaggtcctgggagcctgtcacaattctgtcacacaaaaagagaattccgtaatgaccagcaca

SEQ ID NO: 522322 - DNA, 567 bp, Homo sapiens
tttatagctctttcgcccttgccattaagaacattttatagacatcagctcagcagtcatccccataagtctacgggggctgccagtatcattccacatgcacaggtggagaaactgaggcacggtgatactaaaaatggcaccctcacaggtcttgtccaggtcatggggtggggatgagccaagaactagggccttgagaggtaggcttcccccacagagcttctgttgcaagtgcttgcatctgggacaagatttgctttttatagaaaaaaaaagtggaattttattatcttagamattctttgttcacagtaggattccttggccaccttataaagtataaatgtatgtgcttcctttgtatcctagagctgttgagatgcgaactgtctcataaggtagcagaaagcactgtgatggaagcttctgtttcatcggtgtcctggaatctgctccatccccttctctaggcagcaatatggtcctgcttccttctgggtttaggtcctgggagcctgtcacaattctgtcacacaaaaagagaattccgtaatgaccagcaca

SEQ ID NO: 522323 - DNA, 659 bp, Homo sapiens
catttcaaggttctatgctaaaaatgtgcagatcaccaaatagttggccactgagagagcctgtaccacagagggtttcctaatgcgaatgcctgccccaaacactgcagacagcactttctggacttcatcctccatgttcattaactttccactgatttaacagttctaaccagagttattcttgatctttgatgaagtagatttttgaacctcgggtgtcgggtgttttgttgtggagatgatgcgggctctgtagcacatttgtggcagggttcttttcaccctccacaaagttgtatgagctctgactcttgcctgggctgaaaatgcggtctaaaattatatatgtacgtagtacttcttaggttttttaagatcctcactggactaaatggaagagaattctaaattctcaacgtgttctaattattctgaactattctccctctcccaaaaacacatacagatacacacaaatttattttgtgtgtaacycttgactttcagaaagtttgggttattctatgcataattttttaaaaaaccatttggtttaaaataatttcaaacttaaagaatttgcaagaagagtataaagcattcccatatattctttacccagattctccaaatattaacatcttatcacattattt

SEQ ID NO: 522324 - DNA, 562 bp, Homo sapiens
cattaggaaaagagggatttcttagtaacattgggygtattcctttttgtatgtagcaatgatatgttttattttaatatttcaaatgtgaacacctataaatgtaaaattgttttatttggctgggcacagtggctcacacctgtaatcccagcacattgggaggccaaggtgggtggatcacctgaggctgggagttccataccagcctggctaacatagtgaaacctcatctctactaaaattacaaaaattagctggacgtgatggtggcgcctgtaatcccagctacttgggaggctgaggcaggagaatggtgtggcctggaggcagagcttgcagtgagccgagatggcgctactgcactccagcctgggcgacagagcgagactccatctcaaaaaaaaaaaaaaagttttatttgtatttttatatattaaatataagcttatgttaaatatgaagaagtaatggtgtttccccagaaagatcttgtgtggaaatatttctgtgtgtgtttcctcatacagtgtttgcattaggctcatctgaacacttgcag

SEQ ID NO: 522325 - DNA, 581 bp, Homo sapiens
agtagtattactagtaatagtagcagcaactaccatttgatagatcaagcatggaactaggtgtttatagcatattttatgtatcttctcagtatcctacaagtaggcattggtagtttcattttattgacaaggtttacaaggaggctggaactctgagagatgaaatcatttgttaagcctggatttgaatccatgtctgtctcaattgtaaaactcttgtgtttttatattttttatatttttttatgcagaggactcctgaacacagatacccatggaaaaacattattcccttaagagagaraggacagattttccaaggattttctccttccacctgaattcatctagttcttattgcaaagggaaccctccccactccaaccaggaatctagatccattgactttgcaaaaccaaagttttttctcagcttagctgacaccaagatccagtgttcatggggatgtaacagcctcagtatgaaattctgtcaccttggctcactttcctacttccagtttggctcaaataagctgcttttggtatttaaaaacccctgtaagcaggcttgcatcc

SEQ ID NO: 522326 - DNA, 606 bp, Homo sapiens
atgaacaaatccatagcattgtgtaacttcagatgatctaagagtggggcttctaaccaactcaagatactgtttcctggactaggctggtgggaaggagggtagaaggggaaactcagaaaaaaaaagatattgcaagttccttgcgagtttctgtaatatggttaatgggagttaaaaactgatagaggatgtgtacgtaatttctaaattagaacttacagaagatgcaaaaaagtagaatagaagaaactatgaggtatgtttataacaagttaaaaacttaaattcctacaggtagcaggctaggaatgtaaatgaatgcaatgggcctttgatagaaaatccaactggaaaattcatgctgtgattacctacatcagccaatttttgccaagtgagaacatagacccagtgttgccagatctttggattttgtaagagaagctagaaatctacacttcatgtgaaacttcmtgatgttcacatgttgccaactagtttacatttaaagtaaacaagcaacagacaaacaagaacattttatatagccacatgaaatacacttgcaggtcacctctttataattctggcataggctgttgg

SEQ ID NO: 522327 - DNA, 634 bp, Homo sapiens
ctgttctaataattctagatgaggcatctgtcatgagttagaaagccatgtatcttaatcgattagtgctgctataacaaaatacctgggacttggtaacttataaaaattagacatttatttctagtagttctgaaggctgagaagtccaagatcaaggcagkggcaggactgatatctggtgagggctgttctctgtttccaagatggtgctttgttgctgcatcctctagaggagagaaatgctgtgttctcacatggcagaaactgaaagggcaaaaggaccaaacactgcattgaagcatcttctaaaagagccttaatcccatgagagagatggaccttatggtctaatcaccttttaaagctcacacctctcaatactgttgccttggggattaagttccaacattaagtttggagggaacaccgtcatttcaaccgtagcaccatctttgacattccagacctaggagacaacattgaagcgaaagaattgtccagctaattctgcccagattgaagaattcttataaataataaattgtgactagccagaaggtttggagtgatttgttaatcagaaattgataaccgaaaccatgtgtaaatttcaactgtcaaacatgcgaaa

SEQ ID NO: 522328 - DNA, 683 bp, Homo sapiens
ttgaacatggactcgaaacatactgccatcatttgtgatacataagtatgggttaggattttctacttttgtttaaagtacgtatagtagtgaaaaagagaacraagttgacaaatgagtacctatttctcaggttttctattatcaatataagtgcaaaaatgttggtaaaagtttacaagaatttttttactctcaatatgaaaccattataattgaacttgaaattatttatgttaagtggcttttttatatttagaagtataaagctttttaaatatgaaaattttgggtccatatacattctgaataatcattaaatgctctattaatgtaaaaaattgacaatattattcttacaaatattcaatcacttaagcacaataaaaataataatcatcatactaattatactaattgtcactatttaaatatggaaagtcaagtagttttattttagttatctaaatttattaatcaaagtaatgtactctttatgaattaagacaaaaatcagagaattaggactgtagactcaggtgccagtaaatttttagaaaatgaaatattgtgtttaaaatgaatactgacccttattgagatatgttagtgtaatgaacacttgactcccactttttgtattccagctactgcccaaataacccattcttgacattcaccca

SEQ ID NO: 522329 - DNA, 707 bp, Homo sapiens
actaaaaccacaatttttaaatggctccaccaaaattgccaagtcaaatgccttgtaaatctaactccttcatgtccttttctcctttccaaatacttacaytctcataggaatgtattccttttaaactgccatctttccttgaactttttgtattttaaatcttaaatataaatttaggaaaaaaagctttgtttctctttaaggtgatttctgctactaataagccatagtatggaaatatcttggaagtcaagaggctcctttgtatgatcttggccctgaaatcagcccaggacctgagctgactttgagaatcatagtccggttatgttagggtattacataagactggatcagggaatgagggaagcagaataggacagagaagaagccaggcacagatgtgggcttaactagtgactaacttcagcctgatcccatgggcagccctgaggcatgaatttcaccgtggagttgtttctttctgagataagggtgctgggctcttgtgccaccatgtttgtcagtcatcgtctataggctgctctcagtgcaaaagttggtgataaagagcagtcacttcccagataaggcagcttttgtgcttcccaggttaattttcaggagaaaaggagctcttagcagctagacatggatgtaccgccccaggaaagggatccggatggagcggcaacagtgtccac

SEQ ID NO: 522330 - DNA, 707 bp, Homo sapiens
actaaaaccacaatttttaaatggctccaccaaaattgccaagtcaaatgccttgtaaatctaactccttcatgtccttttctcctttccaaatacttacackctcataggaatgtattccttttaaactgccatctttccttgaactttttgtattttaaatcttaaatataaatttaggaaaaaaagctttgtttctctttaaggtgatttctgctactaataagccatagtatggaaatatcttggaagtcaagaggctcctttgtatgatcttggccctgaaatcagcccaggacctgagctgactttgagaatcatagtccggttatgttagggtattacataagactggatcagggaatgagggaagcagaataggacagagaagaagccaggcacagatgtgggcttaactagtgactaacttcagcctgatcccatgggcagccctgaggcatgaatttcaccgtggagttgtttctttctgagataagggtgctgggctcttgtgccaccatgtttgtcagtcatcgtctataggctgctctcagtgcaaaagttggtgataaagagcagtcacttcccagataaggcagcttttgtgcttcccaggttaattttcaggagaaaaggagctcttagcagctagacatggatgtaccgccccaggaaagggatccggatggagcggcaacagtgtccac

SEQ ID NO: 522331 - DNA, 707 bp, Homo sapiens
actaaaaccacaatttttaaatggctccaccaaaattgccaagtcaaatgccttgtaaatctaactccttcatgtccttttctcctttccaaatacttacactctcatrggaatgtattccttttaaactgccatctttccttgaactttttgtattttaaatcttaaatataaatttaggaaaaaaagctttgtttctctttaaggtgatttctgctactaataagccatagtatggaaatatcttggaagtcaagaggctcctttgtatgatcttggccctgaaatcagcccaggacctgagctgactttgagaatcatagtccggttatgttagggtattacataagactggatcagggaatgagggaagcagaataggacagagaagaagccaggcacagatgtgggcttaactagtgactaacttcagcctgatcccatgggcagccctgaggcatgaatttcaccgtggagttgtttctttctgagataagggtgctgggctcttgtgccaccatgtttgtcagtcatcgtctataggctgctctcagtgcaaaagttggtgataaagagcagtcacttcccagataaggcagcttttgtgcttcccaggttaattttcaggagaaaaggagctcttagcagctagacatggatgtaccgccccaggaaagggatccggatggagcggcaacagtgtccac

SEQ ID NO: 522332 - DNA, 707 bp, Homo sapiens
actaaaaccacaatttttaaatggctccaccaaaattgccaagtcaaatgccttgtaaatctaactccttcatgtccttttctcctttccaaatacttacactctcataggaatgtattccttttaaactgccatctttccttgaactttttgtattttaaatcttaaatataaatttaggaaaaaaagctttgtttctctttaaggtgatttctgctactaataagccatagtatggaaatatcttggaagtcaagaggctcctttgtatgatcttggcyctgaaatcagcccaggacctgagctgactttgagaatcatagtccggttatgttagggtattacataagactggatcagggaatgagggaagcagaataggacagagaagaagccaggcacagatgtgggcttaactagtgactaacttcagcctgatcccatgggcagccctgaggcatgaatttcaccgtggagttgtttctttctgagataagggtgctgggctcttgtgccaccatgtttgtcagtcatcgtctataggctgctctcagtgcaaaagttggtgataaagagcagtcacttcccagataaggcagcttttgtgcttcccaggttaattttcaggagaaaaggagctcttagcagctagacatggatgtaccgccccaggaaagggatccggatggagcggcaacagtgtccac

SEQ ID NO: 522333 - DNA, 558 bp, Homo sapiens
ttcccgtcaggaggaaaacaagagaaactactaatatacgttcatcctctgatcacctgtcagcctcacaggaacacgcatctcacaatttgtccctgcccaggcacttcatcttcaaacagaaactgcatcttaattataggctttaatgggctgtttcactccaggatcaatatgtctgacaaaaaccaggcttcgctaaaagctcattaattcacatccgactaattcaggatttgtgatgattttggcagggaccacgctgaagttttgcctcttatactgctgcttacaaaggcttagcttggccaattaattagggagaacagaattgccagggaagtatttacagaacaccagtttgcacagagatacagcctgtttgtagcttccagactgttcagctcttaccaggcaacctgatttaacaattattttttattagcactctggacatagaarctgaaaagtgtactgtctcaaaaagtgtctgcagatgcaccatgttggctccctgtggcccatgccttcggtaccttatatccattacttgtttta

SEQ ID NO: 522334 - DNA, 517 bp, Homo sapiens
attaagctttcagcactgtttatgcaacagaaaaggaaatgttgactsaagatttcatacacttactattcacacaaagaagaaaccatgaacagtataatctgcaattatagtacctgccgaaactggatcactgtcattgaacctggttattagttgttgtaagcactgtcagaggcaagataacttctgaattggggatctgtctggtatgatcattggagatacggacttgaaagctcatgaaataaattatataaaattaaactggtttaaacaatatccaaatggttttcaatatctatgacctcatggtagaagaaatcattcctttaatttcacaaattagaggcttctaaaaagtcaaatttttctgtcactacttttaaccatcttcaccatgccattattgtagaataacataattcagtgtttattaaatagaaaaaacaatgagtgtaattcatatatgccaacatcatttgtagcagaaatacaggctactctataaaaaata

SEQ ID NO: 522335 - DNA, 631 bp, Homo sapiens
acctttacacacattcccccacaaaaatgttcatgctataggtcattgataatggattcctcactctcagaactccagaaaaacaaaacaaaacaaaaataatattgcagtgacgattacttggagagtttagctgacagtgaggaccagatcccagaacactcaaagcatcctaattcatagagacagaaagtagaatacaggttaccaaggctggggatgttggggagggaaggaagaaagaagagggacttattgtttaatggatagagattttgttgatgatgaaaaagttttgggtatagatagtggtgatgtttgcacagtattgtgaatgtatctaatgcctctcrtgaatggttaaaccatacttttgaatggttaaatgataaatgttatatatattttaccacattttttttaaaggttaaaacaaaaaaaagaaaaagaaaactgtggctaagcaaaaatcagaaattggtcttcctcatgcactgtattaaatatggtagcttcctttgaaacttagttactcacttagctcagagcaaaacatttggcaagagatgggacagggatcaccaggctgtaggagcatgtggcaagagggaaaaagagaagtgaggaccag

SEQ ID NO: 522336 - DNA, 639 bp, Homo sapiens
cactccagcctgggtgagagagcaagaccctgtctcaaaaagaaaataaaacaaaaaacaactcacatctcagctactttaaactaagctgtgtgctcatggtcaactaatatcctctctctaggctttagtttcaacaactgtaaaatgagaacagtagactatatctttcctatgttcttttattataatgctaaacacattgaaggatggctcgttttaaactttctattgttaaatgcacagaactgaaaaattaagcagatgaaatctgatgggtgatatcaatcattcttagtctaggttacctcttctaaatgaagagataacttcttatcrttcaaatagtaacatgacatttcccaaactattccaatataactaggttctcagactagaaatatctattctaaaacacatgataaagtaatttagggaagtatagattaatcacaggtttcattactgcaagtctcacaaagactttaatatatgaatggaatcctgaccctgtaagatggctacactattgaccatagatctcttttattctttgggcatcttgcaggacttgtatctgctggcactcaataggagttgctatcatacagagaatgtctatattggatcacagtgcag

SEQ ID NO: 522337 - DNA, 584 bp, Homo sapiens
atgcaaagtttaatgcagtcttttcaaagcttaatatggaacaggttatatacaaggcttaatggagaacaggtctttggctgtcaagtctagtgaatgggttttcttttcaacctagaccatgtaagttcctaaaatctgtttaagacgcacatcatttgttactgagtataaatagttttaagtctccttggctatacttttctatagccaaggggaaaaaaacaggaaagaaaagacaggaatggggtgggtgcagtttgaatagggaaaggtgaataacaattagaaacrtattaagtgccacttcatacacattatctcaattaatcctccccgcttagatctctcacccccattgcacaaataaggaggctgaagcctcaagagacttagtaatttacccaagttcatacaactaataaatgaaaaaatgaagatctgaacctcatttttcagaccctaaaattaatgctcttttttttttaaatattctgtcacttggccacttccttaagtggcttgatcacttgccatttaaaaaaattaataagtaatttatttctagatgcgtcccaatcagc

SEQ ID NO: 522338 - DNA, 397 bp, Homo sapiens
ttgtgcaattttttaaagttaattttttttaagtrctaaattcatttcactggtattcaaagtaagattctattgaggttaagttatacaatgtattattttcatctcacaaaattcagtgttttcagctgttaaaatgaattcaatactcattcaacaaacatgcctatgtccatgaactgcatgcccactctgtgccaggccttataactttgacttctgtactattcagcgatgctactgcagcattaagcatgcttcttatgtaacactgcttcatcacatcaaccaagaatcccctgggcccaacacttacacagacttgacaaacggcaacaggataaacaggaaaatatctggaatccttgcctgtctctataaatcatctgctgacttg

SEQ ID NO: 522339 - DNA, 508 bp, Homo sapiens
cttatctggccctggaaagcctatttaacatgcaataaaactaaatgtaatgctaaccccagcactttgggggkccaaggcgggcggatcacttgaggccaggaatttgagaccaacctggccaacatggcaaaaccccatctctaccaaaaaatacaaaaattagccaggcgtgcctgtagtcccagctacttgggaggctgaggcacaagaatcgcttgaacctgggaggcagaggttgcagtgagccaagattgtaccattgcaccccagcctgggtgacagagtgagagactcttccaaaaacaactataaaaagaatattaaatataatgctaagagtcttattcttccattgattctacaaaaaatgggcccaacctttacctgagaagtcaggataccagaacacaccacttactactttagttccagcctccccatgataatttctactgtagtcgtccagacagagggattcctatgctatggttaagttcccttatca

SEQ ID NO: 522340 - DNA, 508 bp, Homo sapiens
cttatctggccctggaaagcctatttaacatgcaataaaactaaatgtaatgctaaccccagcactttggggggccaaggcgggcggatcacttgaggccaggaatttgagaccaacctggccaacatggcaaaaccccatctctaccaaaaaatacaaaaattagccaggcgtgcctgtagtcccagctacttgggaggctgaggcacaagaatcgcttgaacctgggaggcagaggttgcagtgagccaagattgtaccattgcaccccagcctgggtgacagagygagagactcttccaaaaacaactataaaaagaatattaaatataatgctaagagtcttattcttccattgattctacaaaaaatgggcccaacctttacctgagaagtcaggataccagaacacaccacttactactttagttccagcctccccatgataatttctactgtagtcgtccagacagagggattcctatgctatggttaagttcccttatca

SEQ ID NO: 522341 - DNA, 467 bp, Homo sapiens
cctgatgagattgagggcatgtaaaagcagccagggtattttaccctctccttccacttcagtagaatctgtgggagtggctatttcatttctagtcttctggagtcagcccctcccatctcccagctttctctaagtattccttactgtggctttagccccctctgggcattctctacaaggctacagtaacrctctttcctttgtcctttgaggtctaaaaggagaagtggcttctgttagtctggatttcttcagcagtccatgtttggctttcaactcttaggatatttttatagctcatttcccatattaaattctttccattgagctatttagcttgtgctctggttctcttagtggacctggactgttatacttgatttctttcaggagtaagccattaaatttctctctcttttggctggcatgggttaatgcttagggcatgaagtatttagaagcat

SEQ ID NO: 522342 - DNA, 433 bp, Homo sapiens
gctgcctctgagctctgcagtataccatagtaatctaatcatttattgttcattgttctcttccatcatctacaatgagcccatctgacttttgcaggggctgtacaggwaaactgaacagggatattattgattgggaccactacttctgcatcctttgagactattaaggaacattcatctctaccacccaacccagttgtgatattaattctgagttactatcttggccctagagcagttttatagtctttgcaaccattacaacccttagtcttcagaaaaggaaacaaattgagggctttactaagtaggtccattcatttcaggcattcagagaccagtgaagtgttcagagtagacccagagactcactggactaagactaacttgggtgaggactttattcttactaaagtgtatgggtcaatta

SEQ ID NO: 522343 - DNA, 520 bp, Homo sapiens
gtttgctcagggagaggcctggtatgggtggagagaaagggagaggccagggtattctttctcttaccactttgctcaggcagttctctctgggactcaggccaccttgcaaacccaaccctgtgttttctaaggctgcctctcttccaagcccaggggcagtagtgggtcccctgcagctattaatttatcagtttccttaccrtatctatactctgtcatcaccaccatcatcctcaggataacgtagattttgaatacctgaagtgctttgttttcccagtttagactcagactgataagaggatacactgcataaagaaaatgcctaaacaaaaaggtgacctattttatgaaactagcataattttgataccatagaacaaaagcaatctatatattaaccgagcagtctgagctatggcgtataggtaaaacttcaggcccagagaatcatgagtatgggacttcagtcatactcccctacccccaatacctgggggcaattgtgtaaatgcat

SEQ ID NO: 522344 - DNA, 535 bp, Homo sapiens
ggtttgctcagggagaggcctggtatgggtggagagaaagggagaggccagggtattctttctcttaccactttgctcaggcagttctctctgggactcaggccaccttgcaaacccaaccctgtgttttctaaggctgcctctcttccaagcccaggggcagtagtgggtcccctgcagctattaatttatcagtttccttaccgtatctatactctgtcatcaccaccatcatcctcaggataacgtagattttgaatacctgaagtgctttgttttcccagtttagactcagactgataagaggatacactgcataaagaaaatgcctaaacraaaaggtgacctattttatgaaactagcataattttgataccatagaacaaaagcaatctatatattaaccgagcagtctgagctatggcgtataggtaaaacttcaggcccagagaatcatgagtatgggacttcagtcatactcccctacccccaatacctgggggcaattgtgtaaatgcatcttgttcccgaata

SEQ ID NO: 522345 - DNA, 580 bp, Homo sapiens
ctgggtttgctcagggagaggcctggtatgggtggagagaaagggagaggccagggtattctttctcttaccactttgctcaggcagttctctctgggactcaggccaccttgcaaacccaaccctgtgttttctaaggctgcctctcttccaagcccaggggcagtagtgggtcccctgcagctattaatttatcagtttccttaccgtatctatactctgtcatcaccaccatcatcctcaggataacgtagattttgaatacctgaagtgctttgttttcccagtttagactcagactgataagaggatacactgcataaagaaaatgcctaaacaaaaaggtgacctattttatgaaactagcataattttgataccatagaacaaaagcaatctatatattaaccgagcagtctgagctatggcgtataggtaaaacttcaggcccagagaatcatgagtatgggacttcagtcatactcccctacccccaatacctgggggcaaytgtgtaaatgcatcttgttcccgaatagctgcctcactcattatcttcatgttcctggaatttatggta

SEQ ID NO: 522346 - DNA, 416 bp, Homo sapiens
tactgaaaacaaggagattaaatgaatgctcaaatactaatgattacatccacttctctgccctcttcccctattcatcttastgagaattagcaactacattaataccttctgtgaaggcagttagaagatgcttctctggataatctgatgggtccaaaggaaagataaactatacttatactgagggtccttaagggaaaagccaagccaaagtaccctgcagtaagtatcacagatgaatgtcaaatgatcattgaagtgtctgatcagctttttagtggacgagaccactacaacagagtgaagaaagcttgttgatcatggatttataatctaaaatgtgttttagaagagtttgagaggatcagggtggaatttgagccagtgtagctcatattcatagctctcagaag

SEQ ID NO: 522347 - DNA, 488 bp, Homo sapiens
tccaggggcatgacctgtttygggcaggcggtggctgtggggagaagagtggggaggtccctttcttttttcttcctgaataaaaaaatgcatgatgctacatgtgccttgggatttttcaacacaattatctaaaaatagtgtgggccaccacagcctgattcctttttaggaaggattttgggagcccagcctgtcctggcggccagctcaggaagtggaggcttgtctgggtggggccggggctgcagcgacccttccctagctccggccaagcccaccccatctcccacttcgctgagagccgggctgccaggagtgcatggtggggcggccagtggcttcctggcggggcccacagccccagtgaatttcagccctgctgctagggcactgcatgacttctctgtgcctcagtttccccaacggggaagtggaagtcattgatcacagtcaacaaggcccagcagagacaggaaagacactac

SEQ ID NO: 522348 - DNA, 418 bp, Homo sapiens
cctgtagtcccagctacttgggaggctgaggtgggaggatcacttgagcccaggaggtcgtgaccacagtgagccgtgattgggycgctgcactccagtctgggcaacagagctagaccctgtctcaaaacaaaagctaaaacattggcccagcaccaattgtgtcaaataggaaggcaatggagttaaacagaggctgaggatgcctgtccatcccggaaaaacagcaagttgatttccctggttatacttactaactttgcttaataagttaacgtagccctggcccttcactttgctaatcccatcttttacaccgttttgcaggacaagtgagatagaaggggccaaccagctactggagctctttgacctcttcaggtactttgttcatcgggaaatctatccaggcagcaag

SEQ ID NO: 522349 - DNA, 487 bp, Homo sapiens
tgtaccatgtatacacatgactgctccatgaggcttgggcttccttacaacgtggcaagtatcaacagacagagagagagctccaagcagaatctacctcctttttatgacctagccttgaaagtcacatagctgtactccattgrtcagacagtcacagtccctggccagaatggaggggtgagaacatacactcacacctctaggtggaagcagtatcagatataccgtatgaagagcatggagaatggggtatacacatgtgaccatctttgggaaacacaatctaacacagtctgccctctggtcagaacagttcacattcctcccatactcatccccaccctacaagaccctgaagcctcatcccattgtggtaccaagctcaggctcaaaagcctagatctcatcacctagatcctggaactcaagtgtgaacaaatgccatataacaaatcacccccaaaatttagtggctccattaaga

SEQ ID NO: 522350 - DNA, 579 bp, Homo sapiens
agatcatcagaatgcaatgtcttctatcagccgggaccccatcgccagccaacccagattccccagaaccacttcccctatctcccacccagctcacacagcaccttcatagcacacagggagcctgttctggcacttcaaggcctcgcttttgtctcccttyaggcccccagctctggccatcacgtatagcatcaccttcctcctcttcctcctcatcctttttgtctgcttctcagaggacctgatggtgaggtgggctgaggggtggaagtggtatgccggagccctggtcacaacctgtcctgaagagggtgccccagccccgtggctaagatgcccatgctccctccacagaggtgtgtcctgaaaggccccaagatgctgcactggctgcctgcactgtctggcctggtggccacacgaccaggactgagaatagccttgggcaccgccaccatcctccttgtctttgccatggccattaccagcctggtgaggacagagggggccctatccacccccatgagggcatgttggacctgccagggactgaaagggaacccctggatttgggca

SEQ ID NO: 522351 - DNA, 374 bp, Homo sapiens
aatttcttgttccatgctcatctattttgcctgtaagatcttatattctgttagccatctccataacattcttatagatcagactctattgaccgccactctaacgttgtcaggcattgtggcaattgtgtccttgtggctttgggcatttaagcttcactacttgacctctatagttttggcatcttctcatacacattactatcagcaagctaaattatttactgactgtcctgctrtaagccctagtctgcagagcagatacataactgaacttcttaagtgaagctggtgcctctcttatcagagcgttctttatggccttggtgtattgtgtgtatccagatccatcctggggaacataatcatctgat

SEQ ID NO: 522352 - DNA, 604 bp, Homo sapiens
cttcctcatatcaaatagctaacaaaccagagctcaaaagccaagcygattcccactgtcatcattgatgaagcctgtacacagatggagaagtaaataaaagggagaggtggtgagttttctatatttgacccagttactatttttgctaaataaggagagaaaagcttgggatttcagacatgaagaaatagatcctgattttgtgagcaaaatcttgctgctcttcttagccctttccggatgtgcatttccttcttggaatcagggcagaatttggcagaatccatgtagactcagagttgcaaccttacaactgagcttagaaaaaaggagctatttgagataggcacaaaggaaccacacagagggtctgaaaaatcccaacagatctggggagccacaagttaggcatggggccaaaaactctggagttgtcattacccagccttcaaatttggacttcaagacaacttaaaaaaagtcctctcctggaaatggcaaacacaagtaggctcaatgaaatcttttatgcaatcttattctggctcagctatgcccagattagctcaatagtcatatcttctgcagtatcttgcttctc

SEQ ID NO: 522353 - DNA, 566 bp, Homo sapiens
ggcgggtgggagagatgagctaggaatccaggtattttgactcctagtccagggtttctctgtgtaccaagatgtagaaaaactcctagtccagggtttctctgtgtaccaagaccataggtccctcctatggtcagttcccttattagacctactatgttattcttctatccccctagtaccactccttccccatatatgcacagacacactgccagggaccaatggaaggaagactgygcttgagaggggcagaagctgtatgtcatgagggctggccttatgcttcccttcactagtcaaggcaacaggagatatgcagcatagtccagccctggagggcagcaaagggtgcttcccacattattaaggcagcactgtgagggtccgaggttgccctgtgctgagaacaactgtgcctggtggcatccccattatctcaacacattcagactctgaggaaggagggtgttgagggtgagaaacacagggccagaacagcctgtcctaacccagtgtccctgctccaagacaagggatccggcttatcacaagctcatgtgact

SEQ ID NO: 522354 - DNA, 382 bp, Homo sapiens
gtcgaaaattcaattttattcaaaataggcttactatatgattctactacctgctcaaaatttgccagttattagacaaaagtaatcaaaacaagttcaggaatatagacttaaacagaaccctgggtattcaaattgcaattttattaaatgtttatcagtgactcctggcagtaaaggaaacgtgcctaagaagcattcagttgcaaactgaaacaaggaggtggctaaatacctcattgaaataatgtcccgaatcttttaactgcactgtcatgctatttaaaaaaaaaaaaggycctgtgagaaaactttcatttctaaaaataatgcagaaactgttagaaaatatatcggctaatttctatatgaaaccattaca

SEQ ID NO: 522355 - DNA, 612 bp, Homo sapiens
acaaaaatacatgtctaaggatatgctggagcatactccataggttagaagaaaagtttatgtcctatagtaagaatataggtaaaaattatttaaaatcctatttcttaacttttttttgagtacgaaaaggcatamaatgtgaattaatggcatactagatattatattcagtatggtcacaatcatcttatatgtgtatacacacacacacacacacacacacaaagatgaggaaacaaaaccaaaatgttaatagttgataatgggagaatataattttcttttttatgcttttctatattttgcaaatttcctaaaatgccatatattatctttataaagaaagacttaaactcatctgtcatctgaaataataaaaaactaaggtgaacacaagagttgactgggttatgacgacccaaatgaatggaatcatccaatgttctgttctttttcctattccttctttgtaatgcttatctcttaatctttttcctgctttggtttccatgtttttcatctatttcaatgtacccaggatggtgttattcttgacgtaatgtaaaagatttttaatggggtgttttaagattttcaaaggaaagctgc

SEQ ID NO: 522356 - DNA, 532 bp, Homo sapiens
taatttaaatggcttggggacatcagtgatttcttcagtttttaaaaaatgggagtatggagtaaaaattacatggattattcagggggaaagaaacgatgagttctgtaatatattccaaatgttcatttgtgagtgaaaatttacaaccagagagagtaaagaatagacacaaggaaaatgtcatataaaaatctggtttctgggccaaaaataaaatctcttgactagttgggggatttcctctcctttcaaggtaaacacagacaccccagtgacaggactgaaataaaaaaaattgtgttacatgctccatatacttacaagaggttggagattccctacccattccatctgccccctagccatcccatccccccatgtgttcaggaaaggactgattttrgctcaacatagcaattatacgcattcacagaaggactgaggataaagaagacatttctgagaaaaccaaattatttctttgcataaacaatacatatagtataaaatagcataatgttttattcat

SEQ ID NO: 522357 - DNA, 642 bp, Homo sapiens
caaatatttcttcatttatctcacaaaatatgtatttccaagtgcagaaagataactgaacacaaccttttctaatgcaagaacagacctgctggcaggaggaaagactttcatgaatgttatgcagatcacaatggagagaaagcaaggagccctttgcaacaatcctgatccagacgcttacctagacaccccactgttaacccagccagtccacaggcatggcagaggaaaggtcaccacatgtgggcagaggaaaggtccaggcactaccagtggtgttctggtaaacatttgacagtcagatctcctgggaaggagtgggaaaggtgtggcatgatttaaagcttttgtcaatgttcatggtgtaaatatktccaacacagccattttcaagccaccaatgtaacactgacgagtttgcgtaattcctgaaaagttaacaataggctcttgtgagctggtataagccagctcctgtgccacactgagtattgctacccctttcatggcaacttttttaagattaggactattggggaataaagaattcatcaaaatgtgattctagaaattctctttaaattgtataagccaggtcagcattacagaacctttttatacacacaagtatcattgact

SEQ ID NO: 522358 - DNA, 642 bp, Homo sapiens
caaatatttcttcatttatctcacaaaatatgtatttccaagtgcagaaagataactgaacacaaccttttctaatgcaagaacagacctgctggcaggaggaaagactttcatgaatgttatgcagatcacaatggagagaaagcaaggagccctttgcaacaatcctgatccagacgcttacctagacaccccactgttaacccagccagtccacaggcatggcagaggaaaggtcaccacatgtgggcagaggaaaggtccaggcactaccagtggtgttctggtaaacatttgacagtcagatctcctgggaaggagtgggaaaggtgtggcatgatttaaagcttttgtcaatgttcatggtgtaaatatttccaacacagccattttcaagccaccaatgtaacactgacgagtttgygtaattcctgaaaagttaacaataggctcttgtgagctggtataagccagctcctgtgccacactgagtattgctacccctttcatggcaacttttttaagattaggactattggggaataaagaattcatcaaaatgtgattctagaaattctctttaaattgtataagccaggtcagcattacagaacctttttatacacacaagtatcattgact

SEQ ID NO: 522359 - DNA, 577 bp, Homo sapiens
taacaagaaaagaatactcattcattctacatgcagcatccagtctccatsagcacacagttttaaaggttgttatttctgcatttgagaggtatggcccaaatacacatatcctagaatattattttttagtcatatagtcatttgatacatattcaaagttctgtctccattctaggcctgagcatataaaaatagattacataatgaagttgctttcaggatgctcccaatgtatcacatggaagagaaaggcaaagaaattggaataatacaatggtgccagtgttgtgaggattacctgccccctcaacaaaatggtattgaaagtcaaaaggaaggtatgagagactgagaatggctcatagttgaaggaatgtctgaaccaaaccctaaaggggcccgattttgtaggaaaaaaaaatgagatgaagaatgttctaggcagaagaatattgtagaagagtcccagaagttcaattcaggtagacctttgattaaattccacgaaaacttgcttgatcttgggcaagttactgcatctccctgaatctcagcttcctcctttataaaacag

SEQ ID NO: 522360 - DNA, 606 bp, Homo sapiens
taattttattagcttggatgtaaaggcagattaattcattgtkaaagatttttgagtgatgaattcaggtagagtaagaagattgattttagttattcaaagaaactggtttaaggtttgagcttttgttttttttttgttgttgttttgaaaaaaacagattccaaaatacttttgttacagacaattatttttatttaaaaaatgggacagaaaataagctattaaaatatgaggtataaaatatatcctaggtttataatggaaaataaaataatataatatccttagatatacagcccttccacacgcagtagttcctttggtttaaatccaatttccatgttccaagagcaagtatttttcattaatatcatgttatagctaaggaaactgaggctaagaattatttgcaaatggataaataagttcatgtaatagacattgagagcactataaataatagagctattatccacatagtatttttattatcattttaaaggaaaaataacaacatcatacagtgtcatagttgaaaagtgtgtgttaacttgaaactcttttgttcccagtaagagattgtattctctgactaggaagtgt

SEQ ID NO: 522361 - DNA, 606 bp, Homo sapiens
taattttattagcttggatgtaaaggcagattaattcattgtgaaagatttttgagtgatgaattcaggtagagtaagaagattgattttagttattcaaagaaactggtttaaggtttgrgcttttgttttttttttgttgttgttttgaaaaaaacagattccaaaatacttttgttacagacaattatttttatttaaaaaatgggacagaaaataagctattaaaatatgaggtataaaatatatcctaggtttataatggaaaataaaataatataatatccttagatatacagcccttccacacgcagtagttcctttggtttaaatccaatttccatgttccaagagcaagtatttttcattaatatcatgttatagctaaggaaactgaggctaagaattatttgcaaatggataaataagttcatgtaatagacattgagagcactataaataatagagctattatccacatagtatttttattatcattttaaaggaaaaataacaacatcatacagtgtcatagttgaaaagtgtgtgttaacttgaaactcttttgttcccagtaagagattgtattctctgactaggaagtgt

SEQ ID NO: 522362 - DNA, 606 bp, Homo sapiens
taattttattagcttggatgtaaaggcagattaattcattgtgaaagatttttgagtgatgaattcaggtagagtaagaagattgattttagttattcaaagaaactggtttaaggtttgagcttttgttttttttttkttgttgttttgaaaaaaacagattccaaaatacttttgttacagacaattatttttatttaaaaaatgggacagaaaataagctattaaaatatgaggtataaaatatatcctaggtttataatggaaaataaaataatataatatccttagatatacagcccttccacacgcagtagttcctttggtttaaatccaatttccatgttccaagagcaagtatttttcattaatatcatgttatagctaaggaaactgaggctaagaattatttgcaaatggataaataagttcatgtaatagacattgagagcactataaataatagagctattatccacatagtatttttattatcattttaaaggaaaaataacaacatcatacagtgtcatagttgaaaagtgtgtgttaacttgaaactcttttgttcccagtaagagattgtattctctgactaggaagtgt

SEQ ID NO: 522363 - DNA, 631 bp, Homo sapiens
agctgcacaaaaggtatcaaaaatgtgagaatataagggaagatcaaattaaatcaaatacatattcaataactttcmaagattaaactatacataatatgcaaaatacataataaaaattagcatataatttggaagcaaaattgcattgaaattcttaaagtatttatgcttttatgtgttttgatacaaaaatatgcatacatatttcaaaacttaagaacactaacaccccagcctggatgacagatcgactctctcaaaaacaaacaacccatctccaccccactccacacacagacttaaagacaatccacacaaaatactttcactattatttttaatgtgcaggcagtgtctcacttcattacccaggctgatcttgagccactgttttcaagcgatcctctggcctcagcctcccaaagtgctgggattacaggcatgagccactgtgctggcccactaatttctcatttaatttacagctataaaaactatgttatactattacagagggatatataattcatttcagagatcagaatatatagaatcttattttcaatttaccagaaaaattactctatataccttagataaataattcaagtagaatgaaatctaaagc

SEQ ID NO: 522364 - DNA, 631 bp, Homo sapiens
agctgcacaaaaggtatcaaaaatgtgagaatataagggaagatcaaattaaatcaaatacatattcaataactttcaaagattaaaytatacataatatgcaaaatacataataaaaattagcatataatttggaagcaaaattgcattgaaattcttaaagtatttatgcttttatgtgttttgatacaaaaatatgcatacatatttcaaaacttaagaacactaacaccccagcctggatgacagatcgactctctcaaaaacaaacaacccatctccaccccactccacacacagacttaaagacaatccacacaaaatactttcactattatttttaatgtgcaggcagtgtctcacttcattacccaggctgatcttgagccactgttttcaagcgatcctctggcctcagcctcccaaagtgctgggattacaggcatgagccactgtgctggcccactaatttctcatttaatttacagctataaaaactatgttatactattacagagggatatataattcatttcagagatcagaatatatagaatcttattttcaatttaccagaaaaattactctatataccttagataaataattcaagtagaatgaaatctaaagc

SEQ ID NO: 522365 - DNA, 631 bp, Homo sapiens
agctgcacaaaaggtatcaaaaatgtgagaatataagggaagatcaaattaaatcaaatacatattcaataactttcaaagattaaactatacataatatgcaaaatacataataaaaattagcatataatttggaagcaaaattgcattgaaatkcttaaagtatttatgcttttatgtgttttgatacaaaaatatgcatacatatttcaaaacttaagaacactaacaccccagcctggatgacagatcgactctctcaaaaacaaacaacccatctccaccccactccacacacagacttaaagacaatccacacaaaatactttcactattatttttaatgtgcaggcagtgtctcacttcattacccaggctgatcttgagccactgttttcaagcgatcctctggcctcagcctcccaaagtgctgggattacaggcatgagccactgtgctggcccactaatttctcatttaatttacagctataaaaactatgttatactattacagagggatatataattcatttcagagatcagaatatatagaatcttattttcaatttaccagaaaaattactctatataccttagataaataattcaagtagaatgaaatctaaagc

SEQ ID NO: 522366 - DNA, 492 bp, Homo sapiens
cagccactggggccgcccgagacaagcttagggaaacattgccaactccrgttccttattgctgggggtgaaggctcttggcagccccaggctgcacgtgacccttgaatcctttatgttcggtgtgacttttatcaagtcatttcacctctccacacctcagtttcctgccccataaactggagacactaataaaacccaccttatggggttgtttgtaagaaaggattgctattaattgccatagggaatgaattaattgcttgttaattgctatgaatgttaaaaatccattgttatacgagttaattgcttgaaagtgcccaccacagtgcctggcacatagtgagcattcagcgctcagcagcagctactgtcattgagacaacgtttgaacacctgctctgtgccgaacttcatgccaggcacccaaaacatcgagacagaggcacaacttgatccgtggatactctaagcccagttgtgggtggc

SEQ ID NO: 522367 - DNA, 492 bp, Homo sapiens
cagccactggggccgcccgagacaagcttagggaaacattgccaactccggttccttattgctgggggtgaaggctcttggcagccccaggctgcacgtgacccttgaatcctttatgttcggtgtgacttttatcaagtcatttcacctctccacacctcagtttcctgccccataaactggagacactaataaaacccaccttatggggttgtttgtaagaaaggattgctattaattgccatagggaatgaattaattgcttgttaattgctatgaatgttaaaaatccattgttatacgagttaattgcttgaaagtgcccaccacagtgcctggcacatagtgagcattcagcgctcagcagcagctactgtcattgagacaacgtttgaacacctgctctgtgccgaacttcatgccaggcacccaaaacatcgagacagaggcacaacttgatccrtggatactctaagcccagttgtgggtggc

SEQ ID NO: 522368 - DNA, 625 bp, Homo sapiens
acccccttcccctaaatagccacctgggctccagcctttttctccagttcatctttcatcctgctcatcagaataattttcctaaatggaaatatatcatgccactcttctgcttaaaacccaacatcctgtaggcattcaatgtcctgtaggacaaagtccagtttccttaccatagcatcaaaatctttaaggatctggtttcagtgtatccctcaatgttactcacaatctttaccaaaagcacctgaaataaatgcttatttctgcctccttgcatttgcacatgctgttccttctgtcttgcaggaccttcctctcctttttctgcctgaaaggcattcattcttcaagattcaaggctcaaattgtttctcctttgargagtcttccttaccatcttccccactcctgacaatgtcaatttcactttcttctgtgctgttacaattatagtcaccctgtattacagtgacaggttgccatcattccctcactcgctagaattgggttcaaatccctgttccattatttttcagctctatgaccttcagtaagttgtaggattctctctggccctcagtttcttcttctgtagcctggagataataataatacctatgtc

SEQ ID NO: 522369 - DNA, 625 bp, Homo sapiens
acccccttcccctaaatagccacctgggctccagcctttttctccagttcatctttcatcctgctcatcagaataattttcctaaatggaaatatatcatgccactcttctgcttaaaacccaacatcctgtaggcattcaatgtcctgtaggacaaagtccagtttccttaccatagcatcaaaatctttaaggatctggtttcagtgtatccctcaatgttactcacaatctttaccaaaagcacctgaaataaatgcttatttctgcctccttgcatttgcacatgctgttccttctgtcttgcaggaccttcctctcctttttctgcctgaaaggcattcattcttcaagattcaaggctcaaattgtttctcctttgaagagtcttccttaccatcttccccactcctgacaatgtcaatttcactttcttctgtgctgttacaattatagtcaccctgtattacagtgacaggttgccatcattccctcactygctagaattgggttcaaatccctgttccattatttttcagctctatgaccttcagtaagttgtaggattctctctggccctcagtttcttcttctgtagcctggagataataataatacctatgtc

SEQ ID NO: 522370 - DNA, 592 bp, Homo sapiens
tattaaccactactctaccctgcctgcagctactgatgatttgcgctggactttgctaacagatgtaagagagataaaaagtgaccttggagctcagaggtctggagggaaaagtgaagatctttgaatcacactaaccagagttcagatcttgatctctttaacttgctgcgtgaccttgggtccattaattaacctctctgagcctcagtttccttatttttaaagtggagcaataggatgattgtgagcattgaaagaaattagatgcatgaartgcctggcacagaggtctcagtaaaggttagtcccctctcctacacccactccccttgagtaaatctgggatatttgaaacttcctagaggaggtgatcttagcactggggctgccagatgaaaaccagtgatccaggtcccagagcccaccccacttctcggggatgctgtccccaaggtcctcatgtgccaggcaggcagccagcagccccctctccctccctcccagccgtgggctggcgggcaggagtgaagacagtgaggaccataaacaaggccaatgagaaagcggtaattccgcggcgccaccattt

SEQ ID NO: 522371 - DNA, 486 bp, Homo sapiens
acagtccggtggcttctggtcatttgcttcttaggtactttgtaaaatttattcttcttgagatgttagatttgtgcatcaaattgtacaaatcattaagggtgcagcttggtgaattttatgtaatgcccacataaccaccacccggtgcaagcacagaatgttttcagcaccccaggaggttccctgaagcccctcccagtcaattccaccttccagaggtaaccactattctgacttctatcsccatagatctgctttgcctgttcttgaatctcatgtaaatggaatcatagcatatgcacacttttgtgtctgcctcgtgctgtgcaatattatgtctgtgaagttcatccatgttgctcaagtaacactaggttttccttttgtattgctgagtagtattccattaagtggatatgccacagtttatgtacctattctgggacatttaggttatttccagtttttaattaatatgatgca

SEQ ID NO: 522372 - DNA, 463 bp, Homo sapiens
tgccagcatttctgggcctttcctcctcaccctgtaggtgggcacgggccccctcctcccccttggagagcttgatagtcacccccatgtagcccaggaaccaagaggcctgagctctttggtgatctcagccccagagaaaagggtgccctcagacagctttgctaggctgctgtgcccagccagcagcagccccttcaaagagaacagggagagaggttgggagaaggccagccactaattgtggaaaataaatcagagacakctaaaccacacagttgaagaagggccagttgcacacagacatgtttccttttgtgttcttgctcaccaagtttaattgttaattgaaagctgggagttatataagttatggggataccaaagaaggagttggaacaagctgttgaaaattacccacttgctgagtggtttgtgaggcaaggaggggtctcaaaaaagc

SEQ ID NO: 522373 - DNA, 501 bp, Homo sapiens
ctgcattctgaggacagtaattattgggcacctgctgtgtgccaggcctgatgctgatgttttatctgcacttgccccatttagtcttcaaggtaggtatcgctctcccattacacagataagaaagctgaggcctagagatgagtgtccaaagtcacccagagagcaaacagagaagctcgggttggaattcaagactcccatccctcagaatctgtgatctttcctcaggagcagggtgtgctccttggccgttaatgtcacaaacactgggggggctttttcttaatgcagcatcctaagaccctccctagagctagagaagcagagtctctgggtgggatccaagagtctacccctgaataaaatagctgcctctggccttggacctcctttaacctaacacagcccctattgcagacaactggaccctgaagaaggagaaaggagatggagcccaktcaatctgcacgcttacctccaaggggatggatgcaacac

SEQ ID NO: 522374 - DNA, 624 bp, Homo sapiens
tgtgttaaagctgcccactgtgaccgggaattcatctattacaccttttatttttgttagtttttgtttcatatgtattttctgctatgttataagaacttcatgttgaattgatcatttatcttgatcaacatctctcttttagatgtagtaatattttttgccttaacatctattttgtcttccattagtatatctataccagctttttttcttgctaacatttgtatggtgtctacccttttactcccgacttttctgcatccttatatttaataagctgtggtctcttataagtggcacatagttgggtttaaaaaaattcctttctgacaatctttgccctttatttggaatatttgataatgatggaattattgctatttttagtcaaattctcttacttacamtttgttttatgtttgtgtcatgtttttgctccattcacctcatatattgccttctttgggattgaaaattttttttattactttgttctccctctgttaattatatgttctttctacattattttggtgactatcctagaggttacaacatgcatccttgatttgtcttagtcaaccttaaattaaggttgttattacttgctgaaaaatgcaa

SEQ ID NO: 522375 - DNA, 607 bp, Homo sapiens
actgtccccagggctgcagcctgtgaagtcctactgccttgattatttcctgataccttccaacagcacttcttttacattttatccagctttgagagttgttctcaaacaaagaggttgttctgatactagttattccatcatagctagtagtgtcagtcatcttttcacttagcacattttattaaatttctatggaaatgagagaacacagtcaaattgacaaagcattttaaaattgacaaggaaattggcttgcttgtacattggtggggaggggatacattggtactgcctttctggagggcattcatttatatcaaaagccgtaacaattcacttgccckttgactcagcaattctgctgctaggaatttatcctaagaaaataatggtgaatatatgtgaagatacatttaaaaagattttcatcccatgaccaaaatcagaataaaaaccttaaatatgcaacaattggggacttaataacttgtggctcttcaatgccatggaatataataaaattcaatgttgcaaatgatgtagaagaatatttcaatatattagtgatccattgttaagtaaagagattataaaacaacacata

SEQ ID NO: 522376 - DNA, 285 bp, Homo sapiens
gctaagggcatgcttgtcctccatggaaagattaacccctggtgattgtatttgctaaagtaaataatgctagctgctattatccctgaatctcagcgacttaacacaatgaaagtttatttcttattgaaattcctagctcatacaggtcagtgtgtgtgcatgtgtgtgtgtatgtgtctacgtgtgatgtgtgtgcatgtatatatgtgcatgggtgtgtrtgtgtgtgtgcacacatgcgggtgtggcactctgctccaggcagtcattcaagaacccacc

SEQ ID NO: 522377 - DNA, 520 bp, Homo sapiens
gtctgaccctctgtctctctagaacataggtatagttaaaaataattctagtgatggccaggcgcagtggctcatgcctgtaatcctagcacttttggaggccaagatggatggattgcctgagctcgggagttcaagaccagcctgggcaacatggtgaaccccgtctctgctaaaatacaaaaaattagccaggcatggtggcacatgcctgtagtcccagctactcaggaggctgaggcacgagaatcgcttgaacctgggaggcagaggtcacagtgagtcaagattgcaccactgcactgcagcctgggcaacagagcgagaccctgtctcaaaaaaaaatttataataatartaataatcctcagtgatgatgcagagtttactgtgttctaagccctttatctatattaattcttctaaagatcgaatgaggcaggcatttgttattctctgcatttataggagaaacaaaaagaggcacagagaagttaattgctcagtcacacagctagga

SEQ ID NO: 522378 - DNA, 624 bp, Homo sapiens
tgtgttaaagctgcccactgtgacygggaattcatctattacaccttttatttttgttagtttttgtttcatatgtattttctgctatgttataagaacttcatgttgaattgatcatttatcttgatcaacatctctcttttagatgtagtaatattttttgccttaacatctattttgtcttccattagtatatctataccagctttttttcttgctaacatttgtatggtgtctacccttttactcccgacttttctgcatccttatatttaataagctgtggtctcttataagtggcacatagttgggtttaaaaaaattcctttctgacaatctttgccctttatttggaatatttgataatgatggaattattgctatttttagtcaaattctcttacttacactttgttttatgtttgtgtcatgtttttgctccattcacctcatatattgccttctttgggattgaaaattttttttattactttgttctccctctgttaattatatgttctttctacattattttggtgactatcctagaggttacaacatgcatccttgatttgtcttagtcaaccttaaattaaggttgttattacttgctgaaaaatgcaa

SEQ ID NO: 522379 - DNA, 403 bp, Homo sapiens
ttttttgtaatttttaattgagcttaatctctcctttaataatagcaaagaagatcttgaacattcagaatccctagacagtaaaatccttaacacagagagtgtgccggggacatggctacctatagttcagcagtgctgacaagctgaatgacactggataaatcatttaattttgatgtcccttagttaccttgccttgaaatgggaatgctaaaagtttcactacttcctttgcaaggtactgtgaatgtaaaatwgaataactagaaagctaaaatatatatgtaatttatgtatctgtaagtaatgtgtggaacttttaagccttgtatgggaataaaacaaatatacactgtactattctatgaacaaatctgttggccaacattctgatattgaa

SEQ ID NO: 522380 - DNA, 425 bp, Homo sapiens
gcttcccctgccggaacagccaaacagcatcagcagcgggcctgggcccagagaggtgaggggctgcaggagggaggctggcagagggccacagggcaagagctgtgggggcttgggcctctcagatcatcaggcctgcccygatcggagggctggctccccagggataacttcctgcccagaaaggacccatccagcctggcccacccaggggctggaagctggggtgggggacagcccctctttcactccaagccgggggtgctggggcacctctttgaacttcgagaaggcccctgcctgatctgggtggtggcccgcctgccagtccatgaccctcccagccaacttggcatgggtgtgggcaccactcagcactgaaggccgcaactctgggcaagggtcggggagatggggggagaaac

SEQ ID NO: 522381 - DNA, 496 bp, Homo sapiens
ctgctgtatctggaggtatagatacacactgtttcttctttggttcattgctgctttttgtattttttgactccaaatatggagctttttggkcatcctcctttgggaagatctggggcttacttttgatatctgtgatgtgtttcgttgattcttttgataatccagtacaatttattgtttgaattcctcaaaatttctgatctactgcttgcattatttcctatctttaaattttatgtactttttgtttttttttgagacaagagtctagttctgttgcctaggctggagtgcagtggcatgatcatggttgactgcagcatcgaactcctgggctcaaccaatcctcccacctcagcctcctgagaagctgggactatagcatgtcccatcatgcccaactgattttgttatttatttatttttttcagacaaggtctccctttgttgcccaggctgatcttgaactcctgggctaaagtgattctcccac

SEQ ID NO: 522382 - DNA, 609 bp, Homo sapiens
ttttgtgaataggattcctttcctgagggatataaattagaacattcttataataacatgttttgttatgttgttaatagtttgtaatcaaatatttttgctaatagtaaacacctgttttaatattaaaatcagtaacaactatcttacgtgtttatcttacagtttatgtttcatttaagaagatcttctttcctgcaagtttttaacaatagtcctgatgagagttcatattatcgtcaccattttatgcgtcaagatctgacccagtctctaattatgattcagcctatcctgtatgcgtattcttttagtggaccaccagaggtaagagggacagaaaaaaataaattggtcttgttactgcaatgtgtggcattaaaaaagtgaaaataactaaaaaaatgcatatagttactaaatataagaatttaactaaaagaatggacatctcaacctattwatgtattcgcttaaaatatttatgaatgtttactatatgctagataccatgtaggctgtattagaagattgttaaatttttttttttaaaggagatggaagagactttcagatcattttgtccagccatttggttaatcaaatcct

SEQ ID NO: 522383 - DNA, 402 bp, Homo sapiens
gccatagtgggtagaaggataaaatgttggatcacttgtctcatagaatcacctgtggtttaagaaagcttaagggtcattattttaagcaaaagaacatacagattttcatggcttttgtttttatcattatttgggattttgaacttctgaccaagtrtttagtaatttcacaccaaccttgtcataattgttgcacacataatttttatatgctgagttttggactcaacaatgtatttgttattttggatgtatgatttggagagaagaggtgcatttattatttatttgtaacacttagtgacctatacatttcaaagtttaatcttttaaaaattaagttaataaaattaattttaccaacacatactaaataaaattgattttgcatgatataat

SEQ ID NO: 522384 - DNA, 517 bp, Homo sapiens
aacatttgggaacattcagattcatagtttttgggtataacttggaggatatttgaaagcacttcaacggaattgaacactcaggaggtgggggacagatgtttacaggccagtgttagatggaggggaagtaaaaaccagggttagactctctggccagaacttgaaatattttcctggttattggcttgtccagtactttctgttcaaatgttcaaaggtcaaacttgatgtgtcctcatgtccaaaagcactttttaacttacatttctccagttgttaaagagtaaartcatgtttttccattaccttccaccttcttgctgctcattgttcctcattcacccatttttgttaatgtattctggattattgtaaattttttttaattgtaaaaatctagatttaaaaattccagattattataaaaatataaaaaattgtatctattaagaatgttttgacattgctttagtttagtttttcttttttttctttatttttactttttttgaga

SEQ ID NO: 522385 - DNA, 472 bp, Homo sapiens
atatgtgtaaagcacatgacacagtacttggcatttaagtgctccaacattgtcagctatctattagagttctgcttccaggtgttgtattatttcctatccccaggccctcttctgaccaccatgccatctaaacaaacttttgacttgcatgcctctaaagtagccacaaactatgctctttaaaactatcaagtcaaatattggaaaaattgcctaaataaagtctatctcttgacagatcccttagtgaggaatatgaaagacatgatgttgggatcttattaaatgtcattcagttgtctgttgtttcttgttcacatgttctgctattcacattgagtgamaaaccacttgcatgacatatgtcaagacaccaaattctctagcatctagtaggatatagcaaagcactttatttccatgggacgttttattcaacttggcaaattgtgggtgcaaaaattttgga

SEQ ID NO: 522386 - DNA, 472 bp, Homo sapiens
atatgtgtaaagcacatgacacagtacttggcatttaagtgctccaacattgtcagctatctattagagttctgcttccaggtgttgtattatttcctatccccaggccctcttctgaccaccatgccatctaaacaaacttttgacttgcatgcctctaaagtagccacaaactatgctctttaaaactatcaagtcaaatattggaaaaattgcctaaataaagtctatctcttgacagatcccttagtgaggaatatgaaagacatgatgttgggatcttattaaatgtcattcagttgtctgttgtttcttgttcacatgttctgctattcacattgagtgacaaaccacttgcatgacatatgtcaagacaccaaattctctagcatctagtaggatatagcaaagcactttatttccatgggacgttttrttcaacttggcaaattgtgggtgcaaaaattttgga

SEQ ID NO: 522387 - DNA, 583 bp, Homo sapiens
gctaagcagagggagggaacagcaggccaggtgtagggacaagatatgctgcagggctgggaataccccagtaggcacatgaagaccaaaggcattaagcggcacaggttgctgaggggggacttctgggcactatgttggagatggtggcaacttaccccaggtaaaaatcaccagagcactcttttaaaaatacagatcccaggcctcatccaggtctgctgaatcagaatggccaaggggaagggcccgagaatctgcattccctcacaatttttcttattttgaaaaatatcaaatctagagaaatggaaagaaaagtacaaggaacacctgaacccccttcacctagactcaccagttgttaacattttggctcatttttgctttctctctctccctccctcactctctcctcaccaagcatctcctaaaaataggggcctaggccaggtgtggtggctcacacctatcatcccagcactttgggaggccratgcaggaggattgcttgagcccaggagttcaagaccagcctgggcaacatagggagatcctgtctgtataaaattatttttaaatt

SEQ ID NO: 522388 - DNA, 160 bp, Homo sapiens
tgtaaagcgtgggtctctttgtgccaatgtgagaaacctcaggagaacacagtggtggcctaggctcttatcagacagtkaaagctcaacgataaagtggcaacagatttttaaatatgacataaactacccttgccttttattcaacttgaaaatattt

SEQ ID NO: 522389 - DNA, 582 bp, Homo sapiens
tgagtgcttgggtacccagccatgaagctgaaggccccaaactgattagacccttgatagtgagtcccatgttcatctagaagcaatagaaacttaaggatcagagcttctgcatatatttaatcatgaagggtagaatcatcagagygaggaattaaaaagggatttcttcctttctctttttgaccttttatgcacagaagaaactaatcatggcacaagagaaagagtgcaatagcactataataatagtaacagggttagttataacctagagtactacttaattccaggtgctatttttaagtaatttgtatatactttatcatcatatacaccctatgaagtaagtacagttattaccatcatttaaggatgaaatggagacagagattaggttacatgtacaaggtcactcatttattatgtggtagagacaagatttgaacttggcttcagagtttttgttcttagtcacactacactatgttatctaggaacatgaggacatcttggatctgttttctcctaaaagttttgaagttttggcttacctttacaccctaaaaccacctgatgttg

SEQ ID NO: 522390 - DNA, 392 bp, Homo sapiens
gggccctcgggctgtagcacctgccagtcattcctgctgctctgcccagaggcatctacaaaagaggaagaaagaccttgcactgggcaggaaggacttggagccctaaatgacaagcttaaaacaatcaaaccattatctggccaagaacaatggcccaggataagacaggagtgtcattagacagggaagggaaagaggggatgagatggctggctgcagagagagaactgagctatgcaatggcaaacctacaaacaataaataacactcaagtgctcaccrtgtgctgggccctgcgtgcatgatgtcacttattcttcacaatgcttctgtaaggtaaatggcatcattcccattttttgacagaggaaactgagggtccggaaagg

SEQ ID NO: 522391 - DNA, 564 bp, Homo sapiens
tccggatacagctgtgtttgccgggtgacttgcttcgttctcctgcccttcctctgtgcttccagccggttaagcatctccctgcccaaagaatgggagtaataatagggggtccgccagtcactgactgggtgactgtcatcaggtttccacttagaagcacacagttactcatcctgggaagagcatggttctgagaagacagcgcacaggtggtggtagtatgttagtattttataagtggctcaaggttgtaagttctgcttttcttcactggaggaggagttgtccaaattcattcactcacccatagcttacatgcatacattcttattgagcatgtgaaagttgataatacgaattgggtcactcttcttatgcccaacggaatcagaatccaggggccaggggaaaagcactggaggcacgcagcgcctgctccaagaaccaatatttccactaactgctgcggaaatggcctgcygtccccctgagaccagattcagctagtaactgctgaaacaacccgccataacctaatactagttttacttaccactgtca

SEQ ID NO: 522392 - DNA, 367 bp, Homo sapiens
acttaagccttcatcagaatcacctgcagaacttggtagagcccagattgctgtgcttcaaccccagttcctcattctgtaggtctaaggtgcaacttgagaatttccatttctaacaagttctgaaatgatgctgatgctgttagtctgggaatcccactttgaaaaatggtgaaatggaagcccttgcctcctgaaatgaggacacctggaatctttgtggcccaagattgagacaaggggtaggatgaaacttttctttagtgggaaagaaccattttggtatgtcctgggagtcctcaggaagttcagtccttaytcttagctcccaaaggggaggtattacagttccagaagagattttctt

SEQ ID NO: 522393 - DNA, 555 bp, Homo sapiens
ataatctcatcaacataaactatcaggtgtggtcccagtgactcaacaggaataaagaggacactcctgtcatgttggaaattctagacatttctttgagtgaggccaaattccttacaacatggaagtttatccattatagcatttatcaatacttcattacttttttgtttctgaataatccattttatgtgtacacgatttgtttattcacttgtttattgctggacatttgggttgtttccacctttggggtattttgaataatgctgctattaaacatggatgtacaagtatctgagtacctgttttcaattcttttgaatatatatctgggatgtttaactttatgcattaatttgactggattatgggatacccagatmtatggtaaaacgttatttcagagtgtgtctgtgagggtgttttctagattagtatttgaatcagtggatggagtaaagaagatcatcctccccagtgtgggcagacatcatggatgaacttcggtgttgaaggcccattaaaatagaacaaaaatgtggaggaagtgca

SEQ ID NO: 522394 - DNA, 555 bp, Homo sapiens
ataatctcatcaacataaactatcaggtgtggtcccagtgactcaacaggaataaagaggacactcctgtcatgttggaaattctagacatttctttgagtgaggccaaattccttacaacatggaagtttatccattatagcatttatcaatacttcattacttttttgtttctgaataatccattttatgtgtacacgatttgtttattcacttgtttattgctggacatttgggttgtttccacctttggggtattttgaataatgctgctattaaacatggatgtacaagtatctgagtacctgttttcaattcttttgaatatatatctgggatgtttaactttatgcattaatttgactggattatgggatacccagatctatggtaaaaygttatttcagagtgtgtctgtgagggtgttttctagattagtatttgaatcagtggatggagtaaagaagatcatcctccccagtgtgggcagacatcatggatgaacttcggtgttgaaggcccattaaaatagaacaaaaatgtggaggaagtgca

SEQ ID NO: 522395 - DNA, 624 bp, Homo sapiens
accttctcctgctctcagacaatggagctcttggttctcaggcttttggacyctaaggcttatatcaatagcctcccacccccagattctcagaccttaggccttggagtgggagttacaccactggcttccctgattctcaggctctcagacttcaactgaattacatcaccatctttcctggttcttcagcttgtaaatagtatgtcatgggacttcttggcctctgtaattgcatgaaacaattcccataataaatcttctctatatgtattgcattggttctgtttctctggagaactctgactaatataattcctaagagtggaatttctgggtcatatgtaattctatgtttagctttttgaggagccaccaaattgttttccacagcaacttccaacagtgacaagggtttcttttttcttttataggttcagtattctttattataaacaatcagacaacagtgtaagtgtgcatttgatggataaccgaagccaagttattataatagaaagcatgacttcgctcaaatagagtttctttgttgttgttgatctgttttacattaatttgaatttaacatatgctaggatcacctaaatttgtcatacagttctg

SEQ ID NO: 522396 - DNA, 641 bp, Homo sapiens
ccacaagcaccatgacagtttacaaatgtcatggtaattacctggaagttaccacccctttcctaggaagttctaaataacctgtccctcagtttgcattggcttgccccttaatttgcatgtaattaaaaatgggtttatgtgagtatacagttgccaggagcccatatgttgctgactgaagtgcactgcctaggagttatccttgctctacaaagagcagtactgttcaacaaaagattgccaattccactggcttgtccttaaaagctaaggaccctyctgggataagcaccaattttggggctcacctattctgtatcagttatactgacatacccattttgcagatgaagaaaaggaggcccagaggggctgttgggttgcccagggtctcagagctaataaatggcagagctgagaacctgatttgggcagtttgccctcatggtcattattcaaaatctcttcattaactgactcaactggggggcacaaggccaaatttttctgagttttcaggtagctggtgattgtttttgtttaagtctcctaggattttttttttttttttacaaattacatgtttttgtaatttgttacatgctgtaataagaactttaaaaaaagtagatttacaa

SEQ ID NO: 522397 - DNA, 605 bp, Homo sapiens
ctttaagctctaaaggccactcagcataaaacatcacaagcattgccttctaattgcagaactgaccaatttcattcctggccgtacaagcctataactcatgcctaacaaactgcctggaatagctccatattcttattttaagtatttagtcttggctctcctgactgaatgcagcccaagctcacagacctggcctgcgttctgtgtcctggtggcacgtatggtgctggtactcaagagcactcttggatttgctttacttgcatgatttttaagaaccagaaggacaagcatgaggccttcatatttagaccttcttccctatatggtaacaagaatatgaggggtaatcccagaatggtaaactttactttaagcacctttagttactaatcagtaagaaaaatgtgaaaatgtgctccagttaaaagcacaagaccatgaaagaagccaaagctatgactgactgcatgcagaggctgttgacgtcatcttcgcctgggtctcctcctgaactgaaatccttggaaagggagcaaaagggtttamaaaacaagacggtgcagagagtctcaagtctgtctactccacagcagcctgct

SEQ ID NO: 522398 - DNA, 583 bp, Homo sapiens
ctgggcgcattgctgccagaaataaagactacatctcccagtgtttcttgcagctaggtgtgaccatgtgaccacattccagccaagtagagataartgaggtggccaagttcctgactgtgcacttaaaggggagggtcctgctcccctttcctgccctcttttccagtctggctgcctagaaggtggacctggtagcaatgagatcagtgaatcctgggtctcaataccagggagtctctgtattgcttggcctgctgatggtcaactttctggttgatttccactggtttaagccactgttatttaagagctttgttatagttgctgaacctgcattctaatattatacctgcccaagccagccatgagggggatggaaggaaggcaggaaggagtggggagaaaggtgtagatggaggggcacagatggtctggctggttgagttcagagattcttacagacatctcctgggaagaagactctgagttggatgttggaggccaagaaggatgtagcgaggtggggaaaggggcagggcgcaccagaaagggctgcagcaggggcaagggtgttgaggag

SEQ ID NO: 522399 - DNA, 583 bp, Homo sapiens
ctgggcgcattgctgccagaaataaagactacatctcccagtgtttcttgcagctaggtgtgaccatgtgaccacattccagccaagtagagataagtgaggtggccaagttcctgactgtgcacttaaaggggagggtcctgctcccctttcctgccytcttttccagtctggctgcctagaaggtggacctggtagcaatgagatcagtgaatcctgggtctcaataccagggagtctctgtattgcttggcctgctgatggtcaactttctggttgatttccactggtttaagccactgttatttaagagctttgttatagttgctgaacctgcattctaatattatacctgcccaagccagccatgagggggatggaaggaaggcaggaaggagtggggagaaaggtgtagatggaggggcacagatggtctggctggttgagttcagagattcttacagacatctcctgggaagaagactctgagttggatgttggaggccaagaaggatgtagcgaggtggggaaaggggcagggcgcaccagaaagggctgcagcaggggcaagggtgttgaggag

SEQ ID NO: 522400 - DNA, 631 bp, Homo sapiens
ctggaagtctgagctattgctgaacagtacgtcattgcatttagaatttagaccagtgtggtttaatagaattttccacgatgatgaaaatgttctgtctgtgctgtctaaaatcttagtcattaaccacatgtggctactgagcacttgaaatgtagccagtgtggccaaggaacacaattttaaagttaatttatttttaattttaaatataaataaccacacacatggtttctgaattgtacaacagagaattctagataatgtcagtttttctagtaataaatgctctccatcctagcccctttttgaggttgggcttctaaagattagttaggttgtctcccaagtttctcacagtggagaaggggaggaagtgcaggaggaagcaaaaatgaatttataaacactataataaaagtgagcctaattacagcaagagatcaaaataaataataccgatagttgcttttagttttgagtgctagccaggtgtaaaacactttaaaatgwgatttaatcctcaaagaattcctatgcaattttgtagctgaagaaaccaaggctcagagtggccaaatggtttgttatttgtggcagagaatttagatgcccatctaggtgagcctcg

SEQ ID NO: 522401 - DNA, 553 bp, Homo sapiens
actcaaaatctatgccatggtctttagcaggcaacagtaatgtaggtctggactgtatttttgcttggtgattttgcttgattctgtagcgatgaagattctaaactttgtgaaaggagggccagtgtggtgataactttatgtgtcatattgacactttggacattgttaaatgtacagcatatgagaaacttgggtttgtattaattcagccttggatatcctaaggatttatactcattaaagacagttttgatggcagttgttaaagaaacacaggcagctaagaaagactctccaagtttaggataagmaataggtggggagcaaagaattactgcgggattttaacttactaaagtaagtttaaaactttcttgctggggatttaatcataagaggtggcttatcttgttcaaatatgggcatgaccatgcttatattgattcctacagttttagttcagacttattttcctgagcttcagggccatatatctagtgcttgtttatatttcctcttgggtatcctataatcatctccaccccatgtc

SEQ ID NO: 522402 - DNA, 553 bp, Homo sapiens
actcaaaatctatgccatggtctttagcaggcaacagtaatgtaggtctggactgtatttttgcttggtgattttgcttgattctgtagcgatgaagattctaaactttgtgaaaggagggccagtgtggtgataactttatgtgtcatattgacactttggacattgttaaatgtacagcatatgagaaacttgggtttgtattaattcagccttggatatcctaaggatttatactcattaaagacagttttgatggcagttgttaaagaaacacaggcagctaagaaagactctccaagtttaggataagaaataggtggggagcaaagaattactgcgggattttaacttactaaagtaagtttaaaactttcttgctggggatttaatcataagaggtggcttatcttgttcaaatatgggcatkaccatgcttatattgattcctacagttttagttcagacttattttcctgagcttcagggccatatatctagtgcttgtttatatttcctcttgggtatcctataatcatctccaccccatgtc

SEQ ID NO: 522403 - DNA, 645 bp, Homo sapiens
tggtaatggagagagtattcgatctacatcattgagatctttgtatgcccctttgaaagggtgggcttcacccttaaggaaaggggagtcaccaagagttggaagaacctgtggtagaggatagaggaaaggttggagggaggcaagattggatttggaaggcgggttaaaggatgatttccattgtccaggggttggatgataatagctaatgctaagatggcacttagtctctagccctctatgtagattaattcatggcctaaactaaggcaagggctgtgggaattgtgaggaaatcagtgaatttkcagttatcaggggacacacaagcgccttccccttttctgtatttagagcacagaggggtggagaagtggctggaaatactctgctgaggccctccaaatcaagggacatttctcaggtcctccccacctgctctggggatagcctggctgcagttctgcagctccccaaaggacagtcctgaggcaggtctgagcgtgtgctgcataatggagagtttcacaatctcagcaaatgagcagcctagaagcattcacccctgactcgtgtcggcagtaggctgagactgaaggagtctcactgaaaccaggatgggtagggattacatccaacctt

SEQ ID NO: 522404 - DNA, 483 bp, Homo sapiens
cctcaccagaactcaactcttctggctccctgatcttggatttctagcctccagaactgtgagaaaataaatttatgttgtataagctgctcagtctatgatattttattatgtcagcccaagcagagttatattattttatttattgtgctagagttcatagacttacttgaatctatttcatgataccttctaacagctttaaatgctgttcattatatctctgaatattgtttttttccattatatggaagttaattcttctgccacttcaattayatgtatggcagattcattctccttgttccattgatatttacttatcttttctggttttttgtccttattcctcttaaagttttatctggatatttactcccaattgtgtgaggccagatatggcgtaagtattgtttccagttgaatgcaattgggaagaagtagatgcaggaaagctctctgcctttcctctatttacataaa

SEQ ID NO: 522405 - DNA, 471 bp, Homo sapiens
ttgatcttatactttaagtgttcttttccagtgccattgacagataagttactctagagtaaagattttcagtgctccatcagtgttcttccatttttctagttttctcctatgcctgtttacttctctacaagaaggatccttgaggagcttgaatctcgcagcctgtgctcattatcccagatgttggggcactgaagcaccacacagagtgtgttggagatggtaaatarcttttttctcaccctgccagttttgagtgattggtagtaactgcataaattgctcttctgagaatgaaagaatgccttaaaaactgcaggagaaaagcagcatgtttcaccgggtgggagggacgagtctcatcttacttgccagttccttgacatcccaagtgggtcttaaggttgaggtacacctgccaaggggtgttcacaaggaactgggagggacctcaatgaagaagcagaa

SEQ ID NO: 522406 - DNA, 624 bp, Homo sapiens
cacaatttatattgtgcatccactaacaaattattgttactattataatattattttcttttcattttcataatagcaatataactgacttatacaccatcattagagtattagagtattctaaaattgactgtctacttacttcaaaaagtaagttttctttctaggtttccatgttactgttaggttggtgcaaaagcaattgcagtttttgccattacaatcaatgataaaaaccayaattacttttgcagcaacctaacaattagtccctttttctttcagcttaaaacagtctctttagcatttcttttaatagtgatctggtgatgatgaactccctcagcttttgttagtcttggaaagtatttatcattcattgattttttttgtatttttgtgggtacatagtaagtgtatatatttatggggtaaatgctatatttttccagaagcatacaatgtgaaataatcacatcagagtaaatggggtatccatcacttcaagcatttatccttttcttgtattacaatgtaattatactttttaagttatttttaaatgtacgataaattgtttactgtagttaccctgctgtgctatcaaatactagctcttattca

SEQ ID NO: 522407 - DNA, 532 bp, Homo sapiens
tgaaaataaatgcctcattaagttaaacatattaacctgagaacagtattgaagtcagacagactaatgaacatcattatagggaagatgcaacagtcctcagaggggccccacccagcatcggggactcccacaaattctctcagctaatgcaggatgtaggatcatcaaaggagggagggagaggagaaaaggactcagagggaccagggctgatccagtcatggctgtcgccgtggatatactcctgattcacgctggatacttgtctgagaagggcatgtagccacccttatgtgatgtgatgagttgcgaattccaagagagaagctggttttgcctctaaaatgagagaagtcaggcttaagtatcaggaaactctgattctagttcctgctctgtccttcagtggggttgggaataattccctggttttctccaaatatcagtggactagatctagattcttccaatctttattgagtcaaccrctatgctaggcactttctcatatgtaactgtgtggactgtt

SEQ ID NO: 522408 - DNA, 533 bp, Homo sapiens
gctttcatctcacctgcacctcccaacccggcacagggtgtaagcaagaaatggtgatgtgtcaaaggaagggtttggtcatcaaattgatgatgaaatattttattttgagattgggtttgggctccaaaaacagacaagatgatcttcgctgccttgccgatctgcttcagctcccgtgtgcacccactgtgtggaagacactcagctcaggacactgggatcagrctacagtgggtcaatgtgagtgggtctggaagaggcaaactccaaaggtgaccctgaggtggtgcatgtccgtgttcctccccagcatgtgggctggggtccaccttctacaggcaaacgtgcccctcttttggggtccctgatcccagggttagaggggttgtggatggtgattctcccagcagccaaccgcacaggtgttggccttgaagacctcatctcccagagagtccctgcctagacccagaaaaaagagtgaggtgtctcattgtggtctcaggcccaagcagctttctgtgacggcc

SEQ ID NO: 522409 - DNA, 581 bp, Homo sapiens
taaagactgcgtggttctgagggaggagagagatattgatttactttagactgtgttagtcaagtgtgcttattatgatttttaagctgatcaattaaagaagagaatagaatgtaatttccaagccagtagagggaaaagagaataaacaaaacctgatcaatatgcatgggcgtcaggaagtgagccaagcagaaacacacacacacacaaagaataaaagcaaaagtcaacacaaaaatccttgccattgacagcacaaaataagaaggtagcatcctgaactctgcctttcacatctgtgtgtcactgggcaaacgacttaattaatgacatcacctctctgaccctgatttcctcatcggtaaactggagagaatagcacgttttgttaaagggttataatagcacgttccatttaagagctatcatgaggatcgaattcagcaggcaccacacaagggcgggttgctagcactattrctatgtgagtctgcaccagctacagccctaagtgcatcccatatgccatctcacataaccctcccaacagccccatgaggcagggccactgtcatctt

SEQ ID NO: 522410 - DNA, 596 bp, Homo sapiens
tgccagcaagtgatttgttggagggaggtatggacagcacaccccatggctgccacaactggcactgttattgggagcctcctgctattctcagtctcactttttcatccttgggcttatccaatrtctttttttttttttttttctggagatagggtcttgctctgtctcccaagctggagtgtagtggcacaatctcagctcacagcagcctctacctcccagaatcaagcagttctcctgcctcagcttcctgagtagctgggattataggcatgcaccaccatgcctggctaatttttgtattttttagtagagatggtgtttcgccatgttgggcaggttggtcttgaacttctgacctcaagtgatccatctgccttggcctcttaaagtgctgggattacaggcatgagccaccatgccctgcctatatccagtatctttatcgtaaggtgtggtgaaaatataatggattacgaatctgacgacctgagtaccatttcctattgctttgctaaaaattttggaccttgtggacaattcatgccacctttctgtgtctctgtgaaatctccaaggtccttcccaaccac

SEQ ID NO: 522411 - DNA, 599 bp, Homo sapiens
gcttcccccagggcaggtgatcaagagaaagcaagaggcaccaacacagaaaagtagtatttataacctaatattagaagtgacatatcatcacttctgccatataccactggtcccacccagggacagtgtgggaggggactacacaatggagtgagtaccaggaggcaggaccactggggaccatcttggaggctgataacctgttatggctttcctccaggaagtcctccctgaccatcccctcacagagatctggccttgtgtgtgcccttcacatggtacttcacagattctgtcagcaagagccatcagaactagggggagggaggcaagccacacagtagggaggagacagcagggtgaggtcttagagactaaacagacaggccctgagaagacatcaggcygaggatcacctgccatggagcaggcatggcacatgctccccagacagttcatttagcttttccagctccacatagaggtaagaattcttgaacttgttaagcctcagttttcccatatgcacaagagaggtaagttacttgcctaaagtcacagcagagagcccatgccagggctggaattcaaaccca

SEQ ID NO: 522412 - DNA, 438 bp, Homo sapiens
tctccttcctctcaggagaatgtcttctccaagcagctatttttatgggaaccagaggatactgaccagaggaagataaggagcctttccttcacatgggtctaagaaactcaccattttcctcaacatctgacctgacaactggtttcccagcattggccccaagaaataccacctgccatcgctacctggattctgcagcccccaaagccacagccttccaccttccttccccagcaagacaaatggggtaacctgtttgtagcatcctcaggagtccttggsgggaggagaacctgacggagatgagaagataggccacgcccagctccaacgagtggcacacgtgtaagcatttaagcatttaggctggctgagggtggcagtcctgacctctgtttttaaggaagcctgcccagggttttatagtccagggtt

SEQ ID NO: 522413 - DNA, 438 bp, Homo sapiens
tctccttcctctcaggagaatgtcttctccaagcagctatttttatgggaaccagaggatactgaccagaggaagataaggagcctttccttcacatgggtctaagaaactcaccattttcctcaacatctgacctgacaactggtttcccagcattggccccaagaaataccacctgccatcgctacctggattctgcagcccccaaagccacagccttccaccttccttccccagcaagacaaatggggtaacctgtttgtagcatcctcaggagtccttggggggaggagaacctgacggagatgagaagataggccacgcccagctccaacgagtggcacacgtgtaagcatttaarcatttaggctggctgagggtggcagtcctgacctctgtttttaaggaagcctgcccagggttttatagtccagggtt

SEQ ID NO: 522414 - DNA, 358 bp, Homo sapiens
gaccttttgccccacataaaacacttctcaaaggcttggcaacaatagataatagagagcattygcctaagaccaatgttttgaccatgatgtcaaaacaatattttgtttcagcaaagaaaagctatgtcacaagtggattgttattactaataatcagagtagtggtacttgcgaataacttggtttcatactcacacttggacaactatgcacactgagtataactgaccttatgagaacatcattgtcactaagattatgatgtgtttctcgtgtgggaactgtacataatattgtgtgtacccttgggaggatgtcctgcctgtgatgttgtctctcagagaagaagagtggt

SEQ ID NO: 522415 - DNA, 358 bp, Homo sapiens
gaccttttgccccacataaaacacttctcaaaggcttggcaacaatagataatagagagcatttgcctaagaccaatgttttgaccatgatgtcaaaacaatattttgtttcagcaaagaaaagctatgtcacaagtggattgttattactaataatcagagtagtggtacttgcgaataacttggtttcatactcacacttggacaactatgcacactgagtataactgaccttatgagaacatcattstcactaagattatgatgtgtttctcgtgtgggaactgtacataatattgtgtgtacccttgggaggatgtcctgcctgtgatgttgtctctcagagaagaagagtggt

SEQ ID NO: 522416 - DNA, 509 bp, Homo sapiens
aaacactaatttcgctgactggtgacggtgggggtgggggaatgtagctgtttcctgataatgtcttctgtgctgaaagtgccctggatagcaaggaggggcactgggcaaggacaaaccaccaggaagagggcagccctccagtgcaagagggtgaagcagcctgttcttgcgtagtgtggacagaactgaaggcatctttgtcatggactcgagtgccccctgtggatgctgagggaccctggagccccgtgggattttacttaacggggcttcctgccctgctgcaaacacatcgttycatagttctttcttgtgactgcaggagactctgctccagcatcaaaaagagaagcaaaacatcatggatccaggccagggtttcccactaattagccatgccccctccacaaattacttggttttctaggcctcagtttcctcatctagtaaatgaaagttaaataagattatttcatatatcaactaaatcccaaacatgatttttc

SEQ ID NO: 522417 - DNA, 509 bp, Homo sapiens
aaacactaatttcgctgactggtgacggtgggggtgggggaatgtagctgtttcctgataatgtcttctgtgctgaaagtgccctggatagcaaggaggggcactgggcaaggacaaaccaccaggaagagggcagccctccagtgcaagagggtgaagcagcctgttcttgcgtagtgtggacagaactgaaggcatctttgtcatggactcgagtgccccctgtggatgctgagggaccctggagccccgtgggattttacttaacggggcttcctgccctgctgcaaacacatcgttccatagttctttcttgtgactgcaggagactstgctccagcatcaaaaagagaagcaaaacatcatggatccaggccagggtttcccactaattagccatgccccctccacaaattacttggttttctaggcctcagtttcctcatctagtaaatgaaagttaaataagattatttcatatatcaactaaatcccaaacatgatttttc

SEQ ID NO: 522418 - DNA, 394 bp, Homo sapiens
tgtaacttggtaagttgtaactgaggtcaaagttggtggttcaattcccatttgtttaarttagttacattagttttcgtggacatagtctgtaaccctaacctcagccagctattttacaattgcaggtcccagtggaacctgaataatagaatatggataagtctataaagtgactccatctttattactgaaaaatgtaaatatgcttgtagttccacaacgttgtataggtttttgtatatgcagttacgcaaataatttttagtaacaatcatcttgacaaaaagagatggcatgcttctccaaaatggtactgtgaggatcctcaaaaatgcttcatatatatcttattccaatagtagtttcctagttttacaattctcatctaata

SEQ ID NO: 522419 - DNA, 649 bp, Homo sapiens
gatcattacacattatatacagtattaaaaaatcactctgtagcctataaatattatacacatttatatgagttatataacatatacaatataccataatatataatataacacataattgtatatattattatacatacttatatatattttcatgtaataataattatattattgcatgttgacaaaaaatgaaaggaagaaagaaacttggtaacctaaaatggaaggaggtgtctcagaagcactggtatctgggaaaagttgacaccttcgctaaataaactaatccaatttgagttgtcttttactgtgtgaagggatgctttagggaacatgccctcctggtatttctaataaagacaataatgcagcattaacaaataggatttgagagtattgaataaaaatgccaacatattggaaacaaacgaaatcaaaggctattctccgtttacttgtagaaatgtttctacagggctgaaggaaacmattttatatgagctatcatcatttgaaatggcactgatgaaagtctggactatggtgaggactgcaggaggctgaagagttggtgaggaagggagaggatgatagtcaggatcaggcaattacaaaacaacaagcatccaggcaagtgataacatat

SEQ ID NO: 522420 - DNA, 587 bp, Homo sapiens
agaaaaggctggaatcctgtttacaagcccgacttgtcatttcactcatggactgatgagggcagggctctttctgtcctgtctgaaatcatttgggggaacctgctgtgttgaaagagctcaaacaaaaagcaagatgagtaaataagtcacatatttgcaggaacatgctggaatccaggcctccagctgacaaagacagactggtggtgacctctcgggtctctctgcctccttatcaggctcacacaggccagccaccagatctgaggggtcagctcaaggttggagaccccagcagcctgaaacaagtacccctaggtggactagagagcagggactagagactggggctggaattacatctgtacctggttcaggcaaggttcaggaatctgagactagagccagacagaagccaagacatgggggagggggccagtccagtccaagggaatactrtgaacaaaggcaaagaggcaggaaggaaagaagcacttctcaggagtaaggaggatctgttgtcaatgcccaggaaaataggaggagatagaaacctgatgaccgaggaatcaagcgtcaagacc

SEQ ID NO: 522421 - DNA, 457 bp, Homo sapiens
tttggggtcacctcaggtacagcctctgctctgcaagctaaagttcatgaactgtgtttacctgttggaaagtcagaatggcagaggggaaaggcactaagctagagcactcggggaatggacaagtggacagacattcttttctgagaggcaggaatgacctagacattcygaaattgaaagccagatgttgggataaaactctagactcaatttgaatcgtaggagtgttgacaaccttgatgaaatcctatgactaaaactttctagagtagaggggaattaatggggcctaagtagggtaacccaccttgaaaataaccagatccctctatttatatcagaaacaaatgtttggactctttaagtgccatggtctgaatgtttgtgtctcccccaaaattcatatattgaaacctaatccccaacgtggtggtaattgaaggcagagccttta

SEQ ID NO: 522422 - DNA, 601 bp, Homo sapiens
tgacctaaactaaatgtggctagtctgggctccaagctgcaggttgggcccaatgcctcgtccacaggtccctcttccttcttgaactggcagctatgtgaggcatgatcttctctttgtgatggatggctggagcacaagaaggacataggcaaacatgttgacttttacagtgtaggcttggagttggcacaktgtcactttgggttatgttccatgggccaaagaaagtcacgtgactgggcccagcatcagtggggcaaagaagtgcatgctgtctatagaagtcacggaggggagtggtgaatacatatttgatgaacaataatataatatacccataaaatgtaacagaataacatttttcataatcaataacattgctaaaattattaaacagtttttattttatgtaaaataaaatgaaggcttaacattgcctgggtgaagtttgatataggatttgaagtccatgttcttaaattgttgagttttttttatgacttccattgaacagagatcaggtccatttactggaaagaattgtttgtaaaccgagttctttctatggccatttttcaaggctggaaattgttccatg

SEQ ID NO: 522423 - DNA, 601 bp, Homo sapiens
tgacctaaactaaatgtggctagtctgggctccaagctgcaggttgggcccaatgcctcgtccacaggtccctcttccttcttgaactggcagctatgtgaggcatgatcttctctttgtgatggatggctggagcacaagaaggacataggcaaacatgttgacttttacagtgtaggcttggagttggcacattgtcactttgggttatgttccatgggccaaagaaagtcacgtgactgggcccagcatcagtggggcaaagaagtgcatgctgtctatagaagtcacggaggggagtggtgaatacatatttgatgaacaataatataatatacccataaaatgtaacagaataacatttttcataatcaataacattgctaawattattaaacagtttttattttatgtaaaataaaatgaaggcttaacattgcctgggtgaagtttgatataggatttgaagtccatgttcttaaattgttgagttttttttatgacttccattgaacagagatcaggtccatttactggaaagaattgtttgtaaaccgagttctttctatggccatttttcaaggctggaaattgttccatg

SEQ ID NO: 522424 - DNA, 609 bp, Homo sapiens
ttcccccagagtgaacattctgagagagagagaaagagagagttagaaggcatgctgtcacttccactgtatccyattcaccagaagtgagagactaaattcaccaaacagaaaagtgaaggagaatgaggctccagttttttgggtgagagttgaagaatgtatggatattttgaacaaccacaatataattcttcttttcacagaagcacaaaaaaatttatttaacttgtccaagtttacacagttagcaagcaacacctttgagaaaaaaatccatgtagtctgatacaagcacccaaactcataaccacaatgtgaatctaactgcttttcaattaaaaaagaaagaaagattcccttcaaatctggcatatgcattcacatggagcattcatactgccagtgacagtaccatagttatatggaattagaagttctaacttatcttggccaaactaaagacttagggctgggtagaaggttggagggatgtaaggtcattctcaagatctcatctaggagaagaaaacaaaatggggaagtagaagacaaaatgcttttttaggttgggaaaggactgggagaatcaagcatctagaaatgggc

SEQ ID NO: 522425 - DNA, 609 bp, Homo sapiens
ttcccccagagtgaacattctgagagagagagaaagagagagttagaaggcatgctgtcacttccactgtatcccattcaccagaagtgagagactaaattcaccaaacagaaaagtgaaggagaatgaggctccagttttttgggtgagagttgaagaatgtatggatattttgaacaaccacaatataattcttcttttcacagaagcacaaaaaaatttatttaacttgtccaagtttacacagttagcargcaacacctttgagaaaaaaatccatgtagtctgatacaagcacccaaactcataaccacaatgtgaatctaactgcttttcaattaaaaaagaaagaaagattcccttcaaatctggcatatgcattcacatggagcattcatactgccagtgacagtaccatagttatatggaattagaagttctaacttatcttggccaaactaaagacttagggctgggtagaaggttggagggatgtaaggtcattctcaagatctcatctaggagaagaaaacaaaatggggaagtagaagacaaaatgcttttttaggttgggaaaggactgggagaatcaagcatctagaaatgggc

SEQ ID NO: 522426 - DNA, 609 bp, Homo sapiens
ttcccccagagtgaacattctgagagagagagaaagagagagttagaaggcatgctgtcacttccactgtatcccattcaccagaagtgagagactaaattcaccaaacagaaaagtgaaggagaatgaggctccagttttttgggtgagagttgaagaatgtatggatattttgaacaaccacaatataattcttcttttcacagaagcacaaaaaaatttatttaacttgtccaagtttacacagttagcaagcaacacctttgagaaaaaaatccatgtagtctgatacaagcacccaaactcataaccacaatgtgaatctaactgcttttcaattaaaaaagaaagaaagattcccttcaaatctggcatatgcattcacatggagcattcatactgccagtgacagtaccatagttatatggaattagaagttctaacttatcttggccaaactaaagacttagggctgggtagaaggttggagggaygtaaggtcattctcaagatctcatctaggagaagaaaacaaaatggggaagtagaagacaaaatgcttttttaggttgggaaaggactgggagaatcaagcatctagaaatgggc

SEQ ID NO: 522427 - DNA, 545 bp, Homo sapiens
tttatgtggcccaacatcaggaagctgtaggtaagactattagtgctcactttaattatttctttagaagtcattctgggtctgaagatcattacacccaacttcaaagcaatcttgactcatatttcatccagtctatttcacaattctgcaaaagtaggaataaaatagaatttccatgctttctccaataaggatctttaaataaataacatattcataaagttctcccaagattctattgtacacaaataccaagtacaacttgtagttgtacttaaaaaagagtagttgcgtttaaaaaaagaagttgacatcaactcataactctagcatgtctattcctgaaagcagaaacaatacttgaggctaaggaaataaaacagaattaggttagttagttagcttgtgttattaaagttaactttagatccctcctaagatgaatcacttattcaccctctactgacacaatttgttattttgaagaasagagagtttaggagctaagaaatggtttattttaaaatatctttttaatagtg

SEQ ID NO: 522428 - DNA, 633 bp, Homo sapiens
gaatcaaaatttcccttagacttttcactaagaagcaaagctgtttgtttgccttttctgataaggaattcaaaacatgcaatggtagtaaatctggttaaagaaattgtcaagggaggttttgacttttgctattatttaacattacatcatagaattaaatcatgtaaaatggcagccttatccatctcaatcactaaattcggtcaagtaaaagtctacaaaattctaaatgaaaagttttttcatctcattaatggaaatatctaaacattacgttgtggtttatttttaggaaagaataacagagaagagagcttggatctgaaaagaaaaatgccacacactggtgatgcttccttctagaggctgtggactgcctgacaaacttgctaaagcaaaaaagggcataatagttctctgyagaggaagaattttaaaaagcaatagcaacaatcaggtaacagcagaccaatcaggttctcccaaaatttagtatttgcagttgaaactgtgataagtaattactttcaaaggaatgtagacagagccatcaatccccattcattcagctcgcatttaccgagccaagagctctgctaggcttgagatataaaaatgaatacaacacag

SEQ ID NO: 522429 - DNA, 616 bp, Homo sapiens
aaaagctatactgtcataagatactcataccacttaaaattcaaacactattatgatatatatgcttatataaaatgtttcaaatctgaaatataaggattttttttttcctgaagactaaaggaagaaagatcaccctttctacatgtttcataatatattttccagggatgaaagagaaaatttaacacttgatgggctcaaatcttaattataaaacagaggtttttgtttcaaagcccagtaataataagtatttccataaaatacctacattactggctatattaatggtggccagccataaagttaaagcaaagagaagaactgaaatctagacctctaatcttttttccaaaaatatcaaggataaaggatggtcaggarctcaaccaaaaccaaaaacggtttaacctggtcaccctcccaccatcgtccactctattttgtgacctgctgagccacatcgtgctttaaattttcttgatttagggtctcattttctctgaactgttatgatcacaatggtgtcacataaagaagaaacatggggtgatttgagagaactttaacaaggtctggacatttctctcactaggaagtagctgaccccatt

SEQ ID NO: 522430 - DNA, 595 bp, Homo sapiens
gtagacagaagtaattttctaattacggtatcacactacgtctgcttcatataatttcaaatttttcatgttactggaatttaagaaaaataaactgaagggaatctctattgctttcttccctaaaagacgtgctttttaaaaggcctataagcattacgtaaaaagattaagagaggtgtaaggagctcactacatgttcgggtttagaaagtctcatagctctgaaagatgaggttaattagcatcatacacctccacctacctttagggggtaaccctgcctctcaatttccattagttctgttactttcggcttcctagcaatgagaacatttgyaattgctctgcaactttatttttccagatgttgtcttaattctatctttaaatgaatttgatattcactgtaacttatctatccctgaatttttatttttatttagttcttgatggacttccttcattttcaagtcatattcctaaggagggtttatagagtgctgccatgtttgagaagatctggtgtttttctctatacataaataaaaagtgagttgggtaaatattttcaattcacaccttccttcaaaac

SEQ ID NO: 522431 - DNA, 612 bp, Homo sapiens
attgcattttgcagaaccagatggggaaactggacggattgtgtgtttggatacttgtgtctggaagctacaaaccagaactaattagagacagttgtggttggctgtgacaggagcaagctttacggctggtggactttaattcccagagtgctacatagcaaagagaaaacttatagacacacttctgccagctgggaatctgtgggcacttttgcacagtatttctgtggggtgcttcctatatagaacagtgtctcttatcaacattttaaaactaagtatctctcacataaaacttgacttgttgcttgccttattaaaagctggaggcctgaasgttcccatagattatgtttgtagcctgccttgatgatatatgtgtaaattactatgctctaaagctcattttcaggcctgttgtcctacagaggtttttagtttctgccacaaataaaagatctatggctcacacagggtaaaataaagaatctacagctaacatgaagttgctgagagagcaatggccatgccccagaatctatggatggccaatgatgtccaatgtatgcaaatgtgtttccaccatgacactggatatagaaatattta

SEQ ID NO: 522432 - DNA, 658 bp, Homo sapiens
caataatttttcagtttcactgaaatgtaatgcctttttcgtgatgaaactgacatgttaactaacacaatggctgtcccaagcagcagatgttacaccaagccaaaagacagatatgcccaaagattagaaccagagccttagggtcaaacaggtacaagttccagcttttcacctctaccatatacatgcctctatatggatgctactacagcgtaccggactcatctggaaggagcgtgctggaacttcctakataagtatgaggcaggagccacaggataacatatcagatctttctgaaatgttaattttaccaggtagcaattaaaaatattttcttattaagccaaacatggaataaaatataaaacccatttacagttttaaggaacaggaactctgaaagaaatattggacttgatccactctagatacatgggatatcagcctagtctcctgccttgaatggaatattagtgggaaaaaaatgaacactggtatatcctaataaacatttgaatctttactcaatctttacctttggaagttccctaaaggctcaattcaagccaattctgtttgatgtcctatgtgtaataccaagtataagaaatggctgctctcagagcagagtaattaaaagcagtattaccca

SEQ ID NO: 522433 - DNA, 541 bp, Homo sapiens
tggttatatgaaagtgtatagatacatacacatatgtacacggtacacagtgcttaaaagaaagtgatggcctggaaatacaaataagaagtcaccagtatatagacatgaagtcacccaaggagagcacagaacagaaaaacaggggctgataacagaagttggataatagctataataattaagagactkagaagaagaaatcagagaagacgaaaattgggaacatgtagtatcacaggagctgatatggtttgattttgtgtccccgtccaaatctcatgttcaactgtaatccccaattttggaggtggggcctagtgggaggtaactggatcatgggggtggatttcttcctttaatgctgttcttgtaatagagttctcaggagatctagttgtttaaaagtgtgtggcacctccctgctccttcctcttgctttgaccatgtgaagacgtgcctgcttcccttttggcttccgccatgatcgtaagtttcctgaggcctccccagccgtgcttcctgtagagcctgtggaact

SEQ ID NO: 522434 - DNA, 495 bp, Homo sapiens
cttacaagtaaagtagagatgacaatatttgcccattctatccctcaggattgttataagggtcaaataaaatagaacagtactttgaaaaacataaagttctgactacttatgatagtattcccagtaggagttattataaacattgttaaactaaacatatatccaaaagaaaaaaagtaattgccaactaaaacactttcgattatcatttaaaactcattcttttggaatataatgagaaaagctaaatctgttcctaactttaaatactcaaccacctgtgtctgagtgtcactcttatttactcacratgtagttattttgtggaggaagttaggaggtacaagataaataagacaaaggctaagtatcttttttttgagccgaggtcttgctcttttgcccaggctggagtgcagtggcacgatcatggctcactatagtctcaaattcctggctcaagcaaatctctcacttcagcctccccagcag

SEQ ID NO: 522435 - DNA, 338 bp, Homo sapiens
aatattttagttaaagagatagaataaaccaaataaaagatcagtttaatcgaagttctgaggaagaagttttggcttggatatgtaggcagatggttgtaacactgatcrgaataagggattaaggaggaggatcaggttttaagaatgaattaataagtttcattttggatatgctaagtttgagttgcctgtgtaaatctgaggtagacattctgacaatgtgtaattgactgactttgagtctttggccaagtagtctagccctctaagcttctttcatctataaaacatgaatatacctacttcaaaagagttgtgacattttatgaaaaatt

SEQ ID NO: 522436 - DNA, 338 bp, Homo sapiens
aatattttagttaaagagatagaataaaccaaataaaagatcagtttaatcgaagttctgaggaagaagttttggcttggatatgtaggcagatggttgtaacactgatcagaataagggattaakgaggaggatcaggttttaagaatgaattaataagtttcattttggatatgctaagtttgagttgcctgtgtaaatctgaggtagacattctgacaatgtgtaattgactgactttgagtctttggccaagtagtctagccctctaagcttctttcatctataaaacatgaatatacctacttcaaaagagttgtgacattttatgaaaaatt

SEQ ID NO: 522437 - DNA, 118 bp, Homo sapiens
tcatatgttcatactttattccaaaagattctatatttktataagaaaataaaattacaatgagcttttttcatattaagaaaaggtctgaaatgtaaacactagattttgtagtact

SEQ ID NO: 522438 - DNA, 675 bp, Homo sapiens
tgctctgcagtaattatctccaattattaatacaggtgataaagacaaaaagctcctatccttctctttctgtaactttgacagtttcagtaactatagctttatcattacaaagcaatagagaatgcatttattaaaacaagtaacggtgatatattagagtggcattaaatctatggtagtttccattatgcaatttctggagaaggaatcagacaagtgctacaagtagaagcagacattctgcaggcttttatttatcatatttcaaatgtcactgccaacttacttctccagcactaacaataatagctaagcacttaagttctttgaaaaagagaagcataactaaaatctgttctttctgatttccaggtgttttcactgatcatgttttatattcagttcactgaagcaatatatttcctcttggtatgactaaataccagtgtcttgttccctagcttrtatttcctaggtgactggtagaagcaattttactaaacccaaaaaagaatttatttcattgcagtaaacatttcatgtatacaaagaaatcagcaaaacaagcaagcaaacaaaaaataaaaacattttagtttgtagacaccactttctgaaatataatattcaagtttctaattatgaggatgttaaaaaagaaataccatgttg

SEQ ID NO: 522439 - DNA, 640 bp, Homo sapiens
gtgtgaaacatatggagagagtaaaaggctgtgctaatgtctgctggagtcaacgattcctaagtggagggtctgtgccattttgcttttccttctttcttataattttctgcagattcttcattttctacagggcatgtctcactccgttcagctttctgtaacaaartaccatagactgggtggcttataaacaacaggaatctatttctctcagttctggaggctggaagtccaagattaaggtgcctgcagatttggtgtctggtgaagccacctccccattggacagccgtctgtctttttgctgggtggcatgtggcagagggggtgaggggtctctccctggcctctttcataaggaaactaattccattcatgacctaatcacctccccttgtcctagcatcatcagcctggggatgaggtttcacctcccctcctcctagtatcaccagcctggggatgaggattcacctcccctcctcctagtatcaccagcctgaggacgaggattcaccttccctcctcctagcatcaccagcctggggacgagtattcacctcccctcctcctagtatcatcagcctggggatgaggattcacctcccctcctcctagtatcaccagcctgaggatg

SEQ ID NO: 522440 - DNA, 615 bp, Homo sapiens
accctctaagcatggacagaggaggaggtgctggaaaacagacggagaaggaagggagggagtggccaggaagcgctctgcagcagcgactcagcgtcctgcatcttcatggcatccaaggccccatgcccagaggagtggcggcagaggaagctgggtatggcttgtggggtgcagtccccccatcactatctggggccatttgtgccaaaaccaatgcactgccacagcccctgagtccagcacatcctcgcaccctgcgtccctggactgtggtccaccctagccagcagcacccagagctctcctaaccaggcaggagctccatgtgacagatgaggaaactgargccagggcaggtggcgccgacctcactccagaataggcacggacagtgggacccagaatgcccacgggcaccatgttgggagctggatgggcactgagggtgaggctggacccctttctgaaggagggacgtggtgtctgctcctgtaccccatggtgggtgctcaccatctccccagcccacagtttacttggacagccccacagtgacccactttctccccgaaatgggctggatctgcctctaggtgttttctgtctcggccc

SEQ ID NO: 522441 - DNA, 615 bp, Homo sapiens
accctctaagcatggacagaggaggaggtgctggaaaacagacggagaaggaagggagggagtggccaggaagcgctctgcagcagcgactcagcgtcctgcatcttcatggcatccaaggccccatgcccagaggagtggcggcagaggaagctgggtatggcttgtggggtgcagtccccccatcactatctggggccatttgtgccaaaaccaatgcactgccacagcccctgagtccagcacatcctcgcaccctgcgtccctggactgtggtccaccctagccagcagcacccagagctctcctaaccaggcaggagctccatgtgacagatgaggaaactgaggccagggcaggtggcgccgacctcactccagaataggcacggacagtgggacccagaatgcccacgggcaccatgttgggagctggatgggcactgagggtgaggctggacccctttctgaaggagggacgtggtgtctgctcctgtaccccatggtgggtgctcaccatctccccagcccacagtttacttggrcagccccacagtgacccactttctccccgaaatgggctggatctgcctctaggtgttttctgtctcggccc

SEQ ID NO: 522442 - DNA, 498 bp, Homo sapiens
cccagccttggtagctgtttttcctcctctatctttcgagcagacgcatttggcagacagcagattttgtcatttttcttcacttgggctgttattcctgagtaataactcatgctcacaggaaggttggacttctcagtaatgatattgaaattggatccctgggcacagggcatgcagcaagccagtgaggccctagcatgtcaatgaggcgggcctggcctggcagtgcccagggctgtctgtctggagaggggctgctcttgtacagcatctccctgagccagggcctgggctgcacctcggcaaccycccaactgcctccaacttgcacagcagaaccacgagaaaatccccagtgagtgtctcctagttaaggacctaatgtgtcttacccaggagtgaccatgtcccagctctgagcacggacatctgtggtaagaatagtaccacgtgcccgggagtcaggcccttgtcactgagtccagttcagaaagc

SEQ ID NO: 522443 - DNA, 498 bp, Homo sapiens
cccagccttggtagctgtttttcctcctctatctttcgagcagacgcatttggcagacagcagattttgtcatttttcttcacttgggctgttattcctgagtaataactcatgctcacaggaaggttggacttctcagtaatgatattgaaattggatccctgggcacagggcatgcagcaagccagtgaggccctagcatgtcaatgaggcgggcctggcctggcagtgcccagggctgtctgtctggagaggggctgctcttgtacagcatctccctgagccagggcctgggctgcacctcggcaacctcccaactgcctccaacttgcacagcagaaccacgagaaaatccccagtgagtgtctcctasttaaggacctaatgtgtcttacccaggagtgaccatgtcccagctctgagcacggacatctgtggtaagaatagtaccacgtgcccgggagtcaggcccttgtcactgagtccagttcagaaagc

SEQ ID NO: 522444 - DNA, 498 bp, Homo sapiens
cccagccttggtagctgtttttcctcctctatctttcgagcagacgcatttggcagacagcagattttgtcatttttcttcacttgggctgttattcctgagtaataactcatgctcacaggaaggttggacttctcagtaatgatattgaaattggatccctgggcacagggcatgcagcaagccagtgaggccctagcatgtcaatgaggcgggcctggcctggcagtgcccagggctgtctgtctggagaggggctgctcttgtacagcatctccctgagccagggcctgggctgcacctcggcaacctcccaactgcctccaacttgcacagcagaaccacgagaaaatccccagtgagtgtctcctagttaaggacctaaygtgtcttacccaggagtgaccatgtcccagctctgagcacggacatctgtggtaagaatagtaccacgtgcccgggagtcaggcccttgtcactgagtccagttcagaaagc

SEQ ID NO: 522445 - DNA, 656 bp, Homo sapiens
tgtctgcatctcgtgcctgtctaccggggratcctgaccccaccccctgggaagaccgtaggggattacgtgaatgacagggcagacaccagcccctgatacaagcaaccccacagggccgctgaaccgtgaccaggattcctgtcctcagggaggtgattttggacccaccccacccctccgtgcaggcaggtcgcattcaagttccttccgtgacccgcaagaggttcggaggctcccaggtccccagccccagcccctggtctgtcacagacgatgggcggttccgcagatcccctccaggctctgcccaaagcttgcctgtctctcatctgggataagctgcctggtgtgggttacagtccagaggaatgtcacccgcaaccactggacatggggagccccaaagaaatcagggttggaccaagggccgaaaatgaaggaaaaatgtgcagggtgagactacgtagggggacagcgctacatatccatggggaacaccgagacctgaaacatccggggacaggtgtgtgcccagttgccagtgacaccaggctctgcactgccgggagaggccaggcagagccatcttggtgagaaagcaccggatagccctccccagacaagcgccccctcccctcattggtcagggaagc

SEQ ID NO: 522446 - DNA, 656 bp, Homo sapiens
tgtctgcatctcgtgcctgtctaccgggggatcctgaccccaccccctgggaagaccgtaggggattacgtgaatgacagggcagacaccagcccctgatacaagcaaccccacagggccgctgaaccgtgaccaggattcctgtcctcagggaggtgattttggacccaccccacccctccgtgcagrcaggtcgcattcaagttccttccgtgacccgcaagaggttcggaggctcccaggtccccagccccagcccctggtctgtcacagacgatgggcggttccgcagatcccctccaggctctgcccaaagcttgcctgtctctcatctgggataagctgcctggtgtgggttacagtccagaggaatgtcacccgcaaccactggacatggggagccccaaagaaatcagggttggaccaagggccgaaaatgaaggaaaaatgtgcagggtgagactacgtagggggacagcgctacatatccatggggaacaccgagacctgaaacatccggggacaggtgtgtgcccagttgccagtgacaccaggctctgcactgccgggagaggccaggcagagccatcttggtgagaaagcaccggatagccctccccagacaagcgccccctcccctcattggtcagggaagc

SEQ ID NO: 522447 - DNA, 524 bp, Homo sapiens
ttttccttaataaacctttcctttataaagttggcaaactgtagactactaaatggacaagtttaagcatgttgttcgatgccagcatgacctagaatttctttaccggtaagcacactagctccttgtcacagacagtgttggtacttttcagccacatattccagaaaaagtccttacacttttgaagttttataaatatcaatttgtggccttggcgcacgttagaggagcaacgtgtggctttgtaagtgcttaacagctatttgcaagctgttttcttcttggtgcaacttagaataatcaatcagcagttagaaaatgttaaataataatctcaaagtgaacaacttgtatttctaacaatgagaaggttttctctaatttttactacttttcatctctgcatttctggcgtatgaacaccaaggtaaaaatggtttcagtaaaaaagacaaaaatgttaagtcacgaactgaaagttttttcagaaaggaagtggkagccaatggaatggcagtaga

SEQ ID NO: 522448 - DNA, 608 bp, Homo sapiens
attttcagccatagaacacatttgccctctactcaaggaaaataatgcaaattctcattcccttcttatatccagaaaaacagtccaagctctctggatgatgttcagtgtagtaggctgaataatggtcacccaaagatatgacatcctaattcctgggacctataaatgttactccataagtaaaaagcaactctacagatgtgattaaggatcttgacattggagattagcctggattagctgagtggactttagatgcaatcacaagtacccttaaaagtgaaaggcagaaagaaatttgagacagaagagaagacagaaaaggagaaggccacgtgaagatggatgcagagattayaggatttggatgcagcaaaagtatgccatttaccacccaaactggatgagataaggaatggtcttccagagcctctggagggaacacagccttgccaacaccttgatttcagccaaggaaactgatgttgaacttctgactccagactatgagagaaaacatttttgttatttgaagtcaccaagtttgtgatcatttgttacagagccataggaaatgaatgactgacagtgactcttcatgatca

SEQ ID NO: 522449 - DNA, 657 bp, Homo sapiens
ggaccagctatcttcatgttatgtttacctataaatcctaatctatagggaacagtaattgagaagtgaagaacagaggaaaagcctttcttctaatcctcctctgagaagagagtagtagcactaaatgtttctatatgttgttcaaagcagtaacatgtggagagggaaagtagagtttcctttatgctgagtcctacatactagggaagcatttttaaatgtattatctctttttatcctagcaagaaccctacaattcaggaaatctatattcccattgtacagattcagaacttgaggcttagagagatatagtaacttggttcatgtcacaaggtaagtgtagagcagagcttggactcaaacgtktgctttgaaatactacatggccttttatcacatacactcatatggctcagttggaatattattttttctgtgacacttcctttattcctctgatcatatataaatattgttctactctcagcatctccatatttacttagtagtatgtagatttcaagccactctagaatttttgattatttatttaggtgtatttgttatctcctttacttgattttatgctaggtgggagagaggcttatttctaaatcctgttggtatacaacataggacctaacaaagatt

SEQ ID NO: 522450 - DNA, 589 bp, Homo sapiens
ctctttgataatactggggatagaaatcaatttgacctaagaaggtagaaaatgaattcatagagttggcaatgttgagttaggcttttacattaaagtaggaattttttaagcggagaaaaagttgccagatgaccaaaaatagcttatctgttcatgtcaaggcttttaccatggaaaagagcaaaaaccaactaaagttaacttaaaaaaaaaaaagcgcaggcttatttttaaaatgcacataaatctcaatgaagatggaatccagaagttgtcaggaatcaaggcatttaatctctgtctctctcggtctctgtctcattctgtttctgtctttctcagtgtcctcgatgatggctaaatttcttcttccaagcctgtgtatctttctgtttctctcttttgtttaacttcctcctctcttattttatctgtaaacwctgagctgatggctttccagccgcagaacctacacgacttcctggctgaattatccgtggattactatatctatatatactgtatgtattcctcaatgtacaaattttatgttctcagtggggaaatctcattggcctcatttatc

SEQ ID NO: 522451 - DNA, 604 bp, Homo sapiens
catgcctccctagaatactgctgagagccaacaaacatcatgaaattatgtgagtttgcaatagctggaggaaggactgttaggcataggtagacataagtgccacaatttagtacaaaggcaaaatatttaatatagcatggttttagatagctgaaaataattcttttagagaacaaggatttgaaaaattgaaataaaaatgtttatgataaattaagagaaggaaaatatagaagatcaacagaaatcaagtatgtggggatattamatgagcacaggtttgaaaaggtttgcatgaatgctggaaaaaatggcttaggtagaatatacatgtaaaagttacatttatagtgtcaggaatacaaaataacaaattatgttaaaatcttgataagatgattttttaaaagaatgatgtgtgtttgatcatattataagcaataagacaaagacaaaggagacttatctcttgaagatctaatattaacaaaacaataaataaaataacaacattaaacagaagcttaatctccaatctcaaagtgctcaggaagaatatgtttaagaaggaatggcatctagggtataggaagagacaaca

SEQ ID NO: 522452 - DNA, 653 bp, Homo sapiens
taaaatcaagcagaaattttcattgatcttaattttttttatatctaggcatgcctatgtgagaacattttttcctgttagaattttaagtaattttgcagcatcacctcattttatcagtctaatgtcaacaattgaattaacatatccctaaaaatgaatatttttaatgtgtctagtattatcttttatgtaggggctttatcatataaaatacagggctgcagctcttaaatatcttaagatgataaacataatatgcttgttttgaaaagcattaagtaatacatagtctgacattttaaaatgaaaacaaaacccctcacttatatggattactttagtaaaatgcaaatcaayttccatttgttagcgatagagaacatgtgtagtcaacttttctattcatgttgggttataggctactatagaaagaacgtgaaattcaagtaccgaaaccactaaggggctagcagatttgcaaatattttggggcttttaaaatttaaagttttatatacatagtcatttttttttgaactttaaagatcagatttatttggagaaaacaaaaaacacacaacccaaaggatgagcttttacatctcaagacatctcccaggtaataagtctacagatgacaaatcattttc

SEQ ID NO: 522453 - DNA, 608 bp, Homo sapiens
tccccggatgccttcttcctcgtccttccccagccggtgcttctttccccatttggctcatgcccatccctgctgacctctctgcagagaagatgacactcagagctggatggcactttgagatcagatagtccagaggcttcatgtcacagatgggggcacagacttgaagggacagtcattgacctggccaagattcctcaggtttctagggtccagtccttgggtgccagtcactgttccttccatcagtccacatgtccagctccatctctgttccctcagaacagacatggaggactttgggacacttggtttggcacttttttcccaggacaaattgatttccccatcaatcctgggaccacctggtcccacctcctcatgccttctgctctggtggctgcatttgcttttctgccattttcctcatttgttgaattaggaggtgggctccaggggttggagcaagcctcttggagtgacagtcatcaggatatccttgatgggccctgcttccttgggractggcttatctgtctttgggaagaatgatttcccaccatcttcctggtcgaatggctgcaggagttcatttcccacttttg

SEQ ID NO: 522454 - DNA, 606 bp, Homo sapiens
tctgactcattgaaatgaagtcaaaggatattcatagtaagtgcttaataagtggccaccattgtagggactataaaagatacataagataagtctctgctcctaaggagcagactccctcattaaagagaagccacaaaaacaaagaattaatgaatcataaaaatagtgcatagtctaatatactccagactacatatatgatctacatgtggagaagggaaggatgaacacaaactgatgtaatttgtggagaatgagtagaatgtggatgatccaaaggaagggcggaaatgttccaagtaatggatacagcatgtgctaagaaacatactcctcctactcgatggagacgtgcaaggcgcatgtggtgtgtggggagctggattacagaggtcctgaacactatataaggttgcatccttgarcactgccatagtgattgatgaaagacatgatatgaggtaatgaatgtgacggcatctcgaagaccagcaaggaggccagggctctgattcaggtgggcatgaaaggactcctccaggagggcacagaagggaaaatatgatttgtttccatacacggatgcgttgtggggggccatgg

SEQ ID NO: 522455 - DNA, 576 bp, Homo sapiens
tttaactaaggcaaatacaatgtttaaaatagatttttttwaaaaagagagagcgcaacactattgtctgattgaagcaggacaggaatgtaggaactctgcttttgcttctacctttctcaaaaagccccttgagccatatagggcaaagtttgaaaaccaccatcctgaagcagaacctagacttcttagcatggtatagaagccttttatgattttgtccatgccttttttcgtgttattcctggacttttgccctggatttcagatatgctgcattacttgcattcaccgaacactcattttttttgcctatatttttgcacaaacttttcatagaatgcctttacccattttgtctatcagctaaacttctgttcttgtctcaagtattaattcagatatcacctcttcaatgaagctttctctgattttccaagtcaaagttaatcttttttttctgcttttctagtatctcttcacattggaaagcaggaagactttgttatatgtgattcagcactagtagcttgaacttacaacctgttatatgacttacaatatttgcatttaaaa

SEQ ID NO: 522456 - DNA, 266 bp, Homo sapiens
tgtactctacaacttaggaacatttataagcaagacatccagggtgaattgatagaggttttaagtgctgaaaagtaaggattcaygtgatagaactgccagcaaaaattgctcactatttttaaaggtctaatgtcactaagaagacaaattaaatgttttctgagatctctggaatctgcatgcatagagtaagtagacgtcatttgaagatggtaacaaaaaagccctacattgataactgaaatgtcatcactggggattta

SEQ ID NO: 522457 - DNA, 433 bp, Homo sapiens
cttttctggcttaggtagggtcacgaatttcattttcttttatttattttaaacttcattttattttcatgacattggaaagataaatatgattcatacagcttgatgttgtagctcaggtgaggctatggaatagtagctggcttgctgagtcaattaagcaataattaatcacttattgactgcagaaacataccaagtttatttaaagtttggtgtgatggcagyagggtatgtgtgtacaaatgtgtgtatgcgtctgtaaagtgtcttctctggtctccagaaacctagagatgaaattgtgttcctgaaaatagcctgattaaaatgcactctttcctgaactcttgtggttgtctcattggtttcccacatccacttttacttatactcatatcagcctgagcaattggagccattggcctggaac

SEQ ID NO: 522458 - DNA, 639 bp, Homo sapiens
aacctttcctccaagctctagtcttatatatgtgcctagctactgggmatttccacatggattatatagaaacttcaaactaaacaaattaaactcacttattttcctcataaacctagtgcttttttatttgttgaaagtaccatatgtcaactggaccgaaaacctcaatgattgtggattcttaattatttctgtctcccaatatccagtcggttgcctcagactgtaagttggctgtttatagtctctcttgttgaattttcttccttggcattctcaatggcatctctgtagttcaggccccaatcccttcacgaccagatgactgcttcagactcttggttaatctgcctacttctaaaatctccagcctaaaccatccagcaagtttccacttatttaatcttactaataggtgaattcaaaaagttctctacctccctaccaactacaaattaaaacctaaacttctttacttggcattgtttcccaaaaggcagtcttaacttacctttccagtcttatttcccattaatactccatatgaatcataggccccaaccaaaagtgcctactcactgttgaccctaatgccttctgtcttcttgcatctatgactttcatatagtattccag

SEQ ID NO: 522459 - DNA, 600 bp, Homo sapiens
tgcaccatgatggatggataatattgggaatgaccaaaagcaaatgggatggcttttcaagagagatgatataacatgatccaaaggatagatgtaaaaatgaacaacttcagaacacaggaaaggatcagcagttgcagaggggccactattaagaaagagtgagagggccgggtgcggtggctcacgcctgtaatcccagcactttgggaggccaaggcgggtggatcacctgtggtcaggagttygagaccagcctggccaacctggtgaaaccccatctctactaaaaatacaaaatttatctggcaggcacctgtaatcccaggtggcttaatggtggcaggcacctgtaatcccagctactcgggaggctgaggcaggagaatcacttgaactcgggagtcggaggttgcagtgagccgagatcatgccattgcactccagcctgggtgacatagcaagactctgtctcaaaaaaaaaaaaaaaatagtgacagaggggtgaacctataagggagaattaagatactaagaccagtacaccaatgctgtatagagcataaatggttcatctgggaaccatagtctttgcaataa

SEQ ID NO: 522460 - DNA, 600 bp, Homo sapiens
tgcaccatgatggatggataatattgggaatgaccaaaagcaaatgggatggcttttcaagagagatgatataacatgatccaaaggatagatgtaaaaatgaacaacttcagaacacaggaaaggatcagcagttgcagaggggccactattaagaaagagtgagagggccgggtgcggtggctcacgcctgtaatcccagcactttgggaggccaaggcgggtggatcacctgtggtcaggagttcgagaccagcctggccaacctggtgaaaccccatctctactaaaaatacaaaatttatctggcaggcacctgtaatcccaggtggcttaatggtggcaggcacctgtaatcccagctactcgggaggctgaggcaggagaatcacttgaactcgggagtcggaggttgcagtgagccgagatcatgccaytgcactccagcctgggtgacatagcaagactctgtctcaaaaaaaaaaaaaaaatagtgacagaggggtgaacctataagggagaattaagatactaagaccagtacaccaatgctgtatagagcataaatggttcatctgggaaccatagtctttgcaataa

SEQ ID NO: 522461 - DNA, 606 bp, Homo sapiens
tctaagccaagagacatccagatgaaaagcagaaaagccaagaaatcatttagataactgaacatggtggtgtctagaagatttggatgcttcgcgaatcttttccttttatccattttaatccaggggtttactgtttccgccactgatcttagatatttgctcactggggctggcttgtttcaatttgcctatggcttgttcagaaatacttatagacacttgacatgtctgcaggagatttctggcagatgaatcaacaacacatcaaataatttcagaaaaatatataccattacatatcttaataattatttatgagacattttccaaacagttgttaatttagaagacaacacttttagactcctttgactgaagtctgaacttgyatgttagtttagtcaagcagctgttttgacacacatacttcctaacaaatttctagttgttttgatgcccatcctgaaagaagacctcctaggcatatgatggcacaattattatgactagctgacatgattacccctaaggttttgtcttctggagagatttcatctccaaaatttgttaaactaactgaaagactcacatctttttatgttc

SEQ ID NO: 522462 - DNA, 542 bp, Homo sapiens
actttaggcaagctactcagcccctcttaccttcagttgcctaatttctaaaataaagataacaattcctatctaactaggttgctaaggcaataaagtaggtaaacagtacaatgcctcgcactttgyaaatattcaataaatgttagggtacttttttctttccttcatacttgtacaaaataagtgaacaaatcaaatctgtgtgattgaactaagtaaaaataattaaaacagtttaattcggtggaaaaataaagcttgagtatgtcatttggactccttaatacataagtttattcctattgccccagaaaactattaaaatatacaggagtttttgatgcatgacattccttcagaaccaatggcaaaaagccatgacaagtggataattcttaagagttatatttcgaagtgcctataaaaggctctcaacgtcactgtctaaatttgataagattccttcatttctgggaagacatcagcattagccaatttatgtctgcatataaagctgtcccaggtgcattttggaataa

SEQ ID NO: 522463 - DNA, 542 bp, Homo sapiens
actttaggcaagctactcagcccctcttaccttcagttgcctaatttctaaaataaagataacaattcctatctaactaggttgctaaggcaataaagtaggtaaacagtacaatgcctcgcactttgtaaatattcaataaatgttagggtacttttttctttccttcatacttgtacaaaataagtgaacaaatcaaatctgtgtgattgaactaagtaaaaataattaaaacagtttaattcggtggaaaaataaagcttgagtatgtcatttggactccttaatacataagtttattcctattgccccagaaaactattaaaatatacaggagtttttgatgcatgacattccttcagaaccaatggcaaaaagccatgacaagtggataattcttaagagttatrtttcgaagtgcctataaaaggctctcaacgtcactgtctaaatttgataagattccttcatttctgggaagacatcagcattagccaatttatgtctgcatataaagctgtcccaggtgcattttggaataa

SEQ ID NO: 522464 - DNA, 460 bp, Homo sapiens
tccaaatagacctgataatttcattttctgaaatatactacaataaacactgcacttgwagtaataagacaccttgatatgtgtctaggtctgttgttaactggttgagtgatcatagacaaactattttccttctttaaatcttagttttcatatctatgagatgaagcaattaagatttataagcttttagagtggaacctattatttctcattgaacccagttgggttatttgttgtatgagttctgaactgctcaggggtccagttatttgtaaggaaaccagataggaacttcaagacttatttgactgctactaaattcagcctcagagatatttaacttttcactttggctcaccttgcgccagactcactgtcttggccaataagctacccagccataaacaagggaaccagggaaaacagtctgttaatactgcttttaagcttgagaaag

SEQ ID NO: 522465 - DNA, 590 bp, Homo sapiens
ctggggaaagaggtgtcgcaggtagaggtgtctgtttctcttaccttctagtcacagtttttcaattctttgtggccccagagattgacacagtctcagttttgagttctgggatattgctagtaacaatcttggcactgaatagttgtttttaattttatgtgggggagaatgaagccagattgcttctactccaccattttggtgactgtcccttgggttttctatgtatacaagcacacatgagtgaaaagagatagaaaatttaatctcatttttccccactatatatacgttttttctatcttatttcattctctagaatagcattatctaatagaatttcctgtgatgatggaaaagttctatagttgcactgtccattatagtagccactgaccatgtgttgctacggggcacttgaaatgtggttagggggccaggtgtggtggctcacgcctgtaatcccagcactttgggaggccgaggcsggcagctcacctgaggtcaggagttcgagaccagcctggccaacatggtgaaacccggtctctactaaaaatacaaaaattagctgggtttggtagcac

SEQ ID NO: 522466 - DNA, 301 bp, Homo sapiens
aaaactgggtaaacctagtttatttttaatatctagtctactgtattcaaacccaaggtctctacccaaaatcactgttaaaatcagttattgtatctctgtgcagtagttcctgccactgggtaggaagctgtgtggagacatatggcagggcctagctgttggtgcagagggtatatttactttgggaaattttatcaacctgtattttttgtgatttgtgtacttttctrtatgaatcttatataaaaagtttttttaaaaaattgactcaacctatactaattggatcatcactaat

SEQ ID NO: 522467 - DNA, 515 bp, Homo sapiens
ggactacaggcatctggctrattttttgtagagacaaggttttgccacacaagcttttttttttaaaaaaaatcttttaaaaattgatacataataattatatatgtttatggatcacagagtaatgtttcaatacacacaatgtatcagcacaagctttttaaggcagtcaggccctctattgtaaatgtagcctttggagatctcactgctgttgctgtcacttgaacataacatctagtgggtaatatgaaaattcctggaggaataaacttttcatggcctgactttttttttttccttttaagataatggtgaacattattttcagttttgcaaacatttcctagcaattcttagtttttgttgtggctgttttatttctatattgtgaagtcagctattttaatgaaaaaataatgaaggtttagttactaaacatgagattttctgtcactaaattaatttccagtaaatgtaggtgctattttgtaagtgcggggaatatgcctctc

SEQ ID NO: 522468 - DNA, 515 bp, Homo sapiens
ggactacaggcatctggctgattttttgtagagacaaggttttgccacacaagctttttttttwaaaaaaaatcttttaaaaattgatacataataattatatatgtttatggatcacagagtaatgtttcaatacacacaatgtatcagcacaagctttttaaggcagtcaggccctctattgtaaatgtagcctttggagatctcactgctgttgctgtcacttgaacataacatctagtgggtaatatgaaaattcctggaggaataaacttttcatggcctgactttttttttttccttttaagataatggtgaacattattttcagttttgcaaacatttcctagcaattcttagtttttgttgtggctgttttatttctatattgtgaagtcagctattttaatgaaaaaataatgaaggtttagttactaaacatgagattttctgtcactaaattaatttccagtaaatgtaggtgctattttgtaagtgcggggaatatgcctctc

SEQ ID NO: 522469 - DNA, 682 bp, Homo sapiens
ctggtaggtagtgaagccaggattcccatccacttatttgggatttcaaagttagcacaagtaattactttttaatgataaaatatttgtaaagcacctagtagagacttctttacaaaaatatttgtaaagcacacgtggagacttcatgtattctgattcaggagctggagagcttgtttaaaaggtaaaccccttaagtcactattgtatttgaagcattccagtggcttcccatcacattaagaataaaatctcgtcagacccttgagcagaccttgcctatgtttctgacctcatcttctgcccctctccacctctttcatactgttctagctaaacaggcctcttgttcttcaacctggagtgtgagttcatcaatctgaaatactcttcactgagattgtcacatgatgagtttctttacttcattcagttttttactcaaatgtcatctgtccactgtaactgaaatgtgcctcacttccaatattctctcttctcttcttaacagtgcctaccactgtgttgtttattgtctctttcccacgtagacaggaaccttgtgtgtcttacctctgtaacccctaccatgtgtcagccacataatagacacctaataartatgtgtgaatatgggaatgaatgaatacccaagaggatgaagtgtaccctctgatca

SEQ ID NO: 522470 - DNA, 574 bp, Homo sapiens
agctactagggaggctgaggtgggaggatcacttgagcccgggaagtcgaggctgcagtgagccgtgataccaccactgcagtccaggctgggtgacagagtgagaccctgtctcaaaaaaaaaataagaccaggtgtggtggctcatgcctgtaatcccaacactttgggaagcggaggtgggtggatcacctgaggtcaggagttcaagaccagcctggccaacatgatgaaaccccgtctctactaaaaatccaaaaattagctgagcatggtggtgtgcatctgtagtcccagctactcgggaggctaagccaggagaatcgcttgaccagggaggtggaggttgcagtgagccgagacgatgtcactgtcctccaacctgagcaacagagtgagactccatctcaaaaaaaaataaaaatttaaaaatttaaaaaagaaaatgaaaaataaaaagagaagctgatrcataaatgataactgctgatcactgtagttgcctaaatcctaataaagtgtttatcagagcaggctgacagctcagactgtctgcagaatgcattcccttgca

SEQ ID NO: 522471 - DNA, 212 bp, Homo sapiens
ctgtaaggacaagctgggaggggagggtgtacggcaggaggaatgggccagcagagagcccgcagcaggagcagcctggcatgatggaggtgccagtgcagggagagaaggcgcgagcagcgttggagcggggtgtggaccttggagaccctgtaggctactgaaaggactttggatttgtccycgtgagaaaggagagccatgggagagta

SEQ ID NO: 522472 - DNA, 463 bp, Homo sapiens
ctgcaacctccacctcctgggctcaagcaatcctcctgcctcagcctcccgagtagctggaactacaggcatgcgccaccatgcctggctaatttttgtagttttagtagagaagcggtttcaccatgttggccaagctggtcttgaactcctggcctaacgtgattcgcctgtcttggcctcccaaagtgctgggattacaggcgtgaaccactgtgtcagacagagtagactccgtcttaaagaaaaaaaagttttggtgccattccatgcaacgtggagagaaatgtsgcattcaggagggaaggctcccagacacttaactctccactccaggccagctttctggaggcaccagggctttgtcaacgcatagatgaggagtcagccattgagtgtgacagtgtgaggcagtggagaaggcatagaagctggaagctggaagtcctgccttcctaaacca

SEQ ID NO: 522473 - DNA, 463 bp, Homo sapiens
ctgcaacctccacctcctgggctcaagcaatcctcctgcctcagcctcccgagtagctggaactacaggcatgcgccaccatgcctggctaatttttgtagttttagtagagaagcggtttcaccatgttggccaagctggtcttgaactcctggcctaacgtgattcgcctgtcttggcctcccaaagtgctgggattacaggcgtgaaccactgtgtcagacagagtagactccgtcttaaagaaaaaaaagttttggtgccattccatgcaacgtggagagaaatgtcgcattcaggagggaaggctcccagacrcttaactctccactccaggccagctttctggaggcaccagggctttgtcaacgcatagatgaggagtcagccattgagtgtgacagtgtgaggcagtggagaaggcatagaagctggaagctggaagtcctgccttcctaaacca

SEQ ID NO: 522474 - DNA, 608 bp, Homo sapiens
aatgttagagatttaacaagaactgcatgtattccctgttatgtgcatgtaggtatgagtgtatgtgtgttatgagtgtgtatgtgtctatatgtatgtgtgtgtttgtgtctgttggggagagaaatgggataaaaaggatcagaatctcacgtagacttttcctaagtcattttccccccaaagtctcatttgtccacctctatgaaacttacttggctgagaactgctgccaaatgatccattttctaatgtgttagtaatcactacatgaatcctcttgagaaagagctgggccmggagaacttaatgacttccaaggtcacacagcaaatccagggccgagcctggttccccgctcctgttccaggctcctcccatgccaccacatcatcaggcttgacatatgttcgccttttctcctttggatctcagctcacagggacatccacagccagatacgaattatcacctgaaggcattaattttttattattaacttgataccaaaggaaacacatgtaaaaaagtgaatgctttgttcctaagtgcatttctctccataatttcagtgagttctgtgtgggtgacagtttttaataaaattc

SEQ ID NO: 522475 - DNA, 639 bp, Homo sapiens
tttatgaaagtgagataaaatgacaattgccagaaaagtattggatgactttccattttcattatgaaataagataatctgacccacagtactccccactcccattctttgtcatgaccaggcgagataggtttgactgcaaatgctccttttttatttatttttaattttttatttttttgagacaaagtctcgctcttgtcccctaggctggagtgcaatggcacaatctcagcttggtgcaatctcggctcacagcaacctctgcctcccgggttcaagcgattctcctgyctcagccttctgagtagctgggattacaggcatgtgccaccatgcccgactaactttgtacttttagtagagatggggtttctccatgttggtcaggctggtctcgaactcccaacctcaggtgatccgcccacctcggcctcccaaagtgctgggattacaggcatgagccaccgtacccagccacgctcctttattattagcaaaaaatagtcctcataccatggtcacatgagagggaagtatttctttcagaattataaaattccttcaaagtattttctgttaattaattttaagatgcacacttggcaatcttggatagtccacttcccctctagggac

SEQ ID NO: 522476 - DNA, 606 bp, Homo sapiens
tctttcacagatcctgctggaatatttgtgaaaagaatgaactatatggaacaaattcataaatacctcagagagatctcggtgtattcacgaaatttgggttaaagatagaactgtgttcacttatatgaagcatcctctgtgtttgatccaaagcaaacagggccccatttaatcctcactgcatcccgggaagcagaaatgctgtcctattttacagaagaggagctggatgtgtcaggccacccgtctcctgggctgagcggcctggttccagctctcacaatggcaccacttcaccattgttccctgtattggcttctgtaaatgccctctcttgttgggaayaggccccctaaaatctggccataaactggccccaaaactggccataaacaaaatctctgcagactgttacatgttcgtgatggccatgatgcccactccagacggttgtgggtttactggaatgagggcaaggaacacctggcccacccagggtggaaaaccacttaaaggcgttcttaaaccacaaacaacaacatgagcgatctgtgccttaaggacatgctcctgctgcagataactagccagacccatcccttt

SEQ ID NO: 522477 - DNA, 606 bp, Homo sapiens
tctttcacagatcctgctggaatatttgtgaaaagaatgaactatatggaacaaattcataaatacctcagagagatctcggtgtattcacgaaatttgggttaaagatagaactgtgttcacttatatgaagcatcctctgtgtttgatccaaagcaaacagggccccatttaatcctcactgcatcccgggaagcagaaatgctgtcctattttacagaagaggagctggatgtgtcaggccacccgtctcctgggctgagcggcctggttccagctctcacaatggcaccacttcaccattgttccctgtattggcttctgtaaatgccctctcttgttgggaataggccccctaaaatctggccataaactggccccaaaactggccataaacaaaatctctgcagactgttacatgttcgtgatggccatgatgcccactccagacggttgtgggtttactggaatgagggcaaggaacacctggcccacccagggtggaaaaccacttaaaggcgttcttaaaccacaaacaayaacatgagcgatctgtgccttaaggacatgctcctgctgcagataactagccagacccatcccttt

SEQ ID NO: 522478 - DNA, 548 bp, Homo sapiens
tgagttcttgctcaattagtattcacaaggtttgattgttacaaagagcctagcacctccctcttctctctctctcttccttcctctctcaccatgtgatgccagctcctctttgtctctcaccatgagtagaagcagtccgagggcctcatcagaagcagatgctgacaccatgctcttgtacagtctgcagaaccacaagccaaataaacctcttatttataaattacccagcctcaggtatttctttatagcaacacacgtggactaagacagtgtcctactcctcacacctaaaaagaaagcagttctccctcctctctctgggatggaaacactagttgtttctgacaatctgcaactttcctaaccctgttgctcatggcaggaatgccgcgacagttcaaaagctttggagtcctctttgatttctttttcatttacacgcaacattcaattatgccttcaaagtgcttatgtccactgrtgagatgataaacgtataacagttgactcttcaaaaggaaaaagaaggccgatttatagcg

SEQ ID NO: 522479 - DNA, 548 bp, Homo sapiens
tgagttcttgctcaattagtattcacaaggtttgattgttacaaagagcctagcacctccctcttctctctctctcttccttcctctctcaccatgtgatgccagctcctctttgtctctcaccatgagtagaagcagtccgagggcctcatcagaagcagatgctgacaccatgctcttgtacagtctgcagaaccacaagccaaataaacctcttatttataaattacccagcctcaggtatttctttatagcaacacacgtggactaagacagtgtcctactcctcacacctaaaaagaaagcagttctccctcctctctctgggatggaaacactagttgtttctgacaatctgcaactttcctaaccctgttgctcatggcaggaatgccgcgacagttcaaaagctttggagtcctctttgatttctttttcatttacacgcaacattcaattatgccttcaaagtgcttatgtccactgatgagatgataaaygtataacagttgactcttcaaaaggaaaaagaaggccgatttatagcg

SEQ ID NO: 522480 - DNA, 548 bp, Homo sapiens
tgagttcttgctcaattagtattcacaaggtttgattgttacaaagagcctagcacctccctcttctctctctctcttccttcctctctcaccatgtgatgccagctcctctttgtctctcaccatgagtagaagcagtccgagggcctcatcagaagcagatgctgacaccatgctcttgtacagtctgcagaaccacaagccaaataaacctcttatttataaattacccagcctcaggtatttctttatagcaacacacgtggactaagacagtgtcctactcctcacacctaaaaagaaagcagttctccctcctctctctgggatggaaacactagttgtttctgacaatctgcaactttcctaaccctgttgctcatggcaggaatgccgcgacagttcaaaagctttggagtcctctttgatttctttttcatttacacgcaacattcaattatgccttcaaagtgcttatgtccactgatgagatgataaacgtataacagttgactcttcaaraggaaaaagaaggccgatttatagcg

SEQ ID NO: 522481 - DNA, 355 bp, Homo sapiens
ttatctacatctatggttatatcaatagctgtatccatatgcatatcatataatgtcgattgaagcctccatgacttagaaaatctaaaaagtaataatttacaatttttgaatactcaccatgtgctagacactgttggaaatgccttatagctgttacctcagatggtygttatgcccagaataaatattccccttaacctcctcccactgctcacagataagaaaacagaagcacaaagagttgtgtggatgctcattggtaactggtagagctatgattcgaactcaggcactctgactccagagatcacaggtttcaccgtcactcttgtcaaatacttgtggccttgat

SEQ ID NO: 522482 - DNA, 479 bp, Homo sapiens
tcgtgtctttttctcttcactgtgtaatatgatatattacattatcatttgtatattgaaacatctttgtattctaggaataaattccacttactcatggtgtagaatccttctaatatgctrttaaattcagtttgttagtatttggttgagaattgttgcatcaacaaattataagaccaacagtccacaaaatggtgtgcagctgcacctgacggaaattttaattttgcttttcagtggaagtttaggttccaatgggccccatttcagatgagcagagccttgcatgtgggacaatctacggttcatgattgcaacaggagagtattgttcctagatctggactccaggatgggagagcccagtaggtaaccaggcatttgttgttttaatggaatatagcacaagggtgagaggggcattgtttttgcatcaaaggccctggggagatgtatggccatcatgaatggtctaga

SEQ ID NO: 522483 - DNA, 584 bp, Homo sapiens
cagcacagcactgagttacatgcctaattcatgcatttctcacctccaccacccttccctgtcgcagccagcatcatctcttctggtagcattccaattgcctctactggctttcagttttcagccacagtgattctttggaaaagtctagttgtatactcctctgcttcttctccaacacagctacatggttcccttcatccctccttcaactctttctgcctaatgtctactaatgtaaaccaccctgtataaaatatcaatttccctccctaccctgatactctaatttatcttaacatgatgaatttttccttagcacatattaccatctgtattattctgaatacaggcagttctcacttttcatggcaatgcaggattgtaaaaatgaccgtgcaacctgaaacctgggaaagcaatctccatatccaattggaaaaacaatgatcattctgtgacttttacaattttttgtcaaaatattagaaacaaagttacaaacgtaggaggcaataaaaatgtaatgaaataaayatttattagtgcactgtaattcaaagcattagaaacattgagagttc

SEQ ID NO: 522484 - DNA, 636 bp, Homo sapiens
tgggattcaagtccaggtggaccaactccagagttcattcttttagccatgttatgctacttgtagaaatattagcacatgcagggaagtaaacataggaataatcatcacccatcacaccagtcagagaagtgacactcagagttaaaacgctggtgtatatactcccaacatttgttacaaatgtgttggatgacttttatgtgccaaatattttrctgagattttaacaggtttcataattttatttaatgcacaaaacatctttatatagtataaggacagaacaaacttttatatatatttgtgaatgcatgtgtatatatgtatacatatatatatgtgtgtataagtgactataagtgtacatacatgtacataagatttcacatttattgttatctttttatttgcaatgaaatgtctcagaaaagaaatgtattttatttttgtttgagaaaagcatatatacttatcatgtacaacatattataaaatatgtgtacatgattaatttgagctaattaacctatgcattaccttacatgtatatcactttttgtggtgagaacttataaactctgctctcttagcaattttcaacaatacaattcatgttattcactctagaaatca

SEQ ID NO: 522485 - DNA, 636 bp, Homo sapiens
tgggattcaagtccaggtggaccaactccagagttcattcttttagccatgttatgctacttgtagaaatattagcacatgcagggaagtaaacataggaataatcatcacccatcacaccagtcagagaagtgacactcagagttaaaacgctggtgtatatactcccaacatttgttacaaatgtgttggatgacttttatgtgccaaatattttactgagattttaacaggtttcataattttatttaatgcacaaaacatctktatatagtataaggacagaacaaacttttatatatatttgtgaatgcatgtgtatatatgtatacatatatatatgtgtgtataagtgactataagtgtacatacatgtacataagatttcacatttattgttatctttttatttgcaatgaaatgtctcagaaaagaaatgtattttatttttgtttgagaaaagcatatatacttatcatgtacaacatattataaaatatgtgtacatgattaatttgagctaattaacctatgcattaccttacatgtatatcactttttgtggtgagaacttataaactctgctctcttagcaattttcaacaatacaattcatgttattcactctagaaatca

SEQ ID NO: 522486 - DNA, 636 bp, Homo sapiens
tgggattcaagtccaggtggaccaactccagagttcattcttttagccatgttatgctacttgtagaaatattagcacatgcagggaagtaaacataggaataatcatcacccatcacaccagtcagagaagtgacactcagagttaaaacgctggtgtatatactcccaacatttgttacaaatgtgttggatgacttttatgtgccaaatattttactgagattttaacaggtttcataattttatttaatgcacaaaacatctttatatagtataakgacagaacaaacttttatatatatttgtgaatgcatgtgtatatatgtatacatatatatatgtgtgtataagtgactataagtgtacatacatgtacataagatttcacatttattgttatctttttatttgcaatgaaatgtctcagaaaagaaatgtattttatttttgtttgagaaaagcatatatacttatcatgtacaacatattataaaatatgtgtacatgattaatttgagctaattaacctatgcattaccttacatgtatatcactttttgtggtgagaacttataaactctgctctcttagcaattttcaacaatacaattcatgttattcactctagaaatca

SEQ ID NO: 522487 - DNA, 591 bp, Homo sapiens
gcttcttgcagcgtaggagatccgagagaaagagcaaaacagkctgggcacagtggctcatgcctgtaatctcagcacttggaagccaaggtgggcaggtcacccaagatcaagagttcgagaccagcctggccaacatggcgaaacctcgtctctactaaaaacacaaaaaattagccaggagtggtggcaggcacctgtaatctcagctactggggaggctgaggcaggagaattgcttgaacccaggaggcggaggttgcagtgagccgagatggcaccactgcactctagcctgggcgacagagcaagactctgtctcaaaaaaaaaaaaaaaaaaagagcaagacagatgacacggtatcttttgtgatcctgcccttaaagccacattctgttgcttccatgatatcctattggttatacaaccctatttagtgtggcgggagactacataagggtgcaaaacctgagggacaagagtcaataacacatgtatatggcttaacaatcctaacattatcaccaagattatcatcaaaaataacagttgccagtatatactgttaacttctttatcctattctcctt

SEQ ID NO: 522488 - DNA, 533 bp, Homo sapiens
agctgtgtacccacaactaaaagtcatctctaacacttactataacgtaaatactgatgctgtctcttgaccattacagcctttttctgagctgatgctgctaatgattatttctctttcaattcacctaattactcattcagtcaatgaggacatcttgaatgcctatatatcatatcagacacagttctaaacactgagaccaccgatggaattttctttcctcaaagaacataaatctagtcacaagagaaagaaaattgacaagtaaatgaacaaataaataagctggatagtgataaataccaagatggaaataaaaacaatgtgataaaaaatacttaggcagggccagacacagtgtcccatgcctataatcctaacaatttgggaggctgaggcaggtggatttcttgaggccaggrgttcaaaaccagccagggtaacataacgagaccttgtctgtattttaaaataccaatagtacttaggcagacctctttggcagaaaagttgaaaaacaatcactgagg

SEQ ID NO: 522489 - DNA, 600 bp, Homo sapiens
tagcctttcttcacggaagtgagacttgctgtgcccaattatactttcctgccaaatgggatattcttacagtctccatgggcatttttactaataactccagacagctttaaaaataaaatcccatcttgattagacttttacacccatcaatgtgtcttgcagctaacagaaacttacaggatctctttctttttaagaccagctttatacatcatatgcataaataacactayattttgaacactttgagaacaaggactatgtattatttatctttgtaatcccagtacccatcagagcatctgacacccagtcaagcacaagaaacatctatttaataaatgaataggacttaacactaaaatgtattctaatatccatgccataaagtatgatttcagagcagtccctatgaactatttgttgaatcatagaatagaatgattcataaaggaagggtcattcctggggacagtatggaaaatgagaagaggaggaattatgcattttccagggccccatattgaaaagagccatccatgctcattagcatggctctctcctccctccttatgtgtggtaatcatgtgagaaaca

SEQ ID NO: 522490 - DNA, 408 bp, Homo sapiens
agaattggatgtggcttgaagcactgaacagaacattggatcagcatctggagagccccattccartcccagctctcctccttactggcttagcgacacaaacacagggagctgcagggacaggagctgatcttctgagctgctttgcctcaggggatctccccccagctctgggccacagccactgcagagagaggctgcctggatcaacccctggctcctagttcttctaccaatgaccccttctgtttctggggggtcaccttcagcctgcggcccccggcgtaacataccaggggctgccacccagcattgctcccttcgtagccaatgctgagctggctcctccctaagtggacatctacccaggggcgtccctctcccctgtgcccttaccatcaatccctc

SEQ ID NO: 522491 - DNA, 549 bp, Homo sapiens
tgccggcagcgtagatcctgcgcctccccagcctatagtctatacacacacctggccgccgcgaagaggcatgcaccagggatgggggcaagcctgagccccacgactgggtgggtgcgatgcagcccaggatgatctgctgaaacagaarcagccttgatgaggacacaacctgggtcccccagcgtcccagaaatctttgggccacaaacaggcccagtgtggcatggggaataacatcaatcctatctagacttttcaaaatttgatttatgataattagccaggcccctggcttaaggattcatgggtccgtgcggcttgtcagaagaaaaatcacagtcctcctcccgcagcccctttccctcttggagctgattatttggggtttatcttctgtagtagaagaagaaatcgatttggtgtttgtccccagttcctgtcacggagccgctaacacctttggaaattcctgatcggtaggcgtgtcttgtcgttcattatatgctctgttagagaactcccgagtttatgctaatgcagtggtct

SEQ ID NO: 522492 - DNA, 510 bp, Homo sapiens
gggaaaaaaactctgataacctttagcacctgctaatctccttttcatcaaagagcatctgcacagagcaagagcagcagcagatgggagatgacagggccaggcaactggcagtatcagagagcaaatgtgtgaggtgtgagccggaggttcctacacccagggatccattatgacattcttcaaactgcatccccagttgtctatcagctacttagtgcactctaaggsactggttcccaaatagttaaaacctggacccagcatttacactgctaagactagatatgctgcaaagattatttctagattcaaggctggtgacagacattaaaatgtctttgctcacaaatggcttttaaacatatgaaaagaagctcaatctcacgtttaatgcaaattaaaactataataaggtgctatttttctcctattggattagcaaagatcaaaagcttggtaatacacagtgtgggtgatggcgtggcaaaactggcactctcgtacatt

SEQ ID NO: 522493 - DNA, 529 bp, Homo sapiens
tgggccctgctggggctggccttgcatgttgctgaggttcacttgaggaaccccagaagtaccagcctgctgattgttcatgttgccatgaattcccatgaggctgggctgcatcatatttggcggcccgtgggacacctgcatctggttttgaggaggaccagctccttgaccaccttaaaaaaaaaaaaagtcacagtttcagaaataaatatttttatcttattggtattaagatactcaagttacattactcagaaagacatccatcacccttatatccactgaccaacataaatatgctgttgacatacttcctgtgagttttctaaactacaaagatgtggctgtgggataactgcttacattcccaatgaccatataatagagaaggagaaacagtttctacattcccatatggtatcttaaagatttaacrtttcaaagatcaagaaagtttactttctttcagattaaataatgagaaaggcagcatctcactgttttaaaatgacttgtagtggccagg

SEQ ID NO: 522494 - DNA, 661 bp, Homo sapiens
gaactgatgaagtttgaaaaatatcacactgtaaaccagaattcagacactcagcataaacaaagcttaacatgtaccacgtagagatttaaaaagttgcagttgtccaaacatgcctccatgcctttgtgtctgtggttttcatttgccagaaatgcctttttgccttttactacctgagcaagctctaactcaggggtcagcaaactatggccctctgctggtctgtaaataaacaagtgtttggaatgctaccatgcttgtttgtttatgtattgtctatggctactttctgtgctatcataacaaagttgagtagctccaacaagagactatataacctgaaaagccaagaatatttactatctgccccttcagagaaaaaaaatactgctgattcctgctctaactcaagttccatctcctcttagatgtttctgagttcctgtgacattttacctacttttgatatattgacaaaagttactgccctgaaagaataattatttatgggcttgaaattaaggggagagaccaagacttaytacttatctgtatactcctgttgtctatcaagtctacgacacaatgctcaataaatgctggctaaacaaatcacagaaaacaaacctgcatgctggacattttgatttgcttgcag

SEQ ID NO: 522495 - DNA, 621 bp, Homo sapiens
agatgcaaggggttttttctgggtaggcaatgggtgtcttttggtggggagtatgtttatcagatgacagtattactgatactctataccttactgaaaagctccaagcacattcatgtgcactagatcaatgattaataagaataaataataaacatggagatggataagttttactgtaatcgttttacctctcacacattaagctccattgctttttcttcatacaagaggcaccttacaaaataaataaataaatctcctttaggtataactggtggaattccctctctaaggagcaggcattggcattataaaactataaaagtcaatgatttctgaacttattcccctttaatactttaaccaaacttaacaagtaccatgcttactattttattaactaggwttatcaaaattgataactaaaagggccttttcttcaatgagaccctgttctttttattttgctctattgcataatcttaatttttcagcaactgagaagtttaaattgttaacaaaatgcatttttcttctggacattttaatttactagtacaagatcaagcaaaaataatttgaaaaacaaaatgaacatctctacattgaattttacct

SEQ ID NO: 522496 - DNA, 604 bp, Homo sapiens
tcttttgagggacacaactttgattcaattcaacatgtatttattaagcaattattacatgccaggcactgcacatgtccctgattataaatcatgtgcactttattaaaagaaacaatagagtccatggtgagcccctggaatttttagaacagttttattgaggtttcacctccataccataaaactcgcccattttaagtattaaattcaataattttaatagatttatagttgtgcagccatcaccaggattcagtttcagaacattctcatcacccaaaaactcatcatcatgcccatttcaattaatctgcattcacactcccaaatccaaccaactcctcatctctattctgcctttatagatttgccttttctggacatttcttataaatggaatcatatttttgtatgtgcttggtttctttcatttgcatttctgtttaagattcatcctataaattctttgtagcagatatcagcatttttctttttatgactgaatagtattctactgtatggctgtactgtatttatttattcatcagttgayggatgtttatatcatttacacttttggggcattatgaataatattgcc

SEQ ID NO: 522497 - DNA, 604 bp, Homo sapiens
tcttttgagggacacaactttgattcaattcaacatgtatttattaagcaattattacatgccaggcactgcacatgtccctgattataaatcatgtgcactttattaaaagaaacaatagagtccatggtgagcccctggaatttttagaacagttttattgaggtttcacctccataccataaaactcgcccattttaagtattaaattcaataattttaatagatttatagttgtgcagccatcaccaggattcagtttcagaacattctcatcacccaaaaactcatcatcatgcccatttcaattaatctgcattcacactcccaaatccaaccaactcctcatctctattctgcctttatagatttgccttttctggacatttcttataaatggaatcatatttttgtatgtgcttggtttctttcatttgcatttctgtttaagattcatcctataaattctttgtagcagatatcagcatttttctttttatgactgaatagtattctactgtatggctgtactgtatttatttattcatcagttgatrgatgtttatatcatttacacttttggggcattatgaataatattgcc

SEQ ID NO: 522498 - DNA, 617 bp, Homo sapiens
ttagaattataggatctctggttcaaatgtggcattgtgaaggtcttatagccacatggttcctgcagtgggctgaatggttcccctactccccaagatatatctatgtcctaacmtttagaatgcgttaatatgacctttattggaaaaagggttattgctgatgtaattaagaatatagtgatgagatcatcctgaaaaatctgggttggccctaaatccaatgacacgtgtcattaaaagaggcatacagaggagagacatggaggggagaagtaggccatgtcaagacagagacagagattaaagtaatgcaaccacaagccaaggaatgctgacaaccacaagaagctggaagaggcaagaaacagaattgttcttagatcttttggagagagcacagtcctgctaaaaccttactttcaaatttctggccttcagaactgttagacaataaatttctgttcttataaggcaactggtttatggtgatttcttatggcagccacaggaaattaatatagttctcaaagctggttgcctatcagaatcacctgggtggtatatgagtggtgaaaattgcagaaggcagagagtggagctagggagaattcttt

SEQ ID NO: 522499 - DNA, 617 bp, Homo sapiens
ttagaattataggatctctggttcaaatgtggcattgtgaaggtcttatagccacatggttcctgcagtgggctgaatggttcccctactccccaagatatatctatgtcctaacctttagaatgcgttaatatgacctttattggaaaaagggttattgctgatgtaattaagaatatagtgatgagatcatcctgaaaaatctgggttggccctaaatccaatgacacgtgtcattaaaagaggcatacagaggagagacatggaggggagaagtaggccatgtcaagacagagacagagattaaagtaatgcarccacaagccaaggaatgctgacaaccacaagaagctggaagaggcaagaaacagaattgttcttagatcttttggagagagcacagtcctgctaaaaccttactttcaaatttctggccttcagaactgttagacaataaatttctgttcttataaggcaactggtttatggtgatttcttatggcagccacaggaaattaatatagttctcaaagctggttgcctatcagaatcacctgggtggtatatgagtggtgaaaattgcagaaggcagagagtggagctagggagaattcttt

SEQ ID NO: 522500 - DNA, 617 bp, Homo sapiens
ttagaattataggatctctggttcaaatgtggcattgtgaaggtcttatagccacatggttcctgcagtgggctgaatggttcccctactccccaagatatatctatgtcctaacctttagaatgcgttaatatgacctttattggaaaaagggttattgctgatgtaattaagaatatagtgatgagatcatcctgaaaaatctgggttggccctaaatccaatgacacgtgtcattaaaagaggcatacagaggagagacatggaggggagaagtaggccatgtcaagacagagacagagattaaagtaatgcaaccacaagccaaggaatgctgacaaccacaagaagctggaagaggcaagaaacagaattgttcttagatcttttggagagagcacagtcctgctaaaaccttactttcaaatttctggccttcagaactgttagacaataaatttctgttmttataaggcaactggtttatggtgatttcttatggcagccacaggaaattaatatagttctcaaagctggttgcctatcagaatcacctgggtggtatatgagtggtgaaaattgcagaaggcagagagtggagctagggagaattcttt

SEQ ID NO: 522501 - DNA, 459 bp, Homo sapiens
acatccatacacagtttaaccctaagattctttgaagccatcaccccaaaattgctatttccactaattctggtaatccttatccaattctaatcaagaccctctttcttaaaaaaacaaacaaaacaaaacaaaaaaaaaactttcttaaaatttccagttctcaacaaattctgaccttactttttcctctctgagacagttccaaagtttgggagatgatggtcttccttaccagggcaagcgagaaactcagctttgtcctatcaataagttgtcctggtgatatgtgaggagccagatgttaacawggtgccacctcctcctttgggaagccctcctggttaattccaagggtaagaaatcacttcaggcagacccagagctcttcattaggttccatcaggtccccatagcaagcatcacaggcttccgtggagcagagttattagtgagcac

SEQ ID NO: 522502 - DNA, 459 bp, Homo sapiens
acatccatacacagtttaaccctaagattctttgaagccatcaccccaaaattgctatttccactaattctggtaatccttatccaattctaatcaagaccctctttcttaaaaaaacaaacaaaacaaaacaaaaaaaaaactttcttaaaatttccagttctcaacaaattctgaccttactttttcctctctgagacagttccaaagtttgggagatgatggtcttccttaccagggcaagcgagaaactcagctttgtcctatcaataagttgtcctggtgatatgtgaggagccagatgttaacaaggtgccacctcctcctttgggaagccctcctggttaattccaagggtaagaaatcacttcaggcagacccagagctcttcattaggttccatcaggtccccayagcaagcatcacaggcttccgtggagcagagttattagtgagcac

SEQ ID NO: 522503 - DNA, 482 bp, Homo sapiens
atcaaatggttcaaataggtccagtgactctatttgaaatacaatatttgggctcagacagagcacctctgaaaatccatcctttctacagatgaaatgttttctgggtactctgctttgctttctttaaaattctacacagtattacatacacttcactgacttaacattttctcttccataaacttcgacaagttgttgatgtatttctgcacagaaacattttttttttttactttgaataaaaccaacacttcctgtagggattatgggtttaggaaagagatattttttaagtaagagaatttcaaaattgtagcaaaattagtgtctagtggtccaaactttgcctgtaatgaagagaggtgatgaagagatcagggttyggggaaggtgctggctcctgcctacaccccaagacaatagtaatgacttctcctcagaagtgaaaaaaatgaaatcctataaaattgatgggatta

SEQ ID NO: 522504 - DNA, 592 bp, Homo sapiens
attgcttgtattaatgtcagtctctgcttgggaaagtgttttcaagatccaataatgtcaacctcacgcatatggtcaaaggttcaccttgtataatgttgttgataaagaacaacattgctttttcctcctgtagttgcatgcatgccatttcagtggcatttcagttcacaggacagtttcctgggaattgttatgtctacatctttggagcccagagctctacaatcaatcgccattgtggaaagatatattgtaactgtcggagccagtctgctaactgtgttgtgacttttctgttaccccatctataaaccacagggtttatacatgtcacctcaggaaggtattatgagagttaatgarccagaagttgtaagggggatttagcctgccggataaaaggtgctgcttaagtatagagcattcccgttttatgtgacctgattcttcagggccaaagcaacatatcaggaagtcacagtgctgctattaaagggcagagggcactatcagtacattctcaatgtaaggtgtaaactcagtctccaaaaggagcagtttgggattttataacttactgttcagtagt

SEQ ID NO: 522505 - DNA, 648 bp, Homo sapiens
ctgctgtgcagtggctttctcagaggttgcttgttgtggtaacatattggacatatgagccagcacactatattttgtgaggcagagactgcagagttctcagaaagcttatctcttgcactagcactatgtccttgtggcagcaggattttsgtttggtggttcagttcagacatcagtccattagctgacacttatgagtagagccagctcacacccaggcaggctgattatgaatggaagcacccatcctgcaagggggcagattggtaggtgaagatcatgttgaggttcactgaaatctctggggaagcagcaggtgtgtgcaccaagtctgtcctcagcagttaggaatgtcatctacttctctattgcaaccctatcacagaggtcacgacctccagttggaatagactttgtcctttggctccaagccacaatgtggctgcaaaccacaataagtccttctggtggctaatgcactaatgggtttagggcagagcctctttgccctgtccagatttgacaattctgttgtttgtctgccttctgttgacaagatactggaattctgtgtagggagggagagttgggccctgccctttatgcaagcccagtaggcacagacacactttcaaggtggatgga

SEQ ID NO: 522506 - DNA, 648 bp, Homo sapiens
ctgctgtgcagtggctttctcagaggttgcttgttgtggtaacatattggacatatgagccagcacactatattttgtgaggcagagactgcagagttctcagaaagcttatctcttgcactagcactatgtccttgtggcagcaggattttggtttggtggttcagttcagacatcagtccattagctgacacttatgagtagagccagctcacacccaggcaggctgattatgaatggaagcacccatcctgcaagggggcagattggtaggtgaagatcatgttgaggttcactgaaatctctggggaagcagcaggtgtgtgcaccaagtctgtcctcagcagttaggaatgtcatctacttctctattgcaaccctatcacagaggtcacgacctccagttggaatagactttgtcctttggctccaagccacaatgtggctgcaaaccacaataagtccttctggtggctaatgcactaatgggtttagggcagagcctctttgccctgtccagatttgacaattctgtygtttgtctgccttctgttgacaagatactggaattctgtgtagggagggagagttgggccctgccctttatgcaagcccagtaggcacagacacactttcaaggtggatgga

SEQ ID NO: 522507 - DNA, 608 bp, Homo sapiens
acattatggtgaaggttaaataaaatagcatatatgaagtaccaccaacagttgttgaaatattgttaagtgctcaaatatttatcgttttaaccaacaattgtttagtaaagacttactatgagccagatacactactagatgttgaggtgataatgctgagcaggacataygtagctcctgtccacaaaaaaattataacccagtgagaaaaataaaataaacaactaattactatacaaacatggattgcagtggtagagaataataataggggcacggctattgatacagggcagttagaaagcataatattgaaaatatttaatgatagtataattgacccttgaacaacattaatttaaactgtgtaggtttgcttatcggtggatttgttttcaaccaagtggtgcattgaaaacacaatatttgcaggatgggctatactgagggatgactttttgaatacacggggctgagtgtggaacttcagtatgcatagatttttgcatgttggggatcttaaaccaatcaactgcatataccaagggatgcctgtacataatagacgtgggcatgggtatttatcagtttagatttgaaaacat

SEQ ID NO: 522508 - DNA, 647 bp, Homo sapiens
ttgagaaaagaggtggggaacagaagaagaacaagaaagctagctgaaaatgattaaagaaaaaggaaagagaaaaactaggagagtggtataacaaaagccaagggatgttgtacaaaaaaacattagatgctagttgcagaggacaaggaagataaaaacwgaaaatagtcttatttgacttaagacataggaaattgttggattttccatagagtaaaaccatacatctacttacagtatgttaaaaggtgaattagaagatttcaaattaaacaacgtcatttgaacatatttgtttctgtccctttaataattaatttattaaaattatagtaaataacttaatatctacattatacttaatataatgagagtgaagaagttaaaaataatctacttatctactataagagcaaataacagaaaagacacaacaagagataacagttgctgagacattttaggaagatggaaagcaatgaaggagtaagcagagatgagcacagtaaatagcaactgcctgcaagtgcccaagagaaaaagccatttcaatagagaaccataaaaatattcagaatttagaatcaacaagtcaagatctgggcaaaaagcccatatatggaacaggtagatgatgcaaaatt

SEQ ID NO: 522509 - DNA, 505 bp, Homo sapiens
gccctaagccaagcagagcgacttcattcaggaggtcacgtccaccctccagaggcagccaaagactgactggtatgatggggtcactaaaggcgattcccttcacctcaaaggggggttctgcagtaaaattcatgatacagagctcctgtgggatcaggctgaagctagaatctagctgatatcacatcagctcatctcacattgctcaactcctttccctcccttttcatgttttcctcactcccctttccctgagagccctctttcaatataycacatggatctgaattcctatctcagggtttgattgtagagaacctgatttaagacacctcttgctatgcattgatcttaacctccaggttaagaccctttgaccacctactattatatttctcatataatgtggcaattcatttatttaaatatattgcagaaatttcacccacgcaaaaaggtaagacctgctgctccttattaccatttccatctctccctatga

SEQ ID NO: 522510 - DNA, 633 bp, Homo sapiens
acaactttctagaaaggcataaagtaggaaacttatttaagaattaatagaaattttgaatagacctataacaagtaaagagaataattaattaaaaaaagctttttttaaaactttttttaactttttaaaacaaattttagaaaactttttttaactttttaaaacaaattttagaaaactttaacttttaaaacaatttttaaaaactttttttttaactttaaaaaaatttttttaaaactttttttaactttttaaaaaagatttttaaaacctttttttttttaaaaaaaatgctgaggatcagatggcttccctggtgaattctttccaagtttaaagtagaattaacaataatttctcacaaactcttccaaaatgtagaagaggaaaaactttccaaccattagctcaggctagtattatccttatgccaaccycaaacaaagtcattacaagaacaaatacctacaattaatatattttatgaatataaatgcaaaaattctcaacaaaacactaagaaagcaaatctagcaacatataaaaagaattacacattgtaatcaagtaggatttgttccagaatgtaagactggctcaacatacaaaaatcaatcaatgtaacat

SEQ ID NO: 522511 - DNA, 594 bp, Homo sapiens
tcagttactttgctactatttaatctagaaatcatgtgtatatattctaaggaaaagcttcatagagaacaatttttaattaaatacaaataagagcatttgggcaggctcctttttgattgaatttcactatcaggaaacactgagagaaccaagtcacagggcttcaccctcctgccaaagagctgtacttcaaatcttctcctataagcaaactattcttctgctcatagtttatttatgtctgtgaatatctggagattttagtagcagtcgtggtggacagaaattttttgtaccctggaaatgtagtgtggtgcttaggcatatcagctctggagtcagasagcctggggtcaaatcccagctccatcttgcactgaatgtgtttctgttctagtttttgaaccactctgtgtatagtttccccaactgtgaaaatggaagcaatacacaaagtatcttcaactccttaatacgatgatgatttaatacaagtattgtaagtaatcaatacagtaaaatcctgagaggagtatctgacatgttatagattttcaacataatgttctttgttgttattaagagaaacat

SEQ ID NO: 522512 - DNA, 501 bp, Homo sapiens
cagctggaactatttcccttgctcagctccttcctatgttccacccatttccctcatgttcttaaagattttttctaagactactccctcaataaatcacttgcaaaatatctcctttttaggacttgtttctaaaaaccctatcctagacaggcatcttgggaatagccgtgcaacagggtgagtccatctgctttcaggcccttggtctaccactggggagctatgagaccatgtgcaagtgtcttgatctctcaagcgtgcggttacacaatggtaaaattcaactagatcattgttgttattgttttcatctgtacccgctcccttgccagcttcttccctgtcttctcttccctctctctcttacaagtttcttttgagatcactcaatcaatatgtcacttgcaaaaccccaaacatgaggctttgtttctagagaatttgaccaaagacacatgctgrtggttgggggtggggggcaatgtgttacctgtagcc

SEQ ID NO: 522513 - DNA, 636 bp, Homo sapiens
tggggtggggaaggaaggctcctggggctgcgctgcctccctcctccccatgggctaagcccagcactgggcaggcccgcgagaaagctgtgatggagggatgtagcgtgcacccctgtttactaagctgtgttcgagggatgtagtgtgcacccccgtttagcragctgtgatggagggatgtagcgtgcacccccatttactgaggagtgatggagggatgtagcgtgcaccctgtttactgagctgtttgagggatgcagcacgcacccccatctatgaggcctgctgcatgccagatactttacatgtcttcacacctcacatgtacaacctcccgatgcgggaggcatcgcggctcccactttacagccgggataagagagactcgaaagagtgacttgtctggggtcactcagcctgtggttcatacgttagccaggactcaacccaacacattgttctggtaagcttctatcgcctctgctaagtaccaagccaagttctttaggaatttggggaagaggttcttagcctttttgttaaaataacctttttactttggagtaactttagatttacagaaaaagttacaaaaacagtacagagggttgctatatatcttttttttttttt

SEQ ID NO: 522514 - DNA, 615 bp, Homo sapiens
tttttcaaaactacaaaattaacactggtgcaatgctattaactattttataccattagctcctattaactacaatgctattaactgaactccagacttcactggaatttcactcttttttcccctaatattctttttctcttccaggatccaacccacatggcatttagggtttgtctttttgtttatttgtttgttttttaaagagatggggtctcactctgtcatccaggctggagtgcagtggtatgatcatagctcactgcagcctcaaactcccgggctccagggatcctcctgcctcagcctctcaagtagttagggctataggtacatgccaccacacccagctaatttttttttttaagtttgtagagatcagcaatcactatgttgcccaggctggtctcaagagatcctcctacctaggtctcccaaggtgcagggattacaggcaggagccaccacacctggccctgggtttttaacctttttttagggtgaagacaccrgcctggctcatacagcccataaggactagagttatttttaaaatcttctttttttcctttttttttttctttttttttttttttttttttgagtcaggatctc

SEQ ID NO: 522515 - DNA, 559 bp, Homo sapiens
accctgaaaatagccatctgtggaattagtattgccctattttattggtgaggaaattgaggtccaaaagttaggtaggtcacacaagatcttccagctaccaagaggcagtgccaaggctagaacctgggttgctttttatcatttatatatttttatgtgcatgcaaaaatgtttttatatcaggattccccaacttcttgatgaaaaactgttgaattgcccagaagctattaattgggggaagtcattaatcaggaaggatgatttacarcaggggaggaaatctctgggagagaggattgtagtcagtttggaagggacgatgctgaagagacctcactgatctcagttgggtgctgctccatggtttttttcctcttctgaatttgtatctagtgccttctgctggggatgtggagaaagccagagttctgaaggaagaaggcaatgagcttgtaaagaagggaaaccataagaaagctattgagaagtacagtgaaagcctcttgtgtagtaacctggaatctgccacgtacagcaacaggtatctcctata

SEQ ID NO: 522516 - DNA, 497 bp, Homo sapiens
acaacccaccactgaccacagaactgtcacctaacaattatgaccagaccattactgccaaaccttagtattggtctcaagttgctggcaaaagcagaaaaagcagaatagaactcctttcagatcacacggcattagctggcttccttaagaaaattttattgggtgccttcatgaagactgtaataatatttccaattcattatacacycataattcaagtttattataatacaacttgaacggatgcaaaaaatgacattcagaatcggctcccacaacctatttgaaagtataatgcggtttagaaaacttctctacagcagtcacatttctccgggaataaagacacacttacagacttcacaatggaaggcagtccccactctgtgctgagaagtctgtggctgtgcaactttccagagggatctatatgtctgtccaacacatcaactccaaccacacttgggttcatagggtttgggtatttctgcatt

SEQ ID NO: 522517 - DNA, 456 bp, Homo sapiens
gacagtgaccttcagccaccatacctgtgggcaaacacaccttctggtgatcccagcccagcttttgaagcaaatagctgaagctcagacctggtggagccgaaatgagctgtccctactgagcgctgtctgaattattggcccatggaaactattacaataatcaacgtcactaagtgcgggggtaatccacacacttttttgaagcrtgtattgaagccacaggaactggaacaggagagaactctcacatggagttcgtctgtggagaaggagaaacatggagtagtggccagaggaagttaagccaagaaaagttgtttttgtttcattttgcttttttttttttttttgagacagagtttcactcttgttgcccaggctggagtgcagtggcgtgatttcggctcactgcaacctctgcctcctgggttcaagcaattctcctgtctcaga

SEQ ID NO: 522518 - DNA, 683 bp, Homo sapiens
caacaaatgctttcagtttttatctgggaatgtatttattttacctttattttgatattgctggatataaaattcttggttgacagtttgctttattcaaacatttggaatatgtccttccactacctttagcttccattttttttctgatgagcagtcaagtcattaatcacatttcccttgttgctttcaagaataagaaaatacacaggccaaaatatcacagatttacactgttcttacttaaagtttagtaattttaattaataaatgcttctccgtttgctgtatgcctttggtctattatttccagaggcctgcaatggttatttttgacagttttgtccagtatcattgtggcatttaaggggcaagatttgttgacctcactccgttgtcatgtcagacatgagaaaatggtttgttgggttttttttttttttcagatgaaatgagaggtcactgagatgtattaagcggagaagggaaataatctgtttgtgttttaaaagactgctttagacactcatattagttaattattgctgcacaaaaaattaccccaaattgatttacttacaacaacrcacatttattatgtcatagtttctgtaggaattttgcaagcagtttagctggatggttctgactcagggtctctcatgaagttgcaagtggtatgt

SEQ ID NO: 522519 - DNA, 592 bp, Homo sapiens
caccaaactcactgagtatcrctcattaatgatcttttcctttcgataagtggtttaaagtgagcagagaattgaactctgcttcttgcaccgcatgttgagtggctgctgatccattcacactatttactaataagcagagcttacgccaggcacagtggctctggcctggaatcccagcaatctgggaggccaaggcaagaaaatagtttgagcccaggagtttgagaccagtctgagcaacatggtggaccctctctctacaaaaaattagctagacatggtggcactcacctgtagtcccaggtactcgggaggctgcagtgagccatgattgtgtcattgtactccagcctggaagacagagtgagaccctgtctcaaaaaaaaaaaaaaaaaagggttggggggcgtattgaagggtgaatgatggagtcatttgagtttgtttttaactttcctttaatgcttttctagcatattttgtgttttaaattgttttttaaaggaagcattctgccttaactgtaggtttccagtggtagcaatgggtgtgctgaagtgggtggattggactgtatcagaaccaaggt

SEQ ID NO: 522520 - DNA, 641 bp, Homo sapiens
  misc_feature (1)...(641): n = A,T,C or G
gtaggaaggtctcattatatagttggtaacatgatgtcatcatggttggattccactgnccatatagatttcngaaaggcagggatgtttagttaataattntgagctaagtagtaacagatcagtttttcctattttatgttgggggatgaagatacaacaaatgactattgctacatggaagaaagcaatctgaacaggagctgagaatttctgggttccaaattcaacatcattttcttgggtgacggtcatcaagataagaataggcgctcaaccaagaaagagcacccagatagcaagttttgtgctgaacactgagatccaggcttagccctctttgataagaacagaagcttagcaaagagggctgaagtctcatagttgccaaaagcacttttcaaagctattttctcatttaagccttacaacagccctgtgatgtcagtgtttgaaatcctcatttggcttgggaggaaggaagacacagggccataaagtggcagggttgggaatggattcttgggcccagtattttcccygtatgaaatggcctctgtcaaaaataaggtgaggttttgatggtagtatgatagtataaagcccagggggcctagaaatactgaaatcttacctcccca

SEQ ID NO: 522521 - DNA, 594 bp, Homo sapiens
catcctgggtgcttgccatgtggaggtgggagaagccaccaggctctggagcagacctagtttctgtgcttttgggctggatgagggtgggggcaagtcccttcagaaagagacacccattccaggcgttgaaaagtatgtcaggagaaactctgactccagagggaggacggggaggagccacagtggaggaagggttggctggaggtgtggccgagagctttgaaaagaaggggcaagttgctgtcctggaagagactcctggaaggagcttcaggaggagacctggggcctgtggggctgtgtcctgatgggtgtgcctagcaggcaggaggtgagcaggacagagtggcgatgcggctcagagctgtgctgtgcaaggatgcagggatgtgaggatgccccagagcggaggggaggagggcagccaccaggatcagggacccatgctcctttctttccttttctgtttccktcccatcccttctttaagacaagtggccttggcagaaagatgtagggaggtacagtgaagaaaccatttaatggctgcttcagttcctctaaacccctgactatgtgatgacagatttg

SEQ ID NO: 522522 - DNA, 545 bp, Homo sapiens
ataggaaaatgtgtatgatattgtgttaattgaagaaattataagattagaaagctttatacacagaatgattcttttaagacaaagtataagtctctgttcaaagaaaaagatctgtaataaaacatcctcaaaagatagttatcttagggtggtaaagtatatcttggaaatatttttctactttgtatacttttgtattttctaaatgcacagactaattcatagtagaaactattaatgtattatttttgcagccaacaagttattaaaacacttcaacatggccaaaagacttttttcttcttgtgagactggaaaagtcaaaagcctcttaaaaaaaaaaaagtttgaaatttctttccacggggcactcaaaaaagtttttacaagtccggtccagggactcatgtctataatcccagcactttggtaagctgaggtgggaggatcatttgaggccaggagatcaagaccagcgtaggcaacacagcaagaccccatctctactaaaawtaaaaaaaattacctgggtgtagtgatgc

SEQ ID NO: 522523 - DNA, 526 bp, Homo sapiens
ttgagcccaggagtttgaggttacagtgagctatgataatgccgctgcactccagcctgggctacagagcctggcccttgtctctaaaaaaatttaaaacataaaataaaaaaagaagttaactcagaggaggaggtttctgatgagaaaggctagattaggaggcactgtaatggatcaaatgccctactgagttaattcatagtgacttttgaagagtataaaattccatttatttgctttacttctccatctcttgttatatctcctaaatataccagtaacatttctttgctctgtttccttccttcctttcttccttccttctttccttcttcctccctaatcaaaggttcccatcaaatacaataattcttagggaaaaatgttatgctttttattattttactaaaatactacaatttaaacatttttcatattttttttccagagggaaacagtcttttcctgcttccagacatgaatcakgtcactattcaatgggatgcagtaatagccctttaca

SEQ ID NO: 522524 - DNA, 545 bp, Homo sapiens
tgagggaagggaggacgcgagagaaacagcgcgagcacgctgagggccgggggttgccaggagaggggcccgcggacccgcagagcggaggaaggtccgggagaaaaggggcgggacggaggagaatccgggatcgcctggcagaaaaagagaagggagtttctgaatcctgggaagaggaggcgtgggtagggacgcttagcccgagatccgacagcagggaaccggagcgctccgggggaggggcttaatgctggggaagggatgtcttaaaagaggagaagctttaaattagacgatcggagaaggctgagggaattgctatgaaggggcgggagctgaagtgtagaggactcctttagacagcagaaagggaaagccgttgagaagttcccttcaaactccacctgcctcctctccaattcaaactccactcccttctccaaaagttaaaaggaaagccaagtttrccacgctcccctgttcctactcaataaatacttcttctactccgccaccgggaaaacagaaaaaaaaactaattt

SEQ ID NO: 522525 - DNA, 549 bp, Homo sapiens
cagctacattaggaaaatatgtcatattgcagggaaaaagcagttgatatgtagatttctggtagtaataaaattagcagttttaacctggtgtcagctccagaattgactttttggggaatctgggaaagttgccttggaagttgttaggtttaaacataagtaataacagcacttaaaakcattttaaaaaattacaaaattaacacccttactgattttacaataatgtgtaagaactctcatctctcccttactctctgtaattgtggtagaatacacaggaggttgaccatcttaaccattctagagtacagttcagtagcattaagtacattcacattgttgtgcagccatcactaccatccatctaaatgactcttttcatcttgcaaaactgaaactttatacccattaaacaacagctccctattccctcctgcccctgtctctggcaagcaccattgtactttgtctctatttgataactccagatactgcaggtaagtggaatcatattgtatatattttttgttactggcttatttc

SEQ ID NO: 522526 - DNA, 549 bp, Homo sapiens
cagctacattaggaaaatatgtcatattgcagggaaaaagcagttgatatgtagatttctggtagtaataaaattagcagttttaacctggtgtcagctccagaattgactttttggggaatctgggaaagttgccttggaagttgttaggtttaaacataagtaataacagcacttaaaatcattttaaaaaattacaaaattaacacccttactgattttacaataatgtgtaagaactctcatctctcccttactctctstaattgtggtagaatacacaggaggttgaccatcttaaccattctagagtacagttcagtagcattaagtacattcacattgttgtgcagccatcactaccatccatctaaatgactcttttcatcttgcaaaactgaaactttatacccattaaacaacagctccctattccctcctgcccctgtctctggcaagcaccattgtactttgtctctatttgataactccagatactgcaggtaagtggaatcatattgtatatattttttgttactggcttatttc

SEQ ID NO: 522527 - DNA, 387 bp, Homo sapiens
ggagttgaggaagggtgggaaggtggagtgaagaaaattgcctgggttgaaaagccagtgactgatgtgagattaccttgtagtgatgttgctttgggcatatggattatgaccagatacagattaacccgttcctctataattgttttatggcctcatccttctgaaattgcctccttgtggcctgaaatcctttctggggttttccttaggctgggaactctgcttgcagatgagaaataaacctacctctctccagggcatgagttccacagtgaaactgaggagtagatggatgaggartcttcttttattttgtttttagggtggtgcccttcccacagggaagcaagctgcggattctgaatttgttaattgcacagcagc

SEQ ID NO: 522528 - DNA, 592 bp, Homo sapiens
tgtgcagggttaccaaatctaggggagtgtggtggccatggagaatattcctctcagatacccagcttcagggagcatgactgcccagcggtccccacaactgctttccaaaatctagcacaaacgctgtgtcctgactgcccctggccacccccagccaatggaggagcggggcagggataatgaggaagggcccttcctggagacrtgggactcctctcgtgggcaaccttggctccaggactcccagacagccttgccaaagtttccgtaggattgtctaaaacacttcccccatccctccctcccctcccttgctccttcaccgggagtcaggtctgcatcatggacttgtggcttttccagcctcccctggcctctacattttttcccacaggcatttcccctaacagatttcttgcatgtttaatcctgtctcggtttctgctttctcggagggcctgaactaacacagatggggtgggtaggtctgtgtggaagcaatgtgggggcccaagggaggtccctgaagccaaggacttggagcctggaaggcagatgaatgggatactcgggaagaatgcacaagcag

SEQ ID NO: 522529 - DNA, 526 bp, Homo sapiens
ctggagcatttgtcagtcatgcatgccacagaggactcacttgaagagtgatctgagtggtacccctccatggccgctacactgtatatgagcagagatgaagcagaaacattcckcctggctgaccttctttcatttattcatcctccgtcttatgaaaagaaaagtgagatgttagagaaggttatcacaggacagggtcattaaagctgggtcctaagggactgtctcaagcatcattgctggccagcagtcacagcaaaccactttcatttatttttggtatctatgttgagctctgctgccaggaatctgccatcagtgatccaagaggctccatggtaaggctttggaatcacacagacctgcattttattctcatctcagccatttgggcattgcataacattgtataagtctttcactgatgtaggtctcacttttgttatctgaaaaatgaggataaccagacctatctcatgcagttgttatagggattaaaaaacatgatgtaagcatagagtct

SEQ ID NO: 522530 - DNA, 526 bp, Homo sapiens
ctggagcatttgtcagtcatgcatgccacagaggactcacttgaagagtgatctgagtggtacccctccatggccgctacactgtatatgagcagagatgaagcagaaacattccgcctggctgaccttctttcatttattcatcctccgtcttatgaaaagaaaagtgagatgttagagaaggttatcacaggacagggtcattaaagctgggtcctaagggactgtctcaagcatcattgctggccagcagtcacagcaarccactttcatttatttttggtatctatgttgagctctgctgccaggaatctgccatcagtgatccaagaggctccatggtaaggctttggaatcacacagacctgcattttattctcatctcagccatttgggcattgcataacattgtataagtctttcactgatgtaggtctcacttttgttatctgaaaaatgaggataaccagacctatctcatgcagttgttatagggattaaaaaacatgatgtaagcatagagtct

SEQ ID NO: 522531 - DNA, 341 bp, Homo sapiens
aaatttaagctacttttttatcagattaaatgtcatttcagataaaattgtcaasgaatcatcttgtttatttgcctgctgaaaggataaacattaggttttaattctagttctgccacttacttcgtaagccccgtggttgcatctctcctaacacgcagtagccattctgtttgggtggtgttgactcatacccatcatcagcttgaatgttggatcctgataggtccaagccaatcaagataatgccatcccctgccatggtgattgcttcaagggtgcagttagagtgttaaaggctttgtttcaatagttgtggtgtgagtcagtcacacatccag

SEQ ID NO: 522532 - DNA, 663 bp, Homo sapiens
atggagaaatgagacaaagactccgtcttcgagaagaggtatccagatttgaaatctagtctaattgttgttgatggtttggttttaaagccagtgaatagacaagtgctgtaagtaccagtactacccagaagaatggtactttgcagaatggaaaaaccagcaaaactgtgtaacttaaaactctgacttttatttaaaacgaaacatttggagcagcttttgcrcaggaacagtttcaaccattgttttccttttgcaagtacttcatcttttacacttgatcttagccaaaaggccgagaactgatactttatctttttactcctgtgtagtaagacagggctaactattcataggcatgctttttactccttttccctttccaccctcttcctcttcccctttctgtcctcttctctcgtccgcctttcttcccctctgttctcctcccaactccccttttttctatcttatttcctcctctcctcttttctcttctcactccctttttgaaaagagtacctgtcatatttttgaggaaagagaccgtaatgaattctgtcaactaaaatgatgacggaggacctttctaaaattcaatcttaattttgtaagcatgctctttataacctcaacagttaaattgattctgagacctgg

SEQ ID NO: 522533 - DNA, 625 bp, Homo sapiens
agttcagtttaaacttccttgattgtggaaataatagccagggccaaactatgtttccctggttctagggggagacaactttttgtatggtagtcagaaaagtgaaaagttacagatttatcaggtttaatatatagtttagccctgcccgtgtgctacaagtggttatttggtttgtttgatttttaatccttacttgtacattttgtagtcggtagtggcaaccacagggtatgaaaatttaacatggcttgaatttcaaacactcagaatttcttaatgttacaactaaagaggatgtagaaagcatcctttctttattcatctggaatcaaaggcctagttaaggctaaatgacttacccasggtcatacagcttataaatgccagaactctggttagcacattcacttgtacatacccccagtctaagtccttatcagtaaactcatgccaaacactttacctcgttactagcagaataatctaccatcattactagaagaatgatgattagaggcacagaaactgcctggaatatctaggaattaaataattttaataatttagataccaatcttttatctgaaaagagatttcttttaagcttagaatatttttgttt

SEQ ID NO: 522534 - DNA, 621 bp, Homo sapiens
ctttcctaataactgcagcactcttgacctctcctaccactaaaccggaggtatccaaagtagggccaggcaatctagcatgtaacacacaggttcctrgcaccgctattcatgatacccaaaaaatggaaacagcccaaatgtctgtcaacagatgaatggataaacacaatgtggtataaacttacagtggaatattattcagccataaaaaggaataaagtactgacacatgttacaatgtggatgaaccttgaaaatatgccaagtgaatgaaaccagccacaaaaggccacatattacatgagtccatttctgtgaaatatccagaatagaaaaatccatagattggtggttgccagaggtttgggagatggggatgaaactgcttaatgggtaaagagttttactttggagtaatggaaatgttttggaactagggttagtggctgcacaagactgtgaatgcgctaaatgccactaaatgttcaatttaaaatggttcatttcaccccagtaagtttttttaaaaaatgaggtgaccatcgttttaggtgagctgaaaagtttgaatgaggcataggctccttgaatttttaagctgtgaagtgctgggcaaat

SEQ ID NO: 522535 - DNA, 617 bp, Homo sapiens
tttgaaactcctgctagcttccttggtagtctggcatgcttgaaggcattttttttcacttaaaatataaagtgatcaatatgcatttgtgcactattcatagtggaccctctttctcctgtttcctccatccccactactctggaggagctgcaatttctcacttcttacaaaagcctattcatgtctacaaatttagagctgaracaaatactataatctttacccactttctactttctttggattactttttctgaaaggggacccaataaggcagcatttagtatactggttaggatgctttgggccgcacgtaaaaagaagataactgtattagatagaatgaggtttgtctatggacaacaataaaaccacaataacactggcttaaagagatggaagtttctttctttctttctttctttttaaggtccagaggtaaatggtccagggctggtatggaggttcttctctatgaaaccacaggaacttagcctccttttgtccagttactctgccctacatgtgctccttcttgaaaggacacctcatggtccatgacagctgtccagccatggttacaatccagccagcagtgtggagacttggacgaa

SEQ ID NO: 522536 - DNA, 541 bp, Homo sapiens
tgctttgctcggtgcctgttattttgaggagtggccctaacagctctcctgaggggtggccttgttagcctgcctttcccagagcccctcgctgtgaagccacccctgtagcagcagcgtgtctccgggaggacccagagaagcaacatcacccatgtgctgcacggaaccctaacccccgcatgtccaccctcctgcctctgggcctggacacctcaagactccaggaagaaatgtctagtccctttgcacctcccagaagctgcagcagcacctgcggagcagacrcagacgcagacgcagacgcgactttctctcaagtcaagaccacatcagacctgaaaattcagtcatgccctggcctgaatgcagcaccgcgaatggagcactttaaactttcttaagagctgtgaaaatgtatcttttaaaaatatttttatttacttaacatgttaacagttcctgctaggcacattttaccaaaaaaaaaaaaaaaaatacccacacacacggtttggggcatccaaaggctctgggagca

SEQ ID NO: 522537 - DNA, 407 bp, Homo sapiens
tgcctaatccgtgcacaataacctcgctgcccattcgtccacattttccttaggttttcagagaagtataattttgtgagaaagttgttgcatttggacttttagcctgggaacaaaaagaaagtccagtggactgtgttagcacgcttgggaacccgcggcaggcgagtggctgtcyggcacaccaggcatcgatctccgcaaaacgaactggaaaatgctcttccccagaagcgcagcacctgagcgtgtgacgtgcacatgtttgtgtggaaggcccgagacgccatccaaccccgtggctctcaaaccgggtctccagaaccacggcctcagcagcatctgcagctcccagcgttccagattctcagactcagcccttacccacgagtcggaaacgctgaggc

SEQ ID NO: 522538 - DNA, 550 bp, Homo sapiens
ccctccaggccttcccagagcgccagggccgccactgccctccttggagcagcgttgcatggctccacgaggaccagggttcgaaaatttgaggtgctgtctctcaagctcggagtttgcgggagcccttgccccgccggctgccgtaaaagctttggttaaatgctctgaactgaaggtccttcccgcgccccctcagagactccagaggcacactcacccccagagtgaagcagcagacagaacccaggaccttctctgcactcacacgggagaggagcatggamgggcctgagcctgaagcgtcgtttcctaaaaagaaggcgctgctcccggcccccgcacgaggccctgccggagtctctgccagcactgcgcctgccgctcttccctcagccccatcggcaggaagtcggctctttaaagagttttaaatcagcagtaaatcacagtttctaaagctgtagcactgattgcagcgaaccctccagactgggcatcacgcgtgcccgtcaggagcagcagccgctgagactgtgattctcctgca

SEQ ID NO: 522539 - DNA, 517 bp, Homo sapiens
agacaccaggtgtcaaggacagcaggagagtgaggagccaagggcgacatggacctcagagtcccagggagcaggagttgcaggaggaggagcagaggccagctaagggcggaagaccaggacctcgtgcgaagcagagggtagggaggcccagggcagtggccacaaaaaccaaacaagggacaaattctgccctgtgttgccgaggagagaggcttcgagctttgttccccacgggagctgtcattggagcaaggggacagatgcagggggctcccgcactggctgtgcaccaggctctcaccctctcctcacccacgcgccaggctctcaccccctcgtcaccaaccacacttcttggcacgttttcttgttmatttctagcacgctgacttccatgataaaagctgccacacacttcagagctagtaagaatgaagctgttgagggaaaatttgcttctcgtaagtgggtaaaccccaagagctcaagctgatcaggtcccggtggataacac

SEQ ID NO: 522540 - DNA, 609 bp, Homo sapiens
gaaaaggtaaaatgcaccccaagccccaaatctgaaaatctgcagattttcacatctgggtttctgctggtgggtgccagcccgcctgtgggtgtggagtggcagcacctttctagtttctgttgctctggtgggagatgcggggtaccaggcaggggctatgtttgttcycctgagcatggcaggtctccaagcctcccaggcctgagggatggggcctgcaagatctgagtcgattccagggttattctgctgaggctgagcccgcaccgatctccgttgattccagggttattctgccgaggctgagcccgcacccgggaagaagaagcacaagtcccagtgggatctgtgtcctgtgcttttcccaaagagggttttgaggacttcaatatttaaagaggaaagagcagacaggagagggaggaggaaaggagaaaaaagcgggggccgggtaggcaatgagacagtggctacatccttgcgaggctctgcttagtgctcagtggatccacgtttcacagaagccggggtaggtgtgtgaagccccagctacctgtgtggccacagaagggaggcagcaccgtgagactcagtccccatgctcca

SEQ ID NO: 522541 - DNA, 603 bp, Homo sapiens
tggctacatccttgcgaggctctgcttagtgctcagtggatccacgtttcacagaagccggggtaggtgtgtgaagccccagctacctgtgtggccacagaagggaggcagcaycgtgagactcagtccccatgctccacttcccttggcatagtgggtttggggtcctgaggtttcatcttcctttcacaggcccctcaatggcctcagtgccactgatgttgactggctgtgggggggcaggaggcacaggtggtggggagattttagctacgaacgtggctcgcaggcagcactcatcaacatcctgagaaccagcgttctgtagacatgcttcgggaaaccccattctcaccacgtagacagaggcctgacaaggagagggtggagctggacaggagaccctgatggctaggggaagggacgtggcacaaactcagcagagggtggcccgctgccaagctgtcacatggcaataggtcagtgaatgtgcccggctgtgcccacctggctgctgtcagcacctcctctctgcctccaaaattcatgccccacccacctgccagccagggccttcctgctgtgaggatatggctgccaagc

SEQ ID NO: 522542 - DNA, 586 bp, Homo sapiens
gactgtccctgctggcccaatcaatgaatgaaggaatgagtgatagccttcatataaatgcacaaaaatgaaatacgctggtcccctttcccaggcaggagccgagtcagcattcctaaaaaggacggcgacgcgacagaagaattcagagcccacaccaacgggctgccttgtcaaggatggaaaaatattccartttaatcccagacaaacactgcgtcctttctctgtatttcaaaagctcagagaaagtcctttaatcagcctcctcgacctggggctctaagctgggctgaaaaccccgcagcccggcccagctctgggtctggtaggaagggccctgcctgtcacgtttaggtccaagcattcacatcccgatacaatcagcttgttaggaagaaaaattgtggatttatccaaagtgggatctcagccctgtctgtggagcaggagcccttcctcacacgatggccacgctcagccacagatctcatctgaggattgggaggaaccgtctttgctaaactccagagtggacagctaccgcccccaccactcccgatgtctagtgtgggacggaatctcc

SEQ ID NO: 522543 - DNA, 586 bp, Homo sapiens
gactgtccctgctggcccaatcaatgaatgaaggaatgagtgatagccttcatataaatgcacaaaaatgaaatacgctggtcccctttcccaggcaggagccgagtcagcattcctaaaaaggacggcgacgcgacagaagaattcagagcccacaccaacgggctgccttgtcaaggatggaaaaatattccaatttaatcccagacaaacactgcgtcctttctctgtatttcaaaagctcagagaaagtcctttaatcagcctcctcgacctggggctctaagctgggctgaaaaccccgcagcccggcccagctctgggtctggtaggaagggccctgcctgtcacstttaggtccaagcattcacatcccgatacaatcagcttgttaggaagaaaaattgtggatttatccaaagtgggatctcagccctgtctgtggagcaggagcccttcctcacacgatggccacgctcagccacagatctcatctgaggattgggaggaaccgtctttgctaaactccagagtggacagctaccgcccccaccactcccgatgtctagtgtgggacggaatctcc

SEQ ID NO: 522544 - DNA, 603 bp, Homo sapiens
gcagggggctctcagcagcctctttcctgggcgtgatgtccccctcaggaggtgccccactgcctgcctgcaccggcccccctcggccacccatcctgcagcgtagggtccccaggctgctctcagctacatgtttatttggctgtggctgcctcctcccgcagcatggcaccgccagaaggaccagactggaaaacaggagactgacacrggccggcaggaaagggagggatccaagcggagaagaatgtcagcctgcagagaaactgctgtcacagacttgcggcatgacatcattctccaagtctccatttcttcagtcatccaatcagagccggttcatggaagccacccctggctgtggtgctttcaatgtataggaaagaaatgtattcttttctatatattgaaaataaatcaagcatcgtagaaacccagagacatgtacagtgtattgtgtgtgtgcatgtgtgtatgcgtgcttgtgcacgagtgtgcatgcctgtgtgtgcgtgtatacacacgtgtatgtgtgcacctctgtatgcatgtaaacccacatgtgcatggatgtgcatgcgtgttgtgtgtgtgtgtgtgcag

SEQ ID NO: 522545 - DNA, 629 bp, Homo sapiens
tatttttccactggtaaatagagctgtgtttctcagatgagatgatcttgatggtgaaactgaaatgtgtttgatgtctatgacatgtttgattgttttacgttacatagtgatacttaatttaagtaaatgatggatctgcattgtttataagcttcatcaaatttccctcatcattttaagaaaaattgttcataaagtttttcactatcatctctacagttttcactgtcagaaatatgcataaatgttgttgttgttgttgtagccttgggataaaataatgctttagaagtcctgagccctgagtatgaaataaacatgtattgataactatttatagaaaataactttgagatattagcaagataaacatctattatattctgtggctttctagatacatattttatatatttcatttttataccttgcmttttaatggaagtatttctaatattggttgaaaatattgcttctcctgttttgctagccttgaaagtatttaaacagtattacttttttagcctaagtcaatgcttcttttgcaaaatatattatcagaatttagaagttaattaattacttcttaatttcgcttggagaaatctttgatcataaactcaata

SEQ ID NO: 522546 - DNA, 550 bp, Homo sapiens
aatctatgcatgtgataaaatgacaaagtaccaatgttcacaccgcatacaaatgctaatttccaagtttttatatcgtactataattatgtatgatgtaaccattgagggaaattgtttgaaggytgaacaggacttctctgcactactgtagtatctttgcaacttcctgtgactctataataattttaaaatgaaaagttaaaaaaatccctgataatcaccattgactcctccatcaccctttccatcattgacgtttaattaccaaaccttattgatgtccattatttgtatatattttttctccatcctcactgctactgcctcaatacaggctaccataatttcttccctgaatttttaccataactttctaactgggctccaggcttccattcaagccccctctccaaaccaattttcattcctttgaattggtattcaaaaaatatgtatatcgtcatggcatacccacgtcttcataaatcttgcaggttcctcgtcatctgcagtataaagtgtcaattccttagtatggcttttaagg

SEQ ID NO: 522547 - DNA, 600 bp, Homo sapiens
tttttggagaggcagtgtgataactgctgwatcatcccctgacggtcccctgacattcccggttggtggggggagagccctctcctgccccgctcatgcctatttaactacctgtaatattcacagatttgactcttatattgagaaggaaaatcacaaccaaaaacttcctagcaaacttatcctcagagatcattatctgggattaaattacatccatgccctgctgcaggggtagctgggaatgtatctggcactaaaatggaggttgggggactttgacttccacgatgattgagtggtcatactttcttcctgttcctcccactaaatacaactaaaaaccctaggcattatgtatgaagaaaacaaaagtaaactctgatagttggaaagaaggtagattagttagagaccgtgggacacaaggaacaacacagtgatgaatttcctgggttttctttttacttcacacatctcagggttctagctgaagaagtcagcaacttgaaccaccaatgagtgcggaccaaagtatcccacccacacacaaagatgggcagacaagcaaggcaaaataacttttagaaaataacccac

SEQ ID NO: 522548 - DNA, 624 bp, Homo sapiens
ttgagacttaacacagctgtgcagtgtttgtgtatcagcagtccctcattacaggaaatttgggtcgtatatatgaattggcttgggatgatggagtctaatgaagagagagtcatgacagggacaacactggacaaggtgtttcagaataaaaccatgaattcagaggtttagattttatggaaaaattcaaccatttctgcttcctgtgcatcagcatctgttgtttttcttctggaacacaaagtgacttgcagagcccatatccatttgaataatgtgggaacaaccactgtagcaagggcttagctgccaggtcgtctctgaygtggcttggtaacatttctaccactctagaatttctggaagaggccatagcttatcgggggtctcctagtattttcagaattgagagttaattcctgataattccacacatggaaagagatgatacagttattcaaatttaatataaagacttatcattaactaaattaagaatcattgtgaaaaaatgacaattcatttgagaccatcagtaatgtagaagttggcaggcgaacgctttgtggtgggccgtctttcttgccaatttgcatgcaaagaagtgtcacagtggggttt

SEQ ID NO: 522549 - DNA, 584 bp, Homo sapiens
tgccacagagtcaatgaaaagggtgtcaaggctgcaggatggagcctgtgtttgtttaagaaggagcctgatgacatcacgtcggcctcctgctccagaaggctcaggagctgtgaaacggcacagcctcctagcccagttgttgcagacctccggcagggatttctgtcttcaggtcaggtttcaaggtgaaccaggttggaacattcaaggagagacttgggacattatagatttttatactgcccgaattggctgattagccccatacgtggtatttgattaatgtctgagagctctaattagcaatgtctaataggctccacatacaccgggatatcgattcttgcctccacaaaactaatctaattgtgctccttatcattagcaagtggttggtgtacggagatgatgaacccacctggatactggaaaagccgccccgttaaggcagctttggaaaagggtagagsggtttctggaggtaggtccagaagtgaccttccaaaggcatcaggaaaagcaccacgttttagctcctcaagcctgtttggcttttctgagggggaagagccacagatatc

SEQ ID NO: 522550 - DNA, 440 bp, Homo sapiens
taaaaaatgctaagtccaaacctatcaagtctcaacaatctatactaataaaggaaagccataacagacactccaaagtcatttttatttgattttaggagatgattttaataaagtataagttatattttgataattacaacatttatcaacaaataaattatgaaacagtacagtgaaggcataattgccccattctgtactcttatcttcctagaataaactatcatctctcaagcagatgtcagagataagcccagagcagctgagrgtgagctctttgtacatatctattctgcttacagtattgaaagatacctatgaaaagaactattagattctgaaaggctctttcctctaataacgataatttatagagtaattaaagattgaagtttgttgttgctgttactgccatttttaacaaatgtactcgcctg

SEQ ID NO: 522551 - DNA, 520 bp, Homo sapiens
ctgacatttttgatgtttgatggcagtctacagttcctatttacacactttaaaatcacagagggtgaccatctgcttccttcttgatgattaccaagaaacgtgggctgcacagactgaggacttgctcttgaccattcataaacaacyatcaaaaggctctgcccaaaacagcacaaaggagaaagagatgctcacacagaatacaaaatgggactgaccagcacagataaaggggaaaggtgtgcaaagaagctgggcttgaggtgaccactgcttacctccaatccatttgtatcctctgggcagagtcagagctgcccgagggtgggaatgaaagaaattggtcccatctccgacctgaaacagttttaatctttaaagagagactgtagtaggaaagggtgatttagagtcccttttcttttaattttcatctttggctttcaacacaccctttccgggaggaaaatggatgcgctctacaattcatctccatttccctgccaatttgacctgc

SEQ ID NO: 522552 - DNA, 422 bp, Homo sapiens
atgagtttggaagcagatcattctcagctaaactgtgagatgactatagcccagccaacgtaccttgattacagcctgtgagagattctgaaggaccgaactgaccattcgcagattcctgacccacagaaactgtaaatttaggttttataattttaattgatgtatggacacacataaacaaaaaagcatgaaggaagatttggatccaagcggtgccacactttatgtcatcactacaagtgttcaagtgtaaagaaaaccagttttgaaactatgaaattcctgattcataaatacacagttatttctaytttagtacatataagataatacactgttattaaagctcttttattaaggcaattgcatatgtcttaaaagcaatggtaaattaagttgccttccaaaactgtgtactt

SEQ ID NO: 522553 - DNA, 605 bp, Homo sapiens
ggaggaagggccccgagcccggggacactgcagcttctagaggctgtgaaaggagaggagaaacctgtcccgtagagccacaagggcacggccctgcccgcaccttggccttagctccgtcttggcttctgacctccaggacgtggagagaatgaatgtgcctctgtgttgtggggcccctaagcttggggcaaatcctttcagcagccacaggaaacgcactgcccrcctgggcccggccagagtcctcagcccctcgtggacacaggcagggtgagcctggaggaggaagcctccacttgcagggtttggcaagggctccagacatcagagcaagcagcctgccctgaacagccacgccggtgggaaagcgcagagggacggcgaggctgggcctgcggggtttccatgacggagcccctgtgccaccagcaccaaggagcagggtgtgcggacacagaggccccgggcaccggccccaggcacagccacctctccccggtgacctgggtaggaacagctcccgcggcgcctgtcctcctgctgtcggactcctgtgggcccggcatgggccgggaatgtgcagcctgcggtgacccgggagc

SEQ ID NO: 522554 - DNA, 419 bp, Homo sapiens
ctaccctagagcctgggacctggccatcctctgccagattccaataggccgccctccacatggcgccacggccacttcctgctgccctggaccccgcaagcccagggacatccaagagcacccctcctgagaccccagactcagaagcagcgagaaggccaggccagccctcagccatcctagccagaccccctcagagcccccagcccccaggagagccctccacagcctgtcaataaattttttgtaggccaacacatgcagcctgcagtgtgggtgacagcaggttattccctggggtgagcacagaatgggaggtggggacagagccctggggaagcagcccctcccctcacagccatgamacccgctttgcctggcaagggcctcctagagtggggccatcctgcaggacacct

SEQ ID NO: 522555 - DNA, 506 bp, Homo sapiens
  misc_feature (1)...(506): n = A,T,C or G
ggttgtgtccggttctgctgcctccggaagcaggcacaggcccagccacatctgccaccagcacggcagccctgcgaygtggcagtcatccctatggacagtgacagccctgtacacagcactgtgacctgtgagtgcctaggggcccgccagttgagggtggagatggcgggggtaaatgccaagcccgcctccacgaacccactctggttccctgcagcctacagctccgtgcagtacccactgggcatgcggttgcccctgccctttggggagctggacctggactccatggctcctcctgcctacagcctgtacaccccggagcctccaccctcctacgatgggnncnnagnnnnnnagngannncagntttcaaatgcatcatcgaccannnnnnnnnnnnnnnnnnnnnnnnnnnnnnnnnnnnnnnnnnnnnnnnnnnnnnnnnnnnnnnnnnnnnnnnnnnnnnnnnnnnnnnnnnnnnnnnnnnnaacggtagccct

SEQ ID NO: 522556 - DNA, 506 bp, Homo sapiens
  misc_feature (1)...(506): n = A,T,C or G
ggttgtgtccggttctgctgcctccggaagcaggcacaggcccagccacatctgccaccagcacggcagccctgcgacgtggcagtcatccctatggacagtgacagccctgtacacagcactgtgacctgtgagtgcctaggggcccgccagttgagggtggagatggcgggggtaaatgccaagcccgcctccacgaacccactctggttccctgcagcctacagctccgtgcagtacccactgggcatgcggttgcccctgccctttggggagctggacctggactccrtggctcctcctgcctacagcctgtacaccccggagcctccaccctcctacgatgggnncnnagnnnnnnagngannncagntttcaaatgcatcatcgaccannnnnnnnnnnnnnnnnnnnnnnnnnnnnnnnnnnnnnnnnnnnnnnnnnnnnnnnnnnnnnnnnnnnnnnnnnnnnnnnnnnnnnnnnnnnnnnnnnnnaacggtagccct

SEQ ID NO: 522557 - DNA, 623 bp, Homo sapiens
cgtgggaggctgaggcaggaggatcacttgagcctaggagttgtaggctgcaatgagctatgattgcatcacagcactccaggctgggtgacagagggagacctgtctcaaaaaacaaaaaacaaaaacaaacaaacaaaaaacagaaaaaaagaaaatgtcttggtatatgccaggaacttagtaaatagtactaccttctcttaactccttaacagaaggtaagaatgaagaacattccttcctctgtatttcagaagtaggtacactctttgggggaatttatacaagtccaatttgaactcttttacaggtgaggttgggaaggatgggtcaaggtaggtggggatgggtgaggggtgagatatccttaccttttatctccctagaacatcatgaatattttataactactaatgatgaaaatattgtttgtactctctatttttctctgtgaaagggtgtttggaaagtcatttcttgttgttatgtttggtttctagtgctccctgggaagcactgatcttggatttggctgctgtgtgggagaccagtgttcctcttagctgatggtggagactcacrtcagtgcaggctgcagcgatgactctcaaactgtgaac

SEQ ID NO: 522558 - DNA, 502 bp, Homo sapiens
agaatctttgcagacccagagtgggtgggtgtagacactttgccatgggtggtagctttatttgtaatcctcccagtgaaagctttgggaaatccagccctcccaaactcttgcctttcttgtaagactttctaagcgcatggctttgtcgtaagacttctcgtggccatgtgtctcaccctaccgttcgtctcaccaatgaaccagagctgggataccagcaaaaaggacccaaaagactgtttcaccacaattgaagaggtcgtggaccatcccccaaaatgaatcccaacactggaagaccaagagggttgacgtttgctatcttgaaagctgcagcycccgtagagaaggtaagctgtgtattccatcaaaggtctgtgtgtgcaggattgcatttccaagagaaggcattcctggatcatgatcattttgtctgagctgcatgtggccaagtgcactgggggaagcagagtttaggaacttgttcctgtatggatta

SEQ ID NO: 522559 - DNA, 364 bp, Homo sapiens
acagccttgcattatttcatttaattcacaaacatcttttagattctgcactgccttaagacttaacctaaaaaagcaaggctgacgcttttttagctacttcccttgttaagtttaatgggagaatatccacagaaaaaatggaaacctgtgtgtttaaagtcaccaggacacttgactttcatctcacttgaaagagatacacagtgaagatttagaaaaccataccaaggacattttctctagttgatttattattcaaagtgccttggtcgtgtatggaaaaaaatataaatgaagacaaaattgttctatatttgaaggagagwgagagatttggggtttttttttttttttagttatt

SEQ ID NO: 522560 - DNA, 657 bp, Homo sapiens
aatgcatgcgaatcatatagcacagcacttggcactcagtaaaggtgagccattattattattagcactgttgttagtgcagttacagtcacatttttagttatgagaagtctgcacttcatagtatcttacaacaaaaacttcatgcattagtttaccacatggtggtggtaaacattcactctgttgtcagtatttgtatggtaaaagatcttaagttacatgctgattacaaaggaatmcattatctttgaaacacttttgaaggaaacagtatggggaaaacctgggggtttagaatattcacaatttgatccagttggagctaggaactcaccaggtataattaagggaaaagtctaaccgaggaagttagggtatctgtcatctatgccaaatacataagtatcaactagataatctatgttacatgattaggctctaaaactgttgatcatgataaatatattcaaatacatgtattaaatcatttaatgagaactattgttattcaacccaaaaaggataggttaaaacagcatggcaggtgagtttgaaaaacttaactggctcttttttctttgtttttaccaagccctaacatttttcatcatcttttcctagacttactaatattataatgactgcacctggaga

SEQ ID NO: 522561 - DNA, 550 bp, Homo sapiens
tataatattggagctcttcttaaccaaagcttcctttggatgcttaggaagcctagagaggtcaagtgacttgcctaaagtctttcagctaaatggtagaagaaccagagctaggttgccctctcaccaagcctactacatcttcaatattatcatcttggtaaatgtgtaattttatgtaaataattattataaaaggaagtcrtcatattccaaagttaacaaatatgagaatatggacagtgattaccaaggtataaaacaaagctttccaaaaagcagcatttttttcctaaacatgctttactttacttattttttcctaagcactatttacttacaacttacaatatttatgaagtgtgatgaaaaatgcatacatttgtgatttcagtttctcctacaatttttcatgtcaggaactctgaggtaacttaggctatctgatccggcgagtctccaagaatcagagaggcagagctcaatctccaattccaacaagggctttaccagggtaagccctgagaggaggtgggcagaccgcgggagg

SEQ ID NO: 522562 - DNA, 552 bp, Homo sapiens
attataatattggagctcttcttaaccaaagcttcctttggatgcttaggaagcctagagaggtcaagtgacttgcctaaagtctttcagctaaatggtagaagaaccagagctaggttgccctctcaccaagcctactacatcttcaatattatcatcttggtaaatgtgtaattttatgtaaataattattataaaaggaagtcatcatattccaaagttaacaaatatgagaatatggacagtgattaccaaggtataaaacaaagctttccaaaaagcagcatttttttcctaaacatgctttactttacttattttttcctaagcactatttacttacaacttacaatatttatgaagtgtgatgaaaaatgcatacrtttgtgatttcagtttctcctacaatttttcatgtcaggaactctgaggtaacttaggctatctgatccggcgagtctccaagaatcagagaggcagagctcaatctccaattccaacaagggctttaccagggtaagccctgagaggaggtgggcagaccgcgggagg

SEQ ID NO: 522563 - DNA, 509 bp, Homo sapiens
gcttctttcaacaattagctttgtttcttcagactgcttttgtccccatcaacatgctgcctcctggttgctcaaggtgaaatctgctcctgagcaatctatgaccagtagtctaaccaaccccaagcatgtctgagtaaactacaaaagacaaacayagacaataaaagatgattcgagcaaagtttgaggtcttcctttatgccaaaaacttgtagtaggcaacaccttcactaagcaccaccagacatcacaaccatcaccacacgtgaattatcaaacttaaagtgtctgggtgtggtggctcacccctgtaattccagcactttgggaggccgaggaaggtggatcacttgaggtcaggagtttgagaccggcctggccaacacagtgaaacccatctctagtaaaaatacaaaaataagccgggaatggtggcaggcacctgtaatcccagctactcaggaggctgaggcaagaacctcttgaacctgggaggcagaggttgc

SEQ ID NO: 522564 - DNA, 532 bp, Homo sapiens
atataatcttattgtattgcaaactrtttcaaacaaagttgtataatttctcttgatggacctccttccattgaaaatttctgaagtgagcaaagtcatgcagaaagcattaatgaaagtacaaagaagggtggaaaactcctcttcgcattgacagtgattcatctcccaaggaatctaggttatgaggtacaattaagagtcgttatttgaatatttcactctcaaagagcttcaacagacaagaggcattttgaagacagcaatgatttttgccacgctagaattaatattctggtcattaagaacataatcagtttttagatcattgttttcactaaaacagggtcctacccacaagcacttataatctgatgcctaagtaaacaatgtaaagaaacccctccatgtcaacatagccttgtgggtggcaaattcatcatgtcatttgcatctgatgacgatatctggttctgtgaagctagagtgggcccatatgagatgttagccttgatagaattcccagggagcc

SEQ ID NO: 522565 - DNA, 532 bp, Homo sapiens
atataatcttattgtattgcaaactgtttcaaacaaagttgtataatttctcttgatggacctccttccattgaaaatttctgaagtgagcaaagtcatgcagaaagcattaatgaaagtacaaagaagggtggaaaactcctcttcgcattgacagtgattcatctcccaaggaatctaggttatgaggtacaattaagagtcgttatttgaatatttcactctcaaagagcttcaacagacaagaggcattttgaagacagcaatgatttttgccacgctagaattaatattcyggtcattaagaacataatcagtttttagatcattgttttcactaaaacagggtcctacccacaagcacttataatctgatgcctaagtaaacaatgtaaagaaacccctccatgtcaacatagccttgtgggtggcaaattcatcatgtcatttgcatctgatgacgatatctggttctgtgaagctagagtgggcccatatgagatgttagccttgatagaattcccagggagcc

SEQ ID NO: 522566 - DNA, 532 bp, Homo sapiens
atataatcttattgtattgcaaactgtttcaaacaaagttgtataatttctcttgatggacctccttccattgaaaatttctgaagtgagcaaagtcatgcagaaagcattaatgaaagtacaaagaagggtggaaaactcctcttcgcattgacagtgattcatctcccaaggaatctaggttatgaggtacaattaagagtcgttatttgaatatttcactctcaaagagcttcaacagacaagaggcattttgaagacagcaatgatttttgccacgctagaattaatattctggtcattaagaacataatcagtttttagatcattgttttcactaaaacagggtcctacccacaagcacttataatctgatgcctaagtaaacaatgtaaagaaacccctccatgtcaacatagccttgtgggtggcaaattcatcatgtcatttgcatctgatgacgatatctggttctrtgaagctagagtgggcccatatgagatgttagccttgatagaattcccagggagcc

SEQ ID NO: 522567 - DNA, 331 bp, Homo sapiens
agctgaaactttacaacatagttttgttactcagggattaaccaatcactaggaacaccttagacatctggtcagaatacttggcacaatagagagayagttcttgttaatatctggtgcttttagaaactataaataaggcaataaaaatataatcattttagaattgaaagagtaaaaaaaatcactgagttcaaatttgttgatttaaaattaagaccagttatgaccaattggataagatgttcaatagcctacatgtcatagcatctgggaccagaatcaaataccctgacatctgcctagggcattttacccatgtctccattca

SEQ ID NO: 522568 - DNA, 560 bp, Homo sapiens
agtgttcgttatgatgtgggyggagggcagcagggagaactctctctgtgtgtcctgatccctgggaaaatgcatggcttgtagtcatgccctgtgtctttcatgtcctatgtgtatatgctaaccacagacaagagaccacctgataaaaagaaatccatcacaggacgtgtgaaggaggcagcaaccacgtggaactcgtgtctcgaacacagtgcagtcttcacacctcagcgctgggcatcgggaggcagccttcatgtgatgctaccctatgaggccagcaagggctcccgggaaatgaaaacggcagcagccggcacccagtcccagcagcagacaggagcaggttaatccacaccatggacactgtctatgcaaagcggatatttggtcccagatggctcaacccttggctattacacatccttaaagctgacactggcatagcacatgggtatgtaacacttaaagtattgctgcaacccttcaggaaggatgtcctggaaagctgcacacccccaggcgtcagccttctgacatcgcatgaggaggggcta

SEQ ID NO: 522569 - DNA, 572 bp, Homo sapiens
gttcgttatgatgtgggcggagggcagcagggagaactctctctgtgtgtcctgatccctgggaaaatgcatggcttgtagtcatgccctgtgtctttcatgtcctatgtgtatatgctaaccacagacaagagaccacctgataaaaagaaatccatcacaggacgtgtgaaggaggcagcaaccacgtggaactcgtgtctcgaacacagtgcrgtcttcacacctcagcgctgggcatcgggaggcagccttcatgtgatgctaccctatgaggccagcaagggctcccgggaaatgaaaacggcagcagccggcacccagtcccagcagcagacaggagcaggttaatccacaccatggacactgtctatgcaaagcggatatttggtcccagatggctcaacccttggctattacacatccttaaagctgacactggcatagcacatgggtatgtaacacttaaagtattgctgcaacccttcaggaaggatgtcctggaaagctgcacacccccaggcgtcagccttctgacatcgcatgaggaggggctaaatgacatttggaga

SEQ ID NO: 522570 - DNA, 610 bp, Homo sapiens
tccaggaaggcagatgttgcaacagtgctccaccataggcaagttccagaaggggcgtttccagaaggcagagcctgtacaatggycgggacgcatctgccaccatgccttgccatcacatgccaggcactgaggatactagagtccctactttcacgcagcttatggtttaaacttgtcctgcaaggtgcagccaacacaagtgtctcagaagaagggcatcatctgatgtgtgtgagggggatacaaaaactgataatagttaagttgcggtttctgctgtattcaaccagaaatttctacaaaaagaatttaactggcagtcctaaattattgaaaattataggactcaggcaagtatttcatacttttccttactctacattaaagacatttcagtaattcacttcctcattagccatttattaggtactatctctggaacagcaaagatgcaaatatgatcagaacaaagtacactcactgtcttatgggaacgcacacccagacagatacacaccagaaaacacgtgttgacactttcatatacaagctaggatttttgataacacctagatcattttgggccctaatagctgcaagcaactgg

SEQ ID NO: 522571 - DNA, 610 bp, Homo sapiens
tccaggaaggcagatgttgcaacagtgctccaccataggcaagttccagaaggggcgtttccagaaggcagagcctgtacaatggtcgggacgcatctgccaccatgccttgccatcacatgccaggcactgaggatactagagtccctactttcacgcagcttatggtttaaacttgtcctgcaaggtgcagccaacacaagtgtctcagaagaagggcatcatctgatgygtgtgagggggatacaaaaactgataatagttaagttgcggtttctgctgtattcaaccagaaatttctacaaaaagaatttaactggcagtcctaaattattgaaaattataggactcaggcaagtatttcatacttttccttactctacattaaagacatttcagtaattcacttcctcattagccatttattaggtactatctctggaacagcaaagatgcaaatatgatcagaacaaagtacactcactgtcttatgggaacgcacacccagacagatacacaccagaaaacacgtgttgacactttcatatacaagctaggatttttgataacacctagatcattttgggccctaatagctgcaagcaactgg

SEQ ID NO: 522572 - DNA, 580 bp, Homo sapiens
gtagctaacaaaagttagattctcatttgttttatcactgataagctgaaatggaaggaaaaatttatctgaatatgactcttcatttctgatcaagaaattcttagtgttaaaagtaaatacctttatttaagaatgtttctggatcagtttttcttgtgattttaggtgatggttttggtactggtgatgggtccctttcaggggacccttcgatgtggtttccaaactggtgacgcatcaatttactgtcaacctctagtttttctagtgtagtcttgagacattgctcgttggttgtcatatataatttacaaaactacaggaaaaaaaaagtccagtgggtaaaacattcartcatacactggggaagaggagaaagcaaatgcacattagtaggcaaggaacagactgatagatggaatatatttcctattgatggttacgcattttatttttttgaatcagattgaccagcctcaagtgacctagtgaaatgtagccgtgattcaatgaggagttcatactctgtgtgaaaataaaatgttacacaaggagaggtgatttattattatttttt

SEQ ID NO: 522573 - DNA, 540 bp, Homo sapiens
gtataggaattagctaagaacaacatgtgaggaggccatgagataagaaggagcctggcctgcttgaagaactaaaagaacgccgggcacggtggctcacgcctgtaatcccagcactttgggaggccgaggygggtggatcacgaggtcagaagttcaagaccagcctggccaagatggtgaaaccctgtctctactaaaaatacaaaaattatctggacatgatggcgggcacctgtaatcccagctacttgggaggctgaggcagagaattgcttgaacccgggaggcagaggttgcagtgagctgagatcacgccactgcactccagcctgggtgacagagtgagactccatctaaaaaaaaaaaacaaaacaaaactaaaagaagttctccattgatggatccctgggaggaggaaaacagtagtgtgaggtgaggagatcacacagggccttgacttcgagcgtcaagtgaaggatgtggctccacactggtcaagtctctttttgttacatggaactcatttaagtaaaaagg

SEQ ID NO: 522574 - DNA, 540 bp, Homo sapiens
gtataggaattagctaagaacaacatgtgaggaggccatgagataagaaggagcctggcctgcttgaagaactaaaagaacgccgggcacggtggctcacgcctgtaatcccagcactttgggaggccgaggcgggtggatcacgaggtcagaagttcaagaccagcctggccaagatggtgaaaccctgtctctactaaaaatacaaaaattatctggacrtgatggcgggcacctgtaatcccagctacttgggaggctgaggcagagaattgcttgaacccgggaggcagaggttgcagtgagctgagatcacgccactgcactccagcctgggtgacagagtgagactccatctaaaaaaaaaaaacaaaacaaaactaaaagaagttctccattgatggatccctgggaggaggaaaacagtagtgtgaggtgaggagatcacacagggccttgacttcgagcgtcaagtgaaggatgtggctccacactggtcaagtctctttttgttacatggaactcatttaagtaaaaagg

SEQ ID NO: 522575 - DNA, 597 bp, Homo sapiens
cattaagtaaccctgcatgggccatgctccatatacacaaacaagcttcctcctttgctctgtggtatggagagactgcatctcactcatttttaacctcagtacctggaatggggttgggcacatacagatagtcaataaatgtgtgagtgactaaaatatttaagtgagagcatcaaacgacccctgtaattagtgtttctgagcaaggaggcgagttttcaggcaggagtcaggagtggtttcccttcctgagaccaacctcaaatagaaaattactcccctaatcacagacaacttcccaaagcacaaggtgtctacaacagagggcactctgcctggaactggcattccaagtagttgcaatagcacaaagtctygtgcaacaattacgaacagaactagaaactgcaatagtgaaggaagtagagccagttagtctgcatggttgaggctgaaagcttataattgcttcccaggataactgcaggcagagtgatgaaggaggggtcttcatggcgctactcaacatgaggtagaaaagtggtgagagtaagagagaaaaagagatgaatgcaagcgagaaaaagagggtcc

SEQ ID NO: 522576 - DNA, 649 bp, Homo sapiens
cattgtacctaactccactaggatcttggtaatatgactcaagagtctagaaattatatttgagctgtgagagctttacataatctggytcattgtgcagaaacattctagggtgtagggagagggtcaaactggaatcaccatctcacgttcaactttccatgctaacagctctgcaaagtggcagagagaacccaaggcttaacaatccaagtggtaaaactttccaatttatcatcttcagtttcagagagaggaaagaaagaaatagaaagaagttaagggcagttacactaaccacagggtatttttactacctaaactttgacattggaatgagtgagaaagcaaacaacaatcaaaagcctcaaaaatttaaggcttttttaaaaattctgaaattaaaaccaggggcatttaaagtaactcactccaactagttcttgctatgttttgatcactaaattttcaggcatactaaattagttctctttacttgaaattattaagacacttatgtataccttttactcaagaaacgtaaatgaagaatgagaagtctaaaagtcaatgtaaacaaaagagagaatgtcccatgtctttctcaaacatatctagccttttgctgaagatgaacagtaagccagat

SEQ ID NO: 522577 - DNA, 524 bp, Homo sapiens
ttcactagccatccttttcatcttaaataacaataccattgccttgtaaaacttctgctgaacttattccatcttctagtaattcttggaggaaaataatttacaagactaacctacctggcagcaccattctctaaaattctggaattccatctggactgtggccagcattaagggatcagagaaatttgggccaaacagaggacgatgtttcttagctaactctctaggctatgaagtacatttgagaaagtcttttaggagatttgaatcactcagttttcttcaaaatttaaaggattaaggaaaacaaacaaactaaaaaagcacaaccctacctagaygaagtaaagatgaaagatgcttgcttttcctccaccaaacacagttaactctctaccagttgcatgtagactgcacttatgtaattcccaaatacccctcagcataacacaatttcacctatcgctgttcttaagatcagacattgcaaacaaaacttagtggccacgtagctgaaacag

SEQ ID NO: 522578 - DNA, 563 bp, Homo sapiens
caggatttcaagaccagggtgatctgataagtcaaatagaggagtcagttctcaatcagtgctaaagtaattggtatgtactctgtgtgtggatgtggtagtaaactcatctcttaatttagttttgtcaagttgaagtcttcctgtcacataaaagtaatttctgggaggtcttccacttccctctccaggcaggttgtacactttattcccagactgggggctgtcagggaaatctaaagtaagactgagaagaagagaaatcgtcgtctttttttttttttttttttgagtcagggtcttgctgtattgtccaggctagagtgtagtggcatgatcacagctcaccacagccttgactcaacctccctggtctcaggtgaacctcccgcctcagcctcttacatagctgggactacaggtgtgcaccaccacacttgactaatttttgtattttttgtagaaacggggtttygccatgttgcccaggctgatctcgaccccctgggctcaagtgatccgcccagctcagcctcccaaactgctaggattacaggtgtggt

SEQ ID NO: 522579 - DNA, 508 bp, Homo sapiens
gaagtcatagacgtgtgttctgcygttgccgtgctgctttacttatagggtgtcactggacacatttcttaactggcttgggagtcagttttgcccctgtgaagaggggctaacataccttaaaatgtcattgtgagacttaatattatatacaaagaatacaggctatggagccagaacatgggggctccagaatccatcttgccttttaactggcattgtgacttcaggaaagcatcttgaaggctgtggcccttggtttttctcatctgatgatactggtagtactcatgtcacggggtggttctgagaattgatgagtaaggcaatgtgtaggaaaacaatctatagaaagctgtctaaatgtttagtcactctgaaatgagtttgcctttttttttgagacagggtctctgccaggctggagagcagtggtgtgtgatcacagctcactgcagcttggacctccatgcctcaagtgatcattcccacctcagcctctctagca

SEQ ID NO: 522580 - DNA, 667 bp, Homo sapiens
aacgccctgcacgggccaagctctgtatgaaagtaagccaactgcagagttagagggaggggtcctcaagggtaccctcacttctgacatcaactgcaagttcacggattcctaagaccaccctcaggttcaacaattctctagaaagactcacagaacacactgaaagttgttacagtgatggtgccgttttttacagggaaaagatacagaygtaaatcacacaaggaaagaggcacctagggcagagtccagaaaagcaccagtagcagagcttctcatcatccactcccgagaagccaggtcagcatcgatgagggacagcacacatgggatgctgcagtcagggacgttcacctgagcctcaggctccagtgtcctcctggggcttggtcaggcaacctggtgggcctcccaggtgggcggcctcagtctccagcctctctggtaatagactgatactatgtgaccagaagtccccagtgtaaatcacattgcccctatccggctcagcccaagacaccccaggtaaagagacactggtgtcagacatgataccccaatagagatcacccagaccccaaggacaaagaccagacctctctttgggcaaggcgaagtgctttaccacacactccaggtctgagaactacaaacttgagcacac

SEQ ID NO: 522581 - DNA, 506 bp, Homo sapiens
cctgtagtcaggcatggtggctcacacctgtaatcccaacactttgggaggcggaggtgggatgatcacttaaacccaagagtttgagaccagccttggaaacatagggagatattgtctctacaaaaaataaaagattagctgggtatggtggcacatgcctgtagtcctagctactcatgaggctgaggtgggaggatcatttgagcccaggaagttgaggctgcagtgaactatgatcctgccactgcactctagcctgggtgacagagggagatcctggctcagaaaaataaaaattttttwaaaaaaaatcttacctgtaatgatgcaactgcactcacatgacaagcctacagtaagggaagatgcggcggagtgcaataaatatgtctcatagatatataagcacataaggacagggcagtagagcatcctacttagcagggtagcgcagtcaccctgaactcttttacaaatatcaagagacgtggagacattgtaac

SEQ ID NO: 522582 - DNA, 506 bp, Homo sapiens
cctgtagtcaggcatggtggctcacacctgtaatcccaacactttgggaggcggaggtgggatgatcacttaaacccaagagtttgagaccagccttggaaacatagggagatattgtctctacaaaaaataaaagattagctgggtatggtggcacatgcctgtagtcctagctactcatgaggctgaggtgggaggatcatttgagcccaggaagttgaggctgcagtgaactatgatcctgccactgcactctagcctgggtgacagagggagatcctggctcagaaaaataaaaatttttttaaaaaaaatcttacctgtaatgatgcaactgcactcacatgacaagcctacagtaagggaagatgcggcggagtgcaataaatatgtctcatagatatataagcacataaggacagggcagtagagcatcctacttagcagggtagcgcagtcaccctgaactcttttacaaataycaagagacgtggagacattgtaac

SEQ ID NO: 522583 - DNA, 439 bp, Homo sapiens
tcagagccaatttaaaagtcctatgtgaaaaataattactcttgctgcactctatgcaaataatcaggctaagtataataaaactaaagtttattttgcaagtaaatcagcagtataatgactttttttaataaaaataaagactgggagaaaaaaattrtttcaataattatagtacacctgttgttagttgtttttgagtctttattttatttttttctgtacaagtcagattaaatatttttggctgcctacaagttatcaaacaaatgctttaaatctttaattttaaaaccagaaattgcactcgttatcctagaactcagtatttatagtacactgtccacttaaatgctgtattaaaactatagatgagaatactaacacctttgtcatgaaagccttggaatcccagcctggtctgtgtgagcaagctcag

SEQ ID NO: 522584 - DNA, 473 bp, Homo sapiens
gacccgaatccccggtgtgtgtgcgcgcttcgtctgcaggtaggagttgtggtctggacagaagcaaagtaggccacactcgcctgcccttgggaacacccacttctccgtgccacgcccgctcctaaggttttcttcgggcagaaacgcggggatccccaagaagacgaagctcaggctgccatgcctttcccgcgaacgccacggcgcggcgcccggttcacagggcgagtcgcccacccgcgagtcggaaagcgcccggaatcttggctaaagctcagcgttctcctccggggctggggccctggccaggcctggcctgagyggtctcccctcactctgcggctcgctctcccgggctactccggcgcgcaggtgctgcgcccgcgggagagagcgatcctgcggccgtggcggacgccgggaggagccaccgggctctcctctcaggagcgcgtccccgtgccctccag

SEQ ID NO: 522585 - DNA, 492 bp, Homo sapiens
gctgcttcttagtgacactgaacagtgaagccccctgggtattcacatagtcatccagaggctctccttgacctagaggtgggagatccaagtggaataaatggtcagtaaatcaatgtcaatgtctaattgtcatgacttccttttaatctatttggttagcattaaccaaataaaacttkctgtttactggaagtagaatgggtagctatgaatcaaaatgtttagttaagaacacacagtcgggcatttggacataaataaagatggcaactaaagacactggggactaccagagaagggagagagggagcaaggcaagggctgaaaaactacctatttagtaggtatttagctcactacctgggtgatgggatcatttgtaccccaaagctcagtgtcacgcaatttagttatgtaacacacctgcacatgtacccctgactctaaaagttgaaattataaaacaaagaaaaacagtttcattagcag

SEQ ID NO: 522586 - DNA, 519 bp, Homo sapiens
ataacattcagactctcagctggtcttctgttacatgtccatggcccagttcactccatgatatacacccttctgctccgtgtcccatgggctgggctcaagtcaagcagtcagtgacagacttcattcccaataagagaaccagttcgcatgactccccatacatgttgcagctttgaaaacattcatctcaatgttcacactttcatttggtatcaagtatttcactagattcttacaaccatggtgtagtaacattcactgaggaagaagtggaggatccaagcaaggatggaacaagttgctctgggcacacaacgtgtttgcaattttacagcctcttcgtggcgcctcagtcagacattctgtgcactgatcaatgccctgttcaattaatgtaaaaggaygcactcggcgtgagattccagttgtgcacagaatatacatgagaagtgcgcctttgtcatccctactttcaaaggtgaaggccaccagcagtttcttatatgcaactgatgc

SEQ ID NO: 522587 - DNA, 519 bp, Homo sapiens
ataacattcagactctcagctggtcttctgttacatgtccatggcccagttcactccatgatatacacccttctgctccgtgtcccatgggctgggctcaagtcaagcagtcagtgacagacttcattcccaataagagaaccagttcgcatgactccccatacatgttgcagctttgaaaacattcatctcaatgttcacactttcatttggtatcaagtatttcactagattcttacaaccatggtgtagtaacattcactgaggaagaagtggaggatccaagcaaggatggaacaagttgctctgggcacacaacgtgtttgcaattttacagcctcttcgtggcgcctcagtcagacattctgtgcactgatcaatgccctgttcaattaatgtaaaaggatgcactyggcgtgagattccagttgtgcacagaatatacatgagaagtgcgcctttgtcatccctactttcaaaggtgaaggccaccagcagtttcttatatgcaactgatgc

SEQ ID NO: 522588 - DNA, 519 bp, Homo sapiens
ataacattcagactctcagctggtcttctgttacatgtccatggcccagttcactccatgatatacacccttctgctccgtgtcccatgggctgggctcaagtcaagcagtcagtgacagacttcattcccaataagagaaccagttcgcatgactccccatacatgttgcagctttgaaaacattcatctcaatgttcacactttcatttggtatcaagtatttcactagattcttacaaccatggtgtagtaacattcactgaggaagaagtggaggatccaagcaaggatggaacaagttgctctgggcacacaacgtgtttgcaattttacagcctcttcgtggcgcctcagtcagacattctgtgcactgatcaatgccctgttcaattaatgtaaaaggatgcactcggcgtgagattccagttgtgcacagaatatacatgagaagtgcrcctttgtcatccctactttcaaaggtgaaggccaccagcagtttcttatatgcaactgatgc

SEQ ID NO: 522589 - DNA, 495 bp, Homo sapiens
ctcctccttgccctgccctcatggtctgtgtactctcaggaggtcaggacaggcctttctgagaatgagaatctgttcatctgcctttctactggatacttgtcatcggcrtacaaacacatgttctctgcagtgtgtcatctttcagaacctcccctgaccctgtattccctagaagtctcgctgctttcagagccaggcttctctcctgctgccacccccactgctcttctagtcactctttaacccactccatctgcatgtggcccccaccacacccctcaaagtggtcaaggttgtcctgttgcttaattccatggaagcttggctatcttcattttattagcctcttttggcctctcaccctgtgaaaatcactacattttgtgccagagatggagctggcatctccaggcttggaagagggctgctgaagctcagccaggtgtcctaaggagcctcaggacaggggatgctcagtagccttgcaatggg

SEQ ID NO: 522590 - DNA, 662 bp, Homo sapiens
gaaggattgatgaatggataaatagataatagatgatagataggtaatagaggtaagtagacagagaaaagaaagagagattgagttttggaggcaaatagtgtacaaggaaagctaatatccagccaatatatgaacatgaagagttatatcaacaaaaattaacattactgaaatctttataagtttctgtttgacatttttcactaaaaaagacagagatatgaatatgagaattacagtaaaagatgtaaaacaatatctggggacacaaatgggctggggagatgggtagcgaagggagggccatcactttcctgtcagagacttctgtactgtttgatttttttttttaaatagaacacatagtcttgtttttttgcgtaatctttaaaaatgatttaactgctaacttaaaaaataaaaagcaatcttgataatgaactggaaattaaggatatggaactctaatgttttttaatatttcaaaaatcctgaggaaaatctttcttccctttgattctactccattgactgctgcctgtttacacactgagagtgatgcattcattcttgattcaatcagaatyagtcagatttgcaaactcatcaggaagaaatggaggaagagggagtcctttgagaccaggactcttctacca

SEQ ID NO: 522591 - DNA, 394 bp, Homo sapiens
caaagaatataggctcctttgtgagctaaaatttctagatctataactcaacaaaggtgatttatgacttttataaatgttggaggccgggcacagtgcctgacacttgtaatccagcamgttgggaaggcaaggtgggcagattgcttgagcccagaagtttgagatcagcctgggcaacatgatgaaaccccatctctacaaaaatagaaaaattagccaggtgtggtggcatgcacctgtagtcccagctactcaagacgcagaggtggggggatcacctaagcccaggaagtcgagcgaaccgtgattatgcaactgcactccagactgggtgacagactgagaccctgtctcaaaaaaataataaagttaaattaaaaattaagtgcag

SEQ ID NO: 522592 - DNA, 580 bp, Homo sapiens
tctgagtgggatggtatgagttagaggaagaattctcttgcaaattaataatcggtcattagaaacaattggttaatgggggagcctaattggagaatgatgctgagaatttgtattgatgaacctcttttagaaactgcagagggctgggcacggtggyttatggctgtaatctgcaaactctgggaggctgaggtgggagaatcgcttaaccccagaagtttgagtccagcccaggcaacacagcaagaccccatctctataaaaagaaaaaataaagaaactgcagcgccttagacctgaggtgtcatatctttgacagtgggctggcagacgtttgctttgagttccttctctcccatctggatctcccagccttttccaaattgaaaaatgccagatcaacacaaaccttaccccacccccacctccgagtcacacgtgcagaactgttgatacaccatttggcttcagcagatattacttccatactacgtattaggttgctgcaaaagtaattgtggtttttgcagttacttttgcagtggcctaatagaaatatttcttccctactctttcc

SEQ ID NO: 522593 - DNA, 580 bp, Homo sapiens
tctgagtgggatggtatgagttagaggaagaattctcttgcaaattaataatcggtcattagaaacaattggttaatgggggagcctaattggagaatgatgctgagaatttgtattgatgaacctcttttagaaactgcagagggctgggcacggtggtttatggctgtaatctgcaaactctgggaggctgaggtgggagaatcgcttaaccccagaagtttgagtccagcccaggcaacacagcaagaccccatctctataaaaagaaaaaataaagaaactgcagcgccttagacctgaggtgtcatatctttgacagtgggctggcagacstttgctttgagttccttctctcccatctggatctcccagccttttccaaattgaaaaatgccagatcaacacaaaccttaccccacccccacctccgagtcacacgtgcagaactgttgatacaccatttggcttcagcagatattacttccatactacgtattaggttgctgcaaaagtaattgtggtttttgcagttacttttgcagtggcctaatagaaatatttcttccctactctttcc

SEQ ID NO: 522594 - DNA, 467 bp, Homo sapiens
gatgctgagaatttgtattgatgaacctcttttagaaactgcagagggctgggcacggtggtttatggctgtaatctgcaaactctgggaggctgaggtgggagaatcgcttaaccccagaagtttgagtccagcccaggcaacacagcaagaccccatctctataaaaagaaaaaataaagaaactgcagcgccttagacctgaggtgtcatatctttgacagtgggctggcagacgtttgctttgagttccttctctcccatctggatctcccagccttttccaaattgaaaaatgccagatcaacacaaaccttaccccacccccacctccgagtcacacgtgcagaacwgttgatacaccatttggcttcagcagatattacttccatactacgtattaggttgctgcaaaagtaattgtggtttttgcagttacttttgcagtggcctaatagaaatatttc

SEQ ID NO: 522595 - DNA, 393 bp, Homo sapiens
cacagacatgggaggagagggagggatcacctgacccttttcatttcgtaggtatctattcctgcctgrtgtttataagcctgacacttggctgggcttccctggggtatatctccatggctctgtggcaagacttgaataggctggtgatgacacttgatgtccccatagccaccttcaaaaatgtcattaaaggcttgcgagaaaatggaaggaaacacagaaaacctgattttgaaagttgccgcctctccttcttcctcattcagagcgtgtacgatattgctgtgcggtgtttgttggactgcaatttagcacaacaccttttctaatatttggcagtttcttgcagagttaagcctaccctataaggaagcaaatttactttcattc

SEQ ID NO: 522596 - DNA, 393 bp, Homo sapiens
cacagacatgggaggagagggagggatcacctgacccttttcatttcgtaggtatctattcctgcctgatgtttataagcctgacacttggctgggcttccctggggtatatctccatggctctgtggcaagacttgaataggctggtgatgacacttgatgtccccatagccaccttcaaaaatgtcattaaaggcttgcgagaaaatgkaaggaaacacagaaaacctgattttgaaagttgccgcctctccttcttcctcattcagagcgtgtacgatattgctgtgcggtgtttgttggactgcaatttagcacaacaccttttctaatatttggcagtttcttgcagagttaagcctaccctataaggaagcaaatttactttcattc

SEQ ID NO: 522597 - DNA, 465 bp, Homo sapiens
tcccagcaaatcttactagccactcaggaagcctattttaagatagtcccaatctcaaacttgttctaagacttgtatgctgactgaggagaaagagcctcatgacaaaaattcaactagagctgtgggtgacagttgtgtgtctcactactggtctgggcccaggtttcccgtgagcacctaatgaatagactcawttgcagggatcgtcaagatgctcactatgtctacctcatagcctcaaaagaagtgatcagctaacagaatttgtgtagtatcctgaagggaaattaatccagatatagaggaaaagataaggattttttaaaacagacatgtgattcaacagttgtttaagatgcagaaagctgtaagagacagttgttcccactctaatgacaagaaaaagctgtatggtctgcaaaatcatacgtgctttgatcccaccagagagctgaagttgca

SEQ ID NO: 522598 - DNA, 537 bp, Homo sapiens
acccaaaggcacaaccaggcaggctgagaaggggaacctttaacagcgaaaatgaggaaggttacatagttgttttgaaacaattatccttggccacaaggaataatcacaagggtggcatcagtccaaggatgaataggcagttgctgggcagatgtcrttgcagagagattctttgggtaaggttgtggtggcctttgtgcaaagttatggttttcagagagttcttgtaatagtttttatcacaggcatgtgtgtgtgagcacccctcctttatgatctcctgattgaattttgttaggatttggcatacgtgactccatttttcattctgacaacttttacaggtcattgcttttcatccatttttactaagggctggacttgcttaaattccaggaaattatgaggtcttgattcgtataattatcacaagtgctcatgttgctgactcagttgcctatttgggatgttataattgtcttttttctccttcctgtgctgtaatttacacaatccttagaggagattaatttg

SEQ ID NO: 522599 - DNA, 537 bp, Homo sapiens
acccaaaggcacaaccaggcaggctgagaaggggaacctttaacagcgaaaatgaggaaggttacatagttgttttgaaacaattatccttggccacaaggaataatcacaagggtggcatcagtccaaggatgaataggcagttgctgggcagatgtcattgcagagagattctttgggtaaggttgtggtggcctttgtgcaaagttrtggttttcagagagttcttgtaatagtttttatcacaggcatgtgtgtgtgagcacccctcctttatgatctcctgattgaattttgttaggatttggcatacgtgactccatttttcattctgacaacttttacaggtcattgcttttcatccatttttactaagggctggacttgcttaaattccaggaaattatgaggtcttgattcgtataattatcacaagtgctcatgttgctgactcagttgcctatttgggatgttataattgtcttttttctccttcctgtgctgtaatttacacaatccttagaggagattaatttg

SEQ ID NO: 522600 - DNA, 537 bp, Homo sapiens
acccaaaggcacaaccaggcaggctgagaaggggaacctttaacagcgaaaatgaggaaggttacatagttgttttgaaacaattatccttggccacaaggaataatcacaagggtggcatcagtccaaggatgaataggcagttgctgggcagatgtcattgcagagagattctttgggtaaggttgtggtggcctttgtgcaaagttatggttttcagagagttcttgtaatagtttttatcacaggcatgtgtgtgtgagcacccctcctttatgatctcctgattgaattttgttaggatttggcatacgtgactccatttttcattctgacaacttttacaggtcattgcttttcatccatttttactaagggctggacttgcttaaattccaggaaattatgaggtcttgattygtataattatcacaagtgctcatgttgctgactcagttgcctatttgggatgttataattgtcttttttctccttcctgtgctgtaatttacacaatccttagaggagattaatttg

SEQ ID NO: 522601 - DNA, 588 bp, Homo sapiens
gctcacgcctgtaatctcagaactttgggaggtcaggggcrgatcacttgaggccaggagttcgagaccagcctggccaacatctctactaaaaaaatacaaaaaattaattgggcgtggtggtgtgtccctgtagtctcagctctgaaggctgaagcaagagaatcacttgaaccggggaggtggaggttgcagtgagttgagatcgtgccactgcactccagcctgcatgacagagggagaattcgtctcaaaaaaaaaaaaaaaaaaaaggagtaaataagaagatgggagtaaacagaaaatagcacccaccagcctaaactagacgtgaattatgtcattatgatgttcatttctttaatagttaagaccccttagggtaatgtgtgggcatactgtcaatacttgtaataattcctgaagaactcttaaggtgttggctgacactaaataacaatgttatgcatttctttaaaaacaaggtatgtctggggcagcatagtgttcccagagcagactggatgtggagaaaagggattcagagttccttgacaacaacagcaatgacatccattcaaccacgca

SEQ ID NO: 522602 - DNA, 588 bp, Homo sapiens
gctcacgcctgtaatctcagaactttgggaggtcaggggcggatcacttgaggccaggagttcgagaccagcctggccaacatctctactaaaaaaatacaaaaaattaattgggcgtggtggtgtgtccctgtagtctcagctctgaaggctgaagcaagagaatcacttgaaccggggaggtggaggttgcagtgagttgagatcgtgccactgcactccagcctgcatgacagagggagaattcgtctcaaaaaaaaaaaaaaaaaaaaggagtaaataagaagatgggagtaaacagaaaatagcacccaccagcctaaactagacgtgaattatgtcattatgatgttcatttctttaatagttaagrccccttagggtaatgtgtgggcatactgtcaatacttgtaataattcctgaagaactcttaaggtgttggctgacactaaataacaatgttatgcatttctttaaaaacaaggtatgtctggggcagcatagtgttcccagagcagactggatgtggagaaaagggattcagagttccttgacaacaacagcaatgacatccattcaaccacgca

SEQ ID NO: 522603 - DNA, 550 bp, Homo sapiens
ggctcacgcctgtaatctcagaactttgggaggtcaggggcggatcacttgaggccaggagttcgagaccagcctggccaacatctctactaaaaaaatacaaaaaattaattgggcgtggtggtgtgtccctgtagtctcagctctgaaggctgaagcaagagaatcacttgaaccggggaggtggaggttgcagtgagttgagatcgtgccactgcactccagcctgcatgacagagggagaattcgtctcaaaaaaaaaaaaaaaaaaaaggagtaaataagaagatgggagtaaacagaaaatagcacccaccagcctaaactagacgtgaattatgtcattatgatgttcatttctttaatagttaagaccccttagggtaatgtgtgggcatactgtcaatacttgtaataattcctgaagaactcttarggtgttggctgacactaaataacaatgttatgcatttctttaaaaacaaggtatgtctggggcagcatagtgttcccagagcagactggatgtggagaaaagggattcagagtt

SEQ ID NO: 522604 - DNA, 593 bp, Homo sapiens
ggcagtgtcttgatctgtaggcgccagggagctggacctctgggcatacccttgggggttcacggagaagtcagctcatacacagaatggctaatctgcagtatgcactgtctgtacatggcaggagtacttttcatcaagtttactaaaattgggcaaatttcagtatttaataaatgttttttgccctcaagttaataccgaggttaccatagaagcagactctataaaaatttgaaaatcagacaatgagatttaaaaagagccgtagataggagctgtttttcagaaagtgcatgtgtgtgtgtttatgaataatacatgcaaacgtaacttgaggccagccacagcggagggaaacggggctccactgactggcatgattcctggagagcagagaaagcccttgccccaaagcctcccagctyttcagttgtctcagaaagatctttaataggaaatggattcctttatttcataatcatgtattcttaaagccatgaatgcaaaatacctaaattcctattaatccataaattcctattaatcagataatataatgagacaatccagcagaaaaacggccaaaagtc

SEQ ID NO: 522605 - DNA, 593 bp, Homo sapiens
ggcagtgtcttgatctgtaggcgccagggagctggacctctgggcatacccttgggggttcacggagaagtcagctcatacacagaatggctaatctgcagtatgcactgtctgtacatggcaggagtacttttcatcaagtttactaaaattgggcaaatttcagtatttaataaatgttttttgccctcaagttaataccgaggttaccatagaagcagactctataaaaatttgaaaatcagacaatgagatttaaaaagagccgtagataggagctgtttttcagaaagtgcatgtgtgtgtgtttatgaataatacatgcaaacgtaacttgaggccagccacagcggagggaaacggggctccactgactggcatgattcctggagagcagagaaagcccttgccccaaagcctcccagcttttcagttgtctcagaaagatctttaataggaaatggattcctttatttcataatcatgtattcttaaagccatgaatgcaaaatacctaaattcctattaatccataaattcctattaatcrgataatataatgagacaatccagcagaaaaacggccaaaagtc

SEQ ID NO: 522606 - DNA, 463 bp, Homo sapiens
tgcaaattaaagtcacggtgcaacccccccccccccgcccccacacccactgctctggcagaaatgaaaaaccgtgattctatgacttgctggtgaggacagagctgcgggtgtggtgggaactggtactgccctttgcaacatcagtttgcccctttgcatgtgggtgattaagatcccagctcttccattccgggaggraacccaggagaaatgcattcacctgtgtgggaggagacctgggagggcgttcccagcagtgttcacatgagaaccaaagcctggaaacagatctgtgtccattggcgtctgcctgggtgagcactgcggttcgctcggttcatcctacagagcagtgagcactgatgaaaaggtccagtgccttcctcagtggtgccgtgcgctaatgtcctcctgagtccacggagccccacacggaggcaccccaaccacaaatcctccc

SEQ ID NO: 522607 - DNA, 601 bp, Homo sapiens
ttagtaacagcttgaattttctgcgatcagctttgggtgaaaaaattgcaaacattcacagaggctgcttatgcattaaaactttatctgtggttatgcatccatatattcttctgcttacaaaaaaaatcaaaaggtatattaaagttcaggagactaagagtggttcgattcccccttcacccagctcttacacacccaacctgaaaaggacccttgagggaagtgcctgagtccccttaagccagcagccacctcagaaccccatrgcgagtctatggtaggcccgtccactgatttccacctgcaaagctagcgcggtgcaatgccagatgagctggcacaggtccaatgtgtgatctctgccccatgatgctctgaaatcactgcctccagccccggagtcttagctgtgtggcatcttcttgttactttacccttctgggcggagatgaggaagggcaaaccccaagggccccccaccgtctacaggcacacatggcagaaacatttaatacctatttataacatttttctcagaaatgcttgttatagatgagtttttcctattatatggagatattaatctctttacatgtct

SEQ ID NO: 522608 - DNA, 668 bp, Homo sapiens
gctggagctgagcaaggcctgtagcaatgggcaggcttcagatattcagaaaggggccaggagggcattccaggggaggggctctttcaatcaaaggcatgaagacagagttgacatgatctatgtaggagaggagaagaagactgcctcaaatacctgtgttgggtgggcccaaatgaaaatccaatcctgaatgcaaggatattgggcctaatgtcatgagaaggaccctcaaraattattctaagttttatccccgaactctttatcaattcaaaatgtcaatgggcatatttggttataaagaccctttctagagaaagtcagcccttgaaattaacttactgtcaagaaaattacattagagaaatcagtttctgtgtaaaaaaaatttatagttacctggaattgattcttcattcaacacatttatgaagtcacagctattccatgcacttggcattgggtggccttatggacatcttttcagcccacaccacaaaatctagattcctcatcatactggctacccagagctcttctattggagtgatgttagataaaggatactaaaaatgggtgctgatgttaaggggaaccctcaaaatttccttgatactctatcttcttgggtggcctagtgcctcctcaaagtctatagtttagga

SEQ ID NO: 522609 - DNA, 516 bp, Homo sapiens
attgtgcctttatcccttgcatattgctttcttaaatagaataacatctcgcctattccatttagagtgaccaactttttcagtttgtttatttttattcttagcttattggaggtttaaattacgatgaagtaagaactgtaatttctttcataatgtttaaacttagggcttccttctacgcttatttcttatcctgcagaaaactgataaatgttcactcattttatctagtttttctatagttaattttgtttttagctactcaatccatcttacacttatttttggttacagtcctctgtgaagatttaaatggatttccaaatagctaaccagttgtatccaaggcatttgttgaaagatccttctctacctcattgattcccatgcagtctctcctacatcgaataccaataaacagasatgaattgaactgtaggggtcaattctctaactattcctttgatagatgagaaagctgacagctagagtgttaagtgacctgcctgtcac

SEQ ID NO: 522610 - DNA, 516 bp, Homo sapiens
attgtgcctttatcccttgcatattgctttcttaaatagaataacatctcgcctattccatttagagtgaccaactttttcagtttgtttatttttattcttagcttattggaggtttaaattacgatgaagtaagaactgtaatttctttcataatgtttaaacttagggcttccttctacgcttatttcttatcctgcagaaaactgataaatgttcactcattttatctagtttttctatagttaattttgtttttagctactcaatccatcttacacttatttttggttacagtcctctgtgaagatttaaatggatttccaaatagctaaccagttgtatccaaggcatttgttgaaagatccttctctacctcattgattcccatgcagtctctcctacatcgaataccaataaacagacatgaattgaactgtaggggtcaattctctaactattcctttgatagatgagaaagckgacagctagagtgttaagtgacctgcctgtcac

SEQ ID NO: 522611 - DNA, 601 bp, Homo sapiens
tgtgtcaccttttaccaggggcagttgggacattctctttccactcctataactcaaatgagtttcttttagacatcacttttattcttggtttttatatattatacgtacatttaaggaaaagttttaagtctccataaaatcatctttctcctttttctttatcacattcttttctagtctttgtttatatgcatgcatattttatttagctataatcatagtggatatagaaaattgttaccrtatttttacctagcacaacctaaacacattaacttatcagaactgtcctaattatcttctcgatgtttttcaagtactctacctacttagcatatagtattttttttaattgtcctcctgtgggatattgcgcgtggccagccttcacctactgcggctcattcttcaatggcacttgcttctatgtactgggcactaagcactttgtgtcagatatatttttttttctattttataaatgaggacctgaagcttagctttgtttagtcacttcctccaggttagctagtaaatatcagaggcaggatttcaagtcaagtgtgcctaactcagaagatcatattctttacctcta

SEQ ID NO: 522612 - DNA, 584 bp, Homo sapiens
ttttcattatccaaattcattacccacagagcagagaaatacgtatacattaaaatgcagttttaatatgtacaaatatataataaaatgctatatatgtactttctaattttgaaatggataaattaagatgctaaaatatacacaattaccaaaataatttttacaggcagaaatgtggaagggactctatcccggcactgttttttaaaaaacattgtctttacatgggacattgattgcttccatatctcagcctaggacgccttaggatatttaattttgtctctcttctagtagaaaaccaactttttcagtagagcagcttttaattattaaggattatgtataaattgcacatttttctatcagacttgtgataaattaggtcaccagataattctgagatcctctccttacatcacttgtttcaagtgaaacttcccagtgtttccaacaacgtaatattctgtccctattaagatgaccaggtaaaatacaaggtaccccattacatttgaatttcagataaattacacwttattttttagcataagtatgtcccacgcaatactaaacgacat

SEQ ID NO: 522613 - DNA, 535 bp, Homo sapiens
tgaagatcttgttaacaggcagattctggtyctgtgggtctggggcagagcctgagattctgcctttccaacaaactcccatgtaacaccagtgccactgctccagggacaccatttgagtagcaaagacctatcaccagcaatgcttttccccacactatgcacctctactgttaaaactgaagaatcaaaggatggaatccctgcaatgcccaattcgagaagcccttggcaaagtgtgtgaggctccctagagacagttgcttaccaagcttccagtaaagaaatggtagcttttcattactccagtgatatgtttaggcactgtggaatccctacgtgatggggagaaaaaaaccctagcagagatacctaatacaatacatgcttatgatccatccacttagtgactataaggtttgagagcaatgcagtgagcatctgattatagtgaatgaaggaaaatgcagtttgtggtttagcattacaatgaatattcatgagtctggagaaatctcctcctttaggactctta

SEQ ID NO: 522614 - DNA, 535 bp, Homo sapiens
tgaagatcttgttaacaggcagattctggttctgtgggtctggggcagagcctgagattctgcctttccaacaaactcccatgtaacaccagtgccactgctccagggacaccatttgagtagcaaagacctatcaccagcaatgcttttccccacactatgcacctctactgttaaaactgaagaatcaaaggatggaatcyctgcaatgcccaattcgagaagcccttggcaaagtgtgtgaggctccctagagacagttgcttaccaagcttccagtaaagaaatggtagcttttcattactccagtgatatgtttaggcactgtggaatccctacgtgatggggagaaaaaaaccctagcagagatacctaatacaatacatgcttatgatccatccacttagtgactataaggtttgagagcaatgcagtgagcatctgattatagtgaatgaaggaaaatgcagtttgtggtttagcattacaatgaatattcatgagtctggagaaatctcctcctttaggactctta

SEQ ID NO: 522615 - DNA, 535 bp, Homo sapiens
tgaagatcttgttaacaggcagattctggttctgtgggtctggggcagagcctgagattctgcctttccaacaaactcccatgtaacaccagtgccactgctccagggacaccatttgagtagcaaagacctatcaccagcaatgcttttccccacactatgcacctctactgttaaaactgaagaatcaaaggatggaatccctgcaatgcccaattcgagaagcccttggcaaagtgtgtgagrctccctagagacagttgcttaccaagcttccagtaaagaaatggtagcttttcattactccagtgatatgtttaggcactgtggaatccctacgtgatggggagaaaaaaaccctagcagagatacctaatacaatacatgcttatgatccatccacttagtgactataaggtttgagagcaatgcagtgagcatctgattatagtgaatgaaggaaaatgcagtttgtggtttagcattacaatgaatattcatgagtctggagaaatctcctcctttaggactctta

SEQ ID NO: 522616 - DNA, 535 bp, Homo sapiens
tgaagatcttgttaacaggcagattctggttctgtgggtctggggcagagcctgagattctgcctttccaacaaactcccatgtaacaccagtgccactgctccagggacaccatttgagtagcaaagacctatcaccagcaatgcttttccccacactatgcacctctactgttaaaactgaagaatcaaaggatggaatccctgcaatgcccaattcgagaagcccttggcaaagtgtgtgaggctccctagaracagttgcttaccaagcttccagtaaagaaatggtagcttttcattactccagtgatatgtttaggcactgtggaatccctacgtgatggggagaaaaaaaccctagcagagatacctaatacaatacatgcttatgatccatccacttagtgactataaggtttgagagcaatgcagtgagcatctgattatagtgaatgaaggaaaatgcagtttgtggtttagcattacaatgaatattcatgagtctggagaaatctcctcctttaggactctta

SEQ ID NO: 522617 - DNA, 607 bp, Homo sapiens
tgttgacacaaatatgttatttgattcatttcaacctaggattaccgtatgcctattatgtaccgggtactgcgctaaccaagagcagtaaacaaaagtgtcctttacatatctatgtccttgtgcaatggcatgtccccttctcaccttctcattctgttccttatccctcaagacgaaattatctcataattctattatgccctttatgactcaatcttcataggcttactcagctatacctgaatttctctctagtcatcayatattttaccttgtgcctcagtttccttaacttgtggggaagactgaatgaagagaggtgaagcacttaaattgtgccaggcacataatatatattaaacaaatattagttattacgattattatatttatcattgtgattggcagagagcaataattggagggagcttggcattaagatgggtcattcaaagagagaaggcaaagatccaaagcattggtaatgtggaggttccttcctggaccaactgcataaaaggaagaagatggtctttgaatgaaaatagataatgctagaagcattcttctgattgcttcagatgtcaggtccaggctatggcca

SEQ ID NO: 522618 - DNA, 686 bp, Homo sapiens
tatgtgtactgtatctaatttcttattttttaaaaaaatttatttatttatttatttatttatttaattatttatttatttatattatagacacagggtctccctatgttgcccaggctggtatcgaactctgttgcccaggctggtattgaactcctgcgctcaagtgatcctcctgcctcagcctcccaaaatgctgggattacaggtgtgaaccactctacccagcccctccttgctcattcgtaatgaaacaacgctttgtaaaccgtgaaagtgctatataaagatatctttaaaataccaaagaagtccctgtaattagatattctaatgctagctactgtaacaaataaacctcagtatgacagtggcttactcctgtagaagtttacttcttgtttgcaaataaatcccgtacacttggaggtgtgtgccaaatggtgattcagggaaccaggcaggcttctttcatcttgtggcttggtcatcacctaggggctcacagatgtstccttccagggagtagaaatgtaaaaagaaaccagaaaaggcatatctgcctcttcaaaacctcagccttggaacaatacatgtcacttccattcacatttcttggcaataaataatcatgtgcatgcacttgggaaacaagagaggagctagaaaaggcagtccttgttgag

SEQ ID NO: 522619 - DNA, 614 bp, Homo sapiens
accaattaaaactttacagcccattcaaactatscactcacatcacacaatttaaagacaacatacataaattggtctgagcaaattgtagcaaattgctacaatgtagacatacagctccccacaaaagtttgtgaaaggcctgcagtgctcacacctgtatggctgtatataatcctgaaaggggaaaattaaaatgcacagtagccctttgaaagctaaaaaaaaaaaaagtagatagtgaaggactggttttctttcttaaaaaataagtccttttcaagttataaatgatattcaagtctaatgggtaactatgggtaacaatggccaacacttatgtagcgcgtgtgtgccaaaccctgttgtccaaggctgtgatgcatatttactaatttaatccccaggtcagacctatgggggtaaacactatgatttcattatcctaatgtgatagatgaagaagctgagaggctaagtaatttgcccaaggtcacacagctagttaatgttggaattaaggcttgaaatcaggcagtctggctacagggttgtggccttaaccatcacattattgcctctagatattccagaaacaactaaatcaaccatta

SEQ ID NO: 522620 - DNA, 503 bp, Homo sapiens
gacttgagttcccattaattaactgtttaacacaaagcgacccagcgatcattcatcagagctacaaaaataaaatccccagcaaggaaatgaaattggggtacaggcacagaggaccagaggccaccgtattcatcacttgtctgtttccttctgctcccctgggcttggatgtccccaagatcagaccatcatccatacacccctgataggtgggtaattgcattcttgagccacagcatctggtcctttttgaacayctttactgctgagcagtgtatacaaagaacaagatccaaatactgcagaattgattcttccaccctctccaagaggcatggctccaaagctagtttaattataggtgtttagacgtactgcgatgaataccttgggaacagccgttccacagcaccgctctggcaagcacatactttcttttctatttttttttccactttctattttaacaaacagtcaactgtgtgctgcatgtaagtgat

SEQ ID NO: 522621 - DNA, 632 bp, Homo sapiens
tggtggacccgagccctaatcatatggctgacaccaaagtcatgaaggtaggggaatgattgttgagtaggaaattagtaatgtctgctaaaagctgcatctcktgagttttgatatataatactaccattaccatttaagtttaaaactcataaatttctgttatacattattttattcatgaattacttagatgttttttggagggtagttttttgttattgatttctaatgttatagcactttggttagaatttgtgttaaacatggtatcagttcattagtatttgttgaaaattgctttgtggcctagttcacacttaatttttctaatattgcatgtgtgtttgaaaagcatatgaattttctttctaaagtagagcatccacaaaatcaagcctattaattgtgtcattcagatattttctaccattactagtgtttgacagtttctgatggagatgtgacagcatttcccactcttttggatatataaagcaaagatggcagtgtttggacagtgcagtctttcagcatctgctggctgtgggtgggaataagggagggaagagaattaattctatttggaagcattatatcagtatccatgactgtaaaattcatgctatgta

SEQ ID NO: 522622 - DNA, 632 bp, Homo sapiens
tggtggacccgagccctaatcatatggctgacaccaaagtcatgaaggtaggggaatgattgttgagtaggaaattagtaatgtctgctaaaagctgcatctcgtgagttttgatatataatactaccattaccayttaagtttaaaactcataaatttctgttatacattattttattcatgaattacttagatgttttttggagggtagttttttgttattgatttctaatgttatagcactttggttagaatttgtgttaaacatggtatcagttcattagtatttgttgaaaattgctttgtggcctagttcacacttaatttttctaatattgcatgtgtgtttgaaaagcatatgaattttctttctaaagtagagcatccacaaaatcaagcctattaattgtgtcattcagatattttctaccattactagtgtttgacagtttctgatggagatgtgacagcatttcccactcttttggatatataaagcaaagatggcagtgtttggacagtgcagtctttcagcatctgctggctgtgggtgggaataagggagggaagagaattaattctatttggaagcattatatcagtatccatgactgtaaaattcatgctatgta

SEQ ID NO: 522623 - DNA, 632 bp, Homo sapiens
tggtggacccgagccctaatcatatggctgacaccaaagtcatgaaggtaggggaatgattgttgagtaggaaattagtaatgtctgctaaaagctgcatctcgtgagttttgatatataatactaccattaccatttaagtttaaaactcataaatttctrttatacattattttattcatgaattacttagatgttttttggagggtagttttttgttattgatttctaatgttatagcactttggttagaatttgtgttaaacatggtatcagttcattagtatttgttgaaaattgctttgtggcctagttcacacttaatttttctaatattgcatgtgtgtttgaaaagcatatgaattttctttctaaagtagagcatccacaaaatcaagcctattaattgtgtcattcagatattttctaccattactagtgtttgacagtttctgatggagatgtgacagcatttcccactcttttggatatataaagcaaagatggcagtgtttggacagtgcagtctttcagcatctgctggctgtgggtgggaataagggagggaagagaattaattctatttggaagcattatatcagtatccatgactgtaaaattcatgctatgta

SEQ ID NO: 522624 - DNA, 632 bp, Homo sapiens
tggtggacccgagccctaatcatatggctgacaccaaagtcatgaaggtaggggaatgattgttgagtaggaaattagtaatgtctgctaaaagctgcatctcgtgagttttgatatataatactaccattaccatttaagtttaaaactcataaatttctgttatacattattttattcatgaattacttagatgttttttggagggtagttttttgttattgatttctaatgttatagcactttggttagaatttgtgttaaacatggtatcagttcattagtatttgttgaaaattgctttgtggcctagttcacacttaatttttctaatattgcatgtgtgtttgaaaagcatatgaattttctttctaaagtagagcatccacaaaatcaagcctattaattgtgtcattcagatattttctaccattactagtgtttgacagtttctgatggagatgtgacagcatttcccactcttttggatatataaagcaaagatggcagtgtttggrcagtgcagtctttcagcatctgctggctgtgggtgggaataagggagggaagagaattaattctatttggaagcattatatcagtatccatgactgtaaaattcatgctatgta

SEQ ID NO: 522625 - DNA, 521 bp, Homo sapiens
catttcaagtattaaatggcacagagatatcagttgtctctggaactaggragtaagtccactgacagggcccagcaattaagctcttccaaggagcctgtccctgtctatacaccatatagccagttagagctaccgccagttccttcctgctccctgaaatgaccagtgcctccctgaggacaggcacatcaggtctcagccaaccttcccttccaaacataactcagccagacccctctggtctctaaatagtatctcttctctttgtctttttctgtttcaggcctccagttaccaactcctgtctggtttcatgtccttttctatctggcagtgggaataatgtttttagtgaacactgttctctgggtgacaatacgtaaagaactgaaaagaaagaaaaagtggaatttagaaatctctttggattctggtcatgagaagaaggtaatttccagccttcaagaagacagacatttagaagaagagctgaaatgtcaggaacaaaaagaagaaca

SEQ ID NO: 522626 - DNA, 511 bp, Homo sapiens
catttcaagtattaaatggcacagagatatcagttgtctctggaactaggaagtaagtccactgacagggcccagcaattaagctcttccaaggagcctgtccctgtctatacaccatatagccagttagagctaccgccagttccttcctgctccctgaaatgaccagtgcctccctraggacaggcacatcaggtctcagccaaccttcccttccaaacataactcagccagacccctctggtctctaaatagtatctcttctctttgtctttttctgtttcaggcctccagttaccaactcctgtctggtttcatgtccttttctatctggcagtgggaataatgtttttagtgaacactgttctctgggtgacaatacgtaaagaactgaaaagaaagaaaaagtggaatttagaaatctctttggattctggtcatgagaagaaggtaatttccagccttcaagaagacagacatttagaagaagagctgaaatgtcaggaacaaa

SEQ ID NO: 522627 - DNA, 568 bp, Homo sapiens
ctgcccaaccattcaggcttttcattattataggaagcatctggccaaggaccaccaacatcttcctgtcctgcccctgaagctgtgagttccccargtggagacacagcctgttccccaacacctacactcatgaacacgggagggttggtcaaaattgcaccgctatcatgcttagttttatactcaggtgtaagtgactgatagaagggccttttggaggtggagagtgcgcaggttctgaagaggcaagaccggggaagtctggacctgcttccagagtgtcctcccacaaggcttagtgctcaggacctgtagtgggttgaatatgttccctaaagttcgtgtctatccagcatctcaaaatgtgaacgcatttggaaactggggctttgaagacgtaagtagttaaggatcttgagatgaaatcatgctggatataggatgggccttaaattcaatgactggtatctttataagagaaaggagagggaaattcggacacacagagatgagtaagaagccatgtgaagatggagggagagattggaatgaggctgccacaagc

SEQ ID NO: 522628 - DNA, 568 bp, Homo sapiens
ctgcccaaccattcaggcttttcattattataggaagcatctggccaaggaccaccaacatcttcctgtcctgcccctgaagctgtgagttccccaagtggagacacarcctgttccccaacacctacactcatgaacacgggagggttggtcaaaattgcaccgctatcatgcttagttttatactcaggtgtaagtgactgatagaagggccttttggaggtggagagtgcgcaggttctgaagaggcaagaccggggaagtctggacctgcttccagagtgtcctcccacaaggcttagtgctcaggacctgtagtgggttgaatatgttccctaaagttcgtgtctatccagcatctcaaaatgtgaacgcatttggaaactggggctttgaagacgtaagtagttaaggatcttgagatgaaatcatgctggatataggatgggccttaaattcaatgactggtatctttataagagaaaggagagggaaattcggacacacagagatgagtaagaagccatgtgaagatggagggagagattggaatgaggctgccacaagc

SEQ ID NO: 522629 - DNA, 542 bp, Homo sapiens
tttcatagaaaaaagtctaggggattcaccgctcagcaggccatcctggctatctgggcataaccaccacccagagtgtaatttcttctaaggcaatcacccaagtctttcacattttataccttcacagccctgacaaaaactgctacataataaacactaaacaaatgcctatgaaaggcaagaaggacgtaagagagggaaagaagcaaagaaatgaacaatcgtagcacctgaggccggattaaagaaaggaaaaaagcttgtawgggtcttttcatattgacaaagctttagtggaacactcttttggtgggttttcaagggatcagaacgtttgggcagaaaacagaaaaatacagacataaagaagagacctaaatatataagcataacattgggaaaaagccttttcagaactgcaactcatgccttattcgaacatgttctgaacaaggtctcttatctaaagttgtttctggcttcagacagcaggtggcagcagaatcaagctttctggttgcagaaacttctggagccag

SEQ ID NO: 522630 - DNA, 542 bp, Homo sapiens
tttcatagaaaaaagtctaggggattcaccgctcagcaggccatcctggctatctgggcataaccaccacccagagtgtaatttcttctaaggcaatcacccaagtctttcacattttataccttcacagccctgacaaaaactgctacataataaacactaaacaaatgcctatgaaaggcaagaaggacgtaagagagggaaagaagcaaagaaatgaacaatcgtagcacctgaggccggattaaagaaaggaaaaaagcttgtaagggtcttttcatattgacaaagctttagtggaacactcttttggtgggttttcaagggatcagaacgtttgggcagaaaacagaaaaatacagacataaagaagagacctaaatatataagcatarcattgggaaaaagccttttcagaactgcaactcatgccttattcgaacatgttctgaacaaggtctcttatctaaagttgtttctggcttcagacagcaggtggcagcagaatcaagctttctggttgcagaaacttctggagccag

SEQ ID NO: 522631 - DNA, 542 bp, Homo sapiens
tttcatagaaaaaagtctaggggattcaccgctcagcaggccatcctggctatctgggcataaccaccacccagagtgtaatttcttctaaggcaatcacccaagtctttcacattttataccttcacagccctgacaaaaactgctacataataaacactaaacaaatgcctatgaaaggcaagaaggacgtaagagagggaaagaagcaaagaaatgaacaatcgtagcacctgaggccggattaaagaaaggaaaaaagcttgtaagggtcttttcatattgacaaagctttagtggaacactcttttggtgggttttcaagggatcagaacgtttgggcagaaaacagaaaaatacagacataaagaagagacctaaatatataagcataacattgggaaaaagccttttcagaactgcaactcatgccttaytcgaacatgttctgaacaaggtctcttatctaaagttgtttctggcttcagacagcaggtggcagcagaatcaagctttctggttgcagaaacttctggagccag

SEQ ID NO: 522632 - DNA, 542 bp, Homo sapiens
tttcatagaaaaaagtctaggggattcaccgctcagcaggccatcctggctatctgggcataaccaccacccagagtgtaatttcttctaaggcaatcacccaagtctttcacattttataccttcacagccctgacaaaaactgctacataataaacactaaacaaatgcctatgaaaggcaagaaggacgtaagagagggaaagaagcaaagaaatgaacaatcgtagcacctgaggccggattaaagaaaggaaaaaagcttgtaagggtcttttcatattgacaaagctttagtggaacactcttttggtgggttttcaagggatcagaacgtttgggcagaaaacagaaaaatacagacataaagaagagacctaaatatataagcataacattgggaaaaagccttttcagaactgcaactcatgccttattcgaacatgttctgaacaaggtctcttatcyaaagttgtttctggcttcagacagcaggtggcagcagaatcaagctttctggttgcagaaacttctggagccag

SEQ ID NO: 522633 - DNA, 530 bp, Homo sapiens
gccttaccctgaggagagggagataggatgtaccagctgatgtggggragtgaggacacaggattagaggggagtggatactgtgaattgcacctagaaacaacagcgctaaggcaggcttcttccccttgaactatgcttccattaggggaagaatgcataaaatgagtaaaataaaagctgcagaccaggcatggtggctcatgcctataatccctgcactttgggaggccatattgtacggattgcttgagcccaggagttgaagaccagccctggcaatgtagcaagatcctgtgtctacaaataataatttaaaaaaattagcctggcatagtgacacatgcctatggtcccagttactcaagaggttaaggcaggaggattgcctaagcccaggaggttaaagctgcagtgagccatgatcatgccactatactccagcctaggggacagagtgagaccctgtctcaattaaaaaaaaaaaaaaggtatattccctgggccaggttttctctctctgtttatct

SEQ ID NO: 522634 - DNA, 530 bp, Homo sapiens
gccttaccctgaggagagggagataggatgtaccagctgatgtgggggagtgaggacacaggattagaggggagtggatactgtgaattgcacctagaaacaacagcgctarggcaggcttcttccccttgaactatgcttccattaggggaagaatgcataaaatgagtaaaataaaagctgcagaccaggcatggtggctcatgcctataatccctgcactttgggaggccatattgtacggattgcttgagcccaggagttgaagaccagccctggcaatgtagcaagatcctgtgtctacaaataataatttaaaaaaattagcctggcatagtgacacatgcctatggtcccagttactcaagaggttaaggcaggaggattgcctaagcccaggaggttaaagctgcagtgagccatgatcatgccactatactccagcctaggggacagagtgagaccctgtctcaattaaaaaaaaaaaaaaggtatattccctgggccaggttttctctctctgtttatct

SEQ ID NO: 522635 - DNA, 622 bp, Homo sapiens
gttgtcagtgtcctcgggtgtctatcctcaagcattgcaatcaaataaactctatacttaatcatattttctgaatttcattatttaaggtagataggaataggagagccagttgtcgaacgtttaccgcactacactggtgcaatctgtcagcacctcccctcctacccggaagcacaacttttccgtcctgtcctgaggatccatactgagttmtgggacaccatgcagtcatgcccagggctcaccacatgggggagttaattccttgtggagctaatatttgacaaataagaaacgagagctggtggattaattcttgcctcttccccgctccccaccgcagacggtcctacttacaacgcagctcagagcacagttctgttgcattgagctatcccctgcacttagcagcagcctgtccctcacacctcctaggatggctctccctcctcttcccattctcttattcctctgctctgagatcgaactccctttaacaatagcacattcaggctttgcgttctagggaagtcagggtaagacaggacctaatgtggaaagtgagtgtggttgggaagagcaagggattgtgtaggaacctgaagccagcaacacggag

SEQ ID NO: 522636 - DNA, 622 bp, Homo sapiens
gttgtcagtgtcctcgggtgtctatcctcaagcattgcaatcaaataaactctatacttaatcatattttctgaatttcattatttaaggtagataggaataggagagccagttgtcgaacgtttaccgcactacactggtgcaatctgtcagcacctcccctcctacccggaagcacaacttttccgtcctgtcctgaggatccatactgagttctgggacaccatgcagtcatgcccagggctcaccacatgggggagttaattccttgtggagctaatatttgacaaataagaaacgagagctggtggattaattcttgcctcttcccsgctccccaccgcagacggtcctacttacaacgcagctcagagcacagttctgttgcattgagctatcccctgcacttagcagcagcctgtccctcacacctcctaggatggctctccctcctcttcccattctcttattcctctgctctgagatcgaactccctttaacaatagcacattcaggctttgcgttctagggaagtcagggtaagacaggacctaatgtggaaagtgagtgtggttgggaagagcaagggattgtgtaggaacctgaagccagcaacacggag

SEQ ID NO: 522637 - DNA, 572 bp, Homo sapiens
gctagaacagacagcagctgaccgagccgttctctctccttggctgtgtcaagccttttctgggttgtttgctctctggcggatattaacatctgtgccaggatcttcactgggtgccaacttccatagacacagtcacatgtctcttcccctccgtgttctcaaccttcctccttccaggccctgacgagcccatcaaatcacacaagactgcccaggagccaatgtggagtctgatttcaggatacttctctttctacactgcctgaagccctgcccactgcgagagcttccccattaccgccgtctctcatgaccaccctgaatgaggcggccagagtacatctgcagccagtttttattttgtgcccacatttcaagctcactcacccctgcaccaagcttaacctttcccctcctctgtcaggtgatcacaagggactctcccatgtgcctctgagtgcgatctgagggaagggcgctggtgtgggggtgatggcacatgggagygtgggtcacagctccatcaccaaatcgttcctctcctcatgttcctgcccctcgtttatgtt

SEQ ID NO: 522638 - DNA, 627 bp, Homo sapiens
gaggtgcaagcaaaggacactatataaggaggcaaaactctcccatactgtctgaaggatctccaacaagccatattctggaaagagctctgacagggaactttccgcaaggtccaactggagctgagacttgaggttaggttcaagtgtaagcttcctttccctcacagcctcggagccttcttggggcaggagccattgtgtgggatgggggtgttgctgtgattgagatcacttccaggccccccatggtcagtccctggatggcagacaggtgtcctggcccctggcctttcaccacaactcagatgtgggtaacaccctttcctgcagcttttgtcacggctgctatgcctgttgtctgtgcattaatgcctgtgcccttcttggcattcagaaattcctctgtgccacaggaagtatgggcaaggggctgattagtggcagagattacctggatctgtgtgttgttgyaggatgctctaatgtgtgcagttgggatctcctcaaatttctttcctgcccacctcagagagcttttttcttttgtaatgggacggtaaatgctaaagctggtgtagctgggagctaccatcttctcttcaatgttctgcttggcctcaatgt

SEQ ID NO: 522639 - DNA, 521 bp, Homo sapiens
tgtcttcctcatctgctgaggacagaggttgaccctgggctctgacgttaccaggcccccagcaggatgcagcacaaagatcatacttgctccattccattttgcctatgaaagaaaatttggaggcctggcagaaaacctctctacgaatgcgggtggggactggagttttctggaacaggagcaccaactgtgccaggtgccacaccttctttcctgcctgaggagaaatgctttttcagtacacaattcaatgatttctgatatgagtgtacacccttgaaaacttcaccctggaaaaattatgataataaacatagacaccactcagaagttcccttatgccccttataatcctccacccccaactgtcccatgcctagatctgctttctgtcacactggattagttttcatttcctagagttttatatacmgggaaacaatatgtgtcagcacagcatggctgccttcatgcaccatcatgattttaagattcatcgctgttgtggacatcagcag

SEQ ID NO: 522640 - DNA, 522 bp, Homo sapiens
ctgaagagctgggctccaagtcctgactgctctgggctggacagagggcaggtgcccaccagggatgtcaccgaggggctcgaggcttggggacagcgaggccagaccagggcgtagagaccttttgatcccrggcttagctttcagtgctggaaggcagtgcagtgggagttggagacgatactgatgtcccgcaccagcccactcgattccccagagggtcacaaggccaggcctgtatttagttagtggtaatgatctcgttaggggtgtgaatgggccaccacccaagacattcagtcctgccagcaggcctccccccgagccctgcctaccctgtgtggccttacacgggacgtgaactgtgattaacagacttccagtgcttaataatttgcaaaacagcattaaacaagggaagttgaggacaattggaatgggacattggccgggcaggaggtggttgtcaacagagctgagacaatcccgcgagcagggccttcacaaagctggcagggtaca

SEQ ID NO: 522641 - DNA, 515 bp, Homo sapiens
ggaggcagtatgggaggagacaaagctcaaagaaggcactgacaatccccagcatcctacgggcccgaatccacactgcggattccgtcagctcactggcggcagcactctctggtgtctttttttttttttttttttttgagactgagtctcgccctgtcgtccaggctgcactgcagtggcgtgatctcagctcagtgcgccctctgcctcccgggttcaggcgattctcctgtctcagcctcccaggtagctgggattacaggagtgarccactgcacctggccttctcttgtgtcttttgtctttcatttctcttcttcactacccgtcagcatgataggtttcttcctcctcttatgaatcccagtgtcaagatacagcctgatcgccccttaatacggtgccgccattactccagacccctctgcaagcattggtcattcatcagctttcacgaggtgaactggggacgaggcaggggcttggaccggcttcctggccaggactcactg

SEQ ID NO: 522642 - DNA, 515 bp, Homo sapiens
ggaggcagtatgggaggagacaaagctcaaagaaggcactgacaatccccagcatcctacgggcccgaatccacactgcggattccgtcagctcactggcggcagcactctctggtgtctttttttttttttttttttttgagactgagtctcgccctgtcgtccaggctgcactgcagtggcgtgatctcagctcagtgcgccctctgcctcccgggttcaggcgattctcctgtctcagcctcccaggtagctgggattacaggagtgaaccactgcacctggccttctcttgtgtcttttgtctttcatttctcttcttcactacccgtcagcatgataggtttcttcctyctcttatgaatcccagtgtcaagatacagcctgatcgccccttaatacggtgccgccattactccagacccctctgcaagcattggtcattcatcagctttcacgaggtgaactggggacgaggcaggggcttggaccggcttcctggccaggactcactg

SEQ ID NO: 522643 - DNA, 481 bp, Homo sapiens
ctgcaaggaggctgaaaggcaagtctcgggcagagggcagtgggatgcctatgattaggccagtcctgattcatccctagggctaggcatgtggctggcccaacagaactgctattttggtagcaaaggaagaaataagaaacagcttttgagagtgcagccaagagtaagtgtgacaaggaaacataaatatcatgtgccggctgggcgcggtggctcgcgcctgtaatcccagcactttgggtcgaggagcgcrtggatcacttgaggtcaggaaatttagaccagcatggccaacacagtgaaaccccatctctactaaaatacaataattagccatgcgtgatggcaggtgcctgtaatcctagcttctcgggaggctgaggcaggaacccgggaggtggaggtttcagtgagtcgagatcatgccacagcactccagtctgggcaacagagcgagattccatctcaaaaaaaaaaa

SEQ ID NO: 522644 - DNA, 526 bp, Homo sapiens
tgtaccacactgggtacctatatacctctctgagcctcagtttcctcatttgtaacatgtgaatggtttggcttgtcaatcggagaaaacgatgagacaagtctcaatcatttttggagatttayttgccaaagttaaggacgcacctgggagacaggtctatgtctttctctgaagatgattttgggggctccaaatttaaaggagaaagggtgggatattgagaaacacacagttttcacataaacaaaagggataaaggaaagatgggggaatctgcattttacataagataacacagacaaaatggggtaggggaacaatcagatatgcacatgggtctggcaggcaggggtgactgcacctaaataaaagctataaattgttgtgagaactaaataaggtgaggtatgtaaagtcgccagcatagtgcctcatgcagagtaagtgttgattccttgagaggaggcttacttcttgtcaccccctaccccactatccctgtgaaacacgacctaggaggtca

SEQ ID NO: 522645 - DNA, 609 bp, Homo sapiens
ctcgctatagaaatgcctggtttatagcagctactcaaagaatgtttcataagaaagttgtgttccaagtattctggtgaatgccaatgctggttcacaatgatgggggtctgagaaccaactgacctccctgacattgtgtgaagcaggaacataccgaacctttactggaagttggaagaggaagatgagagctgtgagggatctcagaatgcatatgggaaatcatgggttcaagaaagaggcaataaaagaatggaatcaacctaggtgcccatcaacagtggattggataaaatgtggtacatatacactatggaatactatgcagccataaaaagtaacaaaattatgtcctttgcagcaacataattgcagctagaagccattatcctaagcgaattaatgcaggaacagaaaaccaaataccacatattcttacttataagtgggaagtaaacattgagtactcatggacataaagatggcaacaatagacattggaaactactagagggagaaggaagggaggagggcaagtgttaaaaaaactattggatactatgyttactctctgggtgatgggatcaattgtaccccaaatctcag

SEQ ID NO: 522646 - DNA, 491 bp, Homo sapiens
ggtatggcccctcccgtggctccaggctgtggccacgctgacctcttcrctgaccctcagataaaccaaagaagtgcctccccttagatcctctgccctggctgccctgccactcgctcctagacctttccacactcatctccttctgatctttaagcagatactccctgctgacagccacctgtgtattttgttcactttttggtttgtgaccctcactagaaagtaggctccacacaagcagaaatttgcatctgtttctatcactgctttattcccattcccaaaaaaaggttctcaaactggagcatacatcagcatcacctggagactcaataaatcccagatcactgggccccacccgtttcctgttaagtgggtctagggtggtcccaagaatttgtgtttctagtaagtttccatgcagtgctgctgctgctgctgctgctcgggtccacactcagaaccactcacccagagcagtgcctgcc

SEQ ID NO: 522647 - DNA, 404 bp, Homo sapiens
acatgcaaccttgaggatacagcagagaatgagagtgttgtttttgcccttatagagcttatggactggtaggggagataaacactaaacagctaggtgcacaactacttatttgattaaaattgtggtcaggtgcagtggtgcacgtttgtaatcccaacactttgggatgccgaggtgggaggattgcttgaggctaggagtttaagaccagcctgggcaacatagcaagactccatctctacaaaaaataaaattagctgaacatggtggtgtgcaccagtggtcctaggaagcagaggtgggaggatcgtttgaacctaggagttcaaggttacagggagctatgattgagccactgcactccaagkcagcagagaggcagagcgagatctgggtggcag

SEQ ID NO: 522648 - DNA, 539 bp, Homo sapiens
ctccccacactgccaccccayccccaccctgtgctaacaccttgtctctgctctctccgcccctccccgatcccaacagctaaaagcatctcagcaggaagacgcagggaaggaggcaaccaaaataagtgtgagttttgataatgacttctcgaaagggctctaatggagggcacagctgtgacttaaaaaaaaattggggtccagttcagcagggagcttgggcaagaagatggaagagaagaaaaagagaagggaaaaaaatggccttgctctgttttttaaaagccggagatttttcaagttcattcaatgatgggcacaaaaaatgacaggggagagaagatgcattttctcctgtcagggccaaggctgtgtgcatcctggtgccttcgtgcttgtctcagcagcattttttatttggggaaccaatgaggtctgatgagcctgagccagctttttttggcctatcatgactgactgagtgttacgccatctcagggtcacttggtgatctggccccggggacggggtggggg

SEQ ID NO: 522649 - DNA, 112 bp, Homo sapiens
gaggagctaaaataatatggtttctgccttgtggttactgctttttttacctggagagggaagcccaaggtggaaaaasaaaaaggctcaaaaccaaggcaacagagaaacc

SEQ ID NO: 522650 - DNA, 562 bp, Homo sapiens
ttattattttttcactttgtatgacttaagatactttttcttattctgcctaatattagttttttaaatagaatcatacttacaataattcatatcttatttttggctctcctttttctcctaccacctcccaactgtaagttccttatgggaacaaacattttattcactttgataattccctcacacaatggaccttcaaatagttcttgaaatggataaaatcaggagtaattatttcttcccctcrgtctcaaaaggaagacctaaaaagactaggaaatctagtgatttggcaaaatcacatcaggtaaggtagagtcatagagacaacctaactctcccaactggatccaataacctgttagcaccaggagccaaacatgcttaattaccctgctaaataggtagccatgacaggaaatggcaattagcctcaaaagttaggcagaccattctcaaaaaagaattctacatctcttggcccaaatgccagcatgctttgtttgtatcaaatgcccctgtgtgggtcctccctccactccaagggtttaacccttga

SEQ ID NO: 522651 - DNA, 636 bp, Homo sapiens
gtgcaaacagaggtggcacagtgctgtttatgttcattgtggggaatgctaccagactgtcccactatgacaggacaactacttctctcccacccaaggaaaattgggactagcagtcacagaaattaaatgacgaatgaagaaagaccaacatttaatcttcaaagtaattatgagactaaagaagttgctgggtaaggcagggcagggagtgcattcaaataccggggagatttgcatttaacattaagagtggctattcagactaaagttttattctctggcagttttcaagagtttcatgttttgttttgtttttcttactacaacaagaaaggcatggatttcttgatttctcttctcacctacatagwatcatcagcctagaaaaccctttccctaaaggtccagaattaggctgggaaacaaatgaaggctcttaagaaagttagtaaagattacatgccatacaggaagtgttgaccaggaatacttaccacaccacctattcaatcaataaacacaagcacatattaggaagtagagaaacagaaacaaaagatgtcctgtggcaactgccccccagactagtgtaggctgtggctgcagtctggttaaattcaactgatgcttatt

SEQ ID NO: 522652 - DNA, 626 bp, Homo sapiens
aatcattcagaacggtcatgaagaagagcctctggaaaacacatggtacgctccatacccacacagcaaaaagcttgctgagaaggctgtgctggcggctaatgggctgactctgaaaaacggtggcaccttgtacacttgtgccgtaagaccaatgtttatctatggggaaggaagcccaatcctttctgccggtataaatgaggccctaaacaaccatggaatcctgtcaagtttcagcaagttctccagagtcaacccagtctatgttggcaacatagcctgggcccacattctggccttgagggccctgcgggarcccaagaaggccccaagtgtccgaggacagttctactatatctcagatgacacgcctcaccaaagctatgataaccttagttacaccttgagcaaagagttcggcctctgccttgattccagttggagcctgcctttatccctgacgtactggattggcttcctgctggaaatagtgagcttcctgccgaggccagtttacacctgtcgaccgcccttcaaccaccacagagtgacattgtcaaatagcgtgttcaccttctcttacaagaaggctcagcaagatctggcatataagtcactttaca

SEQ ID NO: 522653 - DNA, 626 bp, Homo sapiens
aatcattcagaacggtcatgaagaagagcctctggaaaacacatggtacgctccatacccacacagcaaaaagcttgctgagaaggctgtgctggcggctaatgggctgactctgaaaaacggtggcaccttgtacacttgtgccgtaagaccaatgtttatctatggggaaggaagcccaatcctttctgccggtataaatgaggccctaaacaaccatggaatcctgtcaagtttcagcaagttctccagagtcaacccagtctatgttggcaacatagcctgggcccacattctggccttgagggccctgcgggagyccaagaaggccccaagtgtccgaggacagttctactatatctcagatgacacgcctcaccaaagctatgataaccttagttacaccttgagcaaagagttcggcctctgccttgattccagttggagcctgcctttatccctgacgtactggattggcttcctgctggaaatagtgagcttcctgccgaggccagtttacacctgtcgaccgcccttcaaccaccacagagtgacattgtcaaatagcgtgttcaccttctcttacaagaaggctcagcaagatctggcatataagtcactttaca

SEQ ID NO: 522654 - DNA, 559 bp, Homo sapiens
tgggatttaacatatacaggctgggttcagtttagaggattctctagcaatttgagaagccaggaaaacctctcaaaccccttagacccagacagaaagaatcaatgagggaatgattcactcaatgaataattaccaactggagtgaaggattctctagtctagtgattctcaatgaataagcattatatcatctctgtcagaaatgtatgtatgttaaaatgcagattcctgggccctacctcaggctaactggagcaaaatttctatgaagtggggtctaagaatatgcatattcacagatatgctagaaggttcttattcatatttacagcagacacttatccttggggatatgtcaaaccagccaagtgggaatgaaggtaaaactttgagcctacagcacaaatgggctgagatattttgggtagagcttcttcttatggataaaacaatagtcayatgagtagcaaaaggcttcataaaatattttgacctccacaggtgacataactttcttttgttgtcaactcctgatttattttagagaaattttgtt

SEQ ID NO: 522655 - DNA, 371 bp, Homo sapiens
ttgtgagatattcactggctctccagacygtgcattctatctttgggcatttctggttactagaatgttcttatcccatttaaagctcacatcccccgcctttaaactcccactcagatatccttgtatccccagtgaccaagcagaataattcttttccacacttcagatctttacaaatttgccagcggttttcatgctacttcttcctctagagtcttctcttcacaaggtaaaacaggcacttccttcaacagttgcataatggcatggtttctggttccttccacaccttggccattctctaaatgtgttctggcttgtctgtgtctttttacagtactcgaagtgtgctctgactgctgcaacat

SEQ ID NO: 522656 - DNA, 533 bp, Homo sapiens
cccactgaatcaactgcctgatactccctggtggtctaactggaccccaacaaycatgccagtctcctgttcccctccaaatatttttaatttttttagacagggtctttctctgtcacccaggctggattacagtggcgcaatcatagctcactgcagccttgacctcctgggctcaactcatcctcccacttcagcctcccaagtaggtgagactacaagcaggtgtcatcacgcctggctaatttttttattttcaaaatttttggaaaagacggccttgctgtgttgcccaggctggtcctgaacacctggcttcaagagatctcaatctttgtttagactgtcttcccccacgccataactcttcctgtcccgtcagcttttgctttctatccgtgggagcccagcatgagactggttgtcctggtaatgctgcagggtgctgggagggggaacatagcctccactggcctcctctctttcctggggggcatctcccggccccttgggtaggtggaaggacaaccctt

SEQ ID NO: 522657 - DNA, 534 bp, Homo sapiens
ggcaacactcttccctgcttctctttcggtgtcctggaacctccaccctcaccccatctctagccttctgatcttttcaactctatatctggatactggctgactacagtccatgccattaactttgaccatgacttccaaataygtatcttaggatgagacagccctccttggttatctcctggacctatgttttctcctgtgctttctatttgaaggacaggtaccaccaaccttcctaatctcctaagctagaaacctaggagtcatcctagatacctctttttccaacacatgccccacatctagtctgtcaccagatcctattgacccaacctccacaaaatctccttaatctacctggggtggatactgtggatggacctacccaatctccatttcatcctgtttctgaggtgcagtgcctagaaagtaacagggacctctgaaagctggacctgagactacctggtacagcagcccaacatacacattcctccctccagggaccagcctcctgccctgggcagcatg

SEQ ID NO: 522658 - DNA, 609 bp, Homo sapiens
catgtccaagagcaggtggctgtgattgcaaaatcacattcttccatcaagccttcttggcttattctcattgtagacatcgcagcctagttggagataagcatatmaacatatgaaatgtcaaatagcaacataaaaacaaggatattatgatgcagcatgtgattaattggcaaatgagtgttaggaattgtgagtttgtcatgaactacagtaacctagaaaggcctggcctctgtgtaggacttagataggttaaaatgaaaaccagacagtcataaaggtgtgaatcctgcatatagtaaggaaaatatgcgatcaatatattgttagtggatcagtttggctttaaaaagtttatgaaggagctcgaaggtagacttcagctttgaatttcaggctctctagaccctcattcagtaggtcagtgttactctgaggtcagtggactgcccttcctaacatcttgggggtcctagcacttattgtcaggattcctaagttctctatgaaactttgctttaaaatttttgatgaaaattagaaaacattatgagcatactatggagatcaaccctgtaactgtgcactatcctgtggtggtcttac

SEQ ID NO: 522659 - DNA, 593 bp, Homo sapiens
gggaggcagggggaagccgtggctaacagcatggatcctggagccatataagctccagattctccttccrtcactcattagctgtatgacttaagtcagcaaatttcacctctaggcctctgtttcctcttctgtgagataaagatgatacctgtttgaagttaaagaggtgaatgtgtgtgttaatgagcccagtgtctggtactgagaaagttgtcaattaatggaagccatcacttcccataaaagtttttaaaatataatcgatcatattatattacctagtaatataaattcctaacttgcaaactgtcttgtaacaaaaatcttatctgtatgtttttcatttatctctagatcccagctcagtgcttggcatagaataaaatatgattaaagttttctgtatgaatcttttttctttatcaaatcctttttgactcaaggactacagattacgtcctgactgggtgccctgaatccagccctgccccctctttggcccgttcactgtgaattcatctgtgagcacttggtcactgagtgcccactaggggccaggcacatagacaagcggacaagatagtcaccag

SEQ ID NO: 522660 - DNA, 593 bp, Homo sapiens
gggaggcagggggaagccgtggctaacagcatggatcctggagccatataagctccagattctccttccgtcactcattagctgtatgacttaagtcagcaaatttcacctctaggcctctgtttcctcttctgtgagataaagatgatacctgtttgaagttaaagrggtgaatgtgtgtgttaatgagcccagtgtctggtactgagaaagttgtcaattaatggaagccatcacttcccataaaagtttttaaaatataatcgatcatattatattacctagtaatataaattcctaacttgcaaactgtcttgtaacaaaaatcttatctgtatgtttttcatttatctctagatcccagctcagtgcttggcatagaataaaatatgattaaagttttctgtatgaatcttttttctttatcaaatcctttttgactcaaggactacagattacgtcctgactgggtgccctgaatccagccctgccccctctttggcccgttcactgtgaattcatctgtgagcacttggtcactgagtgcccactaggggccaggcacatagacaagcggacaagatagtcaccag

SEQ ID NO: 522661 - DNA, 593 bp, Homo sapiens
gggaggcagggggaagccgtggctaacagcatggatcctggagccatataagctccagattctccttccgtcactcattagctgtatgacttaagtcagcaaatttcacctctaggcctctgtttcctcttctgtgagataaagatgatacctgtttgaagttaaagaggtgaatgtgtgtgttaatgagcccagtgtctggtaytgagaaagttgtcaattaatggaagccatcacttcccataaaagtttttaaaatataatcgatcatattatattacctagtaatataaattcctaacttgcaaactgtcttgtaacaaaaatcttatctgtatgtttttcatttatctctagatcccagctcagtgcttggcatagaataaaatatgattaaagttttctgtatgaatcttttttctttatcaaatcctttttgactcaaggactacagattacgtcctgactgggtgccctgaatccagccctgccccctctttggcccgttcactgtgaattcatctgtgagcacttggtcactgagtgcccactaggggccaggcacatagacaagcggacaagatagtcaccag

SEQ ID NO: 522662 - DNA, 592 bp, Homo sapiens
tttgcccttcaggcttctcaagcctgattctgacagtagtctattttgtcctaataccccagggaaccagagaaaacacccacagaaacctgaagggaaaagattcggcaaagtgaaacatttaaacttctgtacatagaaaacaaggttaacaaaggtaaaagtcaaagaacacaattggaaaaagttattcccaatatatatgacaacatgttaatattcttaacacttaragactctcacaaaccaccaaaaaaaagaatatcccaatttaagaaataggatacgtttttgataaggttcaaaacaggcaaaacttggccaggtgcggtgactcatgcctgtaatccagacactttgggaggcctaggcaggcggatcacgaggtcaagagatcaagaccatcctggccaacatggtgaaaccccgtctctactaaaaatacaaaaattagctggatgtggtggcatgcgcctgtactccctgctacttgggaggctgaggcaggaaaatcgcttgaacccgggagtcagaggttgcagtgagccgagattgcgccactgtactccagcctcatgaccgagtgaaaatc

SEQ ID NO: 522663 - DNA, 592 bp, Homo sapiens
tttgcccttcaggcttctcaagcctgattctgacagtagtctattttgtcctaataccccagggaaccagagaaaacacccacagaaacctgaagggaaaagattcggcaaagtgaaacatttaaacttctgtacatagaaaacaaggttaacaaaggtaaaagtcaaagaacacaattggaaaaagttattcccaatatatatgacaacatgttaatattcttaacacttagagactctcacaaaccaccaaaaaaaagaatatcccaatttaagaaataggatacgtttttgataaggttcaaaacaggcaaaacttggccrggtgcggtgactcatgcctgtaatccagacactttgggaggcctaggcaggcggatcacgaggtcaagagatcaagaccatcctggccaacatggtgaaaccccgtctctactaaaaatacaaaaattagctggatgtggtggcatgcgcctgtactccctgctacttgggaggctgaggcaggaaaatcgcttgaacccgggagtcagaggttgcagtgagccgagattgcgccactgtactccagcctcatgaccgagtgaaaatc

SEQ ID NO: 522664 - DNA, 544 bp, Homo sapiens
ctttgtctggggctggaacatccaaaattaccccacttgcacatctggccctcggtactggctctcacctggagtgccatgctctcttccacacagctttctctatagatagtctcttctcattctgtagtctagccagaactcccttacaacgtggtgctggcttccaacagagcaaaagcaaaggctgccggcactgagacattatcacttctgccctgacccattggctcaagtacatcatgaggccagccccgattcaaaagaaggtgaaatagaccctaccccctgatggaggatccacttgtatgtakaaggatgggaagctttgcaggcagccatctttggaagccatccaccacagtggctcaatcaacctggtgatgacacagagtgaagtccccactttccaagaattttccttcacaagaaagttcctttcatttcacccacacaggaatgttgactttaaatgagaccaagacctaaaaggccacattcacagataggtaacagggcatctctttgacaagcctcaatcgct

SEQ ID NO: 522665 - DNA, 386 bp, Homo sapiens
tttctctcagagcttcccaactacctaagtgagcaaagaatgtgtaatctcactcactcaacctctctatttctgtcttgtcactgtctttgtctctctctcatttctgtggttacacattttcttttctctstggttgtctgcctggcctgaagggtgagacaaggtctgttgcgggaagtcagggaccccaaacggagggaccggctgaagccatggcagaagaacgtggattgtgaagatttcatggacatttattagttccccaaattaatacttttataatttcttattcctgtctttactgcaatctctaagcataagttgtaaagatttcatggacacttatcacttccccattcaatacccttgtgatttcctatgcc

SEQ ID NO: 522666 - DNA, 589 bp, Homo sapiens
catcagtgtcatgaactaaaaggaatttttggagggtccagaaacaaatgaattgcttaagattaattaactattcatgattgttgtttcatgctgatcacatgatcatgtggtggttttaatcacctcttcagtcatgtgcatgttttctctttgtaccctgaagtgcctcttaagcttgaaatcaagccctatgtttctctcagagcttcccaactacctaagtgagcaaagaatgtgtaatctcactcactcaacctctctatttctgtcttgtcactgtctttgtctctctctcatttctgtggttacacattttcttttctctgtggttgtctgcctggcctgaagggtgakacaaggtctgttgcgggaagtcagggaccccaaacggagggaccggctgaagccatggcagaagaacgtggattgtgaagatttcatggacatttattagttccccaaattaatacttttataatttcttattcctgtctttactgcaatctctaagcataagttgtaaagatttcatggacacttatcacttccccattcaatacccttgtgatttcctatgcctgtcttt

SEQ ID NO: 522667 - DNA, 519 bp, Homo sapiens
ccttgccacatctgcagccctaagcttccaggtgaccccagtggaccagtctgcccagagcatatcattagttaggggcactctgcaggaggatgcctgcctttgctagtgcatagctaatgtcccagggggcttcctctaattaaaacccaaactgcaattatagttgtgccaaagcatgtgcacatggcgccacttaaaagggacagattgacaaggcrttaacaactccagaggcagcattgtcccagcaccaggtgctaccaatcatcaaaattagaaccaaatgagtcactggggctcaagatacagtatccagtgcagactaatgggtgattccaagaaacttatgaggattatttaaaacacactaactatgctccttctacagggcctttgcacttactagtccctgtacttcttcttgcctaactctatttgatctctctcaattatcacctcttctgagacacctgctttgatcacatgaatctctaccctgctttatttttcttctta

SEQ ID NO: 522668 - DNA, 482 bp, Homo sapiens
gagccaccatgcctggccactctgggataattttattttggtttttagaaataactttattgaatattttagtaccagtaatcttgcgataaatttcagccctggtttggttgttgttgttgttgtttttggtctaaagccatcttgattttgcctttatttttgaagagtatttttactagatatagaattctaagttgtcaattatgtatattttttcagcactttataaatgttatttcattgtcttctggctttcatcatttctgttgaaaagtctaccatcagtcttattgttgctcttctgtaggtaatgtcatttacctctgactacttttaagatttttctctttatttttgtttttcagcagtcttactatgatgttcctrtgtataattttcttagtatttaccctgcttgggattgtcagagcttcttgagtctgtgggttgatatcttttatcagttttgaaaaaattct

SEQ ID NO: 522669 - DNA, 475 bp, Homo sapiens
gttttaaaactttttattgtaaaataaaacacattaaaaatctcacacggcaaatgtttaacttagtaaattattataaactgaaccctttaaagtattactcaagtcaagaatataactttgccggccattcagaagcccctccgtatgttctatcccaattatagctccctctcccctccaaaagcaatattaccctgactttcatatcaatcactttcttgcttcttttatcatccaagtgtgcacccccagacactatggtttagtcttgccatttaaaaaaatgtttatatgtattttgagtctcttttaatctacaggctccctttccatctcttctctttctttaatattcatctgttgaagaasccaggccatttgacctgtacagagtcccatagtttggaatttgctgattgcaagtcttggtgaagttcaagattcctctgtttaacgtctttactgtaaatgg

SEQ ID NO: 522670 - DNA, 602 bp, Homo sapiens
tctttgaatattctagtgatttgtcccctgtcaattttagaaattgcaaacatctcctaatttgtcattagtctattatctttgtctttatgtctgtcatttaagagaaatcattttcctgtaaatgttttaaaactttttattgtaaaataaaacacattaaaaatctcacacggcaaatgtttaacttagtaaattattataaactgaaccctttaaagtattactcaagtcaagaatataactttgccggccattcagaagcccctccgtatgttctatcccaattatagctccctctcccctccaaaagcaatattaccctgactttcatatcaatcactttcttgcttcttttatcatccaagtgtgcacccccagacactatggtttagtcttgccatttaaaaaaatgtttatatgtattttgagtctcttttaatctacaggctccctttccatctcttctctttctttaatattcatctgttgaagaacccaggccatttgacctgtacagagtcccatagtttggaatttgctgattgcaagtcttggtgaagttcaagattcctctgtytaacgtctttactgtaaatgga

SEQ ID NO: 522671 - DNA, 561 bp, Homo sapiens
ctttcttcatcctttaggaggaattgcccaagaggcagcatttatggggcatgcccagggtctccaggcactgtgctgagggctctgtatcccgtctgtcaatttttcccaactctattatacagatggcaccactgaggctcagagaggtgaagggacttgcccaaggcctcatagtgcatcagaaacagtcaggactcagctcaagaaaaggccccaaagcmagcactcccaaccacatgatctaagaccagggaacaaggggacaatgagagtgagggcaggaaaaacgctggaagatgtaccagagacttagcacttgactgatggcatctttccaggccagtgcccacccctcctctcctggccttctcttccacctcccaccctcctgggttcctgcaccattttctcactggagctcctgccatgcctgttatcttctgttggttcttgggaaaagactctgagatggagattggcgtgcagtgggtttattggggagagtgctcaggagtaagaccaatgcaggagtgaggaaaacaggcctgggaggagtga

SEQ ID NO: 522672 - DNA, 572 bp, Homo sapiens
ctgtggattgtccttcacacggkaggcattcaggtcaggagaatataccatgtgctggcccttcaggtctcgatctgaccaccctttccaacaccctgggttcctctgtgtccttcctcttggaccgccctctgagaggatggtgcgaggaagaggcttccgtgttgtgcatggtaggcagggatgggggcgttccaggggcggacagcatgggcaggtggtcagaagtgtgaaagaaccgacctgtggggcacggcaggaagcccggtgtgctaggaacagatggggcgagacttgctgggtgaggaggtgtgcacctgctgcagaggcccaagtggtgggggtgagggaagcccagggggtgagtctgggcaggggctggggggtgatgagccatgtttcagatgcagaaggtgcagagtgtgtgtgcagggacagcagggagaccgcctggtggcctgcaccgcagagctgtgtgtctcagggagtgggaagccctgcctgtgctggcctcagttcttccgctcttctggaattctgcatccttcttttgacatttctctctaatgccc

SEQ ID NO: 522673 - DNA, 622 bp, Homo sapiens
ctgcttgggtggctgaggtgggaggatcacttgagcctaggggatggaggttgtagtgagccgagatcacgccactgcactccagccaggcaacagagtgaggccctgtctaaaaacaaacgaaacaaaacaaatgagaataatagttagtacagatttcctcgtgatgaagttggcaggaggtggagaggttgtggggaaagggaagagggtacagtgacaagaaataaaaattacgtatttggaaaaataaacaacatgcttttacgcattttgtaaagtatatatatgcgtataagtgtgtatagaataagtcaaatttgaaataaaatgaaaatgaaggctgggcaactgttagtggatgaaacaaaatgaaataatgtctaagaaactgcttcctaaatggcaaagtgacattctaactgaaattattatcacagttgtccaaataactrttactgttattaaaagctcagcttcagcagaatgcaggctgtgctggcgtctgttcaaaagcaaaccttctcactgaagtttccctgctcagattccaagcggactgggactcctagctaagccagccctcggggccagaagtcaggggagcagtcctatctgagca

SEQ ID NO: 522674 - DNA, 622 bp, Homo sapiens
ctgcttgggtggctgaggtgggaggatcacttgagcctaggggatggaggttgtagtgagccgagatcacgccactgcactccagccaggcaacagagtgaggccctgtctaaaaacaaacgaaacaaaacaaatgagaataatagttagtacagatttcctcgtgatgaagttggcaggaggtggagaggttgtggggaaagggaagagggtacagtgacaagaaataaaaattacgtatttggaaaaataaacaacatgcttttacgcattttgtaaagtatatatatgcgtataagtgtgtatagaataagtcaaatttgaaataaaatgaaaatgaaggctgggcaactgttagtggatgaaacaaaatgaaataatgtctaagaaactgcttcctaaatggcaaagtgacattctaactgaaattattatcacagttgtccaaataactattactgttattaaaagctcagcttcagcagaatgcaggctrtgctggcgtctgttcaaaagcaaaccttctcactgaagtttccctgctcagattccaagcggactgggactcctagctaagccagccctcggggccagaagtcaggggagcagtcctatctgagca

SEQ ID NO: 522675 - DNA, 620 bp, Homo sapiens
tgagagttagaataagggtaagatttggccatgtgggtacatcaggacagaggaattgcatgcacataggcatggaagtgggaaaaagatttaatagcagcaattaagtttgttcacatgagcatgaaataaatggaaagaatgggaaattaaaatataaggtaagacacacacaatcagattagggtttcgaatccgacatggagtaatttgaaatttattcattaggtaagagaatcttgatttttcttgggaagatctgttttgtgtctcatgaagattaacatggcagtgatgtttgggatggtttgaaggtggcttctgtaatagctatttatttttttattgacttacttatttttgagactgagtctcactctgttgcccaggctggagtgcagtggcacgatcttggctcactgtaacctycgcctcccgggttcaagcaattctcctccttcagcctcccgagaagcttggattacaggcgcctgccaccatgcccagctaattttcgtatttttggtagagatggcgttttaccatgttgtccaggctggtctcgagctccagacctcaaatgatttgcccaccctggcctcccaaagtgctgagattat

SEQ ID NO: 522676 - DNA, 604 bp, Homo sapiens
aatatttcttacatattaaacaataaataataaaaattaaaattaaccaggggacagaaattaaaaaagaattacacctaagaatgctttcaataggattgttattgtcagactaacataaagaaattagaaaactttgggctatttaatgagcaggatatacacatcattataaccactatgcatacatacgtgagttcaattatttctctctctgatattatcaacctcatttcatgatgctagcaattatcatagtagctagcatttatgtttacttactatgtgtatgttctttatacagtataaacggcatgccagatattcaaatagcaatgccaccttggcaattctgtgattaaatctgtgttttttactaaggttcagaagctttggaatattcacagatgatatactgtaccttatatccttatagatgattaataagcatgttctactaaatgaaacaggatagaaaggaataattttaaaatttgagtcaagtatatttatgtaaatttaattcatatataatttctcctgaaaactaggcactgctcttawctttacttagtattttcctctttccttgactctctctatg

SEQ ID NO: 522677 - DNA, 595 bp, Homo sapiens
tgtagctttgggcagttaatttacctccttaaactacaaattccacatcatgaagtagaaaacctactttatgaagttattgtgaggaataaatgagattacatgggtaaaatgcttacatgaaaagttgatgactagcaagtactaaacaaatttttattgtattactgctgctattatagttatattctatattataactatatcatattatactatatgattattacaatatgctatattatcattattataaaactaaccactaccwatgagagagtatatataaagtactagaatagtgtcacagactaaatgaacaataaaatgatacagatgatgacagtggagaaggtccagaatagattttgaggtagctgcttttagtaaagataataataataatctcatcctcttaagtctaaaaagtactggtgaatctgagggaatgaaaagtcacccttcttattgtctgaggatctttttctaaacctctgttgaattcattcattcaattagccaaatatttattgagcacctaattgtaagccaagctgagagtacacaagtgacaaaaatgaacaacattgctgtg

SEQ ID NO: 522678 - DNA, 595 bp, Homo sapiens
tgtagctttgggcagttaatttacctccttaaactacaaattccacatcatgaagtagaaaacctactttatgaagttattgtgaggaataaatgagattacatgggtaaaatgcttacatgaaaagttgatgactagcaagtactaaacaaatttttattgtattactgctgctattatagttatattctatattataactatatcatattatactatatgattattacaatatgctatattatcattattataaaactaaccactacctatgagagagtatatataaagtactagaatagtgtcacagactaaatgaacaataaaatgatacagatgatgacagtggagaagrtccagaatagattttgaggtagctgcttttagtaaagataataataataatctcatcctcttaagtctaaaaagtactggtgaatctgagggaatgaaaagtcacccttcttattgtctgaggatctttttctaaacctctgttgaattcattcattcaattagccaaatatttattgagcacctaattgtaagccaagctgagagtacacaagtgacaaaaatgaacaacattgctgtg

SEQ ID NO: 522679 - DNA, 453 bp, Homo sapiens
ctgtgtcttcggggaggccttgaatgctgttgcattcctgtgcttttatatccctggacacgcctgagtgcaagggaggctgggaagtgtagtcttccttccagatggccaggggctgctacaagctgtaatacgacaggaaaaatggagaatggatagtgaggcgtgatcagcaggctcttccatgacaaccagcaggtagggtggatctctacttgcaactgtaagagactctgcagaagacacaccttcccgtcctctgccttatggactgtgaaactgtctttatgtatacggccatctgtttaactgttacctggtctgtgcaatgaataacagtgayttctttctgaataatagggaaaatagagggatgggaggagggtaggaggttcgtgggctttgggccaaattgcttgggggctgctgtcttttcgatagtattggtggtca

SEQ ID NO: 522680 - DNA, 632 bp, Homo sapiens
atgttatttcagtatgactaatgaatgactaaattcattcatgaattcctcaggaaaaaacctttccctggcctccttgaagtctgccctctgtgccttttctatgcattttcatgatgactgttattatataaatatccttctgtcacatcaattctcagactctttaatcatctcttttccaatctaggctgacagattcttcagcatagggagagatggtgtccaaagctctttctacaaactttaccactcaatctggaacataagtatgctgaaatgtgtctgttaaaatgaatgaatggattctctgaaagtactttattatttcagtagaagtttagaaagatgttttctgctctgttagaatgagattatagwacaggaaggggggtaaagacagatggaaacttcaatattaagacatttctgtgcatacaatttttgagatgcattattccaattaatgattaaaaaaagaaatagaataagagccaaattcttcttctgcttttagccaaatatccaaagttctctatgttagatgacctcaagtttactgtgatctgttctcagcatttgcagaagctgggagttttgcttcattttgttacagatgaggtggcaggaac

SEQ ID NO: 522681 - DNA, 502 bp, Homo sapiens
ctgcttttcacggattgctgtcacaaaacatccaaaatgtccttatctcaatgcctgggagtgtagggcctgatccccagcctaaactcctttctaagtgggtagaagccagcataatgaaggagagccagatttcctgaaaaccttttatgcagtaaaaggtaataaagccccccaatacttggggctgaaactcacaattatttattatttctcacagtctccagggctgacagcctgggcagttcttctgttggtatcccctggctcctacatgtgctgtagccactggtgttgaccaggctggagggcccaagttggccccatggccatgctggcaggtggtatggctgttggtcggggtacctccgtgtgcccaagtagcctctcatcttccaggacgctgatccaggactctccacaacactgtggtctcagtgttgcaagggagtgaaggtgggggctgtaacctatactgggrctcaggagcctgcccagttca

SEQ ID NO: 522682 - DNA, 467 bp, Homo sapiens
cattggtcagttaatgtcataattattccatgtaatgctccaaaattcagtggctgaaaacaatcattgttattactcctgcatctgtggggcaacgggggtctggctgatctaggttgggcttgcttcagggtgctgsagcaggggctgcttgactgcagatcacactgtgggtcatttggggtgactctgccacacatacttctcagccttcttgcaccagcagtctggcagggtcatgttcttccctgtggcagaggcaggacgtaagtgaaaaatgaacaaggccacagaacaggccattttaccacttcccattggctgaagcaagtcacatggtgcacacgcacactgtcacttcaacccacttccactagctaaaatgagtcatgaggacgaatacaaaatccaagagtgaaaaatacattctgtttagcttagtttagcagaagaaagttcatttattt

SEQ ID NO: 522683 - DNA, 467 bp, Homo sapiens
cattggtcagttaatgtcataattattccatgtaatgctccaaaattcagtggctgaaaacaatcattgttattactcctgcatctgtggggcaacgggggtctggctgatctaggttgggcttgcttcagggtgctgcagcaggggctgcttgactgcagatcacactgtgggtcatttggggtgactctgccacacatacttctcagccttcttgcaccagcagtctggcagggkcatgttcttccctgtggcagaggcaggacgtaagtgaaaaatgaacaaggccacagaacaggccattttaccacttcccattggctgaagcaagtcacatggtgcacacgcacactgtcacttcaacccacttccactagctaaaatgagtcatgaggacgaatacaaaatccaagagtgaaaaatacattctgtttagcttagtttagcagaagaaagttcatttattt

SEQ ID NO: 522684 - DNA, 272 bp, Homo sapiens
gttccaatcccaggtgtacccttcctggctgtgtggcccagtagtcagactgtgtgtatgtgcacgcacgcattcagagtgtgtgctggcttagaatgcattctccattggagaagattttgtaactctcttactgttgcagagtcctggccaagaaaatcaggtggtttggaattttcgcccttaagtggagctaggggtacatctctcaggagaggtgacccagrgaggcatgggtggctctgatggggtggggggaggggtgtcactca

SEQ ID NO: 522685 - DNA, 590 bp, Homo sapiens
ccaggccagggcgggcggggagggcaccaggggttggctgccaggcctgcagggggttccaggtcctgagggtcgcagaacccagccctgcagtgttaggtggccccatgatgcaggcctgggtgggtgggattccagcccagctccctgagcttgccaggccgttgggaggcgtcatcagggccccatttacagagagggcggcagactcagcttccatggttggcccaaggattgccagaggtgggagcccsgaagatgtcctggaaaccccgcttccagggcccacagggcaccgctgggtgttttctgtctggctctgggcacttgtaagttcctcccaagcctctcccagcatcttgtgacctgctggtttctgttgggcccctgtggtccccactgcagcccgaggcagaagccctgcacctggcttcccagccacatggacccttccaggcaggaagctgggggtgggactgcctgcccctgggtagacacgcagcttctgacagaggctgggtcccctccccaaggcctgatgtgggagctgggcacctggcagccaattcatcccgcagggctgggaggtg

SEQ ID NO: 522686 - DNA, 590 bp, Homo sapiens
ccaggccagggcgggcggggagggcaccaggggttggctgccaggcctgcagggggttccaggtcctgagggtcgcagaacccagccctgcagtgttaggtggccccatgatgcaggcctgggtgggtgggattccagcccagctccctgagcttgccaggccgttgggaggcgtcatcagggccccatttacagagagggcggcagactcagcttccatggttggcccaaggattgccagaggtgggagccccgaagatgtcctggaaaccccgcttccagggcccacagggcaccgctgggtgttttctgtctggctctgggcacttgtaagttcctcccaagcctctcccagcatcttgtgacctgctggtttctgttgggcccctgtggtccccactgcagcccgaggcagaagccctgcacctggcttcccagccacatggacccttccaggcaggaagctgggggtgggactgcctgcccctgggtagacaygcagcttctgacagaggctgggtcccctccccaaggcctgatgtgggagctgggcacctggcagccaattcatcccgcagggctgggaggtg

SEQ ID NO: 522687 - DNA, 590 bp, Homo sapiens
ccaggccagggcgggcggggagggcaccaggggttggctgccaggcctgcagggggttccaggtcctgagggtcgcagaacccagccctgcagtgttaggtggccccatgatgcaggcctgggtgggtgggattccagcccagctccctgagcttgccaggccgttgggaggcgtcatcagggccccatttacagagagggcggcagactcagcttccatggttggcccaaggattgccagaggtgggagccccgaagatgtcctggaaaccccgcttccagggcccacagggcaccgctgggtgttttctgtctggctctgggcacttgtaagttcctcccaagcctctcccagcatcttgtgacctgctggtttctgttgggcccctgtggtccccactgcagcccgaggcagaagccctgcacctggcttcccagccacatggacccttccaggcaggaagctgggggtgggactgcctgcccctgggtagacacgcagcttctgrcagaggctgggtcccctccccaaggcctgatgtgggagctgggcacctggcagccaattcatcccgcagggctgggaggtg

SEQ ID NO: 522688 - DNA, 582 bp, Homo sapiens
agcagttcactcagcctgtctgggctcttggtggaaacaggtctctgaggttccttttcggccatgcttatggctccaggtcatccagcgccacagggcaggggtcctcactgagggggcgtgagccaacagccgacggctgagggcgggccgggtggagctgagttctgctgccttgcagtcgctgcgggtggagagttgcctccccactctgagcccgtgtcctcagtagtaaaatgggcagcataaggccctcctcacaggattctggcatcaagtgagatcttcagtgtaaatgaccatgtataaactgtaaagtgcaatagaaaactgtgtgtgtgaggaaagtaaggcctagagggggtgatgtgtggcacatgacagggattttgatcccacagctgcagcacggggacaggccgcttccccacatccgctcatgccactgtaagcagccctagctcttgggtccaggacctcaccagstcctcgtcagactcctgtgctcttccaggggctgctcagccccacctgaagagcccagagaggctgtcttcctacccagcaggtctcatgcaggcc

SEQ ID NO: 522689 - DNA, 631 bp, Homo sapiens
ctgttacatcaatgagcaactggagttgggtggatagctgagagaagactttggaggaggtgaggggctgcaggcagagcgaatagagcctgttttgtrgctgttggtgggcaccctgtgagggccggtgcagaacagccctgtcccaggctcacttactgttaagagaagggaaagggtcttggagctcctcatcaaagtgacgttcttgcctcgtttacaggctcccacagcagaaggtctttcaggcaaggctgaagggagaggccagctaagccattgctgacaggatgcttctgcgtctcctcctgccaagccagcagacccactatatttggaagtgtgattaacgtccttattaccagactccttggtggttttagttattttcaggtcaagttcgatggtcctccagagatgccctccgcagatatgggaagcctgaaatgcccagaagggtggaggtgctgtgtccaggctgtgcccttgctcttggctgtgagccagaaccatggggagatttttttctcttctaagaagacatttcttaagcataggaaaaggtgcttaagctgtctgtcatcctgccctcccctcacttaaattttctgcttttgatcacagaaaaaaa

SEQ ID NO: 522690 - DNA, 442 bp, Homo sapiens
ctttcaccattttctcatgaatgtcttctcgttagctgattccagaycccttcctggctgtaagtgcatcctgtggtgaggagaaggtattttagagcacttttttggtcactggcatttaacacataccccttctttttaagaacctacaaataaaagaccaggtttagagatacttgacttattaaggatacaaatacaggggaacaaacactgaaaaaatgtaaacctaagattcaggttataaaatcatgcagatttggagtaaggggctgagttgagatccttggcattgcatgttgaaaatgcgatatgcatgatggggtggggtcagttctccgtgttagctgggggacttcacaggaaggagcatttgagtgatgggagggaaggaaccctggcccctgggccgggtattcctgagtgtggttaggaagagttg

SEQ ID NO: 522691 - DNA, 709 bp, Homo sapiens
tttaaaatagctgctcacatctggggccatttacaaagggtcgtcrgcccccatcctgcttcgtggcctttcaaggaaggccatgagcagcaggtcccactgccaggttgtttccctgcgagcccattgagaaatccccctggaaatcctcctttggcctggcgcaggcaggcgagagaattgcagacaatggggagccggggaacaaagggagcgattgtgcggtggccgaggcaggggtcatggacgccccaggccaggcaggcaggcctgcaccggtcactgggtttctgcccacccgtggagtggccgtgagtgaccatgggtggggggagcgaggccagaccccaggtgtgaggcttcatacgctgtcctcctacctggcagctctgtcctggaagatagaacttccacggttgtcttcaggggctgtgttctttgcaggcggggtccagcatctggtgggtctgaccagcttggtgtggcatagttggtggtctgttcacggggctctgggttgaccaggccctgtccatcctgccttgcccaggtctttgccctggagagcccagtggtttgagcatgggtgtggcctttgccagggtagggtggcactgggcacacctgccattccttctccagtgctgatggtggggtttcaccctcccactcctcctctttgcttcagcgatcgtggaaccagcctccc

SEQ ID NO: 522692 - DNA, 687 bp, Homo sapiens
ccctgggcctcacaggttctcagctaagctgctggrccagcgaggcaggtcccactggtgtggttcatgagaagtgcgtggacagcaccatcctgtgctgggaggtgacagacaggtcaggagtctccaggcagagctgagggtggggctcccgggagctgctgctcacagggactcagtccttctcctgggccagcttggtcctgcatgtcagagcaggaaggggtgccttaagctgtgtggcctggggacctttgggaccaccctcgaggggccctggccctggattttagatggggtcagagggtgggcttcgggaggcctgtgtgcaaagcagccatgctctgagttttactgaagggctcttgaaatcctcacccaaggtcacagtttgacttgtggtctgtttatgccttggatgtacccctggccctctttgtgggattgtggctactttttggggatggaggaagatgtggccattagtgtgagccaccctcattagacgggcacagatcggtgaggtttggaggagtggggtggtcacagcagcgggtttcccccgggttttctgttgcagctcagtttctggaagggagtggatggggtgtcatctcagcccacgtgtgtgatttggcctggtaggtgatttggattcctgatgtctacctctgccccctgtaggca

SEQ ID NO: 522693 - DNA, 687 bp, Homo sapiens
ccctgggcctcacaggttctcagctaagctgctggaccagmgaggcaggtcccactggtgtggttcatgagaagtgcgtggacagcaccatcctgtgctgggaggtgacagacaggtcaggagtctccaggcagagctgagggtggggctcccgggagctgctgctcacagggactcagtccttctcctgggccagcttggtcctgcatgtcagagcaggaaggggtgccttaagctgtgtggcctggggacctttgggaccaccctcgaggggccctggccctggattttagatggggtcagagggtgggcttcgggaggcctgtgtgcaaagcagccatgctctgagttttactgaagggctcttgaaatcctcacccaaggtcacagtttgacttgtggtctgtttatgccttggatgtacccctggccctctttgtgggattgtggctactttttggggatggaggaagatgtggccattagtgtgagccaccctcattagacgggcacagatcggtgaggtttggaggagtggggtggtcacagcagcgggtttcccccgggttttctgttgcagctcagtttctggaagggagtggatggggtgtcatctcagcccacgtgtgtgatttggcctggtaggtgatttggattcctgatgtctacctctgccccctgtaggca

SEQ ID NO: 522694 - DNA, 601 bp, Homo sapiens
tcgtccctggaaggtttccagcaaaggacagatgtcagagctttcccggagctgaccaggccctgtggctggactctggtgaccgaagggggcagggtaggaggagctattggggttgggattttatctaaagcctggcggaggtgtgatacctgatcatttatacttgtgaggccctctggcttccctgtggagcagggccttggggtgggggtgggagccgggattgcaggctgagacactagcccgcagcgcccgcagtgtcccgtgaggaaggccacatgccacagctttcagtttccttggggaaagtagcggggaggagacggcagtgatggcatgaaaagacccatccctggggagggagggactctcggggagggccacagcctggccattcactaacgctgctggggccagggccactgaagcccaccctggaggtctttctagggaccaccaccctgtgaatttgagccctcaggcttgggagggtatgtggggaatctggcccttgccgctgccttccagagacttgcgggtgctgggttagggttgggggctctggggrtcacgctctgagatgccccgtggaagggtg

SEQ ID NO: 522695 - DNA, 498 bp, Homo sapiens
aggccacccatgtgccaagaggtgccagaaagcaggaagaaaagsggcaggtgggatttgttgttctgatcagctcactggagacaggctcttgtcacagggggcattgaactgggcacctacctgcctgaaatatttacattggcaaaggcccggacaggccacaaattaccctgtgcatgtgattccatttcccagccactttttttctctaaggagttgctggcatcgtaaatcttactgcaaacagtggggaagaaaagaatctgagattctacaaagcacatttaacatccatgactgtgtttgatctttccagtggtggaggggcccgcctgctcccctgcagacgtggctgaacctccccgtcagggtagcccagtgctgctgcctgtgggcctttggtctgcgtctcagccttccagtggggcctacagaacggcacggctgtgcacctctggcacctgcacgcccaaaaggcacttggtcatcacagca

SEQ ID NO: 522696 - DNA, 424 bp, Homo sapiens
ggccccaccactccagccctttagaaatgcscatgaacccatgagactatagtgagccgagatcgtgccattgcactccagcctgggtgacagagtgagactttgtctcaaaaaaaaaaaaaaaaaaaataaagggcaggtggcctccagagagtgtctgtggcttccccagggctccccttccctgctgtccatgaatttgttccccaatacggggcctggggctgctaggccagggccattcaaactgggcagttgtaccagcctgagcccctcctgcctctctgcctaaagggaccaggccagtctgggaccagtgccctggagtctctgcatctagacctgcttcagttcctgggtatttaaccatttcctctgggggtgggagtggggggcagtcttgtgtatttggagtcatccgcag

SEQ ID NO: 522697 - DNA, 423 bp, Homo sapiens
gccccaccactccagccctttagaaatgcgcatgaacccatgagactatagtgagccgagatcgtgccattgcactccagcctgggtgacagagtgagactytgtctcaaaaaaaaaaaaaaaaaaaataaagggcaggtggcctccagagagtgtctgtggcttccccagggctccccttccctgctgtccatgaatttgttccccaatacggggcctggggctgctaggccagggccattcaaactgggcagttgtaccagcctgagcccctcctgcctctctgcctaaagggaccaggccagtctgggaccagtgccctggagtctctgcatctagacctgcttcagttcctgggtatttaaccatttcctctgggggtgggagtggggggcagtcttgtgtatttggagtcatccgcag

SEQ ID NO: 522698 - DNA, 423 bp, Homo sapiens
gccccaccactccagccctttagaaatgcgcatgaacccatgagactatagtgagccgagatcgtgccattgcactccagcctgggtgacagagtgagactttgtctcaaaaaaaaaaaaaaaaaaaayaaagggcaggtggcctccagagagtgtctgtggcttccccagggctccccttccctgctgtccatgaatttgttccccaatacggggcctggggctgctaggccagggccattcaaactgggcagttgtaccagcctgagcccctcctgcctctctgcctaaagggaccaggccagtctgggaccagtgccctggagtctctgcatctagacctgcttcagttcctgggtatttaaccatttcctctgggggtgggagtggggggcagtcttgtgtatttggagtcatccgcag

SEQ ID NO: 522699 - DNA, 619 bp, Homo sapiens
agctggtgtgagtaggttcctacaaggagggaaagaacacctggctgtgtgcagggggtgagtggggcctaggtgcaggtttgatttttttttttaatttcaaaggggatgtgttccctagagaagcttaggaagatggggaaatgtagaagaaaaacccagacccatgcarcccagtcccgtggcctctgctgggaagatttctttcccctgagattgatctgtgtgttctctcccgggcaggggtgtgctggctgcgggcccacctgctgtgggtttatgtggaatctggctttttcagtccacgctgcatcagatgcatttttcctcttagtctgcagccaccctgtcagtggctacatcacaaccctgcaagcgggttaactagaatttccttaacagctcctcggctgctagacatgggcacgttgctccctgatggaagagacagccagccttcctcactgcagtgtttttggttaacaggcgactgctggctggtgaagttgtgatcggtttggaggctgtggcaggtggctccgagttacctcaatggaagtcactttgggaaatgaggcagaaagttgcacaggatggcaaatgtggtgggtgacgaagt

SEQ ID NO: 522700 - DNA, 619 bp, Homo sapiens
agctggtgtgagtaggttcctacaaggagggaaagaacacctggctgtgtgcagggggtgagtggggcctaggtgcaggtttgatttttttttttaatttcaaaggggatgtgttccctagagaagcttaggaagatggggaaatgtagaagaaaaacccagacccatgcaacccagtcccgtggcctctgctgggaagatttctttcccctgagattgatctgtgtgttctctcccgggcaggggtgtgctggctgcgggcccrcctgctgtgggtttatgtggaatctggctttttcagtccacgctgcatcagatgcatttttcctcttagtctgcagccaccctgtcagtggctacatcacaaccctgcaagcgggttaactagaatttccttaacagctcctcggctgctagacatgggcacgttgctccctgatggaagagacagccagccttcctcactgcagtgtttttggttaacaggcgactgctggctggtgaagttgtgatcggtttggaggctgtggcaggtggctccgagttacctcaatggaagtcactttgggaaatgaggcagaaagttgcacaggatggcaaatgtggtgggtgacgaagt

SEQ ID NO: 522701 - DNA, 511 bp, Homo sapiens
cattttgggcaagaacagcccacaagggacgtgtgtctgatcaggggaacctgaggtgtgcatcttggggtgtgaacttgattacgtggtttgggagggtcccccattgtaagctgagcatacaaatctctgtaagtaataactggtttgcgggaggctcttggagacatgcagatgtcttggtctccarcaggcagacacgcacttgtctcagcatccacagttagctgtctggtggggacgatgctgattttctaacttctcccgtccttccacctccttccacatttaatacttggccttctcctgggagggccgcttcccctttccctcagtgagctatgtatggatgcctttttatcagcgtggactcaggatttttatttcatccaacagggctgtaatccctggctcttattatcattattgccacttggcctgggagaaaaaagtggctgtgtgccagggaggagaagggatttgaaggcccaggtgtgtgtgctcataggac

SEQ ID NO: 522702 - DNA, 511 bp, Homo sapiens
cattttgggcaagaacagcccacaagggacgtgtgtctgatcaggggaacctgaggtgtgcatcttggggtgtgaacttgattacgtggtttgggagggtcccccattgtaagctgagcatacaaatctctgtaagtaataactggtttgcgggaggctcttggagacatgcagatgtcttggtctccagcaggcagacacgcacttgtctcagcatccacagttagctgtctggtggggacgatgctgattttctaacttctcccgtccttccacctccttccacatttaatacttggccttctcctgggagggccgcttcccctttccctcagtgagctatgtatggatgcctttttatcagcgtggactcaggatttttatttcatccaacagggytgtaatccctggctcttattatcattattgccacttggcctgggagaaaaaagtggctgtgtgccagggaggagaagggatttgaaggcccaggtgtgtgtgctcataggac

SEQ ID NO: 522703 - DNA, 441 bp, Homo sapiens
atgtgatgcaagcagagaggtctgattcccagtgtgcagttatagggagagcaagatccttgttctggaactgctgctagattgctaggcaaagtagtttgtagtcagcctygtgaagggctttctcaggtgtgtcacagaaacacctgccagtcacaaatttcaagggaactttaagaactgggacagtaaatatctcagtgacaatctgtgtggactgatgatgtagaaccttcttctctactgtttttttttttaggaagccccctagatcagctcttgaaactgtagcttgacctaataataaaagacctcaagaaatacaggtcaaatacagaatcaaattatttcagaaaataaagttatacatcttgtgtgcctgggtatatggactgggattcttacatgctaccttctcttctccccacagtttcttcgtct

SEQ ID NO: 522704 - DNA, 644 bp, Homo sapiens
acagtttgtttgctgactgtgattctttaggtggcccattagatggtaagtggtgggcagtgggtggctctgtgcctgcagtgctgattgttaccaaaacaacatcagagggagtgatggtcaacaatagggtagagtaggtggtcttctgatcatattccctcagcatcaacaattaaacagctatctatggataaaagtgcctttgggtgagctttgggatttaggtaggaggttgtgaaatcytggtggagcccaacatctaggagagccattttgagaggacagacctgagtccagatctggatctagaacccatacccaaaaatatacccatcccactgcagactcagatacagctccatttagccttggtcctgcctccagagccatctgccaagatatctgggaggtgtcatgaccattttcatgacttaggtgacaggcctatcaaccttagtctcagccgtagaccctgaaattgtcctgtaatttggctctaacccctcttagctgggtctgaaagcagttctgcccactcagggacctggtgggagacatacctatctatgccttgtaggcagggccatttgacctggatctcactgcagatcctgacatggccttgcaactcaaccccagca

SEQ ID NO: 522705 - DNA, 458 bp, Homo sapiens
ctgtcacttgccatttgggcttcccccaggtgaaagggaaggccagggtgatcaagttgactagcggctttgattcccctggactggaatgtgctcagtaagccacagaaacaggagctgtcagagcagaggcttaggagacgagcaggcgagttctcgtgggtgatccatcatgcaggacttgcgctcgtgatgaatgcggagrtagtactgaacctgaatccgatcaactgtgttattcacagtattgacaacttccttcctggcctctgacctgccagtgatgagcctgtgttgtctgacttatattcttggcatctgtcctcaaaacagactgcagcttgggaacccagaactctccctcgattaggcaagcccaggcctaaatgattggtgttgtcggaaacccatgatgaactgataggatcagagacccatgtcagacagtttaaaaagcc

SEQ ID NO: 522706 - DNA, 635 bp, Homo sapiens
ttgctccagtctgctcttggggactgttccctgctccttgaagaaatcttggggaatcttcatgctcactctttttttgtcgtttttctttttctttttyttttttttttctgagacggaatctcgctctgtcacccaggctggagtgcaatggcatgatctcagctcactgccacctctgcctcccgggttcaaacgattctcctgcctcagccacccaagtagctgggattacaggcacgcgccaccacacccaactaatttttttgtattttttagcagagacagcgtttgaccttgttagccaggatggtctcgatctcctgacctcgtgatcttcccgcctcagcctcccagagtgttgagattacaggcgtgagccaccgcacccggcccatgctcactcttagatactgctattactactaataatcctgctattacagaggtctcctgatctcattttagtaaatattacattcatttgagatagtggccaacattcctaacttcattcagaattaaagctttttcagtcccttggccagggcctgatgtagggacctaagggccagacagcatcttggctcctggggactcttatgcatcatatgccccttgtctacaggagcaca

SEQ ID NO: 522707 - DNA, 635 bp, Homo sapiens
ttgctccagtctgctcttggggactgttccctgctccttgaagaaatcttggggaatcttcatgctcactctttttttgtcgtttttctttttctttttcttttttttttctgagacggaatctcgctctgtcacccaggctggagtgcaatggcatgatctcagctcactgccacctctgcctcccgggttcaaacgattctcctgcctcagccacccaagtagctgggattacaggcacgcgccaccacacccaactaatttttttgtattttttagcagagacagcgtttgaccttgttagccaggatggtctcgatctcctgacctcgtgatcttcccgcctcagcctcccagagtgttgagattacaggcgtgagccaccgcacccggcccatgctcactcttagatactgctattactactaataatcctgctattacagaggtctcctgatctcattttagtaaatattacattcatttgagatagtggccaacattcctaacttcattcagaattaaagcttyttcagtcccttggccagggcctgatgtagggacctaagggccagacagcatcttggctcctggggactcttatgcatcatatgccccttgtctacaggagcaca

SEQ ID NO: 522708 - DNA, 537 bp, Homo sapiens
attgcattactgttccaaatggatttcagggctgcatcacgtgtagtgactcctcagttaagacttgtggaatgaatgaagctgtgtctaaccttaaatgttcaggtgaatgaatggttatttgaatatttcagatagttgtttttttttttttttggcatggtaaaatatacataacacaacgttgaaccattttaagtgtacaactagctggcatacagtacatttacattgtttttagtcattaccagcatccatctccataytttttcatctttcccaactcaaactgtcctcattaacactaactcctgattccatcctaccttcaatgccagagaaccaccattctacttcctgtcactgactactggagaaacctcaaaataagtagagtcatacagtatttgttcttttgtgtctggcttattttacccagcatagtgtctccacggctcatctgtgatgatttagatgtcagaattcccttccttggaaaagctgaatggtatttcattgtatgaatatactgcattt

SEQ ID NO: 522709 - DNA, 623 bp, Homo sapiens
tccccaggagcagtggcctccaccctgtaatcatgactaaaattgcatcgagcttattatagggtcgtatgaggcaggagcccagtaggaaactccaaggagtgagtccagagggtttgatgcagaggctgtttacagagatggggcaggaaaaggccaccagcaagggctggtgcagcacccagtggctyccagcagcagggagctgttaccattgccaggcctgatgggcaagaagagggggctgaattataggagccccacaaagctatcgcctggtgaggggcactctggctggagctgggggcccaggtggaagaatgcagccctggccaaaaccacagctaaggagcgggagcaagagtaggaggcagcagaggaataagtgatgtggcccctccaccccacgttgtcctgccagcgcctcccattggccaaacccagtgagtagccagaagaccaggtgcccagtgacacaacctgtggaggacctgcccccaggacacagggcagggagagaaaggaagatgaagtaggaggaggggtgtgcaaaggagactagcacagggatttatcctaatcctcaccatcacacctgaaaataagtgcccttttctacaagg

SEQ ID NO: 522710 - DNA, 605 bp, Homo sapiens
tttaatctgcgtcatctgtgagatgcctttcttgggtatatgtacctccagggctagaccactatctggcctacagtaagggtcagtaaatatttgttgaaggaatgagtgactttttttttttttttttttgagacagagtgttgccctgtcgtcaggctggagtgcagtggtgctatctcatctcactgcaacctctgcccccctgggttcaagcgattctcctgcttcagyctcctgagtagctaggactacaggcgcctgccaccaagcccagctaatttttgtatttttagtagagacagggtttcaccttgttggccaagatggtcttgatctcttgacctggtgatccgcccgctttggcctcccaaagtgctgggattacaggcgtgagccaccgcgcccggctgtgactatcatataataatactgcaagacacacacaagaatgagaaggcagtcagggtcttcccttcaaggagccacacagggtttagagatgttcttacgaggcagcgtgctgggtgtgagctttggggacgcttcccttctatccagcgaccagggccaggtgccaggaacctgatggggagtgatacctg

SEQ ID NO: 522711 - DNA, 605 bp, Homo sapiens
tttaatctgcgtcatctgtgagatgcctttcttgggtatatgtacctccagggctagaccactatctggcctacagtaagggtcagtaaatatttgttgaaggaatgagtgactttttttttttttttttttgagacagagtgttgccctgtcgtcaggctggagtgcagtggtgctatctcatctcactgcaacctctgcccccctgggttcaagcgattctcctgcttcagtctcctgagtagctaggactacaggcgcctgccaccamgcccagctaatttttgtatttttagtagagacagggtttcaccttgttggccaagatggtcttgatctcttgacctggtgatccgcccgctttggcctcccaaagtgctgggattacaggcgtgagccaccgcgcccggctgtgactatcatataataatactgcaagacacacacaagaatgagaaggcagtcagggtcttcccttcaaggagccacacagggtttagagatgttcttacgaggcagcgtgctgggtgtgagctttggggacgcttcccttctatccagcgaccagggccaggtgccaggaacctgatggggagtgatacctg

SEQ ID NO: 522712 - DNA, 605 bp, Homo sapiens
tttaatctgcgtcatctgtgagatgcctttcttgggtatatgtacctccagggctagaccactatctggcctacagtaagggtcagtaaatatttgttgaaggaatgagtgactttttttttttttttttttgagacagagtgttgccctgtcgtcaggctggagtgcagtggtgctatctcatctcactgcaacctctgcccccctgggttcaagcgattctcctgcttcagtctcctgagtagctaggactacaggcgcctgccaccaagcccagctaatttttgtatttttagtagagacagggtttcaccttgttggccaagatggtcttgatctcttgacctggtgatccgcccgctttggcctcccaaagtgctgggattacaggcgtgagccaccgcgcccggctgtgactatcatataataatactgcaagacacacacaagaatgagaaggcagtcagggtcttcccttcaaggagccacacagggtttasagatgttcttacgaggcagcgtgctgggtgtgagctttggggacgcttcccttctatccagcgaccagggccaggtgccaggaacctgatggggagtgatacctg

SEQ ID NO: 522713 - DNA, 663 bp, Homo sapiens
aactctgtgcatagactagataccactgagctatgggctttaaataggtgtattatattgcatgtgaattatatcttaaaaaaaaatgagtgaggcacttggcttgggaaataagttatttttaatagaatttcctttaaaaattgaatgaggtgatggatggggagatggtcaacaaagacagcatgaactggaccatagcttggcaggcagacatggcacatcgtgggaggagattccctgctaagtgcccragtcctggccctggctcttcccctccctggctgtctgaccctggccaagccattttaccttcttaggttctgttttcttattcctaaaatggaagtgtgttgttaagggaacgctagctgagtctccgaatcgcggtggtttaacatagtagaagttaattttctctctcatgaagtccactgcaggggcatgcagggacaggcaccaacctccagcctgtggattggggtgggggaggagctcatgtgaggtgcaggggccaggccggagaggacacacaccccttacctcccattccagtgtccagaattcatcatgtgacccacctagagtcaggaccctggagatatggttacctcccagcagtatctccatgctgtgggggccagtgggagcctttggtgccag

SEQ ID NO: 522714 - DNA, 456 bp, Homo sapiens
ctgggctcccttcttcccctgtgcgtaccctgctcaggctgggtacctgagggtgcccaatggcaacatgagcagggggcacggccgtggcccctggttcttggacctctgtcttctgcctctctgactaactcaggtcctgtgcatggcagaggtgacccgcaccaagccctgtgatattggcatcattaaccccattaacaagccacgacagccagcccaggcatgagcatcggggcagcagggcagcsagtgtggggagagaggccttgcagtagctgaggccattagagaggacaagagggtgcaggagggagcatcctcacctctgcccttcccacttacatcccatctccccttcctctcccattcttccccatgccccccttcttcctgtaggagggagcaccctcacctctgcccttcccactcacctcccatcttccctttctcatc

SEQ ID NO: 522715 - DNA, 441 bp, Homo sapiens
agccacacagacaaccatgatgagcccattttgtttcttgcctgttctttgtctttttcctctagaaaatgaggcagtcatcttttgctctcctaagtggagcagactaaaatgagccaacaggycccccattggcatgtgggtgaggggcctcagccatgatggaggaggactgtgtggtgactgagcagtgagggcttgagctcccagatgcatggccccaggaccttcctcaacctcctcctgagccttccttggagcacggcgagtccctggcgctcctgggcctgccattcccttgttcttccctgttcttgcctttgcatctggcacatttgccagccttatgatcccagcactggcgtgtcctgtccattggagcacagggctgtgccaagtccccgcagatgaagtcactcagaactcaggtcccttctcagc

SEQ ID NO: 522716 - DNA, 535 bp, Homo sapiens
ccagctgcccgtggcttacagttgcccgaggctcacagttgcccatggcttgctaattgccagcgatttgccaattgcgagtggttcgccagttgcccgcggtccgctaaacccgtaatcctgtggtactgtaactggccacaatggactcgccctttaggcttcccggccctcttttgcccaaatgcagttctcagcagtgcagttcactgtgattcaccacaattcgccatggtttgtgatttcatgggtcttggtgattctcagaccacaggttatctacggtcctcaggcaacttcctgcttgcccrtttggaggaaagctgctgccaaattgctccaggcttgtgtcctgcacctcccccatccgaaactctacatttcaagagaaatggaatcttgatgcttaggcaaccctcccccaatgctcttggttacaatgaattagccagaactcagcccaaggaatccctgctggaggccaatggtgggggatggtggagacagaagtgggaagggcggcacctcccatgcc

SEQ ID NO: 522717 - DNA, 535 bp, Homo sapiens
ccagctgcccgtggcttacagttgcccgaggctcacagttgcccatggcttgctaattgccagcgatttgccaattgcgagtggttcgccagttgcccgcggtccgctaaacccgtaatcctgtggtactgtaactggccacaatggactcgccctttaggcttcccggccctcttttgcccaaatgcagttctcagcagtgcagttcactgtgattcaccacaattcgccatggtttgtgatttcatgggtcttggtgattctcagaccacaggttatctacggtcctcaggcaacttcctgcttgcccatttggaggaaagctgctgccaaattgctccaggcttgtgtcctgcacctcccccatccgaaactctacatttcaagagaaatggaatcttgatgcttaggcaaccctcccccaatgctcttggttacartgaattagccagaactcagcccaaggaatccctgctggaggccaatggtgggggatggtggagacagaagtgggaagggcggcacctcccatgcc

SEQ ID NO: 522718 - DNA, 601 bp, Homo sapiens
cactccaattaaactttaggctccagtcagaccttcagccaaatggaaaaaaaaactaggggataagggaggtagttggagcaagaaaatgttattagttgaaaccttacgggaccttcctcccttagtgagtctgttggctaaaggttctctggcttcgtgaattagaatyggatactgtttccaagttagcaaaaccaactctaccccagcaccccacgaggaagaatgtggaaggatctcccattggccggttggggcaaaagcctgaggcaatctttcatccccttttgccaaggcgagactttcccagtgacggtgatgtagttggccactctgactatgggtggactcgggtgtagacctctgaagctgagatcacacgaaaacctggcctccccgccatgtagctgttggagagtagaaaaatagagcacgcctgatgtttctaaatgagaagactttcaatagtaatgaagaatccatggcactctcctcaccctcaaacacatggcagtcattcacatacaggccccaaagccactgttagtgctgcagtagctcctgtggacattggaaagcccggagagggcgtggaaga

SEQ ID NO: 522719 - DNA, 633 bp, Homo sapiens
tttgcatgctccccacacacaaatcctttcctggtgacaccaggagctacaactctccttggcctcctcttgtgactcccaactccctccttgggaagcttggcctcaggacctctgggatagacaggccacgaatcctgctgtgtcccgttgtgttcctaatataaatggtgtggatggcacttgacctagagcagtgggaaatgcatgcaccactcaacattctgacatgtcacccattttacattcttacaggcatactttttttaaaaaaagagtgtctattctttaatgagcatcccttctttaaaaaaacctaattgccattattcaccacatayacttttttttttttgtatcctgcctcttctatttaattttctgtcatcaacattttcccttgttccatgaatcttcataacctcacttgctgcgttgtgccttgttgagtggctatggcatcattcacagaaccattctgttattcttatgtataaccaccttttaaaaatattatgaataatgccacaactaactgcttaaaacaccctttttttcattcttaagaattatgttcttccacccagaaattatcattgcttcactacagatcagtttcccctgctagactgt

SEQ ID NO: 522720 - DNA, 633 bp, Homo sapiens
tttgcatgctccccacacacaaatcctttcctggtgacaccaggagctacaactctccttggcctcctcttgtgactcccaactccctccttgggaagcttggcctcaggacctctgggatagacaggccacgaatcctgctgtgtcccgttgtgttcctaatataaatggtgtggatggcacttgacctagagcagtgggaaatgcatgcaccactcaacattctgacatgtcacccattttacattcttacaggcatactttttttaaaaaaagagtgtctattctttaatgagcatcccttctttaaaaaaacctaattgccattattcaccacatacacttttttttttttgtatcctgcctcttctatttaattttctgtcatcaacattttcccttgttccatgaatcttcataacctcacttgctgcgttgtgccttgttgagtggctatggcrtcattcacagaaccattctgttattcttatgtataaccaccttttaaaaatattatgaataatgccacaactaactgcttaaaacaccctttttttcattcttaagaattatgttcttccacccagaaattatcattgcttcactacagatcagtttcccctgctagactgt

SEQ ID NO: 522721 - DNA, 575 bp, Homo sapiens
tgtcctcagccctggcctgcacatgtggcctcagtggtggtctttggggtttaactgacgaatggaacattttggatcaggactgatgggagaatctcctttcatttttcttcacctggggcaattacattctaaggagcggaataaagggcatgttctgcccaaagcatcagggctcacaggtcagtcacagccatttagggagggcatgtcacccaaggagggctcgcccttctttccagagcatcctccgctctcagcagagctgcttctgcccacccatccctctactatagcactgagcactgtttgcccgtgtcagaatccctcacccacatgtttagcttggtatccgagyttgggaggccggcaatgactttcaacatgaattgctccatctacccatccatgcatttggcctacttatcttgaccccgtgcttttggccttttcttctcctgaaagcaaaccctttcattttgggtgggctgtgtagcgccatgggctgtggttatgaagcaaacaccctttcttgtagctgcctcctccggggttactgccctgagcacgtccca

SEQ ID NO: 522722 - DNA, 561 bp, Homo sapiens
gtcactcttcggcatcgacatcatcatcaacaaccagacagggcagcacgccgtcattgacatcaatgccttcccaggtgagtggcggccaggccacctccactgaccggcctccagagactgtcctcaggtgaccaggcaggygaggcggggtgactgaggccagaaagccagctttctccctcaccacgaggtccggggaggtgcagccccgagaagcctcagcctcacctgcgcgatgggcttacggggtgtgcgaggagggagggagagctgcacgtccacctggggagcgccaggcacagtggccacagcacgcatgtccctcacctcctctctccacctgcgtcattggtggatcagcccctcccccaggccctcctcgatttaaggagcaggaaggaccttgaagggattacagccccctgcagtttacatgttgggaaactgaggccctagagaggaggaagctgttcaggccccacagcacattggtggcaggccagagactcccaggctcacgttgcctccaccaccctgaactgcagcgccgggcagagg

SEQ ID NO: 522723 - DNA, 506 bp, Homo sapiens
cctccactccagtatcctgtccaggcttggcttgaatatcatcagtgaygagtggctcactacttcataaaggtatttcctaaaatgactgaactgcagaggccgtgggttttagggaagctgcacctggcatgtctctattcactgtgtgaccttggacaagtcactcaacctctctgggccttgatttctttaacaatatcaataacagattgagccaggtggcacggcggatcctgcttttccgctttataattaaaaggaaatgacagtcccagagaggaacttgctgaatcttccaccagattttctgactctcagttactggaatttacccagagtcaagtgcagtggctggaaaataccttggagagcgaggtcttggagctccttcagtaaattctgatgtctcagaatggaaaggatccgttcatctgcaatgaagaagagtcatcatgggtggtttccagagaacagccgagaaagagattaccatcaatattttc

SEQ ID NO: 522724 - DNA, 544 bp, Homo sapiens
ctcatctttactaaaaattttttaaaaatttgccaggcatagtggtgtgcacctgtagtcccaactacttgagaggctgaggcaggaggatcacttgaacccagaagttcaaggttgcagtgagctgtgatcacaccactgcactccaacctgggtgacagagtgagagtgagaccctatctctaaaaaaaaaaaaaaaaaccctmatctttgtcaaacataatgaaaaccaattaagaaggggaagtttccatatttaagtattcaaagctggagtcacttaaatcctgagaaagaagactgttaaggccccatgacagattggacccagcaaaagaatcaagaaaatgcggagatctggcctgccacaggcagtgcctctttatttctttcccactagtgctgggctggctccatggaatcccaccaagtgcagcagacagaggagtaatctgttggaatttttgtctctggtgtcagagcaaggattcatcattatctccagaagagctgaattaattaaccatcataacaaagcagggtc

SEQ ID NO: 522725 - DNA, 544 bp, Homo sapiens
ctcatctttactaaaaattttttaaaaatttgccaggcatagtggtgtgcacctgtagtcccaactacttgagaggctgaggcaggaggatcacttgaacccagaagttcaaggttgcagtgagctgtgatcacaccactgcactccaacctgggtgacagagtgagagtgagaccctatctctaaaaaaaaaaaaaaaaaccctaatctttgtcaaacataatgaaaaccaattaagaaggggaagtttccatatttaagtattcaaarctggagtcacttaaatcctgagaaagaagactgttaaggccccatgacagattggacccagcaaaagaatcaagaaaatgcggagatctggcctgccacaggcagtgcctctttatttctttcccactagtgctgggctggctccatggaatcccaccaagtgcagcagacagaggagtaatctgttggaatttttgtctctggtgtcagagcaaggattcatcattatctccagaagagctgaattaattaaccatcataacaaagcagggtc

SEQ ID NO: 522726 - DNA, 554 bp, Homo sapiens
ttttcgtgttctcttttatctgcttgccttttttagagagtagcagtggttcctatttcggaaaaggacgttctaattcaaagctctctcccaatatatttacacgaatacgcatttagaaagggaggcagcttttgaggttgcaatcctactgagaaggatggaagaaggagccaggcaccgaaacaacaccgaaaagaaacacccaggtgggggcgagtcggacgccagccccgaggctggttccggagggggcggagtagccctgaagaaagagatyggattggtcagtgcctgtggtatcatcgtaggtgagttccattccttcccgcggacccctcctctcccctctggtggtcctcctgtgagatcttaacccttcgaaagcattattgttcttcctattccttagaaaaggattgtcagtcacctgagctgtaactcacctccactggtcaagtttgagaggcataggaaatacatcatacatctcttcctccaaaccaggcaaagattctgcccagtgttcatagaatggagcaaatcgtggtcag

SEQ ID NO: 522727 - DNA, 477 bp, Homo sapiens
tgtggcctgcgtgggcagaactggaaccttatcagagccttgggttgtgtgcgttagaggtcaaacaggcctccgtgttttctttgcctatsagcgccttttggcagccggcactgcttacctcctagatctggaaacgcctgcggttggacaggccaagccgaagcggcttttccacaattagaaacacgtgctcagttccttccacaagcgggggaggcggccaaggaactcggtgcagccaatcacagagccgagcgtagccacacccacgcccccacaggcccggcttccctgcccagcggctccaacctccagcctgggcacccagacccagagggctgctgggagggacatgcctcaccccttttgctccagctggaggggagggagtctgtgggagctggccagagcgtggcagaaggcagagaagtgaacgccccagcaaaaggtgaggctgagaagccaacccttctg

SEQ ID NO: 522728 - DNA, 596 bp, Homo sapiens
agctgcggggcaccctgggtgttccaagtcactttccctctgcaggcaggaacctcatcctgctctgaaacagatgagagggaaacgcagaaaacagcttccagctcagccaggaaccttagagtcctgaccttttacctcgcctaggagtttgcaggggagagaacacacraattttagattttaagcctaaataaaggaagccttagtttgaagtgcaagctctgccggacagggggcaccctgtgagccccatttgttaagaggacaatagtcagagagcttccaggctctcacaccagaaacaggaaatacagatttcacactgatctccttcccaggagcaacttgatcttctccataaatccgagcgggaagcatttatccaaacaacaaacaagcaaacatgagctgtgtatgggggatagagagaatgaaacccaggtccatcccggggagaatgctggtctatggcagtggggagcagtgaataaatgaggcgtacatccatggatctgggtggagagggtcagggtgtaacccaggacctttccagaggcatgagaaacagtcagcctacacccacagatgacctc

SEQ ID NO: 522729 - DNA, 585 bp, Homo sapiens
ccaagctgcggggcaccctgggtgttccaagtcactttccctctgcaggcaggaacctcatcctgctctgaaacagatgagagggaaacgcagaaaacagcttccagctcagccaggaaccttagagtcctgaccttttacctcgcctaggagtttgcaggggagagaacacacgaatttyagattttaagcctaaataaaggaagccttagtttgaagtgcaagctctgccggacagggggcaccctgtgagccccatttgttaagaggacaatagtcagagagcttccaggctctcacaccagaaacaggaaatacagatttcacactgatctccttcccaggagcaacttgatcttctccataaatccgagcgggaagcatttatccaaacaacaaacaagcaaacatgagctgtgtatgggggatagagagaatgaaacccaggtccatcccggggagaatgctggtctatggcagtggggagcagtgaataaatgaggcgtacatccatggatctgggtggagagggtcagggtgtaacccaggacctttccagaggcatgagaaacagtcagcctacac

SEQ ID NO: 522730 - DNA, 596 bp, Homo sapiens
agctgcggggcaccctgggtgttccaagtcactttccctctgcaggcaggaacctcatcctgctctgaaacagatgagagggaaacgcagaaaacagcttccagctcagccaggaaccttagagtcctgaccttttacctcgcctaggagtttgcaggggagagaacacacgaattttagattttaagcctaaataaaggaagccttagtttgaagtgcaagctctgccggacagggggcaccctgtgagccccatttgttaagaggacaatagtcagagagcttccaggctctcacaccagaaacaggaaatacagatttcacaytgatctccttcccaggagcaacttgatcttctccataaatccgagcgggaagcatttatccaaacaacaaacaagcaaacatgagctgtgtatgggggatagagagaatgaaacccaggtccatcccggggagaatgctggtctatggcagtggggagcagtgaataaatgaggcgtacatccatggatctgggtggagagggtcagggtgtaacccaggacctttccagaggcatgagaaacagtcagcctacacccacagatgacctc

SEQ ID NO: 522731 - DNA, 585 bp, Homo sapiens
ccaagctgcggggcaccctgggtgttccaagtcactttccctctgcaggcaggaacctcatcctgctctgaaacagatgagagggaaacgcagaaaacagcttccagctcagccaggaaccttagagtcctgaccttttacctcgcctaggagtttgcaggggagagaacacacgaattttagattttaagcctaaataaaggaagccttagtttgaagtgcaagctctgccggacagggggcaccctgtgagccccatttgttaagaggacaatagtcagagagcttccaggctctcacaccagaaacaggaaatacagatttcacactgatctccttcccaggagcaacttgatcytctccataaatccgagcgggaagcatttatccaaacaacaaacaagcaaacatgagctgtgtatgggggatagagagaatgaaacccaggtccatcccggggagaatgctggtctatggcagtggggagcagtgaataaatgaggcgtacatccatggatctgggtggagagggtcagggtgtaacccaggacctttccagaggcatgagaaacagtcagcctacac

SEQ ID NO: 522732 - DNA, 596 bp, Homo sapiens
agctgcggggcaccctgggtgttccaagtcactttccctctgcaggcaggaacctcatcctgctctgaaacagatgagagggaaacgcagaaaacagcttccagctcagccaggaaccttagagtcctgaccttttacctcgcctaggagtttgcaggggagagaacacacgaattttagattttaagcctaaataaaggaagccttagtttgaagtgcaagctctgccggacagggggcaccctgtgagccccatttgttaagaggacaatagtcagagagcttccaggctctcacaccagaaacaggaaatacagatttcacactgatctccttcccaggagcaacttgatcttctccataaatccgagcgggaagcatttatccaaacaacaaacaagcaaacatgagctgtgtatgggggatagagagaatgaaacccaggtccatcccggggagaatgctggtctatggcagtggggagcagtgaataaakgaggcgtacatccatggatctgggtggagagggtcagggtgtaacccaggacctttccagaggcatgagaaacagtcagcctacacccacagatgacctc

SEQ ID NO: 522733 - DNA, 558 bp, Homo sapiens
tcttctggaccatgacatgagggggtgggactaggtcacgcactaattatcaaacaggattcagccattgactcctccaagagatggaaacaattgtgctggcacaataaaatcattctcatcatcatcaccacgaccaccatgttgtcacattgcatcttcctctgagagatttgcaattcaccttagcacttcaaagcactgagaagttgtacagaatggaacaatgtctgacttagctttactcagcatttcccaaacagcatgtgaacatggcaggcattttaacaaaagacctttcaacaagctacggttccatggactgtagttcggtagtggccaaggagctgtctttccagctcatatactgatgcagtcaacatgaytggtgattaactcagagggagccgggaccgggcttctttattggtcacttgtcaaggaggctttacacaaaagccactttccagccatctgcacatctctcctcttggccacactctgtgatcaagttccttgcttttctcaagtatttgaggtctttgctactcaatgtgc

SEQ ID NO: 522734 - DNA, 558 bp, Homo sapiens
tcttctggaccatgacatgagggggtgggactaggtcacgcactaattatcaaacaggattcagccattgactcctccaagagatggaaacaattgtgctggcacaataaaatcattctcatcatcatcaccacgaccaccatgttgtcacattgcatcttcctctgagagatttgcaattcaccttagcacttcaaagcactgagaagttgtacagaatggaacaatgtctgacttagctttactcagcatttcccaaacagcatgtgaacatggcaggcattttaacaaaagacctttcaacaagctacggttccatggactgtagttcggtagtggccaaggagctgtctttccagctcatatactgatgcagtcaacatgattggtgattaactcagagggagccgggaccgggcttctttaytggtcacttgtcaaggaggctttacacaaaagccactttccagccatctgcacatctctcctcttggccacactctgtgatcaagttccttgcttttctcaagtatttgaggtctttgctactcaatgtgc

SEQ ID NO: 522735 - DNA, 439 bp, Homo sapiens
ctgcaagttgacaggactttgactgctctyacagtcattccatagacactgttgttacaacagttaacccccaccatctcaagtattctactctcagaccaaccaccacctcctttctttctagctcattccttttggcacccaactccaacaatcctctagtcccactgggatgcaaatccattgattctactggttttcatttctctctcttctcttgggtcctcacttccttcttgcccagcttcaatgtcataatcagtcacagcctctgctcctttgtcctcctcttgctttatcagggctgcttgacaagtcctccaactctcttcctgttccgtgccaacactcgagctgttgaatgtagccagagaaaaccacactatgcaggctagccccgttttaaatccatgatcactaacctcaagagagcttggat

SEQ ID NO: 522736 - DNA, 638 bp, Homo sapiens
ttcctgcctgtctgagaggatgaggccaagaggggtttggggtcctgcttggtccacgaatggctcaaaggctgtggatagtacaggtggcccctgaagtgcagattggcaggagagggatccaggcagttcccttgggccaccacaaccaaaagccaggctccaggtccagcgacagccaggtccagctcagaagtccatgatttgggagagractcagaggcccttggagcacccacagcctaccctgccacccccacactggccactagtactgggtggcatccctgtttgccaatacagctcatgattcctcagataaacagccaggtggggcttggaaagtccagccaagactcattctagaggttgtggtcaccgtagtctctggcttcacatggcctgtcccttgccaagcaaggcctgggcccttccctcctacagacacgatcctagagagggcttgggaagttcagatgtcctgagcaaccctcctggctcagcttctgtgctcagcagaattgggcaagatgccctgagcaaccctcctggctcagcttctgtgctcagcagaattgggcaagttgaacccagagcagcacagctgtaattttggagaggtagccattcatggtcag

SEQ ID NO: 522737 - DNA, 590 bp, Homo sapiens
cccaggaagctggcaaacaaaatttaacaggcagcatccaccgcaggcttactgtacacatgctagggtccaggacagcaggaccaagccagcagaaacagcctgagcccaccgcagactgtgagtaacacctgagaaccctctgtccctccccctgcccagcctccagagcaaagccatggctgcagctcgcttgtttggtttgttgagatgctttgtttttttaaasggcacattgaacattagggcagccagcagtgttatgaggcaatctggttaggattttccagaccccggagtctgtgagtcatccacaggggttccgatgtcccctgggttcctgccatgcagggggctgacacagagggctgtagctaagaaccattctcgtccactgccatgattgatgctcctaagcccagccagatagccacaacagccacaacagccacagagtcgcagcctgcaagctacaatgcatctgctccagtcggcaccaccgatgaaggatgctggccgcgggtcagggcctgggagggctcagctggcccagtgcaggggtattcttctgagtcacgcagacctgtctc

SEQ ID NO: 522738 - DNA, 590 bp, Homo sapiens
cccaggaagctggcaaacaaaatttaacaggcagcatccaccgcaggcttactgtacacatgctagggtccaggacagcaggaccaagccagcagaaacagcctgagcccaccgcagactgtgagtaacacctgagaaccctctgtccctccccctgcccagcctccagagcaaagccatggctgcagctcgcttgtttggtttgttgagatgctttgtttttttaaagggcacattgaacattagggcagccagcagtgttatgaggcaatctggttaggattttccagaccccggagtctgtgagtcatccacaggggttccgatgtcccctgggttcctgccatgcagggggctgacacagagggctgtagctaagaaccattctcgtccactgccatgattgatgctcctaagcccagccagatagccacaacagccacaacagccacagagtcgcagcctgcaagctacaatgcatctgctccagtcggcaccaccgatgaaggatgctggccgcgggtcagggcckgggagggctcagctggcccagtgcaggggtattcttctgagtcacgcagacctgtctc

SEQ ID NO: 522739 - DNA, 523 bp, Homo sapiens
gtgtaagatagggcaaaactttctggaacataatatcaaagcaaatttcgataacccaaagcccatttctccctgtgccccctgaaatgccctgaagaattagtgttttgcaagaagaaagtgattttttaaaaatctggaaacttaatgtcattaacagatgttgctatccacatagctatacaatataatagcccagttgwtatggctaaattaagaataaatataggtgcataaataagaaaaccaatattcagtaaacatacaaacttcaatctataaaccacttagcatttatatcagggcaataaaatattctttcaaatgcttgtttataaattctaggttggctttcttctcacaattggtaagtctttctggctcctatcagatgtgtgattacaccttattacttcaccataggtttatacatgattgtagaaaagccacattgaatttttaatcacaattgaggtcctttgatgtaatggtctattaataggctgcctataactgcctcagg

SEQ ID NO: 522740 - DNA, 400 bp, Homo sapiens
ttcaatcttttttggaaaataygatttaatagtatgatacaattagagcataagataatctcgtttcatgcatatttttatttaaaagacctcagaaaaggaagacagtaattcccactataggccacagggaggctctgcagaggtggtggtaggatgattttgccctccaaaggacatttagcaatgtctggagaatatttttattgtcctgattcagagactgctagtagcatataatgggtagaggctaaggatgcttctaaaaccccaacagtgcacaggacggctgccctccatccactttacagtaaagtattattcagtccaaaatgtcaacagtactgagattgaggcatttgagttagatgcatttggaaaggcaaaggtcggagttgca

SEQ ID NO: 522741 - DNA, 400 bp, Homo sapiens
ttcaatcttttttggaaaatacgatttaatagtatgatacaattagagcataagataatctcgtttcatgcatatttttatttaaaagacctcagaaaaggaagacagtaattcccactataggccacagggaggctctgcagaggtggtggtaggawgattttgccctccaaaggacatttagcaatgtctggagaatatttttattgtcctgattcagagactgctagtagcatataatgggtagaggctaaggatgcttctaaaaccccaacagtgcacaggacggctgccctccatccactttacagtaaagtattattcagtccaaaatgtcaacagtactgagattgaggcatttgagttagatgcatttggaaaggcaaaggtcggagttgca

SEQ ID NO: 522742 - DNA, 400 bp, Homo sapiens
ttcaatcttttttggaaaatacgatttaatagtatgatacaattagagcataagataatctcgtttcatgcatatttttatttaaaagacctcagaaaaggaagacagtaattcccactataggccacagggaggctctgcagaggtggtggtaggatgattttgccctccaaaggacatttagcaatgtctggagaatatttttattgtcctgattcagagaytgctagtagcatataatgggtagaggctaaggatgcttctaaaaccccaacagtgcacaggacggctgccctccatccactttacagtaaagtattattcagtccaaaatgtcaacagtactgagattgaggcatttgagttagatgcatttggaaaggcaaaggtcggagttgca

SEQ ID NO: 522743 - DNA, 613 bp, Homo sapiens
agtgttttgcagctttcagtatacaggtcttctttttaagacctgtatacttgtgtacctgtatactaaaacaagcatattttaaaaattttatcttatttcatgctttcatgcatgcttttggacattatatgtggaatttaaaaatgtttcattttctggccaggcgcagtggctcasgcctgtaaacccagcacttcgggaggctgaggcaggtggatcacgtgaggtcaggagttcaagaccagcctggccaacatggcgaaaccccgtctctactaaaaatacaaaaggaattagccgggtgtcatggcacacgcctgtaatcccagctacttgggaggctgaggcaggagaagcacttgaacccaggaagcggaggttgcggtgaactgagatcgtgccgctgcacactgcagcctgggcgacagagtgatccgtctcaaaaaaatttgtttttcattttctaattcatctgtagaaatacagttgctgtttttttgagataggatctcactgttggccaggctggagtgcagtggcacaatgatagctcaccacagcctcaaacttttgggttcaaatcatcatgtctcctcagccttccaagcag

SEQ ID NO: 522744 - DNA, 613 bp, Homo sapiens
agtgttttgcagctttcagtatacaggtcttctttttaagacctgtatacttgtgtacctgtatactaaaacaagcatattttaaaaattttatcttatttcatgctttcatgcatgcttttggacattatatgtggaatttaaaaatgtttcattttctggccaggcgcagtggctcaggcctgtaaacccagcacttygggaggctgaggcaggtggatcacgtgaggtcaggagttcaagaccagcctggccaacatggcgaaaccccgtctctactaaaaatacaaaaggaattagccgggtgtcatggcacacgcctgtaatcccagctacttgggaggctgaggcaggagaagcacttgaacccaggaagcggaggttgcggtgaactgagatcgtgccgctgcacactgcagcctgggcgacagagtgatccgtctcaaaaaaatttgtttttcattttctaattcatctgtagaaatacagttgctgtttttttgagataggatctcactgttggccaggctggagtgcagtggcacaatgatagctcaccacagcctcaaacttttgggttcaaatcatcatgtctcctcagccttccaagcag

SEQ ID NO: 522745 - DNA, 378 bp, Homo sapiens
atacttctgcttcctgtggatggaatatcaagcattagacctaatttctcactataaaagtaagtagaaatttgaaaacttaacatttgaaacaactctttccaaatattgaacaacaggcagcccaggactgtgattccaaagataagagaagtaaaggcttgtctcgcatgtgccatatttcttcccgaagacaatttctgctatgtggatgtcgtaatgagaaatgcaaaagagtctgggagtgtcagaattaagtcagtaaaaggctgaggcatctaaactttgcagagaagtgctataraaaaaagcagaaaaagtgcccaggagtctatatgggagtcaccgtgggtcttggctgagtatcagtcatgcatg

SEQ ID NO: 522746 - DNA, 614 bp, Homo sapiens
tctcatgtcctcacatttcaaaaccaatcatgccttcccaacagtcccccaaattcttaactcatttcagcattaactgaaaagtccacagtctaaagtcttgtgtgagtcaaggcaagtcccttccagctacaagcctgtaaaatcaaaagcaagctagttgtttcctacatacaatgagggtacagggattgggtaaatacagccattccaaatgggrgaatttggccaaaacaaaggggttataggacccctgcaagtctgaaatccagaagggcagtcaaattttaaagcttcaaaatgatctcctttgactccaggtgtcatatccaggtcacgctgatgcaagaggtgggttcccatggtcttgagcaaggtccatttctctacgtcccagctcttgagtcctctgcaccatggcaaagaaaactcatagctaaataaatacttgcagcttctcagtctgtattgtcctccctctgcatcccaagagttgaatcccccttcatctggtgttcccccaacctcagagctcctgggcattttagggccaggctggcacaccctgctgtctccctgacatggaggagagatggcatctggagagccgcaca

SEQ ID NO: 522747 - DNA, 493 bp, Homo sapiens
cggtgcaccagcccctccatgatggtgtgggcctgcacggtgcagggtcattctaagtagccacggtcagaaggtatcaactggctgcagccgtggtgaccgtcttagattgtttgtaacacatatgatsatatgattagtaatttcaagcccccctcaaattctaaaagggatgacctcttcaagaaaccacgctagggtgtgatcctctagccaatacacggagggccatgtccccctttgttggacgttccatttttcacggatgattgctgccttctggcttggggctggatgcccttggatgtacccaccttatttagacatcactggcatccccatcgttagtttggccgaagattcttaatttataacccatcttaaatgtcgttattgttttggggggaatggagaggagtgttgggggttgtatctgtcagggtccagtaagaaaaaacagaaacaacttgaagttttttgagaagagtgctta

SEQ ID NO: 522748 - DNA, 608 bp, Homo sapiens
ctgacaccaggcttctgtgttgcagggaggtgggagagcaggagggggtgtttaccagccacgaatgcttgttaagacatgaccccaggccctcggcacactgccgtataaaggcagtgcacactgtataagacattctagtaaatagaatttttcacccacatcacatgcagatttttatcttatctatatttggtcagatattcctgaccaaataattacaattacccacccaccaataagatacccaatcaacaacaaaattctaaagatttctggtgtattactgcgggccctaggtgctaaatttggcccatcttgctaacttctctaacaagaacatgggtaaaagatcggaagtgatatgcttgtcaaaatttcaaatgacagaaagctaggagagaatagctaatgaattcgttaatgcaatcaataggttggaataatggtccaaaatgaagtttaatccatataaatgtaaactgcctgttaatgtaaaatrcgcacagtgaagtttaatacacataaatgtaaaatgttacacttaaattaaaaaatgtagacaaacacataaggattaggagacacctggctgtgttggtcaattt

SEQ ID NO: 522749 - DNA, 631 bp, Homo sapiens
cagccccaaaactattctctttcttctccataacccatggttcataacccatggttctcaatttctatctattgctcttattagcagtgatcacttttctgtatttacttgtgtcagaagaacacattttgtgattatcaaccttccttattatcatcagyacaaattctgaatctaaaatagtgggtaacagcccgggcaacatagcaagccctcgtctctactaaaaattaaaaacattagttgggcctggtggcacacacctgtagtcccagctactcagaaggctgagacaggagtatctatttttttttttttttgacggagtctcgctgtgtcacccaggctggagtacagtggcgcgatcttggctcactgcaagctctgcctcccaggttcatgccatcctcctgcctcagcctcccgagtagctgggactacaggtgcccgccaccgtgcctggctaatttttgtatttttagtagagacggggtttcactgtggtctcgatctcctgacctcgtgatctgccctccccagcctcccaaagtgctgggattacaggcgtgagccaccgcgcctggcctgacaggagtatctttgagcccagggtgtggaggttgcagcaagc

SEQ ID NO: 522750 - DNA, 631 bp, Homo sapiens
cagccccaaaactattctctttcttctccataacccatggttcataacccatggttctcaatttctatctattgctcttattagcagtgatcacttttctgtatttacttgtgtcagaagaacacattttgtgattatcaaccttccttattatcatcagcacaaattctgaatctaaaatagtgggtaacagcccgggcaacatagcaagccctcgtctctactaaaaattaaaaamattagttgggcctggtggcacacacctgtagtcccagctactcagaaggctgagacaggagtatctatttttttttttttttgacggagtctcgctgtgtcacccaggctggagtacagtggcgcgatcttggctcactgcaagctctgcctcccaggttcatgccatcctcctgcctcagcctcccgagtagctgggactacaggtgcccgccaccgtgcctggctaatttttgtatttttagtagagacggggtttcactgtggtctcgatctcctgacctcgtgatctgccctccccagcctcccaaagtgctgggattacaggcgtgagccaccgcgcctggcctgacaggagtatctttgagcccagggtgtggaggttgcagcaagc

SEQ ID NO: 522751 - DNA, 627 bp, Homo sapiens
acaggcatgtgccatgacgcccagctaatttttgtatttttagtagagacggggtttcaccatgttgcccaagttggtctcgaactcctggcctcaagtgatccgcccacctyggcctcccaaagtgctaggattacaggcatgagccaccgcacctggcccaattttttctgtgggagttcttacagcagagttcatacattcttccaggaaccaccatctttggtccttcagaagatggctcagatgcaaggagatgagacccacattgggtggatgcaggagccaccctgacgtaaaagcctcattctcaatgtaacaactccataggcacagtatccagtgtccccataagaagtactacccccatctggtatttatagttcatgatcttttctcccaattcaaaggcagtttgccaatcagaggtcatttctatcagaagcaagcttaactaaaaatatagttagcattttatttctatcagatcaccagggaaacagaactagagagtgaaacaaaggtcaaatttttcatgcagaaggaggtgaaagggttttgttaagtagcttattcaaaaaacaaatgaaagagtggattcaaacttaggtctgtctgactgcaagt

SEQ ID NO: 522752 - DNA, 640 bp, Homo sapiens
aagtggaactggtcaggtggatggaaagtttatcattcagattcttcaaggccaaatccagaagaaagatgcaacagaggtcaagaaccatgccactgtgccttggcccttagccagaggacaaagatactgaacttcaaacagaactcctggctctaggctggcatccagcagaggcagctcttgggtggctccaagtccatattcattgtaccatcctcaagttaggcaaggaccggcttaaataccagtgagggcaaagcagccacatttgagcaccttctctcaaaattcagcagaggactattctggcactttcagaaagcctccttctctctctgtctagaatgttctaccaccttctcccctttctggaaaatctctgattaccacacatgactcctctaagaagcaatcctgagcacttccaggcagagttgtcaccttactttattatttccaaatacagttgaatctggctctcagcctttactcttcaggatggatgagaagtccactatcacacatcaaaagggcttccttctccttcccatcacctaagaatcaagctcatagaagtcagaaaactaggaaagagcatgytctacagcccatggtgatcaccactgttgctgcttca

SEQ ID NO: 522753 - DNA, 521 bp, Homo sapiens
gagtgcagtggcgcaatctcagatcattgcaacctccacctcctgggttcaagtgattctcctgcctcagcacccccagcagctgggagtacaggcacatgccatcacacccagctaatttttttttttttttgtatttttagtagatacagagttttgccatgttggccaggctggtctcaaactcccgacctcaggttatctgctcgccttggcctcccaaagtgctgagattacaggtgtgcaccactgcacctggccagaaataaattttcttctacaaaacagatttattattttttaaagacacaggggaaaagatgatctttaactgtttttccaaaggtatcttttggtgcgtgtgcgtgcgtgcatgcgtgtgtgcgtgtgtgygtgtggtgtgtgtgtgtgtgtgtgtgtgtgtgtgtgtgtgtggtttaaaccttggctatattgtgagggtgctgttggatactcagttagcccagggatgctagggcaatcatgattcagaaggaaaa

SEQ ID NO: 522754 - DNA, 468 bp, Homo sapiens
ttgcattcccagtgcctggcacctagcagatgcttaatactgttgagtgcgtgagtgaacatgtgtgaaggcagttagattttaacgcagggcascacagacctcctgctgtgcgggtggctgattcatgtcaattatctgccataatctctctgtgtggcctcagacaagttgcccctcacatcagtctacccatggcccgtgggtctcaatggcttctcagccttgaggttggccaaggatgatttttatgtggacagagaacaagggtcagggccccctccagggggagaggtgagggaagccctgctgagcgcctttgccaaaggtgctatatataaatagcaggtggttcaattattatccttccctaatctccagtttcctaatcccccagcaggtttgtgagtgtgtatgtgtcttgaggaacagtgaacagcagagccttctggaagtccagggcaggag

SEQ ID NO: 522755 - DNA, 447 bp, Homo sapiens
tccgcggggatgttacctgtggctctgaccatgtctttctgttggcctacatcaaacacctggctgtcgccggcaggcgggctctgaaggctactgtgcatgttcaccaaagggtgaggtcaccattcaggagtcttgcttcttaaatgggttttgcaaaaccatgggtctcctgggagggcaccgggtggggggcggggggagcagagaaatggcattaagggagttgggagggagagaaraatggggatcttgttttttgtcgtcttgaaactgtgttgtaggcagtggggtctctctgtacctcccacccttgaggagggaggtaaagatgagctcagtgtccaacacccccttttgcgtttgactagagatggtaaccatctgatagcagggagaaagggagaactagcaaagagtgggtggaaggagaagtatggggggtag

SEQ ID NO: 522756 - DNA, 537 bp, Homo sapiens
ctgtactttcctaaatggtaaagttaatctcacttcctctttcgtaagaagagaaaacggggcgggagtgctttggctcaacacatcaggctgttggaagttcctttaaagccatagttttctctgagtactttctggcctttaccaacccctcggaaactcacggtaattcacgtctgtacttgcagtcatgcagcacctatgcagtgctggtgtgaaccatgtgttgagagaagggaggaaaaccaacattcattagatagttaatggcgttccaggccggatgctgctcctgcgtcgtctcacccgcaagacatggattggctcttctccccattctgcagatgcagaaaatcgagtcccaaactggggaactaacttataagtgatagagaggagccaggattttggatgctggccttcctgctgggtggcttctagggaagaagctcaatgacwtaatcaggatgatttagtccaagctggagagggagtgagagaggcccctttctggccttgggtggaggactgtagaag

SEQ ID NO: 522757 - DNA, 482 bp, Homo sapiens
ctggggttcggtctgctgtcagcttgcctccatgcctcaactgccctgtgacagctaattagagaatgatccgtgtctagaatctgaacctcctgatggcctggcccagcccactttgtttcaagagattcatagttattgcctatatgcttttgtctagcaatattttgtgtaaggacttttactttcctgcctgccttttttttttttttttttttaagacagggttttactctctcgccctggctggagtgcagtggcgcgatcttggctcactgcaacctctgcctcccaggctcaagtaattctcctgcctcagcctccygagtagctgagattacaggtgcacgccactactgcccagctaatttttgtatttttagtagagatggggtttcaccatgttggccaggctggtccatatgatccacccaccttggcctcccaaaatgctgggattacaggcatgagccactgcgccc

SEQ ID NO: 522758 - DNA, 395 bp, Homo sapiens
ttggctgttggttgagttctcttctgaagcaggaggatacgacttcgtcactcacagtacgaagctgcctgcagtctctggatgttggaagtgtaagatgtgagcagagaatatgagcaggagcccccgtccagggtgggatgagtcagggaggaccccattgcaagatagcagggctctgaaagcccggcagggccctgagaggtcagcagcaggcagccagaagtaggttgggtgcttttattcttagcgatgtttgggtgcctgtgtgctgtgccctggagaatgkttcgggctggacagctagcatggcagtgattctcagtcagggatggtctgaatctggacacaatttccttctttcatggaactaatattctgagagaaacagttgt

SEQ ID NO: 522759 - DNA, 626 bp, Homo sapiens
gttagagcccatactttgtatgatttcaactcttctaagtttgttacagtttgttttatttatttatttttttccagacagagtcttgctctgttgcccaggctggagtgcagcagcatgatcttagctcacagcaatctccgcctcccaggttcaggcaatactcctgcctcagccttccgagtagctggggactacaggtgcacaccacctgtaattacccagcaccatacctgggtaattttttgtattttttgtagagagagggttttgccatgttggccaggctggtcttgaaactcctgacctcaagtgatccgcccacctcggcctcccaaagtgctgagattacaggcaggagccacacatctttttactttaaagctgcctatatcattgtgtttgaactgagtttctcgtagacwgcatgtatttggttcatttaacatccattttgataatctctatttatttgtatatgttgagacagggtcttgctctgtcacccagactggagtgtggtggtgcgatcacagctcactgcagccttgacttcctgtactcaagtgatcttcccacctcagactcctgagtagctgggactactcagatgtgagccaccacag

SEQ ID NO: 522760 - DNA, 581 bp, Homo sapiens
gccagtctttgattttccttccagagccaagctacctaaaataattaccaacacgtggtcccagtttttaacctctttttcattcatcaatgtctcaagtcccacctttccccccaaaactgctctccaagattaccaagtgaccattttgttgctcagctcaatggataaacttcagtcttcattgcattgactattctgtagacgtggatatactttcttttgttgggttggggtttttgtttttgttttgggaaacagctttattgagatacaatttacataccataaattaatccattcaaagtgcccaattcagtatttgttttagtatactmagagttatgcagtcatcaccacagtcaattttagaacattttcatcactcccaaaaaaagcctaaactctttaacattcaccctcattcccttcatacccctccccagccctaagcaattatgaatctactttctgttggtacagttttacctattcatgtttcatataaatggaataataaatcatacaatgtgtgtgttttctgtgactactttttacttagcacaatgttttcaaggttc

SEQ ID NO: 522761 - DNA, 579 bp, Homo sapiens
ctaaatcaaataggtcggcatatgcattttttgaagatgttgctgaaatgctttatctctttataaaagtccaagaatttattcaataaacatttcacaatctataagaaggcaaggtaagaagcttacagtttggtagaaagagataaacgtgaggtagaatggaaggttggatatgttctaagagaaatgggtgggcmctcaggagacaggttgattctatcttggcccggaggatgcaaactcagtatatttcatgtaaaaagttgggatgagaatcaaaccaggtgattctacaaacatcacgccttactccaacatgaaagctttcaagtaatgatatctttagcagagatacaaatatgtttttattttcctaaagttgaaagtgtatttggaataagtcaggggatgatggcactgagaaccctttcttccaaaaaaaattgttattttatgcagatgcgactgcatcagctagaccttcttactgtctgcacaatgctcacctttctaagttagatgctgcaggtgagctgatgatactttccctcctttcttttgaagatgaaaatgaca

SEQ ID NO: 522762 - DNA, 579 bp, Homo sapiens
ctaaatcaaataggtcggcatatgcattttttgaagatgttgctgaaatgctttatctctttataaaagtccaagaatttattcaataaacatttcacaatctataagaaggcaaggtaagaagcttacagtttggtagaaagagataaacgtgaggtagaatggaaggttggatatgttctaagagaaatgggtgggcactcaggagasaggttgattctatcttggcccggaggatgcaaactcagtatatttcatgtaaaaagttgggatgagaatcaaaccaggtgattctacaaacatcacgccttactccaacatgaaagctttcaagtaatgatatctttagcagagatacaaatatgtttttattttcctaaagttgaaagtgtatttggaataagtcaggggatgatggcactgagaaccctttcttccaaaaaaaattgttattttatgcagatgcgactgcatcagctagaccttcttactgtctgcacaatgctcacctttctaagttagatgctgcaggtgagctgatgatactttccctcctttcttttgaagatgaaaatgaca

SEQ ID NO: 522763 - DNA, 579 bp, Homo sapiens
ctaaatcaaataggtcggcatatgcattttttgaagatgttgctgaaatgctttatctctttataaaagtccaagaatttattcaataaacatttcacaatctataagaaggcaaggtaagaagcttacagtttggtagaaagagataaacgtgaggtagaatggaaggttggatatgttctaagagaaatgggtgggcactcaggagacaggttgattctatcttggsccggaggatgcaaactcagtatatttcatgtaaaaagttgggatgagaatcaaaccaggtgattctacaaacatcacgccttactccaacatgaaagctttcaagtaatgatatctttagcagagatacaaatatgtttttattttcctaaagttgaaagtgtatttggaataagtcaggggatgatggcactgagaaccctttcttccaaaaaaaattgttattttatgcagatgcgactgcatcagctagaccttcttactgtctgcacaatgctcacctttctaagttagatgctgcaggtgagctgatgatactttccctcctttcttttgaagatgaaaatgaca

SEQ ID NO: 522764 - DNA, 546 bp, Homo sapiens
tcacctggggtcacaacgaaacaaagcaagagggcagagcccacggagaccagtgggtagatcttgatgaaagctcagtgtacctaccaggagtacgtgatcagagatatcaggtaatagcatagatcacctgcaaagtcaagctggtcactcccagaagaggtgggaaggactactaggcttgaatccctcgatagccagcctccatgtycagcctttgaccctacccctaggagctcctcagggaatgaggaaaccctttccctacccactggcggtgaatttccacaacgagtagacactagatctgccataaactgaagcttaatgtttcacacagccccaaagcctatcccttagaccctacatagcgagaaagacaatcactgctgcaaattttgacaataagcaggtattagttttgccacagtcaggaatgtaatatactgagcatagcgtttagtccattcatcacaatccaattaactttagggtccctcctgcaactttgtccaactgatgagtccagatagcagtatattccag

SEQ ID NO: 522765 - DNA, 546 bp, Homo sapiens
tcacctggggtcacaacgaaacaaagcaagagggcagagcccacggagaccagtgggtagatcttgatgaaagctcagtgtacctaccaggagtacgtgatcagagatatcaggtaatagcatagatcacctgcaaagtcaagctggtcactcccagaagaggtgggaaggactactaggcttgaatccctcgatagccagcctccatgtccagcctttgaccctacccctaggagctcctcagggaatgaggaaaccctttccctacccactggcggtgaatttccacaacgagtagacactagatctgccataaactgaagcttaatgtttcacacagccccaaagcctatyccttagaccctacatagcgagaaagacaatcactgctgcaaattttgacaataagcaggtattagttttgccacagtcaggaatgtaatatactgagcatagcgtttagtccattcatcacaatccaattaactttagggtccctcctgcaactttgtccaactgatgagtccagatagcagtatattccag

SEQ ID NO: 522766 - DNA, 546 bp, Homo sapiens
tcacctggggtcacaacgaaacaaagcaagagggcagagcccacggagaccagtgggtagatcttgatgaaagctcagtgtacctaccaggagtacgtgatcagagatatcaggtaatagcatagatcacctgcaaagtcaagctggtcactcccagaagaggtgggaaggactactaggcttgaatccctcgatagccagcctccatgtccagcctttgaccctacccctaggagctcctcagggaatgaggaaaccctttccctacccactggcggtgaatttccacaacgagtagacactagatctgccataaactgaagcttaatgtttcacacagccccaaagcctatcccytagaccctacatagcgagaaagacaatcactgctgcaaattttgacaataagcaggtattagttttgccacagtcaggaatgtaatatactgagcatagcgtttagtccattcatcacaatccaattaactttagggtccctcctgcaactttgtccaactgatgagtccagatagcagtatattccag

SEQ ID NO: 522767 - DNA, 486 bp, Homo sapiens
tgccacttcagcatagtacacacawaatttggttcatcaatatttgacattcctagaagacactattgagagaccactttatgtgttgacaattacctcctagtattttgtcactttcctgtttagtatcatgaccttagagtggtcttaacagactcagcttgctccagtggactttaatcattgttttcccttttaatgcccaaattgtcactacttggccagtgagagccaccttttgtactttttgacactattgcaggtatctctaagagcagccttgctttttggcaacagcaagcttttctagtgctattttaaattagcttgctttgagacatggtattgtctactttcaaatgagccctggttccttttcatgaagacttctattaaagaccagaatctaagttctatgggtgtccttatattgtcgtccaagggtattgttgatagacacaatgataccgcaggaaacgttcttaa

SEQ ID NO: 522768 - DNA, 486 bp, Homo sapiens
tgccacttcagcatagtacacacataatttggttcatcaatatwtgacattcctagaagacactattgagagaccactttatgtgttgacaattacctcctagtattttgtcactttcctgtttagtatcatgaccttagagtggtcttaacagactcagcttgctccagtggactttaatcattgttttcccttttaatgcccaaattgtcactacttggccagtgagagccaccttttgtactttttgacactattgcaggtatctctaagagcagccttgctttttggcaacagcaagcttttctagtgctattttaaattagcttgctttgagacatggtattgtctactttcaaatgagccctggttccttttcatgaagacttctattaaagaccagaatctaagttctatgggtgtccttatattgtcgtccaagggtattgttgatagacacaatgataccgcaggaaacgttcttaa

SEQ ID NO: 522769 - DNA, 501 bp, Homo sapiens
ctgccacttcagcatagtacacacataatttggttcatcaatatttgacattcctagaagacactattgagagaccactttatgtgttgacaattacctcctagtattttgtcactttcctgtttagtatcatgaccttagagtggtcttaacagactcagcttgctccagtggactttaatcattgttttcccttttaatgcccaaattgtcactacttggccagtgagagccaccttttgtactttttgacactattgcaggtatctctaagagcagccttgctttttggcaacagcaagcttttctagtgctattttaaattagctwgctttgagacatggtattgtctactttcaaatgagccctggttccttttcatgaagacttctattaaagaccagaatctaagttctatgggtgtccttatattgtcgtccaagggtattgttgatagacacaatgataccgcaggaaacgttcttaagctgcagtaatgaa

SEQ ID NO: 522770 - DNA, 495 bp, Homo sapiens
gccttgtcaggaagaggccctatgtgtaatcattctcatagtaacagctaagagcccaacctgaacctraggcaataagaacattgatggagggagtggagtgggaagaaaaataaagagaaaactggagttgatgtgtctgatgggtattcttatattttggttatagacctgtaattagaaattttcctaatcagaacttccagttaaagtaattgccatggtcacaaagactatattgacaaaaattttcaacagaaaaatctgttaaagaactcataggacctcagcttccaaaaccatagaatttagacattgagaacaggttgcaaggttggaatgcagcatttcagaatgggtttatgcttcagaggggaaactttgaactgtgagtctaaaaggcatggtagcaagcaataaaagattctgcaaaccaacatgaactacaaatccaaagcagttttcagatattactcaccctggatgcagcgatat

SEQ ID NO: 522771 - DNA, 495 bp, Homo sapiens
gccttgtcaggaagaggccctatgtgtaatcattctcatagtaacagctaagagcccaacctgaacctaaggcaatargaacattgatggagggagtggagtgggaagaaaaataaagagaaaactggagttgatgtgtctgatgggtattcttatattttggttatagacctgtaattagaaattttcctaatcagaacttccagttaaagtaattgccatggtcacaaagactatattgacaaaaattttcaacagaaaaatctgttaaagaactcataggacctcagcttccaaaaccatagaatttagacattgagaacaggttgcaaggttggaatgcagcatttcagaatgggtttatgcttcagaggggaaactttgaactgtgagtctaaaaggcatggtagcaagcaataaaagattctgcaaaccaacatgaactacaaatccaaagcagttttcagatattactcaccctggatgcagcgatat

SEQ ID NO: 522772 - DNA, 495 bp, Homo sapiens
gccttgtcaggaagaggccctatgtgtaatcattctcatagtaacagctaagagcccaacctgaacctaaggcaataagaacattgatggagggagtggagtgggaagaaaaataaagagaaaactggagttgatgtgtctgatgggtattcttatattttggttatagacctgtaattagaaattttcctaatcagaacttccagttaaagtaattgccatggtcacaaagactatattgacaaaaattttcaacagaaaaatctgttaaagaactcataggacctcagcttccaaaaccatagaatttagacattkagaacaggttgcaaggttggaatgcagcatttcagaatgggtttatgcttcagaggggaaactttgaactgtgagtctaaaaggcatggtagcaagcaataaaagattctgcaaaccaacatgaactacaaatccaaagcagttttcagatattactcaccctggatgcagcgatat

SEQ ID NO: 522773 - DNA, 510 bp, Homo sapiens
ggacaaggtgaaaaactcttaaagtggaagtattggtgcaagtgctgtgacaggctggaatggtgcagtcagtcccttcatccataaatcagtagaatgttagcagttcatactcaaaccttgtaaaaaataggtggagaaaaggaagtccctcacagtaactggcaccataatcaagacagaatgtttccagaataaatggagttatctgctttcagcttcaggtggtagctattgtctgccctgatgatatgtgataataatttstgatcccgatgtcttaaaatgggatcactcatctccagtagaattaagtccacagtgaagttgtcccctcatccccaaagagataaacatatatgaatggactgagatgataataactactgctgcctgggatcatgagagacctgaaatgaactgataggatgtgaaaggtggctgagaaaatgagaatggacccatctgcggaggatcataaaaccagcaaagcttcagaagctttgtcca

SEQ ID NO: 522774 - DNA, 563 bp, Homo sapiens
ggcacagtgctcatgcctgtaatcctaacactttgggaggctgaagtcgaaagatctcttgagcccaggagtttgagaccagcctgggcaacacaccaagaccccatctctaccaaaaatcaaaaattagtcaaaaatggtggtgcacgcgtatagtctcagctactcaggagaatgaggtgggaggatcccttgaacccaggagatcaaggctgcagtgagctgtgattgtgccactgcataaacagtcaagaccctgtctcaaaaaaatgaacaaagaaacaaacaaacaaacaaaaaaaacccatttccttttgaggaataaacctrtcagaaatatttagatttaaaatgatagaatatataattattgagattttaaatgattagaactaccaggaatatttggagtaaagggtcaacaaggcacctgttaataatcatgtttttattgctgtattaaactgcttaattacaaaaataattctacatgctcacagaaaacattttatgtacagcactaaagctctaagaggaaaaactacctagaatttcacttctca

SEQ ID NO: 522775 - DNA, 680 bp, Homo sapiens
atcaggtgatcaagctcaatatcaacgtgagcagtcatgttggtactatgtactctagatataatacgatgaaaatggcacttcatttctgtgatcttcctcacaaaaacccataaccccaatctaatcattagaaaagcatcagacaaatcccaattaagggacattctatgaaacacctgactggtactcctcaagactgtcaaggtcatgaaaaaccrgcaaggcctgagaaacagtcaccgtctagggctcaaaagagacatggcaactagatgtaatgtggaatactgaatgggatcatggaagagaaaagggacactaggtaaaaactaagaaaatatttaaaaattatgacttgagttaataataagatatcaatattggatcattagttatgaggaatgtttcatatcgatataagatattagcagtaggggaaactggatctgggaatatgagaactctgtactatctttgcaacttttctgtaaatctaaaagtattctaaaattaaaagcttattttacaaaactgtctttggctcctctccctcccataccccatacccaggcttatagtagattctatgtccaaaatgtctttctgctgttcccttccctcccattccctctgccatccccctgttcattgtattctccgatccatcctccacacag

SEQ ID NO: 522776 - DNA, 620 bp, Homo sapiens
cttctaagtctagtggaagagatatacataaataattaccttaaagtataaataagtgttcttgaatataaattggtaaaaaccttacttggggaaaatgtatcatttctttcctctttaaaattgtaacacttaatactgataaatattatgtaagaagtaaacaaaataaagtcagttattccttctgaaggaaacaataattttaagaaaaaaattattttattaactatctcaatgtaaacatatttcttagctcaaaaatataacccatattgtttctgcttctttttaaattattyttaattgacaaataaaaattgtacatgtttatcacgtataacatgttttgaaatacatatacattgtggaatagctaaatggaactaactaacatatgcattacctcacacatcctgttttgtggtaagaatacttcaaatctactcttttatcaattttcaagcatataatacatggttatttactggagtcatcatgaagtacaatagatctcttgtccatagtcattttaaagaaaataatcccatgtgcagcaaaggagactaggcaacttgtcctataccacttcctcacacccttcacccccaaattccaca

SEQ ID NO: 522777 - DNA, 620 bp, Homo sapiens
cttctaagtctagtggaagagatatacataaataattaccttaaagtataaataagtgttcttgaatataaattggtaaaaaccttacttggggaaaatgtatcatttctttcctctttaaaattgtaacacttaatactgataaatattatgtaagaagtaaacaaaataaagtcagttattccttctgaaggaaacaataattttaagaaaaaaattattttattaactatctcaatgtaaacatatttcttagctcaaaaatataacccatattgtttctgcttctttttaaattatttttaattgacaaataaaaattgtacatgtttatcaygtataacatgttttgaaatacatatacattgtggaatagctaaatggaactaactaacatatgcattacctcacacatcctgttttgtggtaagaatacttcaaatctactcttttatcaattttcaagcatataatacatggttatttactggagtcatcatgaagtacaatagatctcttgtccatagtcattttaaagaaaataatcccatgtgcagcaaaggagactaggcaacttgtcctataccacttcctcacacccttcacccccaaattccaca

SEQ ID NO: 522778 - DNA, 583 bp, Homo sapiens
ccactgatctgagttcacacaacaagcccctttgtctctgagctcccatgcagctcttctgagcgacagaagcccaggaacaccaaggtcctgggctcaggccagcccaagctgagcgaaacaggctaaaatacaggcggcttggacattcctttatcaaacactctggaggggcagaaagcacaattttgcacacatgatcacactctgtacctacagtggagtgaaatcaggcctgagccatggaattcacctgtgcaccctgaacagcaccctgatttttatgatccctgtggcaaatcctatcacttgcatccaactgaatttaccatagaatccaaccacctctttttttcctcaaattagccaactaccagccaatagcctggtataataacaccacttaccagaaccactgggcctgccaggctagactaaatcagcaattacacgcacttagtgacaagaagttctcatggagaagtccccagatggcttcatgctatcctcaggggcctcaggccccaatacyctaataccctggaatggcaatgcccaagagaacttatgttccaaccagggg

SEQ ID NO: 522779 - DNA, 561 bp, Homo sapiens
ctgctaaccaaatgaacaagaagaaaagtgaaggatggggccattttcctggttttagtcaccaaaatctgctttaaaagactgaatttttagaccttaaattttaaaatttggggttctaagcttcaaagtaattatttaagacttatcccacattacaactacagattgcaccaacagttttcttagagttagtgagcctcttgcatcaactttgtttcctgttctctccaaagctcctttctaaagcaactgagcttcagaagagggaagaaggaaacagggcagaggggtttgctgacctcagtctgcattcaatacatttttctttttctctttgagacaaggactgctargaaagggccttttcatattttaaagctgaagtttcaaaaaagctagaacaattcaaagatatttattccataaaattatcctcaggtaccaaaagtagctctggaaaagtggccacctctttttatttggccttcatagctcattattttaatcaagtagatggttaatgaaaagcaaacttacactttccatgaagtaaataaa

SEQ ID NO: 522780 - DNA, 605 bp, Homo sapiens
tgatcacagctctgggatcagcccctacatccttttcaaatgatgccacctgtcatttaagtattttgcatttgcctttcatgttacatatatttcatgatgatttccattttaaaaaccttcttggttaaccctttgaaggttctcatgatatggattatcctctgccgtcaggaatggggtgagctaaccaccctcccaggtaggcaagagaaacagcacgtttgcctctgaaaaagaccaatcctctccaaacgttcacatcttaggaaagagaacagttgcatccttttcactgggtgtaaaactgcttctctgctcagaaccaatggaaaaaaatgggggacgggtcagatgctgtgtactggttgacttcagtggcatgtgcagaccatrcccattccaccgggcacatgcatccctcacacccccagggtgacctcaggcctgctttgtcacacaggcacccaccttgggctccatacccagcacacgcaacttctctactgaacaagtggcaggggtcttctcacagggcccctggaactctttcaacccataagacaacgccaaatgggtgaaaacccacctcatccacccctgcc

SEQ ID NO: 522781 - DNA, 605 bp, Homo sapiens
tgatcacagctctgggatcagcccctacatccttttcaaatgatgccacctgtcatttaagtattttgcatttgcctttcatgttacatatatttcatgatgatttccattttaaaaaccttcttggttaaccctttgaaggttctcatgatatggattatcctctgccgtcaggaatggggtgagctaaccaccctcccaggtaggcaagagaaacagcacgtttgcctctgaaaaagaccaatcctctccaaacgttcacatcttaggaaagagaacagttgcatccttttcactgggtgtaaaactgcttctctgctcagaaccaatggaaaaaaatgggggacgggtcagatgctgtgtactggttgacttcagtggcatgtgcagaccatgcccattccacygggcacatgcatccctcacacccccagggtgacctcaggcctgctttgtcacacaggcacccaccttgggctccatacccagcacacgcaacttctctactgaacaagtggcaggggtcttctcacagggcccctggaactctttcaacccataagacaacgccaaatgggtgaaaacccacctcatccacccctgcc

SEQ ID NO: 522782 - DNA, 581 bp, Homo sapiens
aaggacaaactatctccatcattcatttaaattcaattgtccctagagcgtctccttctactatgaatgccctactggagctttcatcagatcgagcccatccccaggctgtcctccgctcatgtgtttctgtgtaaaatttttctctgctttgatagagagactttcaagagttcatttacatctcccaaggacatatttaccatcagatggacactagatagattggcttccatttgtatctgggctctgagtatgctggttgttttctggtttgtcattccctgaaaaatctgtaacctcttctaataaaatgaataatggataaatgattttaaatggtttgtggtttsctatcagaggagtatcatacatattaaacacccaaaatcttaatgtgcttaacatcttttccagctttttgaacaaagtgggctactttacccccaggtataaatcaattagcagagacataaccaaggagacgttcaagaccaagttaactgagtctacagttaggatctctgagtggatgacagatgttacactgaaagtcagtaaccagcatgtctaatgctaca

SEQ ID NO: 522783 - DNA, 642 bp, Homo sapiens
taaaataaaatacatgtttctacacatagaaaacatggaagatatacattaatgacattaatgatatgtttctctggagtggggaagagggaggctcacagatgatttcaattttgctatttgtaattcttttgtcttaaaactttgtgcagtaagcatataatgcaagctattatacttttttaaagttgtaaaagtgaaatctagggaaagaagaggaaaagtacagcmgcaaagattactgttctcaggactggagaacaaacagaacttggaacactttccaggagcctgtcatctggagctctctggggagctgcaatctccattcaatgacttatttcctgttttctttgcatccaaatatttatcatggcactgggtagggagatactgcttaggaatcgtgcattccctcataaaagtttctctttgagaaaatcatccaagcccttaacagacaagagagccagtaggaaggtatttaaagatcctacaggagacacctgtaatgttgtctcagtgggaaagttctcctgcctaaaaatggagtgatggaggtggggatgaaagaaccagaggtggtttatcagagtcccttcctgtccaaaaagagaactcagagtaaagcaaatattcagc

SEQ ID NO: 522784 - DNA, 642 bp, Homo sapiens
taaaataaaatacatgtttctacacatagaaaacatggaagatatacattaatgacattaatgatatgtttctctggagtggggaagagggaggctcacagatgatttcaattttgctatttgtaattcttttgtcttaaaactttgtgcagtaagcatataatgcaagctattatacttttttaaagttgtaaaagtgaaatctagggaaagaagaggaaaagtacagccgcaaagattactgttctcaggactggagaacaaacagaacttggaacactttccaggagcctrtcatctggagctctctggggagctgcaatctccattcaatgacttatttcctgttttctttgcatccaaatatttatcatggcactgggtagggagatactgcttaggaatcgtgcattccctcataaaagtttctctttgagaaaatcatccaagcccttaacagacaagagagccagtaggaaggtatttaaagatcctacaggagacacctgtaatgttgtctcagtgggaaagttctcctgcctaaaaatggagtgatggaggtggggatgaaagaaccagaggtggtttatcagagtcccttcctgtccaaaaagagaactcagagtaaagcaaatattcagc

SEQ ID NO: 522785 - DNA, 594 bp, Homo sapiens
gcaaggtgccgtttcccgcactgcacctcatcctcaataccagtgcttctgactgcgtcagacagtacccttcttgcccccgtttgtcccctcgttctgtgggtcgcatttagggtatgcggccgccctgcagggtagacagtcttattcgaaggggagaggtatgttcggctggtctgggtacacagacgtgctcaacacctatcctttccctttcccttttcttctgtgaggctttgtcttttgctgaggatggatgaggccacgttctgagctttttctgtgttcgtttagagccaaaggcaggaactacattgattctgtggtccccagagcacactgctttgcgtatagtgggcatgccataaatatttatggaatgattgattgggctaggttagtgttgctggacatgaaaagaaaggagatgaatttgagactttgtaaatggaaaaactgtaggacttgatgaatacttttataatgagaktatatcggtttcttcttctttatttatcaacttctgtgaatgagctgaatgtgaatttctacattaaaatttaatttgttaaactcagaagcaaaggctcaaat

SEQ ID NO: 522786 - DNA, 600 bp, Homo sapiens
gcaagttatagaaaatgatgacttacattggctgatatgatacataaatctattatctccgtaaaggcgaagaaggccaggcatggtggctcacgcctgtaatcccagcactttgggaggccgaggcgggcggatcacgctaatgtggtgaaaccccgtctctactaaaaatacaaaaaattagccgggcgtggttgcgggtgcctgtagtcccaggtattcaggaggctgaggcaggagaatggcctgaacccaggaggcggagcttgcagtgacctgtgattgtgccactgcactccagcctgggcgacagagcgagagtccatctcaaaaaaaaaaaaaaaaagacgaagaagcccagggtcaggccgactgcaggacstgttggtccatctgcttagcgatgtctcggggcccaggcactttcctcctctgcacttaccccacatggtcccaggatggctgcactgactccaggggacacatccagacctgacatcaggaaaaggtgaggccgtggcttcccctgggtccttctcagaagtgaggaggccctgtcccacgcgtgtcttatggcccattctcaaacccatcagaggt

SEQ ID NO: 522787 - DNA, 643 bp, Homo sapiens
ctaactactgtttaactgcatcccatgagctttgatatattgtgtctttattttcatacatctcaagggattttcacatttcctttttaatttcttaactttgatacatttgttattgtattcatattctaggactgctgttaacaaagtataccacaaaccagatggcttaaaacaatagaaatttattttctcacaattcttaaggccagaagtctgaaatcaaggtaccggcaacgttggttccttctggagggttcagaaggacagtaagttcaatgtttctctcctactttttaacagatactggcaacttcaggcatttgtagtctatgagagtatcactccartctctgcctccatcatcacatgccagtgatgagatacctgtgtgtctctgtattcccctggtgtctttccttctttgtatcactttcctcttcctataaggacaccagtcatattgtattaagggcccacacttttccaatatttcctcatcttaacgaattatgtctggaagaacactatttctatataaggtcacgttctgaggaactgtcaggacttcagcatatctctttgagggacacaatttcgtgcataatagtcatatgagaatatgtttttaaatttccataaa

SEQ ID NO: 522788 - DNA, 619 bp, Homo sapiens
gtggctttattgtttacaacaacagtatttgggggagacattgctttacagacagagtcagtcaaatatgggccctttcaaggcccgtttccagcactcggttatttgagatttgtctcaccataggatggctcctcccagccacctcttccccagtttctcctcagcagtttttccaaactacagttgagcctgtatctccaataaatccatccatgtcctcccagttgcctcctcctacaacatccactctttatgggagtacctctaggcaactgacattggatggtaggtgataaaggactgtaatccttgagaaaagtgaaacatatgaactcctacatttatccagttgaggataatttcctgactctgggacagggcagtggaacgaaagcagagccttatagcagcactgggtagaatccgggagatgtgggaattgtgctgagatgccaagaatctgcagaagctcctcacgggtcagtggctgggcctgagtttctcatacctggggtggaatttcacaggccctagcagagcagttgagagtgscacagtgtgcagagttaagcatcccacggagattgtagggatcacacagtatttggaaacagac

SEQ ID NO: 522789 - DNA, 532 bp, Homo sapiens
ctttcaatgtgtatgttcatcagtgatttaaatccttaagcagctagaaaaaaagagtaaattaaagcctaacttgtgggaagtaaataatctggataagagagcaataaaacataaagcaagcaacagaaggaagattcgaaatgccagtagttctttgaaaagactattaaaatggatacaattctgactaattaaggaaaaaaaagaaaatattaacaccaattgccaatgttgacagtgaaagaggggatagcacttagattacattgggataataagagagtattataaataatatgctaataaatttgaaacttagatgaaccggataaattttttgagaaatmcagcttactatacttgaaccaaaaagaactctgaatatttcattgaagaaatctaatcttaaaacaaacaaacaaacaaaccacccatccctcaggaccaggcctcaacagcttcatgtggggttgctatcaaacaatcttgcacaaaagctttccaaaagaaggacaagaaccatttccta

SEQ ID NO: 522790 - DNA, 532 bp, Homo sapiens
ctttcaatgtgtatgttcatcagtgatttaaatccttaagcagctagaaaaaaagagtaaattaaagcctaacttgtgggaagtaaataatctggataagagagcaataaaacataaagcaagcaacagaaggaagattcgaaatgccagtagttctttgaaaagactattaaaatggatacaattctgactaattaaggaaaaaaaagaaaatattaacaccaattgccaatgttgacagtgaaagaggggatagcacttagattacattgggataataagagagtattataaataatatgctaataaatttgaaacttagatgaaccggataaattttttgagaaatccagcttactatacttgaaccaaaaagaactctgaatatttcattgaagaaatctaatcttaaaacaaacaaacaaacaaaccacccatccctcaggaccaggcctcaacagcttcatgtggggttgctatcaaacartcttgcacaaaagctttccaaaagaaggacaagaaccatttccta

SEQ ID NO: 522791 - DNA, 594 bp, Homo sapiens
tgacgaaggtattatataactttgtaaagtcaataataaaacaacccaagaaaaaaattatatgaaagatttttacagaatttaaagccaataaacacatggaattttctcaacatctctaatcataaggtaaaaccagggtggtgtatgtaccattatgcacccactagaatggccaaaattacaaagaccaacattatcagttgttggcaagtgatattgtttggctgtgtccccacctaaatctcatctcggattgtaatctgcatgtgtcaagggaggggcctggtgagcggtgattgagtcatggggacagattttccctttgccattctcatgatagtgaatgaattctcacccagatctggttgtttgaaagtgtgtggcacctcccactttgcttgctctctctctcctgcagccatataatacttgcttccctttcaccttcgccatgattgtaagtttgctgaggcctccccagccatgtggaactgtgagtcaattaaacctcttytctttataaattacccagtatcaggtaattctttatagcggtgtgaaaatggactaatacagcaaggatgtcaagca

SEQ ID NO: 522792 - DNA, 297 bp, Homo sapiens
gcccaggaaccatgatgttactgatctgctgaattagccagtcctggaacagctatactctgaattccttcaaggtgaaatgaccgaaacaaagaaagagggaaggaaggaaggaagggaagggaaaggaagggaagggaaggaagggaaggragggaagggaggaaggaaggaaggaaggaagggaagggaggaaggaaggagggaaggaaggaaggaaggaaggaaggaaggaaggaaggaaagaaggaaaaaaaagaaaaagaaagagagaaaagaaaaagaaaaatccttact

SEQ ID NO: 522793 - DNA, 605 bp, Homo sapiens
tttaagtttggcttcaagcactgtattgagagtcagcatatccaaaatggactttcagctctgcaacttgtgcaaatgatttttctttgcctccattttttcccataaagatatcaatactattttttactctttaagtgtattttattttgcaaaatgcatgttcagaagactagcgggtagtctatagcttcttgatgttactstctttcttcctaagcccatgttcattttagatcatcacactgggagaagtatcctctttgtcaggtggctctgcatgcactatcccttccttccatcagtcccttggtcacctggtgcaataatgtcatgtaacatttgtattgtactttacaatttgtaaagggaacacaacctattcactatcatatttaattatttccaaaattctgtgaggtaggcattatttgtattttacaaatgggatgaataagatccagaaaattaagtgacttgtttaagatcacataagaaacagagccaggcctggaactcaagtcttctgagtttcaatccagtgttgtttcttctataccccagataagcaataggacaagcttgtccagcctgtggcccacggg

SEQ ID NO: 522794 - DNA, 610 bp, Homo sapiens
agaccatgcattacttcgagggcatcatcctgtgccccaaagccaccttacatatctggcttggccatcatcctgagcttcctggmggcactacgtggacaatccgaccctcatcttctaccatcaccctgtcacgggtgtgcagcgctgtgctgcgatgtcaacggtggtcagagcaagtgacacaacagtgcgttctactgggacacttctccaggggccttccctccaggaggacatcccggaggtccagaaagctgcaggggaatggagggaaaagacaacggtggccacggtgatcgtcaactgtaatcattatgttggcaaagctataaaatcaaacccaggacaccacacaagatcctgaacatatttccacaagaggaagaatattgtgctccaggcaacccaggtagtgcaccttaaataggaaagagttcaacaagtcacacaaagttacagacacctgcatgccgggtgcaccagcctcgtcctgaggagttgagaatggtggccctggctgggaattctctaagttgctctgccactgggaaaatagattccttagggaagcaaagaaaacgatggattcctttgtgctcagaagaca

SEQ ID NO: 522795 - DNA, 610 bp, Homo sapiens
agaccatgcattacttcgagggcatcatcctgtgccccaaagccaccttacatatctggcttggccatcatcctgagcttcctggaggcactacgtggacaatccgaccctcatcttctaccatcaccctgtcacgggtgtgcagcgctgtgctgcgatgtcaacggtggtcagagcaagtgacacaacagtgcgttctactgggacacttctccaggggccttccctccaggaggacatcccggaggtccagaaagctgcaggggaatggagggaaaagacaacggtggccacggtgatcgtcaactgtaatcattatgttggcaaagctataaaatcaaacccaggacaccacacaagatcctgaacatatttccacaagaggaagaatattgtgctccaggcaacccaggtagtgcaccttaaataggaaagagttcaacaagtcacacaaagttacagacacctgcatgccgggtgcaccagcctcgtcctgaggagttgagaatggtggccctggctgggaattctctaagttgctctgccactgggaaaatagattccttmgggaagcaaagaaaacgatggattcctttgtgctcagaagaca

SEQ ID NO: 522796 - DNA, 639 bp, Homo sapiens
tgcttaattgatcacaggttcataytgttactaacaggcttcaatgatgcctaatcataagaaacacttgcgtctgggtcataactgccctcagcatcacttctgggtggcagacgcagtttgtcagtttgccaacattctgcatttatgagaaacagttcgctgcttacttacatagcctccagtggtatactgagttgatcacgaccctcactcttcggcctccaacaggaccccatacctggaccagccaagcccctgccttatctctccagggcttgttaccaaaccgaacttcggtctacttggctggtgcagcggagctaaacgctgacatcaggatagcagcgagacagtgcgaggtttaaattgcagggtgccaagcaaggagaattgggtggctagtgcttaagacctaactcccagatggcttacaggtaagggtttttaaaggcggggaggcagaggttacaggcaaagtcataaatcaatacatgaaagctctgcatgggattgacctagaaaggtgggatgtctcaaagcagggcccacaggtcaaaggtggattcaaaggttttttgatttgctattggttaaggaagcaaagctttgtctaggaatttgggatcagcagaaatg

SEQ ID NO: 522797 - DNA, 639 bp, Homo sapiens
tgcttaattgatcacaggttcatactgttactaacaggcttcaatgatgcctaatcataagaaacacttgcgtctgggtcataactgccctcagcatcacttctgggtggcagacgcagtttgtcagtttgccaacattctgcatttatgagaaacagttcgctgcttacttacatagcctccagtggtatactgagttgatcacgaccctcactcttcggcctccaacaggaccccatacctggaccagccaagcccctgccttatctctccagggcttgttaccaaaccgaacttcggtctacttggctggtgcagcggagctaaacgctgacatcaggatagcagcgagacagtgcgaggtttaaattgcagggtgccaagcaaggagaattgggtggctagtgcttaagacctaactcccagatggcttacaggtaagggtttttaaaggcggggaggcagaggttacaggcaaagtcataaatcaatacatgaaagctctrcatgggattgacctagaaaggtgggatgtctcaaagcagggcccacaggtcaaaggtggattcaaaggttttttgatttgctattggttaaggaagcaaagctttgtctaggaatttgggatcagcagaaatg

SEQ ID NO: 522798 - DNA, 630 bp, Homo sapiens
gctgtgttctaaacacgatctcagcaaggccaatggacctcgggcttaacctcaatatgagcctcagtgagtaaaatgtcactactggtcacatgcagagtcatcaaacaacactctcgtccatgctaccttctgagtattctccagtcttcacccatggccccgcctctccactgcccctgcaaagaaaaagtcctccatccttgccctgccacaactactggacrtcttcaacctttccaccacccaagactctgttatttaccccacagaatctgtttccatcaatggctatgaaaaaacagagagtgatttaatctgttcgctttttttttaaggccatcaactgtcctgagtcatcacactaagtgtctgtcattctaattggatgcagaggtgtttttacaataagcctgggcagctttatgtcaaatcaatgaacaatttccaaccaccatttgtaaacaataataaatcaaggactctcgaaacggaacccccaaggtataaacgttcccctacagaagcccatctgctgcaagctcttccagaaaataaacctggaattctaaaacctaaaaaaggaaatgatccatttgggcttacaatttcagagacacaacttcactc

SEQ ID NO: 522799 - DNA, 630 bp, Homo sapiens
gctgtgttctaaacacgatctcagcaaggccaatggacctcgggcttaacctcaatatgagcctcagtgagtaaaatgtcactactggtcacatgcagagtcatcaaacaacactctcgtccatgctaccttctgagtattctccagtcttcacccatggccccgcctctccactgcccctgcaaagaaaaagtcctccatccttgccctgccacaactactggacatcttcaacctttccaccacccaagactctgttatttaccccacagaatctgtttccatcaayggctatgaaaaaacagagagtgatttaatctgttcgctttttttttaaggccatcaactgtcctgagtcatcacactaagtgtctgtcattctaattggatgcagaggtgtttttacaataagcctgggcagctttatgtcaaatcaatgaacaatttccaaccaccatttgtaaacaataataaatcaaggactctcgaaacggaacccccaaggtataaacgttcccctacagaagcccatctgctgcaagctcttccagaaaataaacctggaattctaaaacctaaaaaaggaaatgatccatttgggcttacaatttcagagacacaacttcactc

SEQ ID NO: 522800 - DNA, 572 bp, Homo sapiens
tgctctattcctgattcacagaatgaaaaactstacattaggccaagggttactgagcgctcagcatgccgggccctcgcaaggcactggagactgcagtgaacaagacatacctgccctcctggggcttcgtctaagctccccttttctgactttgaaaggaagcttgtttttcaggagggaaaaatcttcttccaagagaacaggcaaagttttgagctttgcatgcccttaaaacttactagcacctaaaattagcttctctgatagatgtgtctttgcactttacacaatgcagaaggctccccaagaagggcaaattgtgcccgcatcaaccagtaaaaccattcggaaaacaaagaggagagctaattttaggaagcagcattttcagtccaactactttttgtgcttctgtctggcaaagggacagaatagaagataaggaaactgcccccactaaatctctcctacggactgtccttactacacatcaatcctctcccaggccaattgctccaaattaccagaggaggaggccatcttatacgtttcatgatgaaagagagggc

SEQ ID NO: 522801 - DNA, 619 bp, Homo sapiens
catctaaagttgggggtggggggtgcattcttataggactgagccttaacctgtgtggtctgcactaactccgggtagttaatgccaaaattgaatagaattgcaggacacccggttggtgtcagagaatcaaattagttgttactggaaaaacaacacatcctcctagaaaactgcctagtacacagtaggcactcaactaatatttgccggatgaatggatggatgtcacctcccctacagactgccattaaagttctcattctgatcatcatcttcctggacaccccayttccttgctaatggtttcctagcaactcaataaataagtatttttgatgcccacacaggcatcaaatacgtatttttgatgccaggcactgaggtacaatcactaaggaaggtagccaggaggcatggaggatgccatccgatgccatgcagcttagtgcagctcagaactccaggattccttgcctaccccaccagggcggggcaaggccttgtgaacaggagagtcctggccctctttgaaactcaatcttcatggttcacaggcatccttcagcctctccctgcatgcagcaataatgcaaccctgaacacatccctctgaact

SEQ ID NO: 522802 - DNA, 506 bp, Homo sapiens
gacattttatgacaagacatcccagattctgaatttattcctttattttttccatgtaacaagttatagtaatattttataactttttacaktaggaataaattcactcactctggaacaacagtactcaaaacaattttgaagacaatgcatatatttattccacttacatatttctcatacatttcatatatttattcattctccatcagcactagaaacctagacaaactgaaattacctatctcagaccttttacatgggcagtactttaagtttgtcttctattttctttttattataaatctttcaattaatccttaatactctgtttatttatttagacatatacaaatatatatgagtagagggaaataaagggtaaaatgaaaactctaaacattagctttaagaaataaattaatcagcattcatatatatattactaaatttatcatattaataacctttacagcttattaaaattacaagctacttataatttg

SEQ ID NO: 522803 - DNA, 506 bp, Homo sapiens
gacattttatgacaagacatcccagattctgaatttattcctttattttttccatgtaacaagttatagtaatattttataactttttacattaggaataaattcactcactctggaacaacagtactcaaaacaattttgaagacaatgcatatatttattccacttayatatttctcatacatttcatatatttattcattctccatcagcactagaaacctagacaaactgaaattacctatctcagaccttttacatgggcagtactttaagtttgtcttctattttctttttattataaatctttcaattaatccttaatactctgtttatttatttagacatatacaaatatatatgagtagagggaaataaagggtaaaatgaaaactctaaacattagctttaagaaataaattaatcagcattcatatatatattactaaatttatcatattaataacctttacagcttattaaaattacaagctacttataatttg

SEQ ID NO: 522804 - DNA, 506 bp, Homo sapiens
gacattttatgacaagacatcccagattctgaatttattcctttattttttccatgtaacaagttatagtaatattttataactttttacattaggaataaattcactcactctggaacaacagtactcaaaacaattttgaagacaatgcatatatttattccacttacatatttctcatacatttcatatatttattcattctccatcagcactagaaacctagacaaactgaaattacctatctcagaccttttacatggrcagtactttaagtttgtcttctattttctttttattataaatctttcaattaatccttaatactctgtttatttatttagacatatacaaatatatatgagtagagggaaataaagggtaaaatgaaaactctaaacattagctttaagaaataaattaatcagcattcatatatatattactaaatttatcatattaataacctttacagcttattaaaattacaagctacttataatttg

SEQ ID NO: 522805 - DNA, 599 bp, Homo sapiens
tatggctctccctcttgtgtgcttgtaatacacagcatgttggataattttgtatgtaaacttgactgggccacagtatgcacagatctggctaaacattatttccaggtgtgtctatgcgaatgttttcagaaaaaaaaatagtatttaagttggtrgccctccctaatatgggccttccctaaagcaggcagccctccctaatgtgggtggggaccatccaatccatgaggacgtgaatagaacaaaagtgtggctctgctcactgctggagctgggacatccatcttctcctgcctttggtgctcctggttttcaggctcgcagacacggacaggagtctacactgttggttccgtgtctcgcatgccttcaaactacatcactggctttcctgggtctccagcttatgaacagcagattatggaactactcaacctctataattggttgaaccaattccttgcaataaatctcattgacccctttctatataaattgatagattagatatagatatagatgatatagacatctatatatcccatataatatttaggctcatttctactaaaaaaaaattcattgcttatctgaga

SEQ ID NO: 522806 - DNA, 534 bp, Homo sapiens
ctgaggggtcctatggaagcctttctcactaaactgaagtagtagagggtagcatcattgacttcamccctgggtggaaaatgtactcatgttatggtaatagcttttggggagatgttccttcacaaattcaccttctttttcaacattctgatccctcttaaatcagtgatctaggggtccaaaaggtacagatctagggatccaaaaggtgtggacctgaacttagctagcacaaaacagtcaggagtgctttaggttgtagatcctgaagccaaactgtctgtgtttgggtgatagttttattacttactagctgtgtaactcaggcaagtcacttaatcttcctcgcctcaatttcctctttggaagcaacagtaagtattgagttaatgtatgtaaagcatttagaacaattcctggcatatagcaaacactatgtaactatgtgctattagtattcctttgtaaattcttcatatattgatctggctttcttactccctttactgaaatctgtattttaacaccctg

SEQ ID NO: 522807 - DNA, 561 bp, Homo sapiens
cttacatgaccaaataacttaaaatttgttgttaataatttttatgtagattacatattgaacaaaattataacattttggaaataaaaatatatgttatttaacttttttatattttttaatgtggctactggaaaattttaaattacatatatggtttacattgtatttctattggacagcactgttctagagggtaatttaactagattcatctagcactgttccttttggaccaccataaaaagggtttggcatttgaaatttattgattactcttttgtaatgtcagtggatacggctcttttctacaacagtcattttgtgcatttkaggtacagtgtactgtgttgcatagtaggaactaagaatatcttcagtttttaagatgtaggataagtaacaaatccagtttacaaaatttatataggaaatttcaataatttgttatcactgttatgtagtcttacttaacatagtaagctcagtgtatagagcagaatactgggagccttgtttcatgaaacaaggttgagtcagctactacttaattgtgaagat

SEQ ID NO: 522808 - DNA, 554 bp, Homo sapiens
ctgttactctttttcatgaattctcaggtcatctttcttgcctatctagtactaggtaacttttctctttttttttcttttctttttaagagakaaggtctcagtctgtcacccaggctggagtacattggtgtgatcatagctcactgaacctccaactcctgggctcaaaatccttctacctcatcttccagagtagctaggactacaggtgtataccacccacaccaggccttttttttttttctttagaggggggctagctgtgttgcccaggatgttcttgaacttctggcctcaagcaggcctcccacctcagcctccctagtagctagtcttacctagtgctatataatttttcaatgtcagttatttccttttttataaatagtttcacgtagtaaagtggcattatactctggatttcttgaaggcagaaatagacaaatttgttgaactggatgatcagacatttattctagaagaatatttcttggtttacttttactgcacccatatgtactaagaaatttgagtataaattaacaagtatc

SEQ ID NO: 522809 - DNA, 637 bp, Homo sapiens
tgttactctttttcatgaattctcaggtcatctttcttgcctatctagtactaggtaacttttctctttttttttcttttctttttaagagataaggtctcagtctgtcacccaggctggagtacattggtgtgatcatagctcactgaacctccaactcctgggctcaaaatccttctacctcatcttccagagtagctaggactacaggtgtataccacccacaccaggccttttttttttttctttagagggggrctagctgtgttgcccaggatgttcttgaacttctggcctcaagcaggcctcccacctcagcctccctagtagctagtcttacctagtgctatataatttttcaatgtcagttatttccttttttataaatagtttcacgtagtaaagtggcattatactctggatttcttgaaggcagaaatagacaaatttgttgaactggatgatcagacatttattctagaagaatatttcttggtttacttttactgcacccatatgtactaagaaatttgagtataaattaacaagtatcatttgaaatgtgcatgtcactcaaaagtaaatgagtaaagtggctgtattttctccttcattacagataaatactgcaacaact

SEQ ID NO: 522810 - DNA, 601 bp, Homo sapiens
ttatgtctaatcccaggaacctgtggatttgtcgtgtcacttgggaagggacaaagtaagatcagctgacttgagatggggaggttactctgtattagcagggtggatgcagtgtatgcacaaagctccttataagtgaaagggagaggcagaggagtcagcttttttgaagatttgaagatgataccctaccaactttgccaactcagtagatagaggaagaggcatgggccaaggaatacagatggcttctataaactacaaaaggcaaggaaacatttttccccagaggctcctgaaagaacatactttccgacaccttgactttggatcactgagascattttgaatttatgacttccagaaatgtaattataaatttgtgttgtttcaagacactaaggttgtgagaatttattatagcactaataagaaactaatatattgaaactattaaaagaggtctgtctgtagaattagccgctctcaaggttccagaaagaacagtgaggttgacatgagatcatttaaaagggttctacaacaccgctcagatgctgatgggctactgcctaaatgtaccatggaggggaaggaagat

SEQ ID NO: 522811 - DNA, 601 bp, Homo sapiens
ttatgtctaatcccaggaacctgtggatttgtcgtgtcacttgggaagggacaaagtaagatcagctgacttgagatggggaggttactctgtattagcagggtggatgcagtgtatgcacaaagctccttataagtgaaagggagaggcagaggagtcagcttttttgaagatttgaagatgataccctaccaactttgccaactcagtagatagaggaagaggcatgggccaaggaatacagatggcttctataaactacaaaaggcaaggaaacatttttccccagaggctcctgaaagaacatactttccgacaccttgactttggatcactgagagcattttgaatttatgacttccagaaatgtaattataaatttgtgttgtttcaagacactaaggttgtgagaatttattayagcactaataagaaactaatatattgaaactattaaaagaggtctgtctgtagaattagccgctctcaaggttccagaaagaacagtgaggttgacatgagatcatttaaaagggttctacaacaccgctcagatgctgatgggctactgcctaaatgtaccatggaggggaaggaagat

SEQ ID NO: 522812 - DNA, 601 bp, Homo sapiens
ttatgtctaatcccaggaacctgtggatttgtcgtgtcacttgggaagggacaaagtaagatcagctgacttgagatggggaggttactctgtattagcagggtggatgcagtgtatgcacaaagctccttataagtgaaagggagaggcagaggagtcagcttttttgaagatttgaagatgataccctaccaactttgccaactcagtagatagaggaagaggcatgggccaaggaatacagatggcttctataaactacaaaaggcaaggaaacatttttccccagaggctcctgaaagaacatactttccgacaccttgactttggatcactgagagcattttgaatttatgacttccagaaatgtaattataaatttgtgttgtttcaagacactaaggttgtgagaatttattatagcactaataagaaactaatatattgaaactattaaaagaggtctgtctgtagaattagccgctctcaaggttccagaaagaayagtgaggttgacatgagatcatttaaaagggttctacaacaccgctcagatgctgatgggctactgcctaaatgtaccatggaggggaaggaagat

SEQ ID NO: 522813 - DNA, 586 bp, Homo sapiens
tgcagtacatatttagagccatttccattagaaagtgggattaaaaataggtccatgtctatgaagaccatgtgaaagtaaattgctccagaaagtgtcccagatttattatgggtgttgctatagaaacctcaagaagaagtttgctcttagagggcatccttttttattctatttgttcaataaacatttattgagcatctactacattccaggtcgattttaagtgttgagaatacagcagtaaacaaagcagacaaaatccctgcccacatggtttatggtttagggaaaagagacagagaataaacacaatagataaatgaataaacaaaattgtatagaagataagtgcgacagatcaaaartggaaaagaaggcaaacatttgaaatacagtagttaatctaggacaaaatgaacaagtgacatttaaggaaacacttgaagcaagtgagggagcacaccagaggtatatttgggagaagagcactccaggtagaggaaccagcaaagtcaaagtcaagggacagcaaaaatgctagtgtggctgaggcagactagatgggactccttccaggatttct

SEQ ID NO: 522814 - DNA, 511 bp, Homo sapiens
cttcctgtacagcctgcagaactgtgagccaattaaacctcttttcttataaattacccagtctcaggtatttccttatagcaatgcaagaatggcctaacacacaataatacaaaagattatctgtcctacatgatagcatcaactgtayagaccaggatgacatgacacagctcccaggcttctagcttgttgctctgacacttcctaaaatgtttccctcaatcttccatgtaacggaaacaacatggactttgaagtcaaagagaagtgacaagaaacaaattatataataaataaatggcaatttatcatataatgcgatttgactgtgctgtgctaattatggcataaaataaaaaatttaaattatcagacattaaagttttcaatattatctgtaaatttacctggaacaaaagactataggcagagaaatacagtaggaaatataagtccttgagaaaatgcaggggtgaaactcatagggaaattaagacatttaaaaaca

SEQ ID NO: 522815 - DNA, 511 bp, Homo sapiens
cttcctgtacagcctgcagaactgtgagccaattaaacctcttttcttataaattacccagtctcaggtatttccttatagcaatgcaagaatggcctaacacacaataatacaaaagattatctgtcctacatgatagcatcaactgtacagaccaggatgacatgacacagctcccaggcttctagcttgttgctctgacacttcctaaaatgtttccctcaatcttccatgtaacggaaacaacatggactttgaagtcaaagagaagtgacaagaaacaaattatataataaataaatggcaatttatcatataatgcgatttgactgtgctgtgctaattatggcataaaataaaaaatttaaattatcagacattaaagttttcaatattatctgyaaatttacctggaacaaaagactataggcagagaaatacagtaggaaatataagtccttgagaaaatgcaggggtgaaactcatagggaaattaagacatttaaaaaca

SEQ ID NO: 522816 - DNA, 604 bp, Homo sapiens
tgtttggcatttggctggatcagcttcacatttttgcttaagaacttcggcaaatcttttagattcaggtgacagcccttacaacttctcagctagatttttttcttgagggctttgttgttttatcatacagttaaaataagaaatctattgaattttgattaaccttctcccttgtatgtcaagttcactcctaaaaatgaccaaccaaaatcatgattggttcaccaaattttattttggaggatccataatctttacaggcacagcaaatatgctgaagtatggataggtactttcttgaatccttgacctctccattcacaaaggaatgaaaagacacagtctgacagatgattcaaactagacttgagacttgcttggccacagatggagtacaactggggaggsggtcaccaattcaaacatagaaagaagataatcaaaatgagtcctgtgtcaaggattccactgtgtatagaacaagcccctaactgagtaatcatatctagcctctaagtccactaaagatggtaaatcagagctggcagacagatacacggttctggagaatttggaaattttgcatcagttattctgcaaa

SEQ ID NO: 522817 - DNA, 588 bp, Homo sapiens
tttggcatttggctggatcagcttcacatttttgcttaagaacttcggcaaatcttttagattcaggtgacagcccttacaacttctcagctagatttttttcttgagggctttgttgttttatcatacagttaaaataagaaatctattgaattttgattaaccttctcccttgtatgtcaagttcactcctaaaaatgaccaaccaaaatcatgattggttcaccaaattttattttggaggatccataatctttacaggcacagcaaatatgctgaagtatggataggtactttcttgaatccttgacctctccattcacaaaggaatgaaaagacacagtctgacagatgattcaaactagacttgagacttgcttggccacagatggagtacaactggggagggggtcaccaattcaaacatagaaagaagataatcaaaatgagtcctgtgtcaaggattccactgtgtatagaacaagcccctaactgagtaatcatatctagcctctaagtccactaaagatggtaaatcagagctggcagacagatacacrgttctggagaatttggaaattttgcatc

SEQ ID NO: 522818 - DNA, 456 bp, Homo sapiens
ctcagcttttttcctctgccatgcttctgttgggcggctccctccatcaccagcaggatgtgcagtggtcagtgcataggcttctggcttcctttaagacaatcaccctctgtgcgcagcctggttgcagttgatgttctgcctgaygattcccagggctcagatgaggccaaacagatgcttcttccaggacatggacttttgggtcaaggggtgcaggactaagaacaaacaccatggctgattcatcccaacagctccactctgatgagactctccagtgcctcctgacactcaaggtctggctgctgctctgcctcctgtgctttcagacacaggtttggtattattattactattttgcctttcctctcatttcttccataagttctcctttgctcaagtaaattttctaaaagatacaccacctttatgagaacaattcgtaccagaaat

SEQ ID NO: 522819 - DNA, 456 bp, Homo sapiens
ctcagcttttttcctctgccatgcttctgttgggcggctccctccatcaccagcaggatgtgcagtggtcagtgcataggcttctggcttcctttaagacaatcaccctctgtgcgcagcctggttgcagttgatgttctgcctgatgrttcccagggctcagatgaggccaaacagatgcttcttccaggacatggacttttgggtcaaggggtgcaggactaagaacaaacaccatggctgattcatcccaacagctccactctgatgagactctccagtgcctcctgacactcaaggtctggctgctgctctgcctcctgtgctttcagacacaggtttggtattattattactattttgcctttcctctcatttcttccataagttctcctttgctcaagtaaattttctaaaagatacaccacctttatgagaacaattcgtaccagaaat

SEQ ID NO: 522820 - DNA, 456 bp, Homo sapiens
ctcagcttttttcctctgccatgcttctgttgggcggctccctccatcaccagcaggatgtgcagtggtcagtgcataggcttctggcttcctttaagacaatcaccctctgtgcgcagcctggttgcagttgatgttctgcctgatgattcccagggctcagatgaggccaaacagatgcttcttccaggacatggamttttgggtcaaggggtgcaggactaagaacaaacaccatggctgattcatcccaacagctccactctgatgagactctccagtgcctcctgacactcaaggtctggctgctgctctgcctcctgtgctttcagacacaggtttggtattattattactattttgcctttcctctcatttcttccataagttctcctttgctcaagtaaattttctaaaagatacaccacctttatgagaacaattcgtaccagaaat

SEQ ID NO: 522821 - DNA, 456 bp, Homo sapiens
ctcagcttttttcctctgccatgcttctgttgggcggctccctccatcaccagcaggatgtgcagtggtcagtgcataggcttctggcttcctttaagacaatcaccctctgtgcgcagcctggttgcagttgatgttctgcctgatgattcccagggctcagatgaggccaaacagatgcttcttccaggacatggacttttgggtcaaggggtgcaggactaagaacaaacaccatggctgattcatcccaacagctccactctgatgagactctccagtgcctcctgacactcaaggtctggctgctgctctgcctcctgtgctttcagacacaggtttggtattattattactattttgcctttcctctcatttcttccataagttctcctttgctcaagtaaattttctaaaagatayaccacctttatgagaacaattcgtaccagaaat

SEQ ID NO: 522822 - DNA, 570 bp, Homo sapiens
gatattgatgaatagttttatgattcatctgggcagatccatgaagccaattacttcataaggtggcatttcatcacagttgccttcgatcctctgtggctggctcattgattagagcttgccaaggaaagcaagtgtaacagtctgggatccaaaattgctgacagtcattcctggactttggcgtrggtgttctgacaatgtgcttataatttctctaggctggcttaattactctacccttatataaggtttagtaacttgacataaagtggaagaaaatccacagtaacattagacagaatctgcaaatcttagattctgataggactcatctggaactgccttcccatccaccctccctttttattgaagaatttgatcattgaatctggacacgcatctatgcatcatttgctcaatttggaggagtcagttaaattaaaaattcaagctgaaaaaatgtgcattagtaggtagttttgatttttctggcttaaatacaatagaattatatctgggtacaattgcattgatgcactatgctgctaacaagaggaacaatttgca

SEQ ID NO: 522823 - DNA, 570 bp, Homo sapiens
gatattgatgaatagttttatgattcatctgggcagatccatgaagccaattacttcataaggtggcatttcatcacagttgccttcgatcctctgtggctggctcattgattagagcttgccaaggaaagcaagtgtaacagtctgggatccaaaattgctgacagtcattcctggactttggcgtgggtgttctgacaatgtgcttataatttctctaggctggcttaattactctacccttatataaggtttagtaacttgacataaagtggaagaaaatccacagtaacattagacagaatctgcaaatcttagattctgataggactcatctggaactgccttcccatccaccctccctttttattgaagaatttgatcattgaatctggacacgcayctatgcatcatttgctcaatttggaggagtcagttaaattaaaaattcaagctgaaaaaatgtgcattagtaggtagttttgatttttctggcttaaatacaatagaattatatctgggtacaattgcattgatgcactatgctgctaacaagaggaacaatttgca

SEQ ID NO: 522824 - DNA, 682 bp, Homo sapiens
aaagagcgaatgcataggtgcttggttcagtaaatgtccaggctaygcaccgtgcaggcagatggtgcctggccagtaaggggcagttgatatcaggcactgctgctccaaagttgctcacttctcagcttagaaatgtgcatataagaaagttcagggactcactgaggtcatccagctagttagctcaaaaactgaatctagacggcagttcttaccttcttatctccattccacagagaaaattctccctcaaattagcagaattagcatgatcccgtcttcacagaggcagaggcagagtccattttgccccacctaagggttctcactcacccggctgtgagtttgtgactcaagctttcctgagcctgtggaccttgttccttttaaataattgaaatctcatagcaagagatgcatatttcttcctcatctcttcaggggccacaaagttaaatcccaagagagcaggaaggtggggaggcagagaatgtaaaggaacgcttagagttagcagtcttcacagcacaaccccatcacaccacggggtcggggctggtatctcccttacaaaaaagaaagctcgggcacagagacattaagtgactgacccaggtcttctaaccctttagtggagaaactggggtttgtcccagactgagagcatagcccaaagcct

SEQ ID NO: 522825 - DNA, 630 bp, Homo sapiens
tcctaactattgctaagagacttaacataggaaaatctgaaaaacacacttaggatatcgggggctaaatgctacaaaatactgcaattgaaaaagtcatatcatgtgtattccctgttgtgtcagtgtttctaaacctacatttctttctaccaggcactgtattttaacttagaaaacagatctgataattgaaacagtaccacttagagaccagaagatccaattatttactaaagggtgtgtggtctggaaaatccgtagattcctttgcctgttatgtcattcagtgaaatggtcagtaatagctctttaatgtcaactcataagaggtkctttgtgctgatgaccacactaaatggagcaaaaccaaaagatttctctttataatcataatcaaactccaatctcatcttttttgtgaagattttccctcaattatccttgatctaccttttcatccagatctgctgttgatatgtgctatgcaattttggtactctgctatgcaattatgttccccaattcacaaatggcttgcaatatcttcatctctgccagctctcagtgagcaataactgcctttcatttttctcacgtccttcaagataccaagtttaaggcttagaa

SEQ ID NO: 522826 - DNA, 626 bp, Homo sapiens
catattaaattagagtcatagaattagtggtggaggagaaatatttgaaggaataatggctgataatttttcagaaataaagaatagctccaacccacagatgaagaatcccattagtcaaatgaattccaacaggataaataaaaaagaaaacctcatctaaatatatcagagtaaaattatgaaaaaaaaagcagtgaaaatatttcgatcctagttaagagacaattgtgtgcatacacttggtgaattgtaagatatctaaattatacctcaatgaaacttattttaaaaatctagctagaaataaaagaaactatataaatgaatgccagttagattggagccaacttaaaaaatagcaaaattaaaagtcagaagagagtgtaacaaaatccccaatatkctgagaaaaaaacaaatattagcagaaagttacaaaaacttcacaaataattcaaggatgaagatgaaaaaaataaatttttaggcaagcaaaatctaagacaacttcccactaacagaatctccttcacattcaaaagtcgtaagatgtaattcaagaagaaagacaatgatcccagatgtaaatatgtaaggaaaaataatgattaaaatgcaagcaa

SEQ ID NO: 522827 - DNA, 626 bp, Homo sapiens
catattaaattagagtcatagaattagtggtggaggagaaatatttgaaggaataatggctgataatttttcagaaataaagaatagctccaacccacagatgaagaatcccattagtcaaatgaattccaacaggataaataaaaaagaaaacctcatctaaatatatcagagtaaaattatgaaaaaaaaagcagtgaaaatatttcgatcctagttaagagacaattgtgtgcatacacttggtgaattgtaagatatctaaattatacctcaatgaaacttattttaaaaatctagctagaaataaaagaaactatataaatgaatgccagttagattggagccaacttaaaaaatagcaaaattaaaagtcagaagagagtgtaacaaaatccccaatatgctgagaaaaaaacaaatatkagcagaaagttacaaaaacttcacaaataattcaaggatgaagatgaaaaaaataaatttttaggcaagcaaaatctaagacaacttcccactaacagaatctccttcacattcaaaagtcgtaagatgtaattcaagaagaaagacaatgatcccagatgtaaatatgtaaggaaaaataatgattaaaatgcaagcaa

SEQ ID NO: 522828 - DNA, 602 bp, Homo sapiens
tgctctgactttgtttcaagacagtaagatgaagaagaaaaaaaataacgtccctcatagctcatgagcaaagcaactcctaaacatgttagggtcagtttctatatagagagtaggctcctaatccacaccatagaagttagcttctcgaggactaaatatttcctttgctttaccccaatcacagggcagaatatcttttatactgaatttctaaacaaaagtttattcaattaatgtattagtctgttctcacactcctgtaaagaactacctgagactgggtaagttaggaaggaaagtggtttaatcggctcagttccacaggctcaacaggacgcatgactgggaggcctcaggaaagttaacaatcatgttggaaggtgaaagagaagcaagcacgtcttaccatggcagagccrgagagagagagtgagggcgcatgtgccacacactttcaaacaaccagatctcatgagaactcactaacactagatcagcaaggggggatgtccactcccatgattcaatcacctcccaccaggctcctccaccaacacgtggggattgtaattcaagatgagatttgggtggggacacag

SEQ ID NO: 522829 - DNA, 602 bp, Homo sapiens
tgctctgactttgtttcaagacagtaagatgaagaagaaaaaaaataacgtccctcatagctcatgagcaaagcaactcctaaacatgttagggtcagtttctatatagagagtaggctcctaatccacaccatagaagttagcttctcgaggactaaatatttcctttgctttaccccaatcacagggcagaatatcttttatactgaatttctaaacaaaagtttattcaattaatgtattagtctgttctcacactcctgtaaagaactacctgagactgggtaagttaggaaggaaagtggtttaatcggctcagttccacaggctcaacaggacgcatgactgggaggcctcaggaaagttaacaatcatgttggaaggtgaaagagaagcaagcacgtcttaccatggcagagccagagagagagagtgagggcgcatgtgccacacactttcaaacaaccagatctcrtgagaactcactaacactagatcagcaaggggggatgtccactcccatgattcaatcacctcccaccaggctcctccaccaacacgtggggattgtaattcaagatgagatttgggtggggacacag

SEQ ID NO: 522830 - DNA, 535 bp, Homo sapiens
tgcagaggtcttggcggttctctggtccaaatttccatctataaaatttatgccaagccattgtgtccttaaacttgaattaatttgaatgtctctagcagtgtgtgtgtctgtgtggtgtgtgcggtacctgagacctcccaaagaagacaactctattttgatacctacaaatgtcacaatagaggacttttttggatacatcttttacgttgtatccaaatttgcctttttgtggccactgcccatttctcttggatccctctttggggacctaaagaacaagtccagggccacatgtcagtagatgtgaagacaagacttaggaccccttgagccttcctctctgggtctctctcctgatggtctcaaggtgtggcttyaatacctctctccctggcagcttcctcccttcgtgtgttcagttgcacctgcccacctcctgttgagagatggacagccccacttgagtcccagcctgtaggggaatggaaacaaccctctccaccaccaggacccataagtgaaggcattt

SEQ ID NO: 522831 - DNA, 626 bp, Homo sapiens
ccacataaacacatgctcattaccaagctgaaagctgatttacatagcatcacctctgaagcatacaaagataagaaaattcaagtgctccgaacctcagttttcttaacaataatacggaagtaaaatacagacctcgcaggatttgctggggggagattccatgagatratgtatgtaaaagactctttgcaatgaaaaccacaatagcaagctcttgatcacttttagctcacacgctgggaatcagcatagtattatgggcaggaacatggactggagtctgtggatgtgggttcaaatcccagctccacccaactgcaatgatctgaggcaacactacctatgtagcctttcttagcctgagtctcctaaactgtacaatgaggattttaatgcgtacctcatagctctaatgattaaatgatgtaatatggtgaaataccacagtacaggtagtaaattctcaatacagcataactagcatcatgttactcttgtcaaatattttgtctaatatttcaagggaaggtcagaagatggagttcacaatctacataatccacagatgctcaggtgttacaagtagtgggagggagacggcacaatatgggacaggctaagag

SEQ ID NO: 522832 - DNA, 626 bp, Homo sapiens
ccacataaacacatgctcattaccaagctgaaagctgatttacatagcatcacctctgaagcatacaaagataagaaaattcaagtgctccgaacctcagttttcttaacaataatacggaagtaaaatacagacctcgcaggatttgctggggggagattccatgagatgatgtatgtaaaagactctttgcaatgaaaaccacaatagcaagctcttgatcacttttagctcacacgctgggaatcagcatagtattatgggcaggaacatggactggagtctgtggatgtgggttcaaatcccagctccacccaactgcaatgatctgaggcaacactacctatgtagcctttcttagcctgagtctcctaaactgtacaatgaggattttaatgcgtacctcatagctctaatgattaaatgatgtaatatggtgaaataccacagtacaggtagtaaattctcaatacagcataactagcatcatgttactcttgtcaaatattttgtctaatatttcaagggaaggtcagaagatggagttcacaatctacataatccacagatgctcagrtgttacaagtagtgggagggagacggcacaatatgggacaggctaagag

SEQ ID NO: 522833 - DNA, 542 bp, Homo sapiens
ggccattttaaatattttttagcctactctagttggtatcagttagttttatacagatgttatccttcactttatattataaacctagaaaataatgttaaaaatggcacaatatcaccatatacatccaaagaccaaaggactctgttaaacaaaaagggaaacttcatggtgaggtttgtatataaagctaaactcaataaacactagattttttttttttttttttttttttgagatagggtctcactatgycacccaggctggagtggagtggtgtgatccagcaatctccgcctcctgggctcaagcaatcctcccaccgcagtttcccaagtagctgggatcacaggcatgtgcccccatgcctggttaatttttgtgtttgtttagagatggggtttcaccatgttgctcaggcttgtctcaaactcctggactcaagtgatcctccttcctcggcctcccaaagtgctgggaatacaggcatgagccattgtgcccagcctagacactggatttttaaaatcagtggctttttc

SEQ ID NO: 522834 - DNA, 665 bp, Homo sapiens
aaccaccatacaattcaaaaacattggcaggctctgttgagggagtgacgcagcagggggcctccaagccagagatgaggtggcacgggcagagctgagcaaggacacttctgccacatgatgcttggcacacgctgttgttccttgtcttgctttcaggtgccatatttgcaaaaacaaatggaattggaggccacgctgtatcccaactggccagctaagacctgctcatgaatcactgactagctccattacttagctaatgtgtcagagctggctccgctctaactgacctcccttgcctctaaaaagtgacacattgaattttattactgactctgtgtttcaaaacattttggggactgaaaaacccaccaggcaaatctcaggccttagaaagcagttaaactgaattgcaaataaaaggcttagaaagtccttaaaatcataaacttggcatctccaataggacaaatgaactttgtcttctcatctgagttaacagatttggragaatcaaaatcttttctgttgtatagactacatgctaccatttccacaggcaagctgcccctaaatttggaaaacttttccttctgaaaccacccaatctctttagcttgatttgggcaaccgaatctcttaggcttttgcctctttgtgtc

SEQ ID NO: 522835 - DNA, 613 bp, Homo sapiens
cagagtggattctctcatctcccttcccagaggcatcctctggccaaataagggggcattctcggccatcaagctgagcaggccagtgaggggtgggcactgaggggcacacaccagcttgtgtcccactcagaggggcggttctgaggcatgctccctacagtctcccagagtggccccaggagggctaagcctcagttgcycatgatggcaatgctcattattgcaccctcgtggcttccttctctttcctgcctcatttcgtactcccaagctgtgctcccctgcatcacttcctaaactaaatcccttcatctaagaacttatcccagggtctgctttggggaagaacaaaagacaaagcacttatgatatactcaagactaacagaagcataagcttctgaggatttaaatgcaaatagaaacaatgcaatagaaatagactaaaaggcctgtgctctccttaacccacccagcctatttcagactgatgggcttggggtcattttctgccagagtgcttattgctctttaaattcttggttttccggacgtggaatattaacaccatctaataagttgaactacttgttctttattagagaactaga

SEQ ID NO: 522836 - DNA, 613 bp, Homo sapiens
cagagtggattctctcatctcccttcccagaggcatcctctggccaaataagggggcattctcggccatcaagctgagcaggccagtgaggggtgggcactgaggggcacacaccagcttgtgtcccactcagaggggcggttctgaggcatgctccctacagtctcccagagtggccccaggagggctaagcctcagttgcccatgatggcaatgctcattattgcaccctcgtggcttccttctctttcctgcctcatttcgtactcccaagctgtgctcccctgcatcacttcctaaactaaatcccttcatctaagamcttatcccagggtctgctttggggaagaacaaaagacaaagcacttatgatatactcaagactaacagaagcataagcttctgaggatttaaatgcaaatagaaacaatgcaatagaaatagactaaaaggcctgtgctctccttaacccacccagcctatttcagactgatgggcttggggtcattttctgccagagtgcttattgctctttaaattcttggttttccggacgtggaatattaacaccatctaataagttgaactacttgttctttattagagaactaga

SEQ ID NO: 522837 - DNA, 613 bp, Homo sapiens
cagagtggattctctcatctcccttcccagaggcatcctctggccaaataagggggcattctcggccatcaagctgagcaggccagtgaggggtgggcactgaggggcacacaccagcttgtgtcccactcagaggggcggttctgaggcatgctccctacagtctcccagagtggccccaggagggctaagcctcagttgcccatgatggcaatgctcattattgcaccctcgtggcttccttctctttcctgcctcatttcgtactcccaagctgtgctcccctgcatcacttcctaaactaaatcccttcatctaagaacttatcccagggtctgctttggggaagaacaaaagacaaagcacttatgatatactcaagactaacagaagcataagcttctgaggatttaaatgcaaatagaaacaatgcaatagaaatagactaaaaggcctgtgctctccttaacccacccagcctatttcagactgatgggcttggggtcaktttctgccagagtgcttattgctctttaaattcttggttttccggacgtggaatattaacaccatctaataagttgaactacttgttctttattagagaactaga

SEQ ID NO: 522838 - DNA, 595 bp, Homo sapiens
gcttccggcagaatccaaacaaagacatgagaattamatttttggtttcattcttgttttattttcttaacatacatgcttatatgtaaaccaattttgaattttatgtatcaacaatttaagttctactgctttaagattatatggacattaaatgtacagaaaaatagaaaccaacaaaagataaataaattaaatacatttttaaaaaagtctcgcgagttgtggtggcttaatattgccgtgagctaatgccttgagggctactctctctggagtgggaatggagctctcagtaattcgacagttttggccagtggcttgtcacacgggttgtgcattcacctggctttaggaggaagaggaggcatggcagccctgccttcatcttcctctttactttgccctcactatcactgttaacttcgattcatggatgcttttcagggatttttttttctaagccacctagccaattcgaggggtttagtgtacttaaaaccagatagtataatccataaacccactaaattgggcacatgtgagctgcaatatgtcacaagatgcagaaaaccagccctgagtgagggcactg

SEQ ID NO: 522839 - DNA, 595 bp, Homo sapiens
gcttccggcagaatccaaacaaagacatgagaattaaatttttggtttcattcttgttttattttcttaacatacatgcttatatgtaaaccaattttgaattttatgtatcaacaatttaagttctactgctttaagattatatggacattaaatgtacagaaaaatagaaacyaacaaaagataaataaattaaatacatttttaaaaaagtctcgcgagttgtggtggcttaatattgccgtgagctaatgccttgagggctactctctctggagtgggaatggagctctcagtaattcgacagttttggccagtggcttgtcacacgggttgtgcattcacctggctttaggaggaagaggaggcatggcagccctgccttcatcttcctctttactttgccctcactatcactgttaacttcgattcatggatgcttttcagggatttttttttctaagccacctagccaattcgaggggtttagtgtacttaaaaccagatagtataatccataaacccactaaattgggcacatgtgagctgcaatatgtcacaagatgcagaaaaccagccctgagtgagggcactg

SEQ ID NO: 522840 - DNA, 595 bp, Homo sapiens
gcttccggcagaatccaaacaaagacatgagaattaaatttttggtttcattcttgttttattttcttaacatacatgcttatatgtaaaccaattttgaattttatgtatcaacaatttaagttctactgctttaagattatatggacattaaatgtacagaaaaatagaaaccaacaaaagataaataaattaaatacatttttaaaaaagtctcgcgagttgtggtggcttaatattgccgtgagctaatgccttgagggctactctctctggagtgggaatggagctctcagtaattmgacagttttggccagtggcttgtcacacgggttgtgcattcacctggctttaggaggaagaggaggcatggcagccctgccttcatcttcctctttactttgccctcactatcactgttaacttcgattcatggatgcttttcagggatttttttttctaagccacctagccaattcgaggggtttagtgtacttaaaaccagatagtataatccataaacccactaaattgggcacatgtgagctgcaatatgtcacaagatgcagaaaaccagccctgagtgagggcactg

SEQ ID NO: 522841 - DNA, 595 bp, Homo sapiens
gcttccggcagaatccaaacaaagacatgagaattaaatttttggtttcattcttgttttattttcttaacatacatgcttatatgtaaaccaattttgaattttatgtatcaacaatttaagttctactgctttaagattatatggacattaaatgtacagaaaaatagaaaccaacaaaagataaataaattaaatacatttttaaaaaagtctcgcgagttgtggtggcttaatattgccgtgagctaatgccttgagggctactctctctggagtgggaatggagctctcagtaattcgacagttttggccagtggcttgtcacacggrttgtgcattcacctggctttaggaggaagaggaggcatggcagccctgccttcatcttcctctttactttgccctcactatcactgttaacttcgattcatggatgcttttcagggatttttttttctaagccacctagccaattcgaggggtttagtgtacttaaaaccagatagtataatccataaacccactaaattgggcacatgtgagctgcaatatgtcacaagatgcagaaaaccagccctgagtgagggcactg

SEQ ID NO: 522842 - DNA, 668 bp, Homo sapiens
gatgacttctctccatttgaataaactgtgctaacttaatacagtggctctctggagcactacaggtctagccaaccctgcagcacatttaaggtctcagtttacatcacttcctccagtatctcattggccaaaccaagtcatgtggccaatctcatcatccatggaagggggatcatatttgtgccattaagtttcatgatagagagaaagagggattgaaaaccataactgcacccaccaaaaaagctattgtcttctttaagcctcacaacagcatcctgagaaaggtgatattggaaagacattatcttacccagttaaggataattatccctgtagaaaacatgaggctcagggaaattctgtggttgccaatamggttggcattggggccagcccttgaattcaagtttttcccactttacccagatgttatggtgagttacatgttatggggcaacagtaggtaaagcttttgcatctccataacacaacaattgtgactcacatttactaccctgacctatactagcacatgagttatctcatttactccccttgcagacgcatacagttggcctttttgttacttacaggcttattttacaggtgtggaactgaggcctcctgctctcaggcagccataaacttgcatgaaagccatg

SEQ ID NO: 522843 - DNA, 648 bp, Homo sapiens
tagttactattattgttaatagtataaccagccagggatcaaaattgcagtatcaaaattagcagatgcttaagtcccttatgtaaaatgctgtagtatttgcatataacctaggtacatcctccagtatactttaaatcatctcaagattacttatacaatgtaaagtyagctagtacaatgtaaatgctatgtaaatagctgctatactgcattattgcatggttttaaaatttgtattatttttaaataatacaaattttggttttttcctgaatatttttgttgtttttttcctgaatatttttggtctctggttggttgaacctgcggatgcacaacccatggacatggaatgcagattgtacaggattcagctcccattgagagacagaacgtatttcccaaagtggtggaactacagattcaatttctaagtgtatgacttcaagctcctggcattctcctggtttttcctctctctcctgttctctctccccctctcctattcccttttcctcccctctgatatttcttttctccttggaagagttaaatctattatctcaaagagttcttagtattctgcaactactgagctcttccagcgaatctgctatagggagtgcagttgatgaacagccccag

SEQ ID NO: 522844 - DNA, 538 bp, Homo sapiens
tcaatgaaggtcactgctagactgggcactttttcaggcagcacagattagcctgctggaatccagtaggcacagacagattccaagccaccacactataaatcgacacgaaaacaaacaatcagaaatgctttaatcacctcacaaataatgaagcaggcacaaatttacaagcctgagtttcaagaaaatgaagcaaggtgatgataaagatattttattggggctctgctattagctgtttttattttattgtagatatttaaaatakttacattttcaattttagaggtctgcatttttccagttccaattcaattagctacacggagatattcatattgccttgactgttttcacaatgcttattttattaatgatctcaaaaaacatgtagtgcatctttaaaagtctcctccttagagtcttgtcaaatgtgagattagccaaagagcctcatcttgagaattgaaagtaagtttccagacctcaggtgcgacattctgactgccttgaagatacaatggggtggtgaaca

SEQ ID NO: 522845 - DNA, 650 bp, Homo sapiens
cacaatgtttctgtttcaatattgaaaacaaaattgtgtgctactgaacatgagtgaaggccatttacaatttatcacccctgatagtcacttaaatttgaaastaaccctgtgagatatgaggctcatgccattctgagtacattttgatatccaaatatatatctcctaatatctagggttcaagactgtccgatttcaaatgctcccatgtttaaatggagtgaagaagggtaatcattgttttcttacaggcaaagaataattaagctgatttttctaagggctctaagccacagagcaatacacaatgccacctaagttgaaaatcacttaactaaagtaacatcagatacagatttattatactcacaatcattctgaatatactagtagtttttataacaaacttcatctatttgtaatccatgacacataaattaactgtcaacacaaggtccttcttcttggtacagttaattctaggtcttcgtttttgtcaacctggccttgcctcactttgtgctggatgagctgctttccctgcaacttttcattccgccctctcactcaaaccacacttgacccttgaacaacacaggtttgaacagcacatgtccacttacatgtcagttttttccaataaatac

SEQ ID NO: 522846 - DNA, 494 bp, Homo sapiens
ctggctactgctctgattaaataaagggaagtgatgagaaataacagggaagttagactgtgagcagaatattaaaggtccagatgacacactctcgagggcaccttcctgggcaagcttctcttctgcctcccctgcccatgagtcctmtatcacagcacggggcaggacattcaggaactggtggttcactcgcccataattcacctggtcaacatgccaggcactatcctaggcactgtggtctcagcaaaagaaatcaagtctcttccctcataaacctctataccagtgtggggttgagctaactaatacataatgcgtatgccgtgagataagtactatgaaaaagcataaagctggggaagaggaaggactgagaagaggacattcaggacagagctgcatgaaggaagggagtggccatgaagatgcatctggtgccaacatgagggatgagccaggccacaggccaggaggggatgtgtgcagga

SEQ ID NO: 522847 - DNA, 627 bp, Homo sapiens
tcatggtctgtgataaaaggagggtatggaagttccttatctggaaacagttcacacatacacacattcagtcaagaattattcccttaaacacctacttagaagttggaatacagtactgaaaaaaccagactcttccacttaccactaaatacagagaccaagagtagacagttgtacaaacagatataatcaccaactacttaaagtgctaacaagaaaagatagaggatgctatgaataagtagcccaggaggtaaaatttggactgagtttggtaaatcctctttgaggaagtgacatttacatggagattttggagacaatgtaggatttggtcatgtgaagagccggtggacaaatggacaagtgttctagaaggagagaatagcatatgcaaagatccagaagcaaaaatgaatgtgtacaactggaaaccttgactgaattagcaacatgttctaatcaaatgagttaacaaattacagagcyggtgacacgtaatcaagttaatatgttactgccaaggaaaatcatgctaccatgtaggactaggaggaaacctactttctcccaccattgcctgtaactgccattcatcatttcaccagaacagtctcatttgct

SEQ ID NO: 522848 - DNA, 563 bp, Homo sapiens
ctgcaagaagagcaaagaaaccactgtgtttcatcagcagcatataactgcgtgtcccaaagccctgacccatagagcttactccccagtggatgctctagaaacatcctcatcttttgcccacagggcctatccacaacctggctctgcctcacatggccatggaactagagcaagtcctcccagatccatttttttagttaccaaagcagctttcctggtcatggagggaagaatagagacgaaactatcatcatagtccaggaatgggtgccctaggatgcttgggctccttttctaaagcagcttttgaacaattcttatctcaggaaactaaacccatggtacagtctgggtgaggcagaagacgcaagtgggaggakggacactgcaccgtgcaggcacccatggccatggctgctgcttcaagagaaaagtgtccagtctcttgggccacctaataaaggtttgggacaaattttgcccttgctgggtaagctcccagagggcagaggccatgcagatgaactcccaggcttgggcgtccctggcccagcaaccag

SEQ ID NO: 522849 - DNA, 545 bp, Homo sapiens
tcgggtcacctacacagcagggatttgaccacactgcctggttcyacattcattcatatcattgcttattaataagctctctttggctgggcatggtggctcatgcctgtaatcccagcactttgggaagcagaagcaggtggatcacctgaggtcaggagttcgagaccagcttggccaacatggtgagccccatctctactaaaaatacaaaaattagccaggcgtgatggtaggcacctgtaatcccagctactcaggaggctgaggcaggagaatcgcttgaacttgggaggcggaggttgcagtgagtcgagatcacaccactgcactccagcctcagcaatagagggagatttcatctcaaaaaaaaaaaaaaaaaaaaaaaaaaagagagaaagaaaatgaaaaaacctctcgttccattcatgcaacaaataccagacgctccctatgtgtagatgccctcaggtccagcacaaaacagagacatcaccatgacttgatgtagaaagtaagaagacaaaaaaaaaaaaaaaggaggt

SEQ ID NO: 522850 - DNA, 595 bp, Homo sapiens
ctgcaaagtagcaacagcttaaaaaaacaataatcatttctagtgtttgctatgtatcaggaacctatccaaatattttatatgaattatttcattaaccattacaactatataagatgggtaatattatttccattttatgygtaataaaactgattcacagagaagtaacttgtccaagattactcagtcattacgtagcagagcagtaattcacaaccagatctaatggttctatagtgtatgcttttaactttattgtatatcaactgaggacatattacagactatattttctattaggtactttttacataccattctcatttgatcccctcaacaatcctgaaaactagttgttcttatccttgttttgcactgagaataatgatgctcagaggggttaaataacttgcccagtggcattttgcaatgtggtagagcaagcactcaaacccatgtttacaaatgtgctctcattttgaatttttttgtatttttttgtcagaacaaatatctgctatttgctgttcaacacggttttaactggacactgaacaaatatttactgaggacatattaacgggcagatact

SEQ ID NO: 522851 - DNA, 595 bp, Homo sapiens
ctgcaaagtagcaacagcttaaaaaaacaataatcatttctagtgtttgctatgtatcaggaacctatccaaatattttatatgaattatttcattaaccattacaactatataagatgggtaatattatttccattttatgcgtaataaaactgattcacagagaagtaacttgtccaagattaytcagtcattacgtagcagagcagtaattcacaaccagatctaatggttctatagtgtatgcttttaactttattgtatatcaactgaggacatattacagactatattttctattaggtactttttacataccattctcatttgatcccctcaacaatcctgaaaactagttgttcttatccttgttttgcactgagaataatgatgctcagaggggttaaataacttgcccagtggcattttgcaatgtggtagagcaagcactcaaacccatgtttacaaatgtgctctcattttgaatttttttgtatttttttgtcagaacaaatatctgctatttgctgttcaacacggttttaactggacactgaacaaatatttactgaggacatattaacgggcagatact

SEQ ID NO: 522852 - DNA, 595 bp, Homo sapiens
ctgcaaagtagcaacagcttaaaaaaacaataatcatttctagtgtttgctatgtatcaggaacctatccaaatattttatatgaattatttcattaaccattacaactatataagatgggtaatattatttccattttatgcgtaataaaactgattcacagagaagtaacttgtccaagattactcagtcattamgtagcagagcagtaattcacaaccagatctaatggttctatagtgtatgcttttaactttattgtatatcaactgaggacatattacagactatattttctattaggtactttttacataccattctcatttgatcccctcaacaatcctgaaaactagttgttcttatccttgttttgcactgagaataatgatgctcagaggggttaaataacttgcccagtggcattttgcaatgtggtagagcaagcactcaaacccatgtttacaaatgtgctctcattttgaatttttttgtatttttttgtcagaacaaatatctgctatttgctgttcaacacggttttaactggacactgaacaaatatttactgaggacatattaacgggcagatact

SEQ ID NO: 522853 - DNA, 501 bp, Homo sapiens
cttagcttgattaaaattttggagccttgtatggctaggtaaatttaatatgtgtcatttaaaaatatactatcatcaaacattttgttacccttgcaattaagagagccagaatagtcttctacttccacagaaataatgagcccaatctggtgaaggagcgaagtaaataaaatatgttcccacttggctataaaatagtcacccatgagaggaaattttcaggatccttttgtatcaaccctttggctttcctgaaagagttaggtctttagcaaatcaagtgatttctaggatgttgtcaggccaaatagtccacttggaggagcagattagcattatttacagagatggtaataatataagcactaatgagrgcaataataattgacaaatacgtaataaacattgatctcaagtctcaacaaatacttagcaagtattgactatgtgaagctgagctgcataagagtaaaaagaactttacaggaaaagagacag

SEQ ID NO: 522854 - DNA, 602 bp, Homo sapiens
gggtgacagaatgacttagtcacttgccactcatcatccagcagggtagcctgggcttgttcacgtgatggcagaagagcttccagcaacaagaggctaagcctcaatgcacaagtgtttttcaagcctctgtttgcatctcatttgctaatgtcctgttggacaaagcaagttacttagccaagcctagattcaaaacaccaaaaaaatttgactctatttctggatggaagaagctgcaatatattgtgggcttcctcccaaactaactcattgtgtggtgagggtggtggtaaagcaatggtggagatgttcaagagaagtgccacagacaagccacctaatgttgacaatataaatgaactgaatctaccctataattatcttagacttcccacttggcgttagcaataagtgcataaccaccaaagacggtggtatataaagttataaatagagatatcatggaatggtagaatgcatttaagtgaccagttaagcccatccagcttaccagtttgcagttcwtgagaagattatccgccctttacatatttctggtatgagcattatcccaggttttatctcagaagcttggcagc

SEQ ID NO: 522855 - DNA, 511 bp, Homo sapiens
tgggatggctggagcagagagtaagatcaggagtgcagacttatagctgcgctaactttacacaggcaaytggggagtccccaagggatgttagaaggatagagtcaatgagtgatggcttttggagagatcaccctgtctgctatgtgagaggtagtgacaggacttctggagctcaacaggagttacggagacatcctggcaatccaaaaagcaaagatgatggcttccacgttatggtggaagaggctgggaaacaacacaaaggagccagtttctagagaggattaaggagggggctcgagcaggacttggtaaccggttggctgttgggaggaggagcattaacctgtgacccacaggcaggcactgagacagcctctttggactggaatgttaaggaatgtcgccttaaggcgctagcactcaagctttctgctcgtgcatccccttgcacactttctccttgacgttcaggctgggcatggtggctgacgcctgtaaacccagc

SEQ ID NO: 522856 - DNA, 466 bp, Homo sapiens
agaacatgaacttattctcacttttagagagctggccctcagcaataagagtaataaaagtaggggctgggcacggtggctcacacctgtaagcccagcactttgggaggctgaggtgggcggatcatgaggtcaggaatttgagaccagcctggccagtatggtgaaaccccatctctactcaaaatacaaaaattagccgggcataatcccagctactcgggaggctgaggcaggagaattgcttgaacccaggaggcggaaggtacagtgagctgagatcacgccattgcactccagctctgggcgacagagcaagactccctcyccgggggggaaataaaagagtaataagagtaggagcgaatgagcatgaacagaagaggacgtgcaatgcctggaaatatcctgcaccccagcaataggtgacatgcatctttgcatgtctgcaatccagcacgtcagg

SEQ ID NO: 522857 - DNA, 498 bp, Homo sapiens
ttgaggacaaagtcaactggcatctgggaaagcctgggtttgagagaaaagaagccgcaactgccatattgcttcccgtatagtaaccaccaagcacttgcaatgaactagatgacgacttggtaaatctggaagctaaatttcttttggcggcagactgaaaggcttggcagcttctagctgtgtaaattaaaacaataagctgttttcttaaaaataacatttctaaatatgcatacccttgaattaacatccagctcatgagaccgtcaacagaagacagggaccctggctgcatgccccgtgagcgcccctgctgcagcgagagccactgctgacctttccagagtgtcctagggagagcagcagcacccagcaaggctctctctccagggycttgacgcatgtgggttggacatggccagttactgccactgtagccaggcaccgaggactgatggccaaaaaaaaaaaaagaaaagaaaaaaagttggttgc

SEQ ID NO: 522858 - DNA, 512 bp, Homo sapiens
aacaaaagaataaaaaaaaagaaaaacagtcgatttaaacaaaaaaataataatagaagtagcatgaggatatggcaaaaatcactgaagttgtacaggaatgagtaaccctcagaaaatactggggcaggcatgcagaagccagtggagctcatggagagaagcragtgtgtgtgttaggggaggctgatccccttgcctcctctttcttccactctagggcagaaatgcgagctgtggctctgtggctgtgccttcaccctcgctgatgtcctcctgggagccaccctgcaccgcctcaagttcctgggactgtccaagaaatactgggaagatggcagccggcccaacctgcagtccttctttgagagggtccagagacgctttgccttccggaaagtcctgggtgacatccacaccaccctgctgtcggccgtcatccccaatgctttccggctggtcaagaggaaacccccatccttcttcggggcgtccttcctcatgggctccct

SEQ ID NO: 522859 - DNA, 453 bp, Homo sapiens
ttattcttcaaggggcatagctttctttctttctttctttcttttttttttttgagacgaactctcgctctgctgccgggmtagagtgcggtggcgagatctcggctcactgcaccctccgcctcccaggttcaagcaattctcctgcctcagcctcccaagtagctgggactacaggtgcgtaccactacgcaaggctaatttttgtatttttagtagagatggagtttcaccatgttggccaacatgatctcgatctcttgacctcgtgatccgcccgccttggcctcccaaagcgccaggattacaggcatgagccatgccgctgcactcggcctaaggggcatagctttctcatcctctgccatcctaggaaaattttaagtattcatattaaaatgaaaactaaacacaattgtccatatatgctccttaggagtagaatgccaagga

SEQ ID NO: 522860 - DNA, 621 bp, Homo sapiens
cagtcaaggcattatccaccttgggcagcattcctgaggcttgggggaccaggcttctgttgtcctttgctcctatctgtaagtaataaatctgcttcatgtaacttgtgaatatgagtgttctgtcccaccggactcagacaagttggtagccagtgcatggtgagcctgtttcaccactttattagtctgttttcatactgctgataaagacayagccaagactgggcaatttacaaaggaaagagatttaattggactaacagttccacgtggctggagaaacctcataatcatggtggaaggcaaggaggagcaagtcatgtcttacatggatggcagcaggcaaagagagagcttgtgcagggagactccagcttttcaaagccatcaaatcttgtaagacttactatcacaagaacagcatgggaaggaactgcctccatgattcaattagctcccactgggtccctcccacaacacgtgggaattcaaaatgagattatggtggggacacagccaaaccatgtctccacttaaagttaggtctctgctcactggacccaaagtttttctgactatacagagcaagtaagacttaaactgctcaaatgtttgatt

SEQ ID NO: 522861 - DNA, 621 bp, Homo sapiens
cagtcaaggcattatccaccttgggcagcattcctgaggcttgggggaccaggcttctgttgtcctttgctcctatctgtaagtaataaatctgcttcatgtaacttgtgaatatgagtgttctgtcccaccggactcagacaagttggtagccagtgcatggtgagcctgtttcaccactttattagtctgttttcatactgctgataaagacatagccaagactgggcaatttacaaaggaaagagatttaattggactaacagttccacgtggctggagaaacctcataatcatggtggaaggcaaggaggagcaagtcatgtcttacatggatggcagcaggcaaagagagagcttgtgcagggagactccagyttttcaaagccatcaaatcttgtaagacttactatcacaagaacagcatgggaaggaactgcctccatgattcaattagctcccactgggtccctcccacaacacgtgggaattcaaaatgagattatggtggggacacagccaaaccatgtctccacttaaagttaggtctctgctcactggacccaaagtttttctgactatacagagcaagtaagacttaaactgctcaaatgtttgatt

SEQ ID NO: 522862 - DNA, 562 bp, Homo sapiens
ctgcccagccttctatgagttgccatcaggtgcttcagaaatgaagacgacggtggctatcagagttcagtagtctgatggacaacactgccaggactgtggtagtaggtgtccccaaagtttagactgttaagaaaggtctctccatcattacaggattcctgctggggaggacagtaagggcttctaaagggcatattttctttagctcattggttcctcactgccaaagtcacagactcaattgcctagatcacatcagcttatctccaaagacctgtttggttcctttctagcaacctacattacctaaaggccttagttttctcatctctgaaatggagctgataataatagcttccattcattgactactaactatgcactctgaaatttacataaattatttctaaccctgagaagtgcagtttttatgtttcatggatgagaaaactgaggctcagagagttcaagtactgaaggtaaaggcagtagattagactattygtcttccccaattggattgtacattcctggcctttgacatgaaactttgcaggac

SEQ ID NO: 522863 - DNA, 575 bp, Homo sapiens
attatattgatgatactaagtcatttcagggttgttgggggatatttaggaactatagtgcccaggcttctgagagagacatccttaggcaaaaatataatattacgtagcccccataggtgcctgacattttaaaacttatattttccaacccgtgacttcattaaggcaattaaagatggccaggcacggtggctcacgcctgtaatcgcagcactttgggaggcygaggcgggcagatcacctgaggtcgggagtttgagatcagcccgaccaaaatggagaaaccctgtctgtactaaaaatacaaaattactcgggcgtagtggtgcatgcctataatcccagctactcaggaggctgaggcaggagaactgcttgaacccaggaggcagaggttgtggtgagccaagatcgcgccgttgcactctagcctgggcaacaagagcaaaactccgtctcaaaaaaataaataaataaaataaaaaagacaattaaagactagtgtggcagaaagtattatcctcacttcgtagttgagtaaccagctcagaaaaacgaagtgatttgcccaa

SEQ ID NO: 522864 - DNA, 638 bp, Homo sapiens
aataaaaaaatgaggaacaaatgcttgttattaatgttattcatggttgctttattattatattgatgatactaagtcatttcagggttgttgggggatatttaggaactatagtgcccaggcttctgagagagacatccttaggcaaaaatataatattacgtagcccccataggtgcctgacattttaaaacttatattttccaacccgtgacttcattaaggcaattaaagatggccaggcacggtggctcacgcctgtaatcgcagcactttgggaggccgaggcgggcagatcacctgaggtcgggagtttgagatcagcccgaccaaaatggagaaaccctgtctgtactaaaaatacaaaattactcgggcgtagtggtgcatgcctataatcccagctactcaggaggctgaggcaggagaactgcttgaacccaggaggcagaggttgtggtgagccaagatcgcgccgttgcactctagcctgggcaacaagagcaaaactccgtctcaaaaaaataaataaataaaataaaaaagacaattaaagactagtgtggcagaaagtattatcctcacttcgtagttgagtaaccagctcagaaaaackaagtgatttgcccaagatcata

SEQ ID NO: 522865 - DNA, 472 bp, Homo sapiens
cagctatgcccctgctgcccagcaccgtgggcctggcaggcctgctcttctgggctggccaggcagtgaacgccttgataatgcctaatgctaccccagccccggcccagcccgagagcacggctatgcggctcctgagtggcctggaggtgcccaggtaccgccggaagcgccacatctctgtgagagacatgaatgccttactggattatcacaaccacatccgggccagygtgtacccacctgccgccaacatggaatacatggtgagtccccgtacctgccccccaccccccgcagtgtcccttccggcaaacgcagccggactcatcttggcctagaatgactggctttgaagagctggaccacttgcctgcctggccccactagccagtatctgggtgtcgacctgtggaaagggcaggagttaatctgcccattttacagatgaggaaaccaagaaggttgcaca

SEQ ID NO: 522866 - DNA, 520 bp, Homo sapiens
ggcacatttcaggcccatgattttgaaaaacattgaaattggcttgtggacatccgccccccsacccccactgcatggtactggagccacgacagagtccaggcccccctttttacagatgggtacactgaggctcagagcagggtgtaacttacccagagctgcacagcttgtctttgatggccaaggttagagctcagtctctcacagctccttcctgcttcctcggctctcagaactgagaagtgaaaaccaaagttggcctgaggggactctctctgggcctttttttctctatctctgcctcggtctctctctcttttgtctactgtccgttctatctctgcctgtttttgttttggtctctgcatctctgattctttttctcccatataatcttactctcattccaataaaccatttcccctctccccccaccatcccacccagggatcatagcacacaaaagtccttttgtctccagagatagtaaaatctcctccctcagaccttgccctgc

SEQ ID NO: 522867 - DNA, 520 bp, Homo sapiens
ggcacatttcaggcccatgattttgaaaaacattgaaattggcttgtggacatccgcccccccacccccactgcatggtactggagccacgacagagtccaggcccccctttttacagatgggtacactgaggctcagagcagggtgtaacttacccagagctgcayagcttgtctttgatggccaaggttagagctcagtctctcacagctccttcctgcttcctcggctctcagaactgagaagtgaaaaccaaagttggcctgaggggactctctctgggcctttttttctctatctctgcctcggtctctctctcttttgtctactgtccgttctatctctgcctgtttttgttttggtctctgcatctctgattctttttctcccatataatcttactctcattccaataaaccatttcccctctccccccaccatcccacccagggatcatagcacacaaaagtccttttgtctccagagatagtaaaatctcctccctcagaccttgccctgc

SEQ ID NO: 522868 - DNA, 508 bp, Homo sapiens
tgtgtgttctctgtaggctctggtggagaatctgttttcttaccttttcccagcttctagaggccacctgcatcccgtgactatggccccttcatcactccagcctctgctttgattgtccaatcactttttctgactctgaccctcctgcctcccttctctaaggacccttgagattatactgcatccacatggatactccaggataatctttctatctcaagatccttgacttaatgacatcaacaaagctataatttaagtaatacagttacaagctttagggattaggatgtgaacatctttaggggtgaggggccattattctgtctaccaacakggagtataggagagtatttctctaggcactttaggattgtgtgaatcttttacaagaaaaatatgtttattttctattggtgtaattagaaataaaatgaaaattaataaagttcttaaagtgattgagagtaccaatcaaaggtaggttgaaggtcaactttactaa

SEQ ID NO: 522869 - DNA, 503 bp, Homo sapiens
agttttaccatttaccgatgcatatggtttaagcagataatagaaggagccaaactgaaagcaggtgagcagcatcaccacccctgtggaamcttttattgtattccttttgatttgtgggcatttattattttctgtttcttcttttattgctataagcaccagtttccatccccagaaaaggttaactaaaaattaatccacaaaaagattaaaatgggatgtgtttcctaagccttgttttcatttatcatctttgtgttcttgctagtaaaatcttttggcacttgttttaagtttgtattcaatgagaattgacagagcgtgggggcacaagtttagccgtgatgaaaatttcacaaaggatgtaattaataacaaaaacagcaataaggatgatagctggcacttcatgaatgctcactacaggcgaggtcgcattctaacaccctgtcacataagtgctattactaccagggatggatgaggagactgaaacccag

SEQ ID NO: 522870 - DNA, 503 bp, Homo sapiens
agttttaccatttaccgatgcatatggtttaagcagataatagaaggagccaaactgaaagcaggtgagcagcatcaccacccctgtggaaacttttattgyattccttttgatttgtgggcatttattattttctgtttcttcttttattgctataagcaccagtttccatccccagaaaaggttaactaaaaattaatccacaaaaagattaaaatgggatgtgtttcctaagccttgttttcatttatcatctttgtgttcttgctagtaaaatcttttggcacttgttttaagtttgtattcaatgagaattgacagagcgtgggggcacaagtttagccgtgatgaaaatttcacaaaggatgtaattaataacaaaaacagcaataaggatgatagctggcacttcatgaatgctcactacaggcgaggtcgcattctaacaccctgtcacataagtgctattactaccagggatggatgaggagactgaaacccag

SEQ ID NO: 522871 - DNA, 597 bp, Homo sapiens
gacaacatctggtaggaagtgacaacctaatgggtatgctgggttgttcctaattgtgggcaatcactcaaaaagcctggaaagaaacttcaatgtgttggttggtgggaggaagaagttcgtcagagcaataaattctagttcaggaatttgagggaattctgaaaagaagtgactttagagcctggccaaatgrattatggaacattcatttgtttccccccaggttctaaataagaacaaactttttaaaggagtttgtgaggcctatctggacctggaatctactttaggtagatattcgattcatgaatactatttaaaacgtgagattctgagagtatatggaaaggttagatgttcacagagaatatggaaatgctaattaaactggggtgagggaagtggagtatttaacaactcaattcaccattcctgtttcttaatttactatcttatggcttttctgggacctagataaaatttaaaaagctttttggctatttctagctctatatattttcttccccgccacccccccccctcccatttccagccatttgtccttgtgtgtctatatctcattgctccctctcc

SEQ ID NO: 522872 - DNA, 573 bp, Homo sapiens
ctggacaacatctggtaggaagtgacaacctaatgggtatgctgggttgttcctaattgtgggcaatcactcaaaaagcctggaaagaaacttcaatgtgttggttggtgggaggaagaagttcgtcagagcaataaattctagttcaggaatttgagggaattctgaaaagaagtgactttagagcctggccaaatgaattatggaacattcatttgttyccccccaggttctaaataagaacaaactttttaaaggagtttgtgaggcctatctggacctggaatctactttaggtagatattcgattcatgaatactatttaaaacgtgagattctgagagtatatggaaaggttagatgttcacagagaatatggaaatgctaattaaactggggtgagggaagtggagtatttaacaactcaattcaccattcctgtttcttaatttactatcttatggcttttctgggacctagataaaatttaaaaagctttttggctatttctagctctatatattttcttccccgccacccccccccctcccatttccagccatttgtccttgt

SEQ ID NO: 522873 - DNA, 621 bp, Homo sapiens
acatctggtaggaagtgacaacctaatgggtatgctgggttgttcctaattgtgggcaatcactcaaaaagcctggaaagaaacttcaatgtgttggttggtgggaggaagaagttcgtcagagcaataaattctagttcaggaatttgagggaattctgaaaagaagtgactttagagcctggccaaatgaattatggaacattcatttgtttccccccaggttctaaataagaacaaactttttaaaggagtttgtgaggcctatctggacctggaatctactttaggtagatattcgattcatgaatactatttaaaacgtgagattctgagagtatatggaaaggttagatgttcacagagaatatggaaatgctaattaaactggggtgagggaagtggagtatttaacaactcaattcaccattcctgtttcttaatttactatcttatgscttttctgggacctagataaaatttaaaaagctttttggctatttctagctctatatattttcttccccgccacccccccccctcccatttccagccatttgtccttgtgtgtctatatctcattgctccctctcctgctttctcacaaggatcacctaacttt

SEQ ID NO: 522874 - DNA, 618 bp, Homo sapiens
aagcaggaggatatcattttgcttaacctgtctcttacttagaatatcaatatgcctagtggataggaaccatgacattgaagaggaaaaaaaatgtatatttgtattttttaagtctcctctgaatataatagcaaagaggtagtgagaattttcaggaacagctaagcaataagtcaagctttacaaggtctaagcakcagtgatgatcaatctatacagtgataaagaggatacaaattcatgggaatcattgttgtagagttgtgtgtatgtgtgtgcatgcttgtgtgtgtgcttgtgtgtggctttgtcacagatctaccagaaaatactgtagcttcctttaacatgtgatgaacttgtagagaaaactgaagaatattggttatgttttttgagttttaatttaggttctagagttttacttttgaaaatattactgcagtgtcagcctacaaaagaattttaagtcacaattttgtttaagaacattcctttttgggttctatgggtatatttgtgataattgttattcacattcatcatacacgcatgctcttttcaccttcctcttccattctgcctttattccgttcacgctgtgttcctttattg

SEQ ID NO: 522875 - DNA, 274 bp, Homo sapiens
ctgtatgcctgacttcctctggctgtggatgaaattgggcaatgtctacagatagagatayagttgaggtttatgccttgtatctgagaacacaggaatagttcatccctcatcacgcaaggctttagtataaattttcttcccaaatagaaacagtatatacaggttaatcccaagcacaacaggctgaataaaatgaactttaaattaaaataggattataggctaaaagtttggcaggaaagaggagttcattttcttttaggaaaagaag

SEQ ID NO: 522876 - DNA, 595 bp, Homo sapiens
gcacatcccttctcatgttctttcaccattcttctccacagagcctctcatactcagggaggctagcctagacttcatgacttctcaaggcagcaaracagtgaaagtggctgctacagggctctaaaagcccgggctcagaatttctgttgctttccactggactgagaaactcacaagagcagccaaagtaagaatgtagaaagtgactacacaaaagtacaaattcaggagtgtgactgattgaggaccactttgtggcagtctatcaaaaaactagtatctataatttctatggtctttatagttcacaaaggacatttacttgcactaacttaattttatccttaccactaaactgagatatggttagtggtgtgctggtaaaacaacaaacaaacaaaaagccctcattggtagcatttgccaatttccatggtataaatatcctacagtaccaagttcaagagaccaatatgagatcactcattgcagaagtatagatacactgcctgcaatggggggtagtatctctacttgcaaatgaggttatgggactttttcaaattcacacgcaatcaataggggcggagct

SEQ ID NO: 522877 - DNA, 595 bp, Homo sapiens
gcacatcccttctcatgttctttcaccattcttctccacagagcctctcatactcagggaggctagcctagacttcatgacttctcaaggcagcaagacagtgaaagtggctgctacagggctctaaaagcccgggctcagaatttctgttgctttccactggactgagaaactcacaagagcagccaaagtaagaatgtagaaagtgactacacaaaagtacaaattcaggagtgtgactgattgaggaccactttgtggcagtctatcaaaaaactagtatctataatttctatggtctttatagttcacaaaggacatttacttgcactaacttaattttatccttaccactaaactgagatatggttagtggtgtgctggtaaaacaacaaacaaacaaaaagccctcattggtagcatttgccaatttccatggtataaatatcctacagtaccaagttcaagagaccaatatgagatcactcaytgcagaagtatagatacactgcctgcaatggggggtagtatctctacttgcaaatgaggttatgggactttttcaaattcacacgcaatcaataggggcggagct

SEQ ID NO: 522878 - DNA, 590 bp, Homo sapiens
aagtgtttaaatgtaatttggaatcaaccggaactcactctagcttctgagaaggagagcagcattatcaaaacatgatgatgcccctgagtaactataccacgagcttccaaagccagcgtggatgcctccgggtctgtccctgaggacagacgggcgcgggtgaacagccatggtgaccccggactgccaaggcttcccaacttgatggtgtgttcatttcctagggcttctgtgacaaattaccacaaactcagtgccttaaaacaacacaagtgtatcctttccctgctctggaggacagaagtctgaaatcaaggtgtcggcagggttggttccttctgaaggctcagagggggagtccctgccatgcctctctccagcctccagcggctgctggcaacccttgtgtcccctggcttatggacccatcaccccaatctctgcctccatcgtcacatgaccrtgtgtctcaaatttcccactcctttctcttctaaggacactcaatgcatttagggcccaccctctcctaattttacaggtgaaaaaacagaggctcagaatgaatgattcagggccttgaggtc

SEQ ID NO: 522879 - DNA, 584 bp, Homo sapiens
gctgttccattttacattcccatcaacagtgcacaggggttccagtttctctacatcctcgtcaacacttgtgatttttcagtttttgatagtagccttcctaacgggtatgaggcatattctttacttttatataacaaccattgtcatactgctttaatgtaygacaattataaagttaatagttctttttctcagtacatagcaagtctgtttgggttgtgtctttatcactatcatgtgttgaaagaagtttctaatagttttaattatttttgctcagattacttatcagccctgggtgtacatttttaaaaaatagacatcgaaaaaactttaaacccattttgtcaacttaagggacttatttccaggcatagccattacttcttatatagaatacagtattttaaaaattctcagtcctaaaatgttcctggaatctgctgatttattgagatttattcttgctatacttactactatggtctactaaatacttgactccactgaatgctagtaacaggtctgccttttcaagtctctccaaccttgtgaattttcaattactaccacttcaactt

SEQ ID NO: 522880 - DNA, 584 bp, Homo sapiens
gctgttccattttacattcccatcaacagtgcacaggggttccagtttctctacatcctcgtcaacacttgtgatttttcagtttttgatagtagccttcctaacgggtatgaggcatattctttacttttatataacaaccattgtcatactgctttaatgtatgacaattataaagttaatagttctttttctcagtacatagcaagtctgtttgggttgtgtctttatcactatcatgtgttgaaagaagtttctratagttttaattatttttgctcagattacttatcagccctgggtgtacatttttaaaaaatagacatcgaaaaaactttaaacccattttgtcaacttaagggacttatttccaggcatagccattacttcttatatagaatacagtattttaaaaattctcagtcctaaaatgttcctggaatctgctgatttattgagatttattcttgctatacttactactatggtctactaaatacttgactccactgaatgctagtaacaggtctgccttttcaagtctctccaaccttgtgaattttcaattactaccacttcaactt

SEQ ID NO: 522881 - DNA, 584 bp, Homo sapiens
gctgttccattttacattcccatcaacagtgcacaggggttccagtttctctacatcctcgtcaacacttgtgatttttcagtttttgatagtagccttcctaacgggtatgaggcatattctttacttttatataacaaccattgtcatactgctttaatgtatgacaattataaagttaatagttctttttctcagtacatagcaagtctgtttgggttgtgtctttatcactatcatgtgttgaaagaagtttctaatagtwttaattatttttgctcagattacttatcagccctgggtgtacatttttaaaaaatagacatcgaaaaaactttaaacccattttgtcaacttaagggacttatttccaggcatagccattacttcttatatagaatacagtattttaaaaattctcagtcctaaaatgttcctggaatctgctgatttattgagatttattcttgctatacttactactatggtctactaaatacttgactccactgaatgctagtaacaggtctgccttttcaagtctctccaaccttgtgaattttcaattactaccacttcaactt

SEQ ID NO: 522882 - DNA, 584 bp, Homo sapiens
gctgttccattttacattcccatcaacagtgcacaggggttccagtttctctacatcctcgtcaacacttgtgatttttcagtttttgatagtagccttcctaacgggtatgaggcatattctttacttttatataacaaccattgtcatactgctttaatgtatgacaattataaagttaatagttctttttctcagtacatagcaagtctgtttgggttgtgtctttatcactatcatgtgttgaaagaagtttctaatagttttaattatttttgctcagattacttatcagccctgggtgtacatttttaaaaaatagacatcgaaaaaactttaaacccattttgtcaacttaagggacttatttccargcatagccattacttcttatatagaatacagtattttaaaaattctcagtcctaaaatgttcctggaatctgctgatttattgagatttattcttgctatacttactactatggtctactaaatacttgactccactgaatgctagtaacaggtctgccttttcaagtctctccaaccttgtgaattttcaattactaccacttcaactt

SEQ ID NO: 522883 - DNA, 535 bp, Homo sapiens
tgggcgcagtggctagtgcctgtaatcccatctacttgggaggctgaggtgggaggatcacttgagcccaggcattcaagrgtacagtgagctatggttggccccctgcattccagcttagcctgggtgacagagtgaagacactgtctcttaaaaacaacaacaacaacaacaacaacaacaacaaaaaacccaaaaaaacaggacgtttgcatttgagcatcaagcgctatgtaacacattatgaagtcctatatattagacatgatttactagtcagatgtattagttaccacctagggaagagccaaaatgaaggtagatatttgtaaagacagtttgatgacggaatattaataaaaagaatacctactcgatctccatgtcaatcttctagtagattcacgtttgccaactctatcgggctgcatgctgctcccagtactctgaaggacccgcctggtgatgatgccatccagcatccacagaagcagggctgcttgctctgagggctctttgtgaatcaggcagtgaa

SEQ ID NO: 522884 - DNA, 592 bp, Homo sapiens
gtaccgagctatgtatggagctttatttccagcgtccttcccctgtttcatatgtggtcttcagttcagtggaatattattctttttccctagtagaaaaatctcatgaatatttttagagacttgcttgtttacagtaggaaaaagcacacatcctgtgcttkacatgcgttcttcaaagacttctgagttaggaggcctgttgggctggggcatgaaccagttgagagaaatagcacagattactagaatgctttagaaatccttttctgcttcagataagtggctaattaaatttggggttggttattggaaaagtgccaattatggaaacgagcatctgttgatcacactttgcttcagatgctcggctccttgctagagccgtgttgcaaagaaagcagggaactgctgctagcaccaagacaagcaggcgtggtgggaagagtgatttattatgtttactttcaggtttccgtcttgtaaaaagattaattcagtagaactcaaattccagagaaaaatggaccatttattgtgttcgattcaggcttaggcacagcaggtggattttccaaattgcctcatctga

SEQ ID NO: 522885 - DNA, 592 bp, Homo sapiens
gtaccgagctatgtatggagctttatttccagcgtccttcccctgtttcatatgtggtcttcagttcagtggaatattattctttttccctagtagaaaaatctcatgaatatttttagagacttgcttgtttacagtaggaaaaagcacacatcctgtgctttacatgcgttcttcaaagacttctgagtkaggaggcctgttgggctggggcatgaaccagttgagagaaatagcacagattactagaatgctttagaaatccttttctgcttcagataagtggctaattaaatttggggttggttattggaaaagtgccaattatggaaacgagcatctgttgatcacactttgcttcagatgctcggctccttgctagagccgtgttgcaaagaaagcagggaactgctgctagcaccaagacaagcaggcgtggtgggaagagtgatttattatgtttactttcaggtttccgtcttgtaaaaagattaattcagtagaactcaaattccagagaaaaatggaccatttattgtgttcgattcaggcttaggcacagcaggtggattttccaaattgcctcatctga

SEQ ID NO: 522886 - DNA, 592 bp, Homo sapiens
gtaccgagctatgtatggagctttatttccagcgtccttcccctgtttcatatgtggtcttcagttcagtggaatattattctttttccctagtagaaaaatctcatgaatatttttagagacttgcttgtttacagtaggaaaaagcacacatcctgtgctttacatgcgttcttcaaagacttctgagttaggaggcctgttgggctggggcatgaaccagttgagagaaatagcacagattactagaatgctttagaaatccttttctgcttcagataagtggctaattaaatttggggttggttattggaaaagtgccaattatggaaacgagcatctgttgatcacactttgcttcagatgctcggctccttgctagagccgtgttgcaaagaaagcagggaactgctgctagcaccaagacaagcaggcgtggtgggaagagtgattyattatgtttactttcaggtttccgtcttgtaaaaagattaattcagtagaactcaaattccagagaaaaatggaccatttattgtgttcgattcaggcttaggcacagcaggtggattttccaaattgcctcatctga

SEQ ID NO: 522887 - DNA, 511 bp, Homo sapiens
ctttttcactaaatatttttgcaaaagtaatttatggtctgattttgcagaaaccaaataatattccctagcaactttaaataattcacattatcatttgaagagcctcaaaaactgtctctatatggtgctgagctaaatatgcaataataagtaaaatacctatggtccaagtacatgatgaatttaaatcaacttcccaagtgttggaatgtttatttagcaggagttcctgataagatggctaaatactccaaaccragacagttcattgttgctgcttttgcccccttcaaataggtgatgtgaatggtaactattgtcttcacagtccaaagcaggatctcatctctcatttattttgctaggttttcctacacagagtgtctttattctccctactccagcaatttgacctcatcacttatactgtactcttcatttctgcatcttctttttaaccatgtgtatcttcatttacttaataactttctggccatacctgttgcag

SEQ ID NO: 522888 - DNA, 489 bp, Homo sapiens
gtttagatcaatagcaagcctcatcaactcttttccacccccaacccttactaagtgcatcagacaacagaagccccagggctgacctttgcagcatccattgtcatagcagttattacagacacaaataataggtagtataataatctgtggttaaatgtcctttaaccagagggctcagagcactctgggaacattacctcatgcccctcctgacactcctgcccacatgccttttcttcaagaccctcaagtccctcttccagcctcctgccttctggaaagccctcctccacatttcctctaactccatctcagcacagcttaacagcatggttcccaggtcttacccaggagctgccstgagtgacagcctcatggaggaagttgttcaggtctcaaagatcttcttatctcccaccatggcctataatcctgagcatgtcccatcactgacctattttctatatgctcagaagcaagaattat

SEQ ID NO: 522889 - DNA, 517 bp, Homo sapiens
acagcttggagccttgaggagtatcccagtcacagaaaagaaaggctggaaaaactaccaactgggcctgcagaaggagcaacagttttctcactgtagaagtcttgggtgggagaaaagttcacgtgaaagatggaaaggccaggcctccctcacttggaggagagagatggactgctcccgcctcatcccctgctttggcatgccactggycccaggattcctatgccaaaaagttaatctaaaagttagtccagaggccgggtgcggtggcttacgcctgtaatcccagcacttcgggtagctgaggcaggcggatcatttaaggccagaagttcgagatcagtctggccaacatggtgaaaccccttttctactaaaagtacaaaaattagccaaaggtagtggtgtgcccctgtaatcccagttactcgggaggctgaggcaaggagaatcaacctcacccaggaggtggaggttgcagtgagccaagaccatgccactgcactctggcctg

SEQ ID NO: 522890 - DNA, 540 bp, Homo sapiens
accacatcctaactgtaatgctttccagcctcctagaatatgccattttccagttttaaaagctgtgaagcctagatgtcaatgtaaaacatttttatgattattaataatgccactagatagagggcctttcaagaggccatgatttgggcctgttaggagctgcttttatctaattaatggtggtacatcaggccagatcaaagcagaggggacagcatcacaggacactggagaggacagctcctttctaccccagctccttttcagcctggggtgaggtgagggatctgcacagggaaaggaaccaaggagaacctctcagaacaggtgacacccacgctgggattggagagacaggtatgattttgacttttcagaaatcatgagagactccacaaatcagtatgctttatctcaaccacatccagacctckgacaaatgaggacaccctgattgactctggttacttaaaggtgtgacgtgcttgattcaggcaaatgtagccagcccacagagacagcaggtgagaaatgatt

SEQ ID NO: 522891 - DNA, 512 bp, Homo sapiens
tgccatctgtgggtcatctcgaatagcaagggatgagatgactcttaagagacaactcaagctgttcmctgcagcaaaaataaaacgagtggggggaatgcagatgtcacagggctgtttggtgtcgtggaaaaatgaaggtggggcttatcatcaagaagtcctttacacatccatgactttctgtccaactcataggagactgtgaagaaattaccttttcctttttaaaatgaagaaactgaagtgtaagaagattgaacacagcagggtcaaaaacattaggagtagatacaggtgccccacaccatccttgaccccacacacacttccagaaaacatcaagcaaggagcaggcaaagagctgtcataggagtgtggtttttttaataccatctgtgccaagcaatatcaaagttgtccatactctccaagtttgtcctatttttaatagacaatattaaaaattttttaagtgtgtgctgataaagagactagtcacacctctgagg

SEQ ID NO: 522892 - DNA, 512 bp, Homo sapiens
tgccatctgtgggtcatctcgaatagcaagggatgagatgactcttaagagacaactcaagctgttccctgcagcaaaaataaaacgagtggggkgaatgcagatgtcacagggctgtttggtgtcgtggaaaaatgaaggtggggcttatcatcaagaagtcctttacacatccatgactttctgtccaactcataggagactgtgaagaaattaccttttcctttttaaaatgaagaaactgaagtgtaagaagattgaacacagcagggtcaaaaacattaggagtagatacaggtgccccacaccatccttgaccccacacacacttccagaaaacatcaagcaaggagcaggcaaagagctgtcataggagtgtggtttttttaataccatctgtgccaagcaatatcaaagttgtccatactctccaagtttgtcctatttttaatagacaatattaaaaattttttaagtgtgtgctgataaagagactagtcacacctctgagg

SEQ ID NO: 522893 - DNA, 512 bp, Homo sapiens
tgccatctgtgggtcatctcgaatagcaagggatgagatgactcttaagagacaactcaagctgttccctgcagcaaaaataaaacgagtggggggaatgcagatgtcacagggctgtttggtgycgtggaaaaatgaaggtggggcttatcatcaagaagtcctttacacatccatgactttctgtccaactcataggagactgtgaagaaattaccttttcctttttaaaatgaagaaactgaagtgtaagaagattgaacacagcagggtcaaaaacattaggagtagatacaggtgccccacaccatccttgaccccacacacacttccagaaaacatcaagcaaggagcaggcaaagagctgtcataggagtgtggtttttttaataccatctgtgccaagcaatatcaaagttgtccatactctccaagtttgtcctatttttaatagacaatattaaaaattttttaagtgtgtgctgataaagagactagtcacacctctgagg

SEQ ID NO: 522894 - DNA, 512 bp, Homo sapiens
tgccatctgtgggtcatctcgaatagcaagggatgagatgactcttaagagacaactcaagctgttccctgcagcaaaaataaaacgagtggggggaatgcagatgtcacagggctgtttggtgtcgtggaaaaatgaaggtggggcttatcatcaagaagtcctttacacatccatgactttctgtccaactcataggagactgtgaagaaattaccttttcctttttaaaatgaagaaactgaagtgtaagaagattgaacacagcagggtcaaaaacattagkagtagatacaggtgccccacaccatccttgaccccacacacacttccagaaaacatcaagcaaggagcaggcaaagagctgtcataggagtgtggtttttttaataccatctgtgccaagcaatatcaaagttgtccatactctccaagtttgtcctatttttaatagacaatattaaaaattttttaagtgtgtgctgataaagagactagtcacacctctgagg

SEQ ID NO: 522895 - DNA, 409 bp, Homo sapiens
gcacaggccttccctggccccccgccctttgagaaacagtggcagggaagcgccacccatggccagaggcaacggggtgacgggcaggctcctccctgggccctgactccagggtgactcaggcgctggtttccccggaaggaagtgagccagccgactctctttttccctttctaggaagacacaagggaatgacttggcccaatcccaggggcccagcctttttactcagactgttatggagaaaccaccccaccgtcctccactacaggagaggaagccagagtgaggagggagagaaagaggaaacagctcatcccacagaggaagatacagaaaaggggaggcacaatggacaagacagggccttstctttctaacctcaactcccaacataaatgcccaagga

SEQ ID NO: 522896 - DNA, 648 bp, Homo sapiens
tgccacactcctgtccaaaggccctcaccaccactgttcatcaacactggatactcrgtgaatacctagtatgtgcaagcttgattcgtgcttacctgctctttggggtgctgggatgagctcatcagggagctcctgaaagtccattactagggggaccccaggagactccacaaatccacctttgatcatccaaggagcctcagatcagttacagatcagtgacatcccctgagaatcctctaaatgtctttagagaggagtttcacaacagtgccccaagaaagtgtaatgaaggcaggcaggctgccacatatctgtcctttctgactctcctagcccaggtactaactgggcaaggcaatggccgagtggctgagagccagaagataagaaggcaagaggagggaaatcagacagggacaaaggccactcaactgggaccccacttgttgtccttgaagcctaggaatggtcctggcggagtggggctcatcgtggctccccacatctggcctcttccaaaactctacatgcagcccaagcctcatatccagagcagtctcttgtcttgcagagcacagccagcttccaaatggcacaagaggctgctgagccataaaatataaactcatttagaagcattcc

SEQ ID NO: 522897 - DNA, 648 bp, Homo sapiens
tgccacactcctgtccaaaggccctcaccaccactgttcatcaacactggatactcggtgaatacctagtatgtgcaagcttgattcgtgcttacctgctctttggggtgctgggatgagctcatcagggagctcctgaaagtccattactagggggaccccaggagactccacaaatccacctttgatcatccaaggagcctcagatcagttacagatcagtgacatcccctgagaatcctctaaatgtctttagagaggagtttcacaacagtgccccaagaaagtgtaatgaaggcaggcaggctgccacatatctgtcctttctgactctcctagcccaggtactaactgggcaagkcaatggccgagtggctgagagccagaagataagaaggcaagaggagggaaatcagacagggacaaaggccactcaactgggaccccacttgttgtccttgaagcctaggaatggtcctggcggagtggggctcatcgtggctccccacatctggcctcttccaaaactctacatgcagcccaagcctcatatccagagcagtctcttgtcttgcagagcacagccagcttccaaatggcacaagaggctgctgagccataaaatataaactcatttagaagcattcc

SEQ ID NO: 522898 - DNA, 191 bp, Homo sapiens
cggccgcgggccggagggggcgtggtggggaargggaggaggggcgggagtgagggaataaggaggccccgccgtcggcgcccccagccactgcgcgctcgccggagagctgggtgctaccgctgtttccgctgctgagccctgcccgccggccggcccgctcgctagctcgcttcccctcgcccaggggg

SEQ ID NO: 522899 - DNA, 614 bp, Homo sapiens
caaccatctttaaaaaaatttctgctttaccatctttcttaaaaataaaggattaaatgagacaatttggatattgctaagtagtacagtgcctgacacatagtgagtgcccagtaagtgttacccattaattttcgttatttatctcattactaacaacacgcatgctacrgcaacatggcaaaaaaaaatttttttttaattctacaaaattgcctcagtattcccaaggtcattggtcccttggagattaaggttcagaatcctgtataaagaaatgagaacagtttgttacccacacatgctacagtatagaaatgttcacagtaggttaaaatacaactttattatatcaagaattatgtcatcaccatagtaattattttcccgtggtctctttaatattactaagatatctcagttttcctattttctagcgccaagaatctcgtttacaaattactccttcctttgtctttttttccccttagtgtccctaaaggaagtggttgggtttggtctgagtcttgtgtagctgtagagaaattggaatcaggagaagatgtagtaggaattctgatactgcttttaccttctccaaggtcagccattta

SEQ ID NO: 522900 - DNA, 586 bp, Homo sapiens
taaatgatctaggctattcgtattgtcaaaaatgtgtctatactgtctgaaaaagaaaattacagatggatgcatgttaggtacagaacatttgtgttcccccaaaatttaaatgttgaaatcctaacccccaaagttatgatattcggaggtgcagcttatgggaggttattaggtcatgagggtggaacccacatgaatgagattagcatccttacaaaagggaccccgagagagctctcttgccctctttccaccatgtaagcacaaaatgagaggtcagcagtctataaaccagaagaggactctcagcaaaatctggccatgctagcaccttgatctcagacttccagcctccagaaatgtgagaaatacatttctgttgtttataggccactcagtctatggtagtttgttgtatcagcctgaactgactaagacagtatataaaagtagtatacaattttaataatttaaaactcacaatgcaaggctacattatatctggacamcaacatacataataaaaatactaaactatgcatgggaagactaagcaccaacttcaagacaatagttacctctg

SEQ ID NO: 522901 - DNA, 637 bp, Homo sapiens
tgtttgagtttgaccctggctctgctgcttacaatctgggtgaccctgggcaagtggctttgcctctctctgcctcatctcctcatctgtaagtaggggatagtgatagtatgaactccgtggtttgttgtgagatataaggatgctggtgagtttatgctgtttccaacagtcccagcatagggtaagcacctctaagggttactgatcattatcgtgaaatggcaggtttggtgacatcgttatttttgtctaattcacatgagaattaatacatgactatgaaaatttaaaaaaggaaaagrttcccctactaggtatcaagtgaactcaccagtggtatatgcacctttttgtagagacacgctaactgggccaatcttcacgttttgtagatgggagacgaggtccgaaggggcagaggggctctcctgggatctggactggatcctctgcagcaagcggcctgtccgggactcctcagttcacgctgcagtctttaactccatacttcttccttctagtacaaagcaggagtgtccgttgtggccacgcctcacccaggaaactcctgaatcctggcagctcctccccacggttcccacacacggaattccctcacagggctgggacttcc

SEQ ID NO: 522902 - DNA, 637 bp, Homo sapiens
tgtttgagtttgaccctggctctgctgcttacaatctgggtgaccctgggcaagtggctttgcctctctctgcctcatctcctcatctgtaagtaggggatagtgatagtatgaactccgtggtttgttgtgagatataaggatgctggtgagtttatgctgtttccaacagtcccagcatagggtaagcacctctaagggttactgatcattatcgtgaaatggcaggtttggtgacatcgttatttttgtctaattcacatgagaattaatacatgactatgaaaatttaaaaaaggaaaagattcccctactaggtatcaagtgaactcaccagtggtatatgcacctttttgtagagacacgcyaactgggccaatcttcacgttttgtagatgggagacgaggtccgaaggggcagaggggctctcctgggatctggactggatcctctgcagcaagcggcctgtccgggactcctcagttcacgctgcagtctttaactccatacttcttccttctagtacaaagcaggagtgtccgttgtggccacgcctcacccaggaaactcctgaatcctggcagctcctccccacggttcccacacacggaattccctcacagggctgggacttcc

SEQ ID NO: 522903 - DNA, 663 bp, Homo sapiens
cctcacaggcctgagccgccccgctttgcccacttacctgctggtccagttccccagccgctctgcatgggaggggccagaggcagctcgttttgtataaagctgtccccgcccagagctcggggaaaggcaggcggagggtgggtgtggctcccggcaagaccaggcgcctactatgtgtctctgatctgccctacagcccagctaggaggaggatccagatggtagaactgtataataaagggcttgctttattgaggctctctgccacccagatttcatgagggttgatccccagttgacaaaagctatgtgcaaacagttggttctggcatcaccctgagatctccataattcctttcacacaggaagagagttccctggagcaaaaacagttcaaatactggtgcttcagtaagtcwtgtggaaagcggggataataatagtgccctcttcataggacagaaatcctaactgccagtgtgcactgagctgactcagtgtcaggcatgttcttggggcttgagagaaattaatgcatttaatcttcatggccttttggagagatgctattactatccctattttccagatgaagaaacaggcccagagaagtcgagagccttgtgtaggtcacacaccttgtatatggcagaactggtc

SEQ ID NO: 522904 - DNA, 492 bp, Homo sapiens
tgcaggaattacatgggagttggctgttaatattattacaggagtggatcaaatccatctctgccatggacttgctgtgtgacctagtgcaggtcactttgcctctcttggtccagttttctcacttgtaaaatgggaccatactgccactctccatagggcaagtgtgcggattcgaggagctcatatgtgaaaggcctccttcaggcgcaaggttggtccttggttatgcacgtatgtgagcctcttggcgtgccttcatatgtggggcataggcaagcactcaagtggcctggactcctatctcggctctcaatgtccccgcttcctggcctgggatcagcaggacctcagtggatccaccatccaggcacatccctttctttccctgcttttttcctgcttcttgggcggcaccaccacctactggccyaaagctacattgcagccaatgtgcacagcggggcggagggaagggaatatggccttggg

SEQ ID NO: 522905 - DNA, 492 bp, Homo sapiens
tgcaggaattacatgggagttggctgttaatattattacaggagtggatcaaatccatctctgccatggacttgctgtgtgacctagtgcaggtcactttgcctctcttggtccagttttctcacttgtaaaatgggaccatactgccactctccatagggcaagtgtgcggattcgaggagctcatatgtgaaaggcctccttcaggcgcaaggttggtccttggttatgcacgtatgtgagcctcttggcgtgccttcatatgtggggcataggcaagcactcaagtggcctggactcctatctcggctctcaatgtccccgcttcctggcctgggatcagcaggacctcagtggatccaccatccaggcacatccctttctttccctgcttttttcctgcttcttgggcggcaccaccacctactggcctaaagctacattgcagccaatgtgcacagsggggcggagggaagggaatatggccttggg

SEQ ID NO: 522906 - DNA, 579 bp, Homo sapiens
cctagtatgctgcctctggctgtggtaaattccagaatataatttgtaaattttcctatccactgtcccatcccacttcctaaagtcacatgcaaaataaagtggcaggttagagtctgaactcacatttctgtttgaatcttttccactatggattttaaaaggatctcaaatggtatcttctaaaattctaagcattctatcaatcctcatgctgaaatatgacttggtgagtgacacttcaaaaagaaaataaacatgcgtctcaacccattactactttatttcctccagatcatttcctcacaggcagggcagccacgtcagtgaacccactcagatatcttggtktctaccacttggaagcctcttttctacattccattttgggagagagctggctcttcccggagacttgacaacctggtaccgtctcctcccacaatcaccctcccattcttctggcttatctctggtgtcagagaagaatgtaatctttaggcgtgtacattctgactcccatgttttggggaagacccctcagcgtagctgactggcatctggagagcagggcagggg

SEQ ID NO: 522907 - DNA, 489 bp, Homo sapiens
ggcctccctctggagttcatagctgagttgctgtccaaatcagtggtccctagaatctataaaacaaarctgagaacttcagaggtgcatccagagaagccacactccaaaaggaccacttccaggtaagcatgacacactgctgggtgcacacgctcctggcttcaggttccaggatctttctcactgccttcatccccagctagtaatagggagacccttcccctggagcctgggtggtgactcggagatctactggtcagcacagagagctggggcaggaatacacatctgcagtgatgagggatatggagcagtgacctcatggccagggcatggttaacggtatctttgccactcccaagctagcccatggctgccggatcttcctctgcttgatctcctagctgacctgtgcaaccctaggtagtccagaaattccacaactagcagctctcagccatccctcctgggcagggctaatactgg

SEQ ID NO: 522908 - DNA, 619 bp, Homo sapiens
ccagctggccgctctgccgccgtgcrccgggcccgcgctgagcagcctccgcgccctggcgctcgccgggaatccgctgcgggcgctgcagccccgggccttcgcctgcttccccgcgctgcagctcctcaacctctcctgcaccgcgctgggtcgcggagcccaggggggcatcgccgaggcggcgttcgctggagaggatggcgcgcccctggtcacgctcgaagtcctggatctcagcggcacgttccttgaacggggtgagtccgggcgccccgcgttttcagccggcctgagcgcagagccaggctgcgcgtgcgctccggggggcagggctgcgttcttcctcgaggggtgacccgggtgcccagctcgtaggagggttcaaaaagacaccagctacatttttcgagcaagcgggcccagtttgaagcgccacacaggagtcactttcttgaatcctaagagataggaactgttaccatctcctttttacatatgagggaaccctggcacagaaaggcgaaacttggtcacacattaagcaaatctgaacccaggcattctgggtccagagcccaaaactttaaccactctgttctgcttcccagcatggctg

SEQ ID NO: 522909 - DNA, 510 bp, Homo sapiens
ctgccaagtcagtggacacttacgtctgtggagcctattgtttatttcctccctcttgaygttctctgtctctttggcccccagatgtttccctggtgcttctccagccttcctggctaggccttcttaatgtccttgcctatttccacttataactgtcttgcaggtcatttgtcaccctatgcactactccagcaccatccccttccctaaagcctaatgcgtcctcctccatctctgtgctgaggatgcttagttgagtatctccagccaaggccttctgatgagccccagaatcacgtatctaattgcctgctggatagtaaagatctatgaggcatccaggggaaatgttcagtaataataacacgaacctgttgtactgtgccaggcatagttctaagcatatattgaagtatttactcttgcagcaatccagatagggaggattcagtcattattcccatttcgcagatgaaaaaactgagacacagggatgttaaatacatt

SEQ ID NO: 522910 - DNA, 510 bp, Homo sapiens
ctgccaagtcagtggacacttacgtctgtggagcctattgtttatttcctccctcttgatgttctctgtctctttggcccccagatgtttccctggtgcttctccagccttcctggctaggccttcttaatgtccttgcctatttccacttataactgtcttgcaggtcatttgtcaccctatgcactactccagcaccatccccttccctaaagcctaatgcgtccycctccatctctgtgctgaggatgcttagttgagtatctccagccaaggccttctgatgagccccagaatcacgtatctaattgcctgctggatagtaaagatctatgaggcatccaggggaaatgttcagtaataataacacgaacctgttgtactgtgccaggcatagttctaagcatatattgaagtatttactcttgcagcaatccagatagggaggattcagtcattattcccatttcgcagatgaaaaaactgagacacagggatgttaaatacatt

SEQ ID NO: 522911 - DNA, 502 bp, Homo sapiens
atagactactatcacttgcataagaagcagaaattgtctacatgcatagactatctctggaaggtttcaggggaaacaggtaactattatctctagggaagggaactcaataatcaaggatgggaggaagatttaattatcactgtatactctcttgtaccctttgattaagaaggatgcaatstaaggaaggagaacaggggatggaggagaagagggatggaaggagggaggcactgtgtttcttgcttctctcattctcaaaggtgggctccagcatggcccccagcaaagccatttttactcttctttgctctttgtcattcagccctgtaagtacattgagacacacccttttcaccctggcaaggagaaaactttagaacttgcctgggcatagaaagtgctcattatccatccagttggggaggagggtgtagcaataataggcacattctgcttctttgcactcagcaaaatgtattcactgcacacgtgaaca

SEQ ID NO: 522912 - DNA, 433 bp, Homo sapiens
ctggacttcaacagggatgggacccattccaccggtgacatctaatgtgactttaagtagcttggcattagactactgggttaactctctgttaatacttgagagcttagtgataaattggtgctgaggagtttttcaacayttatccaccgtttactatgctccctgtttaaacaaagaaagaaatcttcagggttacactcttcaccttgtagcgtgtcagatgtcaacattatcaacctagaatttaataacattctattttctttgtgcttcttttgccttctatttaaggccttagatgcgggcttttcatttgctctagcaagatagtttttttttcagtccttattgactgacatataatatacatacagaaaaattcacttattataaacaaggcttcacttatcataaacagttcaatggattt

SEQ ID NO: 522913 - DNA, 561 bp, Homo sapiens
tttcatgtcagcttcctcctttttgtgtctcatagtgtctcgtggtgtggctttgcagaattgttaggtttttagagaggtccccgcaagctctgtcttatttctacccaggtttatcaggtagcaaccctgttctcactggtctctgaagatttctgggtctgaaggatgcataggaggcccatctattgcccccagaaagacagcttaagtgacttgtccaagttcacccccagtccagggcacacttggcataaagccctgcatcctcatttgttatccccgcctagcactatggctctgccccactgtatacaayggatggtttcccaaaacatatccacaagcatgcttgtaaatcaaattacattcttcagttcagaaaaggagactgatgcttaagcaaaatctacccccaatcctacagtacagcaagtactgtcactttctcatcttataatttcggggtgggataattggtttgtatttttaatcattggcagtttttgttttcttggccctttccaaagactccattcctccattacttctaacagggga

SEQ ID NO: 522914 - DNA, 666 bp, Homo sapiens
aaacataatcctgataattgtagagtgtgtgtgtgtgtgtgtgtgtgtgygcacgcgtgtatcagaaactcctcctgaaagcaattccagaacatgaattacaaacatgtttttaacactggaagcatcatttgcaaaaatatttcacttaactaagtaattttgctgaagactgacttttgccaaataatcttttttatctctcttaaaagttggcaatccaaacattctctcaagtaaaacaagcaagtattctccatgttctcaatactcctccctcagaaatggtctcagagttctcatcttgggtcctttatcagatttactttatgaaattgaatataatttctgcagcaataaaatggaaataatagcatttgcctccctcctaaagaaatgtggtgaacaagagttggtcagcaacacctagaatctggagtatctctcatgggttccataaatagttggcataattaataattgctagtaaagagattgtgttattaatatattactgaggattaataatcatgtattataatctttccagaaatgacaaaatgtcatcactattaaaatcttcttcaaaaaaatacctaatgttccaattctctgagattactgtcctaccctcttttcttctcaaccctccacatccgcccctca

SEQ ID NO: 522915 - DNA, 666 bp, Homo sapiens
aaacataatcctgataattgtagagtgtgtgtgtgtgtgtgtgtgtgtgcgcrcgcgtgtatcagaaactcctcctgaaagcaattccagaacatgaattacaaacatgtttttaacactggaagcatcatttgcaaaaatatttcacttaactaagtaattttgctgaagactgacttttgccaaataatcttttttatctctcttaaaagttggcaatccaaacattctctcaagtaaaacaagcaagtattctccatgttctcaatactcctccctcagaaatggtctcagagttctcatcttgggtcctttatcagatttactttatgaaattgaatataatttctgcagcaataaaatggaaataatagcatttgcctccctcctaaagaaatgtggtgaacaagagttggtcagcaacacctagaatctggagtatctctcatgggttccataaatagttggcataattaataattgctagtaaagagattgtgttattaatatattactgaggattaataatcatgtattataatctttccagaaatgacaaaatgtcatcactattaaaatcttcttcaaaaaaatacctaatgttccaattctctgagattactgtcctaccctcttttcttctcaaccctccacatccgcccctca

SEQ ID NO: 522916 - DNA, 666 bp, Homo sapiens
aaacataatcctgataattgtagagtgtgtgtgtgtgtgtgtgtgtgtgcgcacgcgtgtatcagaaactcctcctgaaagcaattccagaacatgaattacaaacatgtttttaacactggaagcatcatttgcaaaaatatttcacttaactaagtaattttgctgaagactgacttttgccaaataatcktttttatctctcttaaaagttggcaatccaaacattctctcaagtaaaacaagcaagtattctccatgttctcaatactcctccctcagaaatggtctcagagttctcatcttgggtcctttatcagatttactttatgaaattgaatataatttctgcagcaataaaatggaaataatagcatttgcctccctcctaaagaaatgtggtgaacaagagttggtcagcaacacctagaatctggagtatctctcatgggttccataaatagttggcataattaataattgctagtaaagagattgtgttattaatatattactgaggattaataatcatgtattataatctttccagaaatgacaaaatgtcatcactattaaaatcttcttcaaaaaaatacctaatgttccaattctctgagattactgtcctaccctcttttcttctcaaccctccacatccgcccctca

SEQ ID NO: 522917 - DNA, 421 bp, Homo sapiens
aggtggggaggagtggggaggtgggggtgtctgcacctggtccgtgggcctggcccgagccacttccccagggcaccctggcaggtgggaaggagtggggaggtgggggtgtctggggatgcggtgctgcccgtcaggggcttaggtgaagaggcatggcatggtggctggctaaggaatcaggcaggaatggggctgggcacatgtgatctccttactttgcttggggtaacttgcaccaacacactggggaaygggggacgtggcgagtttagggtctgtccccatgctcagcacacagtagttggcccgtgaagaggccttgtggaggctgggggctgctatgtgccggatgatggagtcctctgggcctgtacaaggggcaggacctgggccctgggatcaggccaacctgagtcac

SEQ ID NO: 522918 - DNA, 562 bp, Homo sapiens
ctgggcccagagaacagtgtggcagcatttaaagcagcaaagagacccgccgtctgcacctgacggggaaaacgcgctgtgcctctcctcagagacagacaggtctgcctgtttccatgccaccatcaggggagtgagcacggggaataatcagccaggcagcctcactcagcctcacctcggctccggagatcgttctggagctgagtggtgacgtcagcagcagggctgagcacaaacaacaaggccaggcgccaagacgaccaggcgagggsggcccgggggacagcaccactgcacggtgccctgaagggggagcaggtgccacggcacttccccgagaccgcatgcgggggctgcagctggaatgggacctgcaccccactcaggtctgcctgaagggctgtcagtcaagaaggaagacgggacccagcaaacagaagccacgacctcccagcggccctggacacacatgaccaacgcaccagcagtaaacaaaagggcctgcaagggtcacccccggggccacccctcccagcaggtggtgatggatggcccgcag

SEQ ID NO: 522919 - DNA, 562 bp, Homo sapiens
ctgggcccagagaacagtgtggcagcatttaaagcagcaaagagacccgccgtctgcacctgacggggaaaacgcgctgtgcctctcctcagagacagacaggtctgcctgtttccatgccaccatcaggggagtgagcacggggaataatcagccaggcagcctcactcagcctcacctcggctccggagatcgttctggagctgagtggtgacgtcagcagcagggctgagcacaaacaacaaggccaggcgccaagacgaccaggcgagggcggcccgggggacagcaccactgcacggtgccctgaagggggagcaggtgccacggcacttccccgagaccgcatgcgggggctgcrgctggaatgggacctgcaccccactcaggtctgcctgaagggctgtcagtcaagaaggaagacgggacccagcaaacagaagccacgacctcccagcggccctggacacacatgaccaacgcaccagcagtaaacaaaagggcctgcaagggtcacccccggggccacccctcccagcaggtggtgatggatggcccgcag

SEQ ID NO: 522920 - DNA, 445 bp, Homo sapiens
gtgactcaggttggcctgatcccagggcccaggtcctgccccttgtacaggcccagaggactccatcrtccggcacatagcagcccccagcctccacaaggcctcttcacgggccaactactgtgtgctgagcatggggacagaccctaaactcgccacgtcccccgttccccagtgtgttggtgcaagttaccccaagcaaagtaaggagatcacatgtgcccagccccattcctgcctgattccttagccagccaccatgccatgcctcttcacctaagcccctgacgggcagcaccgcatccccagacacccccacctccccactccttcccacctgccagggtgccctggggaagtggctcgggccaggcccacggaccaggtgcagacacccccacctccccactcctccccacctgccagggtgccctggggaagtggc

SEQ ID NO: 522921 - DNA, 423 bp, Homo sapiens
ctggccgcagcccctgcccccggtgccctcgtgttgggacagcggtgctcactgtgggcctgtgcagccgccggtggtaggcggtgctacacagcttccgagccttgctgtgttgtgtgctgcagggatgccggtggtccgtggtggacagacagtgcccggccaggcccctctctgctttgacccrggaagtccagccagtgacaagacagaagggaagaaaaaggggcggccaaaagccgagaaccaggccctccgagacattcctgtgagctccctcagggccatggtggggctcatgctggggtctccctatccagccactgccctgccctgatttgtcctctgcacatctggtaccaactctatgcctcaagatgtgggcactggcctggcagacttcacgtggcctggctttgtatc

SEQ ID NO: 522922 - DNA, 540 bp, Homo sapiens
tgctgtgtagataaaactcaaagcagatatcacaagttttgtcagatcatactgtctcaattttgaggtgaatgcatgtgttttactacttaactacctctgaaatttaggggttttttgtttgttttgagacggagtctcgctctgtcgacaggctggagtgcagtggcgcgatctcggctcattgcatcctctgcctcccggcttcaagtgattctcctgtctcagcttccccagtagctgggmctacgggcatgtgcaccatcacgcctggctaatttttgtatttttagtagagtcggggtttcaccaggttggcgaggctagtctcgaactcctgagctcgtgatccccccaccttggcctcccgaagtgctgggattacaggcgtgagccactgcgcctggccctgaaatttcgcatgttttacggttggcttgttagggttaaattggtgcaccttatacttggttgcatactagactcactggaatgatttgactttcgtcatagttgcagaggcactctgaaaccctacgt

SEQ ID NO: 522923 - DNA, 626 bp, Homo sapiens
aatttcgcatgttttacggttggcttgttagggttaaattggtgcaccttatacttggttgcatactagactcactggaatgatttgactttcgtcatagttgcagaggcactctgaaaccctaygtatgtgcttcaccagggacagccccacgcatgggaggtggtggccagccatcaccccagggtgaatttctctaagagcagtcctaggccagggggtgagtgtgggaaagtcagggccgtttccatcagttaacgtttcagagcgggttcccgctggaagtgctggaaatacccagatgccatctgtagcattttatgaactgtggcggatccactctctgtgtcttgagcttctgctctgtggtctgctcagtggaagcatcctgtcagtccactgtacagtggggtggagccgcagccagggtgggtgtgccgtttgattggtcacggaatgaacagggcaaaggtcactaagtagatatgatactgcaagtaggattgtggtcataggtatttttatgaatttgtgttatgtgaagttgaggatttgaatgttgtgattattatatccagataaagttctagcctggcacagtgcaggcacgtgcctgtggtcccagc

SEQ ID NO: 522924 - DNA, 426 bp, Homo sapiens
gaggacagtgtccgtgtgcacacacagggggcagtggaaggagggagcccagcccgacacgtgacagctctcctgggcccagagaacagtgtggcagcatttaaagcagcaaagagacccgccgtctgcacctgacggggaaaacgcgctgtgcctctcctcagagacagacaggtctgcctgtttccatgccaccatcaggggagtgagcacggggaataatcagccaggcagcctcactcagcctcacctcggctccggagatcgttctggagctgagtggtgacgtcagcagcagggctgagcacaaacaacaaggccaggcgccaagacgaccaggcgagggsggcccgggggacagcaccactgcacggtgccctgaagggggagcaggtgccacggcacttccccgagaccgcatgcggg

SEQ ID NO: 522925 - DNA, 564 bp, Homo sapiens
tcggccccaccctccgcagagtcagtcaaggatgtgcacagagaagtcctggcagccctaagstctctcccaggggcagacaggtcagccatgggtgtcagcttcctcctaccatgggtttctcttggagcttctagtactgaggcaggggctgccagaagctcagggaaaagggaagactccacatggaggtcatactcctcaatagtaggccactcctgggagctgcctcagaggcaggaccggcccatctgtctgtgtccacaggtgcttcctctcctcattctgctcccaggaggcggctacatccctcacttgggaagtgggcaggagacagcccagggtcggggaggcggaggctgtcctgagcaggggcgcagagtccgggctcctgggggccatgccactggctgggctgtctgaacagcagagtggacgcagactggtcttgcctggcatgggcatgcaccctggctgccctagccggccaagaggcaaggctacaggcctggggaagccagcactgtgctggccaggcgagggacggaggagcccaggcacgca

SEQ ID NO: 522926 - DNA, 614 bp, Homo sapiens
cctgattgttacgcgaatctagctttaacggaagcaaattcattattttttaaatgcagtggacttttcaaaaagtttaaattaggcaaagcagctttagcctcatagaatattatttctttggactcaagctgaaatacaagccttacattgccttatgctttatttctttctaatttttatatgtatatagatgagggttccttaatggttgtgagcattgtgtggaattttacacctggcctgcgtggcagcctcttccagttgaggtgttttatgtcacgcacactccatcccagtgtacaaaacctgcttctcttctcaaccgtggcagctcccgctggctcctatgccctgccctaaagggctcttgagcctctgggaatgggaggggccaagagaaggaaaaccctgtctttagcaccctttaaaagaactgtgccccccttctcagtgctgcctttgcatgggcctggcccggctcrcattcgtcagtgactccaaccctcctgcttgctgtacttgggatgaaacgaccccacaggtcaggtggagggtggggcgtgggcatcagccaggattgccgttacagtctttttctcaggagctacaaa

SEQ ID NO: 522927 - DNA, 355 bp, Homo sapiens
cagccatgcagggtgggtcttaaacagttttttagattctcgagtataaaggtataatattgaagaataagcacamataatgtcatcatacatgttaaagtgacaacacaggatttacaaaattacccttttttccccaaaattacctcttacgatgtggtttctgttggtgctgttttctcttgcatcatcccgccaggttgggtaaccctaactgattgtcaccagcagaccaacagacagactcacagcatccttctccctggtgtgagcactgcttaattcacatttatgaaaatactttaagacaagggcactgtaactcacatagaatctgaagtggccttgaacaggg

SEQ ID NO: 522928 - DNA, 590 bp, Homo sapiens
tgcatagaaatcttgtaattccagaattagtcaaacaaatttgaaatacacacatttaaaaatacttacattctcatttagcrttcatgaagtgattactgacatttacaattacatctgacatcacagagcaagcctttgcagggatctaattcaagcttaagccaaatctatgcaaagaacttcagctcagaggaatagtgggcaaaatctgctgaaaagaactgcttgccaccttgcagataagagcaacagcacaataaagggattccagagcttctacctaaaatagaagggcattatctacaagaacagaccaaaacacaatttatttttaaacaagcccttcagtgagtatttgtctcaggaatctagtatgaaaatagtgtctttgattagtgaatatatggagaattcggattatcatctctatttttagttgagaaaatgcacaaaccatatagatttaaaccatgggttttgcagccgaagtagagacagatgttttctgggatcatatctcagattcccaagctaaagctattgttcaaggtgatggaaatatgtagggggcattaaaccattttgca

SEQ ID NO: 522929 - DNA, 440 bp, Homo sapiens
gatacctcctaagaatgtgccttaagtccttgcattttagcaaagatatttgagacattttgggaactctccatagaagccaccagaccctccctgtgccccttcattcatccatctgtttgtccatccacccatctaacawttgttgattaagaccctgctatgcactgagtgaggcactggattccaggaggggatccctgcctctgtgatcctggagtcctgttagagtggacaactttgaacaagtcacggcactgatggctttattgcaggcagcacaggggagcggggaggtcgtggttgatacaggggtggcatcctgactgggggatgggcaattaggagagactcctctggagaagacaggcagtcaagccggaatctaaaggagaagcagctcagatgtggaatggtgtcgggatgggggaacagcatgt

SEQ ID NO: 522930 - DNA, 594 bp, Homo sapiens
ttctctcccacaactgcaagttgttgaaacatcttgcgggatgggattggaggaggcatatatgggaattttctgtactttctacctaattcatctgtagacctaacgtttctcaaaaatgaaattataataatttaaaaaggatacttgaataaccccaaagaaaacaggaaaagagaactgaaaggaagggaaggaggaggaggtggargaggaaggtaggaaaggtagaaaaagaaccgaataacaggcctaaccccaataaatgctgattctatctacgaatacttctaaaacaggccaaacaaatctgtggtgatagacagcagaacagtgtttgtctatggggtggaacttgattgcaaggagcataggaaacttactaggggtgatggatagttacacatcttgaccaaagtgatggttacaatggtatatacatttatcaaaatgcattaaattgtacagttgggattcgtacctttctctgcatataaatcttacttcaactttttaaaaaggattaaaaatgcttccttggtgagcgggacttctgtgtgaggcctgtaggcacagcagccatgctgtaggcac

SEQ ID NO: 522931 - DNA, 483 bp, Homo sapiens
cagagaagaaaggctgctggagagacatcatcagaggagagagacagtggctctaatccaagaatccaggcaacrtgtgtagggctcagggtggcatgtgtgtgttttcatgcccagcaccaggacctgagcactgagagctttccctacctgccatgggatcctggtatcaaggtgttgcccgaaggtttcagcaccatgtggtcaattgtccatgcatctttatgccaatctatcatccccgctgctgggtcccagagccattcaagttggtctgaggcattcagggcttgccatctcccagtgggcacaaggcagctcccctgcaagaacacttcccagctttgatgacctaaccctccttgctggggtgcagataaaggacacggcaggtgcactacctctgtaaccctcactcaaatatgccagtctgtgggctcatatgccttgacctccaaagcacagacatgccagctgggcata

SEQ ID NO: 522932 - DNA, 479 bp, Homo sapiens
tggggttctgggaagggtgctgaagaccagcttggatacccacactggccctgtcaggggtccttagagccagatgggaataagctaaaaatggggtgagatgttttagccctcagtattgatgtcaacggtgaaggtgtctgggtctttctccccctcatgccagctaagggtatgttaattcaccctgaatctgcccaggtcaatgttcaagactgtgcaccaggaaaggaaaacacttcatggagcaagaaacccagggctggcctagctatgktcctaacagagcactcactcctgcccagtgttgctggaaaatcaggggccgattgaaagcgccttccctgggttgtgtgacagtgagctctcaccactagacaatgggatctttatctgccttagggattttagtaaaggtgatctttcacagtcttgccttaaggcaaaatcgagccattgttctcatgccttatttcttc

SEQ ID NO: 522933 - DNA, 479 bp, Homo sapiens
tggggttctgggaagggtgctgaagaccagcttggatacccacactggccctgtcaggggtccttagagccagatgggaataagctaaaaatggggtgagatgttttagccctcagtattgatgtcaacggtgaaggtgtctgggtctttctccccctcatgccagctaagggtatgttaattcaccctgaatctgcccaggtcaatgttcaagactgtgcaccaggaaaggaaaacacttcatggagcaagaaacccagggctggcctagctatgtycctaacagagcactcactcctgcccagtgttgctggaaaatcaggggccgattgaaagcgccttccctgggttgtgtgacagtgagctctcaccactagacaatgggatctttatctgccttagggattttagtaaaggtgatctttcacagtcttgccttaaggcaaaatcgagccattgttctcatgccttatttcttc

SEQ ID NO: 522934 - DNA, 413 bp, Homo sapiens
gtgtggttcctgcaggtggagtttggccttgcccaggtccttggaggcacgacttctgtgtctggtggaactgtgcagcrtggctcagacccacaagctgtgtgatggcttatcatccctgtgtaggcagggcatgctgagccaggctgactggacacctctgttcaggaagcattaccatcctaccagcaagagcaggtgaatagtttacatggtaattagccagcatgcactgttcccatgtgttcattcatttgttgaaaaacaaaataagacaaaacactccttcctggccctactagctccctggcttttctagaatatgctaagcacaggccacttcagaaactgtgagttcacctctccccctgcctggatactctttcttgtggtgttctcctcatagctcacac

SEQ ID NO: 522935 - DNA, 636 bp, Homo sapiens
aattgctgtgtagccaaagaccccaaaactcaaacagcatttattattattgcccccatgtctgagagtcagatgtgcatttgctgatctcagcttgtttgagctgctgcagggttggggctctgctccaggcaggcttagctgtcaccacatgcacacatacattctgggcctctgctgygcgcgtcacgttcactgaagatcttgggattgggagttagggcggtgggagggcccagcaaagtcacctggcgatggcagggacacagggaggaatgtagaatggggccgatgatgggacccacacgtctgcaaagctgcggtctccttgaggggtggagacagcaacaactcaccgcacgcggtgcttcagttcaccatctccctgggacattaggggtccccgtgttatctcattttgctctggtttgcattagttttttatcacttcgtagatgaagccactgacacccagagagggaaagtggcctgaccaagggccacagcaggggagcgaaggagccccacagtccggcaggaacacagcctctccctggctttcaggttcactgacatcttctcatggcctctgtaactcaccaggcatcagggtgtagtccttagaccagtgtccca

SEQ ID NO: 522936 - DNA, 552 bp, Homo sapiens
ggtatgagggtcagagttgagatggagtcagtctgcagacttggcatggaaggcgagaactcacagagagagcacgtgtgctgtatgtgtcacgcaggatggcaaccgctcccagacgggcactgatggaaacagtgaatcagagaaagggctgaaacagtgccctgaagcctggccaggcagggtcactgggagcaccctggtggggtgtgcaattgtatggttcatttgcccaacacggcacaatgcacaacagagaaaatcaaatcaaactccagacaagaacactttgcttaagaaagcagatgtgagaaatgtgccacttgtttgtgaaagtttttcatcaaaacagctctcacagagatgggggggtttgatttaaatgagaaatgtgcttataaaaaacagatctttggtgagtaatgaatagctattatcttatctatttaattatgtatttaaacgacatatgaaatttattatattttcctaaacaastttgaattatgtttttgattatctgaagtgcaacaaagttcatctgcaatgatt

SEQ ID NO: 522937 - DNA, 640 bp, Homo sapiens
aaatttattagtaaccttaatgaatgtgaatagattgaattctcccattaaaagacaaagacttttgattgaataaaagaaaaaaaaagtgaaatccagctttgttgtttacaagagacaaacatgaagtgtcaccagaargctgaatttagggaaaaaataccagatattcatcagatgcagcagaatgaatcgggtatatcagttgtaaagtcatatataatataatttgaagtgaaaaggttcaaaaaggtatattttttattggtgaaggatgaaatctgccaaacacatattagtcccttcaccacgcggctgtaaatagaagacaaaactggtggaaatccgaggagaagctgacgaagccacagccatgggggatgagggcctggatggaggccagggcatgaggacttgcaggacggatgagaaggaaagcagacaagggcgtgacaccccgacaaacacacgtgggacaggaggcagcgatttcaacaatgaagtaaaacatttgtgatataacgtttttgggaaagccagaccctggagaaagaaggtagacgtcccaattattttcttccacctcacaaatttcattatttcatgatacttgaacacagtaggagccccacagagacag

SEQ ID NO: 522938 - DNA, 640 bp, Homo sapiens
aaatttattagtaaccttaatgaatgtgaatagattgaattctcccattaaaagacaaagacttttgattgaataaaagaaaaaaaaagtgaaatccagctttgttgtttacaagagacaaacatgaagtgtcaccagaaggctgaatttagggaaaaaataccagatattcatcagatgcagcagaatgaatcgggtatatcagttgtaaagtcatatataatataatttgaagtgaaaaggttcaaaaaggtatattttttattggtgaaggaygaaatctgccaaacacatattagtcccttcaccacgcggctgtaaatagaagacaaaactggtggaaatccgaggagaagctgacgaagccacagccatgggggatgagggcctggatggaggccagggcatgaggacttgcaggacggatgagaaggaaagcagacaagggcgtgacaccccgacaaacacacgtgggacaggaggcagcgatttcaacaatgaagtaaaacatttgtgatataacgtttttgggaaagccagaccctggagaaagaaggtagacgtcccaattattttcttccacctcacaaatttcattatttcatgatacttgaacacagtaggagccccacagagacag

SEQ ID NO: 522939 - DNA, 640 bp, Homo sapiens
aaatttattagtaaccttaatgaatgtgaatagattgaattctcccattaaaagacaaagacttttgattgaataaaagaaaaaaaaagtgaaatccagctttgttgtttacaagagacaaacatgaagtgtcaccagaaggctgaatttagggaaaaaataccagatattcatcagatgcagcagaatgaatcgggtatatcagttgtaaagtcatatataatataatttgaagtgaaaaggttcaaaaaggtatattttttattggtgaaggatgaaatctgccaaacacatattagtcccttcaccacgcggctgtaaatagaagacaaaactggtggaaatccgaggagaagctgacgaagccacagccatgggggatgagggcctggatggaggccagggcatgaggacttgcaggacggatgagaaggaaagcagacaagggcgtgacaccccgacaaacacacgygggacaggaggcagcgatttcaacaatgaagtaaaacatttgtgatataacgtttttgggaaagccagaccctggagaaagaaggtagacgtcccaattattttcttccacctcacaaatttcattatttcatgatacttgaacacagtaggagccccacagagacag

SEQ ID NO: 522940 - DNA, 480 bp, Homo sapiens
cttccactcagttgaattctatraaccaattttaaccacaagagaacatcatcatccaagttaatcacgacaaacctcaaatagaacccaactaccagaactcagagagggacaaccgctcatggagagtttggtggtggttctcctggggactcaggagagggcctgtgcctgagctgcatgctgagcacccttaagtcaatcacagttccggaaaaatgattgcacttgatctataccttttactctctctgcctctttcttcactttttcactgttgagctgttcataatttcctctgaaaagggagagttaggaggcattcagaggatctgaagggtaaacccattagtcattctgtttctaagcacctgtaatgtcaaatataattcagggaaaggctgactccgacttctctggttttcaagtttatcatctctgctctctgtatctcctcttgctgaatatacacaagagtca

SEQ ID NO: 522941 - DNA, 575 bp, Homo sapiens
cctgcagaaggtcccatcttcagccatagaatttttcccaggccttccttggatgggctcagttgggatgtttttcttttgtctggcttctttggatcagttacagtgttttgtgaataactacttcattctttgttattgatgagtaatactccattgtatggatgcatcacagtttatttattcactcaaatggccacgggggctgatttcagtctarggccgctggctgaattaagctgctgcaagcacataaggacaagtcttcttgtagacatgttgtcctttctcttgggtaaaaacctccgagtgaaattgctggtaagttaaagttccactttatatatactaaaataaaaagccaccaatctatttacaaatacaaatggtggtggaacttaccattgatattttttaaaaacaacaatacttgaatgatcattatcaaaagaatagaaaatactaagaagtttcaaaacataatttaaattatctgaaatagcttcaagtagcaacaacctttttttaaattataccttaagttctagggtacatgtgcacaatgtgcatgtttg

SEQ ID NO: 522942 - DNA, 575 bp, Homo sapiens
cctgcagaaggtcccatcttcagccatagaatttttcccaggccttccttggatgggctcagttgggatgtttttcttttgtctggcttctttggatcagttacagtgttttgtgaataactacttcattctttgttattgatgagtaatactccattgtatggatgcatcacagtttatttattcactcaaatggccacgggggctgatttcagtctagggccgctggctgaattaagcygctgcaagcacataaggacaagtcttcttgtagacatgttgtcctttctcttgggtaaaaacctccgagtgaaattgctggtaagttaaagttccactttatatatactaaaataaaaagccaccaatctatttacaaatacaaatggtggtggaacttaccattgatattttttaaaaacaacaatacttgaatgatcattatcaaaagaatagaaaatactaagaagtttcaaaacataatttaaattatctgaaatagcttcaagtagcaacaacctttttttaaattataccttaagttctagggtacatgtgcacaatgtgcatgtttg

SEQ ID NO: 522943 - DNA, 630 bp, Homo sapiens
agctggaggctacacttcccagcctgtcagaatggccaccctgcaggccttataaaaaataaagctctcctttccaaatttacaaaccttgtcattcttcagttgacatgtgcatcagaatcacagacataaaaaacccgactgcagggcctgatccctagatttgctggttcagtaggtctaggtggagcctgggaatttgcatatctaacaagttctcaggtaatgctgatgttgatgacatactttgaggaccactagctttaggtatagtctgttaagaagagttagggctttgacattgaaaaatagytgttgaatcagcccatatacaagtgacagatgtcatatttgcaggtctctaatctgaggaagacatatgatgaatgcttagggtcaagtgcaggtgagtcagtgaaggaacagacactgatacctgctgacacataaaaggcctcctctgttaacgggataccttggctaaaccactgggagatctatttccctttctagttccactaaaattcttttttaatttgtcagcgaacaactcacagcagccctccagcagatgaaaattttatcaaagtctcctcagctccactctgcagacaatcatctgttccctct

SEQ ID NO: 522944 - DNA, 486 bp, Homo sapiens
aacactacatcacatcattttgtgttttaaaaacatgttmcatttcccattttaataatccacaaacatcacgaaaagttaagtaaagaattctaatccttaatttctgaaggactatagactttttttctttaatgagatcttttggtcttaaagtatgtgtaattaaaagaaaagttatcaccttgcttttttgtacaatgcattgaaacaaagtcatctcgcattttactgccctaagacatgctaatgacatttacattcactgcacagcgttttaacaccttcaaacatagtatttttatgttaatttcattaacagtgatactgagaaagctgttcagtagcacagcagaatgccagaggaactcaagcccatcagatctgaagatcatggcaccatgctaataaaacaattaagagcatcccgcagggaaagacaattccgacaattaaccttcaatgccaattagtaccagtactgtc

SEQ ID NO: 522945 - DNA, 624 bp, Homo sapiens
ttatgagatgcctaacataaaaactctccaacttattcattacatagactgatacttcattttatctccccccaccatgccccccgccagcatattttctggctcatttgtccctttagttctcttctgtgtcatccagagtccagtcaggaaacaggaatcttagcagttatttcaattgaaaaaggttaacatagggaatcgattataccggggttggaaagctacaaagccaaaaagagacctgtgagccaacagcaatcctaaggatgggggaacaaattaaaagacattcgcgttatcagattccaaaagctcgaagaaaagacccccaaaacttaggctgagacctccacccakctggggctgataactcacaggctgcaggagggtcccagtacagccatccttctcaagctgctatctctaaggtacaatgagaattgcaccgacagtgccaaaaacagtagaagatagaagatgaggctgactgctgctgctggagggaagagctatggccggggcttctctgacagtaatgatgggtgaaaaaggaaggagtaggtcttctcctgcctgccagtttcataccagtgtcctatggcagaatctaacagggagcca

SEQ ID NO: 522946 - DNA, 500 bp, Homo sapiens
cttaaagtctgagtgaagctaagggcaagtacagaggggatgacccaggagcacagtgcctatgggactgactctacctaattgtagttgcttgaggtcartgtatcattgaatccacttgctcagatactggaccagagcaatttctactaccattgctctggaacagggcattgcaccattctcttagaaactggaccttaagaaactgtggccatttcaattccattttgatatttattacagatttcttagtagatgccagacagtgtgttaggtcccatcactcatattgccttagtatccattagggctaagtaccattttcttagctacactcttccgcatgtagcttatttaggaaaagtcgggcaagtgggttacagacatagtagaaaacattatgtcaaataacaacctgcccagcaatgaaagattttaccacgtcctttttgattcctatttttgctaaacaggtttaaatccttaaatggttacag

SEQ ID NO: 522947 - DNA, 500 bp, Homo sapiens
cttaaagtctgagtgaagctaagggcaagtacagaggggatgacccaggagcacagtgcctatgggactgactctacctaattgtagttgcttgaggtcaatgtatcattgaatccacttgctcagatactggaccagagcaatttctactaccattgctctggaacagggcattgcaccattctcttagaaamtggaccttaagaaactgtggccatttcaattccattttgatatttattacagatttcttagtagatgccagacagtgtgttaggtcccatcactcatattgccttagtatccattagggctaagtaccattttcttagctacactcttccgcatgtagcttatttaggaaaagtcgggcaagtgggttacagacatagtagaaaacattatgtcaaataacaacctgcccagcaatgaaagattttaccacgtcctttttgattcctatttttgctaaacaggtttaaatccttaaatggttacag

SEQ ID NO: 522948 - DNA, 491 bp, Homo sapiens
cctcaatgtaggaaacaaatgaacccagagctctccagtggaagggctcagaccagccaacaggcctctccaagctgtcccccgaagctcccactagaaattttaagtgtttttcttatagacatcaaatagtagggctttcaaaaaattatttatttatttatttatttttatttttttgacagagtcttgctctgacacccaggctgtagtgcagcggcacaatctcggctcactgcaaccyccgcctcctgggtaaaagcaattctcctgcctcagcctccccagtagctgggattacatgcgtgcaccaccacacctggctaatttttgtatttttagtagagacagggtttcaccatgttggccaggctggtctcgaactcctgacctcgtgatccacccaccttggcctcccaaagtgttgggattataggcttgagccaccgtgctcagcttttcatcctgacaatttctgctttttaattgga

SEQ ID NO: 522949 - DNA, 561 bp, Homo sapiens
agtatcatttattctagttaatcattcattaactcttcgtgaataaatgatctctgcacaagcctggatattttcacaggttgattttcctccccagcctccacaccccacactcacacaccccctaagacttcaccggctcttcacagctcttagttccaggaggaagaaccggccatccacagggtagagtagagatccagctttggatctttcgaaaaaggtaaatggaaatcaactggcaaaggtgctccttccatccagaatcagacaggccrctggccacccaaatggaaagaggaagtgcatgaacacctgcggggcaggcagagggcaggaccactgactggccagggtggggcatgatggagctggactcccctgttactcgatatgattctaaatattaattatataccttaagtccctttgaaatctgcaaagattaaaataataaggcttttggctttggaaggtggctcaatacaacactctgaggaacgaagacttagcccagagcttggggacagtcaactctccagtgactgcaacccatattag

SEQ ID NO: 522950 - DNA, 584 bp, Homo sapiens
tagtcagctcaattggacccctgccttatcgccaggacagagggctttctgtgtcccggggttcttgccttggtgtaccggaagaatcagatcacacctgcacttggggaatgagttcaggttttttgagwgagaataactcttggcagatgggggaagccagaaggggatggagtgggaaggttttcccctggagtcaggctactgagcggccaactcttctctgaccaccccagctaaactctgagttgttctgctggtcagtggcctgccggcctgccggtacctgtcaacgtgctcttaacatccagccgcctgtgtgtttacctgctagggtctcagggtttttatacgcacaggatagggacgtggcaggccagggtggtcttgggaaatgcaacatttgggcaggagaacaaaaatccctgtcttcacctaggtctgtagccatgggtctgggggtggagccctagccagggaccacgccctaggatggaaagacgttctctctgccctgggtggcataataacaaggcagataaaggctatattggaaataagcagaaggcacagtgggctccgca

SEQ ID NO: 522951 - DNA, 638 bp, Homo sapiens
ttgtacaatagtggtttcattagaattaccctgtgtcaaaagtaaaagctccatttctattatatcttgttattaaatgtttattgagagctatattattatctgggatacagctgtattttttctttttcaaaataaaatttttttaattccatgagtttaattaaattaataagcaaaaagcaagttgccatgatcaaacaaaggtagtacattgactttggaaaaactattgtagttgactgacaaactgtactacctacaaatctatacatattatggaatgaataataaagataaaagaataagtaaatttagaatgttaatgtaggagaaggaatgatagactccaaattcctagctatgaatactatcttatataaaagatatcatatataaaagatcttatctttatagcccatataaaatctttaggtaccatcaaatatgtagtacttggtctggaatatggcaaataccagctgatttaacaaaaataattaaayacttgttatttactcaaaaatgttcacaccagagaaataaaacttaaaatgtatcctctgaaagactagaaattttaatacacaatgaatacaaagaaaataacatttatctctttaagttatatatatgtt

SEQ ID NO: 522952 - DNA, 490 bp, Homo sapiens
ctgcattagacacagtacattggtagcgccccttgtcatttctccgtgcattctttaaatgtaagacttgtcctctgtctagaagttcaacattaggatcgcccaaaaataaaggcctagaaaaaataaaaytttattccatgggtctattttcagtttttcacatttcttatttatcacaacaaaaatcattagtacaggctaaaaatacaagtaaaagttaatttaaaaaataaaatgatatgattagcactccaagaataaaagttttaaaccactttgctaacagaagttaggtaatcataaatatctctttgagatgaaaagttcctccatttcaaacttaaattatataataatattaatagaaatccagtagtgtcattatttgttttattcattcatccattcttattcttttttcagctttttttaaattttttggtttgcatagctaaaattctaccattatctggaaaagaaaaattaa

SEQ ID NO: 522953 - DNA, 454 bp, Homo sapiens
aggctcagggaagaagtctgaactggagataaaaaattgggagtcatcagcacacagatggaattcagtcaagggagcggacaagtaccaggagaaataatgtcagcaagactcaygataacaatgatttcgtaatttgtttttataactcatacttaaatataataatggtgattttgtggaagaaaaatttcaggctttgagaagcctaatgggaggaattatttgtatgttatagcagtttatgaatataatttttatgcagtatcattcctccactcacttctactcaagacttacaaattatgtgcccattgtaaggagcaaaatattgaaaagggagaatgtcattttatcacaaagtgaattttaaatggcaaatataatttcacaaactagaattataaaattttaaatttatgattaccattaaaatgtcttacatcctaattta

SEQ ID NO: 522954 - DNA, 608 bp, Homo sapiens
gtgcggtgggttgggttacacaactttttgcagggaagtgatagacggagttaaatgcatggaccaaattgacttttatcaaccatggatttttaattaacagtggtgtccacttactgtcattcattatttactgtttacccactaattaaaaattatgctgtttttgcattcataagagcagggacatttgaaattagatagcattgttcaaattacctgcagaattaaatctagagttcccaattgctcagaccaggctaccggagcttaaaatatgacctgcttgaggccgatgtgttatcctgaatcagagcaccagaaacaggcctcatgaacaaataccatatggacctgcctggggccttccggggaaaggacactcactgagcacacccagaagtgtgggcacttggctaagattgtcttgagatcatcaaatggtgcccagcgtctcctgagcacacattctgggaggcccaaggccaggtgcttcatctgcatcatgaccttgagycctcacagcggcagcgtgtcagtaccttggcagagcccaaaggattgacaggtataatcgacacaaccacccgtgacatgggttctgtcaa

SEQ ID NO: 522955 - DNA, 608 bp, Homo sapiens
gtgcggtgggttgggttacacaactttttgcagggaagtgatagacggagttaaatgcatggaccaaattgacttttatcaaccatggatttttaattaacagtggtgtccacttactgtcattcattatttactgtttacccactaattaaaaattatgctgtttttgcattcataagagcagggacatttgaaattagatagcattgttcaaattacctgcagaattaaatctagagttcccaattgctcagaccaggctaccggagcttaaaatatgacctgcttgaggccgatgtgttatcctgaatcagagcaccagaaacaggcctcatgaacaaataccatatggacctgcctggggccttccggggaaaggacactcactgagcacacccagaagtgtgggcacttggctaagattgtcttgagatcatcaaatggtgcccagcgtctcctgagcacacattctgggaggcccaaggccaggtgcttcatctgcatcatgaccttgagtcctcacagcggcagcgtgtcagtaccttggcagagcccaaaggattgacaggtrtaatcgacacaaccacccgtgacatgggttctgtcaa

SEQ ID NO: 522956 - DNA, 624 bp, Homo sapiens
gagacgacatcctgggaggtatttccatgagtgatcttaaaactctggcttttggtttgttagcaagactttctgcaaataagaatctcggaattctgtttcttttcgcctccacggaacgcctgtcaccctcctctccttgcctccrtgttttcgactgtagtgaacatgctgaagccgtccgcccctttccctttacaatggaaaggaattctctggggtgggcttggaaaagtggagtcatcctccttggaaagtagacacctgagagggcgcggtgtccctgggcttagcgctgcgcacagccctcccctccctctaggcctctgaacggcagcacctgcgagaatcccaacgaaggacgaagccaggaggcagggatcttgttttcagaaggaatatgaaccaaaatatggtcagaacaagagaatggctggcgcgcaggcctggcacgcgggatcttcttggcggtggctgcagcttttcggggcctgcctggcgcgttccgctgtcatacgtgaggagttgccatttggaagcattgaggggaacctggattcatcttcatgtggttaacctgaagtgtattgcgaatatgagggctcatattcaagggtacggatg

SEQ ID NO: 522957 - DNA, 584 bp, Homo sapiens
tgctggaaaaaatgattctgttaggtaaaaatactatacatttttgaaacatgcaccaattatttagctctgtgattgtgggcaatttcttcaagcagcctgagcctcaatttccttatttgtaaagctgggaaaacaacgatgcccatcttggagggttacaggcacatagaaaaacaatcaataaatataagctgctgtttacatttgttctttttttwaaaatttttaaattttatttatttatttattttgagacagagtcttgctctgtcatccaggctggagtgcagtggcgtgatctcggctcactacaacctctgcctcccaggttcaagtgattgtcctgcctcagcctcccaagtagctgggattacaggtgcacaccaccacgcccagctaatttttgtgtttttagtagagacgggttttcaccatgttggccaggctagtctcgaactcctgaccccagggcatccactgcctcccaaagtgctgggattccaggtttgagccaccacaccaagcctacattagttctaacgaatagacagggtctagacacagtgagattagatgagtga

SEQ ID NO: 522958 - DNA, 584 bp, Homo sapiens
tgctggaaaaaatgattctgttaggtaaaaatactatacatttttgaaacatgcaccaattatttagctctgtgattgtgggcaatttcttcaagcagcctgagcctcaatttccttatttgtaaagctgggaaaacaacgatgcccatcttggagggttacaggcacatagaaaaacaatcaataaatataagctgctgtttacatttgttctttttttaaaaatttttaaattttatttatttatttattttgagacagagtcttgctctgtcatccaggctggagtgcagtggcgtgatctcggctcactacaacctctgcctcccaggttcaagtgattgtcctgcctcagcctcccaagtagctgggattacaggtgcacaccaccacgcccagctaatttttgtgtttttagtagagacgggttttcaccatgttggccaggctagtctcraactcctgaccccagggcatccactgcctcccaaagtgctgggattccaggtttgagccaccacaccaagcctacattagttctaacgaatagacagggtctagacacagtgagattagatgagtga

SEQ ID NO: 522959 - DNA, 584 bp, Homo sapiens
tgctggaaaaaatgattctgttaggtaaaaatactatacatttttgaaacatgcaccaattatttagctctgtgattgtgggcaatttcttcaagcagcctgagcctcaatttccttatttgtaaagctgggaaaacaacgatgcccatcttggagggttacaggcacatagaaaaacaatcaataaatataagctgctgtttacatttgttctttttttaaaaatttttaaattttatttatttatttattttgagacagagtcttgctctgtcatccaggctggagtgcagtggcgtgatctcggctcactacaacctctgcctcccaggttcaagtgattgtcctgcctcagcctcccaagtagctgggattacaggtgcacaccaccacgcccagctaatttttgtgtttttagtagagacgggttttcaccatgttggccaggctagtctcgaactcctgrccccagggcatccactgcctcccaaagtgctgggattccaggtttgagccaccacaccaagcctacattagttctaacgaatagacagggtctagacacagtgagattagatgagtga

SEQ ID NO: 522960 - DNA, 563 bp, Homo sapiens
cctcagaaacgcagcttggcaaaggcgtgcagccctgtagcctctaagaagcgtccagctatagctcagtgtgaacatcttcctaaacacaatccacatcactggcttcaggcttttcaggtagctggtaacaacggcaacatttctatgaaaaggctggtgaaaatgcggtgacaaaaaaacagactacagcctcctgcagcactgcacagggactggggtggcctgaagggccctgttcctacaaagctggcactggaaacaaatcttgcagggggcaggagagcttaggtagagcttcatacccaggcagaagagaagacagcaggragagcaggtctcttcatattttctgtccccacaactgtgtgggcctggcttaggtcataaaatggtgacattattgcctagccaggagcaatgtgtggctttgcatgcagacaataaaagctgccggagagctggctgcacggccagtgcggaaaggtgccctgggatccctgctcctcttcaccccatggctgggcctaaccggaacaaggacagggaaggtggaccacaga

SEQ ID NO: 522961 - DNA, 614 bp, Homo sapiens
tgtgcagacaaacatgtccacacccagaatgctccagtgctgctgtgcagcaagtgcctcagaaacgcagcttggcaaaggcgtgcagccctgtagcctctaagaagcgtccagctatagctcagtgtgaacatcttcctaaacacaatccacatcactggcttcaggcttttcaggtagctggtaacaacggcaacatttctatgaaaaggctggtgaaaatgcggtgacaaaaaaacagactacagcctcctgcagcactgcacagggactggggtggcctgaagggccctgttcctacaaagctggcactggaaacaaatcttgcagggggcaggagagcttaggtagagcttcatacccaggcagaagagaagacagcagggagagcaggtctcttcatattttctgtccccacaactgtgtgggcctggcttaggtcataaaatggtgacattattgcctasccaggagcaatgtgtggctttgcatgcagacaataaaagctgccggagagctggctgcacggccagtgcggaaaggtgccctgggatccctgctcctcttcaccccatggctgggcctaaccggaacaaggacagggaaggtggacc

SEQ ID NO: 522962 - DNA, 621 bp, Homo sapiens
gctgactttttttgtctcttgcgcactggcccacgtggccagcccagacaccaggagatatcactatcctggcctgagaactagggatagatggtcagatctgtctggggagagccactataaccaaagggagccatctctgggtctcttggcttcactccttgcctgcggccagagaggtatttaaagattggcaaaccccaaatctgagtttgtcacatccctgctaaaaacccaagaggggttccaactgaccttaagctcaagcccaagagcctcacctttaaaggcctagtatcatccagttctgctacctcccaacaacatacccctttccctgggctttcaaaagaccatggcccactcctgcctcagggcccctgcacaactgctaatactaacaagagctaacatttattgagcactaattatgtaccacgcactgtgctaagggcttcacaggtgtcctctcacccctaccctgtaaggtaggcaatggagccaagtggcgaagctccagagcccaaaragctggacttgaattctgccttggaccctgtgtgatcttgggcaacttacctaatgtttctgtgcctcagtttcctcatctataaaataggg

SEQ ID NO: 522963 - DNA, 389 bp, Homo sapiens
tggtgctgtctttctgggtggcctatggcaaaactctttatcccatgggtcctgttcctcatctgtacaatggggacaggagccttccattttggatggttgtgaactgcctgtaagataacacargtgtttgttttctattgctgcataacaaatgaagcagcttaaaaacaccaatctagtgatttacaatcctgtaggtcagaagtctgggcagcctgagctgggttctctgcttagggcctcacaaagtattggccagactgggctcttctctgcaggctctggagaagaatccgcttccaagatcattcaggttgttggcaggattcagttccttgtggttgcaggactgaggttcctgtttccttgctggctgtcagccagaa

SEQ ID NO: 522964 - DNA, 616 bp, Homo sapiens
tactttggacgggtcatttcggctcaccgagcctccctcatctccttcgcctccctcgtctccctggtctcctttgcccccctctgctgaatggagctgtcagcccacgcaggcagggacgggaggaatcagtaaatcgagtttgccaaaaggctgacccaggagtgctcagaaaacgtccaaggggcttggagataggtgaagcggggctgggagaccaagtggctggatttgcttttccttgcctggttgcctcacacttgctgtgtgaccttagacgagttgctcaacctctctgagccagagttttctcttctgtaaaayagtgtcgctaatcggccttatctcagggctgtggtgagagttattattcaggagacagactatgcacagacaaggcctgtgctaaaacatgacacatacagagcactacaaagaaaagatcatttttttattattgcaattgttattgttaccccatgagaatggggacccagtctgtcttagggactgctgtatgacccgtgcctagcatgcagtagatgatcaataaatacttgttaaaggaatgactgataaccacaggctctggactctgccctcagggatgcagagc

SEQ ID NO: 522965 - DNA, 656 bp, Homo sapiens
gttttgaaaggggctcgtgaaactagattaggcagataatctttctgtgttaaagttaactgtgcattaaaatgtaagataatcatggaggtgatagttcatagattccggatattagggtatggaaacttggtggctgttattaaaattatgcctaccaccagacagaaggacaaagttaagaaagagtgaaatagtagcatgttcttcaaataggctggtttcatgcaagatattttctctttcacttaatcttcataacagcattacatgataagtaatgtgcccattttatagatgaggaaacttcagctactgaacctgtctcctaaagtctcagtgtcagcaagtctaatccaagactccacatttgtatgtcaaaataagagaaaaacaaattttatataaaaattataaagtaattaaaggcttgatttcttttagggaaaatgatatgatcattgacaagcttatccaagacaactattcaccatattaccccctgcttccatatttccacttgtcttcactcaattcttggtgatcttgggtctacagattttatgcacaataagctatacccttccctgtgtccttccaaaatgtwgcaaggaacatactggttagataccaggctttttaccctagctaatatg

SEQ ID NO: 522966 - DNA, 570 bp, Homo sapiens
tcaatcacttttgcctcagcctgtcagtaggtatcaaagggtgctaagcactgcctcaattataggtgtaacccacagtcctggacacaagaatctatcaagagatctttacctaacctgagtatatttcaggctgatggtgatccactttgcttttctgataattgaaaatgatttgcatttacagaccatrggagcagacatgggaccccagtggcagagcacttaggagggatgaaagcaaacttgccaacctgggccatggtttatatcagccctggaatcattgtcctggatgagtacttgggtactacaagtgatgagcagaagggtactacatacctgccactcaaaccagcagcattgacatcacctgttaacttattagaatgacagcatcactagacttacctcaggcccaccaaatcagaaagtgaatattagcaatatcccaggtgatctttttgcacattcactttagggagtgttgttccttatcagtatcaagaggaattcattcccaaagtttgtaaaactttccagaaacgaccttcagcctgccacctaggc

SEQ ID NO: 522967 - DNA, 576 bp, Homo sapiens
gctttttaagagccaaggggtccccagtgaatgcaaatcacaccagcgcatgagaaatgattgactctgagagctttgccgaaatgactactaatgttgaaatcacactcagctcagtacatttcctgtgggctggtgctgcagtgggtgtactgggggcaggcaggggggattcccaaagagggaagtttctatgcaaaccccgcagcccagatcaggtttcagcctctctttgctaattccccttgcatttttctttcccctaaaacatttaaacttaaatagctatataagttcaratgttcttttatagagtgaaataaacagcttttatagcctgaaaacagcaagcttagagatcaactgttcaccactgaagcaggcatgtttaagctaaagaaatagatggcattctcttcgttatcgttagctatatttttcccccaaactaataggaggtagcatataaattagctgccatataagttgtcagggaaagaagttaatgcagcctccaggcattttgctgcaaggctgcccccctctggctcccaccacgacccacaacatgatttg

SEQ ID NO: 522968 - DNA, 275 bp, Homo sapiens
gaacaggcgtcggagcggagagagcccacgaggcccagaggctgggggwaaggggctgcaggccgggctgcggaggccgagcagagtcgccagccggtgcctgaccgcccggcgccccatctcctggggccgctgcctcgccctcggcctggaacacaaaacctgggccctagccctgcgccctgtgctcagcacttccactggtcttattttattgctgttttgtccaattaggtatcgcagcgtcctccacccggtgttgttttcaaatgcga

SEQ ID NO: 522969 - DNA, 516 bp, Homo sapiens
atccatcatgggcttttgtcatatcagattagtcagtcatgggtttgggggagtaacttgcctgggtcggggtgtacccacccttcaaactttgtggagcaggcccgggggtcttgggaaacacgaaggcattcctatccagccccagtcattcggatcccccaggcctagcggctgcacacttgtgagatggcggagggactgcagacccgggtgcrggaggccagtgccagcgaagagaggtgggcaagggaggcccctccagcgtcctgctggggttgagttggggcgactcgtcccgtggccgctgggtcgtctggtttcccctttccgaaagaaatgagaggagacgcaagtggagtcgctgaactttgattaaaccatagagaagacagtgggaggagggaaaaaaaaaaacagatcggagaaggaggaggaggtggccgagagatcgaggaaaggaagtcctagaggctctggggaatttggaaatctctccaaggggctgaaagctgg

SEQ ID NO: 522970 - DNA, 516 bp, Homo sapiens
atccatcatgggcttttgtcatatcagattagtcagtcatgggtttgggggagtaacttgcctgggtcggggtgtacccacccttcaaactttgtggagcaggcccgggggtcttgggaaacacgaaggcattcctatccagccccagtcattcggatcccccaggcctagcggctgcacacttgtgagatggcggagggactgcagacccgggtgcaggaggccagtgccagcgaagagaggtgggcaagggaggcccctccagcgtcctgctggggttgagttggggygactcgtcccgtggccgctgggtcgtctggtttcccctttccgaaagaaatgagaggagacgcaagtggagtcgctgaactttgattaaaccatagagaagacagtgggaggagggaaaaaaaaaaacagatcggagaaggaggaggaggtggccgagagatcgaggaaaggaagtcctagaggctctggggaatttggaaatctctccaaggggctgaaagctgg

SEQ ID NO: 522971 - DNA, 516 bp, Homo sapiens
atccatcatgggcttttgtcatatcagattagtcagtcatgggtttgggggagtaacttgcctgggtcggggtgtacccacccttcaaactttgtggagcaggcccgggggtcttgggaaacacgaaggcattcctatccagccccagtcattcggatcccccaggcctagcggctgcacacttgtgagatggcggagggactgcagacccgggtgcaggaggccagtgccagcgaagagaggtgggcaagggaggcccctccagcgtcctgctggggttgagttggggcgactcgtcccgtggccgctgggtcgtctggtttcccctttccgaaagaaatgagaggagacgcaagtggagtcgctgaactttgattaaaccrtagagaagacagtgggaggagggaaaaaaaaaaacagatcggagaaggaggaggaggtggccgagagatcgaggaaaggaagtcctagaggctctggggaatttggaaatctctccaaggggctgaaagctgg

SEQ ID NO: 522972 - DNA, 533 bp, Homo sapiens
acctgagagctgcttctcaaccttggacatcccctcaccacaggcactgcttcagtccgggaggttttcacttagaattagcttctcttgagatcccagaatttcagagactctcacccttttcatttcctatagctattagaatttacaaaggggccaccccaagaggagacagaggaattgacaaattgacctctaagaggctcatctcttatcmgaaaagcatatggtccccagatcaccagtgatagaagcagaggcagatacctctattagttggaaaatttgtagttacatagtaaatggagtttctacctggttgctacaataataggccaagcgattaggatacaagtttccaggatcttttcctatatttccaaaaagataaatcacccctaggaacagaatctgcatattgtaattaactgataaatatttcatgcctggctcaaactttctcctcttctatttaatggccacaaacttgagcacagaggaaacagcagtgaggagagtgggggttggctgta

SEQ ID NO: 522973 - DNA, 533 bp, Homo sapiens
acctgagagctgcttctcaaccttggacatcccctcaccacaggcactgcttcagtccgggaggttttcacttagaattagcttctcttgagatcccagaatttcagagactctcacccttttcatttcctatagctattagaatttacaaaggggccaccccaagaggagacagaggaattgacaaattgacctctaagaggctcatctcttatccgaaaagcatatggtccccagatcaccagtgatagaagcagaggcagatacctctattagttggaaaatttgtagttacatagtaaatggagtttctacctggttgctacaataataggccaagygattaggatacaagtttccaggatcttttcctatatttccaaaaagataaatcacccctaggaacagaatctgcatattgtaattaactgataaatatttcatgcctggctcaaactttctcctcttctatttaatggccacaaacttgagcacagaggaaacagcagtgaggagagtgggggttggctgta

SEQ ID NO: 522974 - DNA, 470 bp, Homo sapiens
gtggttgtgagaatttaaatggcataagcatataaaagcatttggcgtagagtctggcacatagtagtgctcactaaatggtagtcattaaagatacaacctgggacagtggcagctagtttaacaaaccaccacaccccrtagcacctctcacctgggtgcaagttccccaggccacactgcagtagctgctcgctgagggtgtccccggatatataagaagcctctctgagggccacagaggttttttgatggcagatggtttaaaacatcattttttattaagttgtataaaatatactacgttataaaatgcaaactttgcatcattttagagctaaaacttaaggccacaaaagaatctgctattttcttattaataaaaaatcctatttttatataatgcaaataatgaagatgaagtaacctattatttaattaaacatgtcttttttttttttttaaaaaaa

SEQ ID NO: 522975 - DNA, 470 bp, Homo sapiens
gtggttgtgagaatttaaatggcataagcatataaaagcatttggcgtagagtctggcacatagtagtgctcactaaatggtagtcattaaagatacaacctgggacagtggcagctagtttaacaaaccaccacaccccgtagcacctctcacctgggtgcaagttccccaggccacactgcagtagctgctcgctgagggtgtccccggatatataagaagcctctctgagggccacagaggttttttgatggcagatggtttaaaacatcattttttattaagttgtataaaatatactacgttataaaatgcaaastttgcatcattttagagctaaaacttaaggccacaaaagaatctgctattttcttattaataaaaaatcctatttttatataatgcaaataatgaagatgaagtaacctattatttaattaaacatgtcttttttttttttttaaaaaaa

SEQ ID NO: 522976 - DNA, 399 bp, Homo sapiens
tgcagtgagccaagatctcaccactgcactctagcctgggcaacagagtgagactccatctctaaaaaaaaaaaaaaaaaaaaaaaaaaaaggagtgttacattagttgtctatatgtagatacacttgtcaaaatttaagccataaaaccctcagtgtccctcactgttcccacccccttagcctggcatactgggtctttcacaagcttgtgtcaacctcctctacagactcatctytacactgagggacttgcagtttccaagtcctctggccttgggacctttgcccatgctgttctcttctgaatgccctttcctgctttgctactttgttcttgcccttctggattcagctcctgggaggccctgtggattgaagtcagatggctcaagtagg

SEQ ID NO: 522977 - DNA, 538 bp, Homo sapiens
tggatccttagggcctatatagtgcttgccacataggaggtgctcagtagacacttatggatttgagtgaatggacttcagtttctccacttacaatctgagtaagaggaagatattctttgccctctctccctccttctccagccacattgggggttgtggttgatgctgtgaggtcrttcctgccttattcaacttcatgtccaaatcttctaatggcaaaacaaaacatggtggccaagtctcagagtccaggcatccctcccatagcccatagccaagtatgggagaagggtgcttcagggtctctctccattcactttagtctccagcattagccaagatcccactgtctaccctgaattcttcctgctattgcacaaggcttctttcatcttactgtattgtcagggaaaatatagccaagattatctgctcctcaacctgaagtaaaatatagattctgcctaattttagaaccggtgttagccaggtgtggtggctcatgcctataatcccagcattttagaaggccaag

SEQ ID NO: 522978 - DNA, 538 bp, Homo sapiens
tggatccttagggcctatatagtgcttgccacataggaggtgctcagtagacacttatggatttgagtgaatggacttcagtttctccacttacaatctgagtaagaggaagatattctttgccctctctccctccttctccagccacattgggggttgtggttgatgctgtgaggtcattcctgccttattcaacttcatgtccaaatcttctaatggcaaaacamaacatggtggccaagtctcagagtccaggcatccctcccatagcccatagccaagtatgggagaagggtgcttcagggtctctctccattcactttagtctccagcattagccaagatcccactgtctaccctgaattcttcctgctattgcacaaggcttctttcatcttactgtattgtcagggaaaatatagccaagattatctgctcctcaacctgaagtaaaatatagattctgcctaattttagaaccggtgttagccaggtgtggtggctcatgcctataatcccagcattttagaaggccaag

SEQ ID NO: 522979 - DNA, 451 bp, Homo sapiens
taggtggaagtgggggcattgtcacagtgggataaagatgtacagtatcccctggtactccacacccatggaaggaaaagcgcttggaratgcacatcctcatatagcccacagtcattagggctggaggaacacacacacagaggcacatatacacactcagacccccatctctgattcaaatccactcttcagcaaccaaccccccaaccccacccacctcacatcatctgatgtcctcacactccatccctcctgtgaggtatttcctgaaacactgcttctcaaacaccactgtgcatacaaatgacctgggacctggttaaaatgcagattctgactcagtagatctggggtggcacctgagctctgttttctaaccagcttccaggtaaggccagggctgcttctccaaagattttaagcagtggtcctcccacattagaagggc

SEQ ID NO: 522980 - DNA, 575 bp, Homo sapiens
agctgcccacttctgtctaagggccctaggccagggaaaatgccaaagtccttctattctagtcccagggaccttctgactcccaagtcagtctagcatggggctgttgagattattgttcccaccccagccagggaccagggcctcataggcatcctctgagaccaagggtcttggatgatstcttgggatcacagtctgctctaacattcaacctgaaagttctgcctgtggtttgaccttctttcctcttgctgtagccaaggtgtcttcttttaccctgcatgaaagatgaaagacagtagctccccatttagtgggggctttgggactgtgtgatatctccccccgccttcactttaagcctcccagaaaagcaggataaaaagatgcttcaaagtcagttggagagatggaactctgccctcttgggggttgccatccctctgccaccctcacaggtgctgtgacagagggaacatatgttgctcctaccccagaggatggagacaacatcttagcagccacagccccacagagctgggctcagcaggccttgacagaactggaaaggc

SEQ ID NO: 522981 - DNA, 532 bp, Homo sapiens
ctgcccacttctgtctaagggccctaggccagggaaaatgccaaagtccttctattctagtcccagggaccttctgactcccaagtcagtctagcatggggctgttgagattattgttcccaccccagccagggaccagggcctcataggcatcctctgagaccaagggtcttggatgatgtcttgggatcacagtctgctctaacattcaacctgaaagttctgcctgtggtttgaccttctttcctcttgctgtagccaaggtgtcttcttttaccctgcatgaaagatgaaagacagtagctccccatttagtgggggctttgggactgtgtgatatctcccyccgccttcactttaagcctcccagaaaagcaggataaaaagatgcttcaaagtcagttggagagatggaactctgccctcttgggggttgccatccctctgccaccctcacaggtgctgtgacagagggaacatatgttgctcctaccccagaggatggagacaacatcttagcagccacagcccc

SEQ ID NO: 522982 - DNA, 215 bp, Homo sapiens
tgtgctttgatagcacccactcaaatgtrcagtgacctcatctagctcctcctgatggaggaatgaggggagtagcaagtgacttcctttctcacagcagcctttctgtgagctctttcttgagagaaatcttgatccatggcaaaccgtctgtggtattcttggctgtagcccttggtgggagatgggaggagggaatgacagtgccaaggatg

SEQ ID NO: 522983 - DNA, 215 bp, Homo sapiens
tgtgctttgatagcacccactcaaatgtgcagtgacctcatctagctcctcctgatggaggaatgaggggagtagcaagtgacttcctttctcacagcagcctttctgtgagctctttcttgagagaaatcttgatccatggcaaaccgtctgtggtattctyggctgtagcccttggtgggagatgggaggagggaatgacagtgccaaggatg

SEQ ID NO: 522984 - DNA, 179 bp, Homo sapiens
tgggtgtccctccaccctcgkgcagcaaggaaagaagagattttagtggacaatgggcagtcttaatccagggctcaaacccacgcctgagctgtcctcttcctcttctcttcccaaaggaagggaaataaagtctacagcccagaaaacaatgtgaccacccatcccctacccaatca

SEQ ID NO: 522985 - DNA, 179 bp, Homo sapiens
tgggtgtccctccaccctcgtgcagcaaggaaagaagagattttagtggacaatgggcagtcttaatccagggctcaaacccacrcctgagctgtcctcttcctcttctcttcccaaaggaagggaaataaagtctacagcccagaaaacaatgtgaccacccatcccctacccaatca

SEQ ID NO: 522986 - DNA, 462 bp, Homo sapiens
agctgtctttcttgggaaagtggcttggaagcctctctccagaaagaccacccttctgtccatcttcttcacatgggtggatttgagaaaagtttctgtccccactgcctgcctgccactccctgtctcagtttcagctcacgctctagcccttcgttcccagtcaccaagaatgactacaaatgcgggggaacaggaggacttgaaacagtcatggaaatygagactggggcacagaagccatgctcagaggcagcgtaggtgagggttctgatgccaggaaatccagctactactgtgtaacctaaagcggggattaagctctcagaacttcaatgaactcttttggaaatagggataagaaacccacttgtcagggctgttgtgaacatcaaatgtgatcatgtatgtacctagtacatagtatgccttcaataaatggtaaggcaaacccaaggcaaa

SEQ ID NO: 522987 - DNA, 462 bp, Homo sapiens
agctgtctttcttgggaaagtggcttggaagcctctctccagaaagaccacccttctgtccatcttcttcacatgggtggatttgagaaaagtttctgtccccactgcctgcctgccactccctgtctcagtttcagctcacgctctagcccttcgttcccagtcaccaagaatgactacaaatgcgggggaacaggaggacttgaaacagtcatggaaattgagactggggcacagaagccatgctcagargcagcgtaggtgagggttctgatgccaggaaatccagctactactgtgtaacctaaagcggggattaagctctcagaacttcaatgaactcttttggaaatagggataagaaacccacttgtcagggctgttgtgaacatcaaatgtgatcatgtatgtacctagtacatagtatgccttcaataaatggtaaggcaaacccaaggcaaa

SEQ ID NO: 522988 - DNA, 462 bp, Homo sapiens
agctgtctttcttgggaaagtggcttggaagcctctctccagaaagaccacccttctgtccatcttcttcacatgggtggatttgagaaaagtttctgtccccactgcctgcctgccactccctgtctcagtttcagctcacgctctagcccttcgttcccagtcaccaagaatgactacaaatgcgggggaacaggaggacttgaaacagtcatggaaattgagactggggcacagaagccatgctcagaggcagcgtaggtgagggttctgatgccaggaaatcyagctactactgtgtaacctaaagcggggattaagctctcagaacttcaatgaactcttttggaaatagggataagaaacccacttgtcagggctgttgtgaacatcaaatgtgatcatgtatgtacctagtacatagtatgccttcaataaatggtaaggcaaacccaaggcaaa

SEQ ID NO: 522989 - DNA, 392 bp, Homo sapiens
gaagctgagaattgtggaagctggggatgggagttttgagatggaggaggcaggcgygtgaaggaggtcagggaaaggcaagtaaatctactaatcattgcagtttataaaataaaaaccttaaaaatggtttaacatgcaaaaggttaaattttaaaaagaggccaggttttaaagaaggtaaaatacctcaattttagacataataaaaatgaggaaaatactcaaaacatttcaagcaaattgttcttcagaagaggagaggttggaattaatcaagagacctttgttacacacacatcccccaagagtttcccaaacaataaattcatttacaaaacaaaataggaatcaacacaaaacctcatccacatacagagaaaaataaattg

SEQ ID NO: 522990 - DNA, 392 bp, Homo sapiens
gaagctgagaattgtggaagctggggatgggagttttgagatggaggaggcaggcgtgtgaaggaggtcagggaaaggcaagtaaatctactaatcattgcagtttataaaayaaaaaccttaaaaatggtttaacatgcaaaaggttaaattttaaaaagaggccaggttttaaagaaggtaaaatacctcaattttagacataataaaaatgaggaaaatactcaaaacatttcaagcaaattgttcttcagaagaggagaggttggaattaatcaagagacctttgttacacacacatcccccaagagtttcccaaacaataaattcatttacaaaacaaaataggaatcaacacaaaacctcatccacatacagagaaaaataaattg

SEQ ID NO: 522991 - DNA, 556 bp, Homo sapiens
gaaaaactagtgagggaggagaaaaatgaataaactctaaatccattaggtgatatttataaatagcaaaattggaggatggaatggagaaaagagttgaacttatcattaaagaagtaacacatgtgaaaacataaggtgtaactcatccccaaagaaaagtaaactctccataaagtagcaagtatagaaatttattgaaaaggaggaaagtaccactcacccccccaatataagcgtattaatttgaattaaaattttctccaaatccgagataggttacrcaaaagaatacaaaaagattatttttctttcaactaagaggaaaaacaaaatccgatttaaattcactaatgggacaagaagggaggctgtggtttgcaggtgctagtaaacgggatgagggttgtgaagagtttgaggggtagaggaccagcttacctcgctttggagccgcagcggccaacaggagtgggcaaaggaccctgccagtgcctgagtgataggggaaataaggaataggggattcgggtgcccctagacgaatgaggaggat

SEQ ID NO: 522992 - DNA, 614 bp, Homo sapiens
caaaatggccaatcacaagtattcttccccatttatcatattttcaatttaagttgtaacttactaaactcagaaattttatatgcgtttaggggtaaaactgcatggctggctcagaggaaaaagyctgtgattttctagctcctgcctctctaaaatcttacagtagctaattctgtggctggaaaaaacctccaaaactctaatgttatgcaaatgtctttaattctggcatttttggggttgaatttaaccttgttcctttttcataatgtgccaagaaaacctatattaatgccaataaagcatgtcctctgtcttttggattcatgacaacattcaagaaagtctttttaattcttagtatacttggagtaacagtgagaagcacacctcaaatacactacaaggttatttttacttaagcatttatgtggcatgtcatgtttagtaagggacacagacagatgactctgggtagcatgagtcccaacggtggcacaaactgcccagacatacccctgggagccaggagtccttcttgaataagaactcaaggagtccccctaaaacacagtaaagcaaatgttgagattgacagtcaagtactgggt

SEQ ID NO: 522993 - DNA, 614 bp, Homo sapiens
caaaatggccaatcacaagtattcttccccatttatcatattttcaatttaagttgtaacttactaaactcagaaattttatatgcgtttaggggtaaaactgcatggctggctcagaggaaaaagcctgtgattttctagctcctgcctctctaaaatcttacagtagctaattctgtggctggaaaaaacctccaaaactctaatgttatgcaaatgtctttaattctggcatttttggggttgaatttaaccttgttcctttttcataatgtgccaagaaaacctatattaatgccaataaagcatgtcctctgtcttttggattcatgacaacattcaagaaagtctttttaattcttagtatacttggagtaacagtgagaagcacacctcaaatacactacaaggttatttttacttaagcatttatgtggcatgtcatgtttagtaagggacacagacagatgactctgggtagcatgagtcccaacggtggcacaaactgcmcagacatacccctgggagccaggagtccttcttgaataagaactcaaggagtccccctaaaacacagtaaagcaaatgttgagattgacagtcaagtactgggt

SEQ ID NO: 522994 - DNA, 603 bp, Homo sapiens
atccacattatgtcctttaatcctcctaacaaccaatgaaggggccattatttccaatcaacagagaaaaagatggaggcctagacaggttgaataagttgtctaaggtaagtgctaagtggtttggctagtaggtaacaattgaatgttacactgaaatgtacaatccataygtgctgtagaaattctgagaaacagaaaacgatttggatttggattaagtggtcagagctgtcatagaaaagttatggcttgaactgagtatcattaaggtaaaggatttaaggtttgataaaataaatcagaactgtaggatggaagagccattatgagcccagcaatgaaactggagtgatcatggcctctatgtggccagtatcccagggtgcttggcagaatagtgggagagaaggctggagaggaggcttagccaaagaaaagaagtttgatgaaactgctttttctcacaagaccttatgggatttacttcacctagctttttgtctccagctacttttgcctccttccacatgacgcatacattagctacgctcaattgatatttattgaatgcctactgtgtacaaagtacagtgtaagaaa

SEQ ID NO: 522995 - DNA, 647 bp, Homo sapiens
ctgaccacttcaaccctaatgataaccctaatatgatactatttggtggtcactaataccttaagaataatcaatgtatacgctgtgctgtttaaacaatatattctaaatattctattaccaatagctttttcttttcacgtatctctgacatgagcatgctacaattaagacagktctaagttaatgtttatgattttgacatattagttaaaaaaaaaacaaaggatttttctaacttctgtgggcacctcaatcaaaaatttttaaaggaaattgtttacttattggaagtaatctaccatctaaagaaaatctcaatacttaagactaaagcttattctaaaagaaaatacaccagccaactacaattgaaccttgaatgacatggtttgaactgcatgggtccacttatacatagtttcttctgcatctgccacccctgagacatcaaaaccaacccttcttcttccttttcttcatctgcctgctcaacacgaaaatgatgaggataaagacttttgtgatgatctacttctgcttaataaatagtaaatgttttttcttttgattttcttaatattttctttaacttattgttaagaatgtggtatataatacatgtaccatacaaattatgtttatat

SEQ ID NO: 522996 - DNA, 369 bp, Homo sapiens
cccatagcaaactcttccatttgttcctctccaagctgttttctctgctttgaatggatctccccccacttttcacgaagccaacaggtttcagctgtgcttccagagttggggaagcctcttctgtactcccatggcactaagtatctcaccctgcatttatctctcagacaataggatttaacaatgggttttcttgtctgcatctccaccagtgtataggccccagaaggcagagacttctttgttctctgccttatccacccgtaaagcaagggatgcacaccatgatgacctttggaattgatgagctatctgatgcctttatcgatacttttgtggcayattgagcaaatttagagcccagta

SEQ ID NO: 522997 - DNA, 450 bp, Homo sapiens
gtacagtctccatcactgtttctctggctctcctggagtttctttaagatrccaaatatcctttagtaaacattctttctgctctaattagctatagaaggttcttattttgttgttgttgttttgttttgttttaagaaataggatctcactgtgtcactcaggctggagagcagaggtgcaatcagagctcactatagccttgaactcctgggctcaagtgattctcccacttcagcctcctaaagtgctgggattacaggcatgagccactgcaccctgccgggttcttgttcatgactagcatctaagagccctagctgataaaagggaattcaggttctgttcaggctagaccttcacctgacactgaaaatgctgtcctcaaggccacctgaatgctggctctgtggagtactctatggtactccagactctagtgctccctct

SEQ ID NO: 522998 - DNA, 591 bp, Homo sapiens
attattagcttctctaaaagtcaattttttacattaatctccactactttctcctctataaacccctgttccccaagaaatacaagcacacacacacaaccaccagcagcagcagcagcagcacccccatcaccaccaccacaacctggaatacccaggactatgaaaaagtcatgacacaccacgtctcactagaatgtaatcttcatgggcagacttgtctattttgttcagttctctatcacagcatgtagaatggtgccaggcagatattaggtacccagtaaatatctgttaaatgaatgaatatcttgccctaaaatacatctatccatttgtttatcaaacgaagaacaaatgcttatggagacatgggctcaggcactggtgtgtgtattaggaaagtcatggctctgcccatgagcagttcgaaatgagttaacgttactaatgacccccacaatatatgttttgtcacttctgtgagcccaattggagcttctttttagtgaagctctggggcagtacaggtaggaggtcttcataaccaagaggcaatgccttcckgctcttcatctcagttttaggcca

SEQ ID NO: 522999 - DNA, 528 bp, Homo sapiens
gaacatgcctttgagcttttattctgatattatttttaaaagacgctatggcaccaagagtggtttcttctttaaaatgtcattttgtgtcttggggaaaaagaaaaaaatctgccgtggctctttcaccagtcaaagtaaatactgaagaaatactttgcttgtatccacagctctctttgcaagagtagaatttccatgacctgccagactggctgaagaggcaraggcccctttcaggctgggggttatagaggacgtctgtagcagtttttacccttcttggattggatcctcagggtacatcacagcattgcttgaaaagtaagattatttagatacagggcttttcatcaagccaaggatgctaccagatgccttgccaatagaccttatcaagagtctccacagttacatattttttgtggttatattgttgttataaataccaagacttcaagaatgatgatacttcctgttattttaatcatgagaatggaagcatatttgctccacagtgtggcaaat

SEQ ID NO: 523000 - DNA, 528 bp, Homo sapiens
gaacatgcctttgagcttttattctgatattatttttaaaagacgctatggcaccaagagtggtttcttctttaaaatgtcattttgtgtcttggggaaaaagaaaaaaatctgccgtggctctttcaccagtcaaagtaaatactgaagaaatactttgcttgtatccacagctctctttgcaagagtagaatttccatgacctgccagactggctgaagaggcaaaggcccctttcaggctggrggttatagaggacgtctgtagcagtttttacccttcttggattggatcctcagggtacatcacagcattgcttgaaaagtaagattatttagatacagggcttttcatcaagccaaggatgctaccagatgccttgccaatagaccttatcaagagtctccacagttacatattttttgtggttatattgttgttataaataccaagacttcaagaatgatgatacttcctgttattttaatcatgagaatggaagcatatttgctccacagtgtggcaaat

SEQ ID NO: 523001 - DNA, 548 bp, Homo sapiens
tcgtatgaaaagcatgatgtaaattccacagaacttgggggtgggggtgggggcaggggccacataaaaactccataatctctagaattcctattttcctacttacaggtcttactggtcatgtctggtgtagggtggttgctcttgaggggcttttagaaatacacagctaagggcacagcaggggagccctgatttttaacaaatccagaattgtatttaaaaaaaaatacacaggtaaataaacaagctggggctggcccaggtgtactgatttgtgtacttttataggataatatataacaaattgattactggccaatccaagaggggtttttgtttatgttttggggcctttgtttttagagatggcttcttgttgcccaggctrgcctcagactcctggactcaagcgatcctcctcccaagtagctgggaccacaggcctgtgccaccacacctggcaatccaagagttttttgacctatcttcttaatttctgtaaaagcaatcagtaacagatactgttggtgaacgaatacgcagca

SEQ ID NO: 523002 - DNA, 582 bp, Homo sapiens
ctggcacattcagatccgtcttccacacagcagccagcatatctgatctagaatgtaccctgaccctgtcgctctccatctcaccctcaagataaggcccaagaccttctgcaaggcatatgaggtccctctgagtggaccctccctggcattgcagccacggctgtctcctcctgcctcctgttcctgctgttccatgttcttagaaaacccttcccacctctctcctacatgggtactgcayctcatcttcaacactcagctcaggtgtcatctccttagtttgggcaaacagctctccctccagcttttagtctttggcatagtatatttcatctacctgctcaaggtctgcttccctcatgctctaggcactttatgaacaaggaccatgccacacggctctcaggcaacaggaactgggtaaatgtgggttcatctaaataaaacacatcttctaccatttggtcttcataaggtggccttgacatgtataattctccctgtttaactgactggtaattagggaaacaggctctccagtgaggcagatccaagttcgaaacccagctctgccatgag

SEQ ID NO: 523003 - DNA, 347 bp, Homo sapiens
ctgcacctcatcttcaacactcagctcaggtgtcatctccttagtttgggcaaacagctctccctccagcttttagtctttggcatagtatatttcatctacctgctcaaggtctgcttccctcatgctctaggcactttatgaacaaggaccrtgccacacggctctcaggcaacaggaactgggtaaatgtgggttcatctaaataaaacacatcttctaccatttggtcttcataaggtggccttgacatgtataattctccctgtttaactgactggtaattagggaaacaggctctccagtgaggcagatccaagttcgaaacccagctctgccatgaggca

SEQ ID NO: 523004 - DNA, 347 bp, Homo sapiens
ctgcacctcatcttcaacactcagctcaggtgtcatctccttagtttgggcaaacagctctccctccagcttttagtctttggcatagtatatttcatctacctgctcaaggtctgcttccctcatgctctaggcactttatgaacaaggaccatgccacacggctctcaggcaacaggaactgggtaaatgtgggttcatctaaataaaacacatcttctaccatttggtcttcataaggtggccttgacatgtataattctccctgtttwactgactggtaattagggaaacaggctctccagtgaggcagatccaagttcgaaacccagctctgccatgaggca

SEQ ID NO: 523005 - DNA, 489 bp, Homo sapiens
actagttcaaggccacagaaatacagcaagggcaggagcaggattggaaaccagatagtttggctccaggatccatgttctttgagctctaacacttaactccttctgggtgtcctgatcttccccaaggcaccgacaggctagaggggtcagccagggagagaggtgtcacttttgtggaagcacagcttctcaatgggtacgatgagggactctgtccatccagtcaccattcgctgtaagctgagtctatgcctgactctggtctcacctctagagccaaggacaaagaggacatagtccytgccctcaaggagctcaaaggcaagaagggaaagaatggcaaatacctacattcttatcatcgcaatctgccatgagctaatactgagccaagcacagcctgctaattggggagaccgccccaactgtggattactgagaaccagtttgccaacttccccctgggccagcacaggtagctggcat

SEQ ID NO: 523006 - DNA, 617 bp, Homo sapiens
gtcttcaaataccccaggagatgtgtggaaactcgctggttccttatacagactgaatgtttgagtcccctgcaaattcacagtttgaagcctgaactcacaatgtgatggtatttggaggcagggcttttgggaggtaattaaggttagacaagtgcatgagggtatggcccccatgatggaatgagccccttataagaggagaaagagagactgtgtgctgtctctctctgccactctgagcacacagcaagaaggtggccatctgcaagccaagtagagagccctcaccagtcaccttgatcttggatttgccagcctccacaaccatgagaaagaaatgtctgctgtttgagctatcctgtctatgatattttgctaaagcagcctgagctcagatagttctctagggactcagagtcactgccactcattcctacatcatacatgtggcatggagagacctgcttyccattttcagtgcttgctctgtacaggccatgaaaataaacatctaaggcctagaggcccatgttttgccttcagatctctagggaaaaattaattataaattttccatagacatcattgagcaaaaataaagcagatttttttaa

SEQ ID NO: 523007 - DNA, 292 bp, Homo sapiens
gggaagggcagtttctccccaggcagggaggcctcagatgccagagcatcaagaatacagaaaataagaacatagacctaatacacactgttaacttcagaaagtgactytcactttttgctaatgtgaattggtctctccagattttgggcaattctaggttgtagagggcattcattgttctcatctggctagcatctactcccctttaatggtaacagcatgccaattttcctttagggaaccaaccctctattccacattaaattcatgtagtttagacaggggctga

SEQ ID NO: 523008 - DNA, 533 bp, Homo sapiens
caccctgaaatcttctgagtagcaaaccccaaccaccctctaatagctagcttgtttgtataggcagaatgattcatctctccattttacatggctagacgttttgtggaagatcttagaattgcttgcctcatttactgggaaaaatcagataggagtggcctctaggaacacttttgcttggaaagttacaacactagtacaacaagtcttaacacatttaacatttgcttgttaaaaagcaatgtcataaagtcagataaaattaaacatgttttacttttttcctcacaagaacataaaaattatggaggggaacataacagggaatttaaaaaaggtaacacaatttttccttttagtagtccttcrgtagctatgacagaatagtttcacttttcgtttgtttctttgaactggggttttggtccaaagttttgtttgcttctagtatctgcttctgcctccccctctatcagatcggcttcctccacggccaccacctcttggtgctctgcagcttgaactgctgt

SEQ ID NO: 523009 - DNA, 642 bp, Homo sapiens
gccagcactacaagaactgctaaaaggacctctaagccttgaactaaatccttgaaatacatcaaaacagaacttttttaaagcataaatctcacaggacctataatgcaacaatatgcacacacaacaattacaacaacaacacaacaacaaaaaaactcaaacaaccaagatatgcaaacaacaaatagcaggatgaatagaatagtacctcacatctcaatactaaatgaatgtaaatggcctaaatgytctacttaaaagatacagaatggcagattggataagaattcaccaaccaagtatctgctgccttcaacagactcacctaacacacaaggactcacataaatttaaggtaaaggggtggaaaaagacattttatgcaaatggacaccaaaagcaagtaggagtagctattcttatatcaaacaaaacaaactttaaagcaacagtaattaaaaaagacaaagagggacattacataataataaaaggtcttgtccaacaggaaagtatcacaatcttaaatatatatgcacctaacactggggctcctaaatttataaaacaattactactagacctaagaaatgatatagtgccctctcttttcaagatctctgcccctacaatttccag

SEQ ID NO: 523010 - DNA, 552 bp, Homo sapiens
cagcctggacaacatggtaaaaccccatctctactgaaaatacagaaattagctgggcttaatggcctgcrcctgtaatcccagctactcgggaagctgaagcaggcgaatcacttgaatcaggaggtggaggttgcagtgagccaagattgcactactgcactccagcctgggcaatagagtgagactccggctcgaaaaatgaaatgaaataaaataaaataaatggagaagtgtttttgtatattgacccacaaaaatacttgcatgtagaaacttttaattttttttattgatttgggaggacatgttcatgtagtctctgaggcctgagttccctgtttctgtggatcagtcactgttaactagctcaccctgttcccccaacctcacccatgctgtagcacttccaatatgtgcttaaaaccgtgcattttatttgtaaggctgatgatcttcttcagggaatattgagcaggatctattaaggaacagttgctttgacttaaatgaaaaagtctttgcaactgacagataaaatcttgagtgaaa

SEQ ID NO: 523011 - DNA, 550 bp, Homo sapiens
tgaaagtttccttctccctttcatccttccccaagtccacyggcagccctcccctagtacccctgtgagataaagtaaaaaatggcttcccagtggggactgggagtgcctatcgggctcttcctgctgttcttctactttcatactttggttagctctctaaattcatttcagctctgggtaaggttaaatccttctcccatgatttggattttcaggttccccagtgaggatgtgtgttcagaggggaagtttccccctctcacactttgggcattcagttttttggctgtctaacaaagtttgcagcagcaaagctgtttatttcaaactgaaaattatttcagttttcctggtatgttgctatggtagttctaggagtaaatgttcacaatgtgagcctccacacactgttctggggctgaaagaacaaaagaaaaactttcattgccattgtaaaggaaggaccacaggtggaggtcagcaacagagggtttctgctctgatatttattattttttttcttctacgaattttggctttagtttgt

SEQ ID NO: 523012 - DNA, 550 bp, Homo sapiens
tgaaagtttccttctccctttcatccttccccaagtccaccggcagccctcccctagtacccctgtgagataaagtaaaaaatggcttcccagkggggactgggagtgcctatcgggctcttcctgctgttcttctactttcatactttggttagctctctaaattcatttcagctctgggtaaggttaaatccttctcccatgatttggattttcaggttccccagtgaggatgtgtgttcagaggggaagtttccccctctcacactttgggcattcagttttttggctgtctaacaaagtttgcagcagcaaagctgtttatttcaaactgaaaattatttcagttttcctggtatgttgctatggtagttctaggagtaaatgttcacaatgtgagcctccacacactgttctggggctgaaagaacaaaagaaaaactttcattgccattgtaaaggaaggaccacaggtggaggtcagcaacagagggtttctgctctgatatttattattttttttcttctacgaattttggctttagtttgt

SEQ ID NO: 523013 - DNA, 550 bp, Homo sapiens
tgaaagtttccttctccctttcatccttccccaagtccaccggcagccctcccctagtacccctgtgagataaagtaaaaaatggcttcccagtggggactgggagtgcctatygggctcttcctgctgttcttctactttcatactttggttagctctctaaattcatttcagctctgggtaaggttaaatccttctcccatgatttggattttcaggttccccagtgaggatgtgtgttcagaggggaagtttccccctctcacactttgggcattcagttttttggctgtctaacaaagtttgcagcagcaaagctgtttatttcaaactgaaaattatttcagttttcctggtatgttgctatggtagttctaggagtaaatgttcacaatgtgagcctccacacactgttctggggctgaaagaacaaaagaaaaactttcattgccattgtaaaggaaggaccacaggtggaggtcagcaacagagggtttctgctctgatatttattattttttttcttctacgaattttggctttagtttgt

SEQ ID NO: 523014 - DNA, 550 bp, Homo sapiens
tgaaagtttccttctccctttcatccttccccaagtccaccggcagccctcccctagtacccctgtgagataaagtaaaaaatggcttcccagtggggactgggagtgcctatcgggctcttcctgctgttcttctactttcatactttgrttagctctctaaattcatttcagctctgggtaaggttaaatccttctcccatgatttggattttcaggttccccagtgaggatgtgtgttcagaggggaagtttccccctctcacactttgggcattcagttttttggctgtctaacaaagtttgcagcagcaaagctgtttatttcaaactgaaaattatttcagttttcctggtatgttgctatggtagttctaggagtaaatgttcacaatgtgagcctccacacactgttctggggctgaaagaacaaaagaaaaactttcattgccattgtaaaggaaggaccacaggtggaggtcagcaacagagggtttctgctctgatatttattattttttttcttctacgaattttggctttagtttgt

SEQ ID NO: 523015 - DNA, 631 bp, Homo sapiens
cagtcccacgtacgtgtactcctacccagatgtctccgtgtccaaggagcctgaaacgagctcagcttccacgccctaatctgatcctgattatttcacatgtaagtctatctattcaacagtgtttcaaacacttttgatggaattatgcagcatacaagctggaaaaaattcttctcccttaagagcccatttgcttagatgcaacatgttcagaataacctagttagttgcttagtgagggtctagtcctcttcatctattttttgtcttcaccacatttgtcttttgccatccacagtgcctagcactgtgctaaataaatgcaacattgcctttaaacatttctttggactgaaaactggcttggggggatcatttgactttaccagtggctggttttgacatttatgtcagcaatttcgcagtttcttcttctaatgtttatttttaaaggcaaaagtgcsaagttaaatgattcccctctcccataacatacatttccttcttctctttctacttcctgaaccatttttcattgtggctatgtaagctcttccatttacctagtatcagtgactctttaggtaaaaatctcatttttcattctctgtgccatcagtaatagaag

SEQ ID NO: 523016 - DNA, 575 bp, Homo sapiens
tagcttcccacaatgtgcattggtgcctgtgttggaaacactggatggcatttagtagacttctggcctgacccagcatgttcattcatgtgcacatcaggtttctccttccattcctccatgactcagaccaaaggcatttctctatactcgggaggtcttttccatattttccctgtagccctcctcttcttcattatcataatcatagtattattactttgctttttaaaactacttttgcattcattcagtatttcatgtcagcagttctcaaccttgacactctttgtaataacgtggagagcttaaaaaggatactcatccctgggtcccacgcccagagagtctgatgtaatcagtgtsgggtgtggacagggcattgggatttttaaaagctccccaggtgattgcagtatgcagtcaaacgttgggaactgctttttcataagagtctcattattacctgaggagataggtggggcaaacgtaatcctgtttttgtagataaggaagcttgtgctctgagacatttagtgtcttagaagaaagagaataaaatcatctagtgacag

SEQ ID NO: 523017 - DNA, 575 bp, Homo sapiens
cattgaccctagtactgcccactaatcgggattctactaactgggaatgagtgaaaactcctagagggactggactttgacctttgttaagctaacttcttttccaaaggcaggttcaggcctttgctagttcaatacccattgctagttcagaattctctgaggaattctcaagactttgctcagatgacactgtctgtatggaaccttcagcatcccctccacctctgaggccaagttaagctctcctccattccttctattagtccttgtagtagtcatggttctctagacaaacagaatatgatttcttatataactaaatgatttattgtaaggaattggctcacatgattatggaggctgagaaagccagatccaggaaagccaataatgtaagttccagtttgartccaaatctgaaggcaggagaaggccaatgtcccagttcaaagacagtcaggcaggacaaactaattatttcttactcagactctttattctattcaggccttcagtgaattggatgaggtccacccacattggagagagcaatgtgcttagctcagtgaaca

SEQ ID NO: 523018 - DNA, 593 bp, Homo sapiens
tatgtcaataagctattgttccattaaaaagtacaggaaaattaactggcttaaaacaacaataatttattcttcttcacgcttctgctacttgattgagagttaactsttctgcacttgggtttgtctagccctgggtttgtctgcacttagctccagatggtagacagggtccaatttttgctgaccttactcttgtctttattagacttatgggctagccaagaaatgttctttccatgacaaggtcaaaagcacaagaactgaagttgccaaactcctacttgagttacacctgtggttatactgaccgaagcaaatcacgtggataagcccaaagtcaaagggtagggaagtatactccatctctagtggaaggaacttcaatgtcattagcaaaggtaactggggtaaggagagggccagggattgctttctggagaggacactaagaggatggacactaggagggatgaagaatttgggccaataattcaacacccttattgttattgtgagtgatagatttgaggggaagaagactggaggttaagaggctatttcaaagatggtaaaagtccagagcagtggca

SEQ ID NO: 523019 - DNA, 550 bp, Homo sapiens
tcctctcaaaaagaagctccagttactagggtgaccaggttcctttcaaaaagaagctccggttactggggcaaccaggtccctctcaaaaggaagttccagttgctagggtgatcaggttcctctcatgggcttttctaggctgaggcctgatcagagcccagtggacaccaatgacatcaaaaagtggaggttgtcacaaaggcaactccctgaccaatgaggggctggagcatagggatacagtgggtggcaataagcactggtaccttgagaggctcaggccagcaggaaaatcaagctgtgccaattggggcaaaacccagcaattcctcatggctggaaacaaaatgttctgtaggcytaggagacaacgcctttcccattccagaagagcagagctgcagtttcctgtcagccacttggaacgctgcctgcgagaaagtcagcatgcccggcacctgagctcaaccacacctgttttcctggctggtgttctcgagtatctgacagccaacatcctggaaaaggtgggcaaggaggtcaagaa

SEQ ID NO: 523020 - DNA, 628 bp, Homo sapiens
acaagaaaatatcacctattgtcataaaatcagtagaaacagacccaaaaatgtccagttgttaaacttcatagaaaaagactaaatcaattattatgtattcaaagaacaaacagaaaataggttcaaagaatgaaaggaaaatatgatctttataaatgyacagatagtgaatttcagcagagaaatggaaactataaaaataaccacatggaaattttagagcttaaaaaattatagtaactgaaattaataacacactagatgggctcacattagtttggagatggctagcatcaaatgagcttgaagacagatcaaaagtaatcatccaatctgaaaaaaatggaacaaaacatgtatctctaaactttttaaaggtgttgtattgacttcttttgtatgagttttttaacataagaaagtaataactctcttggtacttcaagctagactcacgttttcgattctccaggacaccacctttggggttccccactgtagctaaaagggacctggctatggtaacataaatgggtaatcaccttggcagaagtgatcttaacaaaaatttcacttacttcaactaaagattcagtaccatacaagcactgagaaaacctcactc

SEQ ID NO: 523021 - DNA, 634 bp, Homo sapiens
caagctacttacattaaggtgtttgttcagaacattgaactttcaagagctgtctgaccatgcatttcatatgtatgaaggcatttctgcttattttccaacactaactcactttgaatgctgcaaaaatgatctatgctatgttaatgcctgaatatgcatgacttcaaaattctccaggcttcaggtggtctcctgcaccataagcctctactgcagagcatcctcttagacatccatcttgaactattttttccttatgtcttagtctatgactttagatctcctaactartggttgatttttcagccaattttgttgttgttgttgttgttgttttttgatgcgagaggttgcccattctcaaaacccacttccttcttccaaccaatgcccattgctacaaggcccgcaactgtgttcagctttcagcatgctccaggggaacaagtacaaagtctgacctggatggaattagattatgcaccaaaataattccaggatttactaatttatatcattagaaacctagaatgttaggccaaggaagatgtaatataacactggattaggccaaatgtattgatatggtgcatttttcagagattctggatttagtgtgatacttcttgca

SEQ ID NO: 523022 - DNA, 581 bp, Homo sapiens
atagcatgttcaaaggccctgaagtgggaaagaacttggtatatttatgaaactttaagaagaattatgttgctgaatcctatctcctatctgtagacaggagatgaccagagggaagagggagcagattaggcagatctttacaggctatgggaaagaggtataaatttcattaaaaatataaaggaaaactactggttggttttaagcagaggaaccacatgatgtaagaaatattttaaaagagtatkgactaatgatattgattattccatggagagtagattggaagggaattgaaagtagggacacctaataggcaccttttcaaaattctaagtgagattgcatggtggttccagtttaatgcagtcttatttgaggcaaatattccatctattttagacattttttaaattattaattattatccatttcaatctccttcccatatgcctcaaattcatacagcacttcaagccactgcagtgagccacagggaaggaataaaggttttcttttcctcttcttttacttctttttctcttttctcttcccctactaaggatctgtgcctgctt

SEQ ID NO: 523023 - DNA, 728 bp, Homo sapiens
gcctcatttagtagctacaaaatttacatagctgagaaggacacatttcccagaaaagtgaccctcaaactttagagtgcttaggaatcacctggagattttgttaaaagtgtagattctgacacagtaggtctgggaggggccctgagaattggcatgtctatcaagctcccaggtgatgctgatgcttctggtccggtccatggatcacacgttgagaaccacttttctaagaaaaaatggctgtcaccctctgagtcaaagaaattccctggggaaaaatgtgggcaggcaacyaattgattgcttccagccaggcatatcctggacaggtttggcaaagacaattgttctgtggctaggcctggacagcatgtcaattagacttattggtgaagacagacaaacctcattagttggaaaacgattgggttaactctaaggagtcaatgttaatcaggttatggcccagaaccagaaatgaatggtggtagctctaaagtgccacttcctgaaactcactgtaagtgcattaggcactgaatctggcctttgcttttagtgaaatggctgggcccttcctgttaaaggtctccctctcaccttggccctgcctcgaggactcacctgcagcattcctagctggagccggtaaaggaggtttcgggctgtgggtgtggacacaatgaggagtctccttttctcataaaactgatccagaagtgcag

SEQ ID NO: 523024 - DNA, 266 bp, Homo sapiens
tatctctaatcagaactttgtttttaaattttaatctcccatttattctaytggcaatattatggatgttgtaagattttatattatgtattgccaaaggtaaaataattaacaaaaatatattaaactgtatttcaaagactactttggaaagatcgagtgtctttctcaaaatcaagtcatagagtaagagcctagatctgggtctggaatgtcaatttaaaagcagccaaatatagccccaggaattcccaagtccagagact

SEQ ID NO: 523025 - DNA, 266 bp, Homo sapiens
tatctctaatcagaactttgtttttaaattttaatctcccatttattctattggcaatattatggatgttgtaagattttatattatgtattgccaaaggtaaaataattaacaaaaatatattaaactgtatttcaaagactactttggaaagaycgagtgtctttctcaaaatcaagtcatagagtaagagcctagatctgggtctggaatgtcaatttaaaagcagccaaatatagccccaggaattcccaagtccagagact

SEQ ID NO: 523026 - DNA, 580 bp, Homo sapiens
cacacattattttaggcatgaagcatgaaatagttattaacttcagaaaacgtttttataaatattataacacagtaaatgactttttgtgcatggctcatatatgtttacatcatgaaaattatatgaatgttatgtcaatatcgactctaaaccaatcctgggattattctatgcatgcagtaaagagtttggttggagggaaagtgtgcatgtcggttttagaatgattgtaagaaaatcaaatccccaacttctctggtaggatggctattaatatctaatggtgacaaattaaaaattgcagtaaaagagcctttcttagatatatgacatctcaaaagaaattgctaaaatagattaagttattgtttctaggaagcaaatgaagaaaatattgatgcaaagggattcttaaaaaaaaaaaaaamcaccttgtagaacttgtagtttttaaaactacttattatgtaatcccagcacttagggaggccaaagtgggtggatcatttgaggtcaggagtttgagaccagcctagccaacatgatgaaatcccgcctctactaaaaatacaaaaat

SEQ ID NO: 523027 - DNA, 662 bp, Homo sapiens
tgcttcccgggaggatgcccagcatgcggggatctgcaagggctcagtgctttgaattatttaaagatggagcagggctgggatatgggaaagtatcctgacttagagctgcagtgcgttctgccacagagagccatggggatgccctgctgatggtgaagacaaagtgcaggcggaagacaaagtccaggcagacttggttgtcaccatagtggatttcccagtttaagagactctattctgcagccaaggggctgctgccttttgtatccacccctcctccccaaaccaagaccaagaaatactccttctacctggtctttgaggcagccctgcccctttagaggagayggaagattggtcagaagctgtgggttcaaatcccagccccactcctgaagctgggcaacaccgggaagctgattgaactctctgggatctccctccactgtgaatgatgttcattcttaccagctttatgggtccaagtcattccaggcactatcctgggctttatcctcccacttgtgaataaagcacattcattgagcgcctgctatcttacaggtttacatcaggaaaacaaaacagatgacatccatgggctctcaaggaaattgcaatataatgacaaatttctctcaactgtttggcttctctgg

SEQ ID NO: 523028 - DNA, 352 bp, Homo sapiens
tgtcaggagctttgtggacgaggtagaatgctttctgaatcctgagcactgtgcaggacatgggtcctttgtcaactaccatcgaagaataagtggtaattttcggagatgcaaaatgttgggtgcagaatgcgagtccccctcccctgygggccgtgggctgcttggctgcggggtgagggtggtgggagtgagaacagtgctccctgttttgtgcacattgctactcactgtcgagttcagcatgagtgtggggaacagcccagccagggatttgtctcggggacacagaatgatggggtgcgcagggaagagggtgccgggccacaccctgttttctagcggacggtcg

SEQ ID NO: 523029 - DNA, 623 bp, Homo sapiens
cctatgacctctatatgacctctattactgggattgttgacaagaaaaattctttaattttttacttctgtaattcacaagcaaatataagtatcgagaacaaggctatttgtagttgtggtttcaagaatccacgccagtgctgtgagtgacctgcgggtgggaagatctttgtgctgggtatgaaaccacaatgacgaccacaaaggaaagatggcatctactgatgttagaggcacttgcttttattctcattagcatttgcccaacaagaactattcaatccttttgacagaagaagcaactgaggctccagaaggcacagtgacttttccaagtcacacagctaaggatagaggygccaggaagctggcccaggatgagagatggagagctgagattttttcctttcaggtaccactgcacacacccatgaggagagtacatctcacccatcaggcctgggagggtacgtacaaggcaggacgggcctgagagagttccccagcagcccctccctgttgcctagatctaggttatatcagtcctggacgagggcaaacaagaaggactttaacacaagacacccagatctgatgccccctgtttccttgccaggcagg

SEQ ID NO: 523030 - DNA, 623 bp, Homo sapiens
cctatgacctctatatgacctctattactgggattgttgacaagaaaaattctttaattttttacttctgtaattcacaagcaaatataagtatcgagaacaaggctatttgtagttgtggtttcaagaatccacgccagtgctgtgagtgacctgcgggtgggaagatctttgtgctgggtatgaaaccacaatgacgaccacaaaggaaagatggcatctactgatgttagaggcacttgcttttattctcattagcatttgcccaacaagaactattcaatccttttgacagaagaagcaactgaggctccagaaggcacagtgacttttccaagtcacacagctaaggatagaggcgccaggaagctggcccaggatgagagatggagagctgagattttttcctttcaggtaccactgcacacacccatgaggagagtacatctcacccatcaggcctgggagggtacgtacaaggcaggaygggcctgagagagttccccagcagcccctccctgttgcctagatctaggttatatcagtcctggacgagggcaaacaagaaggactttaacacaagacacccagatctgatgccccctgtttccttgccaggcagg

SEQ ID NO: 523031 - DNA, 571 bp, Homo sapiens
cattcttttgggtctttgatcagtgtttcactgaacacacaatttacatgtgagagggggtagagaaatagtcacttatgccttaggctgactcagtgaatctgcatttttacataagcagtagggcagaggaagccatcrgatgtgcatttgtctcaggtgggcagtgggatgactttgatgagttctgcctgtccattgtcccgcacctgtgaagggaagctatccatttacgttgccagggtgaaattcagcagaacagttttagggcaaagatcttgaagcccaagaagagtttctctgtggggaaattgtgagggaggatgtagacttccacacaatccttgtcactatcttattcgggaataaaatgggaggcaggttggcctgacgtgctttggcttagtgattttggggtccctagatttattttcctttcccaagtacttattacaaagtagcaggcttcaaacttggagatctcacaaccccaagtaacattctgttagaaaccatgggaccacccacaccgttgctgtggactacaagctcgtgtcactggcagctcaaa

SEQ ID NO: 523032 - DNA, 648 bp, Homo sapiens
actaagagggaaagggagagcatatttagaacactcaccccaccccaactttaccaccttcactgatgctcctcaagtccttaaccttctcgctagcttccccagcctccttcctggtcttgagcagcattcatgcggagtctcaaatcagagccccttgccctgcttcctcacttgcctcatactgtctctgtattgctttcctcttgcaagaactcgttcaccacactaggagaaaagcctagaagaaccctattcttattgctttatggatgagaatgtaaggggttaggaagagcccccattttcttatctttatgttgaaaacgcagggtgatatgtggtcttgacacatcaatttagaattcygaatttattttctcatcaaaacccctttataactggccatttggtttcaaaatactacaagtagtacccactggatatattagctatattggtgtttaaatagatgtttatattcttatctatcagtctaattaccatgtataatagtatttccatacaaaaatctgagcttagttcctcaagattgctcagataaaatttggggagattgtctatttataattaggtctatctcccttttttgctagttctcatttgaatacattcaattccaagctg

SEQ ID NO: 523033 - DNA, 648 bp, Homo sapiens
actaagagggaaagggagagcatatttagaacactcaccccaccccaactttaccaccttcactgatgctcctcaagtccttaaccttctcgctagcttccccagcctccttcctggtcttgagcagcattcatgcggagtctcaaatcagagccccttgccctgcttcctcacttgcctcatactgtctctgtattgctttcctcttgcaagaactcgttcaccacactaggagaaaagcctagaagaaccctattcttattgctttatggatgagaatgtaaggggttaggaagagcccccattttcttatctttatgttgaaaacgcagggtgatatgtggtcttgacacatcaatttagaattccgaatttattttctcatcaaaacccctttataactggccatttggtttcraaatactacaagtagtacccactggatatattagctatattggtgtttaaatagatgtttatattcttatctatcagtctaattaccatgtataatagtatttccatacaaaaatctgagcttagttcctcaagattgctcagataaaatttggggagattgtctatttataattaggtctatctcccttttttgctagttctcatttgaatacattcaattccaagctg

SEQ ID NO: 523034 - DNA, 584 bp, Homo sapiens
ttttaacaaaaaaatttaaggacaagatttgtgcagtattaagagccattacttattactgtgtgactgagatcatttatagtcattcaatgtttgagcaggttagttttcattagcagtttctcccccctcttggttaagagagtgaatgtttcagatgtggtgacttggttgcctgttgttcaaatatacgctactggcagtttctcaaaatgtcaatcacttcatctctgctttaatttactacatatattgctcagagtgctgaattaatgatgtgaacttgaagtttcaggtcttcaagtaatccctgggtgatgcatcrggattaggcctttgtagtagaaattatggacatgcgtgctgagctttttgtgtcttgctattttttcagccttgtatgaagggccaaaagatgtgaagccttattaaacccagtttatgggaatctgttgttttggactgagctcctgcaactaggcccataccagaccaaaccagaatggagtcactcttgctgggtgccatgtaataaccaaactgaatgaccagttttccaaaaaacaggagatttcacagcaacc

SEQ ID NO: 523035 - DNA, 584 bp, Homo sapiens
ttttaacaaaaaaatttaaggacaagatttgtgcagtattaagagccattacttattactgtgtgactgagatcatttatagtcattcaatgtttgagcaggttagttttcattagcagtttctcccccctcttggttaagagagtgaatgtttcagatgtggtgacttggttgcctgttgttcaaatatacgctactggcagtttctcaaaatgtcaatcacttcatctctgctttaatttactacatatattgctcagagtgctgaattaatgatgtgaacttgaagtttcaggtcttcaagtaatccctgggtgatgcatcgggattaggcctttgtagtagaaattatggacatgcgtgctgagctttttgtgtcttgctattttttcagccttgtatgaagggccaaaagatgtgaagccttattaaacccagtttatgggaatctgttgttttggactgagctcctgcaactaggcccataccagaccaaaccagaatggagtcactcttgctrggtgccatgtaataaccaaactgaatgaccagttttccaaaaaacaggagatttcacagcaacc

SEQ ID NO: 523036 - DNA, 538 bp, Homo sapiens
cctgaatagaagagaaatgagcttagttttatattatactttaggaagaataaagaataatatatgagagttggaggtgtagagaacatatgtgaaatagttggcaattatttattttattccctttgaggacagttcrtctttatacataagtattaacatggttaaatgcaaggaatctttaggagcaaaatgataataagaggttatttttatctttgaacaaaatctaacctaactgggctgaaacccaataggtaacattggtgtgtgtgtgtgtgtgtgtgtgtgtgtgtgtgtgtgcatgcatgtgtgcctgcatttatgtgtgcatgtatacattaagtcacattttttatatttgtttcacttttgattgaaggcagatattgttggagaacagatctatttgtgaaaccttattgggaacatccaaattggcaaaatgacttggtgcccatctgcagtaaattaagatgtacatctgactaggttggggcttcatgccagtgcctgtctcaacatgttcagtttttaa

SEQ ID NO: 523037 - DNA, 538 bp, Homo sapiens
cctgaatagaagagaaatgagcttagttttatattatactttaggaagaataaagaataatatatgagagttggaggtgtagagaacatatgtgaaatagttggcaattatttattttattccctttgaggacagttcatctttatacataagtattaacatggttaaatgcaaggaatctttaggagcaaaatgataataagaggttatttttatctttgaacaaaatctaacctaactgggctgaaacccaataggtaacattggtgtgtgtgtgtgtgtgtgtgtgtgtgtgwgtgtgtgcatgcatgtgtgcctgcatttatgtgtgcatgtatacattaagtcacattttttatatttgtttcacttttgattgaaggcagatattgttggagaacagatctatttgtgaaaccttattgggaacatccaaattggcaaaatgacttggtgcccatctgcagtaaattaagatgtacatctgactaggttggggcttcatgccagtgcctgtctcaacatgttcagtttttaa

SEQ ID NO: 523038 - DNA, 612 bp, Homo sapiens
gcccgttcctggatgctaagcaaatctgtttcacatgtgaacatgttgggatcttttacattttgagaccgttttgcccttcttttaaaggtccttatagtctcataactcacagagaattatggtttagtttcagttaccagtaatattgtaaatatattcacatacatttttaaagacattatggcaatgtccttaattaataacatagccatcattttataaagagtcccaatttattaaaaataaaaccctaaaaccaaaaatgatgggataacatctttatgttgcccttgtttgcattcaggatgtttccaagtttatyatgtctgtgacctcagttacgtttacttccccagatggttttttaccacatgagcaattaatataattggagactatgaagtgtttatgtcaaggcaagaagcagtagcagcttcaatgtggtgactttgcaggcagtcaaacatatttcactgtgtgcttccaacctaacccttcccctgcccttccccttctatttttatattaaacagaaaaagagagttcacaaaggtgctcagaaactggcagtttctttcagaatgtggtatatttctaatttccatatat

SEQ ID NO: 523039 - DNA, 322 bp, Homo sapiens
ctaggaaaactatccaaagcaatatacttttgaaaagataaagaaatcaagatagaaatttttaatatgatcaagtcacccaaaggaaagtaagagaaacagaggaaacaaagagaaaacaagtaataaaatgacagtcttaagccctagtatgttaataaacccaattttattactttaaatttaaatgatctatggaaatgcaagggacccaggatagtttaaacagttttgaaatgaaagaaccaagtytgaatacttagattttctgattttaaaactgtaaaactatggtaatgaagacaacatggggctggcctaa

SEQ ID NO: 523040 - DNA, 335 bp, Homo sapiens
taacctgataactcctcaccttagctgtacctgaaactgtttcttcctcggaggtgtgttggctactgctcttgggagtcaggtagtccagtgcatccttatacctgattcagttcttggccaatatgggatgggagcaggtaggarcatgctcttctttctatgtctcaggcagacagttctgaagttattctacacatttcctgatagcatccccagtaagattaaacgtcagttgctcacgttagtcaccagcccaactatacacccttggattggctttcccccttcctgttttacatttacacttcctatcccattcaactctcattcta

SEQ ID NO: 523041 - DNA, 573 bp, Homo sapiens
aaatggaatgggagagatttttgcagagagaaaaatggtgctaatgcagtgtgatacacttggtgtagtggaaaggcaagcactttacagttagggtcccagtgtagggtaattgtgtcttctgttgcccagaaaataaatacagttaaacatattaataaggaccacccagatatttttttcctccagcattgaaaccaattgccatttctttgttgagcatcagatgtttgaaacatatatatgtgaccattataatgacattgtttgccatgagatactcatataataagaggcacacaggaggaggcacagctcccaaatcacacttactctggggcatacacatcaagtgaaattgtggcaaaaatcmtctgcactcttgatcttttctctccgtctgtcactttgtggctgagtgcatgtggttgagtgtgcagaagtactcatggatgatgcaactctcttgtctgagcgtatttccaggctcaggaactaaggacgtgtgactgtagcagatgactctcatgtcttgtgttggatttccttggcctctctctaacttgagaaaca

SEQ ID NO: 523042 - DNA, 573 bp, Homo sapiens
aaatggaatgggagagatttttgcagagagaaaaatggtgctaatgcagtgtgatacacttggtgtagtggaaaggcaagcactttacagttagggtcccagtgtagggtaattgtgtcttctgttgcccagaaaataaatacagttaaacatattaataaggaccacccagatatttttttcctccagcattgaaaccaattgccatttctttgttgagcatcagatgtttgaaacatatatatgtgaccattataatgacattgtttgccatgagatactcatataataagaggcacacaggaggaggcacagctcccaaatcacacttactctggggcatacacatcaagtgaaattgtggcaaaaatcctctgcactcttgatcttttctctccgtctgtcactttgtggctgagtgmatgtggttgagtgtgcagaagtactcatggatgatgcaactctcttgtctgagcgtatttccaggctcaggaactaaggacgtgtgactgtagcagatgactctcatgtcttgtgttggatttccttggcctctctctaacttgagaaaca

SEQ ID NO: 523043 - DNA, 584 bp, Homo sapiens
atgtggagaaaagttatccaccaatctgaaacaattacgttagactactgcatgggcacaaaataaacctctgttctgttaaaccactgaattttttttatcgcaggtaatgttatcttcactaatacagggaagaagtcctrctgcttgtcagacttagtagggcccactaatcctgttgaacccagaagaacaggagcaaagctgctctagtgtgttgaatggcgccaataccttgtgaatgagagaagtctgcttgaccaaaagacctaggatacaatggatgccttctacaacttcctcttagtgactataaaacagagaaaagcctcttctaggacttccatggtagattttccactgcttaagcaatagcatctgcttagtgaatatgtctgctaaagaaaaatccagacaagttaatattcacattttatttaagaatattctagatgaggaagcaataattgaacaactagaagtgtaggctgtcattaaattagagctaatagaggaactggaagagaactttatcaaaaagagaagtgctctcaagaagactgaagaaaatcgtgaaaaaagag

SEQ ID NO: 523044 - DNA, 641 bp, Homo sapiens
gggctctgaaatgcaaaaatacccttttgagtttctcaaaattctagttctctaagaaaatatttattttttcccaattaatccacactcaataatttccccaagttatcttttgattgggaagttctgtaccacattgtagtaacaccgataacagtgaagtaggtggtgctttggaaggaaatcaatcaacttacattgttttatgcataacggcagttggaaaactgttcctatgatttcggtggtattctgccttctccatctgaagggaaacacttcatacacttgcctgtgtaagaaaggtgagtctgaattgcaaaatgggctttgttgataacttccttagtcttttatttagtatgtcatattacgaatgcaaaatatattccgtagagaaaagcatgaaaatacaatcaagcaaaagaacattgaaaacaccctactcctttgtcttcagaagcaatcactctttttttttttaactttttataatggaaaatttcaaatgtataccaaagcagagaaaatagtacagtgcagtcaacrcacctattgccagctccaccagttatcgactcacatctactcagagttcatatctaccccaaccccaccctgcgctgagtattttcaaacaa

SEQ ID NO: 523045 - DNA, 256 bp, Homo sapiens
ctcagaaaactacttttctccctatatatttagractagagattttgtcaataaaaataatggagaggatttgaggtccaaattaaagcaatgtatttcccagaactaaactgagtgtgtcagtggcttgtccaaagtcttgtagaagccagaccatgaacacagcatcaggacctgctgtttagtctttattcagaggcacataatttggtgttcttctgatgactggtttgtttttgtgggaataaaaagaata

SEQ ID NO: 523046 - DNA, 555 bp, Homo sapiens
tcctagatccacgagtgatgggattggtggataagtacccatctcctttgctcctcagacaagccaactccgaagtgtatgttctataccatttcccaaagtttcccagtgggctgtagccctagctgtccacagtggcaactgctttgtccttcaaatatatttgtttgcattatcctccaaataaattacttgtgctgaaatctctgcctgaaggtcagcttgtggaagagccaaactaagacaggtacattgcatacattatckcagttaatctttcctacctctccaaggcgaaacattgcactccccgttttacagatgagaaaactgggattcaggaggttatttttttctctctctctcattccaaatattctctgtctctcctctctctcttattccaaatctccttttctttatattttattgtgaagaaagtggccacagtatatggtctcttaggaaggtgcagccatgtggttaatgaattttgcagcagaagaataaatcaaatatttattgattcaaattggtgtaggcatggtaaaaaaa

SEQ ID NO: 523047 - DNA, 638 bp, Homo sapiens
ctctcgctctctgagtggagttctctgccttccaccctttgcttctgtcctttgaaaatgtgagcgaagcacagttgcttgtgcaaaccacaccagcctcctgagatcctctcgattttccttctcactgggaatatttttcatcagaatttattctcccaaactaagaaagggacctcatgtccccgctcatctgatgcactgagaacacagcatcattttcccagtattcttgccaagaatacacaacctgaggcttatcatgaggaaacatcaggcagacccaaactgarggacattctacaagaaaactgcgtggactcttcaaaaatgtcaaggtcaggaaagacaaagaaagcccaaggaactgtcgccgattggaggagattagagacagggcaaccaactgcagcacgtgatctgggatattgtgttgctataaaggacattactgggacagttggtgacatctaaatctgaatacggtctgtagattagctaattgtattgaatcagtgttcgtttcctgacttagtcactgcactgtggctgtgtagcagaatgtcctttactttttaggaattatacactgaagctttgggagatagagggcatcacatctgcaatttactctctta

SEQ ID NO: 523048 - DNA, 491 bp, Homo sapiens
gcagcctagatcacttggtgagcagcagacccagcactcaagattcatgcctctgctgtccatttgacaaggtttagtctcaagaaaatgcaccaaggccccgaggccaacagccagagctccaccaatcagggctgatcacactggtgctcaagcactgcggcccaggaacctgactgcaggagtgctggctctacactaacagaatgctgggcgtgtgtgggtggctgctgtggacattatgggggagatgggtaggaaggacagatttggttaggagcccagactgaagttacaactgccaagtttaaattcactcrttttgtgcaccgtttcccaagtatgtactgtgaaggtagaaggcactgtggccgcctgtaaatagctggggaggcaagacacgaagaccagataaatgttaagaaacatgctccctgtatgtattgaaatcagttctgcaaccctcataccagttggctgtaacagatgct

SEQ ID NO: 523049 - DNA, 491 bp, Homo sapiens
gcagcctagatcacttggtgagcagcagacccagcactcaagattcatgcctctgctgtccatttgacaaggtttagtctcaagaaaatgcaccaaggccccgaggccaacagccagagctccaccaatcagggctgatcacactggtgctcaagcactgcggcccaggaacctgactgcaggagtgctggctctacactaacagaatgctgggcgtgtgtgggtggctgctgtggacattatgggggagatgggtaggaaggacagatttggttaggagcccagactgaagttacaactgccaagtttaaattcactcattttgtgcaccgtttcccaagtatgtactgtgaaggtagaaggcactgtggccgcctgtaaatagctggggaggcaagacaygaagaccagataaatgttaagaaacatgctccctgtatgtattgaaatcagttctgcaaccctcataccagttggctgtaacagatgct

SEQ ID NO: 523050 - DNA, 439 bp, Homo sapiens
cctattgccatcagaattcggcattaatgacccattggaaattggaacaaaccaagaatatgcatgtccgccctaattccttcattgaatttgtgacatcaagttctgtcttgcagttttacttgactaaaactttgaccatcacccaaccttctgctggtgctcaagtgttcagagcagactcaccctccttcctgtctctacagtgctgtgcaaaagaactacaatacaagcagccacatccaagttaaaaagtcacaaatttcatagtgatatgtcaagtctatagtgcttgcactacaaggtgatgtttatcagtcccttggatatcctgggtgaagataagctccctgccttcctctrgacctacacacagtaccagggctccatacacttaactattcacctcctgtgaaaccagcccttacccactgactca

SEQ ID NO: 523051 - DNA, 624 bp, Homo sapiens
taatgatctgtaaggatctcctggcagataaatcctactgggaatcaatacaccactgctaccaagaaagcaggtccaacaaatgaataaaagaaacccagccaggcagagaggttcttgtctgtaatcccagcactttgggaggctgaggcaggaggatcrcccgcggccaggagtttgagacaagcctgggcaacacagcaaagccttaaaaaaaatcacctaggctcggtggcctatgcctttactcctaacactctgggaggctgaggtgggaagatcacttgagctcaggattttgagtctgcagtgaactacgatcagaccactgaactcgagcctgggagcaggccgagaccctgagaccctgtctcaaaaagtaaaaaacagaaatgccagtttcctttactcagagctaaaagccttcacctactacccaatcccatcatggctccctcccaaaagttcactggcataccatatcaagtcagcaagcccccttttttgtagcagggtctcactctgttgccaaggctggaacaagccctcttcaacaaagctaagatggtccatattactcatgtggatgagggtgttgaaggacatttactgccttccttcatg

SEQ ID NO: 523052 - DNA, 591 bp, Homo sapiens
cctcctttgcccttgttcatcatctggtttctcttgctctctctccacaggacctaaggcagcagcttgcaggctgtcaagaggctgtgaacttgttgcaacagcagcatgatcagtgggaggaagagggcaaagccttgagacagcggctgcagaagctcactggggagcgggacactctggcagggcagactgtggacctccagggagaggtggactctctcagcaagtgagcagacgggctgttcatcccaccctcccagcctggtctcagtctcagtcaccatccagccatttacccactcccatcaggtttttggggtgctgatcctgttctccttgagactcagggctgttttgcccagtgtttcacttgtttctccagaacaagcttttggggttggagtctttgtgatgataaaaaagtttygcactagaaacagaagatgggatgttgaaacagggtctcttggccctgtgatgcctgcttccagaaagaattttaggtcctatggtctctgctcatctctgattcccttcttccagggagcgagagctgctgcagaaggccagggaagagctgcggcagca

SEQ ID NO: 523053 - DNA, 504 bp, Homo sapiens
tccttgcctcgcccctctgcctactgtgtcctgcctgttattccccctgcatgcgagagcttctacttgtggacctcagggactttgcattgctgctccctctgccttaaatgctcccacccactacttgttgcctgacagcctccttctctctcttctgggctccctcagtttaattgctgcctctacagagagaccctgtctccacacttcctgtgtttgctgcacagcacttagcacaatgcaacgtgtgaccacctttgtgtgtttgcttgtttgttgcctgcctcctgcagtggactctgaggcctgcaggggctgggactgtgtctaccttgcttctcgttgtgtcccagcccccaggagctggtatgaagggggcactcagcgaacaaacctctgcggaaagatgaaggatggktcctgtgtgcagagggagctctggacctttgagggtggctggaggctcctggacctgccttggaggacagacaccaggcaggg

SEQ ID NO: 523054 - DNA, 670 bp, Homo sapiens
ttgttcacatggtaggagaagggttcccagagcagcaagagcagaaattgcaagatttcttgaggtccaggcttgaaataaacacacatctacttccaacacattctattggtcaaagccagtcacaggaccagcctagatcaaggaatggagaaatagcctctacctcttgatgggaaaggctgcaaaatattgtggcctttttacaaactaccacatgtaggaaacatatgggatatgattcatgatgattttgttgaaaaataacttagacttttctggtacctatagctccttgcagctcagtgggaccctactagcttctagacttgaatgatgaaagttctatatatttccttcctcttttccctggagtgcttcttgaactcacaacgcgagcgcgcgcgcacacacacacacacacacacatacacacatacacgtgaacaccctctcacaatgtgttgtctcatcaactgcaagaattgtattgtccaaattactggattaaggattgacatcaacatttgggtaaaatgaagccctcacagccactagaggattcagaggataaacactctaaatggcttaaaatatgttttataaatacagttaaatacaaggttcacccaatcagyaaatgtttattggacacctgttatatgcaagg

SEQ ID NO: 523055 - DNA, 501 bp, Homo sapiens
aattataaggtatcttagctcaggctgcctagaagcagagcctgaggcagggtttcttgggcaaatgatgtaatgaggaaacactcttgggaaaaggagctgagggaagcggggcagggcaggggatggtgctaagagaggatgtggtctctaggtgaagacragcttcagcctgatcccatagggaactctggtgtataaagagctttatagaattgacaccaccttaaggcaaggaggctagccccgcgcacagaagccaggtgatgggtgcaccagcctgggcgaggagatcaaggcttggtaccaacagcatcaactacctaaagatagactacgtagaaaactgagaaaagaactgaagtgcatttgggctctgcaggagtaggcctcctctccttctttctgtatacctgctgtattctcctctcatagaatgactccactgggcccacactagattcatgaactaaaaggcagttcatatacaacttggtgagt

SEQ ID NO: 523056 - DNA, 615 bp, Homo sapiens
cactcagtagatgtgtcttccttcgtttgattcttcttctcatgtctgagagagtgtttgggcatctacatttacataggggtcagaggtgagcactggtgctttgtcccyggctttctactctggcagagagagcacattttaccttcagagaggcaattagaccccagatggcagcactgagcttctgcacagtattggctccccagtggactaggcagaagaacatcacctccaggatccccctcaggtgtgggtgtgacctagttactggatggttgcagagaggacagaccccagttactggatggatgcagagaggacagaccccatgggggagtcagggaaatgagttgagttccagggggctggtagctcccacactcacagagtggagtgttggggatgtcaggagccctcatctctgatctgagcctgtccctcccttctgctctttccctttttcccagccccaccttctcactttaagtctctctatgtctctctttttcactctattgcttttccttccccctcctttccctttgctctttctctctcctatcttccatcctttgcttttctcctttgttcttcccccacatcttgccatct

SEQ ID NO: 523057 - DNA, 534 bp, Homo sapiens
cttctggggaaaccaaactaggttagctcctaaacttaagcataaactgacttgcagcactggccatgaacacaatagcaaagacagggaaacaacctaggtgcccatcagtggtagattggataaagaaaatgtggtacatatacaccatggaatactatgcagccataaaaaagaatgaaatyatatcctttgcagcaacatggatgcagctggaggccattattttgagtgaactaatgcaggaacagaaaaccaataccgcacgttcttacttataagtgagagctgaacattgcattgggtactcatggacataaaggtggaggaaacaagaaacactggagactactaaagggtgcagagaaaaaggaggaaagggccgaaaaactacctagtggatactatgctcactacctgcatgacgggatcattcataccccaaacctcagcatcacacaacatacccatgtaacaaacctgcacatgtacccttgaatctaaaataaaagtggaaattataaaaaacttaaa

SEQ ID NO: 523058 - DNA, 616 bp, Homo sapiens
gaatattcattcactttgaagaagaacattcagtgaaatggcttttaatccttctaggacactctaacctcaggggttctgggcaagtgatgtctttattatgcttctatgagatcactgagcttcccaattgaatctgaaatgcatttactgcaagaggcctgtctgaagatcaaatgccaggtaatgtctttgaccaagaacaattagcaaagttcgttcttccttacctcttttaccgaggagaatcattggtttgcattaaggaatatgttcagtctttattaaaatcatttgggcacctcagggaagaaaattctatgtgcttagaatctcacaaaaatgaatgacctgagcaggtagagttcatgacgagaaaccagacccaracaacattttcatgagcagatacattaagcaagcttataaagaataattacagtgattataacaaaactcatgtctatttattaaacatttaataacatacaaaaaataaagcttattattattatcaatctcaaatgtaattaaggcaggaggttacttgcatattcttattcaatcttcaaatcaaaagagatcagtactatcgttatccccatataacaaacta

SEQ ID NO: 523059 - DNA, 494 bp, Homo sapiens
atcctaccactgcactctagcctgggctagagaatgagagagacctctctctctctctctctctctstctctgtatatgtgtgtgtgtgtgtgtgtgtgtgtgtgtgtgtgtgtgtgtgtgtgtagttactgctgcttttagcatagttactgctgcttttagccacaatagatgacaaagggaatgtttgtagactgtaagccaggaggcaacttgatatggtgagaaaagcatggatttgatgtcagatatacccaggcacagtcattcattcactcagtcaatgaatatttatagattatgtactatgtgttggatttgcagcatttacgttctcgtggaggaaggcaggaattaggaaatgaatggcaagatgatttaagggtgtggtgtgtgctgtgaagaaagtaaagtgaagtggtagaattcagagtggctgggaagagtggggagccttggagtggacaattaggaacggcttccctgaatgctg

SEQ ID NO: 523060 - DNA, 610 bp, Homo sapiens
aatttcttacagactttggctaagtcccctaatacttaaattgtccttgctacccattttcagtgggtctgtgccaaagactagagtctataatacaacctatttaattctacctggccatgtgcgaagccaaaaagggatcaccctgcaggtacatcattttacctacgtcttgaactctgactttaaaacccaaactctaatagtagtaagtagctctatggcccaaagttatgaaggtggtagttaatacctgggggtaactcagtattatacttggaaaggcaggaatcaggtgaccatgttcttctctacagcttgataaatacaaagggtactgtaaagtaatggatgtattttggtcaaagataggcagaggtaggatgtttacatccagagtgactcagcgaatttagagtgcaggcacatagctccacttgttatcacagccatgtagccataacatgggaaggctcatcatttggctctaagccactatcgtctgtaaaacrtatatttgccctgctgatacagtacaggcacacttgtgtccagagagagagagagtcagagctgtccatctttgcagatggacagggtgagccaggac

SEQ ID NO: 523061 - DNA, 633 bp, Homo sapiens
agctgaaatcaagggctaataaactgtaagctggctagtgagtggaaaaaacagaaatgtaactattaaaatataatcactttgttaaattaagtcaaacttgattaagtggaaaaaaattggcatattttagaaagcccacatatactgaatgatgaaattaatagtgttcacaaaatgttgaaccaatttggaaaagagattatagaatgaagaaaaaaccatcatagtctagagaagtgaggctgggcactgtggctcaagtctgcaattccagcactttgttttgttttgagacaaggtctcgctctgtcacccaggctagagtgcagtggtgcaacgttggctcattgcagccttgacctctgaggctcaagcaatcctcctacctcagcccccaaagtagctgggactatgtgtgcaaactaccatgcctggctaatttttaaattttttgtagaaatgagatcttactatgttgcctaggctggtcttgaactcctagactcaagtgattctctcgcttcaatctcccaaattgctggggatcgactgaggccaggggttggagacyagtcttgtcaacagagtgagacagccatctctacaaaaaaaaaaaaaaaaattagccaa

SEQ ID NO: 523062 - DNA, 588 bp, Homo sapiens
actagttcaaagttacaggccagtaagtagcagaactaggtttcgaacctaggcaaacctacattctaaccacaaacctacattcttaatcagtcactcttcttgtagcatataactctcaattttaactcctttctttttaaaacattcccttattaaacctgtcccttattcttttttttttttttagacatggtctcactctgtcrcccagactggagtgcagtggtgtgatcacggctcactgcagcctcaacctcctgggctcaagtcatcctcctgcctcagcctcccaagtaggtgggaccactggggcgcaccaccacacctagctaatttttgtatttttttatagagatgagagtctcactatgttgctcataggctggtgtcaaactcctgggctcaagagatctgcctgcctctgcctcccaaagtgtggggattacaggcgtgagccaccataccgggtcctgtcctttattctacagctaactgcgactatgattattccagtaacatcttttgcatccttcttaagtgaactgtgggaaatccttaggtacttttgttggaaacctaacactg

SEQ ID NO: 523063 - DNA, 590 bp, Homo sapiens
gacctttgcattcaggtggtgtccgaaccagggccctgtaggtgtagagggggagcccaggacagaggcttcagaacccagggaagaaccagcgttgctggcacacatggggaggggtggggtaggagacccagaaaaccagacccmagcaggagagagcacgggccaggctgggggatcccatcaagacaccaagcttgcaagtgaccaagaagagggtctctcccaagcctgctgactccaaacatggggcggcctcctttgttcattgtccttagacagatgactgaccatctaattatgagacatcgaatcagaaaagagtttcattgacggccaaacatgactatgttattatggtatttattattattgtttaaacggtagttattgtatttacttattaataaaaacaattaataataataatgcatgtatgtgttacagtaaatgcactacagtttaaataaaatgtaaataaataaaatgcacttttgttaaaaatatattaccttgtaaatgtatcacaaatgttttaacgcatgatgaagacaagtttgatcactcttagcaagttcgaagcttccttt

SEQ ID NO: 523064 - DNA, 590 bp, Homo sapiens
gacctttgcattcaggtggtgtccgaaccagggccctgtaggtgtagagggggagcccaggacagaggcttcagaacccagggaagaaccagcgttgctggcacacatggggaggggtggggtaggagacccagaaaaccagacccaagcaggagagagcacgggccaggctgggggatcccatcaagacaccaagcttgcaagtgaccaagaagagggtctctcccaagcctgctgactccaaacatggggcggcctcctttgttcattgtccttagacagatgactgaccatctaattatgagacatcgaatcagaaaagagtttcattgacggccaaacatgactatgttattatggtatttattattattgtttaaacggtagttattgtatttacttattaataaaarcaattaataataataatgcatgtatgtgttacagtaaatgcactacagtttaaataaaatgtaaataaataaaatgcacttttgttaaaaatatattaccttgtaaatgtatcacaaatgttttaacgcatgatgaagacaagtttgatcactcttagcaagttcgaagcttccttt

SEQ ID NO: 523065 - DNA, 590 bp, Homo sapiens
gacctttgcattcaggtggtgtccgaaccagggccctgtaggtgtagagggggagcccaggacagaggcttcagaacccagggaagaaccagcgttgctggcacacatggggaggggtggggtaggagacccagaaaaccagacccaagcaggagagagcacgggccaggctgggggatcccatcaagacaccaagcttgcaagtgaccaagaagagggtctctcccaagcctgctgactccaaacatggggcggcctcctttgttcattgtccttagacagatgactgaccatctaattatgagacatcgaatcagaaaagagtttcattgacggccaaacatgactatgttattatggtatttattattattgtttaaacggtagttattgtatttacttattaataaaaacaattaataataataatgcatgtatgtgttacagtaaatgcactacagtttaaataaaatgtaaataaataaaatgcacttttgwtaaaaatatattaccttgtaaatgtatcacaaatgttttaacgcatgatgaagacaagtttgatcactcttagcaagttcgaagcttccttt

SEQ ID NO: 523066 - DNA, 553 bp, Homo sapiens
cgtgcctgtaatcccagctactcaggaggctgaggcatgagaattgcttgaacccaggaggtggaagttgcagtgagccgaattcgtgccactgcactccagcctgggggacwgtgcaagattctatctcaaaaaaaaaaaaaaaaaaagaatatacatggaattaacagtagtggtcacctcgggtgggtgggtcacctctagggtgggggcccagggctggggcctgggattgggactgataattacagcgacttgagcctcatcgctattgttttatctttgcacaaaaacaccacattcatgttttacttgtgaaaaaaattagatatgcatgtaaacctaaaaagtatctccaaaataagaaactccttttcttctctacactggtggtgttagagggaaatagcactagggccaaacaaataacctgggataagggacccatgggcccagtcctcatttcctcagctaacacctcattatgggcaaacattgtccttggaaatgagtcccacttgctaacgacttgctcccctgggttcctgggcag

SEQ ID NO: 523067 - DNA, 553 bp, Homo sapiens
cgtgcctgtaatcccagctactcaggaggctgaggcatgagaattgcttgaacccaggaggtggaagttgcagtgagccgaattcgtgccactgcactccagcctgggggacagtgcaagaytctatctcaaaaaaaaaaaaaaaaaaagaatatacatggaattaacagtagtggtcacctcgggtgggtgggtcacctctagggtgggggcccagggctggggcctgggattgggactgataattacagcgacttgagcctcatcgctattgttttatctttgcacaaaaacaccacattcatgttttacttgtgaaaaaaattagatatgcatgtaaacctaaaaagtatctccaaaataagaaactccttttcttctctacactggtggtgttagagggaaatagcactagggccaaacaaataacctgggataagggacccatgggcccagtcctcatttcctcagctaacacctcattatgggcaaacattgtccttggaaatgagtcccacttgctaacgacttgctcccctgggttcctgggcag

SEQ ID NO: 523068 - DNA, 596 bp, Homo sapiens
tgctactgcactccagcctggtgacagagcgagattccatctccaaaaaaaataaataaataactggtcatccttgttctcttaggtccagcacttagcagtttgcagaacacattcacaagtctttcctatgactgcagggatggggacagattggactgtggcctcagtgtcatggttgagggaactgaggcccagagggcagcctagtcattagctgtgtctcctgccttctcacaaagtggtcaccagtgtcatttcccacytccaggtattacaggatctgtggcgtgtcgatttttctggccagaaacctctgtggccatggtgtctttgcctgagtttttgtcctgcgtccaggaagaatgaggtacacagacaagtgaagggtgaagaagaaaagagttttatttagtgttagaacagctcagaggagtgggtagctcctctctgtagacaggtggtcccgccaagtgttcaactctcagcagagaggacgccctggagagggtggctcttctctgcaggcaagtcatttggacgtctctgcaggtctctgaagctctcaacagagagggtagctcctctgccagcag

SEQ ID NO: 523069 - DNA, 596 bp, Homo sapiens
tgctactgcactccagcctggtgacagagcgagattccatctccaaaaaaaataaataaataactggtcatccttgttctcttaggtccagcacttagcagtttgcagaacacattcacaagtctttcctatgactgcagggatggggacagattggactgtggcctcagtgtcatggttgagggaactgaggcccagagggcagcctagtcattagctgtgtctcctgccttctcacaaagtggtcaccagtgtcatttcccacctccaggtattacaggatctgtggcgtgtcgatttttctggccagaaacctctgtggccatggtgtctttgcctgagtttttgtcctgcgtccaggaagaatgaggtacacagacaagtgaagggtgaagaagaaaagagttttatttagtgttagaacagctcagaggagtgggtagctcctctctgtagacaggtggtcccgccaagtgttcaactctcagcagagaggasgccctggagagggtggctcttctctgcaggcaagtcatttggacgtctctgcaggtctctgaagctctcaacagagagggtagctcctctgccagcag

SEQ ID NO: 523070 - DNA, 636 bp, Homo sapiens
taatgaatagcttttaacctttaattrttttttacaaaccttaggtaactataattacaaattaattgagaactgtctataaatatgattgcataaattgtaaggaattgtgttaaatctgtgctgacttcaaggtaaaaaacaatacccttcactgtatgggaaatgagcatctaaaaaactgaccttgctgccaacaggagttataagatctggacaaaatacaaaaacatctacacgagactctggagactgaacaaaagcaagcagtttttggaggagagctaaagctacagcaaggaacaccatggaacacaatgagttttcacttcatgtggctttcctctgaaggtaataactagaagacgaatcaataagaagaatctgaacaacaggaaaaaagtgaacagagcctcactgatctatggaacaacttcaaaagatctagcatatgtggaaatgtagtcaataaaggaaaggagaaaaataataggacagtaaacatatttcaagaaatcatagccaaaaatttccgaaatctggttaatgacttaaatttacagattaaaccaattccatgaatctcaaacaggataaatttgaaagaatcatacttaggcacatcgtggtcaaaca

SEQ ID NO: 523071 - DNA, 554 bp, Homo sapiens
gctcccctgcttcttagtgagattgccatgaggtaaccacaaaaatccaagagagctattatcaaacttcagggttgtaaaaccacggatttatttatttgttcctgaaagggtctaagccgcctaaatagctgtttaattgcgtatttctcattagagctcctttttccttttagaatacagtggagccactgttgttctttatgaaagtaagcattagggataagggggtttatgayctgaaaccttttttccatgctgaacacacatgttgtcttgactacaccaatgagggaaaactctctattctgtcaaataggtttatgaaagggcatgagcctggtgctcccacggagcgagggaagcctcacacacaaacaggcatgggacaataggtgtataaactgaactatgcaacagcacttaagctctggctatttttctcctgcatgagctctgtagaaatccagatggcagccctaaaggctgtgccttaagcagaagaagcatacatctgaccctcaaagggacaaaatgagatggctgctctgacc

SEQ ID NO: 523072 - DNA, 619 bp, Homo sapiens
gtctctcccaaatttctgatccccagaaaatgtttgttattgtaaattgctaagtattagaggtaattagttacatagcaatagacacctaatacagcaacagccatttcagtagagcaatggggtggaatccaggacacattgggctaaatagtgatttagaaaagaggaaattggaaaaggaaatgtagaattctttcataaatcttgactgtgaggaatttatgagtaatgacaaaaatagcaaggatttggcaccggggraagagtttgattgtttttgttctttaatgggaaccatatttttattttgagaggaaaaagccaatagataacagggtttgaagataaagatcctgtgggtatcttgatgctgatgccatcacagtgatgaggaaggggatggagtggtgcaggttactggaacagtaggaggggaagaagtgaaaccctaatggctccagcatttataactctatctcttgctggctctaggtcattctgtaagcaagctatctctaagttgcctagtcttttcaagtttgaagaactcttaggtgctcctaactgtccaaccaggggccttggatatcaaactgtaagacaggaatgaactcac

SEQ ID NO: 523073 - DNA, 506 bp, Homo sapiens
aggcatttaaagatttaacgttttggatattttaaagttggtgtctgttttcaccctcaaaaatgctattacctatttatgaaatatctttaaaagtgtggagtggtagatgggaaaggtgacatcggctgggcgcggtggctcacacctrtaatcccagcactttgggaggccaaggtgggcggatcacctgaggtcaggagttcacgaccagtctggtaacatggtgaaacctaatctctactaaaaatacaaaaaattagccaggctggtggtacgcacctgtaatcccagctactcaggaggctgagtcaggaggatggcttgaacccagaaaatggaggttgcattgagccaagatggcaccactgcactccagactgggtgacagagagagactccgtctcaaaaaaaaaaaaacgccgggcactgtggctcacacctgtaatcctagcactttgggagactgaggcgagcagatcacttgaggtcaggagttcgagacc

SEQ ID NO: 523074 - DNA, 566 bp, Homo sapiens
aattatcgtgtgggatgtgtcattttagttaatattggatgactcttgatagccttacctgttttggacaaaagagatggagagatggaccacatttgtgctctttccaaggaattaacacttaaaggaatgttttgtgggttagggactttgtcttccaagtggggcattaaacccctgatgtgtaacatttttgcctcctatcatttttgtagttttttttttctgcgcccaaactgaacctccccccatgccctgcattggttcttccagtctttttgcccccgtctcagggtaagtgcaggccagacagagacattgccggtaggctcagcwttaatgagaagactggacacgggaataggcaatacaaaagaatgaaagagaggagagtgaggctgggctggcagggttatggggtagagggaagagagatgatggcagatacgaatccaaagcgggtgcctggcacattgcaggccttccatacacgcatggatggttctttcatttactgtttagcttttaccatgtgccaggttctatgaatagaggagaaacacagc

SEQ ID NO: 523075 - DNA, 165 bp, Homo sapiens
ttttctggtgagatacatggagatattcatgaatgggacygagccagaatcttaccttgcactctttaaaataattaattaaggagacaaataataattgtatatatttatgggatacaatgtggttttgatatgtacatttctacattgcagaaagattaaatt

SEQ ID NO: 523076 - DNA, 626 bp, Homo sapiens
tgacctgaggagaggagatggccatcaggcaggtgaagtgaggttttcaggaaccctgacctgccactaagctttcaggagctcacctcctctggaagccaatcaactcattttactagtgactcccatttccataccttacctyacattgtcactggcaccacctgcaccaggtcctcattatctgaagcctggaacactgtagtcacctcttaactggtcttcctcccttgagttgtctccccagcccagccagagtggccatcttaacataccacactgtgcatgtcactaccctactctagagctttccacggctccttattgcctgtagagcaaatgcctgatgttaaggaccacagtctctctggcattttgcagcacacgagggccaccccagccacactcaagagctaaatctctctcaattcttccatctcccacacctctgcacctttatttatgtggttcctcttctatatatgtgcaaatccttttcttccctcaacaactactcaaacttgccctccattctcccctccttggtgaactctccctaactggccattataaaagcaacacgctatagcgctcatgtggtacttcacatgttcaccttgtgcttt

SEQ ID NO: 523077 - DNA, 626 bp, Homo sapiens
tgacctgaggagaggagatggccatcaggcaggtgaagtgaggttttcaggaaccctgacctgccactaagctttcaggagctcacctcctctggaagccaatcaactcattttactagtgactcccatttccataccttaccttacattgtcactggcaccacctgcaccaggtcctcattatctgaagcctggaacactgtagtcacctcttaactggtcttcctcccttgagttgtctccccagcccagccagagtggccatcttaacataccacactgtgcatgtcactaccctactctagagctttccacggctccttattgcctrtagagcaaatgcctgatgttaaggaccacagtctctctggcattttgcagcacacgagggccaccccagccacactcaagagctaaatctctctcaattcttccatctcccacacctctgcacctttatttatgtggttcctcttctatatatgtgcaaatccttttcttccctcaacaactactcaaacttgccctccattctcccctccttggtgaactctccctaactggccattataaaagcaacacgctatagcgctcatgtggtacttcacatgttcaccttgtgcttt

SEQ ID NO: 523078 - DNA, 626 bp, Homo sapiens
tgacctgaggagaggagatggccatcaggcaggtgaagtgaggttttcaggaaccctgacctgccactaagctttcaggagctcacctcctctggaagccaatcaactcattttactagtgactcccatttccataccttaccttacattgtcactggcaccacctgcaccaggtcctcattatctgaagcctggaacactgtagtcacctcttaactggtcttcctcccttgagttgtctccccagcccagccagagtggccatcttaacataccacactgtgcatgtcactaccctactctagagctttccacggctccttattgcctgtagagcaaatgcctgatgttaaggaccacagtctctctggcattttgcagcacacgagggccaccccagccacactcaagagctaaatctctctcaattcttccatctcccacacctctgcacctttatttatgtggttcctcttctatatatgtgcwaatccttttcttccctcaacaactactcaaacttgccctccattctcccctccttggtgaactctccctaactggccattataaaagcaacacgctatagcgctcatgtggtacttcacatgttcaccttgtgcttt

SEQ ID NO: 523079 - DNA, 698 bp, Homo sapiens
cagtaaaatccaactcattaaggtttgggaccaaaggtatggagcccaggaacaagagaaccagcagcattttggatgtaaacctcagacaaaaattatggcagtatgaatctcatgatttaattatatagcacttcagtagtttgcagaaggttttcatatgtttctctctgtttctcttgttctcaaagggaaataggtcaaatatctgtcctcactctgtaagtgaagaaacagaacaagaaaaatagagtagctctctccagtccgatagttaaggaaaggtaagaactagaggttgatcccagatctctgagtctcactgcccatgacctactggacaaataggactgtgcaagttcgactttcatttaaagagcaaagagttcctccagtaagccctgttaccagtgacaacgaaatttcccttgcaatactgtaaacaacagggaaatggggtcccagtccagcggagatggacacaattctataaagcaattacctgattcagaaaaggaactgtraagcttattccaaacttggtgggaattatgcacaatcctctctttttccaacaattctccctagagaaaaaggaatattcttatagaaccttcgctatcatattgaggacatgaatatctttggatgttcacatcaaaacaggacatccttggggttgcccacaaagatgagaa

SEQ ID NO: 523080 - DNA, 619 bp, Homo sapiens
ctggtttcaaaatcaaagtgactatggattggcagcaggcctggaacactgctggtgatargagtcggagagcagtgcggtttccatgaccagttgtcagtgtctttcctggcacatacccggggaactgtggcgcattcacctcaagactaaggtttcaccagttcctcagtgaagaggagtcaaatttaatatcaaacccatattgtatcttatatatagtttattatatacataaatacatgctataaatagttaacagtttagtaaaccacaaagatcttattccatatcctcaatcactttaccatctttgaaaggtcttgagaaaaagaattctctgcagatacttttaaatgaataacaacctggccatagtgaattccaactggtcttcgtggtgaggatcctagcggttggagtttgtaagcaacacccctcacagaatatgcctttggaaatctgttcctgattgtgtacggctaggctacaagacctcaggatctgggggccgaacacgacccaggaaatcatcatgtccccccaaatctcagacagtcactgatgaagttgatgaagttctgtctccttgtgacggtccttggccactcacatgtcc

SEQ ID NO: 523081 - DNA, 634 bp, Homo sapiens
cctcaattggttagaaaatggccagatattatttatgaaatatttstactgatttgaagataatccttctaaatcataaataatttacaaaaataaaaaaaaagatttgcttcttaagccactgagatttgggggttctttgttatcacagcaaaatctagcctatcctgactattgaaacatgagaccaaagagaccatctagtcccatcccctgttttacagatgggaaaactgaggcttaaaggaggtgaaatgaagtccccaaggtcacatggtaagtagctgacctaattctagaatcaggttctcctaatattcaggcccacacctcttttatgacaccattgtaactgcccaatgggttcaccttgcccgctgcctagatagagctgatgtatcaagagaggggaattacaatggcaaaagagtaattcatgcagagccagctgggcaggagactggatttttattattactcaaatcagtctccctgagtattcggggatcagaatttttaaagattatttggctggtatgggctcggaaagtgtggagtgctgattggtcaggcttacgataacatcatagggggtcgaagtgagttcttcttgctgatttctgaatgggatcac

SEQ ID NO: 523082 - DNA, 616 bp, Homo sapiens
ggaatcagctgagtgtcccccagcatgtcacctccacrgtgagggtgttggacctgatgacctcttctagatccatttttaaacatttctccaagtgactttagcactacccagtagaggtttctacaatgacaggaatgttcactaaaggctaccctgtacaataatggcagccactggtcacgtgttgcctttgagcacttgaaatgtgaatggtacagtgcagaaagacttatttcatttaattttaattaatttaaatttaaggagccacaaggggctaacggctaccatattagacaacacaggcctaggctactggattctgtatgtttaaaactgtgtgttccatccattctatctagaaattataccacatccacccatgtctcttcatttccacagtatccaccttaagctgagccaccaacatctctttcttaggaaatgacaatatttactccttggtttcctttctctaactttagctccctctgatccgtttgctacagtgaaaagtgatcttaaaacaaaaattgaccaagttactcttctcctcaaaatccttcaacaacttccccactgcagtaaaattgaaaacccctcatgaggcctg

SEQ ID NO: 523083 - DNA, 616 bp, Homo sapiens
ggaatcagctgagtgtcccccagcatgtcacctccacggtgagggtgttggacctgatgacctcttctagatccatttttaaacatttctccaagtgactttagcactacccagtagaggtttctacaaygacaggaatgttcactaaaggctaccctgtacaataatggcagccactggtcacgtgttgcctttgagcacttgaaatgtgaatggtacagtgcagaaagacttatttcatttaattttaattaatttaaatttaaggagccacaaggggctaacggctaccatattagacaacacaggcctaggctactggattctgtatgtttaaaactgtgtgttccatccattctatctagaaattataccacatccacccatgtctcttcatttccacagtatccaccttaagctgagccaccaacatctctttcttaggaaatgacaatatttactccttggtttcctttctctaactttagctccctctgatccgtttgctacagtgaaaagtgatcttaaaacaaaaattgaccaagttactcttctcctcaaaatccttcaacaacttccccactgcagtaaaattgaaaacccctcatgaggcctg

SEQ ID NO: 523084 - DNA, 616 bp, Homo sapiens
ggaatcagctgagtgtcccccagcatgtcacctccacggtgagggtgttggacctgatgacctcttctagatccatttttaaacatttctccaagtgactttagcactacccagtagaggtttctacaatgayaggaatgttcactaaaggctaccctgtacaataatggcagccactggtcacgtgttgcctttgagcacttgaaatgtgaatggtacagtgcagaaagacttatttcatttaattttaattaatttaaatttaaggagccacaaggggctaacggctaccatattagacaacacaggcctaggctactggattctgtatgtttaaaactgtgtgttccatccattctatctagaaattataccacatccacccatgtctcttcatttccacagtatccaccttaagctgagccaccaacatctctttcttaggaaatgacaatatttactccttggtttcctttctctaactttagctccctctgatccgtttgctacagtgaaaagtgatcttaaaacaaaaattgaccaagttactcttctcctcaaaatccttcaacaacttccccactgcagtaaaattgaaaacccctcatgaggcctg

SEQ ID NO: 523085 - DNA, 527 bp, Homo sapiens
gttcaggaaatgaggccgtcggggcgcccaggggtgctcggagggagcccgtttcccaaagcacgtgcgcgagccccgggcgcttccaagggctctaacttcacgtctgctccgtgttttcaagcgcagggggccggaggcggcaagacgcggcccaacgcgcggcgggacccggaccaccccccgccaaggccaccccgggacccctagacccgccccgacgcgggggacgtttcggtccgggcccgcgcgagcgtgcgcgacargaggagacgcgacggggcagcaccgctctggtggcgcattgctggacgcagcccggggccggggagccgcggcacccacctaggtccatggcggcgacgccggcggctgcgcggggctaacgccccctcccctccgagaactcgaacgcggcgcgggacgcacggcacgatgggagacgcaggagccacggcggccgcgcttaggcctgctcacaacctccgcccggccccgcccacagcctccgccgcgcacgcgcagtc

SEQ ID NO: 523086 - DNA, 690 bp, Homo sapiens
tgccgttcaggaaatgaggccgtcggggcgcccaggggtgctcggagggagcccgtttcccaaagcacgtgcgcgagccccgggcgcttccaagggctctaacttcacgtctgctccgtgttttcaagcgcagggggccggaggcggcaagacgcggcccaacgcgcggcgggacccggaccaccccccgccaaggccaccccgggacccctagacccgccccgacgcgggggacgtttcggtccgggcccgcgcgagcgtgcgcgacaggaggagacgcgacggggcagcaccgctctggtggcgcattgctggacgcagcccggggccggggagccgcggcacccacctaggtccatggcggcgacgccggcggctgcgcggggctaacgccccctcccctccgagaactcgaacgcggcgcgggacgcacggcacgatgggagacgcaggagccacggcggccgcgsttaggcctgctcacaacctccgcccggccccgcccacagcctccgccgcgcacgcgcagtcctcacgaacgagcgcgccaagcgcacagcgccgccttccggcagagccctcccaccagccctcaggtacccggacgtcgctcactagacccctccgcaccgtcccctgcccggcccctcttccggggtcccagcgggtcgggctcatgattccccggcc

SEQ ID NO: 523087 - DNA, 476 bp, Homo sapiens
tggctctgttttccacagcttaaaaatgtcctgaatggttgtggagtcagggtgctaaaataacaacgcaaaccgggaggaggccgggatgcagacagaaagakaggacccggcctgaaccaagcactggccacggaggctcgtggcagcgctgaggggaggacggtagcctcctgcctgtggctgccggggctcacatctgagcgccactggcttaccaggactccgactgggcttgccaggcagcggcccttgggaaccggggacgtccaggcagccaaggccttgctctcagccatgcatgccactggccttcaacaggctttccttaggtcggcattttaaacaaaccccagggtgggtcctggtgaggatgctctgttctctgtgctgtcctctaactgcagggacgctgggtccgcagcttccatgggctgggcggctctggtttgggccggggtggatcctggctgtgc

SEQ ID NO: 523088 - DNA, 584 bp, Homo sapiens
tctgttttccacagcttaaaaatgtcctgaatggttgtggagtcagggtgctaaaataacaacgcaaaccgggaggaggccgggatgcagacagaaagagaggacccggcctgaaccaagcactggccacggaggctcgtggcagcgctgaggggaggayggtagcctcctgcctgtggctgccggggctcacatctgagcgccactggcttaccaggactccgactgggcttgccaggcagcggcccttgggaaccggggacgtccaggcagccaaggccttgctctcagccatgcatgccactggccttcaacaggctttccttaggtcggcattttaaacaaaccccagggtgggtcctggtgaggatgctctgttctctgtgctgtcctctaactgcagggacgctgggtccgcagcttccatgggctgggcggctctggtttgggccggggtggatcctggctgtgcattcgtggacatcagcttctctagggtttgggatgggggatggtttatctcaaacccccaacccctcactggacctcaggcctgctgcaaagcagaggctagggttggcttt

SEQ ID NO: 523089 - DNA, 532 bp, Homo sapiens
tccttgtccaagtcattcagggattttccaagggagagggagtttttttattgtttgtttgtttgttttcagagtcttgctgtgtcactgaggctggagtggagtgcaacggcatgatcttggctcactgcaacctctgcctccctggttcaagtgatttttctgctcagcctcctgagtagctgggattacaggtgcacaccaccacgcccagctaatttttgtatttttagtagagatagggttttgccatattggccaatctggtctcgaactcctgacctcaggtgatcagcttgccttggcctcccaaagtgctgggattacaggcgtgagccaccgygcctggccgggagggagtttttaaagaggtcagacctcttcctgattttggggtgcagagccagcaccatccaaggagatgctgcggggttgggagggaggaccgggtccatgctccccagtggaggtgccggctctgggagacacagggcccctcgccctgcatgcatgcacatgcggcttctcaggg

SEQ ID NO: 523090 - DNA, 605 bp, Homo sapiens
atcccacagacagcacaaggaccttccccctttcctcccagagaggaatctgcatgtctcctccctcccagagaaaacaggagctccttgtccaagtcattcagggattttccaagggagagggagtttttttattgtttgtttgtttgttttcagagtcttgctgtgtcactgaggctggagtggagtgcaacggcatgatcttggctcactgcaacctctgcctccctggttcaagtgatttttctgctcagcctcctgagtagctgggattacaggtgcacaccaccacgcccagctaatttttgtatttttagtagagatagggttttgccatattggccaatctggtctcgaactcctgacctcaggtgatcagcttgccttggcctcccaaagtgctgggattacaggcgtgagccaccgtrcctggccgggagggagtttttaaagaggtcagacctcttcctgattttggggtgcagagccagcaccatccaaggagatgctgcggggttgggagggaggaccgggtccatgctccccagtggaggtgccggctctgggagacacagggcccctcgccctgcatgcatgcacatgcg

SEQ ID NO: 523091 - DNA, 637 bp, Homo sapiens
cagctagcccccctgccatactactaaatattttagcaaataaaaattttttaaacgtgcggccagatgtccaggttgacaaagtgcttaaggygtttgactgataaaaagctggaacccttggtaaatggggatttaaaacaagccctgaggcaagtgtgtgatattaaaaacatcctgggctcttttgtgcagggcccgggtgcacagaggcttgaaggcgagcgtccatctgtcgccgccgtgtgtcctgacactcaacaaagctggatcttggagcggtggctgctcagcagcaggcctgggtggctgggcgcacgctcaccacaaaggaggtgccatcaatattcatgagctgggcctgcgtggctgggtttacagagaggacgaggcagccacaggccagacacctctccgtggcactggttctgggccttggctggcagggaggaacaagttctgcctccagagtccctgtgagcctccgagaaacaggccaggactctacagaggccacagttctggaatggatgaggggtagagatcagcccaggctccatgcgaagccagaggctccccagactgagaggaagcgagggagagagaaggccctggaaggatgagaggccctgggagg

SEQ ID NO: 523092 - DNA, 506 bp, Homo sapiens
ttggcatctagtaggtacctgatacattcttggactcttttctgtgtatcgcaccttgcagctcatccatcaccaactcctgttggcccctaagtcccctcgastttctttgtatcaccttcatgttactaccttggtccaggctaccatcgttgtctacctgcagtgcctttctttccttccttccctccttccttccttccttccctctctccctccctccctccctccttccttccttccttccttccttccttccttccttccttccttcttctctctctctctttcttctctttctttctttttttttgacatgggggtttcaccatgttggccaggctggtcttgaactcctgacctcaggtgatccgcctgccttggcctcccaaagtgctgggattacaggcgtgagccactgctcctggcccctgcagtgcctttctaagcggccttcctgctcctgccttgtgcccgcccccggctccgaagcttgctctctgtac

SEQ ID NO: 523093 - DNA, 568 bp, Homo sapiens
tgccgggccatcaccccagcgtgtgcagtgcctgtcaccctggcccaagtccttgttgctgccgctgatggttacgtgagctgctgtcactgatggttacatgagctgctgtcgggggtcttatcccactctggccacctctgcggcgtacgtgggagtggggggggcctggatgcttctctctgctctgccctggctgggccactacaggcaagtgtctgctcctctctgaggtgtcagtctcctcatctgtaaactgaggggttcaggtccctccaggggggttatcacacggtttgctgggtggggcattgcctcttcccagagagtcagcttaacacattttagtttaatattaaatattaaagttaatattaaaactcacatgctaatgatggggtcgaattagcaatttgcttggaaaaaaccatccgggttgttttgggggtctcccaaggccccttgcacctcaggctctacatggcctggggtgcgtatctgaggacactggtgggttgagtccccccagttgctggaagsggggtagcagtcactacacccaaaagaa

SEQ ID NO: 523094 - DNA, 559 bp, Homo sapiens
cgggtggtggtgatactccttgcaggctgagttggctagattttaggatgactcaagcaggagacacccagcaccaccaaggggcatatattcttaggaaatatttttaaatgatgcctttaaatgttaaacacacagggaccttttactctctcttattttggaaaattaaaaaaaaaaaatcatacacaatgcaaaaccttgagagttaatctgaaaaggtttggagtttaaaaagtaactcaaggaaagataatgaactkgacttcttcattagatttttttttgtttttgagacagagtttcactcttggagtgcaatggcgcgatcttggctcactgcaacctctgccccctgggttcaagcgattctcctgccttagcctcccaagtagctaggattacaggtgcctgccaccacgcccggctaattttggtatttttagtggagacggggtttcactatgttggccaggctggtctcaaactcctgacttcaagtgatccgcccacttcgacctcccaaagtgctgagattacaggtgtgagccactgcgcc

SEQ ID NO: 523095 - DNA, 559 bp, Homo sapiens
cgggtggtggtgatactccttgcaggctgagttggctagattttaggatgactcaagcaggagacacccagcaccaccaaggggcatatattcttaggaaatatttttaaatgatgcctttaaatgttaaacacacagggaccttttactctctcttattttggaaaattaaaaaaaaaaaatcatacacaatgcaaaaccttgagagttaatctgaaaaggtttggagtttaaaaagtaactcaaggaaagataatgaacttgacttcttcattagatttttttttgtttttgagacagagtttcactcttggagtgcaatggcgcgatcttggctcactgcaacctctgccccctgggttcaagcgattctcctgccttagcctcccaagtagctaggattacaggtgcctgccaccacgcccggctaattttggtatttttagtggagacggggtttcactatgttggccaggctggtctcaaactcstgacttcaagtgatccgcccacttcgacctcccaaagtgctgagattacaggtgtgagccactgcgcc

SEQ ID NO: 523096 - DNA, 584 bp, Homo sapiens
ttatttctcagaaagaatactttctgtcacaaaagagagtagacatcaaaaatatggaagaaggactcatcacactccaggaacttcaacagtatgtttgttgcctttgaaattttttatctttactttctctgcatttattttttaataaatgatagcagtaaatctatgttgatttctaacatactacagaaaaggaagtttagaactagctctctctgtttcacagtctggaagtcactctcatggactttttcattgaaaggataaacaggttctgaattctatgggagctcctgggccccaggaatggaccagttggggtgcagtgacaagaatgtgcctgaacattatcacaacactgagtcccattgatgttcatttctgcattctaagtcattttaattttaatttttttctgattaaaaaataatacctgtacatgattttaaaattcatatataaaatgcataacttagagaataaaagttaccctaaaatctccatctctccacaggcataatcactgttaacagtttacwatatatgctttcaaatatatatttatatgtatgtatccaaaa

SEQ ID NO: 523097 - DNA, 619 bp, Homo sapiens
aaagttaccctaaaatctccatctctccacaggcataatcactgttaacagtttacaatatatgctttcaaatatatatttatatgtatgtrtccaaaaattggattatactctactataactgaatttgttccacttaaaattatacctaggaggatgataaaacaaataaggtaaaatgttaacagttggagaatttggtgaaggatatatgggaattctttgtactatttttttatgcttacctgttgagtttaaaactatttcaaaacaaagagaatatatatatattctcaatatatctcaatcttttctctaactgcatagtattctatgcagattatagtataatacacattatactatactgtatttaaccagcactctattgatggagatttacttttgtctgttgcctatattacaaatatttgaagttaacatatctctctctacccatatgactttttttttgtaataaagtcctaaaagttgaagtgctggatcaaaggaggatgcatatttttcacttttataatgattgtcaaaatgacctatgtaaatattctaccattgtacacattaagactgagcataaggagcttatagttcagttggg

SEQ ID NO: 523098 - DNA, 642 bp, Homo sapiens
agatcagtggatttgtggcacagattgaaaaacttacaacagaattaaaagaagaggagaaagcatttgttaacaaagaaaaaatgttaatgaaagagttaagcaagtatgaggtaaattttattttgcatctaagaatacttttggatgactacatgagggggagggggaataatatttcatgctattctaatcagttaaatgtaaaataaatattctagtatgaaagaggytacaatttcattctggatctttcttcttttcctgaagaggaagcagagcaataagaaatattttttcagaaaaaataataataataatcacacttcaaattatgtagaactgttggcaatggccttagagacaggtggagttgtgtaggaagccatttggagctggcttgaaaatagctggggcaagggagattagtaaagtcagtctcagatgtgctctttaaaaagagggtatcatgctgtcttgagaactgccaaaagccaacctgagatagaacagggcatggatgctgggggaggtggagagaaaagccactgaaagtacccagaagtgccaggtccacagaaacacaataaaaaaatgcaccttcccaaggcgatgatattaccctggaggcagccattagca

SEQ ID NO: 523099 - DNA, 530 bp, Homo sapiens
taaattttattttgcatctaagaatacttttggatgactacatgagggggagggggaataatatttcatgctattctaatcagttaaatgtaaaataaatattctagtatgaaagaggctacaatttcattctggatctttcttcttttcctgaagaggaagcagagcaataagaaatattttttcagaaaaaataataataataatcacacttcaaattatgtagaactgttggcaatggccttrgagacaggtggagttgtgtaggaagccatttggagctggcttgaaaatagctggggcaagggagattagtaaagtcagtctcagatgtgctctttaaaaagagggtatcatgctgtcttgagaactgccaaaagccaacctgagatagaacagggcatggatgctgggggaggtggagagaaaagccactgaaagtacccagaagtgccaggtccacagaaacacaataaaaaaatgcaccttcccaaggcgatgatattaccctggaggcagccattagcaga

SEQ ID NO: 523100 - DNA, 528 bp, Homo sapiens
aaataagaaaactgttaggagttttacaacttaaaagtatagtgttctatttttccaaagtatgtttgagctatatctttaagttcaagctgagcaaagttatcttattgtttcatgaaataaaattctaaattcttccttattttatatgttgccaaaggaaaaaacataatctcagcattactcttgagctctttgacaaagctggtgttaatgttgaacaaatgaaaagcacaactrtaagttttaatttttagaaagtattgcagttctacacattttacaaagaaaatgctttaaatgtggtcatattttatcccctttcttcagaaatatttcaccaaactgcagattggcaaatttcaaatttggtgataattggcatcaagaagaacataatattttattgaatggaacagaggtacaatgagaaatcaatccttttgtctttttagttcaagaaatatttttgctgttatcatcttggcccaaattttaaacgtattcattttttttaaaaaggaacca

SEQ ID NO: 523101 - DNA, 528 bp, Homo sapiens
aaataagaaaactgttaggagttttacaacttaaaagtatagtgttctatttttccaaagtatgtttgagctatatctttaagttcaagctgagcaaagttatcttattgtttcatgaaataaaattctaaattcttccttattttatatgttgccaaaggaaaaaacataatctcagcattactcttgagctctttgacaaagctggtgttaatgttgaacaaatgaaaagcacaactgtaagttttaatttttagaaagtattgcagttctacacattttacaaagaaaatgctttaaatgtggtcatattttatcccctttcttcagaaatatttcaccaaactgcagattggcaaatttcaaatttggtgataattggcatcaagaagaacataatattttattgaatggaacagaggtacaatgagaaatcaatccttttgtctttttagttcaagaaatatttttgctgttatcatcttggyccaaattttaaacgtattcattttttttaaaaaggaacca

SEQ ID NO: 523102 - DNA, 658 bp, Homo sapiens
tacctatataatggagtttattctgagatttcagtgagataacatatgagagtgctttgaacatttcagaatcaatgtaaatagataatattgttgcaaagtgtccagaaccaacagcctgttgttttaagataacagtccttttgttaacctccttattagaaacctcctgcaatcttagcaagtaattgaaagatctgctaagagacgaccctacaccaaactcatgttacttagctaatgctttctgcccacagtttcttcaaggaaagtccatgaagtgcctgccattcacagacttcttgagcaggtggcctcctggttggagatttaggaggcttccctagagggcatgccatttctaccaggtataaagcaattcattcagaggggattcacttgaaaatagcaaattctatcttctstttgtctgaaaactcctttcaggctcttctgagccccttcacgtctcacaagtgggtaagcatcttccttcacactaaggagtgcccccttcagcacaaatcattctgtcttataatgtatttgtttccaaatatgtacgagcatcataaaacagattaccatttatttcttatccatttgtgtgagtgtgtgtttgttttgtataattcacttatttttatatccccacctc

SEQ ID NO: 523103 - DNA, 655 bp, Homo sapiens
taatttgcacaagcaggccaggaagtaaatgccaggaatgttcatcctaaaaattatttgctgtttatctgaaattcacagttaactgagcattctgtatttttattggttaactctagcaaccctactcgacatgtttgcagaacaaatgttctgaacatctgctctgtgccaggcaactcacaccttctcattaagttatttgtccaattacaagaaattaagctcttgagggtaatggctgtgtctgtcttatgcaccaccggcctccatgcctgaccccgggtagactcaataaatgttcctagaattgaaatagaactaaaaaagaatttccagtggttactttctttccatggcagcttgtccaccctggaaggagtctggtgcagcggtaaggagagcctgaagggggcagtgtcaccccctggctctggcttcctgttgtccatcaccatggggaggcagggcctcaaatsggaagcacatgaaactggaacttggaaggcagaggaggcaagacaggtgggcaggcaagatggctactgccaggtggggtctgacctgctcaggtcctcaatgtggtccctttattcctcccttgttactccttggctttctgcggtgtcttctgctgaatgtctcatgcagggct

SEQ ID NO: 523104 - DNA, 615 bp, Homo sapiens
ttcattgactctcctctaatttcattcaagttatacttttcttatacatctcaatctgttgattaacctgcctccagagtaatattttagtgattatattttaatgtggagatgttatacttggtactttttgatactatatcattgcattaagttttctattcctttttattaatttacttttttattacattttatatagtctaattgagattcttctattaactctaattcttgggcatcctaacactcttgctgttagagcgcttgtygtgtactgtcatgtactttacaaagctttaaaacaaggcttatcaaatttaaactccatggcatattgaacattgataaaatgggatttccattacattctgatgattctctttcatgatggtcctttttatgttttcattgagatggctgtcctaaaacaatctaaatggcaatttcttgactaaggttccctgaattaagtatacggtgtaaattctgaacccactcatgtgcatgaaacaagcttgtgacttctctttcacatgggtgactatcttcccctacctagggtctttgagcacagacaggttttggccacttctctgggctggtgaattaaca

SEQ ID NO: 523105 - DNA, 637 bp, Homo sapiens
tgttgtgaagagtaaattagataagggatgtaataaatagcaattcataaactgcctggaactcactaaatatatttcaataattgccatcatcattattggtccatctatctcatattgtacatagatctgaaaccatttagagcagcagccccgaacctttttggcaccaggtactggttgtgtggaagaatttttccatacatgggggaggagagacgattttgggatgaaactgttccacctcagatcatcaagcattagttagatcctcataaggagcacacaacatagatccctagcatgcagagttcacaatagggtttgtgckcctataagaatctaatgccgctgctcatgcaacaggaggtggagcttaggcagtaaggtttgctggcctgctactcacctcctgctgtgtggccaagttcccaacaggccatggacaggtactggcctgggagttggggacccctgatttagagaataccatttaaaataatacaattagaataaagattgtgtatgtcactgaagtcagcattgtttctactcctttccagcagtttcatttaaaactctactggactgttcatgtccccaaaacaaattcttttgagcagttgcacttgtttaa

SEQ ID NO: 523106 - DNA, 604 bp, Homo sapiens
ctatgttttttacaatattcctgagatagaacaaaccattttaagcttcatattccagtaatacattcacatactaagattcactaaaattaatgaagaacaattaaaaaataaaaagtcatttagatatatgtagtagcaatacggctttataaatgacaaaatatttcctctatgggtaaaagtactaaagcaaacagcttcattttcataatagcaaaggacattaattaatgactacaatcacaataattttagactaagtaaaaaatactgtaactaaaggagatgctagttttgtatttcacataatactaagatttttttttaaaaaacatgggagaatcatatacatttgactattaaatmgtctgaaaatacagagaatgatgctaatgactagaaaatagcacatgccatttcattttaaagtaaaagataagacccagggaattacgagcctctcagtttaacctctgtggctgaaaagctgctaaagctgttcttatcagaaacagcctaaattttcagggagacgcagaggcttaaaaacatggctcaagcattcaaacaaatctgcaggagtacaaatttatctgacgtt

SEQ ID NO: 523107 - DNA, 604 bp, Homo sapiens
ctatgttttttacaatattcctgagatagaacaaaccattttaagcttcatattccagtaatacattcacatactaagattcactaaaattaatgaagaacaattaaaaaataaaaagtcatttagatatatgtagtagcaatacggctttataaatgacaaaatatttcctctatgggtaaaagtactaaagcaaacagcttcattttcataatagcaaaggacattaattaatgactacaatcacaataattttagactaagtaaaaaatactgtaactaaaggagatgctagttttgtatttcacataatactaagatttttttttaaaaaacatgggagaatcatatacatttgactattaaatcgtctgaaaatacagagaatgatgctaatgactagaaaatagcacatgccatttcattttaaagtaaaagataagacccagggaattacgagcctctcagtttaacctctgtggctgaaaagctgctaaagctgtycttatcagaaacagcctaaattttcagggagacgcagaggcttaaaaacatggctcaagcattcaaacaaatctgcaggagtacaaatttatctgacgtt

SEQ ID NO: 523108 - DNA, 366 bp, Homo sapiens
ccttgccaactgttccctgaacagtttagatctagatgatgtattctaaccaattaagctatattctagttgattaagctaatmaacctaaattcattattttgctccctgtatcgtgaggtcggtgaacacagcgaatagtatcaacaaataaaacattttatagtgaaaatgccttcattcaaaagcattgctggagattgttgtcaatttaataatttattcacaaaatattgtgactcccaggcccatctttacagaagccctccctggaatccttcctagtggaggaaacctgctttttattcagttgacatctggcttagccatatgatttgggttagccaatggaatgtaagcataagt

SEQ ID NO: 523109 - DNA, 605 bp, Homo sapiens
tttaagaaccattgtgatgttcccccgttactcttccctctaccataaaaatggcctggcttcatcagtctggatccccaaatggagctgcagacaatccacagctaatacttttattagcaagccactaacttctaccatagcaagccactgagatttgggggttatgcttggttactatagcataacttcctgaaagctgacaaatgttgaaacctacctataaacatttcattctctccctctagcctctgtcacaccacagacataaaatgcaatttgaagctcagtctttgaaatcaacagtaaaatgagagaaccatgtcacaggggtgttgaaattgtttagtggaatcrtgtatggagagcacctaggatggtgtgagctcataaatgtgagctccctcgccaccataatgccttcccttcatgtttcattcccacttccgtggtggaggtaggaaatgacagacaatgtcaaccagaatcttgattcttctctgtaatcgtgtgatgaacaagttataaacagctcctgcctcacaaaacttgtagacttacttctagcagaaaaatgtaccatgtgcatgcttgcttcctcatct

SEQ ID NO: 523110 - DNA, 652 bp, Homo sapiens
cggtgttatgatatacattgattttcatccccagttcctggcccataacacccatatccctgttacagtcttttgcgttataatgttgggtatgtcaggcctcaggggcaggcctctgaacttcctctgccttctttccactctgacgttcccccctctttctgactgtgggtcttaagactctcccaggagtgggtcccacactaaacctgggagaaggaatggcgatgtcatgagacttccataaaaatgcaagaggacaggtttcattgagctttcagatagtggaacccgtggagcttcctggagggtgatgcacccagggagggcatggatgctctgtgccccttccccatacctcgtcctatgtgtctcttcatctgtatcctttacaatattctttataataaacctacaaatgtatgtaggtatttccctgagttctgtgagctgcttcgcaaattaatcaagcctgaagagggtgttatggtaatcccagcttaaagctagttggtcagagttccacaggccgggacttgggaccagtgtgtgtgtgtggagaggggcagtcttggagatggagccttcaacttgggggatctgacactatytccaggtagatagtgtctgaactgaattggaggactcccag

SEQ ID NO: 523111 - DNA, 604 bp, Homo sapiens
aaaatgagcatgaaaattatacctgaatggcatcacgagtgcagggccccaggaagagaacctaaagaatgctgctscattttgggactgagaagttttaggtcagtccctgttttcttctgcacaaagtaatggtgagaatagccttcctctatctgattccctaataaataaaaagtttatataatggatttgcaaatattttttagcccatactagtaaaaataccacacactcttcacactacaaaaaagttatcaccaaatagaatgggaagattggcattgacttgcctgcctccccattctagattttattaaaattgtaaatatctccatctgttatcaaaacaaaggaaggaaaggaagtgttacctgtaaaatcttcacgatttcaacagcataatcacttctttcttaaattctggaaggaaggagaaaaaaaggaagtgtaattctgaaacgtttatggtaatagagaagggcactaaattcctgaaggacatttaatgtttactagtagtccccggatgaggaacttagagagtctttgtcttaataaagccagaaaataattttaatctacttatgtgaaaatgaaaatt

SEQ ID NO: 523112 - DNA, 469 bp, Homo sapiens
ttcagtagcttagtgcatcgcatccccaccgcacagtcactggaaggggtaggggcaatgcggggctgttctcctctgctcacttcctattctctcactgcagagaatcagtccttcccagaatcttcccagcagagctcagaatttgccttaagtcactttggccaggactgtgtcacaaatcactrcagcccactggtctggcacatcttatctgagatcaaggatctcccctcaaggcctgaataaggttggggttctgtaagtaaaaaaggggggaatattgcccaaataagtgggcaaccacaatggctgcaccatgtgcagaaaagggagaggaagaagccagactggaaaaggcataatgcaggaagcagaagaaagttccccaccagcgaaggcttcatttcgtgttatcgaggcgctaatgaaggacatgaactaaggaagaagacggagtcactcaata

SEQ ID NO: 523113 - DNA, 547 bp, Homo sapiens
catttcagaattgaagacgaggataatattactgggtcaaaattcttcagttttagtccagaccatttgggtgttccagagaccaactatctccccttttcagagacaatgctgtcattcttttacatgaggcttactcttggcacaggctaagacatttaaattggttcagggctctcagatcccttatttataatcccaatctgatctcctgatgtgtgggtgaccaggcatcatttcaagtctgatttgaaaatgtcgcctgtttcaaagatcacaaaacagttgrgatattgctacttaataaatcctttattttgcatggaatatttgatccataaaatcccatttacaaatacctttaaggcaacatttctccaagctggtattaagaagcaagaacactgtgagatgtttcagtgaaaaacacacacacacacacacgcacaaacacacacaacaacaacaacaaaataattatttcacagtcagatatgtttcttttttttttaagcccaatctttttttctataagttattggggaac

SEQ ID NO: 523114 - DNA, 610 bp, Homo sapiens
ggaactccgcattgttgggaaaaaggtaactgaaagatacgtatcagtccacactcccaccagaaatgcctgaagttctaactgcagaaaagctcctagaccctcacatgtcctgagcctagtctggaaagctgcctggaatccacgtgactgcatttgttccagggagagaatttgcacaggggcccatccctggaatgcaggctgctatagtatggtgccattttgagagcaaatacaacaacagactatatcccgccatggagaccaatagctcctgcatctccacaaccctgagacctcaccaatatccacccacacccactcaaagggctgcagcatcatagtgctggctaagcccagtggcacaaccacactgccagcatctgagaccacacaacatcccacaccccagggaacagatggtccaacacaaccggtatactggctcaaggacatagagaaccaaagtgtgagctccccagagcctgagagcaaccttcctggacctgctgccaccaacagcaacctcactcctctccagcagtggggccatgaaacaccrtaaataccacccaagggcccagagacttacctgcccaacccacta

SEQ ID NO: 523115 - DNA, 505 bp, Homo sapiens
acaaggagtgagattcttctatactgcttttaacaggtttatcgatgtgtttcaactaggtgaagttaacatagaaaatggtttaactgatctccaatcactgcattcaagtatgccttcaatcaaatttaagtttaagatccttgagggcaggcattttatttgttttgtgcatggctgtatcgccagcaactagagcaatgcctgctatgtggtaggtgctcagtaaatattaatttgctaactgaattaataaatgcttgttttagtccattttcacactgctgataaagacatactctagactgggaagaaaaagaggtttaattggacttacagtttcacatggcttgggaggccccctcagaatcatggcaggaggtggaaggcactccttacrtggttgcaacaagagaaaaatgagaaagatgcaaaagaggaaacatctgataaaaccctcagatcctgtgagacttattcactaccatgagaacagtattggggg

SEQ ID NO: 523116 - DNA, 410 bp, Homo sapiens
actcaagatacaacatttggcagggaatccctagtttggttccaaacattatgtttcctgcaagtcacaatgaccctaagagaagggagcacagactgcccaggagacaatacagcagggtgggaaggagagcaaagacgtaaggaggccaggcgcctygtgcagaaggccactgtgcatcactgggaactgctctgaatttcaaagtccacagctacaaaatgaggatattccaaggatcaaataaaatcatgaatgtgggaacaacagaccactgaaaaaaaccctaacgcctataaagttgtgggagcactaagctgtttagaaaggtatattgagactcacataaagaaccacctaacaactcttgacccagcaattctaaaactaaagagctgcaaagaggagac

SEQ ID NO: 523117 - DNA, 440 bp, Homo sapiens
atcacggtcttgtgagagcattaagtgatacatgaacagggagcatmtttgaaaatacaccattctctgctactacagaaagatgcactaaagcatagaaatggaaatatcatccttgaaggcaagcaagtcattctgctttaatgagaatggtgtgtgtggtggcagtcttcagctccaaactgaaagctgtgaaccacccccagagcagaaagaccaccattgcttcccatatgtgtgtattttaggaaggggtgatgattaagtcttagacaccatttttgtcactaccaaaagaaaaagactaaacagatgttctctgggccctttccaagccctggtttattttgttcatcagtgacttcggaagtctcttcccgacccttcactcttgcagaagagaggcaagtaagaagtgaatctttcagaagatgacaatc

SEQ ID NO: 523118 - DNA, 545 bp, Homo sapiens
aaatttatcaaattttatactttatacatgkgcagctttttgtacttcaattgtacacaatgtaatattttttttaaagaaatggaacatgtcttcagactctccattattaaaccacaaaatctaaagttgttttaattcaaaagttccagtgtaaactcacatgaaatatgaaatcattattgagatctgaaaaaatagttaaattaatctactatgccacagaatataggagctatctgagtccatttatatttacatgatgaattagatgaaaggagtgtttggatggagcgagagacaacaaattaaaacttggttcacaacagtgaaccaggcaaatgacctaacctgtaaagacctgggttaagactccagcaccactgattgattgcaagctaagggagctttaccaattatctcaacatctatggagtcaaagagttttaatataattataatataatctaaaaatgtctacaacataggtggtactgaggctcaaatgagaaaataaatgtgaaagtttttataaaactttaaag

SEQ ID NO: 523119 - DNA, 616 bp, Homo sapiens
gacaaagtactgaataagccctacatcatacagcgaggaaagactggagctggtttcaaaccctggtcttcttagtcaaactctagtgatcagcctattctatctgttactcatctatttctaattagattataaaatctttctacctgaaatacccacattattgctttacatctcaacttccattttacaagtaataggaaatctgcaatcactggtagagtaatcaactctggcacaatctttccatgaaagaagatagagagactattaaaataatgtatattgtgagctcaaggacagtctcttatatgcctagacttatcacaatacttgataagtgttgataaactttttcttagaggcaggatcttgctatgttgcccaggctgtagtgcagtggtataattatagttcactgaagcctcaaattcctgggctcaagagatcctcccacctcagcttcctgagtagttgggaatacaggcatgtgccaccatgcctggctatttttgtaattttttatagaaacggggtctcactatgttgcccaggctgttctcaaactcccgccctmaagtgatcctcctaccttagccccctgaggggcttggag

SEQ ID NO: 523120 - DNA, 481 bp, Homo sapiens
cctgttagtgaaccccagcagctcccaggagtgcctttcgggtggtttgggatgtcacaactgttttcacaataataataagacattttttaatttttttttttttttgagatggagtcttgctctgtcgcccaggctggagtgcagtggcgcactctcagctcactgcaagctccgcctcccgggttcatgcccttctcctgcctcagcctcccaagtagctgggactacaggtgcccgccaccacacccagctaatatatatatatatatatatatatatatatatatatatatatatatwttttttttttttttttttttttttttttttttagtagagacggggtttcactgtgttagccaggatggtcttgatctcttgaccttgtgatctgcctgcctcggcctcccaacatttttcacttttttaagctctctcgttcacaagtgtataggggaattttctggaatctccatga

SEQ ID NO: 523121 - DNA, 473 bp, Homo sapiens
tcccacccctcccacccacattgtacagaaggaacgctggatttggccccaaaatacctaaggctgaaccccctttctttttcttactagttgtgtagttttgtgcaattgacttagccactccgagcttcagttttctcatctgataaatgggttaaccattcctgccttcctcatcagctagttttttaaagttcttatgcaatttcagaggtaagcccagtttaaagcatgaaaaactgctgaataggggtgaagaattgtaaatgataactcttagtaattatgacttggtagcyagagaaaaaggaaatcagggcaggaagacagcagtaggcaggaatatgtccctattatgattttatctggtttgtgttttcttttcttttgctacatgggtaatacatgctcattgtagaactctgaggaaaaacacctaagcaaagagaaggatctaaaatcacctgggatcc

SEQ ID NO: 523122 - DNA, 618 bp, Homo sapiens
cctctcctaagaaaggttgacatcatgctcactttaaaggagaaatacttaagtgagtcccattgcttatcatggaacatacactgaagggtgcttttggagctgagaggcagtaataaattgctaactgacacagtggggcagaggagaaaaggaccgtgttttcccaggtcaggtgcctttgcaaatctctcacttgtccacttgcatggccactctttgccctgaatgtctaccctgcatatttcctcgctaggctctttgcccaacatgggatgtctttaccggagcctgtctaccccmacgcagcagctcagatgcagtctcccctggccacagcatggggtgacctacctgcctggtttcagtctccaaacccctcctcctcaatcactgtgttgccctttgattgcacaccatggttattggtgtccatgacttccttccccaccgcacctccctgacccttcccagagcccagagtacaacaaatgcataataaatgtgtggtgagcgagctgtttgcacacatacatggtggagctctggcccaggcttgcctcaaccctaagccctgggcaggccatgtggaaagccccatcctcataggcaggtggg

SEQ ID NO: 523123 - DNA, 563 bp, Homo sapiens
gccaccgagataaaagagacaagcccggtctgcttggcacagagaagacacccaatagatgtgagccgaatgaatgaatgagtgaatgagtgaatgaatgcaggcattggcttggactgggaaggcaggcccatggtaagggcccatcttagtttgtgcattaggtgagccctcagtgacttagcccgctgagagcaagagagagtctggtgggaacctcctctctctgggtggacataggccctgctcccatgggccctgccttcattcttttcagccaaagctcaaaactgaaatatacacttggcccttggttggaagagtttcagatcttggtaagtaagagggaaggatttctatgggcccggggtggggtagggctttcctgggaacctgaaaaggtctggggtgggaggtccttatgctaggagacctaatgtctgtgcctcagtttctctatcggagaggcgatgtctcaagaggcctttcagggctcagarttgagctttctgagttccacatggaagtgagctgagctggaagaggtggggagggaccctggc

SEQ ID NO: 523124 - DNA, 645 bp, Homo sapiens
ctgcctttattaaactgcattttccaaatgggcaaacaggatgacaaaaatgtcacgtttaaagttctctagctgtgttctgacatttaatgaaaggaaaggatgatgtaaactatggtgtttttagtcatttgtgtgtgtgtgtcaccatggtattcctgaatgccagagagtagcattagctttgtagcctccatagcacttcctagaagaagccaaagaaaataacttgctggtgggtttgtggagcccttccccaggccagacttggaacccaccaaaggattggggacrtgttccctcaaaggtagacttagagtgaaaagattcaccttgtcaccttttactggtaaaagctttggtgggatgctaaggactgttttaaagaattttccagggaaattggggtggtatacagccactggccacatatatcagtgaatttctcagagtgaaggtaagtggtcttattgcaggaaacactggtttatgtctaaagcaatcaaggaaagaaattttggcagctcactcagcagagccatttctcattgtattagtttcctattgcttctgtaataaattaccagacacttaccaacttaaaacaacatgcatttactctcttagggttctggaggtcagaaa

SEQ ID NO: 523125 - DNA, 645 bp, Homo sapiens
ctgcctttattaaactgcattttccaaatgggcaaacaggatgacaaaaatgtcacgtttaaagttctctagctgtgttctgacatttaatgaaaggaaaggatgatgtaaactatggtgtttttagtcatttgtgtgtgtgtgtcaccatggtattcctgaatgccagagagtagcattagctttgtagcctccatagcacttcctagaagaagccaaagaaaataacttgctggtgggtttgtggagcccttccccaggccagacttggaacccaccaaaggattggggacatgttccctcaaaggtagacttagagtgaaaagattcaccttgtcaccttttactggtaaargctttggtgggatgctaaggactgttttaaagaattttccagggaaattggggtggtatacagccactggccacatatatcagtgaatttctcagagtgaaggtaagtggtcttattgcaggaaacactggtttatgtctaaagcaatcaaggaaagaaattttggcagctcactcagcagagccatttctcattgtattagtttcctattgcttctgtaataaattaccagacacttaccaacttaaaacaacatgcatttactctcttagggttctggaggtcagaaa

SEQ ID NO: 523126 - DNA, 618 bp, Homo sapiens
gccgcagtggcaccctgctcgttagcatatcgtgtatgggcccttctcccttccctgcctcacttcccctccccctgtgtgtgcttcccgggatctgctcccaataaactacctgcactcaggtctttgtctgggagtctccttgggggaaacctaaactaagacaactccccgtagcactctgttgcactgttttctaagcacccactgtctccctggggaccacatgtccatccccagaaaaagctcctactctgctgagggtggtcaggacttggagttactacagcgacatctgtgggtcgccagatctgtgtggaagcaaccatgccttaactcatctcagaggattccatgaaagcaccagcgggcagatggtcccaggggtctgtttgcccccattgaatagggcaggcatggtccatgagcraagaagcctctagctgaagttggtaagtatgcactattgcaaagaatgtgtccagggcgtacaactggccaccccatcatctcccccactcaagcaacagagcttttttgcctccatatctggaagttgccctgagcatgtagaacacctgcccaatcgcagcccctccccaggaggaaagcaaacag

SEQ ID NO: 523127 - DNA, 618 bp, Homo sapiens
gccgcagtggcaccctgctcgttagcatatcgtgtatgggcccttctcccttccctgcctcacttcccctccccctgtgtgtgcttcccgggatctgctcccaataaactacctgcactcaggtctttgtctgggagtctccttgggggaaacctaaactaagacaactccccgtagcactctgttgcactgttttctaagcacccactgtctccctggggaccacatgtccatccccagaaaaagctcctactctgctgagggtggtcaggacttggagttactacagcgacatctgtgggtcgccagatctgtgtggaagcaaccatgccttaactcatctcagaggattccatgaaagcaccagcgggcagatggtcccaggggtctgtttgcccccattgaatagggcaggcatggtccatgagcgaagaagcctctagctgaagttggtaagtatgcactatygcaaagaatgtgtccagggcgtacaactggccaccccatcatctcccccactcaagcaacagagcttttttgcctccatatctggaagttgccctgagcatgtagaacacctgcccaatcgcagcccctccccaggaggaaagcaaacag

SEQ ID NO: 523128 - DNA, 517 bp, Homo sapiens
atgacagaggagagggccgaggaggccaagcaagacaccaggcacacttaaaacctctgcttgcatcttttctgttcatgtgccattggccaaagtaaatcacaagcccaagcccaaaataagrgggaaagggaagttcactccaccatagatgggaagggcagaaggagtaattgctgaccaattaaacaatccaccaaagagggaagtgtgaggagaaggagaggagaaagtggactaggaatgtcatgcagccattcacaaagagccagcccagagctagggtgaccttggtagacactgctgagaccctgatctatgccaggcaatgcactgcatactgggcatacagtatctgaataattaaggaacagtttctggtgactaaaatgtcatcagactgcatggcccttaacaatgaagtgatttaaatgggagtgagagaacggtgattccagctccttcactgttgggtgtcagccaccagccctttggcttcctaccctccctccaggtg

SEQ ID NO: 523129 - DNA, 517 bp, Homo sapiens
atgacagaggagagggccgaggaggccaagcaagacaccaggcacacttaaaacctctgcttgcatcttttctgttcatgtgccattggccaaagtaaatcacaagcccaagcccaaaataagggggaaagggaagttcactccaccatagatgggaagggcagaaggagtaattgctgaccaattaaacaatccaccaaagagggaagtgtgaggagaaggagaggagaargtggactaggaatgtcatgcagccattcacaaagagccagcccagagctagggtgaccttggtagacactgctgagaccctgatctatgccaggcaatgcactgcatactgggcatacagtatctgaataattaaggaacagtttctggtgactaaaatgtcatcagactgcatggcccttaacaatgaagtgatttaaatgggagtgagagaacggtgattccagctccttcactgttgggtgtcagccaccagccctttggcttcctaccctccctccaggtg

SEQ ID NO: 523130 - DNA, 517 bp, Homo sapiens
atgacagaggagagggccgaggaggccaagcaagacaccaggcacacttaaaacctctgcttgcatcttttctgttcatgtgccattggccaaagtaaatcacaagcccaagcccaaaataagggggaaagggaagttcactccaccatagatgggaagggcagaaggagtaattgctgaccaattaaacaatccaccaaagagggaagtgtgaggagaaggagaggagaaagtggactaggaatgtcatgcagccattcacaaagagccagcccagagctagggtgaccttggtagacactgctgagaccctgayctatgccaggcaatgcactgcatactgggcatacagtatctgaataattaaggaacagtttctggtgactaaaatgtcatcagactgcatggcccttaacaatgaagtgatttaaatgggagtgagagaacggtgattccagctccttcactgttgggtgtcagccaccagccctttggcttcctaccctccctccaggtg

SEQ ID NO: 523131 - DNA, 520 bp, Homo sapiens
cggctaattttgtactttgtagtagagatggggtttcaccatgttggccaggctagtctcaaactcctgaccttgggtgatccacccacctcggcctcccaaagtgctaggattacaggcatgagccccatggcgcccagcctgacatttctttatttaaatgagctcagttgcgttttggtttcttgcattagactgtttctaaaacacagaataagattggttaatcccttcaaaataaatgtgcctacttttccttatttggtcctgccccattaaaaactcaagctccttcatcttttaatgctcagttccacgctgayacagcgtgatattgtaaaacacatatttggtcttcaacctccttttctggcatacaactcctaaaatccttcgaatctccccaaagtgatggtttttgtatgctaatgattgactggtggctggcagcccctaacatagattcagggtggggttggtcactggtcactgggaaaccaaagcagggttagagagcttg

SEQ ID NO: 523132 - DNA, 630 bp, Homo sapiens
gaataaagacacactaggactgccttaggaaaggggttattgtctatcagaatggaatttacatggagtggcatgtcctcagggtgggatgggaaccaagacacagcctcttgtggagaccagaatgtggttcaggatctaaaaagtcatttgggaactctctactatcttcttcttctctagtgattaagggaaaagacatgatcataagaaacagtaacacagaagatttattggttggygcttgaacagggttgggtgagagaggaagtcccttacagtatgacactgtccagaagcttctagaagaggaggaggtcaagggaactcccaggggagaaagggatcagagtggggcttatgtgactaggtgaggcacagcggggagtctctgggtcagagagctccgaggggcaggggtggcttagggtcttaaaaccgtaagactcttatcttatcaatggccagcagatactgggtgtactttcacagggttggcaaagacagtgggctctaaatggttttgagtttgatgcctgtagccttttagccaacaagtctcagcctgctatgaagaaatagcctagaggccaaaacacagaggccctctttggttcatttatacaacac

SEQ ID NO: 523133 - DNA, 602 bp, Homo sapiens
tccagtcaggactctcatcaagtaaaccagtgacattaagggtgctggacaactctttggaggatcatatctatacccttggggtacactaagaagcataattgttcaactatattctttccttgatttttttttctttgctggcacaagttaacttgttccctcaccttagggcttacttgggggatyatacatacagctcatcactctgcaaaattatcatggatgtaaactaggtaaatatgcaaactagactgtactataagctggaagattacaatttccacataatgaataactgtgtaattctcactgggcaggctccaagaaagaataagaaatggtcttcatcctcgtggagcttacaatctagttggatgcacaagaaaatcacacactaaaatgataattatatagaatagcattggcattctgaggagagagagagagaccaatgttggggaaggcttgaaagaggaagtttgtaggacacataaactttggttatgctggaaagggagggaaaggccctctaaatgaggggaagagtctgggcaaaggcatggaaatagggatgctccatgcgttggagacataggaag

SEQ ID NO: 523134 - DNA, 486 bp, Homo sapiens
ggtttggccttggacccaggcagcattcttggcgagcagatattttgtggtctcggttgctggaatgatgagatggtcatgggggcaaagaagatggagagaggaggctgttgtaggaaagttgcactattactgattttraattatactcttatccgaagatttctccgttggctctttggttcaaaaccagtggtcaggacggtagcttaagacactccacctttcaataatcgccattctaaatggtgtgagatggtatctcatggtggttttgatttacatttctctaatgaccaatgatgataagccttttcatacatttgttggccacataaatgtcttcttctgagaagtatctgttcatatcctttgcccactttttgatggggttatttgttttttttctcgtaaatttgtttaagttccttgtagattctggatattagccctttgtcagatgaatagatggcaaaaattttctcc

SEQ ID NO: 523135 - DNA, 497 bp, Homo sapiens
tattatgagttgcgtggttgcaaggcattagtacrcttatatccgtcagtgttcacccaccaaagactgtcaggaacacttctgtagtcgaagataaagttaggtttactgaccttgctgtgaaaaggggggacgcacagcagggaaatcactgggcaccttgggagaagggacttgggagtgatttattacagcatttgggcatgtgctgggaatgtctataaggagagtttaagagagcagcagggtcctgctcaggatccagctccatcagggaggaggggcaagctcataattagatatctcaataatttttatctagatggtaggcagattaaagtgggactagagttgtcattggtaaagaaacaataattactcaatgttagccagaaaaaagagatgtttaggaaagtggggggttgtagagggtttgttttggatgtggtgagagagttgcctgatgactgccgacattctgggagcacggcttttca

SEQ ID NO: 523136 - DNA, 497 bp, Homo sapiens
tattatgagttgcgtggttgcaaggcattagtacacttatatccgtcagtgttcacccaccaaagactgtcaggaacacttctgtagtcgaagataaagttaggtttactgaccttgctgtgaaaaggggggacgcacagcagggaaatcackgggcaccttgggagaagggacttgggagtgatttattacagcatttgggcatgtgctgggaatgtctataaggagagtttaagagagcagcagggtcctgctcaggatccagctccatcagggaggaggggcaagctcataattagatatctcaataatttttatctagatggtaggcagattaaagtgggactagagttgtcattggtaaagaaacaataattactcaatgttagccagaaaaaagagatgtttaggaaagtggggggttgtagagggtttgttttggatgtggtgagagagttgcctgatgactgccgacattctgggagcacggcttttca

SEQ ID NO: 523137 - DNA, 587 bp, Homo sapiens
aacctcagaccttcagatcccggcccccagtggacatggaacctgagtgaggaatgaacagtgtctcagttgctgagctgtgggacatggtggctgctgcggggtcttcagcttggtcatggcagggtgcccatggcctacattcctttctcctcctcttctctgtgtccttggcaggctgcccctgcagaggaggaccgtgggtgcccagactgagtaggyaagtttagctctaagagaacaggttgagagagcccatcggttgtgtacaggcaacttctcagccaagctctgccagttgctggtgttcatacttggctgatgtctccacttcaatacagagcctgcaggggatgcaggctgtgaatgcagtccctggaaccagactgtgggctcagccatgagacctgggggatgtacttcaccttcctgacttgggcttttcaacttggaattggaggccagaagtccaccctgaagcgtggctgtggggtggaaacaggccctccagcagggcaacagcaggggctccttgcctggcagcccctccggttcttcagcccttagcctcccctctctggctgtgg

SEQ ID NO: 523138 - DNA, 536 bp, Homo sapiens
cattgtatggtgctatgtgctgcacactttgcacacctgatcatttaatactcacaatgatccctagcagatggatcctattaccaagttcattttacagatgaggaagcttagacccagcaaggttaaggggctgtgctcaaggtcttaccttctaggagaggcagagctggatctgaagccatttctgttctcagcccctgctgtgtgctttcctaccatcctctccagactcgccctgagcccawgttgctgaggcatgtggcacggtgcctggcacacagtaggctcacagtagtggctgctttgatgatgaccataaactgggatctggggtccttgagatgattctaccaaggggacccgggggaagctgagccctggggcaaagtgggggccagcacaggagctgctggggaaggaacagagcctgtgcggtgggaagataggacatggagcaaagaggatcttgaatcagaccccgtggtcccctcctacagagggttaaagcaagccagcctccttccggctgagcg

SEQ ID NO: 523139 - DNA, 536 bp, Homo sapiens
cattgtatggtgctatgtgctgcacactttgcacacctgatcatttaatactcacaatgatccctagcagatggatcctattaccaagttcattttacagatgaggaagcttagacccagcaaggttaaggggctgtgctcaaggtcttaccttctaggagaggcagagctggatctgaagccatttctgttctcagcccctgctgtgtgctttcctaccatcctctccagactcgccctgagcccaagttgctgaggcatgtggcacggtgcctggcacacagtaggctcacagtagtggctgctttgatgatgaccataaactgggatctggggtccttgagatgattctaccaaggggaccygggggaagctgagccctggggcaaagtgggggccagcacaggagctgctggggaaggaacagagcctgtgcggtgggaagataggacatggagcaaagaggatcttgaatcagaccccgtggtcccctcctacagagggttaaagcaagccagcctccttccggctgagcg

SEQ ID NO: 523140 - DNA, 536 bp, Homo sapiens
cattgtatggtgctatgtgctgcacactttgcacacctgatcatttaatactcacaatgatccctagcagatggatcctattaccaagttcattttacagatgaggaagcttagacccagcaaggttaaggggctgtgctcaaggtcttaccttctaggagaggcagagctggatctgaagccatttctgttctcagcccctgctgtgtgctttcctaccatcctctccagactcgccctgagcccaagttgctgaggcatgtggcacggtgcctggcacacagtaggctcacagtagtggctgctttgatgatgaccataaactgggatctggggtccttgagatgattctaccaaggggacccgggggaagctgagccctggggcaaagtgggggccagcacaggagctgctggggaaggaacagagcctgtgyggtgggaagataggacatggagcaaagaggatcttgaatcagaccccgtggtcccctcctacagagggttaaagcaagccagcctccttccggctgagcg

SEQ ID NO: 523141 - DNA, 653 bp, Homo sapiens
aatcagtggcacaggatacagtttccacacatctccccatcctggttgcttccccgaaccattttccagtctgtcagtgttcttctgaatatacaggatccagaactgagcacaaaactccagaaataggtgaatggagctgagcagaatgaaactgtcacctcccttaccgtagataccggacttctaattacatgaccagacatttaataagcttgttttgtttccctgggtggcatatatcaagctactagcaagcgttttgttttcatggtcctctacccacatattgttgcaaaacctcactttactgcccttctcccttaatttcacgcttataatagtattgcccctctctcacttcccaggaatgccaagycgattacagctcaagagcccaatcttgactggtccgtagcctggaacatggtgctgagatagatgctgtaactgagtttgggctcactgagaaagactgctgcaattgattaacgatgtctgccaagctgtgtaaagtgaagtaatgtcattccctatcacaagtcctaacctggggtccatggaaagaatttagttggtctgtcattaacttggatagggaaagtattacatctttaatttcattaacctctatctgaaacttatcattcctt

SEQ ID NO: 523142 - DNA, 653 bp, Homo sapiens
aatcagtggcacaggatacagtttccacacatctccccatcctggttgcttccccgaaccattttccagtctgtcagtgttcttctgaatatacaggatccagaactgagcacaaaactccagaaataggtgaatggagctgagcagaatgaaactgtcacctcccttaccgtagataccggacttctaattacatgaccagacatttaataagcttgttttgtttccctgggtggcatatatcaagctactagcaagcgttttgttttcatggtcctctacccacatattgttgcaaaacctcactttactgcccttctcccttaatttcacgcttataatagtattgcccctctctcacttcccaggaatgccaagtcgattacagctcaagagcccaatcttgactggtccgtagcctggaacatggtgctgagatagatgctgtaactgagtttgggctcastgagaaagactgctgcaattgattaacgatgtctgccaagctgtgtaaagtgaagtaatgtcattccctatcacaagtcctaacctggggtccatggaaagaatttagttggtctgtcattaacttggatagggaaagtattacatctttaatttcattaacctctatctgaaacttatcattcctt

SEQ ID NO: 523143 - DNA, 634 bp, Homo sapiens
gggatgaggccagggcagggggcagtagatgggaccaggaaagctggtgggtgagaggagggatccatgcggggctgggagactgacctgtgtatgtggcacaggcacagtggttcgtggcagcagactccagggcctgactcacctggtggaaactgtggygtggctttggctagctgtgtgacatcagcctagttgtggtccttctctgagcctcaggactctcatctgtcaaatggggctgtcaaacaattcctacttcccgggggtgtttggagaatggttcgtagcgcctgatgcacaggggctacgaaatgcttgacatggtgaagtccagaatcagagtgcattagtcattcactcattcagtggataaatgtttattgagtgcctaccatgttctaatggttcctgggaaagcagcagtgactagaacagagtccctttcctcttggagatgacattctaagaggggagacagaccattaatcgtgaaacacataagcataaaaggtcataccagcaatcccacttctgaaaacttattctatagacatgtttgcatacatgtggaatgaatgcattcatggttatttattgcaattttgtttggcatagcaaaatcttagtaatg

SEQ ID NO: 523144 - DNA, 586 bp, Homo sapiens
aggtgggggggaagcacagcagcagtttgaagaattgtggggcggagggttcccagcggtgtccagaaaagagggggaccctgccacccatctcgtaccgcaggtgcttaacgcctggttattggcttggggatctacaggctcccatggctgggggtgggggttaggggaggtgggaggtgggagggagaggcctgggaatttgcctgacagtgtctctttgtgcatttttctggggttttgccagcagttgacccagcctcagaaaggtagcctgtgattcaggtagtgttgaaaaccagaggcccaaaggcaggatamatctgggcctattttagaggccaatagcgtggtggttcagaaaggggttccaacagttctccctactcgccgttgaggatttgcgtcaggtaaccaccctgcgcccggggcggtggaggtgatgggctgagaccgtgttggcgcagtgctgggtacacggtgagtgctcacaagtgctggttcttgctgttttctgtgattttccttggaggggcacagggaaaaccaaaaatggctggtgctggaaagaggcccttgagtttca

SEQ ID NO: 523145 - DNA, 640 bp, Homo sapiens
ttacatgtgcatactgaggaagtaaatggaaaggttctgctaaatttaggtgggcagcatcaagccagtgctgtgaagcaatacagtgacagacagaacaagttacctgatggattaactcagtgctcttgggtttattaaaacagatttcttgggttggggcaggggagataagggaattatttatccctagaggggctccagaccaggagatgttactggggcatgagtaggctctggagagcgctgtggaaaactcctgctctccagtgttccggacatggataataaccaggtgttgtatgcaaaaataaaaaagaaaaagagaacaaagtattttttgatggaaatccatggtcccaggggatatagacttacattctgtatcattaatttatcattgtatctctctgacttcattgtgcgatttctgtttgcattattaatttagctaaagagtatctacagttsagtgactttttcagttgcattgagagcagtctaaattgggcttttaaagatacttctttctgttctttaggaagactttatgcagttatcacttcctttttccttcagcaaaatgaattgaataaaactctcatatttctatgagaaagtgctctgtctttggaaggta

SEQ ID NO: 523146 - DNA, 629 bp, Homo sapiens
tttcagcaaaatcatgttttagttaatccttatactaattcctgaaccattccttatcatatgagttatrgcttattgtttagtggaaatccaagcttctcttctttgggcagtcatatgaattggtcttggtcattgacctccagggcctttcctgaagcatagtacagtcactggttgaatcaataaatagttgttaagcatcagttctctttgagaagcaacagtaggcccctctatgaaggccacaattttcttaccttcagagtgcttctcagaaagcaatgttctttctaaggcacagaatagtgtgtgataaagtgccagtcacgtgggacaaacatgagcaatgagaagaaagaagattctgcttcctgtgaattgagtaatcccagccctggtggaggaggtggtgtgtgagctggcatagaaggatgtgcaggatgccagtcagtggtagaaaatgagcttggaaagctaccttgtgggatttggtacctggaactatggtcccaggctaagaactgagatttcctcctggaatttgtgtgtgtgtgtgtgtgtgtgtgtgtgtgtgtggcagcagatgaaggaaggacttgtgagcagagcagtcacatcccatgtgt

SEQ ID NO: 523147 - DNA, 533 bp, Homo sapiens
tggctggtccagtatcccacagtgtataactgatgtgactgggtatggtcctcagatctcctggtctgaaccttctactcctcctagctctttcctactcccctatttaagaaaaggaaaataaaaaggctgcctgcatcctgmcaagtgaaggggcttgagcaagaaactccggccaacagggcataaccccttgatatatacactcattgcccctctgaggtcctgatcccatccacagcatagagggcatctccctcaagacccccattgaagtaccctccagcctgcttgcaaacggatattgagtaggtatgaagagggtagaagaggcaactgactctttccaaatctaagaacatcagatcaacaggaagataatttctgcttcctgccatgacagcatgccaaattccagactatctcttccactgtaggccactaacaaaactatttttagacattagaaggcaacacaagactgtggccctgagggaagagaaacacacaaggtgagaccaatgatggcccag

SEQ ID NO: 523148 - DNA, 533 bp, Homo sapiens
tggctggtccagtatcccacagtgtataactgatgtgactgggtatggtcctcagatctcctggtctgaaccttctactcctcctagctctttcctactcccctatttaagaaaaggaaaataaaaaggctgcctgcatcctgacaagtgaaggggcttgagcaagaaactccggccaacagggcataaccccttgatatatacactcattgcccctctgaggtcctgatcccatccacagcatagagggcatctccctcaagacccccattgaagtaccctccagcctgcttgcaaacggatattgagtaggtatgaagagggtagaagaggcaactgactctttccaaatctaagaacatcagatcaacrggaagataatttctgcttcctgccatgacagcatgccaaattccagactatctcttccactgtaggccactaacaaaactatttttagacattagaaggcaacacaagactgtggccctgagggaagagaaacacacaaggtgagaccaatgatggcccag

SEQ ID NO: 523149 - DNA, 575 bp, Homo sapiens
gggatgccccactcacccttccaggcaagaatgagtcctcccattttacagatgaggtaacagaggctcagagaggcaaagtgatgggctgtgggacacacatctggaaaatggtacagtcagcacatacacacgcacacatctggctgtgctctggttgcctctaacaagcatttattgagcccctgctgtataccgagcatttgtgatatttgtgagcatagtcattacctacatcctctcataggctggaggcagcgtaagaggaaggagatcctcctacatggcgtgatgggtgcagcagcagcagcaggtgacactcatgcaatgtgccaggcacacacccaaggatgtctcatcactccatgccacagccctgtggtcacgtggtgaacatagcttgggtggtgatgagcagccagccttggtccagcccctgttctcaagtgtgggyggtcttgggttgactggggttggggggaggttaggaaacaagccctgtgaccattggacctttctcaggtagtggtgggcggtgtgagctttatgtctttgctctcaggacaacacagagc

SEQ ID NO: 523150 - DNA, 452 bp, Homo sapiens
atgctgctgttcattgaccctgtgatggtactgtggtgtagtttatacaattgaaccttcggatttcacttactacctgagggtgggtttttaatggtctgttattattatctccattttacagatgaagaaaactgaggttcagagattctaagtagggaggatttgaatctggcgcttgattgccaaggcctgtcccctaactgcctcctggttctctggggagggagggatgaggcaggtcaggggctctgggctggcttcccaaaggaggaggtgagggctagactgagacttgacggacaagcaggcgtgggactgatggagcgcgtgtgtgtgtgtgtgtggagagggggtggcggcttgggcagggcttactrggtggggcccagcggggctggaaggtgggagcaggggagccggctgcaatctcagcttgtcacctgggttac

SEQ ID NO: 523151 - DNA, 484 bp, Homo sapiens
tgcccttcacaccccagtggagcccaacggttagaaattcaggctctcctggtggtcttakgttcaaattctggttctgctgggtggaccttgattcaccctttgtgtgaccatttgagctttgattttttttccatctgtaaaatggagataagaaaatcagtttgcacagggggctgggtgaaaggtgcataaatcttagccaaatgcttactgaagcatatactacactgtattataatgatctgtgtaaatgttcatctccatatcttgagggcaggaactgatactgattctgatgtatctctttgcccctagcacccagtatggcttaaaataggtattaaataaatgtggagtaaatgaataaaaaatgaaataaatggatcttagaatcctattctcataatttgatacataaaacctaaggacctcatgtcacataactgcaaagtttgaaggatcttagagatcaacttccgga

SEQ ID NO: 523152 - DNA, 536 bp, Homo sapiens
tgaaaatatacttttatttaaaaggcaaaagcatatagctatgagtgataagtgatcagagacgacatctaatccaaactttcaatttgtataggtaatcaaagagatttaataaatttctcaaagtcacacaaatgcaaatgcaaataaaaactcaagatttctggtctgatgagtatcaaattactgtaatcaataaagtattaaaataaaacaatggcattatatggttctcattaaatttaaaaggctcaaacagacaactcaaaatgtgtctctaatattctaggcgatttgttgccattttcacatcaacattggtttttactgctaatcctgttgattttaaccttgttttgtgacagttataaagactggtaagatcaagtggccaatgttatgattatttatttgaaaggtgaaaccagaaaacaaagcctgattctaaataaggtcattttaaatggcaaatgaacagatgccagttttaagrgactccatcgtagcctttctcagtgagtgagattttaacattg

SEQ ID NO: 523153 - DNA, 568 bp, Homo sapiens
ggggccagcaaatggttgactcacagggattgcaagtcacgagagaaagagtccagctcaatccctctgtgacaggacatcattaagtcacatcttcacagaaagggttggctgtttagggcgtatggtgtccctattttctgtcctgtcagaaaataaacctgacacacccacctatggagactccttcccatatgcacactccagtagtgaactggtgcagtcatgccaagaggtaccttaaaccctgtcagaagggcccagaaccactcctactcgataattaccacttagttgtctaacagaaacaatgcacaaatcaaccagcctcactttcccttcccaagaacgtagagaagcttttcactccctgcaggagagtgtacattggttggggtctgtagtcctcaaacctgaatgcacacaagcatttccaagaaaacatgtgaaaaatgaatgtcaagatcccttccacagaacccttggagaacagaagtggatctgagctttatgctttctctaaatcaktggttcttaaactttcctgtgcatcagaatcacctggagt

SEQ ID NO: 523154 - DNA, 440 bp, Homo sapiens
ctctgttcccagagattctgtttctaccttgctgagagtcactgccaggaggagtcattgaggccctcaagtggcctcagatacactgagaggtcactatgaggggatatttccaggcacaatggaaagatagcrtctgccccttctacagaaaactgctggctctacctttttagtaatagttcacttttgtaggcatatgttttgtattcacctccaaaagatacctggcatagagggtaagtggatagaagccattttattttcctaggtcttttgctacagacacttatagtttacagtcctagatttgcatactagggatccgagactctgtataactcaagcagcaaatttgagctcattttaagcattccagcttcaaagaaaagcctgaatgtttagaaaaaggtaaggagtgataacattgtaaaatccag

SEQ ID NO: 523155 - DNA, 642 bp, Homo sapiens
ttcccacttaccctatttatcaaaagctgaatttggtgatgtcacatcttctggtttgttgggacaatcaatccagtaactgattccagaaaactacacacaaaacttggaatgaaatgtgatgaggaatttcagaatccctgcaattgcttttttcagtgcttctgagccatgcttataaatcattgcttaaaagagatatgcttgtgtgtgaaggtgcttccagtacaaaactaatgttttttaattcttgcaaaataaagtgtactccactcagttttacatctttatttttgatgtgccaagtcagacatttcacttcctcccatgattaatgaaggatgattcattttttaaaatactacatactaaatctgtactgtgtttggtcatcatrgctctaaccaccaatgagtctgaacccaaatgcccagtgctgttttcttaggagaatggattttgtctgctggttacagatttctgatataccagttccagcttttctaaaaatgtattgtcataacatgtagaacagttttttacaattgcttaaatattcaatccaacttcacatgtgaaaaacatgtttacctgcatttattcatcatattatttaatcagtgtttcccaaactgatgcata

SEQ ID NO: 523156 - DNA, 570 bp, Homo sapiens
tagcagcaagatttgacgccaggagcaaacacagccaggaagtggaggagcagatgactcagcccacagggcaccagaggcggggataatttctttgcccaggggagtagcagtagtcatctgttgtgtaggcattaccaagttcaattgtgtgagcgagaatggaaatctgttcttctgcagcttgtgaaagaaattaatcacagctctctgcatgacaaattttggattttagttcacacagtccctgaattttccttcaggttaaattttcctttccttgggacctcgtgttgcctttactacagcccaactctctcttgcccattttgcaccccaatccaaatataaaacaaaacaactgggaattggttctaaatgccyctttcacatctgctcaggccatcattacagaatttcatttgcaaaaaaaaatccagatgaaaccaaatgaggcattttattctggcatttcattttattctacatacagataacgacagggcagtgaggagttttggtctgtggcctcttcccaggactaacaagagcctgacacaagaaaacaca

SEQ ID NO: 523157 - DNA, 570 bp, Homo sapiens
tagcagcaagatttgacgccaggagcaaacacagccaggaagtggaggagcagatgactcagcccacagggcaccagaggcggggataatttctttgcccaggggagtagcagtagtcatctgttgtgtaggcattaccaagttcaattgtgtgagcgagaatggaaatctgttcttctgcagcttgtgaaagaaattaatcacagctctctgcatgacaaattttggattttagttcacacagtccctgaattttccttcaggttaaattttcctttccttgggacctcgtgttgcctttactacagcccaactctctcttgcccattttgcaccccaatccaaatataaaacaaaacaactgggaattggttctaaatgcccctttcacatctgctcaggccatcattacagaatttcatttgcaaaaaaaaatccagatgaaaccaaaygaggcattttattctggcatttcattttattctacatacagataacgacagggcagtgaggagttttggtctgtggcctcttcccaggactaacaagagcctgacacaagaaaacaca

SEQ ID NO: 523158 - DNA, 511 bp, Homo sapiens
agcagagcagaaaaatgagattagtccctgtgagcattttgctacatagatgtcaagccagggtgtgctagcatcacctagagagcttttaaatatcctgacacccaggccacacgccagaccaattgcatcaaaatctctatgcgggaggcccaggcaccagtgtcttttagagtttctggggtgattccagtgatcgagaattgctttaaaggctacagcttctcaaatagtgacacttccagaaccttagatacatattagaaccacctggaagctacaaaatttcttatgcctgggtcccattttagaggctctarctagggtgtgacctcggcatcaggattttaagactccccaggtgactgtaatatatagccagcgttgagcccactgccccacaacagaacagagcactaaagcggacgggctgtgtaccaggagttgaaggaccccacacttaaggagatagtagaagagacatggaaagccatggaggcaaacaatgaca

SEQ ID NO: 523159 - DNA, 504 bp, Homo sapiens
ctggtggttcttctgcatcctgtgttatctgttggagtcactgacatggctgcattcagctagaaactcagctagggttggatcatccaagatggctagagcctcaactagggtaatcagatggcagaaagctgtctaggattctctctccctacttggtatcttatcatgcagcagcctttcccaagattatttacatcgttttggatcctatgatgagaaaaattggggtatccaaagctttaaagtcccaaggcaaaaaagtctcacagcatcatttttgccatattctctcagccaaagcaattcagaaaatgagactagattcaaatagaggggaaataaaccaacctcttcatgagaaaagtgatagatgtscatataccaggatgggaaaaactgtcaggggccatttttgtagataatctaccacagaaaacaaaattccatacacatctgtgtataaagagataagaaaaactttttcagaaacacgtatgctta

SEQ ID NO: 523160 - DNA, 618 bp, Homo sapiens
caatgcaataaacctggaaactaataacaaaaatttaaagagcaacaacaaggaaatctcaacccttggaaatttttaagtgatttaaatactaaagtcaaagaggatatcaaaatcttaagtaattatatacaagattgccttcacacttgtgttttcaattctctcaccagagcgactccatcttgaawacgggatgggtaaaataaggctgagacctactgggtgacatgcccaggagtttaaggcattcttagtcacaggatgagacaggaggtcagcagaagatacaggtcacaaagaccttgctgataaaacagcatgtggtaaggaagcacgccagatcccaccaaaactgagatggggatgaaagtgacctctggttgtcctcatcgctttttatatgctaattataatacattagcatgctaaaagacactcccacaagctccattaaagtttacagatgtcatggtaacatctggaagctaccctatatgaactaaaaaggggaggaaacctcagctccaggaattgcctattgctttccaggaaaactcatgaataatccattccttgtttagcatataatcaggaagtaacaataagcataagcag

SEQ ID NO: 523161 - DNA, 618 bp, Homo sapiens
caatgcaataaacctggaaactaataacaaaaatttaaagagcaacaacaaggaaatctcaacccttggaaatttttaagtgatttaaatactaaagtcaaagaggatatcaaaatcttaagtaattatatacaagattgccttcacacttgtgttttcaattctctcaccagagcgactccatcttgaaaacgggatgggtaaaataaggctgagacctactgggtgacatgcccaggagkttaaggcattcttagtcacaggatgagacaggaggtcagcagaagatacaggtcacaaagaccttgctgataaaacagcatgtggtaaggaagcacgccagatcccaccaaaactgagatggggatgaaagtgacctctggttgtcctcatcgctttttatatgctaattataatacattagcatgctaaaagacactcccacaagctccattaaagtttacagatgtcatggtaacatctggaagctaccctatatgaactaaaaaggggaggaaacctcagctccaggaattgcctattgctttccaggaaaactcatgaataatccattccttgtttagcatataatcaggaagtaacaataagcataagcag

SEQ ID NO: 523162 - DNA, 442 bp, Homo sapiens
gtgacttggagcagaaaccgaagtgcagtggactgttttcctgggatctgagctgatgataaatgataaataagtcttgggattttagaaggcaggaatcacgaaaaccaacaccaatgaaatccaagtctcctctgctactatctgaagtggaacagaacagaaataaggtctgttttctttccgcttcgctgttctgtttctgtccraaacaaccgtctctctgacaccttcgaggtgtccctttgtctctttgaggttccctccgtgacactggctactttgtaactctaacactgtcagcaattaattcccaaaggtgaggtccccgtgggaagtgggaaaacccagcgaatcaccagggacccgcctgattccgaaaaggctggatgctggctgggaaccggccccgcagctccggcgtccccgcctgcctgcgcgg

SEQ ID NO: 523163 - DNA, 516 bp, Homo sapiens
catactgtagtatggcccaactttagagaaccttctcttgactccacttttacttccagctcccacatcttttctcagctttcattttacaaagaactctttacgagtgcatcggtgctcactgtccccaagtctcttcctccacttcttccgttgtaccactctagccaggatactgccccctgaactgattttgtcaaggtcaccgatgacccccctgttttcaaatccagtggtcagtctttgatcmccatatgatgtgattttctagcagcatctgacattaaaccaaggatggggcccttctgaatgcagggccctgtgtgactgaacagtttgggtgccacgaagccagccctggaaccatgctgatcttgggtttcatgtcacaagagacacaagcttccactgacaagcactccaagatcccaaggaataatcccagcagctaaaagggtcccggcactgcctgagccagacctctgttcaggacttcacatggctgcctcatctcag

SEQ ID NO: 523164 - DNA, 630 bp, Homo sapiens
tcacgagccaggcatctgccctctgagcatttggacctgctgktctggtaagaacatgccccaacccaagcacaagcaggacgacatcagcaccatagggacaatagtgaacttggaagaggcaaaaggacttatggcaggatgggcagagtagaggtgggaaggaggtgagacccccacctagctagaccgaaagtctcaaagagggcacaggagtgtgcttaaggtgctgactacagagaaggggtgctaggatatgagacagtgacatgaggtccttagcagagctcctggccctcctcgatcttcattaatggctagcctgtcaggaaggaggagccctacaggcctcttttcattttgcttttgaattataaaagtaatacacattaatagcccaaaactggaagtggcccagatgtccatcaacaggagcataattaaacacaccgtggcatatttacactgctgtaaaaataaatgagctgttgatgcaatgaaaacattgaaggagtctttaaaaatgatgcggatataaaagagtacacgctgcaggattccattgctatgaagctctaggacaggctgaactgccttgtggtagagaaacagggcagtgcctgcctcagg

SEQ ID NO: 523165 - DNA, 630 bp, Homo sapiens
tcacgagccaggcatctgccctctgagcatttggacctgctgttctggtaagaacatgccccaacccaagcacaagcaggacgacatcagcaccatagggacaatagtgaacttggaagaggcaaaaggacttatggcaggatgggcagagtagaggtgggaaggaggtgagacccccacctagctagaccgaaagtcycaaagagggcacaggagtgtgcttaaggtgctgactacagagaaggggtgctaggatatgagacagtgacatgaggtccttagcagagctcctggccctcctcgatcttcattaatggctagcctgtcaggaaggaggagccctacaggcctcttttcattttgcttttgaattataaaagtaatacacattaatagcccaaaactggaagtggcccagatgtccatcaacaggagcataattaaacacaccgtggcatatttacactgctgtaaaaataaatgagctgttgatgcaatgaaaacattgaaggagtctttaaaaatgatgcggatataaaagagtacacgctgcaggattccattgctatgaagctctaggacaggctgaactgccttgtggtagagaaacagggcagtgcctgcctcagg

SEQ ID NO: 523166 - DNA, 630 bp, Homo sapiens
tcacgagccaggcatctgccctctgagcatttggacctgctgttctggtaagaacatgccccaacccaagcacaagcaggacgacatcagcaccatagggacaatagtgaacttggaagaggcaaaaggacttatggcaggatgggcagagtagaggtgggaaggaggtgagacccccacctagctagaccgaaagtctcaaagagggcacaggagtgtgcttaaggtgctgactacagagaaggggtgctaggatatgagacagtgacatgaggtccttagcagagctcctggccctcctcgatcttcattaatggctagcctgtcaggaaggaggagccctacaggcctcttttcattttgcttttgaattataaaagtaatacacattaatagcccaaaactggaagtggcccagatgtccatcaacaggagcataattaaacacaccgtggcatatttacactgctgtaaaaataaatgagctgttgatgcaatgaaaacattgaaggagtctktaaaaatgatgcggatataaaagagtacacgctgcaggattccattgctatgaagctctaggacaggctgaactgccttgtggtagagaaacagggcagtgcctgcctcagg

SEQ ID NO: 523167 - DNA, 577 bp, Homo sapiens
ggtgggaagaattggagcacagtaccctccaggctttgagttgggggcaaggactacactcgataaagagcagcccactcaaggacataaacccagtgtctgattatctgtacacttatggatgcattaaagtaacctgctagtgtccttagcttactgcaaagagcaaatgtaattcctctctagagaatgttaacatttccagggcctcaaattactctgtttttcatatataatgcctagtactcaatttaaaaatacatgtaaataaatacatgacgagatatgatgaagaaattattgaaaaaaatgaggatgatgtggtttggcactgtgtccctgcccaaatcccatctttaattgtaatctccacgtgttgaaggagggacttggtgggaggtaattggatcatgggggtggtttcctccatgctatccgtgatagtgagggagttgtcatgagatctgatggttttaaaagtggcagttttgtccagcrcaatggatcacacctgtaatcccagcacttagggaggctgaggtgggtggatcacttcagatcaggagttcaaaaccag

SEQ ID NO: 523168 - DNA, 535 bp, Homo sapiens
aaaaggaaaggtaaatgctaatttggagatggcatggttatgtacaaatgtcaacaattatctacaaacaattagaaataaaagccagtttggtaaggtgactggatttataacaaatgcacaaaaagcaaaaatcaattgtatacctgttacactttttgtttgataaagtagaaataattcatcacaaacaaggacagaaaggaaagggattaaacatgtccttaaattgtgtaccctagatgcctctcttgcttcacccaaggctcagtccagatgaaaatggctcattatttgttagagaaatttaaattaaaactgtagtgacataccattctacacatactagtttgtctaacattaaaagactaasaataactattacaaatgaagatacagtacaagggaaattctcatagactgttggagaaaaagtaaatggatgcagctacccacttacatatttataccacaagatacaagcaaggatgtacatagcagcattatttgtttaaaaaaagatgaatttttaaaa

SEQ ID NO: 523169 - DNA, 592 bp, Homo sapiens
acacagtgaaggcaagaattcccaaaatgcaaatcagaaaacattaaaataatactatgaaagtttggttttcacaattagggtatttttcaagttcaattcastttctcattgttgtatttttcttttaatttttcaatttctagacatatttatgcaattatttgtaaatctgtctaaattctagaaaaaattttgcccatttgaatgtcatagaaacagaaatataaaagcaattctaaggtataaatattcttgaggatttataacaaaatatttttattccttattcaactaaaactattccctcatatctgtgccccaattaaaataaaattgaataaaatgaatattttaagatactggttttcagcactttcttactttttttgtaaatcgtacaaaactaagtaaccagttctcctttgcataaagaactgctcaccactctccaagaacagctgtttaattcagacaaagaagaaaataatacagatacacctttctctcctccagaacaaagcaaagagaaagagatccaattggcagagagtgggaagagagatgatttgtttttgaagacagacatgaa

SEQ ID NO: 523170 - DNA, 652 bp, Homo sapiens
caaatactactaggtttccattttagagagttgaagatctgaggtctggagaagttagtgtgtagaaagttatatttaacaagtggcaagaccatgtggccaggtcagataagctgccttcagattttactcttgaacttctacaggataatgtctttttttaatagaaaaaaaaagagtgaacttagattttttttttcaaaatcatggactgtaagagttctttcaagatatgatgaaaagcaataattgtcccattttacattacctataattattgctcaccagaaattgattatcgatgcagcaaccttttacattcctctctgctttactatgcatgagggggcttcactgtaaataagaggtccaagattcagaaatatctttaacttgcaatgcttggtcacatgtatccatctgaaaaatattttgctcattagccatatggactcatatggcaaactacaaccagagacacaaaacatggaaagaagaaagggctatcagaagtcccatgtctccttacattttgtatttctattcatacgcatctagaatcataaggaatttgagcaaamgggaaatgcaaagtcctaatcaaagcatacccacatgtcagttatctgcattattgcacatttaaatttat

SEQ ID NO: 523171 - DNA, 625 bp, Homo sapiens
ttcctaaatggaaagaaatgttgaatatgcaactgaaatatatgttttagtattagttataaatgactggtaaggtgtgtgtgatatgaagatggtccttgcttgtaccttcgcatagcacttggcatcaatccaygaagaacagtacctacagccagagtttctgttgctgacatctttttctcttaaaccatatgtcacatctggatttcctgtttgtggggatgcctctaaaatgtgtctcagagaaaagttgtccaaggaaaaatataaaagggtttgtaaacaaaagcttttggagaatatgagtttccgtatctacttcgtggtgaatcacaacacatattaaaagcgatggcaaattgtgcagtaaagaaactattttaggtttatttcacctgttacttacttcttatttttatttaaacttattaatatcccatgaacataatttcacattttgtgagctgctgctctagaatataatctataaatgatatagtgaacatttcaagttattgagaaatacttaaagaccctttgggcccaaaaatgtctttattacatgctctaggattctcaaacaaatggcttaattgaataattcattacggactcttttgtg

SEQ ID NO: 523172 - DNA, 520 bp, Homo sapiens
actagccagggatgtcagtwgctgactctggcatctgtgttatgaatgacatctcagggtaaaatccctctccagtttgttggcagcttaaaaacctcagagtgagatgaaaacatggctctcaatgcttaaatgagttgctggaatattttggacctgcttgagccagtatgagatttgtgcacatatctgactttcaatccaggtttgaattgatattcagcacccaagaaatagtgacttgcagtgaaaagcatctttaattagttcaaaagcccaaacttccattacatctgaataaagaatatttgtagaggttcttctgatctttcatctgcccatgattgcttttcctaatcaaaagcagcaaagtaagagtctttctcttttaccatttgaaatatgcaataatttttggaggcaagcagaaggaaattatccttttcactagcaatagctgtttaaatttcaaagattctacaaaaagaggtgtccttgttctgcttaacagcattttaat

SEQ ID NO: 523173 - DNA, 419 bp, Homo sapiens
agcagaaatccactgggcttcttcctggatcctctagtagcaaaccagagccaacctgtgctgctgtgattaccatctcttgcggttgtctttcaaccactacttgtctttctgtttttaagtttttctttttttttttttttgaaatggagtctcactctgtcactcaggctggagtccagtggcgcaatctcagctcactgggttcaagtgattctcctgcttcagcccccaaatagctgggattacggcgtgtgccatcacatccagctaatttttgtatttttagtagagatgggtttcattatgttggccaggctggtcacaaactcctgacctcaaatgatcggcccacctyggcctcccaaagtgctgggattacaggcatgagccaccatgcctggcctacgtttttcatt

SEQ ID NO: 523174 - DNA, 528 bp, Homo sapiens
gaataaaaatgcatagtcagtagtttaaatgtctttattaatagctataattaaatcttttttcaaaatatcagtccaacataactccaatcatatctatcacactgatgggaggaaaaatgacaactacacaaagttttcccattactgataatttttgtcaaaagattccaattgtgagaaagtcagaagttccaggaagagaatttataattaccagctcagtttttaaaaatcactaaattagctgggcatgcagctcatgcctataatccgagcactttgggaggttagctaaggtgggaggattgcttgagcccaggaatttgagaccagcctgggctgtaacatagtgagaccctgtctctataatttaaaaatgtttttaaaaagcactatcacatataacatataaacacatttttttaaaagagatggtcatctagtctggagtgcagtggtgcaatcatagctcactgcagcctcgaayacctgggcttaagtgattctctcgcttcatcctcccaa

SEQ ID NO: 523175 - DNA, 560 bp, Homo sapiens
aattgttacctcgtcctccctgctctttctacccaataaatatgaagggctgtagaagctgaaggcagctccctttgctcactagaagcagggagctctcttcttcttctcctgaccccttcctttaaaatagttacttttgttttaagttttcatttctgcattcgtcctccttcgttcagtctcgtagtaaccgtggcaaactgcagcatggctatttgagtaaatggtattgaaggattcaaccattttggaaaaaaatcaatttgtgtccttttaattatataacaaaagaaatttcagatggattagaactaaatagaaatgaagcaatattggtgagtctgatctctgatttggaaaagactttgtaagcataaaaataatgaaccaagttacaaagkaaaagtttgatagatttgatgacatacaggttcaaatgtctgaaacaacaaataaaaaaaaaaatcaaagtaggaaaatatttgcagcaagttgcccaaaaacttacaacatatatataagatcaagtattaatttattaataaaaatataccagt

SEQ ID NO: 523176 - DNA, 581 bp, Homo sapiens
acctcgtttcggccctgctgtaacaccacttcacggacattgcctactgtgagacagtgtccaccccaaaattcatgtccacttggaaccccagaatgtgactttatttggaaataaggtctttgtggatgccattagttaaggatctcaagatgacttcagataggatttagggtgggccccaaatccagtggctgctgtccttataagaggagaaggaggacacagagagacacaaagaaaaaggtgatgggaaggtgctgggccgcatctccaggccaacaatgtcaaagactgccaggaccccagaagctggatgacaggcatagaatgcctactccctcagaggctctgaagggagccaacccagccaacacattgatttttggacttctggcctcctgaactgagtgagaacacatttgctgttttaagccacccagtgtgtrgtcatttgttaaggcagccctaggaaactaatccacgccctgagccagtggggcagagggcttcctcagtggcagccacacagctgcccttccgtgcccttcacctacaaggtaggtgtcgcttcctcttac

SEQ ID NO: 523177 - DNA, 560 bp, Homo sapiens
gctgcgactgacgtctccacctgctggccgtcctgacccttgctacgtgcagctctccatccctgccactgctgccggtactgttgctgctgctgctgctgcaatattttataacaaacgacccagagaccctggtaggaagcacgcccaggcagatgacayggcgttctgcttctgtcaggatctactcacgttggatgctccgaataagtttccccggagaaaaagtccgagggggtagagagataaccctctgactgtgttgctgtcccccagggatccttccatgaagactgaggcaggcggagctgctaagagcctgctgacatgacatcggccacagagtttgaaaatgtgggcaaccagccaccttacagcaggatcaatgcccgctgggacgccccagacgacgagctggataatgacaacagctcagccaggctctttgagaggtcccggataaaggccttggcaggtactgtttggggccacaagggttggagggcattctcacagtcacaaggttcacagccctccccacctagtgtgaatcctctgtg

SEQ ID NO: 523178 - DNA, 516 bp, Homo sapiens
actggccatgaccacttccctaggcctcatcctccactgcccatctctcacttcctgaactagggcagggtctccaggaagccactcaccacaaactttgacagcggtactttagattaaacccctccctttgtaggcccgtggttccagcagagagggkcggagactcagcagatcagctgggtagaagcggctaggagttaggcagccgaccctgagttctcattgtgtctgtcactctgttactttaaattctggtccctggcgaacccttattcaaagtcttccgagccatctcgaagcctccaccagaatcctcctgccacccttctgggctttcctaggacagctccacccaccatctgccccctccctcactttccctaccccttgtccccgccccactccgcttccgacctccaggcataatttacctgccggaggctgggggaggggtggacagccttcccagctgtgaggcagagtcgggaggtcagggagaaggtgtgattcatt

SEQ ID NO: 523179 - DNA, 611 bp, Homo sapiens
aggtttgggaagcagactagacccaagctccagtgcatcttggtgtggcctccacccaatggctacagtgaggccactccaggaaaggcctggaaaatcactatggggcctcttgcctggggacacagccagaccctctcccaggaacacttccctgtcgattccagggstttcaaacaaacttggagaaaaccccttgatttcctagcctcagagcaccatctgtgtgccagacaggcacggaattcccagagcacggggtcttcatggtctaggatgggagccgagaaatctgcaggctctctctcctctctcgtatccctggtctctcccagcctgtctcttatatctctctgcagacctttcaaatcatactggctgctgttgtcacaccttgggaatgcacaacagcgctctctgtccagtccatctcctagtccctcagcctccatcccctgaggcagggtacaaagatgaatgagacacttggtcccatcctttaattggtcactccagtggaggcactgggggtgtgttcactgactggggctttgtgtccagtgatgggttgtgtggaggtcacgtgagcaactgtcaccccattgctcctt

SEQ ID NO: 523180 - DNA, 557 bp, Homo sapiens
tggcacccctaattgctgtcctggggctctatttcttcttctatcatggtttttatgggaaattatgttttmagacatacagacaggagggactcatctgtcctggagatagctctcacaactgctctagctcctggaggattttaggaatcagagaatacttacctccccaggattagggaggggtatgcctctctactttcatgtgcaaagggcatttgcaagacacttgaagagtttcataactctgaaaggacctatatttcccttgctcttccccagcatagaccatagccttgggtgttatctggagagcccagttgccatctacccctcaccagcaatggagcatgggtggtgggagaggaatggacaagactgaggctaaggacagtaagggagccagcaccaggcctggagccaaagtgacaagtcactcttaggaccatgactttttaaagcgtcttccaggtcttgtataatagtggtcactttctcgcgaagcctcagagcactgtttttgaaaacgtgggccttggatgtccttcattaaaaac

SEQ ID NO: 523181 - DNA, 557 bp, Homo sapiens
tggcacccctaattgctgtcctggggctctatttcttcttctatcatggtttttatgggaaattatgttttcagacatacagacaggagggactcatctgtcctggagatagctctcacaactgctctagctcctggaggattttaggaatcagagaatacttacctccccaggattagggaggggtatgcctctctactttcatgtgcaaagggcatttgcaagacacttgaagagtttcataactctgaaaggacctatatttcccttgctcttccccagcatagaccatagccttgggtgttatctggagagccyagttgccatctacccctcaccagcaatggagcatgggtggtgggagaggaatggacaagactgaggctaaggacagtaagggagccagcaccaggcctggagccaaagtgacaagtcactcttaggaccatgactttttaaagcgtcttccaggtcttgtataatagtggtcactttctcgcgaagcctcagagcactgtttttgaaaacgtgggccttggatgtccttcattaaaaac

SEQ ID NO: 523182 - DNA, 494 bp, Homo sapiens
aagtctgaatgcctcagggaagccaatggtctgactctcagtcccagaccaaaggcctgagaacccaaggggccactggtataagtcttggagagcctggagttctgatgtccaagggaggagaagaagggtgtcctaattccagtagggagggagagataatttgtcttctctgtctttttgttctatctgggctcccagttaattagatggcacctgctcacattgagggttaatcttcctcactcagttcactgactcatccatcartctttcctggaaacacccttacagacacacctgaaagtaatgctttaccagttatctagatattccttaagccagtcaaatttacacctaaaattaaccatcatcgtgatagtcaatggcacaaggggtggtggtttcaggaaaagtcttgtttgggttgcatttcggtttactgcctaattgttatgtgggatcattttgtgttttgagtctagcaacacatg

SEQ ID NO: 523183 - DNA, 527 bp, Homo sapiens
gtggattattgtatgtggggtttctacaggggggccatactgtttggaccattttcccatggaaagctctgccagcccttacagtgccctgatgctttaagtctacttttggaggtggcctccccttaggcggtcattctgaagagcctttcaagaacctgaaatgttgccattggagcatttcccagaaggaaattgaaccacaattttttgaagtgcagggaactctctaccaggagtatgtcatgtgtctagacatattctgatgtgtttttcattataataatgcaataacatgggctgcaccaaaatgatagggtaaattcattaagactgttttcttgtctcagggaaaaggacactatgaactatgaactacctgtgtgtggcatctgccttttttrtttcttttcccttctaatctctttgtacttgattttttttctctttccctattattttgttcctcattgttctctaaatagagtagaacagtaacagtttatcaattctactatatttctcag

SEQ ID NO: 523184 - DNA, 542 bp, Homo sapiens
tcctagtgaaagaagacatatacaaataaattcattcatttgttcaattagtattcattaaatacctaccaagtactaagtagtagtttttttcttgtttgtttgtttttgaggcagggtcttgctctgtcacccaggcggaagtgcagtggcacgatcatggctcactgcagtctcgacctcctgggctcaggcgatcctcccacctcagcctcctgagtagcagggaacacaggtgcacaccaccatgctcagctaaaatggtttttttgtactttttgtagagacagggtcttaccatattgcttaggctggtcttgaattcctgaggtcaagcaatctgccagcttcagcctccctaaattctgggattactggcatgaggcaccgctcttggccgtgagyggttaataagacaaaagtagtctgtgccctcagggacactgagcacaattacaacagtatatgatgaatgctacagtagaagttagggtttctttgagcattgccagggccttgatcttacttagagtaaagaaaga

SEQ ID NO: 523185 - DNA, 542 bp, Homo sapiens
tcctagtgaaagaagacatatacaaataaattcattcatttgttcaattagtattcattaaatacctaccaagtactaagtagtagtttttttcttgtttgtttgtttttgaggcagggtcttgctctgtcacccaggcggaagtgcagtggcacgatcatggctcactgcagtctcgacctcctgggctcaggcgatcctcccacctcagcctcctgagtagcagggaacacaggtgcacaccaccatgctcagctaaaatggtttttttgtactttttgtagagacagggtcttaccatattgcttaggctggtcttgaattcctgaggtcaagcaatctgccagcttcagcctccctaaattctgggattactggcatgaggcaccgctcttggccgtgagtggttaataagacaaaagtagtctgtgccctcagggacactgagcacaattacaacagtatatgatgaatgctacagtagaagttagggtttytttgagcattgccagggccttgatcttacttagagtaaagaaaga

SEQ ID NO: 523186 - DNA, 640 bp, Homo sapiens
aacttggaaaacacgaaagggagatacttgagttgtgatcatagcaaatgttcctataatatttagtgtgtgtcactgatgctttacatattctaattcgtttcatcttcatgactaccctctgaggcagatgtactgttaaccccactttacacatggggatgctggggtctgagggcttgagaactccgcgggttaacccaagagttatgggacctggttatggaacctcagtgctaaggaaagtgacaccatcataggtagtgttagaacaaaatcttggggaatggttatgttttcctgttcggtggaaaggaagcatcaacatagaagattaggtaggagctcatgtacactaaaaatgaaagtagattagaatgagccgggttggaagtgggagaaatgtccccaaacacaggtttagagttggccttgagaacatcagcggtatggacagatgtacggacactggggcctgataattcttccttatggcgctgtcctgtgccttgtaggatggttagcagtatycctggcctctccctccccagttcctctccctccccagttatgacaaccagaagtgtctctggacattgccaactgtccactgggaagtaaaatcactgccattcagaac

SEQ ID NO: 523187 - DNA, 542 bp, Homo sapiens
gcacatgcgaagtcccagtggcaagaggtactatggtgcaggatgttcagcatgatgggaacacgggctgccaggaggagacagagagagatgaggcccacaggcttcgggtccttggtcttagagctcttgagccattgtggctcagactgcagatcttaacacatcagcgggttatgaaatcaatttggtgagccacagccagcatcgcaggaagaaaagtaatagaatcgaaaataccagagtgtgttgcacatgaggtcagtgtggttttttgaaacttttatttgaagttttataaaggtgtacactgcactgcattgcaaaacaggtttcttactgtgagtcttggttgaagaattcgaaagccacygtttttagtccctgtgaaagtttggaatttagcccaaggggcagtggggagcaattaaagaggttttagtggggggcatgacaaggtcagatgtatgtttaaaaatctcactccaggagtgtggagaacagatttggaggaggtgggcagtggaggctgggaggcgtct

SEQ ID NO: 523188 - DNA, 417 bp, Homo sapiens
tggcgttggcagtagctgcaattctcaacacccgcagcttctgcagccccttcccctggctcacgttcaaccaggttctgatacactacctcctcctcttgccccttcaggccttgggaggctggggcttgtcccaggggcagcacccccaccttggtccctgcaacccagctccactgctcatggtcgctgaacagtctcttccttaactctccccagttcttctttttcatgaggttttcctgtcccaccctgaagagaagaagatttaaaacaccgtcaaatgtgccatgacacagcatcaactcataagatagatggcaattttagagatgttaaagatgcrggaaaacgcacatcttagagccaacgaaaggtattagacatttacgtgtatcttgtctgtctctttcactc

SEQ ID NO: 523189 - DNA, 310 bp, Homo sapiens
taaggcatcacacgcctggctattggagttctcagccggtggtgtctgtttaggcgattagtgaattaagggcttgtttctttgacttcarcaagggaccacatcccagtgggcaactaacagacactatttgggatggatggccacaggctctctgtgtcagcggtgaagacccccaaacaggcattgttcttgggttatccacaggctgagttctgaccctgcagtgtcactgcagagcagggagccagcctccccgggaggacaggctgacagggaagacacctgagctgctttgtaggggagctgc

SEQ ID NO: 523190 - DNA, 534 bp, Homo sapiens
actcaccaagcatcactcacatcagacactggtctaagcaccttacatgcattctctatatttttatttaacaaatacttacatcgagcttgccgtgtggaggcactgctctagttgatttacaaaacgaaacaagaagcgtcgaaaacacatcgaatcaacaaaacaccatcgtgaattctcgcaactgccctgtgtgggaggcactgccgctacctccatctgcagaggggtaggggagcctgggagctggtgggcggagggccgggtggggtggaactggcatctgcctccagggctgggctcctcccattgctgatgcctgggtttcactgtgctcgtaaaagccacgggtcaattatgcttattacctgttctgcaggtgagaaaacgaggcacayaggggtgagcaattcgctcagcttgaaagtggtagaaccaggacccagcccaggccatggctcgggacccactctgtaatcactcactgggggccccgcagtaatgagctctttgaagaaaggtgagtcactg

SEQ ID NO: 523191 - DNA, 534 bp, Homo sapiens
actcaccaagcatcactcacatcagacactggtctaagcaccttacatgcattctctatatttttatttaacaaatacttacatcgagcttgccgtgtggaggcactgctctagttgatttacaaaacgaaacaagaagcgtcgaaaacacatcgaatcaacaaaacaccatcgtgaattctcgcaactgccctgtgtgggaggcactgccgctacctccatctgcagaggggtaggggagcctgggagctggtgggcggagggccgggtggggtggaactggcatctgcctccagggctgggctcctcccattgctgatgcctgggtttcactgtgctcgtaaaagccacgggtcaattatgcttattacctgttctgcaggtgagaaaacgaggcacacaggggtragcaattcgctcagcttgaaagtggtagaaccaggacccagcccaggccatggctcgggacccactctgtaatcactcactgggggccccgcagtaatgagctctttgaagaaaggtgagtcactg

SEQ ID NO: 523192 - DNA, 480 bp, Homo sapiens
ccctcgaactaaaacaacaatgctcctccctgggtcagcagctccacgaccctgaaactagaacaagacctctcctccctgggtcgccagtttccggacccttgaactacaacaaaatggctcctccctgggtctgcagctccacgaccctcgaactcgaacaagacttgtcttccccaagttgccagctaccagaccctcgaactacaayaacattgctccaccctgggtctgtagctccacgaccctcagaccggatcaagacctctcctccctgggtcgccagcttccggaccctcaaattacaacaaaattgctcctccctgggtcggcagctccacgacccccacaatagaacaagacctctcctccctgggtcgccagcttccggacccttgaactacaacaaaattgctcctccctgggttggcagctccacgaccctcaaactccaacaagacttctcctccccgagttgcc

SEQ ID NO: 523193 - DNA, 480 bp, Homo sapiens
ccctcgaactaaaacaacaatgctcctccctgggtcagcagctccacgaccctgaaactagaacaagacctctcctccctgggtcgccagtttccggacccttgaactacaacaaaatggctcctccctgggtctgcagctccacgaccctcgaactcgaacaagacttgtcttccccaagttgccagctaccagaccctcgaactacaacaacattgctccaccctgggtctgtagctccacgaccctcagaccggatcaagacctctcctccctgggtcgccagcttccggaccctcaaattacaacaaaattgctcctccctgggtcggcagctccacgacccycacaatagaacaagacctctcctccctgggtcgccagcttccggacccttgaactacaacaaaattgctcctccctgggttggcagctccacgaccctcaaactccaacaagacttctcctccccgagttgcc

SEQ ID NO: 523194 - DNA, 403 bp, Homo sapiens
tgtgactgtcctttgttggaatacctccaaagaactcccagagccaatgccacacttaacacttgttttccacatgtatagattttctggtgtggcttcaatttctctggtaaatgagcttcaggccttctcatgtcagtgtgcagagtaaagaagtgaggatctagcctttcacaggatcctctgcaaggcagtgcagtaaggaggggaagggttttctgccacgtctgtggtctcttcattcttctcttcctgcygtcattctcgacctgggccctgctgtccttctctcatctggtatccattagagttcttgattacaagcaacagaaatggattctgcttcacttcaaccagagagaagttgtcaggaagatatcgggggctcacaatcaatgggcag

SEQ ID NO: 523195 - DNA, 638 bp, Homo sapiens
agtcttgaaagctccggggctgggttgcaggaacatagtgaggatcttttactagaagagcctggtgagggaacctccaggataaatgggctccaggggatcttggtccttgcttcaccttcccaagattcaaatcctgggaaagagacacccacagaggcacccctaaggcagagggagactctaatgcctgcagcaggcgggcacctagaacttcactccaccaacacagaacctgatggattggaagtaattcccccaaatacactggggagatttgggaagaggaaaaaaaatgttgggctacaaaatataatagtaatatcyagcagcacccttttatatatgtgcataatccttgagtttgtacatgttcggagactggccacaactgttgcatgataaattagtctttgtccaagtgaaaacaagtttcctgattaaaacaaagcctagccattgccagaagctgcttgaactaactcagctcctaaattgcatttacatccaagagcttggggttctttctggctgtccaaaattgaaatgttgtcagtgcaaggacacaccatccatcaatttcttctcagaggttcctctctaccttctaggactttgctatggcatttgttggctct

SEQ ID NO: 523196 - DNA, 567 bp, Homo sapiens
cagctggaggatcagtcttgaaagctccggggctgggttgcaggaacatagtgaggatcttttactagaagagcctggtgagggaacctccaggataaatgggctccaggggatcttggtccttgcttcaccttcccaagattcaaatcctgggaaagagacacccacagaggcacccctaaggcagagggagactctaatgcctgcagcaggcgggcacctagaacttcactccaccaacacagaacctgatggattggaagtaattcccccaaatacactggggagatttgggaagaggaaaaaaaatgttgggctacaaaatataatagtaatatctagcagcacccttttatatatgtgcataatccttgagtttgtacatgttcrgagactggccacaactgttgcatgataaattagtctttgtccaagtgaaaacaagtttcctgattaaaacaaagcctagccattgccagaagctgcttgaactaactcagctcctaaattgcatttacatccaagagcttggggttctttctggctgtccaaaattgaaatgttgtc

SEQ ID NO: 523197 - DNA, 567 bp, Homo sapiens
cagctggaggatcagtcttgaaagctccggggctgggttgcaggaacatagtgaggatcttttactagaagagcctggtgagggaacctccaggataaatgggctccaggggatcttggtccttgcttcaccttcccaagattcaaatcctgggaaagagacacccacagaggcacccctaaggcagagggagactctaatgcctgcagcaggcgggcacctagaacttcactccaccaacacagaacctgatggattggaagtaattcccccaaatacactggggagatttgggaagaggaaaaaaaatgttgggctacaaaatataatagtaatatctagcagcacccttttatatatgtgcataatccttgagtttgtacatgttcggagactggccacaactgttgcatgataaattagtctttgtccaagtgaaarcaagtttcctgattaaaacaaagcctagccattgccagaagctgcttgaactaactcagctcctaaattgcatttacatccaagagcttggggttctttctggctgtccaaaattgaaatgttgtc

SEQ ID NO: 523198 - DNA, 638 bp, Homo sapiens
agtcttgaaagctccggggctgggttgcaggaacatagtgaggatcttttactagaagagcctggtgagggaacctccaggataaatgggctccaggggatcttggtccttgcttcaccttcccaagattcaaatcctgggaaagagacacccacagaggcacccctaaggcagagggagactctaatgcctgcagcaggcgggcacctagaacttcactccaccaacacagaacctgatggattggaagtaattcccccaaatacactggggagatttgggaagaggaaaaaaaatgttgggctacaaaatataatagtaatatctagcagcacccttttatatatgtgcataatccttgagtttgtacatgttcggagactggccacaactgttgcatgataaattagtctttgtccaagtgaaaacaagtttcctgattaaracaaagcctagccattgccagaagctgcttgaactaactcagctcctaaattgcatttacatccaagagcttggggttctttctggctgtccaaaattgaaatgttgtcagtgcaaggacacaccatccatcaatttcttctcagaggttcctctctaccttctaggactttgctatggcatttgttggctct

SEQ ID NO: 523199 - DNA, 598 bp, Homo sapiens
attttcatcatcacagatagttacattagcgtgactctacatccataaaacagcttttcagtaacaggattggagcttggggaaatttgactttattgctgctttcagaatgaacccttgtaaagtagcctttgataactttttattacagacatcccttacatgttattcaacctgcgtgcctaccaaagacttagcagagcttcattttctatagtttgtgatatgaaaaccaatgggcttgatgaattggcatttttccaactacacacgtccttggccctgccaagattgtggagaattgccgcctgtggtcgtttcactggggatgtgttgttgccctccatcacccatctgggtctgccagcaaaaagctctactgtgcattattgacccaattatatacaaaggctacacagagatgaaacagttgagcctttcccatccgaagatcctcaaagaacagaacactatgttccttaaagtgaggctttgaagcagaaatgacagaggaaaccaagaggagccagcctgcttaaaacctgmgttgtcttgtgtgggctcattaaatatcaacataaaaacaatgcctcaatgt

SEQ ID NO: 523200 - DNA, 591 bp, Homo sapiens
gcagtggcttctctgtgggacattgatgatcattcaactactatcaggttattaagagcaaacaaggtcacataggtggaaatgctaagtggggatccctaacaggtgacacatatgcaccccatcaacattatggtccagatacatgtttgaaaagaaagtgcgaatgttcttaggtrgcgcttgtcctctgcagtgtgtcctcaggccttaggtggagcttgtcctctgcagtgtggcctcaggccttaggtggagcttgtcctctgcagtgtgtcctaaggccttaggtggagcttgtcctctgcagtgtggcctcaggctccaccctgccatattgtcttactcttggccacttaactcattttgcttcctggctggtctctcaaggcatttaagtttgcaggccctgaaatcaggcattataagatcaatgttcaactagttcattcttagattgtgcaattagagcttgggcatcttaattaaaaagaaaaacgcttatgttttcagtggatttaatcatgaattgggtgagtctggatctgcatattccagtcccccctcttttggcacacgtgttcccaagct

SEQ ID NO: 523201 - DNA, 568 bp, Homo sapiens
ctgctgctgtgattgcctgtgcagaacactcactcaccgatacagaatccagatgcagatgcagagtccacytgcgctcctgcatctcccttcctgctcttagccactctagcaaagggcactgccatctcagcagcctactttcattgccacctgccccgtgttctgaaatccttcacagtgccccgtgtggcactgtgagtttacttttcctaaaatggcattttattcttattgtggctcactgtagcacggagtccacctccctgcctgaacatcagaggccttgaaaatgtgatgcggccatctgatggcactgtgcctagttcctcccaccagggaacctgtttattttgccaagcactggaccaaatactgggtgcagatttgagggacccaggacctgtcatggggaggtcacaggctcagggagaagcataggaacagttatactacagcacggtgcgtgtggcaggagtgtgaacaggtgtggggtggagatgggaggtcaggagaggcccctcagaggcctgggaccagatctggaaggacaggtggcagtggggag

SEQ ID NO: 523202 - DNA, 538 bp, Homo sapiens
tgctgctgtgattgcctgtgcagaacactcactcaccgatacagaatccagatgcagatgcagagtccacttgcgctcctgcatctcccttcctgctcttagccactctagcaaagggcactgccatctcagcrgcctactttcattgccacctgccccgtgttctgaaatccttcacagtgccccgtgtggcactgtgagtttacttttcctaaaatggcattttattcttattgtggctcactgtagcacggagtccacctccctgcctgaacatcagaggccttgaaaatgtgatgcggccatctgatggcactgtgcctagttcctcccaccagggaacctgtttattttgccaagcactggaccaaatactgggtgcagatttgagggacccaggacctgtcatggggaggtcacaggctcagggagaagcataggaacagttatactacagcacggtgcgtgtggcaggagtgtgaacaggtgtggggtggagatgggaggtcaggagaggcccctcagaggcctgggacca

SEQ ID NO: 523203 - DNA, 538 bp, Homo sapiens
tgctgctgtgattgcctgtgcagaacactcactcaccgatacagaatccagatgcagatgcagagtccacttgcgctcctgcatctcccttcctgctcttagccactctagcaaagggcactgccatctcagcagcctactttcattgccacctgccccgtgttctgaaatccttcacagtgccccgtgtggcactgtgagtttacttttcctaaaatggcattttattcttattgtggctcactgtagcacrgagtccacctccctgcctgaacatcagaggccttgaaaatgtgatgcggccatctgatggcactgtgcctagttcctcccaccagggaacctgtttattttgccaagcactggaccaaatactgggtgcagatttgagggacccaggacctgtcatggggaggtcacaggctcagggagaagcataggaacagttatactacagcacggtgcgtgtggcaggagtgtgaacaggtgtggggtggagatgggaggtcaggagaggcccctcagaggcctgggacca

SEQ ID NO: 523204 - DNA, 568 bp, Homo sapiens
ctgctgctgtgattgcctgtgcagaacactcactcaccgatacagaatccagatgcagatgcagagtccacttgcgctcctgcatctcccttcctgctcttagccactctagcaaagggcactgccatctcagcagcctactttcattgccacctgccccgtgttctgaaatccttcacagtgccccgtgtggcactgtgagtttacttttcctaaaatggcattttattcttattgtggctcactgtagcacggagtccacctccctgcctgaacatcagaggccttgaaaatgtgatgcggccatctgatggcactgtgcctagttcctcccaccagggaacctgtttattttgccaagcactggaccaaatactgggtgcagatttgagggacccaggacctgtcatggggaggtcacaggctcagggagaagcataggaacagttatactacagcacrgtgcgtgtggcaggagtgtgaacaggtgtggggtggagatgggaggtcaggagaggcccctcagaggcctgggaccagatctggaaggacaggtggcagtggggag

SEQ ID NO: 523205 - DNA, 617 bp, Homo sapiens
ctggcattccaatgatatatttggggttttttgttgcccgtgggttttgttcccccttctgatgaaatttgtcatcccagtaggccacaaaatcaccaccaaatattcagatatctatgagagctggattaaatggtgacagacagaaggtgaccctgacatttgttttgttccccagaacaacagcagccccctcactatgaagggagtagcacttttcatttgcttttctttaaatacagaaagagccctagggaatctggcaggccctaaggggagcagctttgagtttccaaggcacgagagagaaagaaaaggcaaaagaaaattgaatgagaaactgcatgatcttgggcatatttttctttgaaaatgattcaaaagccttcatggttcagaggacatttccagggccttgacatttctctgtcacattgyaaatgttgcttcttattttaccaagtggacatgaaactgctaaaattaactgtgtttttgtcctctgtctcaatccttcgggctctctcaccttgctgggaggagttgaggttttctgtgaggatgcagctctattatttctcctttctggccactgctaaaggcactagggccacctc

SEQ ID NO: 523206 - DNA, 613 bp, Homo sapiens
agggtttcctttcttctggtcctggtctggcctcactggagatgttcctcactgtccctcgtggttgacggcagtaagagaactactacagcaggtggaggaaactggtggttcccctagcttctttcataagactatgaaattgtggtgctaagttatcaggcacctcttactactgcctgtcaggtgtccccagcctctgggtcatgtctgccctcagtagctcatgtgacgcacatgcrtttggaaatagacatcatcccttcagtagctcttagagggaggcacattaccccttatccagggtttctgaatttcaagcctcaatggtccacccttttctggagaaccatgtgtttagcttgaacaggacttctgctcagcacttctaatttggcagatggacctcacagatagctcactcccaccttcctcattcaagcttccagctatgtgagctgcgtggtctccagctactcccagttgatggccagtaacctggctcctgggttattctatagttcaagaaaataggaagagacatctttagcaagtgagactagaaatagagagcaacgtctattgaccaatccatgtattgtagtgggcggtg

SEQ ID NO: 523207 - DNA, 613 bp, Homo sapiens
agggtttcctttcttctggtcctggtctggcctcactggagatgttcctcactgtccctcgtggttgacggcagtaagagaactactacagcaggtggaggaaactggtggttcccctagcttctttcataagactatgaaattgtggtgctaagttatcaggcacctcttactactgcctgtcaggtgtccccagcctctgggtcatgtctgccctcagtagctcatgtgacgcacatgcgtttggaaatagacatcatcccttcagtagctcttagagggaggcacattaccccttatccagggtttctgaatttcaagcctcaatggtccacccttttctggagaaccatgtgtttagcttgaacaggacttctgctcagcacttctaatttggcagatggacctcacagatagctcactcccaccttcctcattcaagcttccagctatgtgagctgcgtggtctccagctactcccagttgrtggccagtaacctggctcctgggttattctatagttcaagaaaataggaagagacatctttagcaagtgagactagaaatagagagcaacgtctattgaccaatccatgtattgtagtgggcggtg

SEQ ID NO: 523208 - DNA, 529 bp, Homo sapiens
ctgggcaggggaatgagggctgttagtctatggaagcatctgcttgtgatacaaccctttcttaagaaggtggcctgcactgagtgtatcaggaagcacatccatggaggtggcactgccatggcatattgagtcgtattgaaatcttttgcttttactgaagtcyatccaattagaatctagatctgagggaatagaaactcttctgttaggctttagctttagtttaacttttggatgacaaatgcatgcatcatagatctcggcaatactagctggtttttgttatagcctcggaattacaaaaggaaaccctgagacacttggacttctgtaccaaacagccaggcatcctttgagtagtatttaaaatgtcgcaagactaagcatttagtttattccctccctgtccctgcatttccttaagctcccatccctctacctccctcattgttaaaatgatttggaaatcatgcttttatatctcttttctaggaatttgttcatttcatctatgttgtctaatttg

SEQ ID NO: 523209 - DNA, 529 bp, Homo sapiens
ctgggcaggggaatgagggctgttagtctatggaagcatctgcttgtgatacaaccctttcttaagaaggtggcctgcactgagtgtatcaggaagcacatccatggaggtggcactgccatggcatattgagtcgtattgaaatcttttgcttttactgaagtccatccaattagaatctagatctgagggaatagaaactcttctgttaggctttagmtttagtttaacttttggatgacaaatgcatgcatcatagatctcggcaatactagctggtttttgttatagcctcggaattacaaaaggaaaccctgagacacttggacttctgtaccaaacagccaggcatcctttgagtagtatttaaaatgtcgcaagactaagcatttagtttattccctccctgtccctgcatttccttaagctcccatccctctacctccctcattgttaaaatgatttggaaatcatgcttttatatctcttttctaggaatttgttcatttcatctatgttgtctaatttg

SEQ ID NO: 523210 - DNA, 623 bp, Homo sapiens
cctcttccttatttgaaggtgtttttacctttctcagcattccacaagttacttcctccttcctttgttctcctctgcctttgcctcttttaaaaagttctaagttgctagccaatcgggacaaatacagactgtgaggtcccgttccagccaatgaaaaccagacacagcagtagggtggatgcatcagattataaataacgctatctcctttgttcggtgtactctcgtggcaaaactgctggtgagtgtaccctttctgcagaaagtaaaaatggccttgatgagtaacttaaatttatgttcaagtgctatttctttatgctactggggaacaagcatttcaaacaggtgggggaacgattgctggagacttctatttggccatcttgctttgccccctctttccagaaatctaggtkttaacaagcctccagctaatagtaatgtgcctaaattttgagagccactgctttagtctattccgaataggagagtggcaagcatcacatgtctgagtctaccagtggtctcaatctaagctacatattacagccacctggggaagttttgaaaatcctggtgcccaggctgcatccaaagccagtgaaatttcgtaggtg

SEQ ID NO: 523211 - DNA, 534 bp, Homo sapiens
gaacaaacctggagaagcagagtgttctgagaatctcaaggaaggcctagtacccagacataatgccccattcaagaccttgcaagtctttttcatcgtagtcttattgtccattaacaggttattcagttacattggagcagtatctgagggcaawgccagcactccagaccctgcaccatttttggtggtattccagagaaaatgggatttggtctaggggtcttgtcttccttttctgggccaagcacagggataggctttgccttctctgtggtataataaatggggtagaacccaaggaaattgttggtgggggttgctcggtatgtgaagtgggaaactttatgccccagagctcagcattaccagaaccaggtctggcttccgtcctgtgcaagttattagaggcctgaccctttcaagccatttgacctctgcatctctcatatttgtacggcggctatgcctccctcattgggttgctgtgaggcttcaagacaataatttatgtgaacaggaacagcgagatac

SEQ ID NO: 523212 - DNA, 534 bp, Homo sapiens
gaacaaacctggagaagcagagtgttctgagaatctcaaggaaggcctagtacccagacataatgccccattcaagaccttgcaagtctttttcatcgtagtcttattgtccattaacaggttattcagttacattggagcagtatctgagggcaaagccagcactccagaccctgcaccatttttggtggtattccagagaaaatgggatttggtctaggggtcttgtcttccttttctgggccaagcacagggataggctttgccttctctgtggtataataaatggggtrgaacccaaggaaattgttggtgggggttgctcggtatgtgaagtgggaaactttatgccccagagctcagcattaccagaaccaggtctggcttccgtcctgtgcaagttattagaggcctgaccctttcaagccatttgacctctgcatctctcatatttgtacggcggctatgcctccctcattgggttgctgtgaggcttcaagacaataatttatgtgaacaggaacagcgagatac

SEQ ID NO: 523213 - DNA, 534 bp, Homo sapiens
gaacaaacctggagaagcagagtgttctgagaatctcaaggaaggcctagtacccagacataatgccccattcaagaccttgcaagtctttttcatcgtagtcttattgtccattaacaggttattcagttacattggagcagtatctgagggcaaagccagcactccagaccctgcaccatttttggtggtattccagagaaaatgggatttggtctaggggtcttgtcttccttttctgggccaagcacagggataggctttgccttctctgtggtataataaatggggtagaacccarggaaattgttggtgggggttgctcggtatgtgaagtgggaaactttatgccccagagctcagcattaccagaaccaggtctggcttccgtcctgtgcaagttattagaggcctgaccctttcaagccatttgacctctgcatctctcatatttgtacggcggctatgcctccctcattgggttgctgtgaggcttcaagacaataatttatgtgaacaggaacagcgagatac

SEQ ID NO: 523214 - DNA, 567 bp, Homo sapiens
aggggctttttaatgttattctggatgtttcccaaaagtactgctgctgccttgcctccctgacagacactggccttaggatgacatgcggcaggaaggaaggacggatctggggtttttcaagactcactgagatgcacaaggaaccaaccctcaagtagccaactcgttcctgtttgcatgtgtcgactgaaaagaatcaaaataaacaaaatataactatttctaagaggttacaacttgcaggcaggaagcaggcctctacctgaggccataaagcatactttgaaggagaaaaggtaggtatttatgctaggtggagaggtaggatatacgtattctgtagcatacaggagaagcctatgaaaattcatggaggaaactcgttagagacacgcactgggcttacatatgaagaatatccaaaagcggatgacctgtgttcactctggggtgaagatttaacatttaaatgtattataattaggctgtaaatgcaaaaaggtgaaacatagggcacaagttcaygatctgtgcaatctccagagaccagtctgatctagcctg

SEQ ID NO: 523215 - DNA, 515 bp, Homo sapiens
ccttcccaccatcctccccagccctgagctgtagatttctctattttgggcattccatgtaaaggagggcacacagtatgtgacctttgtgcatggcttctttcacagagcagagcatcatcggtgtttgtccatgccatggcacgtgtcagcacttcagtccttatttccatgtaatcttccatcatgtggatatagcacacttcactcacccacctagcrgtggatgggcatttgtgggagaggtggcctagggtgaagcagaggggaggctgatggagaagatggtttgttcactgtggaaagggggttccagggagcttaggtgagaaggggctgaaggaaaggtagcagtggcaggaacattgtgagtgtgtgggataggggatgggaggggcatgggtaggaccctggaggggttttcagtcccttcatggacttggagactgtcagcccctcctggccttcctgcctccttggctggccttgtctacttgctgaatactggggacccc

SEQ ID NO: 523216 - DNA, 574 bp, Homo sapiens
gctgggctccatcccaggactcctaagccctgtggttgttgcatgttcatgttagttaacgccacagctcagcgaaaaaacaactgatctggggacaagcaggtcaacttgccaacatacaacattagtacatgtgggttcagagcactctgcatttttctttcatattctaattgtgacaaacaaggctatataaggtttaaaattttggcaaatgtaaatgaggtttatggaaacaatattcatgtcatgcctgaasaaggatagtgtcttctactaaaaccagattgggatttcatgtcatgagacaagtttgtgtagcagttcatctactggcccctagaggccactctccatcacccctcaaagatttatgcccctggctgatatccgtcctgtcataatacctagttgacttcatggtgcatggagactatccttccaactccatgacttctcaatttttttacctcttactttatttatgttacccactcactccctttatcgtcccctagtctttgtgatttcccagtaacatcacctcttgcgtgaacctcacttgcaagaatct

SEQ ID NO: 523217 - DNA, 574 bp, Homo sapiens
gctgggctccatcccaggactcctaagccctgtggttgttgcatgttcatgttagttaacgccacagctcagcgaaaaaacaactgatctggggacaagcaggtcaacttgccaacatacaacattagtacatgtgggttcagagcactctgcatttttctttcatattctaattgtgacaaacaaggctatataaggtttaaaattttggcaaatgtaaatgaggtttatggaaacaatattcatgtcatgcctgaacaaggatagtgtcttctactaaaaccagattgggatttcatgtcatgagacaagtttgtgtagcagttcatctactggcccctagaggccactctccatcacccctcaaagatttatgcccctggctgatatccgtcctgtcataatacctagttgacttcatggtgcatggagactatccttccaactccatgacttctcaatttttttacctcttactttatttatgttasccactcactccctttatcgtcccctagtctttgtgatttcccagtaacatcacctcttgcgtgaacctcacttgcaagaatct

SEQ ID NO: 523218 - DNA, 616 bp, Homo sapiens
aataattatctgcaaataaggagcacaacaggttctgatactaacacttaggactgtagatagtctccaattttaaccagaaagtcctataaatagtaagtcaccaagcacatcccaacaaaataaaattaaagattttattttgcctctaagccatggtgtgcatttcatgagccagaaaaaaaaaaccaaagccaaaatgcagttataaacatctacaaatatgcagatgtcatgtaaaatatttcactatacatattgattatatatgtggtataaagtccacaaacagaaagaacataagcaagacagttatactacaccataaatctaacctataactactgagccagccacatatattaaatatttaattaataattttcttaatgacttaaaatttagaagtaatttattggggtcattttgatctctttaaaagctgaaaaggaagtttgagccratgttatttctcaataaattcctctgtacaaaggagaggcaatataaatcatttcatcagctttaaagctgtacgcaaagtttaaaaacaacattcagtatttagaggccaaataaagtaccatagaaaaaagtcttaaatctgctcaccagt

SEQ ID NO: 523219 - DNA, 663 bp, Homo sapiens
tctttaaaatttaattcagaatatggcaagtttcagtaagaaccaccctccgaagtttgcttttaaggaccaagggtaggcaggactgtggagtaagaagctacaaagctatgaacgtaaaygtataataataggtgctaacgaccacacacgtgctacagataccgtcttttggagagcaacccttcatttggagaagcgtaagcacacatgctttgtgaaagcttcattgtacacagtaaaatcagcaggttgcccggctcttgtaatgcaaatgaggaatacacgggtgaatgttttccgttctttacctagaagtggaagggagtgcaaacccaagttagacggtctcttcaccattactctgtttctgaaatcatctatttacaagtagggtaatatatctgtctgataaaggaagagaattctctctcaactctcactagctgtaaggccggtaggatggagtggagagacattaaaaaccagaaagccacaatcaccagtttagaaccgcatgaccttggggtagtcatttcattgctgagccaattaagttgctctcctctgtgaaatgggattaacaagatctgtgaaatggatatctcggttggtacagagtggagttaccagccctgcttcatacgaacctcgcatgtcttc

SEQ ID NO: 523220 - DNA, 501 bp, Homo sapiens
taaccctacttacttatctgtcatgtcacaaactagaatgycagatacatgagaaaagacttttgtctattgtgtccccaactgtgtccctagagcctggaacagtgcctggcatgcaagggcactcaacaagtgttcgatcagtggatgactctgcacctgtttctaatcaccagtctcttaccacattccttcagaaaaccaactccatgagcacatcaactactagtactacaacaaaacctgccatctcctgagtgcttaccccatgctagtccaaaccttttatatgtgtgatctcatttaatcctcctgttctcttccctttcatagatagggaaactgagactcagagaggacaggtgacttgcccaaaggcaaccagatggaagagctgggattcaaacccaggttgttcactccgaatcatgagcactcaactgccatgctatccagcctgctaaataggtgacagcccccacacccatgagccatttgggg

SEQ ID NO: 523221 - DNA, 480 bp, Homo sapiens
ctgttgggattaggaaaagtcttttttagtcactttcttattaagtatgtattgagtgtagcactttgaagttctgcggcttcaatggtgagcaaaacaggtaaaaattcctgccctcaatagaaaaataggtcattaacaaaatatgagtaaaatatagtgtgtgtgagatgtgaaaacgttataaagaaacataaacagggagggaggayggagagtgaggtgggaggctggggttgtggtttaaacggagcagggtggttagggaggcctcactgagaatgtgatgtctgcacagagacctgaggaggccagggattgagccatcacatttacatctcctaacagtctctcgggagacagtctttatcttcatttcacacataaggagactctaaggacttaaataaattgcccaagtcccctcgttcttggaatggcagggcggggagtcttagtttgtagggttgtttgaaatca

SEQ ID NO: 523222 - DNA, 480 bp, Homo sapiens
ctgttgggattaggaaaagtcttttttagtcactttcttattaagtatgtattgagtgtagcactttgaagttctgcggcttcaatggtgagcaaaacaggtaaaaattcctgccctcaatagaaaaataggtcattaacaaaatatgagtaaaatatagtgtgtgtgagatgtgaaaacgttataaagaaacataaacagggagggaggatggagagtgaggtgggaggctggggttgtggtttaaayggagcagggtggttagggaggcctcactgagaatgtgatgtctgcacagagacctgaggaggccagggattgagccatcacatttacatctcctaacagtctctcgggagacagtctttatcttcatttcacacataaggagactctaaggacttaaataaattgcccaagtcccctcgttcttggaatggcagggcggggagtcttagtttgtagggttgtttgaaatca

SEQ ID NO: 523223 - DNA, 638 bp, Homo sapiens
ccatgtggtaaaagggcttcgtaggatttgcagagtttcattgagcaggaaagggacacagcagttatcttcatccttcaggaggaatgcagacactggaaaaatagaaccaattatgagattcaccttctgcataccaaaagatgtactgcatccaattggccagacttctttggatagagctatataaaacaatattttagagagagtaataaaatttacaataacatgtttccatatgaaatagcatttctttcctagttcacttcagagaaacagcaacaggtagaaagggagcatgagagttgaactctgcggtcggaagacatgagtttagccctggccaggcagccctgtgactttgggtaaatcccttcacctttctgggccttggcctccttgtctgtaaattggattgttaagtcagggaactagaaaccatgccaggtgtttcaaatagwggggctataaaacaggaaattggttacacaggtgttggaaaactggaagaacagaaaagggaaggagagctaacctaatgattaatgaccgcagaaagtatctaccactcctagggctggaggggatgaaagggacctgtgagcatggtggaggggcgggtgcctcgggagctgcag

SEQ ID NO: 523224 - DNA, 648 bp, Homo sapiens
aattatagcagcaaacagaactgtaaacctcaagagtcctttaaaatacatttctctactataaaacaataataactgatgctcataaaaaggtaaaatatcagatgcacaacactatatctaagaagagaaggcatcrcacatgttttaaaggttgatgtctgaactaactgaaatcactaaaaacaggtgctttaaaagttacacttcagtaatctggcaaatgcttccccagcaatgctggctctcagaggcagaggtggtgcctcacccatgataacccacagtcagagcgggcactggccactcagctaatattggcaaatattatttagagtgccttgggggcaggccctccactgagaccctgagcacagctaaggcaaagcagcctggctcctccctcactgcacccaccgtgtggtgattcaagtctgttcctagatgccctagatgttcctgagcctcactttgcttaggattcctcttcggactgttatgagaaccaaggaagatgaggaatagaaagcaatctttgaaacagaacacggtcccgtctctggcaagcggtgtttcggttcatctcaactctccagccaccctgtacctcccacggcagccccgcagcctctgtcctgcaggccacca

SEQ ID NO: 523225 - DNA, 587 bp, Homo sapiens
tgtaatttgtaaataagcaacagttattcttattagctgggatgaggggatgcttgctataattgtagtttacatagtgatcttgttttcatctgtgcttagacaaaattacaaagtgttcttggttttgtctcacttcactctggttacagagtggccttgtctgatgttggtgttcaataaaatcgtttggtgggtatgtttgcttcagagagcaggcaggactccttctcatccacgaccttayggaggatacactggtataggagtagaaatgttcagttgggataagggtagatgaagaaatagatgacaggtaaaatcatctctctctctctttttcttttctttttttttctttttcagtgaagttagagacaaggtcatcagccaagactggggagaaagggagatgaaaaagcctggagaaagtttaactcatctaagaggctgttaagtgaatcaacaaaagatgccattttctattaagtcatctattttattaaagagttaaatgcaactgttgctgtatatcatgaatttatgaaagatttaggagtgggagttctttttttctcaaaaaaaat

SEQ ID NO: 523226 - DNA, 491 bp, Homo sapiens
ccccatctcgggcgaaattcctaagaccagcgagcaggagcaccgcggcgggacggtcagcagcccctttccggccctggtcttcgggagctggcgaggtgaagaaatgtggaaacacccagacgaaaaggggatggggtgggggtcgcaggaaggcggcgccctcaggcagggtctccgcactccctcggaaccacagatgtkttcttcctgacccaggggcgcggcgccccagcccgggcgcccgggtgtttgtgtgtccgggtttccgaggaagggattacgcagcgggagcagccgcggcaacgcgggccgccggggccgcaggagccgtaacgaggcggctggccttctttgttgacttttaggtcccgggctcaacaggagatttattcgctaggaagggaaaatgcccaaacaatgaagaactatctgcacttgtcacctcgagacgcttgctgtcctgctctgtccgccttccctggcaacca

SEQ ID NO: 523227 - DNA, 491 bp, Homo sapiens
ccccatctcgggcgaaattcctaagaccagcgagcaggagcaccgcggcgggacggtcagcagcccctttccggccctggtcttcgggagctggcgaggtgaagaaatgtggaaacacccagacgaaaaggggatggggtgggggtcgcaggaaggcggcgccctcaggcagggtctccgcactccctcggaaccacagatgttttcttcctgacccaggggcgcrgcgccccagcccgggcgcccgggtgtttgtgtgtccgggtttccgaggaagggattacgcagcgggagcagccgcggcaacgcgggccgccggggccgcaggagccgtaacgaggcggctggccttctttgttgacttttaggtcccgggctcaacaggagatttattcgctaggaagggaaaatgcccaaacaatgaagaactatctgcacttgtcacctcgagacgcttgctgtcctgctctgtccgccttccctggcaacca

SEQ ID NO: 523228 - DNA, 491 bp, Homo sapiens
ccccatctcgggcgaaattcctaagaccagcgagcaggagcaccgcggcgggacggtcagcagcccctttccggccctggtcttcgggagctggcgaggtgaagaaatgtggaaacacccagacgaaaaggggatggggtgggggtcgcaggaaggcggcgccctcaggcagggtctccgcactccctcggaaccacagatgttttcttcctgacccaggggcgcggcgccccagcccgggcgcccgggtgtttgtgtgtccgggtttccgaggaagggattacgcagcgggagcagccgcggcaacgcgggccgccggggccgcaggagccgtaacgaggcggctggccttctttgttgacttttaggtcccgggctcaacagragatttattcgctaggaagggaaaatgcccaaacaatgaagaactatctgcacttgtcacctcgagacgcttgctgtcctgctctgtccgccttccctggcaacca

SEQ ID NO: 523229 - DNA, 477 bp, Homo sapiens
tcgtggggtgccaagccgtgtgccgggtgagaggcgggcacagaggccagcgccccgggcccggagcttatggggggcgcagttgaggaggctggagtcttcaactccgaggcgccccctgtcgccgtcgccccactgtggtccagagtctgggggctggcggcgggcccgggggccggcgcgccctctagctggccggtcttcccgtgcacrccccgatggaggggcgagtcggcgctggggttagaggcgccagaggggtccttgcggctctcagggccgcccttggcgccgctgcccccgcttccgctcccgcccccgccgccggcccccggctgcttctcgcacttgaagcgcttctggcggcgcaagtagcagccgttctcgaacatgttgccggagtccgggtgcagcgtccagtaggagcccttgcccggcttgtccggggagcgtgccaccttgacgaagcagtcattg

SEQ ID NO: 523230 - DNA, 651 bp, Homo sapiens
atgatttcaacgcctggctttgagattccgtgagtagtcttgaataatttaaaattcgaaaatcaaattctacttattttctcttaatgctattgtatttcctaattctcagctttaacatgtaagaaagtactttcgctaggggtcttaattgaatggtggggtcgagatgactgcgtcagaattaaatctctggaagacctctgagctccttttaaaatcatcaacaagcgaaaatccttatcaatagcgatgtgggaatgcattaggtacagtattttaaacatacaaaacctaggcatattaaaaagcactcctctggtaatttaataaggaataatgatgtccttaagtttattttaatcagcaagtatgactcaatttgaaaayatgagaacaaatagatttaaataggaacacccagtaaactatggtatgcaaataaactcagaggtaaacttgtgaatacataaatctaaataagtcagttaccatcaaaatattacgtgatcctatatttttctgtccacgtcttaaaagtattttttaccttggggctttattttctttccctcttcccaagattatccaaggcagttccaatacgcgttttcaataatggtaattaaacttttggagggtaatcgccag

SEQ ID NO: 523231 - DNA, 570 bp, Homo sapiens
ggaaggattgagaacctggtggaagggagaggtaggtgcacgacgccmcacggggctgtggggacaagagaaaaagaggctaggaaggagaaagagggggattcaaagagacttcgggaggtgaaaggtcacagtggagggactttaatttccatctacctgacctctgctgtccctttacagggcagcttgttttgagtaaacctcaaccaccagtaggtggttgccccactagggtcgatgtgtgtagtttcagaatagagaccagtttcctgagtttggctccaactccttggtggacggtgagacactgtgggcttaatgcaaggattgttggcattgaaacccacgacccacaatggaactgttgcaaactactgctgcagaaatttaaaggagatcaatagtttttttttttaacatgcaaatctaaaagttgaacaaattgcttttttcatatctacaactttatagaggcataatttatattcagtaagttgcacaaatgaacagttgtacaatgtacaaggtacaggcatacaatttgatgagttttgacagattcataca

SEQ ID NO: 523232 - DNA, 570 bp, Homo sapiens
ggaaggattgagaacctggtggaagggagaggtaggtgcacgacgccccacggggctgtggggacaagagaaaaagaggctaggaaggagaaagagggggattcaaagagacttcgggaggtgaaaggtcacagtggagggactttaatttccatctacctgacctctgctgtccctttacagggcagcttgttttgagtaaacctcaaccaccaktaggtggttgccccactagggtcgatgtgtgtagtttcagaatagagaccagtttcctgagtttggctccaactccttggtggacggtgagacactgtgggcttaatgcaaggattgttggcattgaaacccacgacccacaatggaactgttgcaaactactgctgcagaaatttaaaggagatcaatagtttttttttttaacatgcaaatctaaaagttgaacaaattgcttttttcatatctacaactttatagaggcataatttatattcagtaagttgcacaaatgaacagttgtacaatgtacaaggtacaggcatacaatttgatgagttttgacagattcataca

SEQ ID NO: 523233 - DNA, 606 bp, Homo sapiens
aaatccaagtttcttgctgaatttcaaggtgtgaagtaacttcttaatgttaatgtaaatctaaaagacaagcttaatgcagcatggtaaataaaatgacccaggaattgtgagatctgagtacagcttattctcactttctcactgttttcctatgtaacacactctcccgttcacagtatttaaaacctttcagccacttgaaaaaggtataacatgaaactccctatattataacttgctatggatgaaaactccttttataatccatccctacagagaattttgtaaaaagacttcatatgatatatatctacagtagaaacacctaaaaggctgtgtagaacaagtgtttagaaggtgctattcacaaaataattacctaagaaatatgcataaatgaatgaatgacagtgctttgtataattacatatcttaggagctaaattaatttatctacattatttctttgtatcctttattccagtaattctttatcttttttcaatttctttttcctttcctttattgtccctttcttttcttttggagayaggatcttgctctgttacccaggctggagtgcagtgagtgggacagtctcag

SEQ ID NO: 523234 - DNA, 507 bp, Homo sapiens
cccaaattgacatgattaaataaaatagagttgttttaagctactgacttttgggtgatttattctgatatggaaatattaattgtagatgtcaaaaaaagagaagtttgccttggttttgctggcaaagcaggcccaggtattagtgggtgagccttttgccccaacgctcagtctaagcccatagtgaaacatggcagcattaagatagaagtaaattcccagattgagagagatataagttccatttccctttgtaatgaaccatactggattgttgtataggactctatgtttttaaaaacactagacatgccgagagagtaaccaataatggtgagcaatttattaacctatacaaagcccttcgaggactggaagtgttagcctcaaaaaaagtaaaacacagtaaagatacaacaattttcttaacattttgacaacacctcataaaggaaatcaagtrgggtaatgatttaaagggtaggtgtatgcagataggtagaa

SEQ ID NO: 523235 - DNA, 590 bp, Homo sapiens
tgcatgttaataagccctcccctgccatggccacagygcacactgagcagcaccacctggccggtgggcgtaccacccctgcaggctgcctagacgaaggacagccctgctcaccccccaggcccccatctctcacgcacacacagtcggaggcaggacagagctcagctccctctgcccagggctgcttgccaggtcagaaagcagtgcccccacctcagtggagagggaggaagggtgcgtgccctcggcagacagtgtccggggcgagggcgggccctgggctctgctcagagggaggaggcctcttcactcttctgtgtccagcaaggtcagatggcccctggcacagtctccctgcttgtgagtgtctcaccatctgtgcacaaccttggccgccagctctgccctgggcctgcccccagcctggccctcctcttcccccacctgtcattaaccttctccagggagggtttgtacagcatggctctgcctgtagcctctgtggtttcccattgccctcgggacaaagccgggacccgtacgcagctagcatagaccgtctcctctgtcccgggccgggcctggcc

SEQ ID NO: 523236 - DNA, 590 bp, Homo sapiens
tgcatgttaataagccctcccctgccatggccacagtgcacactgagcagcaccacctggccggtgggcgyaccacccctgcaggctgcctagacgaaggacagccctgctcaccccccaggcccccatctctcacgcacacacagtcggaggcaggacagagctcagctccctctgcccagggctgcttgccaggtcagaaagcagtgcccccacctcagtggagagggaggaagggtgcgtgccctcggcagacagtgtccggggcgagggcgggccctgggctctgctcagagggaggaggcctcttcactcttctgtgtccagcaaggtcagatggcccctggcacagtctccctgcttgtgagtgtctcaccatctgtgcacaaccttggccgccagctctgccctgggcctgcccccagcctggccctcctcttcccccacctgtcattaaccttctccagggagggtttgtacagcatggctctgcctgtagcctctgtggtttcccattgccctcgggacaaagccgggacccgtacgcagctagcatagaccgtctcctctgtcccgggccgggcctggcc

SEQ ID NO: 523237 - DNA, 590 bp, Homo sapiens
tgcatgttaataagccctcccctgccatggccacagtgcacactgagcagcaccacctggccggtgggcgtaccacccctgcaggctgcctagacgaaggacagccctgctcaccccccrggcccccatctctcacgcacacacagtcggaggcaggacagagctcagctccctctgcccagggctgcttgccaggtcagaaagcagtgcccccacctcagtggagagggaggaagggtgcgtgccctcggcagacagtgtccggggcgagggcgggccctgggctctgctcagagggaggaggcctcttcactcttctgtgtccagcaaggtcagatggcccctggcacagtctccctgcttgtgagtgtctcaccatctgtgcacaaccttggccgccagctctgccctgggcctgcccccagcctggccctcctcttcccccacctgtcattaaccttctccagggagggtttgtacagcatggctctgcctgtagcctctgtggtttcccattgccctcgggacaaagccgggacccgtacgcagctagcatagaccgtctcctctgtcccgggccgggcctggcc

SEQ ID NO: 523238 - DNA, 529 bp, Homo sapiens
ccaagtggaacctggaaactggattttacaggtgccagggccttcttagcgggaggctggtgagctgagaatgctggtcccagaggcctggcgaaccccagctcgtgagcccccacccgcagagcagcagctcctgaagcagagcccaaaggccactgccccccatgcccttggtgcccagcacagtgtgggcagagtaaggagccaggaggatgagtgaatgaatgaatgaatgaatgggtaaatgaatgaatgaatgaatgaattcaaactcccttccagttcagccagtgcaactgcccccaagaggcctgctaatccacaacaacttagaagaatgttgaccctggcccaagaccctcggcccctcaatgcacagggcctcctcatkccccctcccaccctggggtccccgctcccctgactagagacatcagagaccaaagtggccgagacagaacgactcagggttaatttccttgttctttgggctgtgtgccccagggccagtaactcaacctctctgagc

SEQ ID NO: 523239 - DNA, 488 bp, Homo sapiens
ctggaagcagtgggaaaagcagaaaaaggtcaccccaggaaattccagtcacaagcccacctcaggggcagtgtggccagaactcacgctcactagatgactggaaaaaccccaggccaaaaatttagtttgagggagtcctggcaacccaagcttctgggagaagcaaaggcgaaacctttccagagaaaggcgttggaaacytggacctcagagaatcctcgcagacgggggtccggggaacgcagccttgccaccttacaagttacccacacgcaggagaaaatctgccctccccaggacaggagccccccgcaacggcgtctgggaaacgtcaggtccactctgccagccacaaggcccctggaagcagcgtggcctgggtgcaaagcaaccgacacctcacccgcgcccctgggcctcctgaggaaagaaagccccaggtccccagagtgcctgtgcggcccctcatctccgtgcatgacaac

SEQ ID NO: 523240 - DNA, 488 bp, Homo sapiens
ctggaagcagtgggaaaagcagaaaaaggtcaccccaggaaattccagtcacaagcccacctcaggggcagtgtggccagaactcacgctcactagatgactggaaaaaccccaggccaaaaatttagtttgagggagtcctggcaacccaagcttctgggagaagcaaaggcgaaacctttccagagaaaggcgttggaaacctggacctcagagaatcctcgcagacgggggtccggggaacgcagccttgccaccttacaagttacccacacgcaggagaaaatctgccctccccaggacaggagccccccgcaacggcgtctgggaaacgtcaggtccactctgccagccacaaggcccctggaagcagcgtggcctgggtgcaaagcarccgacacctcacccgcgcccctgggcctcctgaggaaagaaagccccaggtccccagagtgcctgtgcggcccctcatctccgtgcatgacaac

SEQ ID NO: 523241 - DNA, 280 bp, Homo sapiens
agacttcaacatatgaatttgggagtcacagttcaacccagcawgctatacagatctcaagggtgtcactcagggagttgacaaaagcggactccaccaagataagaacctgaccacccccgagatatgcgctcatcagtccccactgcaccccctccagaggcgacttttcattgcagatcagcgtgacctgttctagagcttcctacaggcagagtcaggccgcactggcccgccccagctctcagaggccggccatcactgtgcacccacacaccac

SEQ ID NO: 523242 - DNA, 525 bp, Homo sapiens
gctcaaagtgtggtccaggaaccaggcagcatgggtgtsatcaggaagcatatgagacatgcacacacccaggctcaccccacactcactgaatcaggatctgcatttaacaggattctcattaacatttgagaagcaatgttccactctacagtccagagaatgagattgctgaagtccattttaagattttcccctttttcacttgtgtttctctcctgtattctcatccccaagtgtcgagaacagatcttggcttttggtaatttctctctttaatatgcattactgtaagtcttataaataaaaataaatgttcccttttgggtttcacacctgttcttgcttcatgaaatgtaatgtctccaggcagcttacatttaaaaaaaattctgaaattctgtgtgtgtttcacagtgtgacactatttatttctctgaagttttcaaaaaatattattcctgttttcccatgcttcatattggttgaaaagaacagttttcttttcataagctgactaccata

SEQ ID NO: 523243 - DNA, 525 bp, Homo sapiens
gctcaaagtgtggtccaggaaccaggcagcatgggtgtgatcaggaagcatatgagacatgcacacacccaggctcaccccacactcactgaatcaggatctgcatttaacaggattctcattaacatttgagaagcaatgttccactctacagtccagagaatgagattgctgaagtccattttaagattttcccctttttcacttgtgtttctctcctgtattctcatccccaagtgtcgagaacagatcttggcttttggtaatttctctctttaatatgcattacygtaagtcttataaataaaaataaatgttcccttttgggtttcacacctgttcttgcttcatgaaatgtaatgtctccaggcagcttacatttaaaaaaaattctgaaattctgtgtgtgtttcacagtgtgacactatttatttctctgaagttttcaaaaaatattattcctgttttcccatgcttcatattggttgaaaagaacagttttcttttcataagctgactaccata

SEQ ID NO: 523244 - DNA, 559 bp, Homo sapiens
ttagtctagcagaccaagatccaagctagagagtggttatttgaggataagccaatctcatcatcctttttggaaagccaagagacaaaacagcaaagtcaatcaccaatgcgggcagcagggggtctggagatggctctaagagaaaggaaccaagcaggagctggaagaaataaaggagagccctggatcatcgcacccaacagtagggatgtatgtgcttacagtgtgggagagtcaggctgcttgaaaagccaagcagacaagaaaggccaaccccttcatttctaagggaaaactgctgcacagagcagttaagggacaatgctgacatggacacagctagttggtggcagaaaggactagctctggagtctccagtgtcgtgtctctctcttcccataactcagtttttctttggtattgagttgatgggcccccctttatagatgttayattctgtttatcacagtgattctctgtttcatttacaattcttgtttaaggtgggtggaggatgttattctgttcagggtggactatcatctcttttttaaaa

SEQ ID NO: 523245 - DNA, 645 bp, Homo sapiens
ttaaagaagtatgcagtgatcccttctaatgcttcttcatgcaaagggctggctcacactttcaacagaggagagaggctgagaactacaaagcctactgatgaacaggagggaggttatttatacagtggcccaggacacgatattacacaggtgtttgggaggctggttttgcttccaagtttgcccactccctggtcatcttccaggcaggtcttagaatcataactttgatcacattccttccctacccaggaaaytctcttgtcaaacccagacaaaaggcacctgcctgctccatcttgcctgccttttcttctgtaactaaatcatcttatgccctcactctccgtcttagcaaagtgaacactggacgcacagtttagccacttgcccgatgttttcatggtacgttgcttggaggcccttgttcctccttcaccttcctattcctcttcctcctcctctctcttacatcttgttcatttgtcatttcttataagatcctacttcaacttcacccctctctgactctccgctgatttggaacacctcgagtagacactccaaaccctctgataaaccctagcaactatcttttttcagtctccacaattcaaaaatcgaataatgccctaggtaaag

SEQ ID NO: 523246 - DNA, 645 bp, Homo sapiens
ttaaagaagtatgcagtgatcccttctaatgcttcttcatgcaaagggctggctcacactttcaacagaggagagaggctgagaactacaaagcctactgatgaacaggagggaggttatttatacagtggcccaggacacgatattacacaggtgtttgggaggctggttttgcttccaagtttgcccactccctggtcatcttccaggcaggtcttagaatcataactttgatcacattccttccctacccaggaaactctcttgtcaaacccagacaaaaggcacctgcctgctccatcttgcctgccttttcttctgtaactaaatcatcttatgccctcactctccgtcttagcaaagtgaacactggacgcacagtttagccacttgcccgatgttttcatggtacgttgcttggaggcccttgytcctccttcaccttcctattcctcttcctcctcctctctcttacatcttgttcatttgtcatttcttataagatcctacttcaacttcacccctctctgactctccgctgatttggaacacctcgagtagacactccaaaccctctgataaaccctagcaactatcttttttcagtctccacaattcaaaaatcgaataatgccctaggtaaag

SEQ ID NO: 523247 - DNA, 614 bp, Homo sapiens
actttaagcaaagcagagaaactgccaaaataggtgtggacttcattaatcagttgaaggcctgaagagcaaaggctgaggtttcctgaagaaraaggaattctgcctccagactgcaacagaaattctgcctgagtttcagaaattctgtctgagtttccagcctttggactcaaggctgaagcatcaactcttacttgctctccagtccacctaacttcctgcaaaatttcagatttgccacctccctccaccgccgtcacatacgtcaattcccttaaatccatctctctccatctcgtctatagctacatctctctagatacatctacattagtcagaatgtgaaaggttatgctgctgtggcaaataaacccctgcatctcagtggttatgtcacctgaaacacgtgacttcaggattgctgtcatcagggaagagagagctggagggttgctgagttgctttaaaaggccaaccctgaaagaggcagacatcacttctgtccacatctacatatgtatatccatatctaatctatctctatatatagagggagatcctgttggttctgtttctctggagaacctttataatacactgggggaaaagca

SEQ ID NO: 523248 - DNA, 614 bp, Homo sapiens
actttaagcaaagcagagaaactgccaaaataggtgtggacttcattaatcagttgaaggcctgaagagcaaaggctgaggtttcctgaagaagaaggaattctgcctccagactgcaacagaaattctgcctgagtttcagaaattctgtctgagtttccagcctttggactcaaggctgaagcatcaactcttacttgctctccagtccacctaacttcctgcaaaatttcagatttgccacctccctccaccgccgtcacatacgtcaattcccttaaatccatctctctccatctcgtctatagctacatctctctagatacatctacattagtcagaatgtgaaaggttatgctgctgtggcaaataaacccctgcatctcagtggttatgtcacctgaaacacgtgacttcaggattgctgtcatcagggaagagagagctggagggttgctgagttgctttaaaaggccaaccctgaaagaggcagacatcacttctgtccacatctacatatgtatatccatatctaatctatctctatatatagagggagatcctrttggttctgtttctctggagaacctttataatacactgggggaaaagca

SEQ ID NO: 523249 - DNA, 632 bp, Homo sapiens
cagctgtgaacctgctcaggctgccgtggcccggggtgaatcagaaaccaagagataggctagctaacaatgcagccccttgttcctgcattgagagagagagagatcaccatcagcaccgggctcctgagagtgggggcagctagctggcgcacacacatacacacacacacacacacacactcaccatttgcctcctggcacaacccactcacctagcccacccagtgtaggtgtgctggggaaaggtgttacatagcaggcctgagaccatcatgactgcctggtggggccagcctctctctaaggtgtctccatcccagcctcctactccctcctttcactctaacttacctgggaaggcagsgggggagggagctggaggggagggcttgcatgaagccaaatggagtgggattgtcttgaggttttccattgggctggggagcatgaacggcagtgggatgcacagccaaagcgggttcttggagcctgagagggtttgggaaagcctgtttacaggaaccagacaccctgaaaaaaataacttgcaggcaagttttgaagcaggcctggtcatggagctggcagccactcaaggccgcggtagagttgggggccttcctatcagg

SEQ ID NO: 523250 - DNA, 596 bp, Homo sapiens
gatgtgctgtctggagctcggaggaagtggagctttttctgctgtgaggacccgccttcagcccccttttggggcacaggaaggggagggagtgagcctaaattgtggccccatgcttagtgactcagatgttactgctaccacaaagggaaattcatgtgggggtggacatctccagagacctcactcacctgtgatttgggggataatagcatcactcatgtgttcacgtgccaggcctgtcaccccggaacattagtcaaagggctgtgttgacagtgatttcaactcttgaattatacgaaggacctggccgcaagaargcattgagccccgaggaggacaacaggcctcaggtacttcatgtgattaaagctgagacaaggggagtcccatgggtcagtcctgtaactggggtctgatatacactagtgataggcattagcatagtttgcacattatatgatagtcttggtccttttcatttcctgataagctggaatgtctgacagagtaaattccagatgcccttgtggaattctcattacgatcatgttgctaaggaactgtcttctacctgtatgcaatttggaaat

SEQ ID NO: 523251 - DNA, 596 bp, Homo sapiens
gatgtgctgtctggagctcggaggaagtggagctttttctgctgtgaggacccgccttcagcccccttttggggcacaggaaggggagggagtgagcctaaattgtggccccatgcttagtgactcagatgttactgctaccacaaagggaaattcatgtgggggtggacatctccagagacctcactcacctgtgatttgggggataatagcatcactcatgtgttcacgtgccaggcctgtcaccccggaacattagtcaaagggctgtgttgacagtgatttcaactcttgaattatacgaaggacctggccgcaagaaggcattgagccccgaggaggacaacaggcctcaggtacttcatgtgattaaagctgagacaaggggagtcccatgggtcagtcctgtaactggggtctgatatacactagtgataggcattagcatagtttgcacattatatgatagtcttggtccttttcatttcctgataagctggaatgtctgacagagtaaattccagatgcccttgtggaattctcattaygatcatgttgctaaggaactgtcttctacctgtatgcaatttggaaat

SEQ ID NO: 523252 - DNA, 590 bp, Homo sapiens
aagggatgaagaccatttatgttgctttcactaactgtttaaatctatcatgcatttaggaatataattgcaagctgctgtttaaagttttgatagtgtaatatctgaaaattatatacctatcctactttacttaatatgcgtccagttttgttagttatcatgaaccatgtaccacacagtttggcagggttgggtaaggagatagtcggagtgtgtgttttgtgtgtgtgtgtgttatgtatatgtgtgtgtactggcagaggttgaattaaaccctgtgataaaaaaggaatcaaggcttatcctaagaaaatgtataaagatctttctttaggrtatattttatgtccttcccctgtgtcctccaactttcagtcgctccattatttgatagtttaattctcagatgctgaggatcagaacagatggatgcagaaattctgggagaatcttggctgaagatgtgggtttctcttctgcaaagaacacaagatcagagaatctttaaaatgagatgggaataaatttcagggatcatatttgacattctaaattaaaacatggtttcttttttatggtctaaaagc

SEQ ID NO: 523253 - DNA, 621 bp, Homo sapiens
acatattgggtctggtatgttaaaatgagatttccatggccggctgaagcagaacaaatttagttaacttccaaagccctttaccctggcgcctttttttcccctgaattccctttcgtcttatctcagcgcccgcccccatcggaaaatttcactcctttctcgaagacattagaattaacaagataaagcacttccaaagtagtctcatcaatgttttattccatagtgaagacggtctgaataatttaactaaggagtgttcgtttgtctcccgcctttgggagctgcttgctggctacattcagcggaggatttggcccagccaagctcagggtgccctgcttcaggaggcagtgactggggctgctggggggcggggggttctctttgctaacgccgtttaggaagtgtaggggcgctgcctgattttcccccactcgctgcatttctatagatatccatatgatggcatttgcagacttctagctggccgatagctgctctgcytgtccctgcgcactgacgtccccaactcctcttcgagtctgggctcggctgctgctgcagccctcgcaggctggtggtgctacaaggccatgtatgcagcgggctttgggg

SEQ ID NO: 523254 - DNA, 440 bp, Homo sapiens
gttaaatgtttcagtgaaaaaaatctgtgtactagggaagcaagttgaattattaggagctgctaaatggaaaggccctaatgacaaagaatcaacaggagctccagcctgagacaatcagtccaaactgaatcctgccaataattcatatataagtgcagaagcagatgctgcaccagtcaagcttcagttgagaccacagccccagcctcctgagaaayattgagataaagaaaaaatgtgagccatgtctggatcctgttctgcaaaaactatgatatgataaatgtttctgacttacactgtgaacttcttttccaagaaccattacaggaacacaccaggaaaactaaaaaagtttacagatcctatgaaagtagtgacatactgctgcaaactccatgagacaggcaaaaagctctgagtacccaaagcgtgag

SEQ ID NO: 523255 - DNA, 440 bp, Homo sapiens
gttaaatgtttcagtgaaaaaaatctgtgtactagggaagcaagttgaattattaggagctgctaaatggaaaggccctaatgacaaagaatcaacaggagctccagcctgagacaatcagtccaaactgaatcctgccaataattcatatataagtgcagaagcagatgctgcaccagtcaagcttcagttgagaccacagccccagcctcctgagaaatattgagataaagaaaaaatgtgagmcatgtctggatcctgttctgcaaaaactatgatatgataaatgtttctgacttacactgtgaacttcttttccaagaaccattacaggaacacaccaggaaaactaaaaaagtttacagatcctatgaaagtagtgacatactgctgcaaactccatgagacaggcaaaaagctctgagtacccaaagcgtgag

SEQ ID NO: 523256 - DNA, 600 bp, Homo sapiens
acatgaacaagaaggtgttcaattaaactatataaagaaaatgtgaagtcaaatttctgctaatagagcagatacaggttccaacttcaacagcagcctcgcatatttactgagactctgacaagaggaggcttcagggtactaaagttgttctgttacaattccaaaaggatgaatcaagtaactcagcttcctgggctacaccctccacaagcaaagaggagatagaattacatatttatgtaaaatgaacytcagctaagaaacccagatgtttaattttaagagcctgcctcttcctgtaagccgctaaactcattaccaagtcagggtatactctgataacaggatggtcacaaaggtccaatctgattcaaataatgaaatcaaaacgtaaaattttactcccagtttttaacaatctagttggtattttcttctccccaaaatgggaaacaaatcttagaatcataggggaaaagatctataacaaagtgaacacaaaaaggaaattcctcttgccatgtgagaatggcattgtctagggggaaaaaaaattgatctttaaagaatgtgaaagtataatagccagaaacagct

SEQ ID NO: 523257 - DNA, 600 bp, Homo sapiens
acatgaacaagaaggtgttcaattaaactatataaagaaaatgtgaagtcaaatttctgctaatagagcagatacaggttccaacttcaacagcagcctcgcatatttactgagactctgacaagaggaggcttcagggtactaaagttgttctgttacaattccaaaaggatgaatcaagtaactcagcttcctgggctacaccctccacaagcaaagaggagatagaattacatatttatgtaaaatgaacttcagctaagaaacccagatgtttaattttaagagcctgcctcttcctgtaagccgctaaactcattaccaagtcagggtatactctgataacaggatggtcacaaaggtccaatctgattcaaataatgaaatcaaaacgtaaaattttactcccagtttttaacaatctagttggtattttcttctccccaaaatgggaaacaaatcttasaatcataggggaaaagatctataacaaagtgaacacaaaaaggaaattcctcttgccatgtgagaatggcattgtctagggggaaaaaaaattgatctttaaagaatgtgaaagtataatagccagaaacagct

SEQ ID NO: 523258 - DNA, 436 bp, Homo sapiens
tttaagctcttagaaccaccttccactaacaagggtcatatttaaactttcagttttttcaaagttataatatgtgtgaaaagcaggatattaaagcagatgaagagagagccacacagataccagagggcagactgttcctatactcagatgcaggctggaagctaagttactatttcactactagagttcttrgaaaataaagaaaggaaaggtactgagaatctgggtctgggtcctggcccctgtgggtttggtattttaaaaccacttaaacgatttatgtcactttttttaacagtcaccaggcacctgctgacccagctctactgcttgctagctatggaactttggatatgttgacctctctgttcctcagtttcctcatctttaaaattcaacagtaataatatctacctcatgaaattgtgttgtt

SEQ ID NO: 523259 - DNA, 576 bp, Homo sapiens
tgggacctgtcactcaaggtcactgtgtgcagctgggccactcaccccagccccttccgacccaccccacccacctccttccacatccccacaggaccacgtccccaccgaccacatctccatggaccacatccccacagaaccacgtccccacaggaccacaacccacaggaccacatctccacggaccacgtccccacagaaccacatccccacaggaccacattcccacaggaccacgtctccacggaccgtgtccccacaggaccaygtctccacaggaccacattcccacaggaccacaaccacaggaccacatctccactgaccatgtccccacaggaccaggtaccacagaccacgtccccacagaccatgtctccgtgcagggccatatctccccacaggacctcatcccctcaggacctcatcccgtgtgtctgaggaagctccagggtcctcagaaccagcttcacgtggccaggcctggccctcctgcccagtgtcgtgccctacccccttgcagccgtcattctcagtcgcccttgaagctggagggcaggtcaacactgcaca

SEQ ID NO: 523260 - DNA, 582 bp, Homo sapiens
tgccccaggactggctgccagccctcaaagagccccctgggtcccccyggcacaactctctgcatgaagcccccagcaggagaagggctcactgccctgagcccgacacagtacgagacggaggcctcactgagtccaggccccgcactggccctcccctggatcctgagtccaggccccaagccagcccctcccctggatctccccagaccctctctgtgggaacccaggggctggagccgctcgactacatcttggtagctctcatttgggacctcatctttaatctcagcaactcagggatcaaagagaaaaggccgaggcaggcgaggccagggtttcttgctcaagcattcggatcattaaacaaacgaaaaaaatcaaagagaaggaaagccaggctgctgcctgtggatctgtctgccctccccggaggccagcgccgcacgcccctccctccctctctctccctctcctctctctggctctcctgatggaggccccacatggggttaggattcccaaatgtcacatgaatccagtgtttggggagcgtctcgctccgtttgtgttgctgtaaca

SEQ ID NO: 523261 - DNA, 582 bp, Homo sapiens
tgccccaggactggctgccagccctcaaagagccccctgggtccccccggcacaactctctgcatgaagcccccagcaggagaagggctcactgccctgagcccgacacagtacgagacggaggcctcactgagtccaggccccgcactggccctcccctggatcctgagtccaggccccaagccagcccctcccctggatctccccagaccctctctgtgggaacccaggggctggagccgctcgactacatcttggtagctctcatttgggacctcatctttaatctcagcaactcagggatcaaagagaaaaggcygaggcaggcgaggccagggtttcttgctcaagcattcggatcattaaacaaacgaaaaaaatcaaagagaaggaaagccaggctgctgcctgtggatctgtctgccctccccggaggccagcgccgcacgcccctccctccctctctctccctctcctctctctggctctcctgatggaggccccacatggggttaggattcccaaatgtcacatgaatccagtgtttggggagcgtctcgctccgtttgtgttgctgtaaca

SEQ ID NO: 523262 - DNA, 567 bp, Homo sapiens
cgcgtggacgagcaaagttgcccaggaagtggggaccaggcaccctcccttctcctaggtctctgtgccaggagccaggagccacgtgacactgcccgacctgcaggcagccacgaagtacagggtcctggtctcagctatctatgcagcaggcaggagtgaggctgtgtctgccacgggccagacaggtgagtgggcaccaagaccccagacccaggtagacccagccccagccgggccctagaccccagaccctgccagctccagactcatccaaccccagacccagccaaccccagacctagttgaccccaggggtcacaggcaggcaggggtcctgggtggctggagatgactggttccaggctggccccacctggattctccagggacaaggacgtggtcacacttgcctggggtcttccacggtgggagctgctgttgctggttttttgtctcttgctggttttcctggagaaccacaggtccagggcgagggctctgagaggcatccatcccaaccttccagcttccctctgggctycccattgtggggtcttccagtct

SEQ ID NO: 523263 - DNA, 509 bp, Homo sapiens
tgctcaccccaaggttccagcgccccacaggtgacggctggggcttccagagctggctctgggaccggtcaagcacactctctctgagctcagtgtccacagccttgtctactcagggggccggggtttgaacccagaactgcctgactatgagaggsaaggatgggctagtgcgtccttgccctggaaaccccttctcttccccttgacagcagtggacagtctggggctgggtggggcatggggctcagggtgggccaggcatggggctcaggggctggtctttgctcctctaccttggttgggtagttctgggggcttagccctgtttgtgcctctgcagggcctccctgggaggaatggcaccccaggagagcagggcttcccagggcccagggtaagttttggggagccctgggaggtgaggggcctggatcgtacctaccagaagagaacacccctcccagtgcattcctgagagtgcagggagctgcacgcagcttccctag

SEQ ID NO: 523264 - DNA, 653 bp, Homo sapiens
cctctgctcaccccaaggttccagcgccccacaggtgacggctggggcttccagagctggctctgggaccggtcaagcacactctctctgagctcagtgtccacagccttgtctactcagggggccggggtttgaacccagaactgcctgactatgagagggaaggatgggctagtgcgtccttgccctggaaaccccttctcttccccttgacagcagtggacagtctggggctgggtggggcatggggctcagggtgggccaggcatggggctcaggggctggtctttgctcctctacctyggttgggtagttctgggggcttagccctgtttgtgcctctgcagggcctccctgggaggaatggcaccccaggagagcagggcttcccagggcccagggtaagttttggggagccctgggaggtgaggggcctggatcgtacctaccagaagagaacacccctcccagtgcattcctgagagtgcagggagctgcacgcagcttccctaggcagggtggggtctccccaagctgcagacaggcagggaccccagcaccccaggagtccagggggtttaggctggcctcccccatgtgcctgcagggcgcctggcccaggcctggttatggtgcaagtccccttttcaccc

SEQ ID NO: 523265 - DNA, 550 bp, Homo sapiens
aatagacataagtaactgcaaaatcatgtataatcataaaatgtagtaaaataattaggaagtaatgagtcaagcatttattacttctgttttttaaaaataatgtatttcattacaagtttctataatttagttttaaataatggttctgyttaacttttgtctgatgatactcctaaaactttaacaagctgggtccaacaactttgtcataccttatttactttagaacgatgctgacaatgtgcttttatattcatgcattaaatgttgctgtagaaacttccgaagctaactttttgcaacatgagaactgaactgatgaactttgccccacttcgtactttaagcacatagaaattctggataaaatggcaaatattaaataaatcaaaataagacaagataaatctccatgtgtgagaaaggaaaaatgaaatcaatgccagagcaataatttgaaactgattcagtgacagctctcaggtgttagaggaggcatggattatagagctgggtgctgagagtctaaagtccattcagggagaag

SEQ ID NO: 523266 - DNA, 551 bp, Homo sapiens
aggttggagcctgaccttgaatttattctctctggacaggactctcactcccatctgcctcttccaagcagtccttatatgaatgagaccttgagcctcattgcacgtgaactgccatctttattctcacttcaatctatttagccttccttgagctagataccagcaccatcttacctatgaacccagactctactcaaatatgtcactcacgattcggctggatgctctgaacaacaaagttagaccccactgatgttcattaccctgaaatggatgygatgattggggttgtctcctgtcaccctttggagtccagccctacatcaagtctgttcccgtaaccccacctctgacaatcactaatagacctttgagtctctttctgtagtcgagaggtcctagtacatctcatgagaaggtccccgagggttaggccacggacattgtttaaaaatatataaattataaagtactctacaaggacttagtgttaccatcataattatctcatgatgatccagttcttgctgccagagatgctgctatgt

SEQ ID NO: 523267 - DNA, 387 bp, Homo sapiens
ctgcccggagctcaggctgaggagggtcacgctcctgagatcccgcgtttctcatcaktgattgggcacccactgtgtgtgtgcgtgagtcacaggctgtgtagggttagctcccgggggacccaagcaacaagcaggggaggctgtaaagaggccgtcgggcaggggcccatggtggagacccctctattacgtgcagacccacgacctcgttagcagggtcacgcgcagacccacgacctcgttagtgagcaggggtgcaggggtggggtctggccggaggctggtcagctcccaggtgcaaagaccctgagtcctgagaactcgcccaggtgagaagtggggaggaggccaggtgaggagggggtgggaggccaggtggggggg

SEQ ID NO: 523268 - DNA, 387 bp, Homo sapiens
ctgcccggagctcaggctgaggagggtcacgctcctgagatcccgcgtttctcatcagtgattgggcacccactgtgtgtgtgcgtgagtcacaggctgtgtagggttagctcccgggggacccaarcaacaagcaggggaggctgtaaagaggccgtcgggcaggggcccatggtggagacccctctattacgtgcagacccacgacctcgttagcagggtcacgcgcagacccacgacctcgttagtgagcaggggtgcaggggtggggtctggccggaggctggtcagctcccaggtgcaaagaccctgagtcctgagaactcgcccaggtgagaagtggggaggaggccaggtgaggagggggtgggaggccaggtggggggg

SEQ ID NO: 523269 - DNA, 519 bp, Homo sapiens
tgcccggagctcaggctgaggagggtcacgctcctgagatcccgcgtttctcatcagtgattgggcacccactgtgtgtgtgcgtgagtcacaggctgtgtagggttagctcccgggggacccaagcaacaagcaggggaggctgtaaagaggccgtcgggcaggggcccatggtggagacccctctattacgtgcagacccacgacctcgttagcagggtcacgcgcagacccacgacctcgttagtgagcaggggtgcaggggtggggtctggccggaggctggtcagctcccaggtgcaaagaccctgagtcctgagaactcgcccaggtgagaagtggggaggaggccaggtgaggagggggtgggaggccaggtggrggggggagcgggaggctaggtggggggggctggaggccaggtgagggggggcgggaggccaggtggggggggcgggagaccaggagaggaggggacgggaggccaggagaggagggggcgggaggccaggagaggag

SEQ ID NO: 523270 - DNA, 468 bp, Homo sapiens
tgtccacggcaacctgcaggttttcaatgctctgtggactcgaggtggcactttttgtttttgttttgagttaagaagacgtgcacagatgtgaaaggtgggcggaaacaggacatctccctcctgtcctggccgcacagtcctgatctgtctcccaggctggagtgcactggcaccatcacagcttactgaggtcttgaactcctgggctcaagtgatcctcccgcctcagcctaccaaattgctgggatcacaggtgtgagccaccgtgcctggccaacctcatttttaatggccttagagtcttccatggcacagggtggagactgcccattacatagaccctgagcgaggggccctgggcattcccggtccattgggtgtagaaggagctgccgggagctgttggtgggcacagatgtccctctgtgcaggagcctctgyggagccacgtggaaggcgcgtgtc

SEQ ID NO: 523271 - DNA, 639 bp, Homo sapiens
atgtgacagcttagttaagctgtcaagctaagttaagcttagtttaacctggtatccagttttgagaaagccctcactgtatagtattattatcctgttctctaaaccctgataaatgtataatacatgagtttgcttttgtactttaaaagcaaaacctaatcactgggcactgtagtgcatgcctgtgatcccagctattcagaaagctggagcgagaggattgcttgaagccaggagtttgagactaacctcagcaacatagcaagaccccgttccaaaaaaaaaaaaaaaagcaaacctttatgcaagtcagtatttctttcagggaaatggagtctaagtcaagatgacagaaacactgcctctttccctgtmgctatacagggcaaggcatccttgtcgaatctagaaagtgtggaggccttttcactaacaggaattttgaatatatacaggagtctgcagaatagtacgatgaaccccatgcattcgtcaccacccccagcaaccatcaacccacagttgccccatccacaccctattcacttcccttttctcctataattttgaagtcccggacatcatactagttcatccacaaaaattccagtatacatctggacatctctagacaca

SEQ ID NO: 523272 - DNA, 528 bp, Homo sapiens
ataaatgtataatacatgagtttgcttttgtactttaaaagcaaaacctaatcactgggcactgtagtgcatgcctgtgatcccagctattcagaaagctggagcgagaggattgcttgaagccaggagtttgagactaacctcagcaacatagcaagaccccgttccaaaaaaaaaaaaaaaagcaaacctttatgcaagtcagtatttctttcagggaaatggagtctaagtcaagatgacagaaacactgcctctttccctgtagctmtacagggcaaggcatccttgtcgaatctagaaagtgtggaggccttttcactaacaggaattttgaatatatacaggagtctgcagaatagtacgatgaaccccatgcattcgtcaccacccccagcaaccatcaacccacagttgccccatccacaccctattcacttcccttttctcctataattttgaagtcccggacatcatactagttcatccacaaaaattccagtatacatctggacatctctagacaca

SEQ ID NO: 523273 - DNA, 615 bp, Homo sapiens
acctcttcctgctccttctaggtcacaatcattggttacaccctggggattcctgacgtcatcatggggatcaccttcctggctgctgggaccagcgtgcctgactgcatggccagcctcattgtggccagacaaggtgggacttccagtggcaatggggaaggagggagggagggaggaggagagggagggaagaagggagggarggagggagggaaggaaggcaggagggagaagagaaagggagggagaagagaaggaaagagggagggagggagtgaaggaaagaaggaaggaagggaggaagtcaggcgggcaggcgggcctctctacctgggggacccacctggtaattaacagggtttggaaggagggagggtgatgccgtgttggttgaaaggtttcctgggctcagaagaacagagaaataatccagaaggtcctacccttgaggaaagcaaagacatttcctaggtagcacccatagccccttctggaggctgtatcaccatcctcctattattcaaagtagtaggaaatgtactgacagctaacctttactgagtaaaacatgatagatgcactatcttatttgatttaaacaacagctctgtg

SEQ ID NO: 523274 - DNA, 558 bp, Homo sapiens
cctcttcctgctccttctaggtcacaatcattggttacaccctggggattcctgacgtcatcatggggatcaccttcctggctgctgggaccagcgtgcctgactgcatggccagcctcattgtggccagacaaggtgggacttccagtggcaatggggaaggagggagggagggaggaggagagggagggaagaagggagggaggragggagggaaggaaggcaggagggagaagagaaagggagggagaagagaaggaaagagggagggagggagtgaaggaaagaaggaaggaagggaggaagtcaggcgggcaggcgggcctctctacctgggggacccacctggtaattaacagggtttggaaggagggagggtgatgccgtgttggttgaaaggtttcctgggctcagaagaacagagaaataatccagaaggtcctacccttgaggaaagcaaagacatttcctaggtagcacccatagccccttctggaggctgtatcaccatcctcctattattcaaagtagtaggaaatgtactgacagctaaccttt

SEQ ID NO: 523275 - DNA, 615 bp, Homo sapiens
acctcttcctgctccttctaggtcacaatcattggttacaccctggggattcctgacgtcatcatggggatcaccttcctggctgctgggaccagcgtgcctgactgcatggccagcctcattgtggccagacaaggtgggacttccagtggcaatggggaaggagggagggagggaggaggagagggagggaagaagggagggagggagggagggaaggaaggcaggagggagaagagaaagggagggagaagagaaggaaagagggagggagggagtgaaggaaagaaggaargaagggaggaagtcaggcgggcaggcgggcctctctacctgggggacccacctggtaattaacagggtttggaaggagggagggtgatgccgtgttggttgaaaggtttcctgggctcagaagaacagagaaataatccagaaggtcctacccttgaggaaagcaaagacatttcctaggtagcacccatagccccttctggaggctgtatcaccatcctcctattattcaaagtagtaggaaatgtactgacagctaacctttactgagtaaaacatgatagatgcactatcttatttgatttaaacaacagctctgtg

SEQ ID NO: 523276 - DNA, 585 bp, Homo sapiens
gtgagggctattttgtcctcttttatcctcagtgaattgaatactaaagtgtccatttgtatcggacttggtgaaatattttcacttacctaatgctcgttgattcatctgatgaggaaggcttggtaaattaccccttgtaactttgaggaaataagtaggaagcaagttagggacaagatgccacgtcatgtaattttcagttaaattttgattccattgcacaataagcttcatttgctgctctggctctgagactgatatttagggtgtgttggctccattactcctagaaacatcctagctacaggtagcaagagtcctgggaaacaatggctacacctcccatgaagacgacatccatttaccaacagctgtaggggtggtcaattcatagagttggtgcagtgtcctcagcaggggcccaggtggtttccttccatcttctacaccattccttgggctcttgttcttgggcacattgctcatgagtgaaaggtgaacaccatagcccaaggcatcctgtcccrcagtacagtgtccaagggtaagggctaggagcaaaaggcagtcctagtggtggca

SEQ ID NO: 523277 - DNA, 454 bp, Homo sapiens
gctggccagtttagcgcagctccagagaggaggtcatgggcccccaccacctctgacccctctgccgcccacgctgagctgagcgaatggggtgtgctgaatggaaccagcgagtggacaaacgaattaatccctgtgtggataaatgaatagagggtgcagggaaggacccgctctgtccccacgtgtagccagcaagtgcccaccgtccagagcccaccgtgtgcctcgcctgctgctgggcrgtgtgaacacagacccctgggccccacctgtgaggccaccacagccaatggctgccagaggagggtgcagggaccccccttctgagtgagtggggctgactctggggtgcgtttcaggttctggggctgtggctgggctgtggctgagagcccctcccagctcagctcccccagtcctgcgtctcacccccactttctcctgggagtac

SEQ ID NO: 523278 - DNA, 546 bp, Homo sapiens
acatccctgccctgtgggattgttagaaggtgcgctgtggccggcatccctgggacaggatgggacgtggcatgggctgggtgcctgcagtcctcctgccgtacccaccatgggcccaagcgccaccaccccttgccttgcccagggctgtctcctcccttccctcctccttggcccccatgtccctgttcaggtctttcctgaaccccactctgttcctggagggggaggcgtccctcctggggctctgctgccaagttcgtggtgctgaccttgtttctgagggccatggcccctcccygataggtagaccccagcgtgaggacgtccatttcaccctgcgttccctgggcctggctgctgatcgagggaagggtggctgccccggcaaaaggggctgctagctcctggcttgagagttctaggatgagttggtttcaggaaatggagagaattctgaaagtcctgaaggcagccctgatgttggtcttgtgagtgtggtggtttgacctgggctctgggaacagacttggcttggaatcccag

SEQ ID NO: 523279 - DNA, 571 bp, Homo sapiens
caggaatgaacaagggcagctgggaggtcagaagcaagataagagtcasgtcagatctcttttactgtcataattttctcagttataatttttgtaaaggcagcttaaggtggtggttttcaataaatatttgttttgttgcatgtagacaactttaggtcctaccaattttttactttaaagcccttttatcaatagttcaattattgtaattacagtcaggagaaaaccattgtaggatggtataattatttttttaatcacaactttattgaaatatcattcacataccataaactcacccctttaatgtgtggcttttggaatattccgttatgcagctcccctaaaagaagactcatacccattagaagtcattcccctttcccattcccttcagcccctggcaaccaacactagtttctgtctctatgaatttgtcaattctagacattttatgtaattagaatgatataatatgcagccttttgtgtctgatttcattcactcagcgtaatgtttccagggttcatcaatgaagcatatatcatcacttcattcttttttatgg

SEQ ID NO: 523280 - DNA, 501 bp, Homo sapiens
ttcatttcatcaccggagcctggggatgcggagtttccaggactcctttagaaatgggtccagacccatgcagcttagtggaatcatcacacasaattgtcgggaagtgagagaaaaggagagtttcagttgctgtttaccatctctgggagccttaacttctgctctgcactacttattttttgattgacaatcctgggaaacatttctactttggaacttggttgcaaaatcccaggacttgctgaccgtccccctaaaccctgcatgcgcctgatatcttaccctgctgcacagtggaggcagaaatgcaatgtcgtaaacctgagtgcatagtgtccaatttacccaggatgtgaaggagaccaggaccatggagatggctccaacatggtacgggaggaagcagagatgcctcaggtgtcttggtcttgcaggcagatggcattttgattttgtgcttacattttcacaagctgctaataatttctgttcagtatt

SEQ ID NO: 523281 - DNA, 501 bp, Homo sapiens
ttcatttcatcaccggagcctggggatgcggagtttccaggactcctttagaaatgggtccagacccatgcagcttagtggaatcatcacacagaattgtcgggaagtgagagaaaaggagagtttcagttgctgtttaccatctctgggagccttaacttctgctctgcactacttattttttgattgacaatcctgggaaacatttctactttggaacttggttgcaaaatcccaggacttgctgaccgtccccctaaaccctgcatgcgcctgatatcttaccctgctgcacagtggaggcagaaatgcaatgtcrtaaacctgagtgcatagtgtccaatttacccaggatgtgaaggagaccaggaccatggagatggctccaacatggtacgggaggaagcagagatgcctcaggtgtcttggtcttgcaggcagatggcattttgattttgtgcttacattttcacaagctgctaataatttctgttcagtatt

SEQ ID NO: 523282 - DNA, 639 bp, Homo sapiens
ctctagtttattcaactatgtccctattgagaggcattactttgtttctcattttgagccaccaaacacaatggcatagtcaacatctttttacacagatctttaggctggtgcctctattcttttgggattgattctcatgagtgggattgctgggtcaaagcatatatgtaattttaactttaatagaagtatgcagattgctttgcaaaaagaacaataccgcacttctaggttccataaataatttatgaaaaaatgcttttccttgaattcccgccaagcagtaggtattattcgtcttttaatttttgccagtctcttggtgtaaagtgagatgtcttttattacaattgagtttgaagatccgtgtgtgtttggtagattgtttgataggtccttttcaggaccttttgtcagttttctacttggttatttatcctttggttgttgtcacttgtaaagagccctttgtgttttagatactaaccctctgacctctattatgtattwtttttggctaaccaaattggtggggctgggccctttggttatgggatatttaaccctggaaaaggttttactttttgcattctcaaacaagtctggatcttttctttcaatagttgctgggtttcc

SEQ ID NO: 523283 - DNA, 639 bp, Homo sapiens
ctctagtttattcaactatgtccctattgagaggcattactttgtttctcattttgagccaccaaacacaatggcatagtcaacatctttttacacagatctttaggctggtgcctctattcttttgggattgattctcatgagtgggattgctgggtcaaagcatatatgtaattttaactttaatagaagtatgcagattgctttgcaaaaagaacaataccgcacttctaggttccataaataatttatgaaaaaatgcttttccttgaattcccgccaagcagtaggtattattcgtcttttaatttttgccagtctcttggtgtaaagtgagatgtcttttattacaattgagtttgaagatccgtgtgtgtttggtagattgtttgataggtccttttcaggaccttttgtcagttttctacttggttatttatcctttggttgttgtcacttgtaaagagccctttgtgttttagatactaaccctctgacctctattatgtattatttttggctaaccaaattggtggggctgggccctttggttatgggatatttaaccytggaaaaggttttactttttgcattctcaaacaagtctggatcttttctttcaatagttgctgggtttcc

SEQ ID NO: 523284 - DNA, 639 bp, Homo sapiens
ctctagtttattcaactatgtccctattgagaggcattactttgtttctcattttgagccaccaaacacaatggcatagtcaacatctttttacacagatctttaggctggtgcctctattcttttgggattgattctcatgagtgggattgctgggtcaaagcatatatgtaattttaactttaatagaagtatgcagattgctttgcaaaaagaacaataccgcacttctaggttccataaataatttatgaaaaaatgcttttccttgaattcccgccaagcagtaggtattattcgtcttttaatttttgccagtctcttggtgtaaagtgagatgtcttttattacaattgagtttgaagatccgtgtgtgtttggtagattgtttgataggtccttttcaggaccttttgtcagttttctacttggttatttatcctttggttgttgtcacttgtaaagagccctttgtgttttagatactaaccctctgacctctattatgtattatttttggctaaccaaattggtggggctgggccctttggttatgggatatttaaccctggaaaagkttttactttttgcattctcaaacaagtctggatcttttctttcaatagttgctgggtttcc

SEQ ID NO: 523285 - DNA, 640 bp, Homo sapiens
ctctcataaaacactgtcagatgaaggaaattcaaagatttctttctgaatcttctgcagctcagatgtctttactttgaagtatctccataccagtttgatgggctgttggtctcttcacatggtaaggaaagtggaagcacagggtgctacaggtataccttggaagggaagaacctggttcagcatgattagggagagcttggaaggaagtggggtcttagttgagactgaagggtgagtagatgttaatcaggcacagcacctcaggagaaatccaggaagagggatcagtaatatgtaccatgtaccatcaggttggcacccagtaggtattgagcaaccatgatacgagagttaattaaaataacctaacaactaaaagtcttaagaaaatgttcacagggaactgatgttatatatacatttaggaagtatatactgatcgtccattaaggagctggcactgggacacaaaaacaagtaaaatgtattcagacccatgcttttgactgggcagtcccagagggaagcaggtagagacttagagaattaaataagcccttgatgagaactgtrttcaaagcaccatagggaagtgtggttgctatgatgcatcctatctccccacttgtctgct

SEQ ID NO: 523286 - DNA, 628 bp, Homo sapiens
gaaactaacaaaaagtcactgaattagaamtgaaacttcccatttatggagttcttgtcatctgaaagagaagtgtcaacaggggccacttgaaagaatttattgttttagacatgccaagagaattgattaacctaagcttatagttgtaatgttttctccctcaactatatgtcatttatctctaaactccttcacactatagcgaaatttaattgtgcattgaagtgaatctgtgttaaactaatgggttaagtggaatgaaggaaagtcttctgagaagaaattaaagtgcagaactcaaaggactagactttcaatctatttttcataggatatcttccctcctgttcctcccaccttcaggccccagcccatatgtagcatcaacaaaaacctgccttttcctaccagactgtattacccacatgactttcatctttactcacaagattcattttccgtattatgtatatgtttgggccctttctctgtctgtccccatgctacttaatgtggagtgacaaaacctgggtaccacaccggagcaaggtgtcattatcagtgtggcattcgctgtccatgtcaggttgggtttgcaggcggcttgcagtccaggcatctggca

SEQ ID NO: 523287 - DNA, 628 bp, Homo sapiens
gaaactaacaaaaagtcactgaattagaaatgaaacttcccatttatggagttcttgtcatctgaaagagaagtgtcaacaggggccacttgaaagaatttattgttttagacatgccaagagaattgattaacctaagcttatagttgtaatgttttctccctcaactatatgtcatttatctctaaactccttcacactatagcgaaatttaattgtgcattgaagtgaatctgtgttaaactaatgggttaagtggaatgaaggaaagtcttctgagaagaaattaaagtscagaactcaaaggactagactttcaatctatttttcataggatatcttccctcctgttcctcccaccttcaggccccagcccatatgtagcatcaacaaaaacctgccttttcctaccagactgtattacccacatgactttcatctttactcacaagattcattttccgtattatgtatatgtttgggccctttctctgtctgtccccatgctacttaatgtggagtgacaaaacctgggtaccacaccggagcaaggtgtcattatcagtgtggcattcgctgtccatgtcaggttgggtttgcaggcggcttgcagtccaggcatctggca

SEQ ID NO: 523288 - DNA, 601 bp, Homo sapiens
aaatgaaacttcccatttatggagttcttgtcatctgaaagagaagtgtcaacaggggccacttgaaagaatttattgttttagacatgccaagagaattgattaacctaagcttatagttgtaatgttttctccctcaactatatgtcatttatctctaaactccttcacactatagcgaaatttaattgtgcattgaagtgaatctgtgttaaactaatgggttaagtggaatgaaggaaagtcttctgagaagaaattaaagtgcagaactcaaaggactagactttcaatctatttttcataggatatcttccctcctgttcctcccaccttcaggccccagcccatatgtagcatcaacaaaaacctgccttttcctaccagactgtattacccacatgactttcatctttactcacaagattcattttccgtattatgtatatgtttgggcsctttctctgtctgtccccatgctacttaatgtggagtgacaaaacctgggtaccacaccggagcaaggtgtcattatcagtgtggcattcgctgtccatgtcaggttgggtttgcaggcggcttgcagtccaggcatctggca

SEQ ID NO: 523289 - DNA, 632 bp, Homo sapiens
ctgctctttgtgtaaggttagttccattgcagtgctgagcagcattctcaggaggcaggtagcatcagaggcacttagaaatggaaatggttggcactgaacttggtgactgkgctccttttatgtcatttaaggatttattcatcatctagctggaggggaagtatgtgcatgttctcagtagttataagtttaatgccagaatataggcacacattgctggcagtctttttaatgatatgataaaaagctttcagaggcgagaaggtaatggtggggagcaagagactgtgacaaaaatagggacgtcataatttgcctctcctccacattcctgaattagaatgtatgggaaattgactctggggtaaagctatttctgctcttctctgctctcatccatttagtgcaaatgaaaatgctgaaaaattatggacccagaaatcctaatgtacatgatgtaacggaatcttaaagacatgaacaagaacatctaaaaatattttccttgatagaaatctgatataaccaggacatttgataagattataaattaattcacctattattctagaagcaaaactagttaggctaaggatacggtgtataatatagcaaagaaagctttttcc

SEQ ID NO: 523290 - DNA, 632 bp, Homo sapiens
ctgctctttgtgtaaggttagttccattgcagtgctgagcagcattctcaggaggcaggtagcatcagaggcacttagaaatggaaatggttggcactgaacttggtgactgggctccttttatgtcatttaaggatttattcatcatctagctggaggggaagtatgtgcatgttctcagtagttataagtttaatgccagamtataggcacacattgctggcagtctttttaatgatatgataaaaagctttcagaggcgagaaggtaatggtggggagcaagagactgtgacaaaaatagggacgtcataatttgcctctcctccacattcctgaattagaatgtatgggaaattgactctggggtaaagctatttctgctcttctctgctctcatccatttagtgcaaatgaaaatgctgaaaaattatggacccagaaatcctaatgtacatgatgtaacggaatcttaaagacatgaacaagaacatctaaaaatattttccttgatagaaatctgatataaccaggacatttgataagattataaattaattcacctattattctagaagcaaaactagttaggctaaggatacggtgtataatatagcaaagaaagctttttcc

SEQ ID NO: 523291 - DNA, 495 bp, Homo sapiens
cctaccgaaagcagctcctcctttactgtctgtcattttactctatttaatcaggttcagagtacttgacattatctttttaatgcatttgctcatgtatttattgccttactgtccctctactagaatgtaaacttcttacaggcaagaactatggcctgatcaccaccatatcctcacatctagaatggggtctggctcctagtcggttctcaataaaattcattaactggctcactagccctgtatttctctcatatatggttgctgccttcttattgctgacatgacgtgctctctgtctaagaaccaggctttatacttaagaaatagttgaactcaattctccttgcactacttatccacttattctatcccctcattttaccctgcagcacactttgtaatctacttgtaagccagctctgataaactaaagcttagactccaccctactcttaacctatgtttygtcaaagcttccactatctcttc

SEQ ID NO: 523292 - DNA, 636 bp, Homo sapiens
ctgcaatacaggtggttaagagtggtcattcattcttagggcagtttctctgtacttggttcagttgggagagatcattgtaccttttgagtttaccaactgtccaatctttattttagaggaaacaggtttctttctgtagtgttttactaaggcatttaatttcattttattcacgttctatttccctctatttgtattatcctttataaatgtaaattttaatcttgcaatattggattaaagatagttttcctgtaatccatttgctgaggatgtgtttgattttcttgtgattcattttctaaacaaatgaattgcttggctgaagacgtcacagatttgtatgagtgggctgtgacacttttccctcgtcttctcaaaatgcctgtatrcacttatccaataaatatgttttcagcacatgctacatgctaggcattgtgcttggcttagatatatagttttagtgaaatatgcatagtcttaccttcataaagttttcttcagttatggtatcatgttaaactagcttcaattcttatggccctttgggtatgacagcattataatctcaagtgaaaatcccaaaaaaagcagtagatttaaggttttgcatggagcatgctatagtag

SEQ ID NO: 523293 - DNA, 316 bp, Homo sapiens
atcaagaaagtcaatcgtcctttcaggagaaggcttaatgcctttaattgagctttgtaaatctgatgaaaattcagaacaagcacttgttcacatgactttcctaaaaaaaaaaaaaaaaaaaaaaaaaaaaaaacaaacaaaaaaacagtttaggcttaacatttggggaatatggagacttattttttgaagatcctattttatttagtgccttgaccatgaaaaatctaatcttacacttaaaaataacctatagaaatgatagaggaaggagctgaaattctctcactgartaacatgattatataaacta

SEQ ID NO: 523294 - DNA, 546 bp, Homo sapiens
tcaaacctatacttctagcccaaaccctctgttaagattcatatctacacatccatctttatatataaatctacaattgaacatctcacagacactttacatttctatcccaaactgcactcattgtctcttcccccaaacctgcttgtcttcctatattccctatctcagagaatgatgtccccagtccccagacctccaagtcagaaacacagtcattcaggcttctgccttgccttccccaacatccaaaaaakatcacaagtcttgtaaatgctatttctttatactactagccccaacatcactttttcatatccatagccttaattcagaaaatgcactttttgcctccagtctgaccctataccaaggccttcagagtcctgcatgatcttgtcctgccagtctttcagatcttaactctgctgctcacttaccatgttccagacactggcctttctactccttgaacacaagttcatttactccttaattcagtagaaatttcatactgaattttatagactctataagatcagtact

SEQ ID NO: 523295 - DNA, 546 bp, Homo sapiens
gatattttaagtatgatagagaccgaggaagagtgctgagtgatttcagatctctgttagcccctgcactgaagctctttgtgtaagcctacacaccctgcctcaaattcctcttgctctaaaaaggggagaatctaaagatggtgcttgaaarggttgccaaaatcttagctttgtggtggagatgtcttccacccaatctcatcacatgaaaccagaaccaaaggtgtttctaaacgaaggttcagaagaacaaatgcatctggactgatatctgggcaaggcatcaggccttccacctggtttctgagaagaaagtgctcgtggctcaagccaggtgacaagcgttcacttcccacctccgtgtcttgtagtctgtttgatgtttggcttgtaacttaaaccaaccacctctgccttaagtttacagtacaccaagtggaggggaaaagttgctgtgttgcaaatgatagaaggcatttttttaagtttaaaaatgtatgtaatgattcttagtttttagaactacaggcaagaacacgagga

SEQ ID NO: 523296 - DNA, 564 bp, Homo sapiens
gtttagcctggagttaaaaagaagttacggttatattttgttttcataccctcttctttactttagggtctcttttgcttatgtaagaattgccaataattgccaggtgtagcagatattctgagtgtcccacccatatccccttaaattattttactgtttccatacatgtgagcttgacttcccacgggcagcaactacgtctttcttgggtggctacctttgagttgccaaaacccactttgcccacatacctgggccggctggaaggggatggaaattaatttytttcaggtgatggcccttaacccagtgatctgtggtgtagaggtataaaatacccaggctcttcacctgtttttatggactaattccagagcttccttgtggtgtcacttgggcagttggcttaataatacaccctttactgcccgcttttccttttctccatcatcttcccctttttctgtaaggatcactgttccatggactttttctgtaagtccattgagtacactgtcccatgtgccctcaataattgttttctcagattttgcttctagg

SEQ ID NO: 523297 - DNA, 572 bp, Homo sapiens
ggggagatgacatttggtctaggtcttaaaggaaaagtgggaattcagcaatggacaagagagtacaaaatattctaggctgagatgcagaggtataagagagcttggtgtgtttatgagatagcttgtcagactgatcaaaacatgkcagtgttttgtggtcgtgggggaagtgtgggaaaattgacagaaaaggaggcagttagagtaggaggaacctgccagaccaggaagcctgaacttgagcttccaagcctgtggcctctgctttgcttatacattttctctgtttgtcaaagtttgagcttttgttccaatatctttattttccataaattatctatatgtatcactatattaatactatattgcatacagtgtaaaacataaaaacagatattttaaaaagacaagctcaaggtaaaatgaatattcaaaataatttttattttagttattaatgcttcaaaatatattttggctgcattttaataacaataatgtttcatgggaagaatgttaatgcatgtgcttaattatatttgaaaattttggcttaacacttagtgatg

SEQ ID NO: 523298 - DNA, 510 bp, Homo sapiens
tgcagaaaatgccaggcgaccagccagattggagctgcattgcccgagtctatgaagtggctgcagaggattgcaatacttgcgaatccccaaagagctttcaaatgtgcccccaaaataagatgtttaaatacctgacaggcctagagagcatgaagtcaacttgcaatgctactgatcaaatgagaatgttccttcgtccctttcctctcctgccttccccagtataaccatgacaggacaataagatgggggacaaggttttggaagtataagacagggataggagtagagaacatggggcaaggtgatttaaacctgtgtttgtggcctaaagtgaccaggrcattttgtaatctaaccatgaaccaaaaacttacgagacttcccaaggttacatctggggagtggaagaacttttctctactgaatgaattttataaatacagtgggaggcagaagtaaagatacttgtgaattatatctcaggagttctgcttattcagcacc

SEQ ID NO: 523299 - DNA, 571 bp, Homo sapiens
ccttcagtggataataatatggcagattatttttattctgatcttttcatcacctggccctgtcccagcaaggttttggagagaaataacaagccactagtatgtgtattggattgctagataccctcagatgcactgagagaagtagtcccctgtgcccggccagctctccaggatgttcctgtgtatattcccaaaccttgaggtcatcctttaggtggtgtgacagcaaatagctattgggagctgtgtgacttttgtctgwgtcattgagaacaggttctaaggaaattgaggaaaggacacaaggaggacactggaggacctcttcctagccactactgtgttctatgcttctttacagacatagacacagtacatggcataaacataatatgtggaataacagcaatcagctcaaggaaatgtgaggttgaggcaaactcactttttttgcagtcttcatattttccactattgtctactcctcaaaactcttctgtaacccctgatcaactttaccattaatgatactactgatcccttgaactttgggttctcattttctgac

SEQ ID NO: 523300 - DNA, 571 bp, Homo sapiens
ccttcagtggataataatatggcagattatttttattctgatcttttcatcacctggccctgtcccagcaaggttttggagagaaataacaagccactagtatgtgtattggattgctagataccctcagatgcactgagagaagtagtcccctgtgcccggccagctctccaggatgttcctgtgtatattcccaaaccttgaggtcatcctttaggtggtgtgacagcaaatagctattgggagctgtgtgacttttgtctgtgycattgagaacaggttctaaggaaattgaggaaaggacacaaggaggacactggaggacctcttcctagccactactgtgttctatgcttctttacagacatagacacagtacatggcataaacataatatgtggaataacagcaatcagctcaaggaaatgtgaggttgaggcaaactcactttttttgcagtcttcatattttccactattgtctactcctcaaaactcttctgtaacccctgatcaactttaccattaatgatactactgatcccttgaactttgggttctcattttctgac

SEQ ID NO: 523301 - DNA, 571 bp, Homo sapiens
ccttcagtggataataatatggcagattatttttattctgatcttttcatcacctggccctgtcccagcaaggttttggagagaaataacaagccactagtatgtgtattggattgctagataccctcagatgcactgagagaagtagtcccctgtgcccggccagctctccaggatgttcctgtgtatattcccaaaccttgaggtcatcctttaggtggtgtgacagcaaatagctattgggagctgtgtgacttttgtctgtgtcattgagaacaggttctaaggaaattgaggaaaggacacaaggaggacactggaggacctcttcctagccactactrtgttctatgcttctttacagacatagacacagtacatggcataaacataatatgtggaataacagcaatcagctcaaggaaatgtgaggttgaggcaaactcactttttttgcagtcttcatattttccactattgtctactcctcaaaactcttctgtaacccctgatcaactttaccattaatgatactactgatcccttgaactttgggttctcattttctgac

SEQ ID NO: 523302 - DNA, 575 bp, Homo sapiens
tttgtgtttggccgtagtgtctgtgatcactgcaaacagagtgagtccctgtctcaaaaagtaaaaaaaaaaaaaaaaaaaaaaaaaagaaattatccgggtggctctgatccaatgacatgagccctttgaaagcaaagaagcaaagagcagcagaactgtgagtctagtgctacagacatttcaaaaacttgaacaactcatccatgtctcttaattgggtcaacgaagcatggtttattgcttcattgcaacttaattgtttattkcaacttaattccagccataggaattaagcttctcaagatattctttcaatacgtgattcttttcccccacctccccctttctttgatgccttggggaatctgaaaaaagctgtgaaacttctccccacaaaatgtacacattccccaaataacaccctcattgtcagggctttcattagaacatcagaagaccctcattggaatgaaaggtacaaccccccgcattaactagaaatccaagcccttccaaaaggaaagcacttgggtctgacctgcgtctgggacgatggacgagcctgcatccca

SEQ ID NO: 523303 - DNA, 629 bp, Homo sapiens
gatttctcagatttccacatgcagtgaggtatccatgtgttttttgaaaattctgttacattaactgatttcaaaaattaacccttttggcctggtgtggtggctcacgcctgtaatcccagcactttgggaggctgaagcaggtggatcatgaggtcaagagatcgagaccatcctggccaacatggtgaaaccctgtctctactaaaaaataaaaacaaaatattggccgggcgtggtggcacgtgcctgtaatcccagctactcgggaggctgaggcaggagaatagcttgaaccagggagtcagaggttgcagtgagccgagattgcaccactgcactccagcctggtgacagagccagactccatctcaaaaaaaaaaaaaatctttttattttgagaaaactatagattcacatacagttgtaagaaataatacagaaatacccatgttctctttatccagttttcccctatagtaacatcttgacaggatgttgacattgataaaatcaggatacataagatttcyatcaccatgggatctctcacattacacttgtgtagtcacacctatttccctcctgctcctgtatctctccttagcccctggaattcactaacctgt

SEQ ID NO: 523304 - DNA, 664 bp, Homo sapiens
tcttctagcattggtagaagtacaagaaggcaagcagaaacacatgaagtctcttaaggcctaagtgcagaactgaacacgattacttccatttcattctgttgaccaaagcaaatcaygtggctgaacccaaaatcaacgggtagggaaatatactccactccttcagtggaaggaacttcaaagtcgtagcaaagggcatggatacagtgcatgatgaagtcctggggccaatactgtaacctactaaaaagaaggaatatgactaggactgtggctccagtaagtggaaccacatagcttatctgcaactgtgacaggttagtcccttctgtggtattgatggtagctatcatatctcaacgctaacgctcaatattcctcccaactctcctaattttcattccatttccctgatcaggcaaccgtttggttatcatttagcttcctggatagctatttcttcagggcatagtgttttggcagtaagatacatgtttgggccttgcaacaatcctatttctcattctatattaatagacagacatactattgtctacttctggtgagcctgaccaaacttccttcttcaagagagatttactcagtatgctaaaagagaaaaggaacaagtttctaagctcgaaaagctgaaagtcagttg

SEQ ID NO: 523305 - DNA, 664 bp, Homo sapiens
tcttctagcattggtagaagtacaagaaggcaagcagaaacacatgaagtctcttaaggcctaagtgcagaactgaacacgattacttccatttcattctgttgaccaaagcaaatcatgtggctgaacccaaaatcaacgggtagggaaatatactccactccttcagtggaaggaacttcaaagtcgtagcaaagggcatggatacagtgcaygatgaagtcctggggccaatactgtaacctactaaaaagaaggaatatgactaggactgtggctccagtaagtggaaccacatagcttatctgcaactgtgacaggttagtcccttctgtggtattgatggtagctatcatatctcaacgctaacgctcaatattcctcccaactctcctaattttcattccatttccctgatcaggcaaccgtttggttatcatttagcttcctggatagctatttcttcagggcatagtgttttggcagtaagatacatgtttgggccttgcaacaatcctatttctcattctatattaatagacagacatactattgtctacttctggtgagcctgaccaaacttccttcttcaagagagatttactcagtatgctaaaagagaaaaggaacaagtttctaagctcgaaaagctgaaagtcagttg

SEQ ID NO: 523306 - DNA, 594 bp, Homo sapiens
atctttcctccttttttcagtttctaactttcactgtttctttgaatgttttttcttttcatctcttttcttttacattttgtgttttcccctctccttttcttacctctttctccatccttctttttctttgatttgtctgcccttttatacttctcatcttgctgtyatcttcatttctccttccctctctctccgcttcattctactcttctcctctttatttcttttctctctctgtgcctcagctcactctgtctctcctgctgtctagtctccactctctatttctaggtttgcccttgactttttttttttttgacctttcccttttcatctcccttcccaaacatttcttcctaattctatgtgctcttgtcttaggtttcttgctgttttatcagcacatgtcctagtttacctctttcttttttcttctttctctctttttttctttgtttttctgtatttcttccatgttgctcttctttttccacactgtcccttctctctctctctctctcataaacacacccctcttgttactctatatctcttcactcaatcttccatcttatttttcgtgaaagaaaa

SEQ ID NO: 523307 - DNA, 594 bp, Homo sapiens
atctttcctccttttttcagtttctaactttcactgtttctttgaatgttttttcttttcatctcttttcttttacattttgtgttttcccctctccttttcttacctctttctccatccttctttttctttgatttgtctgcccttttatacttctcatcttgctgttatcttcatttctccttccctctctctccgcttcattctactcttctcctctttatttcttttctctctctgtgcctcagctcactctgtctctcctgctgtctagtctccactctctatttctaggtttgcccttgactttttttttttttgacctttcccttttcatctcccttccyaaacatttcttcctaattctatgtgctcttgtcttaggtttcttgctgttttatcagcacatgtcctagtttacctctttcttttttcttctttctctctttttttctttgtttttctgtatttcttccatgttgctcttctttttccacactgtcccttctctctctctctctctcataaacacacccctcttgttactctatatctcttcactcaatcttccatcttatttttcgtgaaagaaaa

SEQ ID NO: 523308 - DNA, 588 bp, Homo sapiens
taaatccaatgactgatgtccttacaagaggacacacaaagatacacagagaagagggcggccacacaaagatggaagcagagttggagttttgaggctataagccaaggaacttcaaggatttacatgaccaacagaagctaggaagaggcagggaaggattctcccctagagcctctggagggagcatggccctgctgactccttgattttggacttctggcctccagaactgtgagagaataaacgtctgttgttttaagccactcggtttgtggtacattgtacagcagccctagaaattaatacagtscatttgcatttgggtctgtaggcaaatttcctgaggatttgggagtggaaggtgggacagaagcgaacctgcttttcagccctccatccctgccgttccactggttcccacttcaaccacccatccttcctttcccctgctcaacttgtttcttcatctcctctttctacacagtccccaaactccaaattcatcctactctattatgcagaactccagctcccaaactcagctcccagcccattgttcaggtcagaacccctccagatcctcag

SEQ ID NO: 523309 - DNA, 550 bp, Homo sapiens
caagtcacagggtggccaattatgaatacccagattctcaaagttgatgataatttatctttatctttccctatgggtccttttcagaccatgmagagtcagttttaggattccaggaggtccttttctctctgggctctcaccttcttctctcttcttcccatattttccttgttcctttatatcactttaacttccttctcagtatcctagctccatcctgagagggtcccaatccattcaggaaaggtggcttagatccttacaatagatcctcctgtccttgcaggagtaggcttgggctttttaagagttttagtagtagagaggctacaaaacagacacacctttttcttgttagcattgtccatgtctcttaatataactttaatatgttattatgttaatgtagtctccagtctacttcattgttttagggatgctaactccccatttctgatgttttctccatgtggagaggcttgcataacaacactagtctgtttctgtcgcttcactcatcccttaccagcgaggaaaaggtgaattc

SEQ ID NO: 523310 - DNA, 619 bp, Homo sapiens
tgggtaagcttctcaaatagctgctgaacatagtgccctgtctttaaaaggtccattctatgtttctggaaaagactgaggtcagaaagctatcccatatcaaatagaaagtggaccaattattgcagatttggaggggggttctcaatttggaaagtaytttgttaaggaaaaaattggtctggggttgcccttggttttggaattatgccagaggcatgactttaaatctctgtgattgattagcttaaatgctctcaaggaaagacagtactgccatttctctttagaatctttgtatttctccttaatttcttttcttgcaatcaggtgttatttttattctgctcttggaagaaataacttattaatatatttggttaaacttaaatgttgccagcctgcatggtaaccacactctgaccactatggctgccagaactcagtctttttaaaaaaattttttagagacaaggtcgcgctttgttgcctaggctggagggcaagtggcacaatcatagctcactacagccttgaactcctgggcttgagcagcctccaggactacaagcacacaccaccgctcctggcttaatttttctttctttttttttttcca

SEQ ID NO: 523311 - DNA, 684 bp, Homo sapiens
atgtgtgtgtgcatctgagtgtatctcagcccattcatgctactaaaacaaaacactaagactggataatttgtaagcaatataaatttatttctcacagttctgcaggctgggaagtccaagatcaagctgccagtagattcagtgtctggtgaaggctgctttctgcttctggatggtttctcttgctgcatctttacatggtggaaggtgtgggtaaaggagcaggggggtgctcccttcaacctctgttataagagcactaatccatacaggaggaggaagccatcatgactttatcacttccccaaagtccccacctcttaatactatcacattggatatcaggttccaacacaggaattttggagggamaggtacatccaaacaatagcagtgtgtatgcgatttaagaaatataaattgcacatgtgtaccactggccagtgaatttggtgactctgttattgactgtgtcaaaacttacatttccattttttctgttttgatatatagggaagtttcttcttgtatcactgcataattttgatgaaggaactcgaaacaggcctcttttctctgaattagacttctctactctatacaattagctttccccctttgctcagtactccctatagtcacaccaaattgtcatctaatgaaagttatattgcctagtat

SEQ ID NO: 523312 - DNA, 617 bp, Homo sapiens
agagataccttgcctaaggtcatatatctgggaagtggtggatcccaggtagtctcactacagagtccaacatctaatctctttgctgtagtgttatagtgacttaaattaccagtgcatcctctgtttgtctcctactaaggagaaattattaatgctgttaaacagtccaccattataatcatcatataactaacagattcatttccaatcataaatttgatcattaaactaatggtcgtggtcaataattttcatttacaaagatcctttttttgttttttttttgagacaaagtcactctggagtgcagtggtgtgatagctcactgccacctctacttcctggrttcaaaggttctcatgcctcagccacctgagtagatgggattacagacatgcgtcaccacacttggctaatttttgtatttttagtagagacagggtttcgccatgttggccaggctggtctcaaactcctgagctcaagtgatctgcccgcctcggcctcccgaagtgctagaattacaggcgtgagccaccacacccggccccatcatcctttttaacattcatgtttcctgataaatgacttgaagtggagaagggtgggatatg

SEQ ID NO: 523313 - DNA, 545 bp, Homo sapiens
agtgaattagggaaatggaacatggccagtaatcatagaatcctgagtagtgttccccacctggacagctatcatgctcagagattagttcatcccctgatgctcagactccctttgttcccactcattattggagcctggtttttcaggggtcaagtctgtgaaccacctactatccttctaggaaattgtttttcctcattaattttgttgcttactgctgcttgaaattgagaactggctgatatagggaatcccatatttttatgtttccttcatttatttatgcccttcgaactgatttaaaagtgaatcaaatggatagattgaatragcgtctgaaattctacttatttaatcttgaaatcttcatctcaagaattaataggatataatatatttcttgaaggattacatatatttttccaaaggatatctgttgaccagtttaggccatgttataaaaaggacatgctggattcatatgtacttttggagacttggagacacaaaacactaacatatcattcttgatggggccattt

SEQ ID NO: 523314 - DNA, 638 bp, Homo sapiens
aaagaaaatacagtayaattttatgatacattaatagtagtatagtgccaagaaggtaatagctttagtggatactgcaatggtgagaacacagctgatatattggatggagttcttggcaccatgtcttaggatgagcattttcaaattgccgtatacccaaagggatacatccagatggtaaagttctataaagaacggaacttgcataaagaatggctaaaggaacttgcatagatagatcaaaaaagagaaaactatgggacacagtacagctgtgttcaaacattgatgaactctcaagtagaaagtgttttagagctgatctgaggattttcttgggaccaaactatcatcatagtttctcaggaaatgtcagggcactgtattaattttactaccattttggctgtgagggtgtagcagttttatttgtaagcggggtaagtgtctgattcttcccttactatataaaatgtcttatctggtggaagatgaagattttcctagaaacagttgatgtaaacagaaacatagtctctttgtttaaaattctttctgatattttatacgtaaaatttcactcttgcaaaagaatatttgtgattggttatctatggaaaaaaggcgaaggtagt

SEQ ID NO: 523315 - DNA, 638 bp, Homo sapiens
aaagaaaatacagtataattttatgatacattaatagtagtatagtgccaagaaggtaatagctttagtggatactgcaatggtgagaacacagctgatatattggatggagttcttggcaccatgtcttaggatgagcattttcaaattgccgtatacccaaagggatacatccagatggtaaagttctataaagaacggaacttgcataaagaatggctaaaggaacttgcatagatagatcaaaaaagagaaaactatgggacacagtacagctgtgttcaaacattgatgaactctcaagtagaaagtgttttagagctgatctgaggattttcttgggaccaaactatcatcatagtttctcaggaaatgtcagggcactgtattaattttactaccattttggctgtgagggtgtagcagttttatttgtaagcggggtaagtgtctgattcttcccttactatataaaatktcttatctggtggaagatgaagattttcctagaaacagttgatgtaaacagaaacatagtctctttgtttaaaattctttctgatattttatacgtaaaatttcactcttgcaaaagaatatttgtgattggttatctatggaaaaaaggcgaaggtagt

SEQ ID NO: 523316 - DNA, 666 bp, Homo sapiens
aggaatcattttccaaagagtctttcttgaggaaactactagaaaattaatttcaacccagagatgagctgggggaaattgtagcaaaacaattcatggggagcatggaatatatgtaactataaaaccataattcagacaaatacgaaatttaggacaaaatataatgtgaaagttatatgcctatatatgtagaaatcacacagctacctaaaattgggaaggaagaaagtaaatgggagataagtatactaattacaaaagtactctgttagctagaagtcaaaggaaccctacaaggctgagaaaaataattataggtgtatttaaaagtacaaatgtaagtgttgataaagttaatgttgacagaaattataaagtagagaacaggtgaagaaaacaaaaacaaaaatgggatactattttattattattcaaaataggaataattactgtaaaaaagtcagaccttcctatcagaggaactacacataaaacatgaagcaaacaaatgagaccactaatttgtcttttaaaaaattgtatgaagaaaaaagtaatgtgatattacacygtagaaataagatcagaaatatcttttacatcaataaatgtaaatgaacttagctcatgcattttcagaaagatttcttcaataaagcaaaa

SEQ ID NO: 523317 - DNA, 521 bp, Homo sapiens
gccagggccctgcacccctctagctctgcagcttgacctcagggagctcccacaggggtcgttaccccaaatgggtatccaccactgcactggaaaagcagcaaccaacagaacctgacctctggcgctcggttccgccccccagtgggtctccccataaagccccgccccccggtgggtctccccatgaagccccgccccccggtgggtctccccataaagccccgccccccggtgggtckcaccatgaagccccgccccccggtgggtctcccatgaagccccgccccccggtgggtctccccatgaagccccgcccccggtgggtctccccatgaagccccgccccccggtgggtctcccatgaagccccgccccccggtgggtctcccggtggagctcggctcctgcaggtccgctccggaacctgctgactctcctgcgattcctaaactggcagcgatgctccagagcctcttccgccccgacagcagccccacctctgcccggagcccggggcg

SEQ ID NO: 523318 - DNA, 579 bp, Homo sapiens
ggtgtgcgcccagtgccccccaggcacctttgtgcagcggccgtgccgccgagacagccccacgacgtgtggcccgtgtccaccgcgccactacacgcagttctggaactacctrgagcgctgccgctactgcaacgtcctctgcggggagcgtgaggaggaggcacgggcttgccacgccacccacaaccgtgcctgccgctgccgcaccggcttcttcgcgcacgctggtttctgcttggagcacgcatcgtgtccacctggtgccggcgtgattgccccgggtgagagctgggcgaggggaggggcccccaggagtggtggccggaggtgtggcaggggtcaggttgctggtcccagccttgcaccctgagctaggacaccagttcccctgaccctgttcttccctcctggctgcaggcacccccagccagaacacgcagtgccagccgtgccccccaggcaccttctcagccagcagctccagctcagagcagtgccagccccaccgcaactgcacggccctgggcctggccctcaatgtgccaggctcttcctcccatgacaccctgtgcacca

SEQ ID NO: 523319 - DNA, 564 bp, Homo sapiens
tgctagatcttgttgtgatggccttctgatgcccactaggaaggagacaagagcagggccgtagcaatccgcccaccgctgaagctccttctcctgcaccacaggaggaaccgagtcctcaagctaatggcawcttctccccaaaaactcaaaggggaggggctcttgatgttctagggactggattaaactcctggagatcggtctctgagctgcacgcaccagaggagaaggatgtcgtcggggcagtcacgaagcttcaaggagaagagaataagtcagtacctgtctgcctttcccgaatactggctgctgctgctgctgtcgctgccgccgccgccgccatcttggctcccacgagccactgcccggctggggagcggagcggggggatgacgtggctgcccttaccgccccggaagcaaagcccggaagggcggggccaaagggtgtgcctgagttccggaccccacctcctccaggaagacctccactctcggtagaactgggagacccggtgcaggttaattcagtggcccgtaatgttaggcgaatactaagagt

SEQ ID NO: 523320 - DNA, 613 bp, Homo sapiens
aaacttacaacttaagtttttctattcaggttaaaatgtaaagggtaaaaatatagatttgtaatctaccattatagcaagtatatcaagacaccccagtggattaaaatgggaaaaaattatattatagaaaatgtttacattattctcttgtaaaaagattatctgttactatgtatcatatctcagatgatgttgaccatctaattaagaggaacaagagttaattttctttaccagaacagaaaatggcataacttttatctttaagaaatagtacatattggaatctaatttttctgtgtatataatgggcatcaataaaatgtgatagcctttaacctaatacttgaatgccttaatagtattaaattataatgctacattaaatttatatttgtatttttttaatttgaaaagaaaaaggatttcaagaatatgaacactaatttcagataagaacatgaaggcccatgtctgtgaaacacagcaggtagaaatattgatagactattgattatattastgtctttggctacagaattctatggatatgaatcagaatgaattctgacgagtgccaggtcaaataatacttgaggaaagaatataa

SEQ ID NO: 523321 - DNA, 590 bp, Homo sapiens
ttaatatcctcttgcatcactaagagcagtaagactgcaccatcccctggttattagtgttcatagcaagctgtgtgaatcttgttggcaaaactttactagcctttgtagcagcccctgacccaggggcatctctacaaatcccctttgacagctgttttcatatgcactgagaatagacaagaagaggtagattttgactgaaacaggaggcattttggtgagagttatttcaaggaattttattgggaggaactttttttcagattgataataaaaacaggtccataggcaaaagctttataacagtattttaatggcaaattaggtgtgtttgcatcagttctgtaagctttcaatgctggtgttttaggagacaaatgtcctactttcctacagaattgtccctggtgttactattggagagcaaattatgtactgcatgggccctgggatatctktaattagtcagtgacgaaagctgggaaatctttcaccaatattctttaactttcaggtttaggatggctctaacctggcctgggtaaagaataatggacttggtgaccctccaaggccacttccatttc

SEQ ID NO: 523322 - DNA, 413 bp, Homo sapiens
atttaactatccttgagagamaaactaatgctctaactctatcagacttttttagcctcatactgactctgcttcttaatgtgtggtcttaaatttgctaaatcaattgattaagcttaaagaaaatttaatttaaaatgagggagagcaaaattagcactggtgaaggcctgctgacttactggcccagcatatttaagtacactgacttatgtggttagagttgaatattggccaaatgaagttttatgaactcaagaaaattacagccactaactctaagggtattatattcactaaatgtagtctttagatcaatggcacccttgtgtccagtaaatggaccagactgtttaaatattggctcatatcctttatcatgtgtgactggattatgaaactaatttcctcag

SEQ ID NO: 523323 - DNA, 413 bp, Homo sapiens
atttaactatccttgagagacaaactaatgctctaactctatcagacttttttagcctcatactgactctgcttcttaatgtgtggtcttaaatttgctaaatcaattgattaagcttaaagaaaatttaatttaaaatgagrgagagcaaaattagcactggtgaaggcctgctgacttactggcccagcatatttaagtacactgacttatgtggttagagttgaatattggccaaatgaagttttatgaactcaagaaaattacagccactaactctaagggtattatattcactaaatgtagtctttagatcaatggcacccttgtgtccagtaaatggaccagactgtttaaatattggctcatatcctttatcatgtgtgactggattatgaaactaatttcctcag

SEQ ID NO: 523324 - DNA, 413 bp, Homo sapiens
atttaactatccttgagagacaaactaatgctctaactctatcagacttttttagcctcatactgactctgcttcttaatgtgtggtcttaaatttgctaaatcaattgattaagcttaaagaaaatttaatttaaaatgagggagagcaaaattagcactggtgaaggcctgctgacttactggcccagcatatttaagtacactgacttatgtggttagagttgaatattggccaaatgaarttttatgaactcaagaaaattacagccactaactctaagggtattatattcactaaatgtagtctttagatcaatggcacccttgtgtccagtaaatggaccagactgtttaaatattggctcatatcctttatcatgtgtgactggattatgaaactaatttcctcag

SEQ ID NO: 523325 - DNA, 487 bp, Homo sapiens
atcacatgtaagtggtacttcaaaaatgtcaattaaaattacaaggtgaaataaagtgttttcagaaaaatatatacaaacactaagagaaattgttatcttcagaactgtaatactagaagrtatttttttcaaacaggagaaaactaatcacagatagaaaaatactgtttttaatagaaatttaaaagcaccagtaaaaattaatatctctataagtagaaaagatcattgactatttaaaacaataatacaaacatcttatggagtttaaaatacagttaaattctaaatacatggcaacaatacccaaaatgcagaataagtaaatgatgttaaagtgttttaaagtccttacattgtctgggaagcagtaaagatactattttaaaataggcattaataggtcaaggcatgttttgaattctagggtaaacactagaacagtaggaacatgtatacttaaagaagaggatgctgtgatgtg

SEQ ID NO: 523326 - DNA, 528 bp, Homo sapiens
gtgcggtggctcacgcctgcaatcctagcactttgggaggctgaggtgggcggattgcttatgtctgggctacattgtgaaactccatctytacaaaaaatacaaaaattagcttggtgtggtggtgtgcacctgtagtcccaactactcgggaggctgaggtgggagaatcacttgagccctggaagcgtgggtggctgtgagctgagattatgcctctgcactccagcctgggtgacagagtgagaccccatctccgaaaaaaaaataataatttgatactctttttgaatagatcaacaaagataagaacacaggcattttagaaatactctcaaatatatattgggttttaatataaatgagatacaattgagtaaacttttaatatgatttgtaggattttagttattcttaggaagaccaagacttccaaaattataaaaataatttgcccatgtttatatctttgcccaatctgcaatttatttcattaacacaagtgctatgtggacttgaaaaaataca

SEQ ID NO: 523327 - DNA, 217 bp, Homo sapiens
gagtctaagagttggaataggatggaagagagacaaaaagaagtggatatggaggctgccttattaaataggctggtgaaatcagtatatcaaagggatatctgcattcccatgtttattgcagcactattcrcaatagccaatatatgaaatcaacctgtgtccattaacagatgaatgagtaataaaaatatagtacatatacacaatggaatat

SEQ ID NO: 523328 - DNA, 580 bp, Homo sapiens
taaactgcatcctggtcattactttcattgttctgcacttcaactgcctttttacatctggatgcaataatattctcctttctccttgaacttcactctttaagaataagcatgccaatgactcaaccaccataacatagtctggctactgtagctaacaattaaagctattaytgagtcctctgaaatttctggtggggatcccagatagttaatctatttattaaattagcaaacagatactcatcaaggcagtttgcactctatcaagcacataaaaacatgcaagcgctggtggactcaaggcagtaataccaactttgagatttgggtttatctaatcagccatataatttaatgtcacaaaatcaataccacatactataggaaaaatagcataaaattttcagtaaaaacttccttcacttggattttctgaagagataaccaattagaacaatttctaaaaaccagatgcctaaacaatattttatccttgatgaccttgtttgtaactgtgctttctaaattaccaatcaccaaaggaaggaggcatgaacttcaaggttataatttacag

SEQ ID NO: 523329 - DNA, 580 bp, Homo sapiens
taaactgcatcctggtcattactttcattgttctgcacttcaactgcctttttacatctggatgcaataatattctcctttctccttgaacttcactctttaagaataagcatgccaatgactcaaccaccataacatagtctggctactgtagctaacaattaaagctattactgagtcctctgaaatttctggtggggatcccagatagttaatctatttattaaattagcaaacagatactcatcaaggcagtttgcactctatcaagcacataaaaacatgcaagcgctggtggactcaaggcagtaataccaactttgagatttgggtttatctaatcagccatataatttaatgtcacaaaatcaataccacatactataggaaaaatagcataaaattttcagtaaaaacttccttcacttggattttctgaaragataaccaattagaacaatttctaaaaaccagatgcctaaacaatattttatccttgatgaccttgtttgtaactgtgctttctaaattaccaatcaccaaaggaaggaggcatgaacttcaaggttataatttacag

SEQ ID NO: 523330 - DNA, 520 bp, Homo sapiens
tatatatgacaaagagctaatatgtgaaatatacaaatcattcacgtgtgtatgtacttttttcaaaacaaattaatagcaattcaatagaaaaaataaaaaataaatattaaaaagtagacaaaagccttgtatagacatttttttccaaaaaaatatacaaatggctaacagagatataataaagaggctccacaacactactcattaggaaaatgcacttaaaaccctaatggaatatgatctcagacctgttagagtggctgttacaaaatgataaragattgtgaagataagataaaaatccccttatgcttctaacagaaagagggaaaagtaatcattttgaaatatgcctgagtattatattctcctcaacaaagatgtattagtcagaaatatccagagaaatagaaccaatatgcagagagagagagagagagagaagagaaaatttatcataggaattggctcacataattatagaggccaaaatgtttcataacatgctgtctgccag

SEQ ID NO: 523331 - DNA, 520 bp, Homo sapiens
tatatatgacaaagagctaatatgtgaaatatacaaatcattcacgtgtgtatgtacttttttcaaaacaaattaatagcaattcaatagaaaaaataaaaaataaatattaaaaagtagacaaaagccttgtatagacatttttttccaaaaaaatatacaaatggctaacagagatataataaagaggctccacaacactactcattaggaaaatgcacttaaaaccctaatggaatatgatctcagacctgttagagtggctgttacaaaatgataagagattgtgaagataagataaaaatccccttatgcttctaacagaaagagggaaaagtaatcattttgaaatatgcctgagtattwtattctcctcaacaaagatgtattagtcagaaatatccagagaaatagaaccaatatgcagagagagagagagagagagaagagaaaatttatcataggaattggctcacataattatagaggccaaaatgtttcataacatgctgtctgccag

SEQ ID NO: 523332 - DNA, 520 bp, Homo sapiens
tatatatgacaaagagctaatatgtgaaatatacaaatcattcacgtgtgtatgtacttttttcaaaacaaattaatagcaattcaatagaaaaaataaaaaataaatattaaaaagtagacaaaagccttgtatagacatttttttccaaaaaaatatacaaatggctaacagagatataataaagaggctccacaacactactcattaggaaaatgcacttaaaaccctaatggaatatgatctcagacctgttagagtggctgttacaaaatgataagagattgtgaagataagataaaaatccccttatgcttctaacagaaagagggaaaagtaatcattttgaaatatgcctgagtattatattctcctcaacaaagatgtattagtcagaawtatccagagaaatagaaccaatatgcagagagagagagagagagagaagagaaaatttatcataggaattggctcacataattatagaggccaaaatgtttcataacatgctgtctgccag

SEQ ID NO: 523333 - DNA, 508 bp, Homo sapiens
ataggggaagggcactgagggataaccaggaaggagtgggtgaagagggtgttgaataggttgcattatagaggaccagtctgtttgtgcctagaggggattccattgactcccacaatagagatagaagaactgaggaggggtacagaatattctggtaaaactgagtaactagcccccatatccaataggaaagacatgggcttactagtgactgacagcgttaccttgggttccgtggtggtgatggcagtggggacagtggggacagtggattccgggccccagcattcttcagttakaggtgatgaagtgggatgatgagttttgcagagcacagtccgacttccagtgttcgttgatgccatggatggggtaaggttttgagagtggcctgggattagagcaggcttttgcccagtgaccctgttggctgcacttcaaacaggtttccggcagagtttgttgtaaggttgaggatttctgtatgcattgggaaccctgttat

SEQ ID NO: 523334 - DNA, 508 bp, Homo sapiens
ataggggaagggcactgagggataaccaggaaggagtgggtgaagagggtgttgaataggttgcattatagaggaccagtctgtttgtgcctagaggggattccattgactcccacaatagagatagaagaactgaggaggggtacagaatattctggtaaaactgagtaactagcccccatatccaataggaaagacatgggcttactagtgactgacagcgttaccttgggttccgtggtggtgatggcagtggggacagtggggacagtggattccgggccccagcattcttcagttataggtgatgaagtgggatgatgagttttgcagagcacagtccgacttccagtgttcgttgatgccatggatggggtaaggttttgagagtggcctgggattagagcaggcttttgcccagtgaccctgttggctgcacttcaaacaggtttccggcagagtttgtkgtaaggttgaggatttctgtatgcattgggaaccctgttat

SEQ ID NO: 523335 - DNA, 624 bp, Homo sapiens
ggaagggggttgggcatgagacacggtttgttggccgggttgaaattagaggaggaaggcatgtccaggggaggaggcatttttgtgggttttttgctgaagaggaggatttgaaaaggttaacagaattagcagagatagagagccacgaacagagataagcaaagcacttyggatcatttaccattgcattggaagttttttagattttgttgaatttagaaataaatgttttgatttttggccattgattattattgtccaatttacattggggctaggcaacattacagaggaaaagtacagaggaaagcaaggcatttggttttaaggagtccactaagctctgggcttggagaattcagatgagacatgtaagaggagtaaataaggtgttcagttttaatggagtcctctaagccctgggcctggaggttccagatgagacattcgagagtggtgtctccaggtggttttaaagagccttgccccatactggtgactggaagggtgagaaatttagaggaggggagtgagtaccccattcctccctggataagggacataggagagccagggcatccctgcagatctttgctgtcccctggaggccagagtggccag

SEQ ID NO: 523336 - DNA, 515 bp, Homo sapiens
cacctggttccccagaacttcccaaggctccaagcatgttcctcactgccatatgggctgtggcctccccaagcatgttcttctctaggcgccgcctccagataacagtttctaacatctggcctcagtgtgagataccaaggccctttcacaacaggcacataattttttctgtaaagacatcatgggtctaaagaacttgggatacttggatctaccactggacattcccctggcatggattctggcaggaaagactcaggctggrcgatagtccagggcagacagtgctggctggagtcccagttccctgacctggcccactgccctctttggctatcagacaacgttcacagagtctgcagacatctgtgtgcccataggaacagctagggagctgcaggatctggagacacaagaggttcccctttgtctccttctgtcctcactaatggcccttcccagcacagcagctgggtgtttgggaagggagttgggggagggattggcctctg

SEQ ID NO: 523337 - DNA, 591 bp, Homo sapiens
gctatctcatgctgatgggaaactgattggcagctatatatgcctttgatgaatagaaatgasgaaaacgaattttatatcataaatgcagttgatctgggagatattcttttcagcttgggagaacatagagaaaaataaaatgctcctttgttgctgaaactattgagaagcactgtattttacaccatgctttctgattcaagggaaaagggggtttaaggggcttagaaagataggcagttgtggtcagagagaatttcagactttgagagcttatgggtaaattgttttcatataacatacctgattgaaaggaggatatgacgtgtttttcttctgtgagaaagagatgaggcaactgaggcctaaagagggataatgaatcagccaagttaaaaaagcagcttgtaacagaaccaatatttcaacccagtcttgtgactctgttccatagctctctctactctgaatcaaagaaatatagtcatcttgtcttgattttgccacaatgtccaaaaaaacattttctcaggtctgattttaatattgactttttctagtgaaagagagaaaacactgttagaagat

SEQ ID NO: 523338 - DNA, 338 bp, Homo sapiens
gggagatattcttttcagcttgggagaacatagagaaaaataaaatgctcctttgttgctgaaactattgagaagcactgtattttacaccatgctttctgattcaagggaaaagggggtttaaggggcttagaaagataggcagttgtggtcagagagaatttcagactttgagagcttatgggtaaattgttttcatataacatacctgattgaaaggaggatatgacgtgtttttctyctgtgagaaagagatgaggcaactgaggcctaaagagggataatgaatcagccaagttaaaaaagcagcttgtaacagaaccaatatttcaacccag

SEQ ID NO: 523339 - DNA, 684 bp, Homo sapiens
caacatgctgcagacacttgatatacaaccttttatttttttatttttatttttggcaggccccttcttaaccctacaacctcagaaactttccatttttgtacctgctcagttcttccagtagaaagtaacccttgatgcatagcttcttggactgggaaggtcattagagttttttgatgatgattccaaatgcaacagagtagcttgcctgtttcaatagattttcctttgttttgactttgttgacctatcatttgctgaatgatataagcagcttcacaataaaagagggtatattatacacaggttgaagcagggtaagtatttttgtcctgagagaaaaatccgatctaaagatatatttgatttttttktgtgtgtgtgtatgtaattaggaatgaccatttgaagtagaagcagagatgtctgagagcccaattttcaaagtaataatttgctatatttatttcaaagtaaggctctatggctaattttaggaaaggccttggaaatgaaccaacatgctttaggaagattcagatgtttagttttaaacctttccatacatgctttaaaacattctaatagttatctgtgaaagaaatgcattttaaatataagaaaaaaatgctatttccttttcagtgcctttctacagcaactgaaagttaaattagaatg

SEQ ID NO: 523340 - DNA, 625 bp, Homo sapiens
cagttcacaaatacttcctctactcttgccccccaaatccattattttgaagtcaataactcagtgtcagatggtgtgtgagcactgcatacaaaaataattttcagatatagctcccaattttagttaataaatgtaacagagaaggcatactattattcagatgtcagtagaacattgagctgaatgagtgagtaggtctcattatgccacataggtagacttcctttaaaaaaaagaaaaaaaaagggaagaggtatgatttaacatcaatcctctaacaaaatgattgaaaaaatgcaacatwtgtgagaatcttggctcttgggtatataataaaatatagtcagggtagttaacagttatactcgtattaccacacagctatatctgatcaagttgcaatttactgatgattcaatcatatttacataatttaccattgattccaagttgttaaggatgttgccagaataatatagattttggaaacattccaaaatctcataaaggcagaatacaatgaaatttactacattgtaatttcctttctactcccactcaggaattctaaaattgcttcatagtttttgtaatgttatgtttttgtggcaatttactctct

SEQ ID NO: 523341 - DNA, 625 bp, Homo sapiens
cagttcacaaatacttcctctactcttgccccccaaatccattattttgaagtcaataactcagtgtcagatggtgtgtgagcactgcatacaaaaataattttcagatatagctcccaattttagttaataaatgtaacagagaaggcatactattattcagatgtcagtagaacattgagctgaatgagtgagtaggtctcattatgccacataggtagacttcctttaaaaaaaagaaaaaaaaagggaagaggtatgatttaacatcaatcctctaacaaaatgattgaaaaaatgcaacatatgtgagaatcttggctcttgggtatataataaaatatagtcagggtagttaacagttatactcgtattaccacacagctatatctgatcaagttgcaatttactgatgattcaatcatatttacataatttaccattgattccaagttgttaaggatgttgccagaataatatagattttggaaacattccaaaatctcataaakgcagaatacaatgaaatttactacattgtaatttcctttctactcccactcaggaattctaaaattgcttcatagtttttgtaatgttatgtttttgtggcaatttactctct

SEQ ID NO: 523342 - DNA, 552 bp, Homo sapiens
ccctttaaaagtaaataataggatatactctacccactcaatactcagtaaaaatagaatacaaaatgtacaatagcaatttttatattccttccaggtaatctaccagtatgttatttatagactgtaaacacatggaaatgtggtattatattatatayaggactattagttatagaaaagaatgttataaacaattaaatattaatatttacattacatattaactattcaattatttcaggaagtctactacatgctaggcactgttataggtactggggatacagcagtgaacaagacaaagtagctaccctcatttctggtgtgggagacagacaataaacatcagataaccacaagatgtataaagaaaaataaagcaggataacatgaaagaataatgggaggttcattttaggtaagggtagtcagggaatgcctctctgagaaagtagcatcaaggacttcagtgatgtagggaataaaccaggtaaagatacagggaaagaatgtttcaggtagaaggaatagcacattcactgaaatagt

SEQ ID NO: 523343 - DNA, 604 bp, Homo sapiens
gaaatcaagaccttcaatctctacttccattccctctaacaaacagccatggcatgttgtcatttaattctgagagagcttcatttccacatcttcagaaagacagaacaatgctagatgtacttgcatgtattccaatagtgattgcctttcagaccttcctcttctcccatttgaatagacattagcctcatgagtgacctccrcacctgtactctccccatacacgattctgcatatagccaccaaatgtaactttctaatatgcaaaacataaaaaaaaacttcctggtttttttgaacacattcatctcaattgagcaaggaatcatccatccacattgtatccccagtccacctttcccgcatccttttcaattttttgccaattgcccatatcccaaaacctccattacggtcatgtcaaactacttactggttcctgaactcaattggtttgtgacttcatactcctcagcatttttttttttttttaatcagccaataggctgaaagctccaacagggccaaaaaaaaaaaagcctttttcagcttagtcttcttagcaactaactgattgtctgcctataaaagatgtttaatc

SEQ ID NO: 523344 - DNA, 444 bp, Homo sapiens
ataccttcaaaacacatttcctttttttttttttgagacggagtttcgctcctgttgcccaggctggagtgcaatggcgcaatcttggctcaccgcaacttctgcctcccgggttcacgtgtttctcctgcctcagccccctgagtagctgggattacaggcatgtgccaccatggmcggctaattttgtatttttagtagagatgaggtttttccatgttggtcaggctggtctcaactcctgacctcaggtgatccacccgcctcagcctcccaaagtgctgggattacaggcgtgagccaccacgcccagcccagaatacattttcaaatcaaataatgtccaatatcatttttttttaaacaaggtctccctctgttgctcacgctggcgtgcagtggtgcgatctcagctcactgcggcctcacctccagggcttatga

SEQ ID NO: 523345 - DNA, 444 bp, Homo sapiens
ataccttcaaaacacatttcctttttttttttttgagacggagtttcgctcctgttgcccaggctggagtgcaatggcgcaatcttggctcaccgcaacttctgcctcccgggttcacgtgtttctcctgcctcagccccctgagtagctgggattacaggcatgtgccaccatggcmggctaattttgtatttttagtagagatgaggtttttccatgttggtcaggctggtctcaactcctgacctcaggtgatccacccgcctcagcctcccaaagtgctgggattacaggcgtgagccaccacgcccagcccagaatacattttcaaatcaaataatgtccaatatcatttttttttaaacaaggtctccctctgttgctcacgctggcgtgcagtggtgcgatctcagctcactgcggcctcacctccagggcttatga

SEQ ID NO: 523346 - DNA, 444 bp, Homo sapiens
ataccttcaaaacacatttcctttttttttttttgagacggagtttcgctcctgttgcccaggctggagtgcaatggcgcaatcttggctcaccgcaacttctgcctcccgggttcacgtgtttctcctgcctcagccccctgagtagctgggattacaggcatgtgccaccatggccggctaattttgtatttttagtagagaygaggtttttccatgttggtcaggctggtctcaactcctgacctcaggtgatccacccgcctcagcctcccaaagtgctgggattacaggcgtgagccaccacgcccagcccagaatacattttcaaatcaaataatgtccaatatcatttttttttaaacaaggtctccctctgttgctcacgctggcgtgcagtggtgcgatctcagctcactgcggcctcacctccagggcttatga

SEQ ID NO: 523347 - DNA, 444 bp, Homo sapiens
ataccttcaaaacacatttcctttttttttttttgagacggagtttcgctcctgttgcccaggctggagtgcaatggcgcaatcttggctcaccgcaacttctgcctcccgggttcacgtgtttctcctgcctcagccccctgagtagctgggattacaggcatgtgccaccatggccggctaattttgtatttttagtagagatgaggyttttccatgttggtcaggctggtctcaactcctgacctcaggtgatccacccgcctcagcctcccaaagtgctgggattacaggcgtgagccaccacgcccagcccagaatacattttcaaatcaaataatgtccaatatcatttttttttaaacaaggtctccctctgttgctcacgctggcgtgcagtggtgcgatctcagctcactgcggcctcacctccagggcttatga

SEQ ID NO: 523348 - DNA, 593 bp, Homo sapiens
tggagccttgaatacttctctctcagcaattggtttaacaagaaggcaaaaataagtacagataatgataacctaaacagtgtcattgaccattttgacataattgacacctagagaacactccgacaacaataacaaaatacccttcttcacaactgcaaatgaaayatccacctagagagactgtagtctgggccttcaaacacaccttaacaaatttaaaagcataaaaatcatacaaagtatattttaaaagatcaaattaaactagaaaataacaaagatatctgaaaatctctaaatatttggaaactaataatgtacttgtccgtaaaatgtggataaaatggaattatctgagaattaaaattcttttgaactgaatgacaataaaaatacagcatatcaaaatgtatgggatgcagctaaagcagtgctcagaggacaatctatactactagaggcttatattagaaaaaaaaatttaaatcaataacctaagctttcaccattagagaaggaatttcctcactcaggaccctctgcggatgtcgcctccatcctcatcaggaccctccatggtgtcacctcca

SEQ ID NO: 523349 - DNA, 590 bp, Homo sapiens
agccttgaatacttctctctcagcaattggtttaacaagaaggcaaaaataagtacagataatgataacctaaacagtgtcattgaccattttgacataattgacacctagagaacactccgacaacaataacaaaatacccttcttcacaactgcaaatgaaacatccacctagagagactgtagtctgggccttcaaacacaccttaacaaatttaaaagcataaaaatcatacaaagtatattttaaaagatcaaattaaactagaaaataacaaagatatctgaaaatctctaaatatttggaaactaataatgtacttgtcygtaaaatgtggataaaatggaattatctgagaattaaaattcttttgaactgaatgacaataaaaatacagcatatcaaaatgtatgggatgcagctaaagcagtgctcagaggacaatctatactactagaggcttatattagaaaaaaaaatttaaatcaataacctaagctttcaccattagagaaggaatttcctcactcaggaccctctgcggatgtcgcctccatcctcatcaggaccctccatggtgtcacctcca

SEQ ID NO: 523350 - DNA, 605 bp, Homo sapiens
gtgctacctcagatgtgcagcttgtctggcttcctggtcttcccctccctgggggaccaactgaccccaaacttagccagcaaccaagtcatcaggagggcttsctgacacacaggcgctggcctcatcctacagtttctaatttaccaggtctgagaatttgcatttctaagaaatttcctggcaatgctggaccctgaagcacatcagatgctggctccacttctggggagaccatgtttaaaccaaggtaaaggaggcagcaagaaaggctgagcagtgtctctatcggtagctttaccctcccaggtctggctacactgggctctcccctgtctgacagctcccacgtgtgtataatgctggaaaataattactaatagcagcaatatataatgttgattaagggttcatgcctacgaaggactaaaatgcatgggtgataatagtcatagtaatagcacaaataataataatgactcaaaccatgattttggcactgtggtggggccagcaccatactcagcatgcccctgtgagcatccctggttcatccgtgtcttgcccctgggtggcagcctcccatttatcagagcttaatgcct

SEQ ID NO: 523351 - DNA, 417 bp, Homo sapiens
tgaatgcaaatgccccactctctacacagaccccacagacacaggccacatcactcattccgagaccagacagcctgggtccaacccccagcttcaccacttctgaacctgtgatttgggtcacgtggtttaacccttgtgagcctcagtttcctccaacctaagaaataatctcagataaagccgtcatgggggttgcgtgagttaatgcacggaaagtgcttagaagaatggctggcaagcaacaggcatgagacaaatatgagccccaagcacacagccccagtgcatgtccacacgcttccacatatgcacacgtgggcacccacatgcatgcacctgcgtggatacctggcccaggcaccacacacggagatgaacattcacatgtrtacgaataggttaggcccccaaaca

SEQ ID NO: 523352 - DNA, 628 bp, Homo sapiens
acgagggccggggagcggcggggaggggatgcgggaagccaggtctgaatatttatcgtatctctagaggggggttacattaarcttttaaaagaaatcagaaatgaaaagacaataaaaattctttaacttgcaaaaataacctaagtaaaaggcaaaataaacgaagaaaaatatttttgacaaactcgtttctatatggaaaacctgtacggcagcaagacctgtagactcgcatctagagacgctcaaccctagctccgtgttccaagtgacgtggcctgtcgcacccgccggggacaatgactgcggccctggggtcccacagacgttccctttgctagacttaaggaagagctaggcctgtccgcgctcccagcccccacgcagccagacacccgcgggtgctgagatgaagagtgaagtcaccaggagagacaggaaacagcgcgggcctcggggacccgagggcgcggaagctcgggggccggggtcgagcacagattgggaggcgcagcgctgggcgcacgtccccgtcggcccggcggcccctaatgaggcgcgctgtgcgcagactgctaagagcagcatgagcacggctccggcggcccccagggccccgcgggtc

SEQ ID NO: 523353 - DNA, 601 bp, Homo sapiens
ttttgtccccaggcagtttcttaattctggttctaatagttttccagtttattctcttgggttttccaagtatacagatcatatcatatacaatccataataatttcaccaccttctctccaatttaaaaatatttattwcttcctcttgcctaaatgcaatagctaggccccccaaaacagggttaaataacagcagtggttgtggacatctttgccttgtcacacatttcttactttcccatcaatcaggaggtttctatgtttgtatgagatagataatcatattaagaaggtagtcttctaatcttagttaattaggaggctgtttgcttgttaataagaataaatattgaactttattaaatgcttttcactgtcagagacagtcatattttctagtcatttctattaatatgttggaacgtaatgataaatctcctaatattgaaacaaccttgaattcctagagtaaacactacttatccttgtggtgttgctatttaaatgtgctgccagtttcaatttggtaatattatattaggatttatgcattgggttttggcactgttccttgtaagaatttagaatgttctctgctt

SEQ ID NO: 523354 - DNA, 601 bp, Homo sapiens
ttttgtccccaggcagtttcttaattctggttctaatagttttccagtttattctcttgggttttccaagtatacagatcatatcatatacaatccataataatttcaccaccttctctccaatttaaaaatatttattacttcctcttgcctaaatgcaatagctaggccccccaaaacagggttaaataacagcagtggttgtggacatctttgccttgtcacacatttcttactttcccatcaatcaggaggtttctatgtttgtatgagatagataatcatattaagaaggtagtcttctaatcttagttaattaggaggctgtttgcttgttaataagaataaatattgaactttattaaatgcttttcactgtcagagacagtcatattttctagtcatttctrttaatatgttggaacgtaatgataaatctcctaatattgaaacaaccttgaattcctagagtaaacactacttatccttgtggtgttgctatttaaatgtgctgccagtttcaatttggtaatattatattaggatttatgcattgggttttggcactgttccttgtaagaatttagaatgttctctgctt

SEQ ID NO: 523355 - DNA, 644 bp, Homo sapiens
caaacccagatctgctgctctgaggccctctctgcagcagtagcacccaagtaccgcagatgatgggggaagggcccctgcttctagtgtgatcttgggcatggaaattacactgccagcacagtcgtagttgccactccctgccccagmcaggtagccctctggctcactggctccagtctctgtcagcagtaggaataggtatgcaaagagggaggaagggttctgttctctacatgagagctccagcacagaggccactctgccagtgggaggggatttcactcttggcttgcagagctgagcacagagattgagccactgcttgggggcagagtcagagccctagggtcatgggctctggaaagtacacactttgctttcctttgtcctggagtcggggaggggatgccttctggtgcactgcacaccctattccccaagatgtagtacttcctatgagctaaagtactggggactctgcagcacctttgggaccagccaatgctgttctgccaaagccctctgtgtggacactggggaatgtcatcaggagctcctgagatgtggagatatgagggctgttgttcccagcgcaggatgcagtaccatgatgctgtgctaccaaaaggctctgtacagca

SEQ ID NO: 523356 - DNA, 586 bp, Homo sapiens
cagatgatgggggaagggcccctgcttctagtgtgatcttgggcatggaaattacactgccagcacagtcgtagttgccactccctgccccagacaggtagccctctggctcactggctccagtctctgtcagcagyaggaataggtatgcaaagagggaggaagggttctgttctctacatgagagctccagcacagaggccactctgccagtgggaggggatttcactcttggcttgcagagctgagcacagagattgagccactgcttgggggcagagtcagagccctagggtcatgggctctggaaagtacacactttgctttcctttgtcctggagtcggggaggggatgccttctggtgcactgcacaccctattccccaagatgtagtacttcctatgagctaaagtactggggactctgcagcacctttgggaccagccaatgctgttctgccaaagccctctgtgtggacactggggaatgtcatcaggagctcctgagatgtggagatatgagggctgttgttcccagcgcaggatgcagtaccatgatgctgtgctaccaaaaggctctgtacag

SEQ ID NO: 523357 - DNA, 644 bp, Homo sapiens
caaacccagatctgctgctctgaggccctctctgcagcagtagcacccaagtaccgcagatgatgggggaagggcccctgcttctagtgtgatcttgggcatggaaattacactgccagcacagtcgtagttgccactccctgccccagacaggtagccctctggctcactggctccagtctctgtcagcagtaggaataggtatgcaaagagggaggaagggttctgttctctacatgagagctccagcacagaggccactctgccagtgggaggggatttcactcttggcttgcagagctgagcacagagattgagccactgcttgggggcagagtcagagccctagggtcatgggctctggaaagtacacactttgctttcctttgtcctggagtcggggaggggatgccttctggtgcactgcacaccctattccccaagatgtagtacttcctatgagctaaagtactggggactctgcagcacctttgggaccagccaatgctgttctgccaaagccctctgtgtggacactggggaatgtcatcaggagctcctgagatgtggagatatgagggctgttgttcccagcgcaggatgcagtaccatgaygctgtgctaccaaaaggctctgtacagca

SEQ ID NO: 523358 - DNA, 668 bp, Homo sapiens
ctggatttgcaggtgcctcatccaccctggagcatcatctggccccagagcacagcagkttgccctaccatgcagcttctgctagcagaagccatgcaggactgctccctttgcccatttttaatggcattatttgtttacttactattgagttgtttgagttccttatatgtactggatattaatcccttatcagatgtatggtttgaacatattttcttccattctgtaggttgtctcttaactgtgttcattgtttcctttgctgtgcagaagctttttagtttgatgtaattctgtttgtctattttttgcttttgttgccggtgctttgggggtcatatccgaaaaaaatcattgcccagactaatgtcataagctttttccctatgttttccaatagaagtttttcagtttaatccattttgtgttgattttagtatatggtgtgagataaggatctaatttcatgcttctgcatgtaaatatccagtttttcccaaaccacttattgaagagactatcctttccccattgtgtgttcttggcacttttgttgaaaatcaattgatggtagatgcatgaatttatttctgggctctctattcttgtccattggtctacatgcctgtttttatgctagtaccatgctgttctgattactatat

SEQ ID NO: 523359 - DNA, 668 bp, Homo sapiens
ctggatttgcaggtgcctcatccaccctggagcatcatctggccccagagcacagcagtttgccctaccatgcagcttctgctagcagaagccatgcaggactgctccctttgcccatttttaatggcattatttgtttacttactattgagttgtttgagttccttatatgtactggatattaatcccttatcagatgtatggtttgaacatattttcttccattctgtaggttgtctcttaactgtgttcattgtttcctttgctgtgcagaagctttttagtttgatgtaattctgtttgtctattttttgcttttgttgccggtgctttgggggtcatatccgaaaaaaatcattgcccagactaatgtcataagctttttccctatgttttccratagaagtttttcagtttaatccattttgtgttgattttagtatatggtgtgagataaggatctaatttcatgcttctgcatgtaaatatccagtttttcccaaaccacttattgaagagactatcctttccccattgtgtgttcttggcacttttgttgaaaatcaattgatggtagatgcatgaatttatttctgggctctctattcttgtccattggtctacatgcctgtttttatgctagtaccatgctgttctgattactatat

SEQ ID NO: 523360 - DNA, 483 bp, Homo sapiens
cataccttactaaaaatagaatggattttgttcatgtatattagcttatcaattgttacsccatcctggcgggcatggtggcttatgcctgtaatccagcactttgggaggctgaggtgggcgcatcacctgaggtcaggagtttgagaccagcctggccaagatgatgaaaccccatgtctactaaaaatataaaaattagccatgcgtggtggtgcacgcctgtagttccagctactcaggaggctgaggcaggagaatcacttgaactgaggaggcggaggttgcagtgagctgagattgcgctactgcactccagcctgtgtgacagaacaagattctgtctcaaaaaaaaaaaaaaattgttaccccatcccactagctgaaaaaggacatatacctgttcaaacattactatgtatttcattcatgtttttacagaatcacatttcattaccttcaagtggaggcttgcctgtggct

SEQ ID NO: 523361 - DNA, 577 bp, Homo sapiens
agccgcgccccgcccactgggtgctgggcagatgattggtggagactcagcttcttagcaactagaccggcccctgccgctccgcagggagcctggtacccgcctggagttcctttcccagtgctttcccataggcatctaagaatattccttcacagagttgccaagtgctaaaagttggtttcccaactcagaatgaaggaaccaggcttgtgcgtccgatgggcattgacattctggaaaacaagaataagaagctgtagcggcgcctgtaagtgggccggagcaggcgcagcttggccacctcccgccgaaaggcaaggaaggaccggctgcgacacgaggaagaaggcccctcggcctcagcagagcgctatcctccactggttmcccgggttccccggcttgctaccgggctgctccgtgcatctttccccccaggcgtcaggaactgcgccctcatggcggaggtgaaggtgaaggtgcagccgcctgacgcggatccggtcgaaatagaaaacaggtaaaccagtgaggctccggcttggcactccatcaggcgcccagtcatttgggc

SEQ ID NO: 523362 - DNA, 473 bp, Homo sapiens
tgccatgcctgtgcctctctgcttcctttgttccatgcacatggcacactgtctacttgctcaatgctgtggtctcagccctagcactggactcagtaaggaattagttgagcgaatgaatggattctccagcaatctttataaaatatgttttccacatttttcagacaaggaaactgcaacaaaaagtgtcagaccccacactgtgatctcaacactgctgagctctgcctggaatcttggaactctccagcgatctcctctccttaagagtggacgtgggatgcctccacgcattcagtcaaaataaggttatggtgtgcctgttgtgtgctaggaattatcttctcatcagaaaaagaatctctctatgttttgggaataagtgaagaacaaaatgatgatgtgtaagaggttcttgccaaattgstcggcacagagaagccctggagaaaggctgacagtattgctgg

SEQ ID NO: 523363 - DNA, 540 bp, Homo sapiens
tgtgccaggagctgattctgcaccttcacccttccctgagctttctgggcctcccttgtccactcctcagatgggcatagcattgtccatccagcctccagaggcttgttgcttactggacaaattgccctcatggagtcaaagtgctgtgataatcacaaagctgtaygcttagattggcaattgttctgcactggcaattcctttccttatctctgctgagggtacatggggaccttgcacatttgacatttctccccagtgttcaggcctggaccacagcctggggaaggaatgaaggcagggctcagcactgccactgaggctgacaacaaagtgcagactctgggaggtattctcaccactgtgatgactaaatgcacctgcatatctctccagaggggagcacagatgaaggaggccaaggcacaggaaattcctgcagaaaggggctcagagggagggcgtgcaggggccctggagacaggcacagtctggcttccttcccgtgctctctccagagccccacctgggtcctcc

SEQ ID NO: 523364 - DNA, 540 bp, Homo sapiens
tgtgccaggagctgattctgcaccttcacccttccctgagctttctgggcctcccttgtccactcctcagatgggcatagcattgtccatccagcctccagaggcttgttgcttactggacaaattgccctcatggagtcaaagtgctgtgataatcacaaagctgtatgcttagattggcaattgttctgcactggcaattcctttccttatctctgctgagggtacatggggaccttgcacatttgacatttctccccagtgttcagkcctggaccacagcctggggaaggaatgaaggcagggctcagcactgccactgaggctgacaacaaagtgcagactctgggaggtattctcaccactgtgatgactaaatgcacctgcatatctctccagaggggagcacagatgaaggaggccaaggcacaggaaattcctgcagaaaggggctcagagggagggcgtgcaggggccctggagacaggcacagtctggcttccttcccgtgctctctccagagccccacctgggtcctcc

SEQ ID NO: 523365 - DNA, 542 bp, Homo sapiens
tcaagctgctcacaggcttctacgagagtctgattcatgcccagagaaccactgaagccaatggttattttaggcagggagataaaagccacagagggcccagttggcgaggggagtccggcaggagctgcctaagcagaaggctgtgtttacatacacagacgacttctctgcccagcctggcctagtgtggggagatgggaacattcaggcgtcactgcctggctgccttgtgaagttgcggattaaccagtgatgcagcggctggtctagccgtctggtccctgcagatggatggatgaagagaggaytgaaaagacagcagagcagtgccagcttctggaagtgaagtgctggctgggtggagtgggcacctgggctgggaatgtgagtgcaaggaaatgtttgtgatctgacagcagacagcaggtgaaattctgctgggtctggcttggggggttatgaggtcttcataacagtccctgttttaaatggaaaaactgttgaaaagaaaaaaaaaaaaaggaggtcaggtgcagtgg

SEQ ID NO: 523366 - DNA, 288 bp, Homo sapiens
tgggtggactcctgactcctacttgctccctggcctctggctttcggtgtgaagatggccaacacatactatgcacatattgtgaactgggcactgatgtgggccttcaggggtgtgtgtgggyggagggaagggagtatgatgaaaagtggccattatcctaaagctcatagtgcaatggaagtttaaaacccttggacaggtcacatgaccctgaacttgagggtggcaggacggagacagagaggccaagaggttatttctagccagaggagttggtgcaaagag

SEQ ID NO: 523367 - DNA, 401 bp, Homo sapiens
ctggcctacctaacagtatcacaaggacctgcagagaggaggaaaggggccatcctttctactgtgtgattcaatgctattcagcgctgcctccactgagatggctagtgagaaacggccctgcactctgacgtggtgaaaagaactctagaacttgagccatgaggcctaggtccaaagccttgtgtgactgtgggcagatcatgtcatacccagagcttcatgcttctcttccgtaaaatgaaatgatactcccttacggagytgtatgtaatgggataggagataagaacatatgcctttgtaaaatgaaaagagccataaagaagtaagtagaatagcaagtaaataattatttttcaaaaagagaaggactctgaagagttttactttgtaaaatt

SEQ ID NO: 523368 - DNA, 558 bp, Homo sapiens
gccctctgccctcatggctgggaacgtaactctggggactcagaaaagggaagggaatggcaggaagtggcttttgggagtagggctgagtgcaactggtcctcgcttgctggggaggggctggaagggtaggggaggmacttaccgctcctgatgagtgctttccccaaatgaagcaattcaatacgaagcagatgccaaaaaccacaccagggtacagagttgccgtctggagcaagaggggccgggttgaggagcagcatccagggacctcccctacctgtcccggtggggcccccagaccagaagctcttaagccctccttgtctttcagactctgctcaagcatcattccttccagaaagtattccctgaccctcagactgagcaggactctgttctatgccctctcaggtccctaatactgccccttcttgctctcatcccagttcgtaattacatattttggctacctgatcaatatccgcctatccccaaaagactgtgagctccttgggaggagtgtgtctaccttgttctctgatgtactctcatcac

SEQ ID NO: 523369 - DNA, 342 bp, Homo sapiens
gctgctgcctaggcccaccccacccttccgggctccaggagcctcagctccaaacacaccattcacaccttcatgtcttcacttgtgctgttccctctgcctggaatgctgcttcaacacccattaaaataccgaccagactcttttattttattaattttttgagatgggcttttgctatactgcccaggtgggtcttaacctcccaggctcaagcaatctcccacctcagcctcccaagtagctgggactacamgtgtgcaccaccacacgtggttaatttaaaacaatttttttagaggaggagtcttgctatgttgctcaggctggtcttgaactctg

SEQ ID NO: 523370 - DNA, 519 bp, Homo sapiens
tgcctaggcccaccccacccttccgggctccaggagcctcagctccaaacacaccattcacaccttcatgtcttcacttgtgctgttccctctgcctggaatgctgcttcaacacccattaaaataccgaccagactcttttattttattaattttttgagatgggcttttgctatactgcccaggtgggtcttaacctcccaggctcaagcaatctcccacctcagcctcccaagtagctgggactacaagtgtgcaccaccacacgtggttaatttaaaacaatttttttagaggaggagtcttgctatgttgctcaggctggtcttgaactctgagattcaagtgatcctcctgcctcagcctcccaaatagctgggattacaggtgtgagccactgtgcttggcctgaccagactctyaaggctaagctcaaattctatttttcctaaagccctggcctggtggacttccccaccaaaccagagaggggaacagagagctccacaccttccaatt

SEQ ID NO: 523371 - DNA, 638 bp, Homo sapiens
gttttctttcagttgacattacctgtaatactaacagtcataagtcacatacttacatagcatatcctctgtgccagatactgtatttcctcattttaaagctagatgggaattactttccacaaaagagagtggacgttttaccaccaaggcactagaggtttagtagctctaacccttttcagaaatcatagacagaagtagaagggcggtgttaaagcaatgctcattgaactctaaggtgtgcacaaatcacccgagtatcttgttaaaatgcagcttcccaggcagcaggtccgggagcctgagactctgcatttctaacaaactcctagggaaagccatttctcttggttcaaggaacacgcctcacataggaggcrtgaggtacttcatactgctcatcctgaaagccacctctgtgataaaataatagatgattaaaaatttcttatttttatttttatgtatcttccaagttttcatcagtgatcatatattagtcttataatgagaaaaaaagtgaataaattgattttttaagtagagtagtccctttccccagatttctatggatggttttccttgggcctctctttgaagatctttgaggtaggtctttgagtgggttgttagac

SEQ ID NO: 523372 - DNA, 547 bp, Homo sapiens
tagcaagatggcagtctgctggaaatgagtgtgaaccactttatttctcattctcaaaacaatccacaagctagttattttcattatctccctgttrcagatgggtaaatgaggctccaagaatttatgtgtttaccccaagtcatcaggctagaaaggcctgagctggatttagacccaggcaagtgagtcagtaaaacaaaactatgtggtcttgggctacatggaagaactgagggaggtagccattatcaccatgtggctcctgagcgcttgaaatatgactagtatgactaaagaactaaagctcaagttgtatttatttctaatacatttaatttaaatagtcatctatagctagtgacttctacactggacaggatacctctagatgcctgcttagagaaatccaaaagtggagagagattttttttttataagaagcctttgtcatacaacatccatgaatcttaaatattattgtccccacttttgagatgagagcactgatattcagagagaataattgatttgcccaagattttac

SEQ ID NO: 523373 - DNA, 547 bp, Homo sapiens
tagcaagatggcagtctgctggaaatgagtgtgaaccactttatttctcattctcaaaacaatccacaagctagttattttcattatctccctgttgcagatgggtaaatgaggctccaagaatttatgtgtttaccccaagtcatcaggctagaaaggcctgagctggatttagacccaggcaagtgagtcagtaaaacaaaactatgtggtcttgggctacatggaagaactgagggaggtagccattatcaccatgtggctcctgagcgcttgaaayatgactagtatgactaaagaactaaagctcaagttgtatttatttctaatacatttaatttaaatagtcatctatagctagtgacttctacactggacaggatacctctagatgcctgcttagagaaatccaaaagtggagagagattttttttttataagaagcctttgtcatacaacatccatgaatcttaaatattattgtccccacttttgagatgagagcactgatattcagagagaataattgatttgcccaagattttac

SEQ ID NO: 523374 - DNA, 547 bp, Homo sapiens
tagcaagatggcagtctgctggaaatgagtgtgaaccactttatttctcattctcaaaacaatccacaagctagttattttcattatctccctgttgcagatgggtaaatgaggctccaagaatttatgtgtttaccccaagtcatcaggctagaaaggcctgagctggatttagacccaggcaagtgagtcagtaaaacaaaactatgtggtcttgggctacatggaagaactgagggaggtagccattatcaccatgtggctcctgagcgcttgaaatatgactagtatgactaaagaactaaagctcaagttgtatttatttctaatacatttaatttaaatagtcatctatagytagtgacttctacactggacaggatacctctagatgcctgcttagagaaatccaaaagtggagagagattttttttttataagaagcctttgtcatacaacatccatgaatcttaaatattattgtccccacttttgagatgagagcactgatattcagagagaataattgatttgcccaagattttac

SEQ ID NO: 523375 - DNA, 456 bp, Homo sapiens
aaggatgagggtgcaggacagtaaacaggatacgagtggagaaccaacagtgccaattgggagtgaaaatggatacaccagtggacacagattgcttaaaatgagggctcctcttcatgggcagataaacaaaccctttccataggaagtctttaggggggatatgggaattacgggctagcatggatacagagaggccacgtgagagaagcaaacagctagcctgagtcgttgctcatgacagaagaaacatgggcacatttaggacccagaagcaaatctctgggttttaaattaggtcctagtcaggaactcagcagggaggaatagggagatgtcttgggtaacttgtggactaacaatgcagtctctgttctgcaaatccttccccaggagaaagcttggcagrcctgtatgcattctatggggctttcctttccagttacctttccacag

SEQ ID NO: 523376 - DNA, 557 bp, Homo sapiens
tgactcttaacaccttctttgtgtcatgccctgatgtaccggttacacttctaatctccacagcaccccctgaaactgcacactgtggtcctcattttaaatagagaggaactgaggctcgatgagtggggaatgacttgaaccaagggctgctggctcagtcgaggcaccagcatgagggtcgtccttccctttctcagagacctcctttataaagaggctgtggttgaggccagggctcacctccaccccatcagcatctcaaactgttttctctagagtcacatagcactttcstctgagaagaggggcgcccatcacggttttccctaccctattgcagggccagtgacatctccacgccttttacccatctgtgccttcctgcttcccccaaatgtgcccatacctccacccacctgtccaagggtgcctcagctcaataggtgaaaggtggagctaacctcctctcccatctgcaccctccatcatactcctcctcctgtcccctggggacaaggacgcatatgcttctcccagcccttggcaggtactag

SEQ ID NO: 523377 - DNA, 557 bp, Homo sapiens
tgactcttaacaccttctttgtgtcatgccctgatgtaccggttacacttctaatctccacagcaccccctgaaactgcacactgtggtcctcattttaaatagagaggaactgaggctcgatgagtggggaatgacttgaaccaagggctgctggctcagtcgaggcaccagcatgagggtcgtccttccctttctcagagacctcctttataaagaggctgtggttgaggccagggctcacctccaccccatcagcatctcaaactgttttctctagagtcacatagcactttcctctgagaagaggggcgcccatcacggttttccctaccctattgcagggccagtgacatctccacgccttttacccatctgtgccttcctgcttcccccaaatgtgcccatacctccacccacctgtccaagggtgcctcagctcaayaggtgaaaggtggagctaacctcctctcccatctgcaccctccatcatactcctcctcctgtcccctggggacaaggacgcatatgcttctcccagcccttggcaggtactag

SEQ ID NO: 523378 - DNA, 640 bp, Homo sapiens
ggtgcaatgcctctagtttgcaggaaccagagtaggcattcatgggcaagaagaatccaccaagagcaggtaactactgtccctatcttatatgtataagaaaacagacaagatgagagttttaggagctttgtttgtgtttaaattgattattcatcaaacacttattaagtacctgctgtataccaggtcctatgctgggtgtcagggagatgccctgagttcagtgaggacagtaaactgtgaaagcaaataactrcaacatcaaccaaagggatcctgggagtcttgtcagaggaagaaaatgcactggtgtcttggggagggaaataacttggactctgcgttgctggtggatgggaagaagtgactcagttcagctcctcaattacttttgggacatgcatgatgtgagcatacaaaactaaaaggagaaagagggaaagaatgggcttagccatgaggacagggactctgctcccgattggtccctagcacctataacatgctaaatgaacacactgattaggcatgtacagtactgcagaggcactatgctgggtaccttaggtatatgggtggaggagttattgccatttttcggaagagaactgcgacccagagaggagaagtattgatc

SEQ ID NO: 523379 - DNA, 654 bp, Homo sapiens
ctgtttgccttgtgaggttggaaaggattgcacttgtcctgctacaaggactcttagyctctggctggattacagaaacatttgcctgcatttctccttttatttcccaaagtttttcagcgtcttacatggttctgtagaagaggcaggatcgtgtccttaaaagaccactgggctgtgagtcaggtggattttggtcttgataatgctacttgggcaggtcactgtttcctcatccatctgtaagcctctttcaacaaagggtagctggtattatctattatgcatgtttagcctttccggtaaggtaatatatttagtaaaactaaattagcatctgtcagcaactctccagggtagtaggagaaggtggcaggtgctttgaggaagttacagatgagaagctatgggattctgagaagggagagtaagcttcttaatttatactttaatttctaataagtagaaatgtcaagatgtacgggggtcaaatgagaatgattctacccctccaccccactaaaaagtctgggaaagtgaattttcccctctgaggccttcttatttctcagttggaaataaaatgtatgttggcagctacattcattattgcttgcagtgtaatccggcccctgttatggattcccagacttg

SEQ ID NO: 523380 - DNA, 510 bp, Homo sapiens
tgcaaattacagtctgcctgcaggctggggctgtggctgcggccatggtgcaatcctccagtacccaacattaagtaactcagggcagactcttactggggccctactgctggtcagttgcaaagactacaggcagcttggctggaggagctgtggagggtagaagggaagctggctgtgtaacactagcctgtctacagaggagcatcatacccgcaatgtcaccatggctttcagcctcatgacagccctggaaggtgtgtgcatcatgctgatgaggataccgagggccaaagaagtaaaagaattcagccaacatcacacagtggacaagttccaaagcctggctttgaatccaggtcttttgactccaactcaggggtctttttactacattactctgggatcaagaccagctacagaccctcctagagaagaccaggtggtcagtggtcggacaccactgtccaawcccgtgggaccccttgcaaaacctgtggcactcggggc

SEQ ID NO: 523381 - DNA, 589 bp, Homo sapiens
aatgtcagagcttctccccactccacaccctttctttaaactgatgtcaaggtgggcccagtgagggtcagtgacggaccctgcagtctgagaaagacatggcagaagcataaggttagaggctgttcctgctgcctcattaaaaacaacaattttcccccaaatctggactgaaactgacattcaaygccaagtgtgatctcagtttaacctgccctggtagatatgcatacacttcccatgcgcaccatctcatgtgatcgtgtccacagctttgtgagttgagaggggtgggagtgattatccccaaccacaagcaaggcttccgggcttcaagggttggagaccacccagggctcggccagcatcagaaccaacggcttctaattccaaatcaaatgatggtttatgccacactacaaccctaaacaaatgaactgtgatgtgtctcacttccctgtgcaagtggaagatgctaatacatgtgtatcatgagaaaggacctcacaattttcttcttctgggttctgctgagacgtttctttgattcagagagaacttcccaggatcagcaagaaaagcatgtcat

SEQ ID NO: 523382 - DNA, 557 bp, Homo sapiens
ctgaaagggcagagcattttctatgatcttgcatcctgtgagctggcataactgagtctggaaagattgagtgggaataggttgtgatgttcttgctatgcaagatcaaggtctttggattttaatgtgattctttctaggaatttggctctgcccttgacaagcctcaccccaaagctgctctttggtaacttacacccttcccccacaccaccatcccttgcctcctaggacttcaggttctcctttctgcctcacagctctaggagtccagagtatcaactggcagaaggccttcaaccgacaagcgcatcacacagacaagttctccagccaggagctcatcttgcggagaggccaaaacttccaggtcttaatgatcatgaacaaaggccttggctctaacgaaagactggagttcattgtctccacaggtacctgctcattcccctccttgcccaaacacacacatacttgagtagcccttgtgcattcaaggactgayggggaccacactggggccactggcattgggttctagccttgctctgtcattg

SEQ ID NO: 523383 - DNA, 541 bp, Homo sapiens
tatcagaaacagcaaaggctttagatccagctgggctctgctgtttccttgtgtgtgaatgttccaggttattgaatcagcctgaacctcagctctgtcactgtaaaatggttgctctgaggattagtgacaagaaaaacaaaacacagcaacaacaaaacccagcaacctccggtcatcctcaaaagaagaagaaatccaatagccataaaatgtccatttctatgtccaaaatgctttcttccccatccttgatctcatttgaccccttctgggagggaagagatgattgtccttctttaccagatgaggaagttgaggcgcaaagagatgacttgtctgcccagaatgaattacggctgtttcttggcagaaacacaacagctttcatcttttggtctgaataaatagtccaaattgcttttctgaccccaaacccagccttcayctgttctgatcactgagcaaggaccgtgtggtattagagctccgctcagactataaatggtgcacagggaacctctgggctctagaagtttag

SEQ ID NO: 523384 - DNA, 589 bp, Homo sapiens
gtgggctgtggtgtctatgaatgtcctgagttcagagaaggccattgtcactgctgttgcctctcagccgagtgggcctcccaggggaccggaggttttagctgacctttaaggatatggaaagtagaagggattcccaattattgttttcaaatttctacttcaaataagggtagattcttattttcaagaatctcagagctctacttatgtgatgcagctactgctggtgaagactgagctggtaaaggtaaccagcagtttgcctttctaactggaccgctgcttgtttgcagaactggctgctgcagcatctgcatgctttccatgcagcatacccatcacattataggctgctgcgtgggtttcatgctatgtcctggcagtgakaagttggaaggagagcattacattcttgctccaaatgacatatttccaaagggaacaggacatggaagcagcagcagaaccaactgactgctgttttgcctggtgcattttttgcaggagaacacgattctggtaggaacatcctgcttattattacctagtgcatgattgctggtgcatgagctcttccattggtggc

SEQ ID NO: 523385 - DNA, 589 bp, Homo sapiens
gtgggctgtggtgtctatgaatgtcctgagttcagagaaggccattgtcactgctgttgcctctcagccgagtgggcctcccaggggaccggaggttttagctgacctttaaggatatggaaagtagaagggattcccaattattgttttcaaatttctacttcaaataagggtagattcttattttcaagaatctcagagctctacttatgtgatgcagctactgctggtgaagactgagctggtaaaggtaaccagcagtttgcctttctaactggaccgctgcttgtttgcagaactggctgctgcagcatctgcatgctttccatgcagcatacccatcacattataggctgctgcgtgggtttcatgctatgtcctggcagtgataagttggaaggagagcattacattcttgctccaaatgacatatttccaaagggaacaggacatggaagcagcagcagaaccaactgactgctgttttgcctggtgcattttttgcaggagaacacgattctggtaggaacatcctgcttattattrcctagtgcatgattgctggtgcatgagctcttccattggtggc

SEQ ID NO: 523386 - DNA, 545 bp, Homo sapiens
cgtaaaacatacaggccggagcttatcaaaggtaagcaggagagccacatccaggaasgggtctttgggacactcctggatggagagaaaaaagaagctgcaactgcagcatctccttttctggaaagtcattgtttatgcttgttacttacttagaaccacatactagctgctgctattgctgctgttgtacttaacacatgtcctcagaatgcttctgctggcatttgccctcctcccttcttctgttcacattttgaaaatgtttgggaacccagaggtgtggctaatacagtggtatttctttgattgtttagcttagccctgtccaatagaagtatagtgcaagcctcaaatgtgagccaaatatgtcattttaagttcttgtagccatatttaaaaaaataaaaagaaataggtgaaattaatttaaaaaatatattttatttaactgaatatattcaaaatatgattttactatgtagtcgttataaacaatgatgaggtagtttacattctcttttttttttttctaaataaaggct

SEQ ID NO: 523387 - DNA, 486 bp, Homo sapiens
cacatccaggaacgggtctttgggacactcctggatggagagaaaaaagaagctgcaactgcagcatctccttttctggaaagtcattgtttatgcttgttacttacttagaaccacatactagctgctgctattgctgctgttgtacttaacacatgtcctcagaatgcttctgctggcatttgccctcctcccttcttctgttcacattttgaaaatgtttgggaacccagaggtgtggctaatacagtggtatttctttgattgtttagcttakccctgtccaatagaagtatagtgcaagcctcaaatgtgagccaaatatgtcattttaagttcttgtagccatatttaaaaaaataaaaagaaataggtgaaattaatttaaaaaatatattttatttaactgaatatattcaaaatatgattttactatgtagtcgttataaacaatgatgaggtagtttacattctcttttttttttt

SEQ ID NO: 523388 - DNA, 545 bp, Homo sapiens
cgtaaaacatacaggccggagcttatcaaaggtaagcaggagagccacatccaggaacgggtctttgggacactcctggatggagagaaaaaagaagctgcaactgcagcatctccttttctggaaagtcattgtttatgcttgttacttacttagaaccacatactagctgctgctattgctgctgttgtacttaacacatgtcctcagaatgcttctgctggcatttgccctcctcccttcttctgttcacattttgaaaatgtttgggaacccagaggtgtggctaatacagtggtatttctttgattgtttagcttagccctgtccaatagaagtatagtgcaagcctcaaatgtgagccaaatatgtcattttaagttcttgtagccatatttaaaaaartaaaaagaaataggtgaaattaatttaaaaaatatattttatttaactgaatatattcaaaatatgattttactatgtagtcgttataaacaatgatgaggtagtttacattctcttttttttttttctaaataaaggct

SEQ ID NO: 523389 - DNA, 545 bp, Homo sapiens
cgtaaaacatacaggccggagcttatcaaaggtaagcaggagagccacatccaggaacgggtctttgggacactcctggatggagagaaaaaagaagctgcaactgcagcatctccttttctggaaagtcattgtttatgcttgttacttacttagaaccacatactagctgctgctattgctgctgttgtacttaacacatgtcctcagaatgcttctgctggcatttgccctcctcccttcttctgttcacattttgaaaatgtttgggaacccagaggtgtggctaatacagtggtatttctttgattgtttagcttagccctgtccaatagaagtatagtgcaagcctcaaatgtgagccaaatatgtcattttaagttcttgtagccatatttaaaaaaataaaaagaaataggtgaaattaatttaaaaaatatattttatttaactgaatatattcaaaatatgattttactatgtartcgttataaacaatgatgaggtagtttacattctcttttttttttttctaaataaaggct

SEQ ID NO: 523390 - DNA, 469 bp, Homo sapiens
ccactgtgaggatgattgccatgtacaagatgtgggcagagtccagcaagtaccttgaatggataattaagttcaaagccatggccccaaacccttgggggcaccacccagactctggagagcagtggagcaggccagtgaaggcctagtgtgagggaggcagtgtggcccactgattagcagggactcagacagacacagagggtggcagggtcaattgactccaacactcactcgctgtgtgtccccaggaagcagtcaccctttctgatcctcagcctmctcatccaatgtatgagagacaacaataccaaccactcctgaagaagatgaggttcaaatatggagagcacctggcatgcagtcagtgcttaataaaagcacatttattccttctctctccacttttgcttataaggtgttaggttttgcagggtaagagctgcgctcactggtccaggaccttggc

SEQ ID NO: 523391 - DNA, 222 bp, Homo sapiens
atgttctataaatatcaattaagtccatttgttctatagtgcagattaagtwccatgtttctttgttgagtttctatctgaaagattcgtccaatgccaaaagaggagtgttaaagtcgatctctcagctttatatacctgggtgcacaagtgctcagcaaccttaggactctaccaggaaagcacacgccttccctgacagtgccctgcctatagcgagtg

SEQ ID NO: 523392 - DNA, 569 bp, Homo sapiens
ggaaaaattctaaacttgattcatgagtaggtcagctcagtatgttagaggaagccaaaaatcgacgatgtttcacaccctcaggagtgaccctgaaagacagcaaccygaggaaatccccccaggagtaaagcttcaggctgtgcacttgctcatccactttgacaaaaaaacaactggaggtaagatttataggccaggtgcagtgactcatacctataatcccagcactttgggaggccaaggtgggagatcacttgagcccaggggtttgagaccaacctgggcaacatgacaaaaccctctctctacaaaatatgaaaaatgagccaggcgaggtggtgtatgcctgtagtcccagctactcgggaggctgaggtgggagaatcacttgagcctgggaagtggaagctgtagtgggtcatgattatgcactagacttcagcctgggtgacagagagatgctgtctcaaaaaaaaaatttacagacacttgggctggggaaaatggtttaattgtttagtcagggacctggaagaaacaagattggaagactggggacaccaagg

SEQ ID NO: 523393 - DNA, 569 bp, Homo sapiens
ggaaaaattctaaacttgattcatgagtaggtcagctcagtatgttagaggaagccaaaaatcgacgatgtttcacaccctcaggagtgaccctgaaagacagcaacccgaggaaatccccccaggagtaaagcttcaggctgtgcacttgctcatccactttgacaaaaaaacaactggaggtaagatttataggccaggtgcagtgactcatacctataatcccagcactttgggaggccaaggtgggagatcacttgagcccaggggtttgagaccaacctgggcaacatgacaaaaccctstctctacaaaatatgaaaaatgagccaggcgaggtggtgtatgcctgtagtcccagctactcgggaggctgaggtgggagaatcacttgagcctgggaagtggaagctgtagtgggtcatgattatgcactagacttcagcctgggtgacagagagatgctgtctcaaaaaaaaaatttacagacacttgggctggggaaaatggtttaattgtttagtcagggacctggaagaaacaagattggaagactggggacaccaagg

SEQ ID NO: 523394 - DNA, 636 bp, Homo sapiens
tgcaggagaacttgctggaaagtggcactaaggagggaatgacttgactgagatatccaggaagacttcctgcaggaggtgacacctaagctcaggctaaaaaaataaataaataactggtacatcaccagatgggcaagggcaggagcacatcctaaactgaaaaaccagcccatgtaaaagcagagaaaaatgaactgacctgatgcatgtaggagaaatcactggtgtcaatgtagtaggaaaattaaatgggagaaggtgaggctggagagacaagggccggacagtggagggcttgaatacgaggctttgagctggactttctcctaagagcygtaggaagccagcagactgaaattaaaaagactcacagtgccaaacgttggtaatggagtgaagcaaccagagctcccatacactacaggtgggagtataaagtgatacagccactttggggaaagttctggcggtttcttacaaaacgaatcatatacctaccctaggagctggcaatcccacttcaagagaaatgaaaacatgtattcacaaaaagacttgtacaagaccgttcatagaaactgtattcagaatagccccaaactggaagcaacccaagtgtccatcaacaggatg

SEQ ID NO: 523395 - DNA, 636 bp, Homo sapiens
tgcaggagaacttgctggaaagtggcactaaggagggaatgacttgactgagatatccaggaagacttcctgcaggaggtgacacctaagctcaggctaaaaaaataaataaataactggtacatcaccagatgggcaagggcaggagcacatcctaaactgaaaaaccagcccatgtaaaagcagagaaaaatgaactgacctgatgcatgtaggagaaatcactggtgtcaatgtagtaggaaaattaaatgggagaaggtgaggctggagagacaagggccggacagtggagggcttgaatacgaggctttgagctggactttctcctaagagctgtaggaagccagcagacygaaattaaaaagactcacagtgccaaacgttggtaatggagtgaagcaaccagagctcccatacactacaggtgggagtataaagtgatacagccactttggggaaagttctggcggtttcttacaaaacgaatcatatacctaccctaggagctggcaatcccacttcaagagaaatgaaaacatgtattcacaaaaagacttgtacaagaccgttcatagaaactgtattcagaatagccccaaactggaagcaacccaagtgtccatcaacaggatg

SEQ ID NO: 523396 - DNA, 548 bp, Homo sapiens
acacatgttctcatttttgttccgcatcatgactgagataatcgcacattgtgactgtatatttatttgtctgtttcttgctctccctccgtctctgtctccccaggacactgtgagccccaggagggcaggggctgatctgtgggctccctgctatatccaaggcacccagctctgtgtccacacagagggtgtgtaaggtgcatttgctgactgactaactgacctgctagccractgcatctgtttgtgccaccagtcttgaattactaaagaaaattagagggttgggagagaaatactgggggactgacccctaaaatcatacaagccctgcaacatagcaaagtcttaggctctagcctgctccagcctctctggccctgccctgggctgctagtggaacctctcccgccctcctgacctggagagactggagatggggtgggggtgggggctgcctcaagaatctatctccaaggatggccatttgagggcagatgaggttaaacctccaagcaccccaaactgaggctcccaacttgagg

SEQ ID NO: 523397 - DNA, 628 bp, Homo sapiens
gcaggtgaagccctcggccaatgaccaggagctgctagtcaagatccccctggacatggtggctggattcaacacgtgagtgacccctccatcaagtacagtaggcttgacaggctcatctgctcgttccccctcccccgcccccaccatgcaggtgtctggaaaagagagttcygagcagagagaagagcaagtgcagaggccctgtggcagcagtgtacttgccttgctcaaagaatggcaaagacaggggaaagagagagggggcatggtaggagatgaggccagcaggcagccgaggccagatcatacaaggcctcttgggagaagataaggacttggcttttgctgagtaggacgggagccagggaggattctgagcagaggagggatatgctgtgctttcacatttttaaagactcctggctgctgtggggaaaaaagactttctgggggtaagagtggagacaggaaggctatcccaaagctactgcaacaattcaggaggagataatgatggcttagaccagggtttggggcagggaggtgctgagaagttgattggattctggatatgttttggaggtaggtggggacaccaggatatcccggggaactgaatatgcat

SEQ ID NO: 523398 - DNA, 616 bp, Homo sapiens
ctgcaggtgaagccctcggccaatgaccaggagctgctagtcaagatccccctggacatggtggctggattcaacacgtgagtgacccctccatcaagtacagtaggcttgacaggctcatctgctcgttccccctcccccgcccccaccatgcaggtgtctggaaaagagagttccgagcagagagaagagcaagtgcagaggccctgtggcagcagtgtacttgccttgctcaaagaatggcaaagacaggggaaagagagagggggcatggtaggagatgaggccagcaggcagccgaggccagatcatacaaggcctcttgggagaagataaggacttggcttttgctgagtaggacgggagccagggaggattctgagcagaggagggatatgctgtgctttcacatttttaaagaytcctggctgctgtggggaaaaaagactttctgggggtaagagtggagacaggaaggctatcccaaagctactgcaacaattcaggaggagataatgatggcttagaccagggtttggggcagggaggtgctgagaagttgattggattctggatatgttttggaggtaggtggggacaccaggatatcccgggg

SEQ ID NO: 523399 - DNA, 442 bp, Homo sapiens
gagcttatcaagtcaaccaagaagaaaacctaggccctggtcacgtttgtgctatgcctgtaattagctgacacgaggtaaatgtccaaagtcgaccttcccttccatcactgtatttatactatcaattttatttgggaatgtcatggtctgggaagactcagccactatttcgaaggcaatgcctgcttctacctaggtcccctttaaaaaaacacagaaattgccgaacaaattctatattaagaccaggcatacacggagtatcattttcgtttgatgcaaagtcagttggaaatacatttaactaacagttaaakagtgtcttgcatcgcttccctgaagcagtggtttttcattacatatttaattacaatcaaactgaacgacttttattaaaaaaatcacagtggtattaaaagaagcctggcgcacaaataat

SEQ ID NO: 523400 - DNA, 592 bp, Homo sapiens
ctggatgcaagatcctctggtcggattttatgtgtgcccagcctgtgagccttaggaaggaggtcagttggtttctttttcttggccaactagattggaaacaaaacaaaacaaaataaaatgctgatatgctgagttatgacaaactgagacacatgtcatgagaggaaaaatgacagctttactgctgcagtgattacaaaaaacacagcaaattaaccaccaatatggctttgtatgtagagtgaaacaactttattgcactgtaaattggagacctagaacatattttaggagtgtcacacctgaaaagctgacgattttccccaaattgctattaatatttttttatttttattagttttattttccacccaactgaaagctgaaactagaattatttttcctccctagaaaaattttattttgtagagttggacattttctttattacrttgtctctgtaagagttacttagctataataaaacagtcatatttataacttaattaaatctggccatttaaacagaaatacttgtaagtaataccaataaaataaaaaagtgaatatcatatttgataagttttgc

SEQ ID NO: 523401 - DNA, 650 bp, Homo sapiens
gtcccagtcctcaggagacagaatgtgatttatgcaagtgttcttgctcaatccacttgaggaagtgagcaaggtcacatgatacaaacatggctaccaaggatccatccctgtggattgcarcccattttcagagttaagagaacatataactcctagagttatgtaagttgccagtgtgatagttattaagcaatgacttctcagctctcaatccctcttctatactctgttctgtgaatctggaggctgggatgctacaaattccatagctcttggataggtaggcataaaaggttgtctaaaacagaattttagctaatgccatcctgtccaagcttggctgtgagagcaaggttggtggtccagatacctacactaagaatggtctatggtcccttgaaatggtatttgaagtacctggactacaacactgtacctgggctatgattccaagtgtctgtctactggctaatatggatcaatggaatatgagtaggaaatatgtaaaaaaaaatcaaataaatctataaatatgaatttttaaaataatctcaaagtgtctctaatgtgtgtatatttaaagaattttatttcagaaaactcactctgttgagttcattttgaagagtctaaaggaagtggatgga

SEQ ID NO: 523402 - DNA, 527 bp, Homo sapiens
tgtcatgtaccaggcactgtactgtgtgttccatgtgtattgtttcatgtaatcctcatagtagcctttgaagaggtactgtcttacgtttgagggaactggggcttagacagatcatagaacttgacaacatgtagtagagtggggattcagacacatttttsgcagcctgaggaatgggaacttgtgaaggttgttctggtcctttgaaagttgtgtgccccattgtttgcctttatagcagtcccaccctgtcctcaacatgctaggccatagctgttaacattgaagttaacttctgaagcagcacatttgaccaaaacagtgtgcggtcacctttttctttagaaggaataaaagtagtcacccttgaaattcattaaagaggtatcgtgttgggactggcatgctgtctttcactaactgctgcagccagcttctctccaatgcccagtgatagaatgatacctttttcattttctctttttttagagacagggacatactctgtctcccaagctggagta

SEQ ID NO: 523403 - DNA, 569 bp, Homo sapiens
tacagtatatttgagtgctcataaagctttaaaaagaagtggattaagtaatcaatctccctagacagataaaaaagcacatgatattttggtatttcccaactttyattatttgactttcatgttctagcaaataactttcaacaatttgtcaacgtatttgcagtcatttatattttacattattaattccattatttatgcatgtgttgaatagactttatagagtagatgttgacacactcgattttgtaacaaagtgaaaaattactttgatacgtatttctttttttctgacaaaattctgaagtgcttttccatctcttccaaaacaacatatagaaaacgtgtttttttctcattattaaatatatgactcggaatacagcaaaactaattggctataaagcaaacctttaaaagagaagagtttgatgaaaaatataagcattcttagttatacataagatcccacagagccaacttttttccagatttatgtcccaattttaaactttaattcctactgtctaagcattgtggctaaaagtatgagataattaattact

SEQ ID NO: 523404 - DNA, 422 bp, Homo sapiens
ataatagtattatgtttatgttaagaatcttgatctcttggtgatacatacctaagtaattgcatttgaaatgctaggtctcggatttgccttaaaagaattcagttagaatggcgtgrgtatagaccagtggttccttactgggggctatttcccccacaaaggcatttagcaatgcttggagatacttttggtcatcaaaattgggaatttgctacagacatctaataattagaggctagggatattgttaaatgtcctacagtgcacatgacagacccacataacagagaattgtatagcccaaaatgtcattagtgtgacgttgagaaaatatatatgcagcatatgttttgtaaaaaagaagcccttaccagtctctgtgacaaactctctactctgtgtagagcactgtttttcca

SEQ ID NO: 523405 - DNA, 589 bp, Homo sapiens
agcctgagaatggaactagcccaaaggaaagctgagcaaagacaattttgaaggttgatttcccgatggcattatttgcatccctggatccagcgtgtgtgaagctggcgcacccccgggcttctcagttaaacacttcctccctttcaggcttcagcagctttgattgggcttctgccatttctgattattrcagggacttagaggaaggaaatggctttgcccagatcacagggctcatgaaagtgcccaggctggaatgcaaatgcccacctacttcccctcacatcactctccctcacctgctttaagtgcatgcccagtcccagggagatcttcccatcactctttggggattctgcctcactgaaagctcttgaagctgcttcaaagtggagtatcatggtgtttcccgggagggtggttgccgggtgctgagaaagactggcctgcagtgctcttgcttttgcacttccgtcccccaccttgatcctggggtgcacgggggcaggaaggagaggagtgtgggagttgatggggagatgagaggagacatctacccatggcctctgcttctgggaggacctgt

SEQ ID NO: 523406 - DNA, 592 bp, Homo sapiens
tcataagcaaagaagactttgcttgccaagggccctattgaaagccctcgatgggtacaggctgttatctcaccaacacagactctgatccaaggtgaccaggagaattttagaatgatctaggcaaggaaattgccgtgcttccaaagcaacctgctcctcaggctccctgtggggctgtctgccccagcttgccacacctctgcaggttygtggctttgtttcctgtatggggtctgaaggtgagcagtacctttgtttcctgtatggggtctgttctgtgttcagaagcaggactcagggctgctggagctggagctggagcctctgagtcctcagggttctccacagctctcctgaccagctctgctagagcgatgtctctggcagatgccttttccctgttgccctgtggtctggcctttctgctgtaggttaaagaaatcacagtgtgggcaggtggcctagtctgtaagtgtgtcctctagtgacctttgttttacctctagccatgcttgctgtttgtcctttcttgggattacatagttggccaggccaaaacatcttagctcacatgaaatccaagttcaca

SEQ ID NO: 523407 - DNA, 633 bp, Homo sapiens
taggtaggccacctaattattcagcattcaacaaagatttattgagcatctactctgtgccaggcgttatggtaggtattggggaaatacctagtggttttcaataacacataatccctgtcttcatgggagtcgtatcttcattattaatacataattacaaatataaatgtaagattgaaaatctggtaaatgtcatggaagaagtggcactgtaggggttaaacatgggcgagggtgcctgggtttgaatgccagttttgtgggattcttgaatattcaacttcttcattcccttttctataaaatgagagtacayacatttttgagtttttatgtggattataaatgatgattcaatccatgcttagagccagcctgcatcatagtaaatagtcactaaattagtaaagtcagggtacatgatgctgtgtattccctaattctgtatatttgaagtgggatgttgctttctgtagagactttggagtgaattggctttttttccattttaattataaaaattatttgcttcatggtaaaatattacataatggttaaatgttaggttaaaatcaaagaccttaccctttaaaaatctccttttagtactggtcccctagagggagctag

SEQ ID NO: 523408 - DNA, 553 bp, Homo sapiens
tggactatgtatcatttcttaccttcaggaacaagaggtcattttatagtaatggcgtgaaccagcaactttattgtttctcctaataggtcctcctggaggatctgttcctctgggctgttggcatttaatggctgagtgttttcctccagcgttttgcatatcatgtgagatacttcattatcttctggcagtgcccgtggctgattttcttcyggcctttccatgaggggaaggaagaatcgcacaacctgacacttctctaagtgatcagtgtttaatgatgacaagagatatccagaaagtagatttattattgaatgttcctatctatttttagtcaagtgcgctatcttttactactccccaaggatgactcataaaccatgtcttagtaggcaaagaggagttggggagtaggagggactgaataattctctcgggactttaaatcagtgtggacacatcatctgcttttcactccttcatcacattaatctggactatccactttctctgtttaagagttgtattatccttaaataggtcattt

SEQ ID NO: 523409 - DNA, 612 bp, Homo sapiens
tctgaggagccgccagccacctcacctgcaaggagaagrgagcctgctcaagaacccagccacactgggaacagcccagatgatgggcccagagcaggagcctgactcacgggggcaacatggggtccctgcaccctgcagcccactgtgcctgaacctggagttccagtcatgtgagcaacactttccgttccgtctttgacacaagcacttctgagttagtttttaatttccaatttaagaacccatttttgtatttaaaactcttctagaactcccctgggcaggtctatagttttcagcaaccttaaggggagaaaggaatcactgccacctaaatttagtagctttgcagcataattagaaaccaaaatcccggccagtaattctgcatctcctatttggtggtggtggaggaagccatgttttagaaagcataagtggtggactttacaagttgcttttattttctgagatagaaataaacccaggagtagtgactcacctccctctagcctggctacaattttccacatccaattcaaatattgtctttaatttttaatttggatctgactgatgcaaactaagtgcatcatctctgccaccagc

SEQ ID NO: 523410 - DNA, 509 bp, Homo sapiens
cttttttgagaactgccatcttgttctcaagatgggccatatactagtctctatttctatttctccagctcttgtccatgccacccagacaactatgatggcctctccttagttattaccctgtagattagttttgcattattggataaatggaatcctatagttttcgtttggaataatttagtcttcggaatctcttacttaacatgatgcttgtggaattcaccatgtagttgcatacagcaatattttatttattcttttgctgaatattattccattacttttgccagtttgaatggatttctttcttacrgtcaagtaggccatgactaagggagataatgaagcatggaattgtcttttccagagaaaccacaggcatggaataagaattccctgaggaggccttttctgtcctttcttcatcaagctgcgacattattttcatattcagagaacttcagagcaacaccgagtttcgctgagtgggttcagagttccatatg

SEQ ID NO: 523411 - DNA, 632 bp, Homo sapiens
gtaggttatcaatatacagttgaatgtgagaatgtatgcacatctcatattccttggcaccatcactactgggtctctgagatgaaagagggtcagaaatgtcataggcctcttcagctcactttcttgacccaacrtgacccaaaggtgttgtatcatcaagtgtgagaaggaattcactcccttgcccacttctcccaacacttccttcccagagacagctttagacattgttggcaagagattgtctataagcaggtcagaagaaagggtcactcctgtcttaggaaaggtctgtggtatcttcccctcaacaaggagcaagaccccattaagtgtcaattgaagcacagataatgtatgagtattaaagaatagactcagagtcatatgttgttccatagggaaaatgcatatactttatatatttctctcatggttatttcctaaggaagcaactataaagtacacacatatacatactagaaactgcatacttctcaggtgataactatatatttgtatcacttttatgtatttctctcatggttatttcctaagtaggcaactataaagtgtgcacatacacatactagaaattgcatacttctcagatgattaatatatatttg

SEQ ID NO: 523412 - DNA, 632 bp, Homo sapiens
gtaggttatcaatatacagttgaatgtgagaatgtatgcacatctcatattccttggcaccatcactactgggtctctgagatgaaagagggtcagaaatgtcataggcctcttcagctcactttcttgacccaacatgacccaaaggtgttgtatcatcaagtgtgagaaggaattcactcccttgcccacttctcccaacacttccttcccagagacagctttagacattgttggcaagagattgtctataagcaggtcagaagaaagggtcactcctgtcttaggaaaggtctgtggtatcttcccctcaacaaggagcaagaccccatyaagtgtcaattgaagcacagataatgtatgagtattaaagaatagactcagagtcatatgttgttccatagggaaaatgcatatactttatatatttctctcatggttatttcctaaggaagcaactataaagtacacacatatacatactagaaactgcatacttctcaggtgataactatatatttgtatcacttttatgtatttctctcatggttatttcctaagtaggcaactataaagtgtgcacatacacatactagaaattgcatacttctcagatgattaatatatatttg

SEQ ID NO: 523413 - DNA, 628 bp, Homo sapiens
tcaatacatagttttgtgccaaatctacaataatcttcccaaaagaaagactcttcagtgttctggatttttcgggacttatcttattttcttgtgcaacatcttaacacaaactagaataaagatgacatataatcatctgcattcatgaataaaaagaatgatctaattgtactaattagccaaactgcaacccacaaaaatgcaccaagtctttatcaacatccacctctggttacagaatgtatcatgatgccttattagcagcagcccaatggctccctggagcaccactacttctgtcaatacatgctaaagcagcacagaaacatctacgaagatagggaacgttgggtaggaaagaccaggactgcaaatatcttgccatcccagccttggaagggacctcaaggccatgtagttcagcctgcatcccctcagagtgaagcattctgtgttccccaaaaggcaggagaaactttgcctgtggtagtgtgggttgcaacccttcaaggatgcttctgagaatcatgttgttaagatagctactgagcaaaaggctgggattctcaaagtcactttgagcrcatgtaataggaggcagagatgaggtcatctccctaaaggt

SEQ ID NO: 523414 - DNA, 648 bp, Homo sapiens
aagcaggtataatgtattattttgggttgggtatgtgtggatctttctggatggtctgttttttcaaaccctcatgtagaagttaccttctctacccaatagtcaacagaagccaagactcatgaggttcattttatgctgtgaacccatgaaattgtatgacgttaagggttgctctggccctgttcagaagctccrccaatggcaaaatacctttaacaatatgatactgtatcctgaaataaagacctgcaaaatacgatttgacttctgtgctctgtgaaaccatgctcagtgctttctctctcctagactcgtgcctctcaaacttggatgtgcataggaatcacctggggtctttttaagatacagattatgatgcaggaagtctgggtggagcttgagactctgtatttctaacaagctactcagggatgcaaactctgttcttccctggactacactttgaatagtgaggttttggctgtttggctggatctgatgcagggccctgatcccattaccatggggaaggcaagagtctctggcagagtgacactaaaccagtgcccattttataggtaatttcatgtgtgtgtggtaggaacagagggaggagatggaaaatttaagagagtggtttcaacc

SEQ ID NO: 523415 - DNA, 648 bp, Homo sapiens
aagcaggtataatgtattattttgggttgggtatgtgtggatctttctggatggtctgttttttcaaaccctcatgtagaagttaccttctctacccaatagtcaacagaagccaagactcatgaggttcattttatgctgtgaacccatgaaattgtatgacgttaagggttgctctggccctgttcagaagctccaccratggcaaaatacctttaacaatatgatactgtatcctgaaataaagacctgcaaaatacgatttgacttctgtgctctgtgaaaccatgctcagtgctttctctctcctagactcgtgcctctcaaacttggatgtgcataggaatcacctggggtctttttaagatacagattatgatgcaggaagtctgggtggagcttgagactctgtatttctaacaagctactcagggatgcaaactctgttcttccctggactacactttgaatagtgaggttttggctgtttggctggatctgatgcagggccctgatcccattaccatggggaaggcaagagtctctggcagagtgacactaaaccagtgcccattttataggtaatttcatgtgtgtgtggtaggaacagagggaggagatggaaaatttaagagagtggtttcaacc

SEQ ID NO: 523416 - DNA, 513 bp, Homo sapiens
tgaaacacataagggaaagagaggagaccatatgtgaaaaattaccaactactttgccagtgattacctaacaatgaatgagattcacctttccaatctgcccacacctccaatgtctctttgaggttgagaacataaatcgtaacctctgtgtgaggcaatcttactttcctaaaraaaaaaaagaccgctgttaatgacagtggtgctcgtgtacataaagattacaaaagctggtcttggaagggacctttgtataaactactccaactatctgattttgtagacaacaaaacagactaagaaacttgtttcttactttcgtgaatggggggctttgaatattcacatgcaagtttttgtctgaatacctgttttcaattcttttgaagtaggattgctctgccatatatgctaattctatgtttaacttattgaggaacctccagattttttctacagtgggtgtaccatttacatgccctccagcaatgtatgagggtttcgattctc

SEQ ID NO: 523417 - DNA, 529 bp, Homo sapiens
gaaaatgagggagaatcataaatggcagctgtattattagcttgtcctggaaaggtcatacttcagttcactctaatagcgaactctaatagtctgacccaaatgagttttcctgaggatttgagatctctaaaaataataatagatgaagaaagacacaaaatttcacattaaatatgatgtctatggggctcaagagaaaagctactggtgaattaaattccttatgtgatctctccttaaggatgtctgttttacttaaccttactttcctgattttaaattgaggcctttcttcaaaatactgctttttctaaattctatttttatgcattcttcttcatgatgaccttgtgagtggaaaaacaactccaactattttttctctgctctcacaccaatcaacacagaagacatctgtgaccaaatgtgtatgggtttttctccacacaccaagcaagcartcaattctgtagcagacgccaacggggtatcctccaatttaattttgacactgtctacttgaaga

SEQ ID NO: 523418 - DNA, 641 bp, Homo sapiens
ctgggaacttctgtctcctctgtcaggcattcttatatattttaaacctgaagctggtgtaatcaccaatcatttttagtgtttctgtgttccacacacattctaatcttgaaattctcaacacyaccataattagtaccacattcagactatgagactgggataaactggcgttatttcagatatctcttaaattgctctctaaccaacaagactcttagaacgtttcccaaaaggtagaaaagccctttgtgcttagcccacaacccagatatgggaaggaaactacttactcctagctaatagctctatcctccacctctcatcccattctacgggcagttggggaatctgcaaagtccatgctttgaacactgaattaccagctctatccctcctcctatttccaccctcactgctcccaattggttgggttggatccagcctggaacttcaaaccttttccccaaaagctcatgatccatcttttctcaagccagagaaggatcgtttgcatgggtgaagttctccaatggccttaattcttagtgctcacaatagtgaaaggaacttgggtgctcttgttaagggaagattctgagcttatcttggagtttcccctagtcttcttgcagatgaag

SEQ ID NO: 523419 - DNA, 527 bp, Homo sapiens
aactaagtattttaataggaaaagtaaaattgctagttaaaaatgaaaggatatatcaagaaagtaaatgaagcagagaaaaacagataagaatctactctgtattcaagagagaaacttttttattattcagacaagaaaacgggctctggtgcaactgctgccaattgtgagcagaattaaaaataggttttaaataatctatatatttatatataaaacacccttagggcattgtttgagaaaatgaagtaaagatttaaaatgtcttctctttggattgtgtttctttggttgctattctttgccagaactggacctcagggtggctgactgttgctatttttcaggttatacragggtcttttggtatccatcataggcggctggttccaggacccccatggatactaaagtctgaggatgctcaagtcctacagtctaccctgcggagccagtggatacagaaggtgaattccatgtgagactcacgaaggcagttgctcttattcaatagtgcttgagga

SEQ ID NO: 523420 - DNA, 371 bp, Homo sapiens
ctccctctccatgagctcccaggattttctagttccctggagtccctttttaggtcttctggcaacaaagctggaattttagttacttggttctgtgtgtacttcagcaactgcatctgcatcgagtgccgagggataaaagtaacagacaaaaaaaaaaaatcaccagcagtttcagcactttaagttccagtcctcttctatgagtcacttttcagagtcctcacagctgccctgtgccttatgttcaggttttatagcgacatccgstgagcaagatgagtggcatgtgcttatcccattatacgtgggaccaggacttcttattatttagatattcacatgaccagtgccaaatggatatatcggct

SEQ ID NO: 523421 - DNA, 636 bp, Homo sapiens
cctggtctccccttcgtccttcctcatcaattcccatccaccagaagcttggatttggcataaaatattgatcccctaattctgaatctcatcctacagaccttgtttcttgcacaagctgagttcaccataaatacagagcaggggagttcctttgaaagtggcagattgttaagaactgctttggaaagctgatcataactcttgcctcttgttacctagattaactttcctgcatggtttgcgggttctctatggctatttctctctttcttacagtttaataaaggattgggttgagccatataaaatgatcatttttgcaggaaraaaataactggatatcggcaattttatatgatgtaacctaatacattgcatggcattgtcacattgtattttatttaacccaggcaagaaatgtgctttgcacccttgagtatatgcaagaacagctaccaaaaacagttattctgaaaatggcaagatgtcttaaaaaggatagaagcccttgcttcttggccttattcagggaccttgctgctggtgtgtagttgaacatgagagcaaagcagggtctactgattccaaagtctgtgctgtcagaccatggtggctagacattgaagtaaccag

SEQ ID NO: 523422 - DNA, 504 bp, Homo sapiens
gacaggctgcaggggcaaattgcacattcttccttctgatttttcatttatttcctggtgatatatttcatcttggcaaaaagcaggggttccgagctcacgcagagaggcaggcatgccatagctggactgggcatcagaaactctcstgcactctgtgaacgactaaaggaagcgtagcaagcaatgcccagtgctgtgatttgtctattttgggaggttgcagggcctgaaggtgcttcgaggtcatcttcatgtcttcattctccattgatgctagtgaccaccacatctctacctctccagcccaaacctcttccctgaactctagaccagcactgtccccatagaatctttgtgataatgaaaatgttcattctcctctaatactgcagccactggccacaggtggctactgagcccttgaaatgtggcaagtgcaactgtgggactgaatgtgtcattttatataatattaattcatttaaatgtaaatctaaacag

SEQ ID NO: 523423 - DNA, 574 bp, Homo sapiens
atcacatcttaaagcacatccatgttgctgtgtgtacattgggtccattgcatctcagcagtctagggggttcatctcccagagatggctggccggggggtctccaggacccacaccacatgcagatatgtgatgcacattctcagacacatctacctctggaagtgagtatggtttattgggcatagaggcccagaagtcagagctgctagaatgccagaaaatctactagatcctacaactccctgggcagagcccaagaactcctacatccttacatgccctcccaatccctggcaataactgccttttaaattcttgtcagttattgtttcatttgcatatctctgactactaatgaatttaacaactttcatatgtttatcagctctttaggtttccttgtctgtaaatttgcctgttcgtatctttcatccattttcccattggggttcctctcttttttttgtttatgtgccaggttcttgataaaatccacatattactcccctgttgrttttagatattataaatatcttttctcaagttatcattgttctgttaattttgtcga

SEQ ID NO: 523424 - DNA, 604 bp, Homo sapiens
aaagaaataggtgggttccaggggggccaggccctgctgtgggactcctgcagcctgtttcccagagtaytgaatttgggtcaatgctctgatctgggagagatgagggcaaacgttgaatatcctggaagatgattctctgtgctttctgaatttattctgattgggatcctttggttagagatgggggtattcagttcactgtcttctaataatgacaacattgagcacttatggggtacttcctggggacctagcactagaaccaagattcccacatggattgtctcatggaatacttccaagaactttaggaagatatttgttttttatcatcatccccatttgatgaatgaggaagtggaggatcagagccttaaggtgactttctcaaggtgaccctatggtaagggatggggctgggtttttactccaactttttaatatgaaaattatcaagtatacagaagagttggagggacagcgctgtgaatgcctgtgtgctcaccacctacatttgacagccgtatttgatgtgtgtgtgtgcgtgcgcactctttgaatgtatgttacaggcatcatgacagttcatccctaaatactt

SEQ ID NO: 523425 - DNA, 581 bp, Homo sapiens
tgctcatggctcaggaaagctgcccaaggcggaaggcgtttcatctgtgcatgctccaccttggactacagcctagggaccctgaaagcaccctgcctcaggtttcacaccctgggtgacactgcgattgctgagttccagcatcgagggacaccctgatctatgaggaatgaggatatatacagcctgggctgttctggacagctccttctaatctcaggacattggatttgtggcatattctacagtgarccagggcaccagcactgatcccctctcccctcctcccagggaatatttttggttgtctattctcattcattctacttctgaaactgttcagaaccacaggtcaggttctgagaacaccatgagaggaggtgggagagctgtgttagccaaggccatgtgaggctctgtcctcctgcagtaaacaaataagcccatcttattgacacacacacacactcactacaccctctccttagggacacacacacaaagcctttttctttgtaataattacagcaaaaataccacggctggtgctcattggcctggcttgtgtcacatgctcatcc

SEQ ID NO: 523426 - DNA, 437 bp, Homo sapiens
tgctgctttgcagatgcttatgatttgtgcatttaaaacccgactagaaaactctcaggggcacctcccccattacctagcaagcttcatgggagaaatgtgtctccctggcacaaatgcccagagatctgagtaagagatagtattagtccgttttcacactgctgataaacacatacctgagactgggaaatttacgaaagaaagaggttaaatggactcccagtttcacgtggctggggaggcctcacaatcacggtggaaggtgaaaggcaggtctcacacggtggcagacaagataagagagattgtgcagggaaactcccctttataaaaccatcagatctcatgagacttattcactatcacgagaatagcataggaaagayctacccccatgattcaattacctcccaccaggttcctcccacaacaca

SEQ ID NO: 523427 - DNA, 484 bp, Homo sapiens
ctgctgcggggggctgtgccttgagaggtgagagtggggatgaaggagaggaggagcaggagagagcagttctcgggtggtaaatgccagggctctttgccagagggcgggctcaggaatgaagaggaggccccaggagccagatggcttgagctgccgcatctatttttaaagtactttttaattgaggtctagagtaaaattaattaatcgtatttgtacagcttgatgaatttttccatatgtgtacacctgtgtaaccatctcccagaaccccgggagactcctgcacyaccattccctggcaatgacccctcccaagaaaaccaccattctgactgcaatcacccatcactatcagtgagtttagcctgttcttgaatctcatacaaatggaaccatgttctgggcactcttttgtttttagctttttttgttcaatgtcatgtttttgagattcatccacgtcatggcagcactgcct

SEQ ID NO: 523428 - DNA, 427 bp, Homo sapiens
catgagtcagtgttctgagttcaggggaaagtaaacagcttgggtggctggacctgtaagcagatggtggcagaccaggtggggtcagcgtggtggaagtcgaaagaaatgaggctcaaaagaatcstgaaggaccttgagtggtaacagaaatggggagccactgaaggagcggcggagtgacgatgagatttaaacaacgcactcgcgccctctttggaaagctactaacccggcaactatgtgtggttctcccacaggggcagggtgttcccctgatatcagtgactaccttaagaagaggcggttacagcacattaccaaatcctcagaaatcggaatggatttatgacactccagtgtctccaggaaaggccagcgtcagaaacacgcctctcaccagctttgcggaagaatcaaggcccca

SEQ ID NO: 523429 - DNA, 569 bp, Homo sapiens
tacggggaataaaggtccaagttaagtggcaacacaatcagaaaagtcctctttaaagtgggagactggtctggctttagaccacagagacaatccaaccacagagacagtccaaccacagagacagtccaaccacagagacaatccaaccacatagacagtccaatacaaagcatgggctttggttgagttctgattttacaaaccagctataagatgtcatggacaataggagaaatctgaatgtggactaaatattagatactgacaatgctgttaattttcttaggagtgatcatggttctagttatataggagaatatccttatttaggaaatgcattctattatagtgcttaaggttgaagcatcatgatgtttgcaacgtattttcaagtgttcactaaaaaagcagatgcagcccttctgactaaatgggaaaaactgctgaacgtaggcactgtatagacaggtatgccatcaactaccaattccgcatttttatcggtttaggtttttttaacgaaggttggaaaaaagctgggaacagcagacascaagccagaacag

SEQ ID NO: 523430 - DNA, 441 bp, Homo sapiens
ctccagcctgggcgacagagtaagactccgtctcaaaaaatgataataataataattagttagaattcagagggtttttgaaatgatgaaaaaggaaaaactatcaaaactttagaaattgggatgcaaaaaattaaaamcaatataaataacatacaggactgggagaaaatggttatagcatatatacagatgttagacattgagttaacatccttaatctataaagagaactcatatgggaaaaagatgagtccaaactcgagaaaaaaggagccaaaggacagggggctgcagaagagaaaaatggtcaggaaatgtaagaaaaggtggccagccttgctgcagacccaagaaatgaatatggggacctggttttgttaatcagatttcaggagtcttaaagatttatattatctactattgatagagatttcggga

SEQ ID NO: 523431 - DNA, 441 bp, Homo sapiens
ctccagcctgggcgacagagtaagactccgtctcaaaaaatgataataataataattagttagaattcagagggtttttgaaatgatgaaaaaggaaaaactatcaaaactttagaaattgggatgcaaaaaattaaaaacaatataaataacatacaggactgggagaaaatggttatagcatatatacagatgttagacattgagttaacatccttaatctataaagagaactcatatgggaaaaagatgagtccaaactcgagaaaaaaggagccaaaggacagggggctgcagaagagaaaaatggtcaggaaatgtaagaaamggtggccagccttgctgcagacccaagaaatgaatatggggacctggttttgttaatcagatttcaggagtcttaaagatttatattatctactattgatagagatttcggga

SEQ ID NO: 523432 - DNA, 566 bp, Homo sapiens
tcaattcttgccctaattccttttccctcccaacctgggggtcaaaacttgggtgataaaactaatcactaataactagagtggctgcagattccccagccctcccagtattatccctgcascagaatatttggtgaatttgtgggcaattcatgaaattcttttttttcttttttctttaagacagtctcactctcgcccaggctggagtgcagcggtgcgatctccactctactgcagcctccacctcccgggttcaaatgattcttgtgcctcagcctcccaagtagctgggattataggcatgcaccaccacgctcggccaatttttgtattttttgtagagatggggcttcgccatgttagccaggcctggcctcaaatgatctgcctgcctcagcctcccaaagttctgggattacagacctgagctgtcttgcccagccaattcatgaaattctgctttggtcaaaagagctatttttatgagtaatcttcatgagattacagcctgaaacttcccgccaagcctttaatgttttgaacattgtaagtctggtgttcag

SEQ ID NO: 523433 - DNA, 552 bp, Homo sapiens
ttacttatccagatttgcaatctttcaggacccaccaaggccagtttctttttcagactttgcactaggctatgagggcagggggtggcgggcagggcaacgtcccataccgtctaaatcgcgcccatacgctgccacctgggaaagggggcagaaaggggcggcggtgctctaaagtgaggcggagctggagggctctgaggaaatgccccggggcaccccctccccaaggcagcctggagtggacgcgcggctgccaggcttcccgcggaggacgcgaccccggcggtgcccgaggctggcgcgccctctcgcggccacgccgggaacgccgccggctgagaccctcgcgtcctcggagaagcctgtggttggttccagcctaggcccggcgggcagcagcccacgctgggtgtttgagggmagtgaggaaaaggacctgtctgcagagatcgtctctgctgcagtccttctgcagtccacgctggggaatgccctggtcagcgcgacagagtcctccgctctccccggcatcccctgtccaagcatttc

SEQ ID NO: 523434 - DNA, 552 bp, Homo sapiens
ttacttatccagatttgcaatctttcaggacccaccaaggccagtttctttttcagactttgcactaggctatgagggcagggggtggcgggcagggcaacgtcccataccgtctaaatcgcgcccatacgctgccacctgggaaagggggcagaaaggggcggcggtgctctaaagtgaggcggagctggagggctctgaggaaatgccccggggcaccccctccccaaggcagcctggagtggacgcgcggctgccaggcttcccgcggaggacgcgaccccggcggtgcccgaggctggcgcgccctctcgcggccacgccgggaacgccgccggctgagaccctcgcgtcctcggagaagcctgtggttggttccagcctaggcccggcgggcagcagcccacgctgggtgtttgagggcrgtgaggaaaaggacctgtctgcagagatcgtctctgctgcagtccttctgcagtccacgctggggaatgccctggtcagcgcgacagagtcctccgctctccccggcatcccctgtccaagcatttc

SEQ ID NO: 523435 - DNA, 640 bp, Homo sapiens
caaattgaagtctactttgtgtacattggcataaaatgaggtccattataaacatatattttagtaaattcaatgtgatgtagatgcaggttgaatacagcagccagttacttaaattgaatgggctgaatttcccagaagaaaatmtgaaatgaacatgaaatgctgttactctgcttcaactaaccagacactctttagacgaaagtgtgccaggtggaatatcatttcatatagtgttttcagatatccaactgatcttccacatttgcccagccctgccctggtaagcaattacacaaaaatgaaacacccaatgtttgcttattaatttatgccacggacagctatcagttgcatttaataggcttctagtccaggaatcagccaagaacaagactcttgagcataaaaggataaatttaaaacacagacttcttttaagaaggcagatttgttatggcacacatatatatgtgatgtctgtgtattttacactgtaaagacatacatcaaatgtagtagtgattatctgtggtataattgttaaaattatagaatagcataaataataattttatctacactcatgtatccaccatcaagcttaaaaatgtaacaccttaaagcaatgcagttg

SEQ ID NO: 523436 - DNA, 613 bp, Homo sapiens
acaaattgaagtctactttgtgtacattggcataaaatgaggtccattataaacatatattttagtaaattcaatgtgatgtagatgcaggttgaatacagcagccagttacttaaattgaatgggctgaatttcccagaagaaaatctgaaatgaacatgaaatgctgttactctgcttcaactaaccagacactctttagacgaaagtgtgccaggtggaatatcatttcatatagtgttttcagatatccaactgatcttccacatttgcccagccctgccctggtaagcaattacacaaaaatgaaacacccaatgtttgcttattaatttatgccacggacagctatcagttgcatttaataggcttctagtccaggaatcagccaagaacaagactcttgagcataaaaggataaatttaaaacacagacttcttttaagaaggcagatttgttatggcacacatatatatgtgatgtctgtgtattttacactgtaaagacatacatcaaatgtagtagtgattatctgtggtataattgttaaaattatagaatagcataaataataattttatstacactcatgtatccaccatcaagcttaaa

SEQ ID NO: 523437 - DNA, 638 bp, Homo sapiens
tcataattgttatatcataataaaaggcatagcaataatgataataatttatattgttattattttgagtgaatacttaccatatttatcaattatrtatgagatatacattgtttcactatttaacttccctgtgatcgtgaggttaaattctgtctttaattataattgattttttttcttagaagttaataaagtagcagtatatcttacataacagtgtatcttataattggtaacatcttagatgggatgaaataaagtgtttagcatcaccaatgtattttcttaccaatctctttgctcattgttgcttcttgcatcccactccttccaaagttcatttttcttcttgctgaaatatattctctaattctcacagtgaggatccatgagttccttattttctgactccttgaatgtctgagaatgtctttattttacactcacgattgaatgatgctttggctgggaatagaattctatgatcacaatttttcccttaccattttacagatagttcttcatttcctctgacatctgtggcttctgattagaagcctgctgtcacctgcctgtgatttatttgtccattatctgtctttcctctctgtcttattaatgttttttctctttat

SEQ ID NO: 523438 - DNA, 638 bp, Homo sapiens
tcataattgttatatcataataaaaggcatagcaataatgataataatttatattgttattattttgagtgaatacttaccatatttatcaattatatatgagatatacattgtttcactatttaacttccctgtgatcgtgaggttaaattctgtctttaattataattgattttttttcttagaagttaataaagtagcagtatatcttacataacagtgtatcttataattggtaacatcttagatgggatgaaataaagtgtttagcatcaccaatgtattttcttaccaatctctttgctcattgttgcttcttgcatcccactccttccaaagttcatttttcttsttgctgaaatatattctctaattctcacagtgaggatccatgagttccttattttctgactccttgaatgtctgagaatgtctttattttacactcacgattgaatgatgctttggctgggaatagaattctatgatcacaatttttcccttaccattttacagatagttcttcatttcctctgacatctgtggcttctgattagaagcctgctgtcacctgcctgtgatttatttgtccattatctgtctttcctctctgtcttattaatgttttttctctttat

SEQ ID NO: 523439 - DNA, 554 bp, Homo sapiens
ccttatgttaaaccctgcctaggtcagtgacatggaaccgatgttggtttaggtttcttgagacagggtcttgctctgtcrctgagactggagtgccacggtgcaatcttggctcactgcagcctcgacctcctgggcacaagtgatcctcctgcctcatcctcctgagtagctgggactgcaggcatgcaccgttacatctgggctaattttgcttattttttatagatgagtttcactacgttgcccaggctggtcttcacctcctgggctcaagtcatcctcccgccttgacctcccaaagagttgagattacaggcatgaggcaccacaccggactccattaggtttttaaagctttttgtagaaagtgatgctgaaagaaagaagtgggtattccatgtcctggtacctctggctgccagagggaaggaatgagagctatttcttgccatcttcctgtgctgtctttggtagttctctcccagggacatgtctttccctcagtgtttgatgcgatgggatgcctgtggccactgtgacgcggggatcag

SEQ ID NO: 523440 - DNA, 554 bp, Homo sapiens
ccttatgttaaaccctgcctaggtcagtgacatggaaccgatgttggtttaggtttcttgagacagggtcttgctctgtcactgagactggagtgccacggtgcaatcttggctcactgcagcctcgacctcctgggcacaagtgatcctcctgcctcatcctcctgagtagctgggactgcaggcatgcaccgttacatctgggctaattttgcttattttttatagatgagtttcactasgttgcccaggctggtcttcacctcctgggctcaagtcatcctcccgccttgacctcccaaagagttgagattacaggcatgaggcaccacaccggactccattaggtttttaaagctttttgtagaaagtgatgctgaaagaaagaagtgggtattccatgtcctggtacctctggctgccagagggaaggaatgagagctatttcttgccatcttcctgtgctgtctttggtagttctctcccagggacatgtctttccctcagtgtttgatgcgatgggatgcctgtggccactgtgacgcggggatcag

SEQ ID NO: 523441 - DNA, 529 bp, Homo sapiens
tggatccgggactcaaatgatgcctgtatgtttctgtttgtctctccactcagctctgagactctctgctcttctttgagttttggcttcattcccattcatgcttagacagggtttctttgcatcgtgggaaacagggtcctttgcagctctcacttctaagaaagtgagaccctccccctcctggcattgaatatcaaatttcagtgaagattccgattagctcttcttgcggcacgtgcccactgcttgagccaatcagcatggaggggaaatagggtcttgtaattgggtcaagtgcctactcctgcagccctgcttcggatggggggagaattgatagckctgcaagagaagtgtggggccaggcaagccagcagaggccaggccatcgattacaaagtagctctgtggcaatcaagtccttcatccacattcccagccccagggaaatcccagtctaagcaaaggacatcttggaggaggtggcgcctcacaccttctgaacctttccttttggctctgcatc

SEQ ID NO: 523442 - DNA, 529 bp, Homo sapiens
tggatccgggactcaaatgatgcctgtatgtttctgtttgtctctccactcagctctgagactctctgctcttctttgagttttggcttcattcccattcatgcttagacagggtttctttgcatcgtgggaaacagggtcctttgcagctctcacttctaagaaagtgagaccctccccctcctggcattgaatatcaaatttcagtgaagattccgattagctcttcttgcggcacgtgcccactgcttgagccaatcagcatggaggggaaatagggtcttgtaattgggtcaagtgcctactcctgcagccctgcttcggatggggggagaattgatagcgctgcaagagaagtgtggggccaggcaagccagcagagsccaggccatcgattacaaagtagctctgtggcaatcaagtccttcatccacattcccagccccagggaaatcccagtctaagcaaaggacatcttggaggaggtggcgcctcacaccttctgaacctttccttttggctctgcatc

SEQ ID NO: 523443 - DNA, 495 bp, Homo sapiens
ttcaccatgttggaccaggctgatcttgaactcttgacctccggtgatctgcctgccttggcctcccaaagtgctgggattacagttgtgagccaccgtgcctggcagatgttggtattcttaaaaccacactggtctacactacctttaaaaacaarttgtgactttccctctaattttcagaaaaaataacaggattttctcaatttatgttatttcactgcattacatttttcttaaacagttttaggttaaggctgtaattatgatattgatataacgcagacatgtcaaagttatttaaacctaatacatgtctgcattttatcaatatacatttatttcatgttcttgtacaaaagacttcattaacatatttgggaattctctaactttgtcctgaaattcccattcttttttaatttttataattacacctatattacagaaacatgtttttataaaaattcaaaccgtaagcatttcataatataa

SEQ ID NO: 523444 - DNA, 564 bp, Homo sapiens
taatgaatatctatatttgtatctgtacatgaaagagtctatctgtagactaacttgctaaaatagaattgctaggtcaaaggtgcatttaacattttgacactttcaatggggttgtactgcgtagaactcctaccaagawcttatgagagcacctgtttcctacagcctcactcacacaaagtgctatccagcctctgattttttttatcaatctgatgggtaaaatatggttttccatagggttaatttgcatatctgaatttaaataaacaaaatcacatacttaacacccacctccaacaaattactaacaatttgtaattattgactcagaagaggtgcaagtaccatgcagatatggcaaaggggacactttgttacaaagtttgaatgccaaagagcacatctgaaagtttaagtgaacttgttgggagcccccatgtgttagaagttagaatgtaacacttgtgggtatgagtttacaattgtattgatacaattgtgtttgattttcattaaaatgtcctaagaaggattttagtaagggtcacactggctacc

SEQ ID NO: 523445 - DNA, 637 bp, Homo sapiens
ctctcccagactctgtccccagcctggagggtgtcacctcggccaagggaggatgctgtcttcacacccayctgccctgggaatcttttctgacaaacaccccaggcacaaagcaactgcacagtcatgtggcataataatggcacagcccatgggcaaaggagccacaggaactgactatggggctggaaggtgacacacctgcctcgaccccagaggctctgaggggctggtcatatgctctcctgagtgggtagtcctggatgctcaagtcccatcgtgcttccattcttggattcagaagatgaaactgcacctggtcaatacaacatgagaagtaacattaaaatacaaaagaatgtgacatgttagaggcaaacatagaaccaacattgtttccatggaatcatgtttctacagaatcatgtctttaagctctttaagccccatacatagagggtctttaaatagcttgtctttagtctggcacagaaattaacagtcctacaattattaagcaaaatgtttgagttcccactatgtgctaaatttccaagagactggacataaaaataggctacacggagaactgtgactatctgactcaggtttctgagagaattggtgcataaaggga

SEQ ID NO: 523446 - DNA, 637 bp, Homo sapiens
ctctcccagactctgtccccagcctggagggtgtcacctcggccaagggaggatgctgtcttcacacccacctgccctgggaatcttttctgacaaacaccccaggcacaaagcaactgcacagtcatgtggcataataatggcacagcccatgggcaaaggagccacaggamctgactatggggctggaaggtgacacacctgcctcgaccccagaggctctgaggggctggtcatatgctctcctgagtgggtagtcctggatgctcaagtcccatcgtgcttccattcttggattcagaagatgaaactgcacctggtcaatacaacatgagaagtaacattaaaatacaaaagaatgtgacatgttagaggcaaacatagaaccaacattgtttccatggaatcatgtttctacagaatcatgtctttaagctctttaagccccatacatagagggtctttaaatagcttgtctttagtctggcacagaaattaacagtcctacaattattaagcaaaatgtttgagttcccactatgtgctaaatttccaagagactggacataaaaataggctacacggagaactgtgactatctgactcaggtttctgagagaattggtgcataaaggga

SEQ ID NO: 523447 - DNA, 637 bp, Homo sapiens
ctctcccagactctgtccccagcctggagggtgtcacctcggccaagggaggatgctgtcttcacacccacctgccctgggaatcttttctgacaaacaccccaggcacaaagcaactgcacagtcatgtggcataataatggcacagcccatgggcaaaggagccacaggaactgactatggggctggaaggtgacacacctgcctcgaccccagaggctctgaggggctggtcatatgctctcctgagtgggtagtcctggatgctcargtcccatcgtgcttccattcttggattcagaagatgaaactgcacctggtcaatacaacatgagaagtaacattaaaatacaaaagaatgtgacatgttagaggcaaacatagaaccaacattgtttccatggaatcatgtttctacagaatcatgtctttaagctctttaagccccatacatagagggtctttaaatagcttgtctttagtctggcacagaaattaacagtcctacaattattaagcaaaatgtttgagttcccactatgtgctaaatttccaagagactggacataaaaataggctacacggagaactgtgactatctgactcaggtttctgagagaattggtgcataaaggga

SEQ ID NO: 523448 - DNA, 614 bp, Homo sapiens
cctccctagtagctgagactacaagtgtgcaccaccatgtctgagttgaccttaccatttttcatggctcttattacaacccaggttctcttaacaaattgaggtgaagacgtgttgtccaccaaattgcatctttatgcaattttatgcartccttaccaagttttcatttatgaaattggtaaatttgagaactctcacaaaacaaaatccccacaaccctataatttgtatgcagtgaataattcctctatatgtacatcggtaacatgtcctgatcatatcttagaactgtagcttttatctatcatgatcagatacctgtcattgataagtttgattttaagtagtctcttaacttggacagttcctgaaaattttcttcttcctaatggtgaggttcttagtacttggtgcaagctgtttttttccaagtatgcccaaaacactgagaatgcacttgtttaaaattcggaggattcttatatttcatagcacacccttaagtctcttctttttgcatatggagaaacactgaccctgcaagatttaagtgacttgttcaaggccgtactcaacagagtccagaggaagtgaaattccttcctgatttg

SEQ ID NO: 523449 - DNA, 614 bp, Homo sapiens
cctccctagtagctgagactacaagtgtgcaccaccatgtctgagttgaccttaccatttttcatggctcttattacaacccaggttctcttaacaaattgaggtgaagacgtgttgtccaccaaattgcatctttatgcaattttatgcagtccttaccaagttttcatttatgaaattggtaaatttgagaactctcacaaaacaaaatccccacaaccctataatttgtatgcagtgaataattcctctrtatgtacatcggtaacatgtcctgatcatatcttagaactgtagcttttatctatcatgatcagatacctgtcattgataagtttgattttaagtagtctcttaacttggacagttcctgaaaattttcttcttcctaatggtgaggttcttagtacttggtgcaagctgtttttttccaagtatgcccaaaacactgagaatgcacttgtttaaaattcggaggattcttatatttcatagcacacccttaagtctcttctttttgcatatggagaaacactgaccctgcaagatttaagtgacttgttcaaggccgtactcaacagagtccagaggaagtgaaattccttcctgatttg

SEQ ID NO: 523450 - DNA, 614 bp, Homo sapiens
cctccctagtagctgagactacaagtgtgcaccaccatgtctgagttgaccttaccatttttcatggctcttattacaacccaggttctcttaacaaattgaggtgaagacgtgttgtccaccaaattgcatctttatgcaattttatgcagtccttaccaagttttcatttatgaaattggtaaatttgagaactctcacaaaacaaaatccccacaaccctataatttgtatgcagtgaataattcctctatatgtacatcggtaacatgtcctgatcatatcttagaactgtagcttttatctatcatgatcagatacctgtcattgataagtttgattttaagtagtctcttaacttggacagttcctgaaaattttcttcttcctaatggtgaggttcttagtacttggtgcaagctgtttttttccaagtatgcccaaaacactgagaatgcacttgtttaaaattcrgaggattcttatatttcatagcacacccttaagtctcttctttttgcatatggagaaacactgaccctgcaagatttaagtgacttgttcaaggccgtactcaacagagtccagaggaagtgaaattccttcctgatttg

SEQ ID NO: 523451 - DNA, 622 bp, Homo sapiens
atctgtatatttttataggtttttatgtggatataggtaaaaaaaaaaaaaagtaggccgggcttggtggytcatgcctgtaatcccagcactttgggaggctgaggcgggcagatcactcgaggtcaggagtttaagaccagcctgcccaacctggtgacaccctgtctctactaaaaatacaaaaattagccaggtgtggtggtgtgcacctgtaaccccaactgcttgggaagctgaggcaggagaattacttgagccctggaggcggaggttgcagtgagccaagatcatgccactgcactgcaacctgggcaacagagttagactttgaaaatgtcttttttcaggttcttccatccacgttattttttcagggaagatgaggacattatcttcctaaattgcttctaaaatttattaacttttccagtatctgttgtgtaaatgcatgccagacactgcatgggaagatgggggatggtgagtcaaggaaatctggaagaacaggacttgtgaactgaggtttgaagtacatgtatgagttaagcagagaatacctggcagagactgccagtgcagaggccttaaaggaaagagagaaaacatgctttatttgatg

SEQ ID NO: 523452 - DNA, 622 bp, Homo sapiens
atctgtatatttttataggtttttatgtggatataggtaaaaaaaaaaaaaagtaggccgggcttggtggttcatgcctgtaatcccagcactttgggaggctgaggcgggcagatcactcgaggtcaggagtttaagaccagcctgcccaacctggtgacaccctgtctctactaaaaatacaaaaattagccaggtgtggtggtgtgcacctgtaaccccaactgcttgggaagctgaggcaggagaattacttgagccctggaggcggaggttgcagtgagccaagatcatgccactgcactgcarcctgggcaacagagttagactttgaaaatgtcttttttcaggttcttccatccacgttattttttcagggaagatgaggacattatcttcctaaattgcttctaaaatttattaacttttccagtatctgttgtgtaaatgcatgccagacactgcatgggaagatgggggatggtgagtcaaggaaatctggaagaacaggacttgtgaactgaggtttgaagtacatgtatgagttaagcagagaatacctggcagagactgccagtgcagaggccttaaaggaaagagagaaaacatgctttatttgatg

SEQ ID NO: 523453 - DNA, 530 bp, Homo sapiens
aaccacatacatcagaaacagacctccaaagacttcagaaactagaatttagataagattagcttaataacacaggtgaagagagaattggagaactgaaggcatccagaatggagcttaaagagccaattagatggaaaatatgaaagggatatctgagacacaaattgatagtgtgaaaatgtgtctacttgaagttctagaagtagaggaactacatggggcggaagcacaatttgaagagagaaatactgaaatttccagaatgattgaaggcttcaacagattcaagatgctcattgaatcccaagcagtaattttaaaaattcacaactggacacatgaggatgaaactatagaaaactaaagttttttttcttaaatcacataaatggttggaaacaaaaagataaatgaccttcaaaggaatggcagtaaggttggtaacttcacagcarcaagggaagctagaagacagtggaattgactcttcagtttgctgaaagaaaatagctgtcaacttgaaagtt

SEQ ID NO: 523454 - DNA, 594 bp, Homo sapiens
atgtttgatcgcatttttaaactggtgactaagattttagtcattgaattagttaaatctaagaaaatrttcaaaggagaacagaatatgtttatgcttgagaaagaaggtgggtgtttttataatttattctactcttagaatttgaatttgttgtgtttttgctctgaaatgcataactctgtagaaaactcttagctctcaaatactaaaatatttctgtgggcttagtaaatgttcatttctgaaataaattcattttaggtatgcagatgcattatttaagtcatccgatatcagatcagccagtttagaggacctgtgggaaaatctgagtttaaagcctgccaactcccctcatgtaaatatctctgcaaccttgtctccacaaggtaagctaaggatgaagcaaagtaagaagtagaagacaaacttcaaagttatttaaaattttttaatcttaatctttattagattttaaatattcaaagtacagagaaagagtgcactatgtattaaagctgtttatgttcaattttaacagaagtctattatctttaacaaatagatcagtgttagaactcttgaacactg

SEQ ID NO: 523455 - DNA, 629 bp, Homo sapiens
gtgacggttttatgagacctccttgtgcatgtggccgtgagctaggttctaataatataacattgccaatgtagcatttaggaataatagcagttcctcagctggcagcctagctacttgtggattttcaattgcatgggaaattaacawtttagaataatgtccagaacgttcctgtctttctccagcctcagtgacactccagtctctgaagtgctctgagaaataggagggtggagtataaattgcagcttgtattgaaagagtgtttgaaaagtctgaggctaattccagccaggactgtgcttgtgcaggttaaaaaaaaatgtgagtaagttcaccacaccctaattctctgcctgggggcttagttcccacaagcttgaggggattcagtttgctaaatgtgtgtggtgaagtcatttcagatccctggcaaggagcaagcctcttaaatgaaagggtggcaatatcttcaggcattcccagtggttgcctcaactcacgtcttttatgaagagtaccttaagcattttgaagtgagtccaaaaatgcaagtttttaagagggaatgtcatagtctaagaatgtcggtattgatgttatccctttaaattgtagatgatcag

SEQ ID NO: 523456 - DNA, 649 bp, Homo sapiens
cctgtttccaaatacagtcacattttgaggtactggggttaggttttcaatatatgaattgggggttagggggaggcataattcagccccataacacattatgtttaattttttctcacttgggtttcagatcattttctttgcacagattctcagagtgggaatcactggatcaaatgataaaaaatattgtaaggctcttgaaaactactttcccaaagaatataacaactggtaccaaaatagccttgttttattctgttctcacgctgctaataaagacataccagagactgggtaatttataaaggaaagaggtttaatggactcacagtaccacatggctggagaggcctcacaatcatggtggagggcaaagaggagcaaaggcacatcttacatggtggcaggcaaagagggcatgtgcaggggaactgccctttataaaascatcagatctagtgagacttattcgctatcacaagaacaacatgggaaagacctgcccccatgattcagttacctcccacaacatgtagggattatgggagctacaattcaagatgagatttaggtggagatatagccaaaccaaatcaaaccttcttaaaattattttaaaataactgaatgaattaactaaggattc

SEQ ID NO: 523457 - DNA, 653 bp, Homo sapiens
tgggcatggtgtctcatgcctgtaatcccagcactttgagaggccaaagcacgtggatcacttgaggtcaggagtttgagaccagcctggccaacatggtgaaaccccgtttctactaaaaatacaaaaatcagccaggggtggtggcacacacctgtagtcctagctatagctactcaagaggttgaggttggtggatttcttgagcccagaagtttgaggctgtagtgagttatgattgtgctactgcaccccagcctaggcaacacagcragactccatctcaaaaataacaactaaaaaatcactctcatccctatctacatcacaagatttttgtgaaggttcatggaggtgatgtagacaaaagcccttataaaacactggttgcatatttgtaagcgaataggcctccaaatgactgaagttgatctgatgttagtacttaaggagtggtaggcagtgtggcaatcatatatatatatatatatatatatatatatgtgtgtgtgtgtgtgtgtgtatgtatccctacactttttaattcagataataaaatagactagaatgtgagacattatatatgtgcattatatatacatatattatatatgtatgcattgcgggaagtcagggaccccacatggagggac

SEQ ID NO: 523458 - DNA, 666 bp, Homo sapiens
ttgaaaattctctgaatttttatatatttttacattcttctgttttctgaatgtatccaacagttactttaaattcatcatcaattaatacagtagtttgatcacaagttgctcttgtgttcttccctgttacttatcgtttatggcatcttattcttgatgtggtggatttattgcactcaggatcctgagttttaccccttcctctgtcctcacatttctccttttaacttcccagtgtccttccattgggcagagcgttctgccacttgaatctaggcgtagccacagggctggtttgggccatgttagcaaaatggcacaagcaaaggcttggaaaagtgcctgtgtgtatcatcttgcccatttgctcctctgtccttgtcacaagaatagggacacatgagcttgctggggaacgaggcacaaggagcagagccaaaaccacaattttwtttcagccaagtcagacatctcttggccaactgtcagtcaggagagactctgaaaactgcccatttgaggttagtccaactcattgactccagaactcatgacttatgtaattattgtatggccttaaagctgagtcggttttttttggtacatagaattattgtgacaatataaaactgatactttaaatatattcattacatttcagtt

SEQ ID NO: 523459 - DNA, 591 bp, Homo sapiens
gatttaactaagataatagaaacaagaccatgctatacaaatgtttaagttataaattaaaatattaaaaattgcccgattccccagtacaaaaagaactaatttggtgaaamactgtcttttatgtacagtcgtagaaaatcctgagctgagaggctccctcgttgggtgggaccaggatgtggagcttcattcggaggaggaaggaatgttcacagtgtagattacggtgtcaatgcacaatgaagtatttagaaaccattcatcaccaaagagggattgtaattttagaatttttcagaaccataatttcttagtataactttgcaagaaaataagctttaacaacaaaagaatgtaaaatacctgatccagcacagcaagggcaaccctgtggcttgctgactcattaagtacccatgctactttatgaaacacatgtgagttgcatagatttattaaatactaatactttgaataaatatggacatacccctgcagaattgtggaatatgacatattttaaaacacagtttcacctgtgactgtaaaacatgcataaattaggttggaaaccttgaggtggtagtg

SEQ ID NO: 523460 - DNA, 591 bp, Homo sapiens
gatttaactaagataatagaaacaagaccatgctatacaaatgtttaagttataaattaaaatattaaaaattgcccgattccccagtacaaaaagaactaatttggtgaaaaactgtcttttatgtacagtcgtagaaaatcctgagctgagaggctccctcgttgggtgggaccaggatgtggagcttcattcggaggaggaaggaatgttcacagtgtagattacggtgtcaatgcacaatgaagtatttagaaaccattcatcaccaaagagggattgtaattttagaatttttcagaaccataatttcttagtataactttgcaagaaaataagctttaacaacaaaagaatgtaaaataccwgatccagcacagcaagggcaaccctgtggcttgctgactcattaagtacccatgctactttatgaaacacatgtgagttgcatagatttattaaatactaatactttgaataaatatggacatacccctgcagaattgtggaatatgacatattttaaaacacagtttcacctgtgactgtaaaacatgcataaattaggttggaaaccttgaggtggtagtg

SEQ ID NO: 523461 - DNA, 591 bp, Homo sapiens
gatttaactaagataatagaaacaagaccatgctatacaaatgtttaagttataaattaaaatattaaaaattgcccgattccccagtacaaaaagaactaatttggtgaaaaactgtcttttatgtacagtcgtagaaaatcctgagctgagaggctccctcgttgggtgggaccaggatgtggagcttcattcggaggaggaaggaatgttcacagtgtagattacggtgtcaatgcacaatgaagtatttagaaaccattcatcaccaaagagggattgtaattttagaatttttcagaaccataatttcttagtataactttgcaagaaaataagctttaacaacaaaagaatgtaaaatacctgatccagcacagcaagggcaaccctgtggcttgctgactcattaagtacccatgctactttatgaaacacatgtgagttgcatagatttattaaatactaatactttgaataaatatggacatacccctgcagaattktggaatatgacatattttaaaacacagtttcacctgtgactgtaaaacatgcataaattaggttggaaaccttgaggtggtagtg

SEQ ID NO: 523462 - DNA, 576 bp, Homo sapiens
atttttgtttccagatattttctgatttgctcagagctccaaatggtatcaacaagtggttttctacaatgagaatgaggcatgccagtgtgatggtccgtaatcgatatttgccagcagatcattattttaaaaatattatcaggaatttacctataagagtatctaagaatgggggttattaattagaaattgtaattyaaatatccctttcccctttttctaaagaatgctcaactgaatgatatttgtgtgtcattttcatgaaatttacagaaccaacaatatttattgttccaaaattctgatctggaatattgcttggaaactttacactttcctctttttcaacattaaaggtggtcttggaaagtatcaaagacatacaatggagaggagttatgaagagtgactgttaacatgaaaatattggcaagagatggaacaagacctatttctttttgagacaggttcttgctctgttgcccaggctagaatgcagtggcctgatcaagactcactgcagccatgacttccccagctcaagctgtccttctgcctcagcctccagagcag

SEQ ID NO: 523463 - DNA, 617 bp, Homo sapiens
actatagtgtactgttgtatacatttcaatatttccatattagctaatacaatattaaaatgtatatagattacaaataatcataagcaaaactcagtatgagtctttctgcccttaagatctatatgcatcattattctagctagcagcctatcaatcttatttattcttcaaaatacaaacctctggttttgtcaatcttctgtctagtttctggtgtctcaattttattctgttcagctctaaattggttatttcttttcttccgctagctttggagttgatttgctcttgttttgctagttcctctaaatgtgatgttaggggggcatgtgaccaggcactagtgtgtgtgcaccatcttctgcctcctgtccccctaaaaaataaaaawtaaaaattaaatgtgatgctaggttgttaactggagatctttttatctttttgacctgcatgtgtagtactataaactttccttttaaggtggctttaactgtgtcccaggtactctgatatgttgtacctttgttttctttagtttcaaggaattcttggtttctgccttaatttcattcattgtttacacagaagttattcagaagcacattgtttaattt

SEQ ID NO: 523464 - DNA, 440 bp, Homo sapiens
ctaatttttcctcctcaaagcttagtttgccggaactttttttttttttttttttgagacggagtcttgctctgtcacccaggctggagtgcaatggtgtgatctcactcactgcaacctccacctccctggttcaagtgattcacctgcctcagcctcccaagtagctgggactacaggcgcatgccaccatgcctggctaattcttgtatttttagtagagacggggtttcaccatgttggccgggctggtctcgaactcctgacctcaggtgatccacccacctcagcctcccaaagtgctgggattacaggtgtgagccatcccgcctggcctgcaggaactttttaacatgtcgtttccaagagagatcctttcttygccatacacatctgtactgggagcttggtccctcctctggttggacctttgccctcct

SEQ ID NO: 523465 - DNA, 632 bp, Homo sapiens
gctgtattgcatatatgcttatatcattgagatcataatgtgagaacattttaacccctgcttttctgcttttaaaattttcttttattttcagactttttttttaaattttttgagatggagtcttgctctttcacccaggctggagcgcagtggcctgatctcagctcactgcaacctctacctmccgagttcaagtgattctcctgcctcagcctcctgagtagctaggactatagccgtgtgccaccacacctggctaatttttgtatttttagtacagacagggtttcaccatgtcggccaggctggtctcgaactcctgtcctcaagtgatctgctcacctcagcctcccaaagtgctgggattacaggtgcgaaccaccacgcccagccttcacacttatttttatcactacttttttctccagtaccatcaccatcttcaactttatcatcttgtgcttaatgtcattatcattatgaataagaatcattttcgttaccataaccatctttagaggattctcttcttgttgatggagggtgatttgtgtataaaatgtatttttttaaattaaatattccattggggcgaagtgaggggaggccgagggagcctttgtcattga

SEQ ID NO: 523466 - DNA, 632 bp, Homo sapiens
gctgtattgcatatatgcttatatcattgagatcataatgtgagaacattttaacccctgcttttctgcttttaaaattttcttttattttcagactttttttttaaattttttgagatggagtcttgctctttcacccaggctggagcgcagtggcctgatctcagctcactgcaacctctacctcccgagttcaagtgattctcctgcctcagcctcctgagtagctaggactatagccgtgtgccaccacacctggctaatttttgtatttttagtacagacagggtttcaccatgtcggccaggctggtctcgaactcctgtcctcaagtgatctgctcacctcagcctcccaaagtgctgggattacaggtgcgaaccaccacgcccrgccttcacacttatttttatcactacttttttctccagtaccatcaccatcttcaactttatcatcttgtgcttaatgtcattatcattatgaataagaatcattttcgttaccataaccatctttagaggattctcttcttgttgatggagggtgatttgtgtataaaatgtatttttttaaattaaatattccattggggcgaagtgaggggaggccgagggagcctttgtcattga

SEQ ID NO: 523467 - DNA, 655 bp, Homo sapiens
gctccttggtaatcctgcctctctccccacaccatcgcaggcattcacttatctgtttttgtttttttgtcttgttttgttttttgtttttgtttttgttttgagacggagtcttgctctgtcgcccagcctggaatgcagtggaacgatcttggctcactgcaacctccaccttytgggttcaagtgattctcctgcctcagcctcccgagtagctgggactacaggtgcctgccaccacgcccagctaatttttgtatttttagtagagatggggtttcaccatattgcccaggctggtctcgaactcctgacctcaggtaatccaccctctttggcctcccaaagtgctgagattacaggcgtgagccatggtgcctgggccacttatctgcttttgatcactacagcttcatttgcactttctagaatttgataaaaaatggaaggagaggaagggttttgaagggaatggaagccctgcagttgctccatgaatcctgtattgctttgtttttaacaggctaatttcactcacatcgttattttgaaattcatctatgttgttattcatatcggtagttcattgtgctttactgccgagtagtattccgttgaggagatgcaccacggtgtgttagccacccacacagca

SEQ ID NO: 523468 - DNA, 486 bp, Homo sapiens
ctggagagccctgggccagcctggagacagtcctgtcaggaacgcccacggcactgccattggaggcattgcagaggatgggcaggctgatctccttcttggcaatgggggcctcatggccctcgccttcggctggtggagtttccttgtccccagacgccttcttgttcagcaggttgctgatctccatgatgttcccaatgatctccactgggccggccaggttcttcttccgggttggcaggtcatccttggccttcttcaggtaggatgctggcgcccagccctctttgcccaggtatctgtggggaggagcaggatgtgctatcattagagcactctgacctcacagcccactcccaggccctaggatccatctggccttgcccagtggagccttccctaccatgttctgcaaggcttggcaatcccactactctggagagaaatggcaccgagggtagrtggaaaagacacccagaacac

SEQ ID NO: 523469 - DNA, 586 bp, Homo sapiens
ttccatagttattattatgagtgacaactgttacaagtcatatttttaaaaattaggatatattaagggaagaatataaacataaatattaayattaaattttatatgttgtctgtcatgtttaaattatagtgaaataaatctaatttttcctagtttaaatatagaatttaaagggattgctgttgagtgggattttctatatgaatattccagataaaaaacatttacttagtaagtccagggactatacacagtactcaaggtaataatttctgtccttaataagttttatgtatgacatttgaacttccagatttagactgtttggctttacaatcagttattttgtagccaaataaacgaggcccagaaaatgactaacatgggagactcatttcatttttggactcccaaagttggaatatgaatatttatgatatgttcaaattatcccttactctcatttaattttttctctccacatgtaggactagctgcttatacaactgacaaagttgtcatgacgtgttacaaccacaggttctttttagtgttgttagctatttcttttttttccttgaca

SEQ ID NO: 523470 - DNA, 644 bp, Homo sapiens
tcacacagagtttacagcggcaagtggcttctttcaaaggatctgtgacttacttcagtttttctgatatgttcctgcagtagttcttgaagcaaaagttcatgatatgagtcttcatgtgctgttctgcctgtctgagtgggaactgcaagttagacctgcctcctaaccgccatttttcctctccaagaagtctactttaaatataaagctttaaccctgttgtgttggattagaatcagagtaaactcatgctttcacagatagatacatacatacacttacatagatccatatttatgtgtgtgtatgcatggattagtatgcatgcaggtatttgtgagctctgttcactgagagggcctgaaaacaatgacacagttgccacaagcatacttacacctatatcttggcttctaaatattattctccaatataaggaaccagatctcctttgtgaagtgtttgataccaggctatgagcagggaaaatgcaagatgaaacctggaatattacatggcatcaggacataagtatatgcacagtaaaggatgagaacacgtgaaaaaggcacagtagctattctgaaagagcacctattagctaacggtagaataatktcaacagcacaataaatcataaa

SEQ ID NO: 523471 - DNA, 640 bp, Homo sapiens
aaatcaacacagcctagagaaggacctaagctttctatcttaaatttctctctgctatttcttttctaccagtattcaaagatattcactctctcatactattaaaaatttttcataaacctctatttccttctgtctatggctgtatcttgcttttcacttgataactagactttttgcgtgtcatttatccatctgtctcttcttggtatttgggctttattccatgtcccatcacatgattaaatccaatgaagagttttcacttgcttggaaactcagaagcttttgacataaacattgtctttatttatctaaaaatcagcccttggcttctcagattccacactatgcttgcttgcytgcttttttttttttttttttttttttttggcttattcattttgtactctaaattttggctaagttttcttctggtccacttcctaattgttctcgttaggcaaactcattcattctcatggctctaatgaacatttttatgccagtgacattcaactctccagcccagggtcttctcctgcattgctaacccatttgtcccactgcccacaggcatccttccttttcatgtttcccaaaattgaactgatttttcaatgccaggtctactcctttt

SEQ ID NO: 523472 - DNA, 654 bp, Homo sapiens
gactgagggatatgaatatcaatactggagcgtggggatttgtcacaactgcagtgacttcatattaccctcagttatgctttctttgttgagaatagggtgatttactatactactagttagtagctgttagtcccctgaaaattcatgtttaaatcctaccctcagtacctcagaatgtgatcttatttggaaataaggtaatcaaagaggtaattagttaacttgaagtcatacggagtaaagtgaacccctgattcaatataactggtgttctaataaaaacgggaaatttgtctgggtgcrgtggtggctcacgcctgtaatcccaggactttgggaggcggaggtgggtggatcacctgaggtcaggagttcaagaccagcctggccaatatggtgaaaccccatctccactaaaaatacaaaaattagccgggcgtggtggcaggggcctgtaatcccatctactcgggatgctgaggcaggagaatcacttgaacctgggaggcggaggttgcagtgagccaagatcacgccattgcactccagcctggggacaagagcgagacttcatctcaaaaaaaaaagtagggggatggaaatttgaacatacacacacatgcagggagaataccatgtgaacatgaaggc

SEQ ID NO: 523473 - DNA, 604 bp, Homo sapiens
tcatagacatatgagcagttcgcagacattttaaaagtcaagggccggtggaggtgatgtaacttaatctcaccaggtacagttctgccaagtagagagaagcttctattttatgttttgtctttccaaaattgtcccaggactaagaaatcagaattgccactccttgagatccctgctttgcaaagctaggtattggggaaaaaagccgatcccttaagaattcagggccttctgggatagaagaaatagacccttaaactctgttcccccataaaatttgaggttatttgccagtggtctgagatggctctgacctcatcttaaagcaagggaagacaattgaaataaacttatctcatggaaaagggaaattgataacttgggactgtcttactaaggaaaggcttgttttaattgatcgtataactctgggttcctgataggaaaattwaaaaaattttaaacaatatttcaaaagatcgctattttaattggtaaaaccagacctaattttctgtagcttttctgccgaaagaatattaagagaagcaaaaggaagaaagaaaaggggcaattttctgaaaacataaaaataagcgga

SEQ ID NO: 523474 - DNA, 680 bp, Homo sapiens
gaaacctggagaaaaatcttttatttgctggtcctattccttagcattgaaaagctaaaaagactcctttttgttaccagaatgaaactgctctgagcctccatttagtggttgctacagtcttgtgctagagaaaattagatgtgaatcaaggttatttagtgaggaatataatttattattttcatgttaaagagaaatgagatacagcagacctacaacataatgtaggaaaatcttcacayggtttattcttaggctgtgatcaataacctcagtaatttgaaataaaatacatcatggtgggtagacagaaatttaacagtgattctctcttctttcttgtctgtattgggcaaacctgggaaagtttaaacattcaagggaggaaatctggcagtgtttggcaagaatctctaaaatacgaagtaagttataacctgtggtcaactgggatgaaaggcagactttgggtaccgccctaccctgcgacaatataaaggacctaagagaaagatggtagatgggaaggggaagacagttacatgttacgcactgaaaattcaaataaataaataaataactataaatctgtcacttaaattatttgctgaaggaataaatggaagactcaggctttctgtgaccaaaataaaagaatctatttttttttcttggag

SEQ ID NO: 523475 - DNA, 398 bp, Homo sapiens
gtaagaatatccctcctctttagggaagaataatattccaccatatgcatatattacattctctttatgtgttcatttattgtcttagttggttcaggcttctataacaaactatcataaacttggtaccttataaacaacagaaatatatttatcactgttttagaggctggaaagtccatcatcaagccatcagcagcaggtttatgtctggtgaggtcccactttctggttcatagatgttcacttcttgccgtgtcctcacgtggtggaaggggtaagagggctctctctccagcctcttttataaaggtaatcatctcatttatgacctamttacatctcaaacaccccacctcttaaaaccatcacattggtgattaaatttcaacatatga

SEQ ID NO: 523476 - DNA, 633 bp, Homo sapiens
tgtgtgtttagtcaatactgtgtttatctcagcgtgagattcaaattttcctcctaatagcattatcacggtgcaacgtcactttttgtattccttcatttgaatagwtcctatacattattatggtttaaaaaataagtctgaaggtggcaatatcctaacactgaaagcagtgtatttttacttgacttattattgtgaacacattatgtcactgcacattcaagtggtgtgatgggaaatgatcaagtcttcctttttactaggtgatcagactctgagaatatgggatgtgaaggcagcaggagtaagaatcgtgattcctgcacatcaggcagaaatcttgagttgtgactggtgtaaatacaatgaggtatagtgtatggctctatcctatgctgctgtccttcctaatgttaaaatgttctgaattttatttgtctttgtttatgtggactttggtggtgttcctggaccattaagttaaattctgtccctttcctttctaattaatgattgtgactgacctgcattagcattaattggatttaagtgctcatgaaacgggcaaaataagaaacagaaattctcaaagttcaacagtgcaggcttacttgtttgttttgggaagct

SEQ ID NO: 523477 - DNA, 633 bp, Homo sapiens
tgtgtgtttagtcaatactgtgtttatctcagcgtgagattcaaattttcctcctaatagcattatcacggtgcaacgtcactttttgtattccttcatttgaatagttcctatacattattatggtttaaaaaataagtctraaggtggcaatatcctaacactgaaagcagtgtatttttacttgacttattattgtgaacacattatgtcactgcacattcaagtggtgtgatgggaaatgatcaagtcttcctttttactaggtgatcagactctgagaatatgggatgtgaaggcagcaggagtaagaatcgtgattcctgcacatcaggcagaaatcttgagttgtgactggtgtaaatacaatgaggtatagtgtatggctctatcctatgctgctgtccttcctaatgttaaaatgttctgaattttatttgtctttgtttatgtggactttggtggtgttcctggaccattaagttaaattctgtccctttcctttctaattaatgattgtgactgacctgcattagcattaattggatttaagtgctcatgaaacgggcaaaataagaaacagaaattctcaaagttcaacagtgcaggcttacttgtttgttttgggaagct

SEQ ID NO: 523478 - DNA, 540 bp, Homo sapiens
acgagagctagattttttacttgttttgaaaatgagggtcacattaagatrgtgaatttttttcactcctggagagactatttacttcttcatgttgaattcccaatagttctcaccacatttcattataatatatgcacttgcttttccatcaataagactgtcttggttgtcgatatagaccatgacagtagcaatgtgagcctcttaactaaatgtaagaaataatgaaactatatccaggcaaatgataaacaatttaatggttgacaaccctcaaaaatataatatatttagtccttagtagcaaataaatatacatattaaaatgacctgttattagctagcacacggagatactaaccattttggtatttcactctaagcgttttcctatacaatttattatgcatacaaataaacatacacatgcccatttggtatgggagcaaaattcaaattattgatttatatattatcaattcaaaattgaattatagataatgtttcaatcacaaccacttctaattgctaacttca

SEQ ID NO: 523479 - DNA, 496 bp, Homo sapiens
ctgaatttaggccttgggcagccagttaaagggttgtgaaatgaacggtatttgagtggtcaatacacagccgccagctcgggagcttgctccccaccctagctgccaggtctgtgatgagaaagcaggtgttcttggcctaacagagagtgcatgtctsgatctaatgccttctctccttccctctcacctgcttcctcctcctccctcttctccctctgtagacagagatgcctcttgcctggaagggctgccttggcatctaggagcaaagggaaactctctggggctgatttccatcccactcttgtctccagaagctgctagagatgtaaagtgaaaatgatagaagaaatgtcacagaaggaaaactcaattcccttgttgactcaaagtggcacattaagcaaactgtcacttttgattgaagatgtggggagcattttgttctcctttccatgggctgagctgggctgacagagaggattccttcatg

SEQ ID NO: 523480 - DNA, 357 bp, Homo sapiens
cagttgcacctccctgcttgwtttttctccacggtattggccaacttccatactacgtatcttttcattcattttttttttggttgttacctgtgttccatgactaaaatggaaaccccaggaggccaagacttttacttgttttagtcactgccgtatcccttgtgcctggagcagtgcccagcacgcggtgggcatgaggaagtgtttaccggaggaatcgctggactgccgtgtggtacaaagaggacgtggaagacctagggcttattttctgaattcactactcctggctcatacattcttgggaagttactcaacgcgttttgtgctggtttctttccatctgcaaaatga

SEQ ID NO: 523481 - DNA, 470 bp, Homo sapiens
actaccacagcacagcacactctaccccatgcctggtggtaaatgagctcttccctctggtcacataaaaggacctcttccagttgccccattgacacccattttaggccccaaacccacctctcttcccgattaaactgttgccttagtagctcattagcttataaccatagggcgaagtcccgtctcagggaaactattgctgccacagggttgtcaaccaaggagaaaagtgtgagaaaatgacatgttgtaaaccacttgctttaacatcagggtggcacattcaacctaatgcttgattgacactgtacgcttggacttacagtcctctctctatatatakggggggggggtggggggagagagagagagacagagagagaactacggggcctcctaaggagaagaggaaaccacaaatgaaggtcagagacagaagtggatagaaagctgggagagggaaacag

SEQ ID NO: 523482 - DNA, 470 bp, Homo sapiens
actaccacagcacagcacactctaccccatgcctggtggtaaatgagctcttccctctggtcacataaaaggacctcttccagttgccccattgacacccattttaggccccaaacccacctctcttcccgattaaactgttgccttagtagctcattagcttataaccatagggcgaagtcccgtctcagggaaactattgctgccacagggttgtcaaccaaggagaaaagtgtgagaaaatgacatgttgtaaaccacttgctttaacatcagggtggcacattcaacctaatgcttgattgacactgtacgcttggacttacagtcctctctctatatatatrgggggggggtggggggagagagagagagacagagagagaactacggggcctcctaaggagaagaggaaaccacaaatgaaggtcagagacagaagtggatagaaagctgggagagggaaacag

SEQ ID NO: 523483 - DNA, 319 bp, Homo sapiens
agctagaggccctacttaatccacaacttgtaaattcaaatgctatccaaactgctttggtaaggcattgtctttttaaaagaaagcatgaaacacctgacacttatcaactgccaagtcaaatgttctccgcctatctccagacaaaaaacagttttaagacttgcacataccctcacctaactgctttccacttatctgaactgagcattctcttcctcacctttagttacacactgttccctttgcccagggcatctattctactcctcccaygtctatcctctttccttgacaagttctgtgtctccctcatggc

SEQ ID NO: 523484 - DNA, 609 bp, Homo sapiens
attgaccttctaaaaacattacctgcagattctgacaatgaatctgtttaggatttccccaggaaagaaaatagaatgactagagattatgatgttgcttgtagtttaaatttggtgtttgccttctgctttccctggttcctctcgtacatgttgtaagatataacatgtggaagaaaagtgtaagaaaagcaagaaattcagaatttcattattctgaaagaaagccaaatttatctttgcttctttttcgtaaacaaggaggtttcacaccggacgcatataaaacactttgatggagccccataggggaaaataacctttcacgcatacttcaactgttccgtgggtactttgaatgcaggaaaactrcaacaggccccgctgggattcgaacccaggatctcctgtttactagacaggcgctttaaccagctaagccacggagccaccatgcctgcggtggtacaaatgagcatagaaaagagatgatctttgcctttgttctgtgcattgatacactttcttgttactgaggtttgaaagtagctacacgcttcttcagacactgaagattaaccttggcttcgccccaaaagacctaagaaa

SEQ ID NO: 523485 - DNA, 504 bp, Homo sapiens
ttgtcagacaacttggttttcctcagtttgatagatatgaaatgttatatcctatgcttttaatatgtacttcttatatatttttaggtgcttattcctcactcatgcttccaagaagtacctgttaacattttttgccatagttttaaaattttcattttgtcctttcctcatggatctataggaatgctttatgtattcaggattctaacattttgtccattatatattttacatatatctttgccaagctggtacttattgttttacttttattatgctatcttttttgatatacacgaattattaacaatatagtcaatttgatttttaacgtttacattsgtcagtctttccctttatggtttacgctttttgtgtcttgttaaagacatctttccaggaacagcgtgaggaggacagaagcacccaacaggactgctcaagccacctgcgaacactgctgctaccatgcccaagagaaaggcaaaaggagatgctaaa

SEQ ID NO: 523486 - DNA, 605 bp, Homo sapiens
ctaaaccagctcctccaaaaccagagcccaggcctaaaaaggcctctgcaaagaagggagagaagcttcccaaagggagaaaggggaaagcagatgctggaaaggatgggaacaaccctgcaaaaaaccgagatgcctctacactccagtcccagaaagcggaaggcactggggatgccaagtgaaatgtacatttttgagagctctgtacttatagtgactctactgtttgaaatactatttttttaaatcaagttttataaaagtgtagaattttggcttttttaagttatgttgttagcacacaggacacttccttgttgtcttttgtggaaagggcaagtaccactaatagggtgtatctcagaaactgaattgaaataagggaaaataggattttctgtcctggtttttgaagattgttcttgattcccttgattcccaggagagattctctgacattcacgtgtcagccactttggcacggaagccttacagtgtggggaaccaaaacttcgtgtctccyctttccccgatgccatcagcatagacttgacttccttaaaccgagagttttgatgtggccttggcaaccctaaaatcag

SEQ ID NO: 523487 - DNA, 527 bp, Homo sapiens
tgcgattttaataaggacctggtaatttagaaattcttgctaataacagcacagaagctcagccataacgagggtccgttttaagaccgaggtctaaccatattacaaatccatactaacatccccccaaaattctatctatctatctatctatctatctatctatctatctatcatctatctatctatctacccacctacccatctacctatctttctacacgcatatatatgtattcatataatccagtccagtcaaggactaacagaatgctcgccttcagttcctaggcttcccagataaatatctcaaatcctctctctaaacttgggcccaaacaaaacattttcaaaagtaacctgatctgacgctggtgcacataaaggggagtaattgaatcaccttttcggckacggacttagggaagctgttgtgagacgaaagatagagaaaactgatttagcagttcttggtttcacctgccttggttttccttaaaaaaggaaaaataaattaaagaagtttg

SEQ ID NO: 523488 - DNA, 639 bp, Homo sapiens
acttgcacaagaaggatcatttgccctgtgcatgtttcattatatgacaaggtaattatctttaatggaacatgaaaaagaatgaaacakatttttttttctcttttcttttttttttttttttttttttttttgagacggagtcttgctctgtggagtggctggagtgcggtggcaacatatctgctcactgcaacctctgcctcctaggttgcagtgattctcctgcctcggcctcccgagtagctgggattacaggcgcccaccaccaccacgcccggctgattcttgtagttttaacagagacaggggtgtcaccattttggccaggttggtctcgaactcctgacctcaggtgatctccccgtctcggcctgctgaagtcctgggattacagaggtaagtcaccgcgccgggccataatgaaacagatttcggatgccagattccaccacaagtggattttttcattaacaagggaggataatagctattctgagcttcagagtcatagaaagctagacaagaatcttacactttgcaaaactaatatttgaaatgatattaccttgtgttaatcatttaaaaatgtatcattttagcacacccatggataggtttttgctgagttaagaatta

SEQ ID NO: 523489 - DNA, 639 bp, Homo sapiens
acttgcacaagaaggatcatttgccctgtgcatgtttcattatatgacaaggtaattatctttaatggaacatgaaaaagaatgaaacagatttttttttctcttttcttttttttttttttttttttttttttgagacggagtcttgctctgtggagtggctggagtgcggtggcaacatatctgctcactgcaacctctgcctcctaggttgcagtgattctcctgcctcggcctcccgagtagctgggattacaggcgcccaccaccaccacrcccggctgattcttgtagttttaacagagacaggggtgtcaccattttggccaggttggtctcgaactcctgacctcaggtgatctccccgtctcggcctgctgaagtcctgggattacagaggtaagtcaccgcgccgggccataatgaaacagatttcggatgccagattccaccacaagtggattttttcattaacaagggaggataatagctattctgagcttcagagtcatagaaagctagacaagaatcttacactttgcaaaactaatatttgaaatgatattaccttgtgttaatcatttaaaaatgtatcattttagcacacccatggataggtttttgctgagttaagaatta

SEQ ID NO: 523490 - DNA, 639 bp, Homo sapiens
acttgcacaagaaggatcatttgccctgtgcatgtttcattatatgacaaggtaattatctttaatggaacatgaaaaagaatgaaacagatttttttttctcttttcttttttttttttttttttttttttttgagacggagtcttgctctgtggagtggctggagtgcggtggcaacatatctgctcactgcaacctctgcctcctaggttgcagtgattctcctgcctcggcctcccgagtagctgggattacaggcgcccaccaccaccacgcccggctgattcttgtagttttaacagagacaggggtgtcaccattttggccaggttggtctcgaactcctgacctcargtgatctccccgtctcggcctgctgaagtcctgggattacagaggtaagtcaccgcgccgggccataatgaaacagatttcggatgccagattccaccacaagtggattttttcattaacaagggaggataatagctattctgagcttcagagtcatagaaagctagacaagaatcttacactttgcaaaactaatatttgaaatgatattaccttgtgttaatcatttaaaaatgtatcattttagcacacccatggataggtttttgctgagttaagaatta

SEQ ID NO: 523491 - DNA, 502 bp, Homo sapiens
atattaactctatcaatacaatttacatggtaggtaattggtattcactgaaaattctttcacctttgctttatgttttagaagttttatgacaaactgctggggaggaaaaagggagagggaaaaattttgtacttctgctgataacagagaccagaaataccactggcttaaacaaaacaagggttttcttggtttttttgttttggtttgktttgttttcatgtaaaatcaattcaggtggttgcagtccagggctgatctggcacctcagaggtgtcattcatgccccagactgcttctgacttcattctctgctgtctctgcatgtggcttccaatgtcaaggttgcctcatggtcccaggagggccgctgcacctccaggtcaaaagcctacatcgcaggcaagaggaagaggaagtacagagagtgtaccctcacactcccagctcttttggcccctcctttgaaggatctcttggagaagcataagcccacagc

SEQ ID NO: 523492 - DNA, 618 bp, Homo sapiens
gtcacctacaaaacactggttccaactttgtcccttggtctctgctrtctaccagatggaaaagaacgttgtagtacctaagaaaattaggccttatcaccaagaagaaagggggaatgcatgatgcagaagggaccagccatctcaatcagatactacacagtctaaattcaaacatttacaatataattaaattgcatcagccccagtcacatcttagccttaggaacttcgatcattgacttgcaatcccagaaagtctgttttgaggtcctaggccacaggaagaaccaatttgttttatagacatcttacagagacagcattcacagtttatctagagtctggcctcagagaatatgtactccactggcagcaggagaaacaaatacacaggaaaatacagtgtagcacagaacaggagctgagggtgaatggagatgctcagaaacacctgcactaaaaatttgctgaaaaaggtaaaacgtgtcaagcagcactgcctctggaagccagaaaaattacattttttgataacagatcctaagcctggatgctggaggtgcttaaaaatgtgcattgtgggccgggtgcagtggcttaagcctgtaatcctag

SEQ ID NO: 523493 - DNA, 404 bp, Homo sapiens
ctgctcatgcctcactcaggtagggaacaattccacgcttgtttctgaagcagacaattacctaattatgtcctcataggacttttgactccttcccaaacctgaagtccatcccgatctgaaggttcacccgtcactaagagacaaatggtgcttctgttaagatcagtttcccccaccagtttctttgtatctygccttccctgtctgagaagcacccttcctctcatgaccccaactccaaaaccctctgacagatcctcccccttgtgcctacagctcagttttctgtgcttggaccctctgggcccatcctggccatggtgggtgaagacgctgatctgccctgtcacctgttcccgaccatgagtgcagagaccatggagctgaagtgggtgagttcc

SEQ ID NO: 523494 - DNA, 613 bp, Homo sapiens
tgctcatgcctcactcaggtagggaacaattccacgcttgtttctgaagcagacaattacctaattatgtcctcataggacttttgactccttcccaaacctgaagtccatcccgatctgaaggttcacccgtcactaagagacaaatggtgcttctgttaagatcagtttcccccaccagtttctttgtatctcgccttccctgtctgagaagcacccttcctctcatgaccccaactccaaaaccctctgacagatcctcccccttgtgcctacagctcagttttctgtgcttggaccctctgggcccatcctggccatggtgggtgaagacgctgatctgccctgtcacctgttcccgaccatgagtgcagagaccatggagctgaagtgggtragttccagcctaaggcaggtggtgaacgtgtatgcagatggaaaggaagtggaagacaggcagagtgcaccgtatcgagggagaacttcgattctgcgggatggcatcactgcagggaaggctgctctccgaatacacaacgtcacagcctctgacagtggaaagtacttgtgttatttccaagatggtgacttctatgaaaaagccctggtggag

SEQ ID NO: 523495 - DNA, 613 bp, Homo sapiens
tgctcatgcctcactcaggtagggaacaattccacgcttgtttctgaagcagacaattacctaattatgtcctcataggacttttgactccttcccaaacctgaagtccatcccgatctgaaggttcacccgtcactaagagacaaatggtgcttctgttaagatcagtttcccccaccagtttctttgtatctcgccttccctgtctgagaagcacccttcctctcatgaccccaactccaaaaccctctgacagatcctcccccttgtgcctacagctcagttttctgtgcttggaccctctgggcccatcctggccatggtgggtgaagacgctgatctgccctgtcacctgttcccgaccatgagtgcagagaccatggagctgaagtgggtgagttccagcctaaggcaggtggtgaacgtgtatgcagatggaaaggaagtggaagacaggcagagtgcaccgtatcgagggagaacttcgattctgcgggatggcatcactgcagggaaggctgctctccgaatacacaaygtcacagcctctgacagtggaaagtacttgtgttatttccaagatggtgacttctatgaaaaagccctggtggag

SEQ ID NO: 523496 - DNA, 661 bp, Homo sapiens
tgaagcttctctaaccccttttcacaaaaggagaatcaaagagtcccaaaactcgggagtaggagcctcttctctgagggcgaacctagtcttttttttttttttcctgcaagatccttatgatgcagcaatttttaaacattgaaaacaaccatgacacatggagggagrgtggtgtggataggtgactctctacacttggtgttcctgtatgctgcagccatcccttcctgcccaggggatttcccaagggacagagctggggaaaatccttattgatacacgctcataattcattcaacaaatgctcaagacactgttctagaaaccaagggtaaatcattgaacaaaatatatcaagatctcctccctcaaaaagtgattaaataattgaccatatactctatcagatggtttgaacatctgtaggaaacattaagcatggagggaataaagagaggcaggggcatgagatattgcaattattaacagaatggtcagggaagaattcactgtaaagatggaattgagtcattctgtctgatggcaaggaaccatcagatgcttaaagactgagcaacccagctacaggaagagcatatgcaaagggcctggggaaggaacatctctggcagtttccaggaccctcaggaggtgatgc

SEQ ID NO: 523497 - DNA, 661 bp, Homo sapiens
tgaagcttctctaaccccttttcacaaaaggagaatcaaagagtcccaaaactcgggagtaggagcctcttctctgagggcgaacctagtcttttttttttttttcctgcaagatccttatgatgcagcaatttttaaacattgaaaacaaccatgacacatggagggagggtggtgtggataggtgactctctacacttggtgttcctgtatgctgcagccatcccttcctgcccagrggatttcccaagggacagagctggggaaaatccttattgatacacgctcataattcattcaacaaatgctcaagacactgttctagaaaccaagggtaaatcattgaacaaaatatatcaagatctcctccctcaaaaagtgattaaataattgaccatatactctatcagatggtttgaacatctgtaggaaacattaagcatggagggaataaagagaggcaggggcatgagatattgcaattattaacagaatggtcagggaagaattcactgtaaagatggaattgagtcattctgtctgatggcaaggaaccatcagatgcttaaagactgagcaacccagctacaggaagagcatatgcaaagggcctggggaaggaacatctctggcagtttccaggaccctcaggaggtgatgc

SEQ ID NO: 523498 - DNA, 506 bp, Homo sapiens
ctcactccttgctcaggtagggaatgattccatgattccacatttatgtttctgaagcagacaattatctcaattacctaattaagcagacaattacctaaatgccctcttagaacctttaactcattcccatacctggaagtccatcccaacctgaaggaycacctgtcacaaagagacaaatggtccttctgttaggattgtgttcccctctaggttctctgtatctcgccttccctgtctgagaaggacccttcctctcgtgaccccaactccaaaaccctctgatggagctttccccttgtgctgacagctcagttttctgtgcttggaccctctgggcccatcctggccatggtgggtgaagacgctgatctgccctgtcacctgttcccgaccatgagtgcagagaccatggagctgaggtgggtgagttccagcctaaggcaggtggtgaacgtgtatgcagatggaaaggaagtggaagacaggcagagtgcaccgta

SEQ ID NO: 523499 - DNA, 506 bp, Homo sapiens
ctcactccttgctcaggtagggaatgattccatgattccacatttatgtttctgaagcagacaattatctcaattacctaattaagcagacaattacctaaatgccctcttagaacctttaactcattcccatacctggaagtccatcccaacctgaaggatcacctgtcacaaagagacaaatggtccttctgttaggattgtgttcccctctaggttctctgtatctcgccttccctgtctgagaaggacccttcctctcgtgaccccaactccaaaaccctctgatggagcttyccccttgtgctgacagctcagttttctgtgcttggaccctctgggcccatcctggccatggtgggtgaagacgctgatctgccctgtcacctgttcccgaccatgagtgcagagaccatggagctgaggtgggtgagttccagcctaaggcaggtggtgaacgtgtatgcagatggaaaggaagtggaagacaggcagagtgcaccgta

SEQ ID NO: 523500 - DNA, 654 bp, Homo sapiens
cttgtgtaaatagctcctgaatgaaatcttccttggattatcaaatgtgagtctgycattgattcccattgagaccctccctgatacaggagctctcaagaatttagggcaatttatccttctacagcattgggttctgatcttcacattgaagtgaagggttatgaggatggagggatccatctggagtgcaggtccactggctggtacccccaaccccaaataaagtggagcgacaccaagggagagaacatcccggctgtggaagcacctgtggttgcagatggagtgggcctgtatgcagtagcagcatctgtgatcatgagaggcagctctggtgggggtgtatcctgcatcatcagaaattccctcctcggcctggaaaagacagccagcatatccatcgcaggtcagtaccctgcttggcctcagctttactgagctgagctgtggcaggtgatgaagggggatgtgtgagtctctactgtgtgagtctctgcggtcaacctgggtctctacaatgcatgtaaggctcaaagcagggacctgaaggctactcactgctttaggggagcttccccacgccacaaagctgttcatgccacaaacatttactgatcacttcctgtctgacagaaacagaaagtgtgacag

SEQ ID NO: 523501 - DNA, 654 bp, Homo sapiens
cttgtgtaaatagctcctgaatgaaatcttccttggattatcaaatgtgagtctgccattgattcccattgagaccctccctgatacaggagctctcaagaatttagggcaatttatccttctacagcattgggttctgatcttcacattgaagtgaagggttatgaggatggagggatccatctggagtgcaggtccactggctggtacccccaaccccaaataaagtggagcgacaccaagggagagaacatcccggctgtggaagcacctgtggttgcagatggagtgggcctgtatgcagtagcagcatctgtgatcatgagaggcagctctggtgggggtgtatcctgcatcatcagaaattccctcctcggcctggaaaagacagccagcatatccatygcaggtcagtaccctgcttggcctcagctttactgagctgagctgtggcaggtgatgaagggggatgtgtgagtctctactgtgtgagtctctgcggtcaacctgggtctctacaatgcatgtaaggctcaaagcagggacctgaaggctactcactgctttaggggagcttccccacgccacaaagctgttcatgccacaaacatttactgatcacttcctgtctgacagaaacagaaagtgtgacag

SEQ ID NO: 523502 - DNA, 639 bp, Homo sapiens
tttttcttttctttttttgcttattttccagagaagctccaggaggaactcagtaagttcccattccccaggagacccaggcatgtcttcttatccccactttgagcaccttgataacccttccctattcattccattgcagagtggaggaaaatccagtacatggctcgtgagtgactctgacattttctctgaatttgaatcttgaatctatgactctcttctgcttggaaattttccagcccataagtctttgcccagggttgaaaaatggtcctagatccctttactcaggaaaagaaaataagtttggctctttggagaaaccacccagaaggagtctctctctctcgtctatctctctctctaagaaaagaaaaagaggtcttcaatctctttgtactargggccacagacctttatgccctaaaaagcactgaggaatatccaggggtacacttcaaaaggaagagagaaggatgaggtgcattttctgtggcaggaaacttacttgttgttttccataatctagaggatgttgaaaggaaaacaagaatggaagatttaagagataagaaaatcagaaaagagagagggagacaagtgtgtctaataaagaggaatagctacagtggctca

SEQ ID NO: 523503 - DNA, 136 bp, Homo sapiens
ctggccagcctgtcccgccggctgcttcctccgtccaccgtcggcracgcgcggccgcatccgcaggactggggcctttccggaattcggcgtggcggacgcggcgcaggaagggcaaagaccgccggccgagcgg

SEQ ID NO: 523504 - DNA, 136 bp, Homo sapiens
ctggccagcctgtcccgccggctgcttcctccgtccaccgtcggcaacgcgcggccgcatccgcaggactggggcctttccggaatkcggcgtggcggacgcggcgcaggaagggcaaagaccgccggccgagcgg

SEQ ID NO: 523505 - DNA, 596 bp, Homo sapiens
tggatctatcacaaatgtcccacctgatttcttggaagctttgattagcatccatgtcctccatggcaaacatttaattataagggctggttgttgataataatcattgctaacatctatttattatccttatgtgttaagcattgtgcccaacagcttatacaatttagtctcatttaatcctccaagtagctatttgagatagttactattatctttcttttgcagatgaggaaagtgaagcatagagaagctaactgtgatgactgggatcactctgctgataattgtgttgctaggactagattcaggcccctctaactctgaaagccaaccacttaaatgatacttgattttcaagttggggggatggaggctgtggctaagacctgtccctggtggggtatagcagaaggacttcggggcttttttgttcaaactgcttatgtttatgttctcctttcctttccctcatcctttccttctccctcttctgatatgctttctgggtagggtggggtgaggtgtgtccgttgctgtcacactgagtcactrttcctcatgggtgtgccatagccttcaggagtattgggatg

SEQ ID NO: 523506 - DNA, 606 bp, Homo sapiens
acagctgagtaagtgtaaacattttaaatacctgcgttagatttgccatcacyaggctaattttgccatctagtggtagcaacatggataacaggcaagttcttccctggatgactaggaattgaaccttcctgagaagcattgatgagtaaattacttgtgttttctcatttgtggtttactctagaactttaaagctggaagaaatcttagaaatgttctagtccaactcaacagttaaggactatcagagagattctttaaaataaaggcttcgaaatgcatggcggagttagcaggtggtatgcatttgttgaatagacaaatttatctatcctgttctaattcttgtttttcctctagcaatattgcatcctaccactatgaagttttatcgtgatcttctgtttttagttttaaaattgcatttctgtatattatttcttaaaataacacattttcatttatattttaagtcccagaaggaaacattcttttctactgtttttgtttgtttgctttgagacagggttgccctgtctcattctagttgtccaggctggagtgtagtgacacaatcacagctcactgcagcgtccacctccc

SEQ ID NO: 523507 - DNA, 606 bp, Homo sapiens
acagctgagtaagtgtaaacattttaaatacctgcgttagatttgccatcaccaggctaattttgccatctagtggtagcaacatggataacaggcaagttcttccctggatgactaggaattgaaccttcctgagaagcattgatgagtaaattacttgtgttttctcatttgtggtttactctagaactttaaagctggaagaaatcttagaaatgttctagtccaactcaacagttaaggactatcagagagattctttaaaataaaggcttcgaaatgcatggcrgagttagcaggtggtatgcatttgttgaatagacaaatttatctatcctgttctaattcttgtttttcctctagcaatattgcatcctaccactatgaagttttatcgtgatcttctgtttttagttttaaaattgcatttctgtatattatttcttaaaataacacattttcatttatattttaagtcccagaaggaaacattcttttctactgtttttgtttgtttgctttgagacagggttgccctgtctcattctagttgtccaggctggagtgtagtgacacaatcacagctcactgcagcgtccacctccc

SEQ ID NO: 523508 - DNA, 620 bp, Homo sapiens
ctgaaaagttgttcaagcataatattttgaaatctgacatgcattaatgagagatttaatttaattagaaataagataacacacaagtataaccttattaagagaaactatggcaagcaaatctattattacaatggagtatataaacaaataaggtatcactaggtttacaattcagacagtctcattacattgaaattttatgtttcttcaaatcataatatccggtttctagaaaatgtttactgcaaattataataaaatgcaaaacaaatcataaaaatacatatcaaatctttaacatctatcatacatgttctagccccactgctgttaccaccagtgcaggccccygcaaccctgctctctggattcatgaacagtcacggagtgggatggcatcctgtctctagtctagatctcctccaatctagtcttcacagtgcagccagaatgatctttccaagtggaaaatgttgacaaagttacttctccaaaatcttctatcagcttcccatcatttttcagttcatataatttgaattccttcgtgtagtgatcaggtccttctgtctctactcactggcccctgcagcaaagcaggctgcagctgtgatccg

SEQ ID NO: 523509 - DNA, 544 bp, Homo sapiens
ttaatcactaattttcaaaatacttaaattctagtagctgtcaagttatatagaaacattatacacaatctctacccaagcatattgtccaatgaagagaagtaataaaaaaatcacaaataaatctagttgggaaaaacaaattaaagaagatacgtaatgcagtgcattatgctcaggcagtttactgaaggtaactttggtggctgaaagattgtcatggtggacaaagtccttaccgctttaatttttcatgattctgaaataattctaaaagctttttctctgtgtgaaaaataaaattaaaagaggctgagaaaagacaatgtagatgaatagtcgacccatcttggatgtccattcagtagtactctaaaataagaarttaaaactctctcacatgagtatctttgatctgttcttttctagtgaaaagaatatgctttttgaaaagctagaagagtggttctcaacttcacatataattattatatagtccaagtatatattttttgagcaaaccaggtaagactgatatgaagcc

SEQ ID NO: 523510 - DNA, 619 bp, Homo sapiens
aaaataattaaaataagaggtcaatgaagaattcatgatattttcaatgactctatctttcagsgtagttgatattatagaacaggaattacgtgtttagatatggtcacttctgcagttaggatgcagccctggatgatgtagtcgaggagctgaatcagtgatcgatgtatgattataatttccctaccagttagagcgtgagagcctggaaaactagggttgtagtcatggttggtgctaataatgattgcacctaacgaccactaaatattttgtttcctttctgtgtattcatttctgcaaaatctaaccttctgcctgctttgtaaatgaagttttattagaacacaaccagttattccactaaggtggaatctaggaatggcattctgggcctctctctaaaagcatgagcaaaaaagagttacttagttttctgtagtaactaactaccaaggggaattgaggttacaggtacacattggagaccagaaaacatactaatggaaatccagaaataaacaattcataagttttaattgcacaccattatgggtagtgtggtgaaatctgactggaacatccgtttgtccagtgtattcacactgtatacaca

SEQ ID NO: 523511 - DNA, 621 bp, Homo sapiens
tattaaataatatttctcaaacaaattaaaaggctctgaatgtaacaagtagtaagaaaacccttactacttttccttttgtgttctctcgacgccccaaaaaagtactacattcatttatttgctggtgaggttcttggttgttcacttaaaatggtgacacaggtgctaaaacatttttaacatatttgtgaactatgtaagtatcttacaattcaaatcaaatctttgaattatctctatatggacctaaagatgaagtagtttattactgttmtctgcagattcatgcaataactgaggactttgatgatgaaaggtgcagtgttcagccagaccagcaacgggtgaaacgtaccgtctccacaaatcaaatagatggtcgtctttggtcctcactggatgggtagagcagatgttggtagggaggggcctgctttgcacaatcctttggacaaataatttgataactttggcagaattgaatctactaatttgattcttagaattctaggtggtggaacagtaccagatgcctcacaaaatattagcatccatgtttaactgctcctcatcacatcctcttcactcctctttggggagcttcattttaaattagat

SEQ ID NO: 523512 - DNA, 665 bp, Homo sapiens
tgggatcctgaccctctggtgcagtaaacactgcatttttttttccatattgacagatacacagcctctgcatttgacattgctggttattgtttaatgcttagcataatcctctgcttgggagcattcacaggacacttgttggttgactgactaattcttcacatcacagaactgaccarttgtgagagttgctcaaatctttagtttacagttgagcaaataaacaagagtggggacatagctttagactcacaaatggcatggaatatctcagacactttctgcagttctaatattgatctaggagtgttcttaaaacattactatggcaacaatccctattcagtgggggaaagcaatgcattatctatgcaaagaaagaagtgagaaaagagtatttcagatgccgcctttttatgccctgcagattgatgtgccctgacctctcagtattatttttgctgaggacagtgtctggaaaataagatgtgttgagagctactgactgactctggaagatgtcatcaattcaaatactatgtcacagaaaatcgcatcttgatgatttaagattttccacaaaaatgaatactttcatcatatttgaagttaatcaggtttatcacttgagaacaccatgaaaaaaataatattttcagcca

SEQ ID NO: 523513 - DNA, 614 bp, Homo sapiens
tgtctattgtacttagagtttctgcaaaaataattatagattgagcaacataacttccttgtgtataaatagcaatatgtttgaagtcaccgagttacagtactaaaactctgaaggagaaggcgacagtgtaaaagttaactcatttaactccactgcgtctgtaaaagccagcatcaaatgcctttaaaagtgtacctgtgtaactgatggtagycgttaccctagtgaaaaatatttgttgcaaagaaaaggctagactaagcaatgttctctgaaacatttaaaacatctgaaaataaacatttgtggattgactgatgtgatgtagacacagaaaggtcttggactcatagcttgttaagttaataagttaggctcctgggatacatgattaccttcaattgcattctaaagggagacattaaaaattttattatagtggaagcatgccatgtgatgtccccaattttgaagatattaactttcattttagaaaataaaaagagaaaataccactgagtggttaacattaaagactctggagctagacattttgggtttaaatactaactccatcatgtactatctttgtgtaatttggagcaagttat

SEQ ID NO: 523514 - DNA, 615 bp, Homo sapiens
ttcaatagtttgaagttccaaatgagaaaagatcctacggtgaatggcaaaatcatatggcaaaaatgaaaaggaatagaaaattatacacatttttaaagaatcatcattttgtagttgctggaattttattgttgcattaaaaaatattctacatttaactagaagacagcagtttgcccttcctggaaaaaggtgaataaagaaacttctaaactgcagtaaaacaaaagtaaaaaaaacaacaacaamaaaaaaaaaaactctgtattatagaaaattttccatttatctgtaaaaatccacagttaaactacttcaaaagaaatttcatgagacctctgcctttggctctgtgtgatttcaattgaaaatggctgtcagtaatggttgcggaattgtggagcacaggagatgtgtcctgagactggatggagatcagaaaatgtcctagttttcagacatgggaagaagtttagactcttcagtccacaaaacagaatatttgatactgatactgaaaaaactctgaaatatattgtcatgatgagaccatcatgggaagaggccatcactaaagtcagaacaagatgaataatagagagggaagaggcc

SEQ ID NO: 523515 - DNA, 561 bp, Homo sapiens
catgacccaagactcaaccagtgctgtggcccttacctaaagacagactcagtacacaaggactgttttccatacccctatgatttcatccccaacaaatcaatattccccataccctagttccctgcccaacaaactacccttgaaaacccctaacctctgagcctccagggagattgatttgggtaataaccccatcccccaaatggtgtggagggccttgcatcagttaaatgctttctttactgcaacgccatggtcttgacgaattgattttgtctgtgcaactggcaggaagaacccaccgggtgattakatctacaacctgctcaatttctacaagtgccctaccacttgagcactgctagaccatctgcatccaacatctctctgttactggtccttttgaaatattttgtcatatataatatttcatactctagggtaaagcagcaaggtcagtctacaggctccatgccagagcagtaccacactgcttaccagacttccaaaggattccctaacaattttgacttttttcctttcattgtcattacatag

SEQ ID NO: 523516 - DNA, 561 bp, Homo sapiens
catgacccaagactcaaccagtgctgtggcccttacctaaagacagactcagtacacaaggactgttttccatacccctatgatttcatccccaacaaatcaatattccccataccctagttccctgcccaacaaactacccttgaaaacccctaacctctgagcctccagggagattgatttgggtaataaccccatcccccaaatggtgtggagggccttgcatcagttaaatgctttctttactgcaacgccatggtcttgacgaattgattttgtctgtgcaactggcaggaagaacccaccgggtgattatatctacaacctgctcaatttctacaagtgccctaccacttgagcactgctagaccatctgcatccaacatctctctgttactggtccttttgaaatattttgtcatatataatatttcatactctarggtaaagcagcaaggtcagtctacaggctccatgccagagcagtaccacactgcttaccagacttccaaaggattccctaacaattttgacttttttcctttcattgtcattacatag

SEQ ID NO: 523517 - DNA, 623 bp, Homo sapiens
taatttgttgttttttttaagaaaacaaatacacaattctattttcccccttacagaaaaaattwaagtataaatattataccatacaatactagtcttcaaaagagtggctatacctactatcttcaactctttttcatgactgtcttttgaaccctccctggtcaggcctttacctgatgaacctgcaaaactgctcctctcaaggccacagatggcaaccacattggtgaatctcaggctcaatgctcagtcctcacccttcccgagtgaccagcagcatttgacaacttggtcacttctttcctaaaactccctctcctcacttgcccagcctctttgtttttctttctttcattttctcatctctatttaaaaaatccaatgtttctatacttctatcaaattttcatcatgtgctatattctatacattgtattgaatcgctaaagaaaacctcataaaatgcaaaagtgctagtaactcataaaagaacagaagaataaactcttctatttagaacctttgtctttccttcacctggtatctaatttcatgtcttcatttttagcaaatactaagaaagctccctattgactcaatgacagtgagcacatgggact

SEQ ID NO: 523518 - DNA, 514 bp, Homo sapiens
ttggtgggttttatatctgcatgttactcctcaactaacttacaatttatgttgatggaaagttttatacttttttcttgtttttattccttgctatttttcccccaaatagctaactgattgtcttcataccattcattaaataacatttattctcccaattaatactcttggctattttaacagttgaattataatgttcaatgacattaaacctwttggccaattaaaatcccaaatccttttgtatgagctaatataaaggcgtttctcccaaataaatgtgacctcatccttgttcttaaggtacttatattatcatttagaaaaatacaaatagccagataattaaagtgtgattgattcaataattaaaggcataaccaagatgctatgggagttcagaggattagatggctgaccacagtggagatggccttgcaggggaaatcaagtgcattaaacatcgttttctctttttaatctggacacaacagatgacacaggctgagat

SEQ ID NO: 523519 - DNA, 600 bp, Homo sapiens
agcactgccccatgtcgtcttcgttcaggttctaagcagaaggaactgcctctatctgggacaggctattctcaagtggcaggaagaaaacgaaatggctaaagcatcgtaacaggtcttaaaaccttcacttggccatgcagtcccccagttctgctcacattccactgaccaaagcgagtataaggctaagtctgctcttgcaaaggggccgggaagtatggtccacccacaaggaggcactgaaagtcacctaacagtgggtggaagtatacacaatcctcttacagaaagaggagcaaacaattgggaacggtagtgtactctgccacatgaatcgtaacagwtttacttgttatttaaggaaatagtgccatgctctaactgacctggttggctcagcaactatagtcaaggacttttaaacagttttatcagtttccactgctagacacagctctacttcatttcctctgatcaattgcctcactcaccgtgcagagaaagagttccattcctcacagccaggaacttgactccatagggaaagaagggagttgagtaggaactcccgtagagtgtgatctgagctctgccttg

SEQ ID NO: 523520 - DNA, 543 bp, Homo sapiens
tctatgatttttactttctaattatcaactacctgtagcttattggttacgggtgcattctttggaaaccatcaggtctgggaaatctatgccaagcttcagtgtttttcttatgtaaaatgtagatttttatatcacaggtttttgctttgaagactggaagggacaatgtatgtaacacctctaatacaataaacacattatgcacataatacaaataaacggaaattattcatgtttttattatcttttgcaatgtctgcyagtttgttgagctcataagagctttctataaacatatgctgtttgattgaattgctaattactaagtgtttaagagacatgtgtttccttccaggtgttataggaaaatacaatcagtataatctaattcgagattcacatgttcaaggcctggttctattagacaccttctggctgactttaggaaaatgctctaacatctgggctgttgtatcctcatcagctcattgaaagccatacacaggagcctgaagagttttgtatagctcaatcacccag

SEQ ID NO: 523521 - DNA, 520 bp, Homo sapiens
ctagctggagttaattatgaatggtataaatattgcataagaatcatatcatatggttgcttagaaaagttctttgttcgaaaagctgattacttttgtttaaaagaaaggtcattaagacaacggcagatgtaaagctttgaatttattgtttatgcaagtaaaaactcaggtagtaggaatggcaatgatgttacagtcttcttctttagcatgtttcaggaaatacgtaatgcaccattttgatccaaagtcctagtgacctaaatcctatggttatacagttttcaaaatcctcaacctgattcagttcgttataaagcactaaatttatgtcagagttcacagttgtcatcatctactatgctacttttgtaaatcattgcctgaaagtgatttctgtgatgatctgggggagaagatgcattgctctttgaaatcaaatttgtcactaacatacatacaatttccmctggtatgtcgcaattaaatgatgcagcccttatccatgcagtcttgc

SEQ ID NO: 523522 - DNA, 531 bp, Homo sapiens
cagtctttcattgggaagtctgggtagctggggctctggaggagttttcttccaccagagcagagacaaacttctctctgaattgatgggcagagttctctctagccacattttaactgagggtgtagcttttccaagggtctgctttatgcaaggaatcctgttcaaactccctggctcttyggagcccaagatcttaaatttcatgaccacctcaatgttaaagccattggctgtcagggccaatttctgggtctaacacttctattctccagcttatctcaacttcacctgaggttgcattcttttctttttcatttgtgtcccacggagatttttctttcttcttacagacctatttatatttactttctttttcagttatgttttatgtcaagtttctgttgtttatagtaggaggagtgacttgctatctcaattcttaatgtaagaactgacagtgaaagaacatctgctttgtattgaactaacgtgggcctctcagtataatttctccttgctggtctttct

SEQ ID NO: 523523 - DNA, 530 bp, Homo sapiens
agtctttcattgggaagtctgggtagctggggctctggaggagttttcttccaccagagcagagacaaacttctctctgaattgatgggcagagttctctctagccacattttaactgagggtgtagcttttccaagggtctgctttatgcaaggaatcctgttcaaactccctggctctttggagcccaagatcttaaatttcatgaccacctcaatgttaaagccattggctgtcagggccaatttctgggtctaacacttctattctccagcttatctcaacttcacctgaggttgcattcttttctttttcatttgtgtcccacggagatttttctttcttcttacagrcctatttatatttactttctttttcagttatgttttatgtcaagtttctgttgtttatagtaggaggagtgacttgctatctcaattcttaatgtaagaactgacagtgaaagaacatctgctttgtattgaactaacgtgggcctctcagtataatttctccttgctggtctttct

SEQ ID NO: 523524 - DNA, 645 bp, Homo sapiens
ctgttattcagtgagtttgtgatttggggaataatctcttttttaaaaaacacaaattctcactttaataagtgacttttgtaaaccaagagctttccttgtcaaattttcattataggttaatgatgaaatggcaggtaattcacacttttggacagagcgcaccgcccccgtggaatcaccctacagaagaggccagctataaaggatgtctcacacctttaagatcagtgtttctcaatgtgtggaccatggatacctgtattagaatacccaaaggatttgtttaaaattcaggctgagcccttcccaagacctaatagagctaaaagctttgggagtaggtggaggaaacctgcatctttacccagcaatccaggtaatttatatgcatactacattttgagacccactgatgaaagaattctaattttctatagagttactctagcaaggaaccttctcatttcttatgtattaggttatttctatatggaacatttcccagtagaccatattatttatggtatcttattaggtggaagccaaaagaacgttaaataatctgctggtgtttttkggttagttttgcactatttctcacagtgcaagcaattcttgttacctagtaaaacggttccccct

SEQ ID NO: 523525 - DNA, 632 bp, Homo sapiens
  misc_feature (1)...(632): n = A,T,C or G
ccccaggccaaggagtctgggagtcttcatcttgccaccctgtagcccctcagtgggcaggctctgtcttctgtggcaagtcacatttctcccctgagcctaggwtccttccaccagtgaccccagcaagccgcacacgtgagctattttgtatgattcaagaccctccacacattctcttccaagagcctcatccaacccagatgagcgtggccctgaccagcttcccctggccaaggatggagaggtgagaaggggccccttgccggagaggcgttctgaggggtagagcgcagattctccctccacagcagctcttaccaaatgtagagatgccctgcaggccactttccaacactgtcacacagggccatgagccaggcagattaagtgagcagagccctattttccaaaggagagcaacattgttccatttgattcctaagnacaagagaaagggacaagatctttcacgaaccaacactgtaaagtaacccaggggcagccttgatttcataggtttgtccccagtgttagcttaatatctggcatgtggtaggtgttcaataaacatgcatcatgtctgtgccctcacggtgtccctttgtcttcttgtcaaaacactcatcctt

SEQ ID NO: 523526 - DNA, 632 bp, Homo sapiens
  misc_feature (1)...(632): n = A,T,C or G
ccccaggccaaggagtctgggagtcttcatcttgccaccctgtagcccctcagtgggcaggctctgtcttctgtggcaagtcacatttctcccctgagcctaggatccttccaccagtgaccccagcaagccgcacacgtgagctattttgtatgattcaagaccctccacacattctcttccaagagcctcatccaacccagatgagcgtggccctgaccagcttcccctggccaaggatggagaggtgagaaggggccccttgccggagaggcgttctgaggggtagagcgcagattctcyctccacagcagctcttaccaaatgtagagatgccctgcaggccactttccaacactgtcacacagggccatgagccaggcagattaagtgagcagagccctattttccaaaggagagcaacattgttccatttgattcctaagnacaagagaaagggacaagatctttcacgaaccaacactgtaaagtaacccaggggcagccttgatttcataggtttgtccccagtgttagcttaatatctggcatgtggtaggtgttcaataaacatgcatcatgtctgtgccctcacggtgtccctttgtcttcttgtcaaaacactcatcctt

SEQ ID NO: 523527 - DNA, 632 bp, Homo sapiens
  misc_feature (1)...(632): n = A,T,C or G
ccccaggccaaggagtctgggagtcttcatcttgccaccctgtagcccctcagtgggcaggctctgtcttctgtggcaagtcacatttctcccctgagcctaggatccttccaccagtgaccccagcaagccgcacacgtgagctattttgtatgattcaagaccctccacacattctcttccaagagcctcatccaacccagatgagcgtggccctgaccagcttcccctggccaaggatggagaggtgagaaggggccccttgccggagaggcgttctgaggggtagagcgcagattctccctccacagcagctcttaccaaatgtagagatgccctgcaggccactttccaacactgtcacacagggccatgagccaggcagattaagtgagcagagccctattttccaaaggagagcaacattgttccatttgattcctaagnacaagagaaagggacaagatctttcacgaaccaacactgtaaagtaacccaggggcagccttgatttcataggtttgtccccagtgttagcttaatatctggcatgtggtaggtgttcaataaacatgcatcatgtctgtgccctcayggtgtccctttgtcttcttgtcaaaacactcatcctt

SEQ ID NO: 523528 - DNA, 537 bp, Homo sapiens
ttctaatctaagctaggcctttactgataggcaacattttaaagtttttgataccttttccttttctgatttcaatgttttgtcattttcacctggatttttgtggtagtttcttaaattatttccctaaacctcttcctcctcctagtgccattacctattctatagtcactccctatgagatggtattcctaaaacccatatttaatcatacaatttctctccttaaaatcctttgatggtttccactgcttatagggagagaatgacctacacaatctttctcaaatctggccctcatctacgttactttcaggtattttttctcaggaatttcatcttccagttagaattattcaaggtcttayattttctctctgcctttgtgtatacttctacctaaaattgcttcatcctggctccttttcttcttggtggattcaaatttatcatgaagatatttcagacttcatttgctccatgatgcctttgctatgtctcctagacagagccagttattctttggccaggacttaa

SEQ ID NO: 523529 - DNA, 373 bp, Homo sapiens
tgctcctcctcctcctcctgctcctctacttcttccttttctgcatcagcatcagcatattttgaatatatatgacttggcacttaattgacttacatatacagctatgaaaaatgccattcatttatcctgaatactaggacctacccatactaaagaaatacaaatggtattttcatcctaactcactgaataaaattgtatcaataggctactatcagtgtaaaatgatcagatgacagtgcaaaatgrtcagatgaattatgagatgctttattctaaggctagatttatagatctattgaagtcttctttctttccattcttaagtccaaatgatactccatctggtgctatggaataatcattatac

SEQ ID NO: 523530 - DNA, 661 bp, Homo sapiens
ttatcacaggaggggttctctcgrgattgggctgggctctgccccctttccctctttctctctcttccatgccgtcttgcccttccgctttccaccatgggatgatgcagcacaaaggtccttgccagatgctggcacctgagtattggacctcccagtctcagagctgtgagaaataaatttattttatttataaatcacccagcctgtggtatttattctataatagcagcacaaacagtcgaagacaccacccaagaggagttagctgtattttacttaatgcctaagtttttaggaacaagattgctcaggaagaaataatgcgttcagcggtggtgcattccggtaataagctcctaaagcacctgtcaggagaaaaatcacatcttggacaaacaacacctgaaggtattttatgggcagtccagcgtgagataactgcagaggctgtaatctaaacgtgtgctgcatcttggctgtggtctccgggctgagtgaggctggtggtcaacaccttgaggggtgcttttatggcattagcgggatctcatgaagacgctgattttcccactgcttcacgcttctgctgctgtaggacctgccccaggggatgacagagccccttttacaggcttgttcacatgaggctgcccacggc

SEQ ID NO: 523531 - DNA, 560 bp, Homo sapiens
tgctgggaggatgcactctaagaggagagaagaggtgagcacaaaactasccacgctcagggcagagcatggtcagcatcagaggagagttagaaagtgagggcatttagattgattccatgccaacctagatgcccatcaatgacagattggataaagaaaatgcagtacgtatacaccatggaatactatgcagccataaaaagaatgagatcatgtcttttgtgggaacatggatgaagctggagggtattatccttagcaaaataacacaggaacagaaaaccaaatactgcatgttctcacttataagtgggagataaatgatgagaactcatgaccacaaagaaggaacaacagaccctggggtctacttgaagggggaggagggagaggagccgaacagataactattgggtactggacttaatgcatgggtgatgaaataatctgtataacaaacgcttggaacgtgagttttccaatataacaaacgtgcacaggtacccctgaacctaaaatataagttaaaaaagaaagggtggttcctctgggcaaga

SEQ ID NO: 523532 - DNA, 637 bp, Homo sapiens
gtatgacctaccagtatgaaattactttaggcaaaataaaaaaaatattctagtgagtgtatataggaggagtccttaacctggracccatgagcttcttaaaatatatgcaaattatatgcaatgttttgttgctatgtggtacacggttttaggagtccttttggaatatagctttcacggggatttgtggccccataaaaggtcaaatgtcattgccaaataaccttacagtatttgactatcttaaaaatcctggtagtgatttttaaaaattctagtagtgattaaaaccagcaaacctttttcaactcctggaaatcccagaaccttaggttgagtgccactatgaagaaatcatgtcatgtgaattgtaaatccctcagtagtctcttcctgaccagttttcagtgtccccctcaaaaagaatcacaagtcactgaatttctcttttatttaagcattaagaaattggagcatagcgacttagaaaactttctcaaaatgtccttaacagcaatgaaaagatatcatgtgtcacgtgtaaaaccttttttctgtttgttttttattgaagctcattgaccagggaaacataaatgttccactcatctgcttttaaagtagagaacaaggc

SEQ ID NO: 523533 - DNA, 637 bp, Homo sapiens
gtatgacctaccagtatgaaattactttaggcaaaataaaaaaaatattctagtgagtgtatataggaggagtccttaacctgggacccatgagcttcttaaaatatatgcaaattatatgcaatgttttgttgctatgtggtacacggttttaggagtccttttggaatatagctttcacggggatttgtggccccataaaaggtcaaatgtcattgccaaataaccttacagtatttgactatcttaaaaatcctggtagtgatttttaaaaattctagtagtgattaaaaccagcaaacctttttcarctcctggaaatcccagaaccttaggttgagtgccactatgaagaaatcatgtcatgtgaattgtaaatccctcagtagtctcttcctgaccagttttcagtgtccccctcaaaaagaatcacaagtcactgaatttctcttttatttaagcattaagaaattggagcatagcgacttagaaaactttctcaaaatgtccttaacagcaatgaaaagatatcatgtgtcacgtgtaaaaccttttttctgtttgttttttattgaagctcattgaccagggaaacataaatgttccactcatctgcttttaaagtagagaacaaggc

SEQ ID NO: 523534 - DNA, 556 bp, Homo sapiens
tcgagttgataaatacccctaggaattcaaagccacagtgcagagtctatgtccctgcccctgagatgtggctgcgaaggttcttcttgattgaggcagacagaagattggttctgggcaggacccctgggcgtgtaaacaagatcaaatgctccattctgaggataggggagcttccagatcctggctgggatgcacctcaytgcaattcacaaaaataaaacacctcttatttggaggtattattatgcatttcaacatgtctggaattaaaaatgtattttcacatatgtatttagtaactgatacaactttttgccaattgaataaatatagtctgtgtatctatctagagtctcagcatataacaaatgcctacaaaaaatagttacccaaaaggtgctgttattttgtaccaattttagagaagttatcttaggttcttgaaaatttccttgtacatggatattagtgattgacaatatttgtaaaacagcactaattaaacaaaaaccatattatttattgcttctgagtatctaggtatgctttcaga

SEQ ID NO: 523535 - DNA, 556 bp, Homo sapiens
tcgagttgataaatacccctaggaattcaaagccacagtgcagagtctatgtccctgcccctgagatgtggctgcgaaggttcttcttgattgaggcagacagaagattggttctgggcaggacccctgggcgtgtaaacaagatcaaatgctccattctgaggataggggagcttccagatcctggctgggatgcacctcattgcaattcacaaaaataaaacacctcttatttggaggtattattatgcatttcaacatgtctggaattaaaaatgtattttcacatatgtatttrgtaactgatacaactttttgccaattgaataaatatagtctgtgtatctatctagagtctcagcatataacaaatgcctacaaaaaatagttacccaaaaggtgctgttattttgtaccaattttagagaagttatcttaggttcttgaaaatttccttgtacatggatattagtgattgacaatatttgtaaaacagcactaattaaacaaaaaccatattatttattgcttctgagtatctaggtatgctttcaga

SEQ ID NO: 523536 - DNA, 556 bp, Homo sapiens
tcgagttgataaatacccctaggaattcaaagccacagtgcagagtctatgtccctgcccctgagatgtggctgcgaaggttcttcttgattgaggcagacagaagattggttctgggcaggacccctgggcgtgtaaacaagatcaaatgctccattctgaggataggggagcttccagatcctggctgggatgcacctcattgcaattcacaaaaataaaacacctcttatttggaggtattattatgcatttcaacatgtctggaattaaaaatgtattttcacatatgtatttagtaactgatacaactttttgccaattgaataaatatagtctgtgtatctatctagagtctcagcatataacaaatgcctacaaawaatagttacccaaaaggtgctgttattttgtaccaattttagagaagttatcttaggttcttgaaaatttccttgtacatggatattagtgattgacaatatttgtaaaacagcactaattaaacaaaaaccatattatttattgcttctgagtatctaggtatgctttcaga

SEQ ID NO: 523537 - DNA, 556 bp, Homo sapiens
tcgagttgataaatacccctaggaattcaaagccacagtgcagagtctatgtccctgcccctgagatgtggctgcgaaggttcttcttgattgaggcagacagaagattggttctgggcaggacccctgggcgtgtaaacaagatcaaatgctccattctgaggataggggagcttccagatcctggctgggatgcacctcattgcaattcacaaaaataaaacacctcttatttggaggtattattatgcatttcaacatgtctggaattaaaaatgtattttcacatatgtatttagtaactgatacaactttttgccaattgaataaatatagtctgtgtatctatctagagtctcagcatataacaaatgcctacaaaaaatagttacccaaaaggtgctgttattttgtacyaattttagagaagttatcttaggttcttgaaaatttccttgtacatggatattagtgattgacaatatttgtaaaacagcactaattaaacaaaaaccatattatttattgcttctgagtatctaggtatgctttcaga

SEQ ID NO: 523538 - DNA, 542 bp, Homo sapiens
tttcctttgtattgctgaataatattgcatcttatggatataccacattttgtttatctgttcatctcttgatggaccaaaaccctaaccttttgactgcactacactccccaacccccagtcagtggctaaataggagagcagagcaaattcattctggttcattctcctcactgacttcttgttcttcctttctaatctcccctggagattgcatgtcagcatgacttttgatatctgtgaacccaaagcaattctgcttcctttaaacattagtgaagctgtttatgaatgttattctacccacttcacctgcttaactttaagagtatagtgatttccagcctggttctatctcacttatggttcttctcttgtgaatttgaccttcttgatatagccagctagatagctgaagggcttagttagctttctggtctcagctgtgtcattcactaactagctgtatgactttaagctstatcactagtctcagttatgaaaggaagagtttggagtagatgatattttgggtttcatct

SEQ ID NO: 523539 - DNA, 614 bp, Homo sapiens
gggcacacatctaagtggggtcccctcccctccttgctgttgcaagaacatcttggccccctttgccatgcaaagtgaagatcacaaccctcccaaaaggatgggggctctccttcagtcacaggggtaaaagaagctccctgaggccaagtgtggtggctcacacctgtaatcccagcactttgggaggctgagttgggcagatcacttgaattcaggagttcaagaccagcctggccaacatgttgaaacccccacctctactaaaataatataaaaattagctgggcatggtggtgcatgcctgtagtcccagctactcaggggactgaggcaggagaatcrcttgaacccaagagacggaggttgcagtgaccgagaccgcaccactgcactcaagcctgggcaacagaggaagactgtgtctgaaaacaaaacaaacaaacaaacaaaactccctgtcagtagcttcaagccaactccgggtttttggcaagagaatgaggggcttcactctacactagtgaagtctcgagcattttgccttactcttcatttctttatttgtgaaatgagaacagtaatttatattttgggctgttgtgttgtggcca

SEQ ID NO: 523540 - DNA, 471 bp, Homo sapiens
cacaactgatccctgtcactgacgacctttgctggcccagagcggcggggtgggaggagctgaacctcccaacccgggttcacctccaaagcaccgcccctgcgggggcgttctcgggtacgccgtaaagtagagagtatacttaacaacccgcctctgtctttacggcaggccgcattccatgcctccaatatggcgtcctccacataggcagtggctgtggtttctaccccgggtggccgggggcagtgctgagctgggactgttgtttgcccagcmtgggctgcagaaagcagcagttaaagttcgtttctggtcactgctccaggaagccaccttactctgagggtcaagaattgccgcttccttttagttactgtaagttcctcctctgcccctggtttgtttcccgcggcacttctggatacccccaggtcccagacccttccagactcaaaccatgaactttcg

SEQ ID NO: 523541 - DNA, 450 bp, Homo sapiens
gctgttctttagattcacctggaaaactttttttaaaaagtgctctgttttcaccccagaagaattaaatactaggcatggatgtttgtaaagggccccttgttgaatctaatatgcagtcaagactgaaaacacaagtctattcagtccttcatcgtggctttttacttgaaaagttagatttccccttccctttgttttcagcttcttattccttccagaagtaaatratgtgaccaagcaaaacaaacgaacaaaaccgggttgcattattttttcctgagcttctgtgatagtttcattctatatttgggggacaaatatttccctggcaaccctcttaagttttgtaactttaccttccaccacccctgcgccctatctgaagaatatctagtctaagtctaaggtctctttgctaaacttgaataactttgccagagacctgct

SEQ ID NO: 523542 - DNA, 450 bp, Homo sapiens
gctgttctttagattcacctggaaaactttttttaaaaagtgctctgttttcaccccagaagaattaaatactaggcatggatgtttgtaaagggccccttgttgaatctaatatgcagtcaagactgaaaacacaagtctattcagtccttcatcgtggctttttacttgaaaagttagatttccccttccctttgttttcagcttcttattccttccagaagtaaataatgtgaccaagcaaaacaaacgaacaaaaccgggttgcattattttttcctgagcttctgtgatagtttcattctatatttgggggacaaatatttccctggcaaccctcttaagttttgtaactttaccttccaccacccctgcgccctatctgargaatatctagtctaagtctaaggtctctttgctaaacttgaataactttgccagagacctgct

SEQ ID NO: 523543 - DNA, 456 bp, Homo sapiens
taaacactgcagtaaatagtagactttgtaatgaggttacatatagtggctgagatgtactgaggtactttatgtgagagctgttcagtaatacatgctcacacaccttttagcattctaagagtttgttttatttattgtttattggacacatattaaaggaactcttactggttgcctcacgtgatgttaggttctagggatacatttatttctgcctttgtaggactgaatagttatcagtaaaaagagaagtttaactaaagtaattataataaatcatgatgactcttggcatagtggaggtatgtgattayatgagagcacgtagcatcctggaaataatgaaactttgcttgtcacagtggtcttgtagcttatctccaaccagacattgtagatttcccttagtcctctgactccaaagtttctcaggaatttctggattgtggatac

SEQ ID NO: 523544 - DNA, 634 bp, Homo sapiens
actagttactcatggtgtacagaccaatgatagctatgaaaagctaactctttcatataagcgtacacttcaaagttacaatgaaatgaaaaagaaactagagcaagtttttatttgttttgaaatacaaccctcaatgaggcattgtttgcacattgaactaaatgtataaacagtgctgttgtgggtttaatttgtgaaatgtgtgtgagccttgatgagctgtgatgtttgctatttggaaatagaaaactacttttaattttacatactcatctcagaattgacccaaacatatagcctgtgtaagagtaaatgagacccagattaagatggcattaaaaagcttatagtaaggagaaacaaagcacagtttattgcagaattggaaactactggttttagcaactgactggatgaacagggccaaggaataaatgcacttatttctacttttagtgactggcacccattaacagataaaggaacttagggagaggagtatcttgtcttggggagggtggagacagacaaccatttctgtttttgttatattgaattgtacatcttcctagrcataaatactcttcatgatttcaggccaggtccaaatgatacctcctacattccttca

SEQ ID NO: 523545 - DNA, 628 bp, Homo sapiens
tctgccaactctccaagcagttctccctgccaattcaaatgtttgtgggggctgtggggtctcccacagctgggatcccagaggttcgtgacaagagtggaattattcatgccttttaattcacctcttccctaggagctgcttggggacaggaatgagtcctggtgctcagcaaccacaygcaggttttccagcttcctcctctttcagcccctgggttccgtgtcttccctgtatccactctcaatgccttctttccaaatgttcagagtgtgtcagtctacctgatggtctggtctctcttggtgggagaagctcttccaggctgtatatttagccatcttccataaccaggttttagattcacttttactatctctcagccttagcactgtactctcatagaaggcaaattcagcatcagctttagctcctattaactaaggagagtcttcaagaaaatgtgaattgtaatgatggaatttaattctccccagagtctcacactggggtgtgggagaagggtcagtcatcacaacccagaacctttcataagtttctgtaagtttccatgtgctgttgcagtaggacctctcatgatcctattgagtgatgaaaaaaacaatag

SEQ ID NO: 523546 - DNA, 450 bp, Homo sapiens
gacctggtaggaggtaattgaatcacaggggcaggcctttcccatgctgttctcatgatagtgaattagtctcacgagatctgatggttctataagggggagtttccctaacaagctctctgttctcttgtctgctgccatgtgagatgtgcctttcaccttctgccatgactgtgargcttctccagccacatggaactgtaagtccattaaacctctttcttttgtaaattgcccagtttcaagtatgtctttatcagcagcatgaaaatggactaattcgcccctaaagccccaaagggttgcaatcataaaaaaattggagatacttcttagttgctaaaataagcagaaatacgtcaaggaggtgaagacggtgaggacatttcaagaagagcaatgacacagacgtgtgaaatcatgtaaccgtaaacacttcttgccaggtgc

SEQ ID NO: 523547 - DNA, 585 bp, Homo sapiens
gttttaactttgtgtctgttttcataaatgtccttcaaccaaattctcattattcattctacgaggcaatatcttcttgtgtatcacatacttagactcaaagtaagtacaaaaactgctacctcagctaggtggaaagagaagaaaaatggtatataattgcataaatcttctaaacagaataacatttaccattgtttattaatctctttaatagccttttccctgaacaaggaaaagaagcatgactttttagagcactccaggtaactgcttagctgttgactgagaaatagttactcatatacacctccgctcaagctttgtttcttgaaggaatggcacaaactgtataatttggctcaaaatccacaacctagcaagtgtaatttccctgtagccttaagtgaaggcaaactttagctgagcagtaaacatggtatacagatcaaatagaggtttgaacatactctatttgcttccctttagaaaaaacaaagrgaggaatgacaggaaatggaagcaagcatatcagggcagatgagaaaggaagaaaataaaaataccttagaactcatccaactt

SEQ ID NO: 523548 - DNA, 655 bp, Homo sapiens
ctgagtcacaaacacagctctgccccttcactggagctggggttgcacaggcaaagtccgacacagacattattgtctctcaaatgtccagcttttaaaatgtatttaagaaacatgtcattaacacttaattctcatatactcaatttaccaatagagataggtaatatgatgtatcataatgtgatcatacagagaacagttactcagcccacagaccccttgctttccatttcttgtggtaccaaccaatttctcccattttgtccctttcataaaagtagaggtatgaataatatagtgaaatggaatcaatggtttcatctgaacaatgtttgctcagttgacaccttactgataaaaacgtaatagctatgtaagagtggactaaagagctgatttactttattatttcattcaatatgaactataggacaatgcgtttctataaaaaatttgtaccacagattttgagtggcaatacatagcaaaataattgtcctttcccttctaaaattattttttgataactaagtgaacttgttayaaaaaaatttcctcaattgcttctcagtatatttgtagttaatttgagctcatgatcctcaagagattatgtgaaaatcctaatggaagcataaaaaagactgaaagc

SEQ ID NO: 523549 - DNA, 320 bp, Homo sapiens
ggtacttaatattctacaggtactcgtgtaccctacaagtactttactttgtacactatagatggtgactgtggagttgttctcaagtaygatggcaaacagaggaacaaagagatctaaataaaaagtgttaccctgtgacttctctaattaacactttaatttgctataatttctccttccaacttagcagaaactgcatgtgaaagctgaagttgtaaacagagtaggaactaacatgtgtgaatggttgagaacccattgggtagccaagatccctgaagatcttaggtcaaggggccaagacattctatattttt

SEQ ID NO: 523550 - DNA, 500 bp, Homo sapiens
gaccactgggtacctggatgggaaacacttccctaactaacccaagtaggtacagataaactcccaggaccattctcagaaggctcctgaccaagtaagtgccagatgaagctactgattccaagaggtggcgctctctagtgggcraaacagtgggtaaacagatgtgtcttactgagtgaatgctcttttagcagctgggtactttattctttaaaatactctggattcttaataaatttcagagtgaaacactcagctatgtgcctggcttttccaggagaaaggaagagcctgtttacacctgccaacatctggagagacaacagcagttctcgaccatcatttgagtaagaggctttcctcccatctgacttgataggtatacaaaggcattctatatctaaccccagtgtgaaatcttagtttctcctatcaactaattttatcaagagcactcatacttcctgacattttcagctcgctataaaaacaaacaa

SEQ ID NO: 523551 - DNA, 468 bp, Homo sapiens
ctttctgcttgctcaaaatcccagcaaagactaggttggttgttatgccacagaacaattggcaaaacaatattttcagtaacagtgaagatagtctttgtaaaaatgtttgacactatctcatacagatgctgtcagtggtccttcctgatatggtggtgcacgcagaaataatatttgcattggcagatcatgtaacacttaacaccaggctctatgctccttttccatccatgactagacactggtcttggaggttcygacaccccctgccgtgcatttccaccaaaatggaacgtcagtttaaatgacctgcccatctgttactttaggcagcctttaaatcagtaggttctatgttatgcataacttgagtcttccaaaatacataagaccacttttaaatgaagcttttttgagaaatgaatggctatttaactgtatttgagtgtcatggtactttcaaat

SEQ ID NO: 523552 - DNA, 471 bp, Homo sapiens
gtacatcacactaaaatagaaacatttacagagatgttgtgattggaattatgggctagtttcttcatcatttatgatttcaggaatgtcttagcatccttttgtagtgtttcctaattagtggcttttcttccctacttaaccctaagttttcctacttttcagtctctctaatatgtggttattgatctatagagacatgttaatataacagtagagctctactctaaattagaaacataaagggaatacattttgtataggtttggattactatagaccagcttttatttatttttttgaaacctgaaktatactactagcatcttcataaaatctgcattaaaatttaaacaatagtttatttctcttcaaaacttcaacatcagtacatttattcatgagttacatacaactcaaataaatattaatcataataatagaaaaaattttttatcagaaccctaattt

SEQ ID NO: 523553 - DNA, 612 bp, Homo sapiens
tgtcctcttgggacttgccctcaggctcaaggctctagagtccatcccacatgatcttagcactgggggtcctcttgtcgtaggagactgcctcttatgagaggccactcagagattattaccttttatggtaagtacttaccaccttggctaaagcagcctgctttagcaaagtgaggagaaaggtcagcaactggggaagactggccttccaccattttgcatagcatggaagtatggattctaaacgctcacactgtagatgagggaagttttattttatcttttgatttttatttttttgagacagggtcttactcttgctcccaggctggagtgcagtgactcaatcacggcttactgcagacttgaccactccagactcaggtaatcctcccacctcaacctcccaagtagctgagattacaggtatgcaccaccacgtccagctaatttttaaaatttttatagagataagttttcaccatgttgcccagactggtctagaactcctggtctcagggaatcctctcaccttggcttcccaaagtgytgagattataggcatgagccaccgtgctgggcctgagggaagctttgaatgagataagg

SEQ ID NO: 523554 - DNA, 565 bp, Homo sapiens
tgtagcaacagggaagaagtttgtactgatctttatactcttaaataactatgctgagtaattttaagagcagggtttattgacaaaaatcataggccgaattacaaggcagtacaaaatctccatcaatgtttaggcaactaggcaaaatccaattacaggatatttgatatagataagtgccagytactaaaatgagaaaaaaaatgtagaaaagaataaaaaaagaaaataggattaagataggaggtataagaaagataaatgagagaaaattaatgaggaaagttaaatgagataaattagataaagtcctgcctttggatagtgatgcacaagtagcaattaccctctgtagcactagggtggatttctatgttcattaaaggggttacaccagtgtttttggcaaatctgtaatgaaggatagtgcattgtgagactaactggattgtaatgaaatatacaattaagtgaaaatagtgaaagtaaatgcaaggatatgaaaggaacatttgctatattctttatgtacatatccttctgaattactctggaaaaaaga

SEQ ID NO: 523555 - DNA, 565 bp, Homo sapiens
tgtagcaacagggaagaagtttgtactgatctttatactcttaaataactatgctgagtaattttaagagcagggtttattgacaaaaatcataggccgaattacaaggcagtacaaaatctccatcaatgtttaggcaactaggcaaaatccaattacaggatatttgatatagataagtgccagctactaaaatgagaaaaaaaatgtagaaaagaataaaaaaagaaaataggattaagataggaggtataagaaagataaatgagagaaaattaatgaggaaagttaaatgagataaattagataaagtcctrcctttggatagtgatgcacaagtagcaattaccctctgtagcactagggtggatttctatgttcattaaaggggttacaccagtgtttttggcaaatctgtaatgaaggatagtgcattgtgagactaactggattgtaatgaaatatacaattaagtgaaaatagtgaaagtaaatgcaaggatatgaaaggaacatttgctatattctttatgtacatatccttctgaattactctggaaaaaaga

SEQ ID NO: 523556 - DNA, 340 bp, Homo sapiens
cctcatctctttatagttcttctggggttacctcagaaatgtgtgtgtgtgtgtgtgtgtgtgtgtgtgtgtgtgtgtgtgcrtctgtgttgctaattgttgatttttcagctttagacagtgtctaataacgacctgccccaaatcatttggtctaatttgtttttgaattatacgttgtttttacaggttttctttcccctctgaagtttctgattgctttttttttttttgtaagaaacaaaacaggccttgcttaagtgtatcctaaatacatttccaattcatgtgcattctattgcttgatattcattctgttttaattcttgaaatccactgc

SEQ ID NO: 523557 - DNA, 585 bp, Homo sapiens
ctgctctggaggataaggtgggagaatctctagcttaggggattaaggccagcatgggcaacataacatctctttaaaaaataaaataaaataaggagactactgctgggctcttgagatggtagatgtcaggagtgtttcctacaactagagaaggtgaactcaagttagcattgttccaaagcttgtcagaaccctggactgtggtcttttctcaagttttaattgtaattttcatatcaatgcatcaagtacctcttaaggttccaccatattgcaagtcattgaatcaaagtctgtgtctggagtgtgcagtgtargaaagaatattctctttgcttttaaaaacattttggagggactagtttagacatttggtactgattcagtgtttctaaataacttccttagagtatattaaagacaggatgggaaagatgtctagtattgtgtaaagcagggtgctctcattgttttgaacacataagattgtctatatcacaatcattggcactcctgtgaactttactagggtgattgagttaggttacaataaaaatcattcttcattaacttatatactat

SEQ ID NO: 523558 - DNA, 325 bp, Homo sapiens
tgtttctaggcagtggtcacttaaaatgcaggctggctggtccttcttctgtctagttattctcttagtaatgaaaactcagctctgggctgcccacaggagacgggtccctaaygtaacactgagtgtcatgattctctggctctaggtattatgtctttcccagagacctggtcaagaaggtgagatagcaatggctgtacctcgtgccaatgacagtaaaatctcccagatgataggagcggcagcaaaatgccattctcaaatgagaaaaatagggcaagcttcttgctggcattgcagagccaacattcaaagagatgca

SEQ ID NO: 523559 - DNA, 579 bp, Homo sapiens
tgagctctcctgatgcatttcccttgtttgttctggggggaaggcagcacctttacgggactcacccttttactaggtaaagggcatcgcattgtgctgggcgaagcattatgtgtcaggatgtctccagtgagtctggagcctagaaggagcatcaaaaataaaattaaaaaaaatcaagtcctccaccatcctggctcactgatggaacaatttaggagaagaacacaaagccatctaatgaccctggggagcatttgcttgtttggtgaccttaggcgcaggaagtcatttatcactctagttgctacattgggcacaatgccacaggacacaaatgggggtactgaacgtaagtctgagtgttggcccaatagtacctgtccagaagcagcctgggatccatgatccattgcagggcaattatggctsttaagaaaatgaagagaagtaagtaatccacagtatcaaatcatgggtgagaagtctctccatcccattgccctagttttataacttagcaattcatcttcttttcagagaaaaccattctggatcccaaacagattttctctgatt

SEQ ID NO: 523560 - DNA, 471 bp, Homo sapiens
ggactaaatggtaatattttgtctttcctgtcccacagccttcccggatggaatgtgcactccctcatttgtgtctcttttgtgttctgtgcacacttctattgtgcacctgtaatgttagtctcccctcttcaaatacagagactgggtcttgtctacctctgtctgccccgtccctgtactaggaacatggcactcagtgaacgaatgagtgctgaccgactaaagaatgattgtgtatctggccagtgctgggaaaagctgagcatatgagcaagatgtcttcctctccaggcattctcttatcccaggttgacccctctgtcattgtggctgctgctacwgtggttacagtggtggttgctgcaggtgtcctcaactctgctgcctccgcagccctgttcagttgtctgctgttaagcttgtgctcttcttaatactttggcatgggcttctcagccattggaattc

SEQ ID NO: 523561 - DNA, 645 bp, Homo sapiens
tggtttccagggttgtatgaaaatgctagatgcacttaaagcaggtactaggaaaatttggcctaaaatagattatgcaataaatagccaaatgtgagaatagaaaytttaatgagaaatatttatcatcaagcagtcattcaaatgtcatctattttctactaactgcaattgagcaggtggttccccattttccatgattatcttctaatctctggggaaaatattttttagaaagttcaaaatacttcacttgaaaaatgaactgtctgcatgagagacatataacaggctgattttgtttaactgagtttcacaaaactctctcagggcaacctatctttcctatgttgccaaaatggggaaaaatcaagttagcaaataacattttttctacagcttcccctaaggctgtggaggatggcctctgtgatttagtaggccttttccctcctttgtgccagtgactaggttttgcagtattactgaggatttagcatctcagctcgctgtttctgactctccaaaatgaggaagatgaattatttaacatccaggaagcaccagctgtgttctctcctaaatgctgagcttcccagaccaacaggatttacaattgaaataggtttctaatctaaataggac

SEQ ID NO: 523562 - DNA, 645 bp, Homo sapiens
tggtttccagggttgtatgaaaatgctagatgcacttaaagcaggtactaggaaaatttggcctaaaatagattatgcaataaatagccaaatgtgagaatagaaattttaatgagaaatatttatcatcaagcagtcattcaaatgtcatctattttctactaactgcaattgagcaggtggttccccattttccatgattatcttctaatctctggggaaaatattttttagaaagttcaaaatacttcacttgaaaaatgaactgtctgcatgagagacatataacaggctgattttgtttaactgagtttcacaaaactctctcagggcaacctatctttcctatgttgccaaaatggggaaaaatcaagttagcaaatarcattttttctacagcttcccctaaggctgtggaggatggcctctgtgatttagtaggccttttccctcctttgtgccagtgactaggttttgcagtattactgaggatttagcatctcagctcgctgtttctgactctccaaaatgaggaagatgaattatttaacatccaggaagcaccagctgtgttctctcctaaatgctgagcttcccagaccaacaggatttacaattgaaataggtttctaatctaaataggac

SEQ ID NO: 523563 - DNA, 645 bp, Homo sapiens
tggtttccagggttgtatgaaaatgctagatgcacttaaagcaggtactaggaaaatttggcctaaaatagattatgcaataaatagccaaatgtgagaatagaaattttaatgagaaatatttatcatcaagcagtcattcaaatgtcatctattttctactaactgcaattgagcaggtggttccccattttccatgattatcttctaatctctggggaaaatattttttagaaagttcaaaatacttcacttgaaaaatgaactgtctgcatgagagacatataacaggctgattttgtttaactgagtttcacaaaactctctcagggcaacctatctttcctatgttgccaaaatggggaaaaatcaagttagcaaataacattttttctacagcttcccctaaggctgtggaggatggcctctgtgatttagtaggccttttccctcctttgtgccagtractaggttttgcagtattactgaggatttagcatctcagctcgctgtttctgactctccaaaatgaggaagatgaattatttaacatccaggaagcaccagctgtgttctctcctaaatgctgagcttcccagaccaacaggatttacaattgaaataggtttctaatctaaataggac

SEQ ID NO: 523564 - DNA, 645 bp, Homo sapiens
tggtttccagggttgtatgaaaatgctagatgcacttaaagcaggtactaggaaaatttggcctaaaatagattatgcaataaatagccaaatgtgagaatagaaattttaatgagaaatatttatcatcaagcagtcattcaaatgtcatctattttctactaactgcaattgagcaggtggttccccattttccatgattatcttctaatctctggggaaaatattttttagaaagttcaaaatacttcacttgaaaaatgaactgtctgcatgagagacatataacaggctgattttgtttaactgagtttcacaaaactctctcagggcaacctatctttcctatgttgccaaaatggggaaaaatcaagttagcaaataacattttttctacagcttcccctaaggctgtggaggatggcctctgtgatttagtaggccttttccctcctttgtgccagtgactaggttttgcagtattactgaggatttagcawctcagctcgctgtttctgactctccaaaatgaggaagatgaattatttaacatccaggaagcaccagctgtgttctctcctaaatgctgagcttcccagaccaacaggatttacaattgaaataggtttctaatctaaataggac

SEQ ID NO: 523565 - DNA, 670 bp, Homo sapiens
aaatactcaccaaatgccagactattctatattcacttgaaattttccccaaattcaacttggaatcagtcaaaatttgaagaatcctttttttttagggcacttataaaggagatggtttttcatttcttctccttacctgtgtataatgtccaaccactgcgttgggagtctttggccctacaccaaagtcaaaatcattgtactcatcaaaccagctttggattgcttgtgaccatgagctggrggcacttgacatgtagagattctcaccacattttagacctaagaaggaacagaccactcatgaggaaagcaataaagcatgcaatggcaaaatacacacaaacacacacacactacacacagcagaatccctgttttttaaatacagtccccagtacccaccgttaatgaatattgactaatacataaggagggtgcctcagatccttatcagctataagctgaatagaagccagatttgcccaatacttgaggctggtctcaacatgcaaaactttgagtagatggagaagccttttttctttaatgtctgctctccctggattcatttatttacacattgaattcttcacatgtgtgtgccttatgagctttcagctttgtaatgtgagcttgctgaagacagagatcaacttagtaattc

SEQ ID NO: 523566 - DNA, 414 bp, Homo sapiens
ctgagcttggtttccatacacttccacttgatktcattaagcagagaacatacttcatttgttgttagaaaatggggcagatccttaaattggagctggatttctttaaggcaaaaatctctttctcctcacacagtgtgactatttatttttatttttattttttatttttagacagggtctctactctgtcacccaggctggagtgcagtggtgcaattacaactcaccatggccttgacctcccaggctcaagcagtccgcctgccttagcctcctaagtagctggagccacaggcctgtgccaacagtgcctggctaagtttttattaataaaagtttatgtagagttggggatatccctatgttgcctgggttggtctagaactcctgtgttcaagtgatccttctacc

SEQ ID NO: 523567 - DNA, 414 bp, Homo sapiens
ctgagcttggtttccatacacttccacttgatttcattaagcagagaacatacttcatttgttgttagraaatggggcagatccttaaattggagctggatttctttaaggcaaaaatctctttctcctcacacagtgtgactatttatttttatttttattttttatttttagacagggtctctactctgtcacccaggctggagtgcagtggtgcaattacaactcaccatggccttgacctcccaggctcaagcagtccgcctgccttagcctcctaagtagctggagccacaggcctgtgccaacagtgcctggctaagtttttattaataaaagtttatgtagagttggggatatccctatgttgcctgggttggtctagaactcctgtgttcaagtgatccttctacc

SEQ ID NO: 523568 - DNA, 414 bp, Homo sapiens
ctgagcttggtttccatacacttccacttgatttcattaagcagagaacatacttcatttgttgttagaaaatggggcagatccttamattggagctggatttctttaaggcaaaaatctctttctcctcacacagtgtgactatttatttttatttttattttttatttttagacagggtctctactctgtcacccaggctggagtgcagtggtgcaattacaactcaccatggccttgacctcccaggctcaagcagtccgcctgccttagcctcctaagtagctggagccacaggcctgtgccaacagtgcctggctaagtttttattaataaaagtttatgtagagttggggatatccctatgttgcctgggttggtctagaactcctgtgttcaagtgatccttctacc

SEQ ID NO: 523569 - DNA, 414 bp, Homo sapiens
ctgagcttggtttccatacacttccacttgatttcattaagcagagaacatacttcatttgttgttagaaaatggggcagatccttaaattggagctggatttctttaaggcaaaaatctctttctcctcacacagtgtgactatttatttttatttttattttttatttttagacagggtctctactctgtcacccaggctggagtgcagtggtgcaattacaactcaccatggccttgacctcccaggctcaagcagtccgcctgccttagcytcctaagtagctggagccacaggcctgtgccaacagtgcctggctaagtttttattaataaaagtttatgtagagttggggatatccctatgttgcctgggttggtctagaactcctgtgttcaagtgatccttctacc

SEQ ID NO: 523570 - DNA, 394 bp, Homo sapiens
agtaggcttatagagtggcaaagtgtccaagacagatggtaggtgcctttttcttctggcattgttgttgagtgaacattcattaatattagcccaagactttcagcatgagatcaaactcactggacccaggaaaaggggtctccattttaggagacttcctgaggtctggtaagcccagtggtttgctcccagcagcctcagccctgggcttggtgagttcaacccaacagattaacatctctgactcccatcccctctgggggaaagaatcacaccgtccagagctggatatcctggtgtaaatattgacaaggccacacccayggggtgtagctaaaccaagtagtcctattaaagacagacagaaggccacttccttgagtgtctcata

SEQ ID NO: 523571 - DNA, 604 bp, Homo sapiens
aaagttaaaattgaacattaaaaaattcaattcaktaagtttttaatttattgaacatctattacatgcctaacactgtgcttgtcaggtagaaatataatgagaaaaaagctcttactttcaaggagcttactgctcctattagtgaaaaaaagcacatatgtgacaactagagaatactctgagccaggataactttgaataagacaaaaagtgtatatgtaagaaggccaaagtcggataaggtcaacatgggctgcagagattgagggaaaggttgtatataagatattaaactggtaaaaactagagaacagagaggacagagaagaacctttcaggtaacattaacagcaaagcaaataattggttctaggaatgagtatcaagttttgaaagttatacacacacatgtgcatatgtatgtgtatatgtatatatatgtgtgtgtataaatatgtgtttttttccaactgccattcagtagtactttaaattcaggaatacttttgtgaacaaacacttttgtgtattcctgaatttaaagtactattgaatggctgtttaaaaaaaagtcaagggaataactttatcaccttgagta

SEQ ID NO: 523572 - DNA, 629 bp, Homo sapiens
ggcttccctaaatatcaatttctgtgtatctttgattttgagcttgtcagttatttccagtttacttcttgcctaggggtattaagttttgctaccagtgttttgtgagcagaattaggatagagggtaactgtttttcatgcagactctcacccaatccccttgtgttcaacatggtgtcccctagtcccagctctccactctgtctagggtgaatccaggttttgtgggcctaaagcttatagtctttggggggccctcttccagaccaaaaawaaataaataaactatgaatgcaaaattaaatacaggaacttggaagggaccagtgcaagtggagggcctatgcttcattcgcttcatggtaaaactgactcttcatcctgattcctaccagggtcccagaggagtggtatctgactttgttggctgaagaggagatctgggagttctatactgctgcttacagtcttctcatcaattctcttctttttagtgctatcccataccctggttcttcacgaggaaccagtgtcttcaagtcccaaagctttatggcccttaaagtttaatgggagtgcttctgttggggcatctgacactgcaggcagttaggcttcagtgatctc

SEQ ID NO: 523573 - DNA, 543 bp, Homo sapiens
tgggtgaaccccataaatagtaaatgtcttgcaatatactggacagttcttcacaaagaactatctcacccaaaatgccaatagcacatacattaagaaacaccatagtttctcaataagtgtctgctaaggaatgaataaatgaacataaatgaataagtaaaataaagtaaaaatgaaagaatacattaatgaataactgaaggggaaaaagcascctgaccatttatagatgaaagtgtaccctaaggagagacaccgatgggaaattcatgacttgacaacttaaaattttgtctttgttatattcttatcccttttcccctagagctgtgactgcaaggtgcaatctgaattgaaagaactaattaaagtgaggctgggcatggtggctcatgcctgtaatcccagcacttggggagaccaaggtgggcaaatcacttgaggtcaggagttcgagaccagcctggccaacatggtgcaactctgtctgtactaaaaatacacaaatcagctaggcatggttgtggacacctgtaatcc

SEQ ID NO: 523574 - DNA, 543 bp, Homo sapiens
tgggtgaaccccataaatagtaaatgtcttgcaatatactggacagttcttcacaaagaactatctcacccaaaatgccaatagcacatacattaagaaacaccatagtttctcaataagtgtctgctaaggaatgaataaatgaacataaatgaataagtaaaataaagtaaaaatgaaagaatacattaatgaataactgaaggggaaaaagcaccctgaccatttakagatgaaagtgtaccctaaggagagacaccgatgggaaattcatgacttgacaacttaaaattttgtctttgttatattcttatcccttttcccctagagctgtgactgcaaggtgcaatctgaattgaaagaactaattaaagtgaggctgggcatggtggctcatgcctgtaatcccagcacttggggagaccaaggtgggcaaatcacttgaggtcaggagttcgagaccagcctggccaacatggtgcaactctgtctgtactaaaaatacacaaatcagctaggcatggttgtggacacctgtaatcc

SEQ ID NO: 523575 - DNA, 539 bp, Homo sapiens
gttactttctgccaaattcactgataggttctgaaaattcaaaaagtgagcacatgtctagatataaatatttgagattcagagccatatgggtggtaggatattacctcagtaagaatgtataatttcagagagcatcaaggctatacttgtttctctgtattgcatttattccacagagctgtctccaccagcctgtgaactggagcatagggccattatttgttcatcttcagataccagctacctgcttttgtagctgatatatataagccattttatgcaaatatgttgaatgattgatttaatgcatgaatacwtgcttttactttttatgagagcagtgagccatatgaccaaacaaagggactggacagggagatataaaactaatttttctttgtttatagattgcaggaacatatcttttcacagttctatgacaactggacctgaaatttagcaagcccaggaaaatcagtctccaaaacacgtatttgtgatatatttcttgtaatagcttatggaagattttcagc

SEQ ID NO: 523576 - DNA, 683 bp, Homo sapiens
tttttagtttaaaaactgttatatatatatgtacatagtaagattattataaaattcttttaaatgctgaatattatggataattaattatgccaacattccccaaatatggaatatgtagagctatagtttagttaataccatttgttaaaaacaaaaataaatgattttgttgagatgctwaaaaacatgaaggatgattttgatatttttgtgtaagagagagagagaaagccagagtatgtattgtgctttttccatttattgagaggatttttttccctgatatgttttggaaagcattggtacaaatggatattggtaatgtgaacttaattttaactgaatatatttttgaaagttaaaaaagcaaaagaatgattgggaatcactacaattccaaatacggtgatatctttagacacttcagattaattttgcagtgtctttggtctgtagtcattctcttatgtattcatttaattacagattttaaccttttgacttaggacagcaaaacggatttcttttggaactaagtactatgatttgtgtctaaaaaaaaacttctaaaagttatatttttctatttgtttttgtgtttgtcacaagatatgtttctcatgggtatagaagtttccagtgtgacagaacactttcaaatctctcattcttgaatatat

SEQ ID NO: 523577 - DNA, 551 bp, Homo sapiens
aagcaatcaactcgtgagacataaagaaggtccggcaagggaaataagtgagagaacctgctgggcataaggacctactgactacggtaaagtaaggggagaaagtgaagtgacttccagcttgcacaaggaaatactgggatgatgagaggcaatgctggagtgttgagtttgcctgaaggattaggttggggatgggttagggatgatgtggagttttagtttagatacgaggtgttggtagcataaccagaaaatgcccaggaggcccctggaaaggacaaatggaggggaatcactagagcacacaaggttggagccatgagytgtgggcatctagggagggtgtgggaaggtcaagatggagtgcaaggggcctccaatgtcaagcggagccaagagaggagcagacaaggagaaggtggtgtcccgcacgctagggaaggaagaaagaagctggagactggttaattgggccaaagatacaatgaaggaaagtgacaagaaggaaggtggcaggccagactgcagcagagtgaggagtgagggca

SEQ ID NO: 523578 - DNA, 579 bp, Homo sapiens
gttgaaatggagattatttattcaggtactgataaccttttgtttcaaatcatgactttgaatcctatattccagaggcactgaaatgttatttatttacctgtgcattcaagagatagctggcagcctagcaatttaagttactgttgttgtggtaacttgagggcgatatataaatcaaacactgatcctgttttccagaagtttatactttaaatgcatttgtatatgattaaaataaggtattaggttggtgaaagtagctgcagttttgaccgttacttttaagggtgaaaacagcaataacttttctaccatcctgtacaaagggctgctgaagcgttgtggggtctcagtgcaaggagaggtcacttcatccctgatgcttgggccacacctcagaccaacagcagtgctaaggcccaggcttcagataattttgtttaattttttttwaaaattctctccatgattgggtagagccagggctgagaaacattgacctgaaggaattagggggcttcatggaggaggtagtgtttgtgttgggcttgagaggatttaagtttctcctgggcc

SEQ ID NO: 523579 - DNA, 603 bp, Homo sapiens
gctgcctgatgagaaatatggttctcaataacaatcctcaaatacaaactaagtgacactttgttagggatattgaaaaggaagtgccaacatcaggtaggagtttgaaatacatcggtttttcctacattttaaacgtgaatatccattttaattaagaaaaaaaaagccgtgtgtggtggcttacgcctgtaatcccagtactttgggagttcgagaccagcctggccaacatggtgatacccccatctctactaaaaatgcaaaaattagctgggagtggtggcaagcgtctgtaatcccagctactcgggaggctgaggaaggagaatagcttgaamctaggaggcggaggttgcagccagccgaaattgtgccattgcactccagcctgggcaacaaaagtgagactccgtctaaaaaaaaaacaaacaaaaaaacccaagtctctgtatactaatacttctagtatccattacataagaaaatatatagagtaatagtaaaaaacattttatttgggtccagaactattgtcatataagtattattgaaatgactcaaatgtatctttatacttttacaaaaatagaattctcaaga

SEQ ID NO: 523580 - DNA, 639 bp, Homo sapiens
ggtttatctctctgagctttaactgctcaatctccagggcctttcttgtttttaggtttttacttctgacagcagcaaatgtggcctctctcctagagtttcctgtcctccataaaccacactagccctataacttccttctcatttgaagaccctcatggtctcttccctggacttctgtgcccaactctgatcttctcactgctggccttgccctctccagtgcattgtcctcagcaatgcyggagccagcattctagaatgacaaattcaccatggccatgccctattgaccctgccaggagcccacattataaaagtaagttccttaccaccaaggcacaggcaaacacagaacctatggtcttctgggtgactctcatgagaatacataataatttgaaagattaatttttaaaaaaaggaaataaaaagaaaaccttaagaacctctctgttgccatcagtacgaattaaagcttaggcctaggctgcccccatccttgtgatctgactgttgctgacgttttttctgccttctctcatcttgtcctctctaccttttctctcaaattcttcatctggcaaactccatcaaagccacacttaaatgtcacctcctccgtaaagccctccttga

SEQ ID NO: 523581 - DNA, 506 bp, Homo sapiens
tgctccttgcctctctcaagggcccagaaakaatccttctgatttctgtgtccaccctctccactcattcctccgcaaggaaagactgcctaacctaatggatctgtgcttaatattcattgggctgcttctagtaatggatgatgtcatcatgcaacgcaagcttgagctaacttctgttcttcctcttttacttcctgctacttagcataggatggagtttgtcaaggtgatgagaactgagtgagaaggaacctgaaaagctgcagggagctccataatgtacatatgaacttggtgattaccgctttgagctaggtctgagaggttatatcaccagtgttgcctgtagccaccacatggtcatcggatgcatgctagaatccacaggtagagtctttgtcctcatcatgttagcgcagggaaatacaggggtcacagctctttgggcaagggttctgcataccaacaacacaaactctacaaaatgtatattcaggcccagc

SEQ ID NO: 523582 - DNA, 505 bp, Homo sapiens
gtggaagagaatgaaaaaaacagagtcagatacactgaatgttacaggagttacaattgaaaaagatatcatttgggtgytttgccttggtacatttcatccttagattcactgctccagctaatgaagagtaaaaagttagtatagaaataattaaaagaacactcaaaattctggcaatagctattgctaagaattcaggtgttgaaggatcacccaccgacagtcgagaaaattatgcaaagctccccagaagctggttatgcactacgctcagagattttttgaaaatggtagaaaaaataatcatcaactcaactaaggttgtaaaaagtgctttgttggatgctgcttccgtggattctcagttaaccacagcaaaactgagaccactggaattcctaaagaagagaaggatctggcatggtaaatgggaagcagtgttgggagtagcatgttctagttcccagaatagtgctttgtcattattaataagccatgtggg

SEQ ID NO: 523583 - DNA, 488 bp, Homo sapiens
gagacaatgatgagaggaaagagagatgtttaagaaatcactctagccattggttattggttttgatagcctatgcggcctaagcaatactgttttctctacctgggacattctttcctccccttctctgcctggctacctcttatttgtaggtacccaggacytcactcaaatgttattgcctccctatgggtgtctacatctctcaggtagaagtcattgccctcctcaagacttccttcagacctctgttgaaaccccaacgcactgcaaaatcatgtcctgttcttctagctgttgccccatgagcttgtgcatctatattctgtgatgacactgaaccaggcacacagaagtttcccagtgacagtttgatgactgagtgaatgaacgactgttataagaatatgtgctttaaattcatttcctgtcaaaaggagtgggttacgcttgaaacctggtgaggtcacgggtgccatattttgtgt

SEQ ID NO: 523584 - DNA, 560 bp, Homo sapiens
tggagacaatgatgagaggaaagagagatgtttaagaaatcactctagccattggttattggttttgatagcctatgcggcctaagcaatactgttttctctacctgggacattctttcctccccttctctgcctggctacctcttatttgtaggtacccaggacttcactcaaatgttattgcctccctatgggtgtctacatctctcaggtagaagtcattgccctcctcaagacttccttcagacctctgttgaaaccccaacgcactgcaaaatcatgtcctgttcttctagctgttgccccatgagcttgtgcatctatattctgtgatgacactgaaccaggcacacagaagtttcccartgacagtttgatgactgagtgaatgaacgactgttataagaatatgtgctttaaattcatttcctgtcaaaaggagtgggttacgcttgaaacctggtgaggtcacgggtgccatattttgtgtgcctacatcagtaacaggctcactctggactgaactcacgagctcagttttgtggaccctgggctcctga

SEQ ID NO: 523585 - DNA, 653 bp, Homo sapiens
actgctgggctgcaaatcctggctcctacatactattaatgagacctgagccagctagttaccctctctatgactctcgttcctcaactgtaaaatgggacgggtaatagtatctccttcacgcagttgctgttaggattgaacaaagtaataaatgccaagcgcttaaaatctagcaagtcctctttatacactggcgcacactaacatgcaaaacttcattctgggctatgctaaggatgatagagggaacagagaacagggcctgctttcaagaagtttgcaactaaaacagtgctttttagattgtgagttgttccctgctgcagatttgtaaaattaatttagaggctgcaactagcatttaaaaataaaaatgacattttcagactacattgtacacagtaaataccacttggtcatattttccttttagctctacagatatatgcttatactgggttgtgattttkttttttacagtggggtgggatgagcaaaacaaagtttgaaagctacggttaataggaaatggaagacacccaaagcaccatcagaggaggccctgtaattctgcaaatacagaatgaattagagctttacagctcacaggctgtgtgatcttgggctagttacaacctctctgagcccca

SEQ ID NO: 523586 - DNA, 628 bp, Homo sapiens
gtaaaatgtatttcttattgcagactgcaatcaagatgtttgaaaatactgaactcacatctgtagacgaggagttggcagatttacgacccccagcttgcagcytattttttaaaaataaggttttattggaacatagccacactcattggtttaggtattttctatggttactttcgaggtatagtggcagagctgggtacctgcaacagaaaccctgtggttcaccaagcctatcatatttactacctggccctctagaccaatgctcctgcctggaggtcatctcataatctagggaatattggacacctcttcccgggcatgtggtctggtcatgctactgtccttgcaggcatgcttgctctaggctgtgtgactgccaggcacttggatctccagaagctcattactcttctctattaaactgatgcctacatggtgaaaggctaaaaccatggtactttggtcagggtccccgcaggaaacagatggccactcaaattaaaatgattggtgagggcagagtgtgggaaagtagcagagacctcagaggctcataaaagtagagttttaccaccctaggcaggaggagataaagaaagggggcaatgcctgtactggaagg

SEQ ID NO: 523587 - DNA, 259 bp, Homo sapiens
tgccacacaactacagcttgtyccctggaggggcttccctggccagtccagaatgctcaatttatgagagatcattggctcacagggaggaaggggatggcttaggtaggccagccaccttgcagcagagctgggcaagaattcaggattggagactcttattagtttccatctttcttttacagaagatgaacactgaagtcttggaaccctgggaatgaacctggaaaaattcaaaatatggtctagtcttaggcaa

SEQ ID NO: 523588 - DNA, 519 bp, Homo sapiens
gtctgcatccctgtgctcgaaggcttttttcccccaatgctaggccactttgcccatgtgcacagcaggctggaagggctagggagttaataacccctcaggagcagccctcattcaatgactttcaggaattggtgtataaatacctcagctccctcattccttgggtgggataattctaagatctgggttctgcagacctgggtttcctagagtgtccctgtgggattatggcccagacccccattgtggtagctggtatgaccaccctttattagctacwgtctcttccctgtattatgtccctcttatctgctagtgtcacctgtgcttcctaatagaacacttgtgcttgaacccttgtctcaggcctgcttttggggaacccaaacttggaaaataccctggttccagaggggcaagaactccagcatcagacacataatatgcctaggagcagccctcttctgggacctctgtcttgttggggcatccgggtcactgactgggtccccatct

SEQ ID NO: 523589 - DNA, 670 bp, Homo sapiens
tgccaagactcatcgcaggccctgggtgcctacacactttgaatcacagctactgtaccgtgctgggtcactgccaggaatctgaggagacaataagctcttattttaaaaagatttgccagcatacccgggcttttacaaatgcttgataattattgccaaaaataggtattggcttagggtctccagtgctgtcctggcagctccagtgatgaggggcctgcaccatgtatgcagtccaaacctcgccacagagggggcctggaggtcagcaagccgggcacccctagaccccacagggtgggcattgtggacyacgcctttgctgctcgaggagaggaaggggaaccgcaggaggagctcttagtgccaactttgaagaacagagattgtgtccttgtgccaactactctgagtcacttaatgccattcccattcacgagaagagaaaaatctggtacacaggactaaccagtttgaatttccaacttcttggcaatccaagaatttcaggcttctataaatagcaaatcctccagtgctccctcctctgatgggggctgccctcttccaaccttgtattcattcagtgagcatttagcgagctacagaccagagagccaccctgcaccttacagattatctcatgcaacccctcacttaactgacg

SEQ ID NO: 523590 - DNA, 578 bp, Homo sapiens
tcaagtaacttctgagagtaactttagtaccagaatttcttgtaataggatcatgtctttctttaagttcaggtgtttcattaaggcaagctggagataggaataaaaggattatgaaagagaaggagcttgaaagatgcttttacccatacctgtttctgctttgtcagcctctttttgctgcctttattttagattttagagtgatgctttgccttgtcttckgaaacagttccctgaatctcctacttgccaaaagttcatgattcttttggtgattctttatatgggtaaagaaaatgtatgcccgtgtgtggggatgtttgtcattccagtgggtgcccagcaaatttgttttaacataactgatagaattttaggaattaagtcaccagagaactgttgaattgttttggtttatcagtttgggaattatgaatacaaaatttgactcctttgggtaaaacagctatcttttatttaaatattcatatttatattagggtactttcacttgtaggttgtattaaaattgtatgttagaagctttgaaaggggtattaaatatgttaaaagaa

SEQ ID NO: 523591 - DNA, 606 bp, Homo sapiens
gggagagaggaggcaaagggaagtcctccaagagagggtggcggtcccatggatgaaaaacagaggtaggccaggtgtggttacaggttcacccctgtaatcccagcagtttgggaggccaaggtgggtggatcactygaggtcaggagtccgagaccagcctggtcaacatggtgaaaccccgtctctaccaaaaatacaaaaattagccgggcgtagtggcgggcacctgtaatcccagctacttaggaggctgaggcaagagaatcacttgaacccgggaggtggaggttgcagtgagctgagatcgcgtcattgcactccagcctgggcaacaagagggaaactccatctcaaaaaacaacaacaaaaaataaaaataaaaataaagaaatacagatgttgaaaggatgtgctgactggagcagacagtttgagtttgattttgtgcatttttgaggtgtcatctagacaaacaggcaggattgtacaactggttattggaggtgtaagactcagtcttcgataagactattgtaatagaaacatagaaatctgagatgatggtgagcaagtgagggtgggaaagtttgccctaagactagt

SEQ ID NO: 523592 - DNA, 563 bp, Homo sapiens
ctcacaaaactagcaagtaaaggccctgcttctctagatgaggtgawgatggctcagagaagttaagtgaattcccaaggtctctcaggtaatgaacagcagagctgtgcctcccccaggtctctcatgcaaaggctgccaaatctacatgtttgcactaacaaccactctactacaccactccaacaggaatccttcttgatccattcccctgactcaacgcactttgcagcggctaaatctttttttttttttttttttttttgagatggagtctctctctgttgcccaggctggagtgcagaggcgcgatttctgctcactgcaagctccgcctcccaggttcacgccattctcctgcttcagcctcccaaatagctgggactacaggtgcccaccaccacacccggctaattttttgtatttttagtagagacgggtttcaccatgttagccaggatggtctcaatctcctgacctcatggtccgcccaccttggcctcccaaagtgctgggattacaggcgtgagcctgtaatttttttgagaccgcacccagcctgc

SEQ ID NO: 523593 - DNA, 630 bp, Homo sapiens
atccctacatagttatagaggtccattgatcagagcttaaaaatcccctaaataattatccaaaaatcccttctgaaatttaccatttggggttagataggttaacatgtgagacctaactgaaatcttcctatcttgatcatttacctggctacactggctcttcattctctataaggtgggtttatctaaaaagtagtaaaataagcctggtatggtggtataagcctgctacttggaaggctgaggtgggaagatcacttgagcccaggagttcaaagctgcaatgagctatgatcacaccactgcactccagcctgggtgacagattgagacccccatatctaaaaaaaaaaaaaaaagaaagaaagaaagaaagaaaaagaaaaaggaaacaatagcaaaattattttacttgaagtcattccacagaaggtgattccatggcatgggcttatactcattagaatgtttctgccaacaactatcaactccktttgaagtggctgaaacaatgagggaattaactatttcacataatatggtgtttcaaaggaggcgagttccagggatgcttaattcaccaaggagccagggtctttctatgcttttgcttggccatcttcacca

SEQ ID NO: 523594 - DNA, 630 bp, Homo sapiens
atccctacatagttatagaggtccattgatcagagcttaaaaatcccctaaataattatccaaaaatcccttctgaaatttaccatttggggttagataggttaacatgtgagacctaactgaaatcttcctatcttgatcatttacctggctacactggctcttcattctctataaggtgggtttatctaaaaagtagtaaaataagcctggtatggtggtataagcctgctacttggaaggctgaggtgggaagatcacttgagcccaggagttcaaagctgcaatgagctatgatcacaccactgcactccagcctgggtgacagattgagacccccatatctaaaaaaaaaaaaaaaagaaagaaagaaagaaagaaaaagaaaaaggaaacaatagcaaaattattttacttgaagtcattccacagaaggtgattccatggcatgggcttatactcattagaatgtttctgccaacaactatcaactccttttgaagtggctgaaacaatgagggaattaactatttcacataatatggtgtttcaaaggaggcgagttccagggatgcttaatycaccaaggagccagggtctttctatgcttttgcttggccatcttcacca

SEQ ID NO: 523595 - DNA, 429 bp, Homo sapiens
ttattacagacaaaagtcaccaygttgtgctagcaaacacctgatcttattcattctttctattttttgcaccaattaatcatccccacctccccctccactttgttccactacccttcccagcctctggtaaccatccttctatgctctatctccatgagttcagtcattttaatttttagctcccacagataagtgagaacgtgcaaaatttgtctttctgtgcctggcctatttcacttaatttaatggtattccttggttgtctttgctttcacctgccatttccctcaccctctcaaccctcagcccagcatctgagaaaggcctagagtaggaatttatgtttaacacgcatttaataggcacctaacttgtatcggcactaaaagcacagtgatgcacacactcccagcctttgtgaagctt

SEQ ID NO: 523596 - DNA, 480 bp, Homo sapiens
cagtgaacagggtaggtgagagggctggctgccttgaggattttataaatcatttctgmgagtgcccaagtatctacaagccactaccagagagaaaaagagagtcgtatagcttgcttctgactccctcccatctccaaattgtaagcaagtgcatctcattggctggatgatcatagtaatgtgaaggtaaaggagtgtggggcgagtagctcccaggcttctagccccagtgataaagggcagggatggtagaaataacggcggcaaaaacaagacaacaaaaaccaatatccagtgcagttttgccttcattttctgggcctaccttttgtgtgcaagacactcaaaacactttcaaatgagttaaactctctaggttcttctctcaccacttctcccaggtgcactatgttctggaagacgcacagaatgtcatgcaactttctaaatgtatgtccatgcctttgcccttgtggt

SEQ ID NO: 523597 - DNA, 480 bp, Homo sapiens
cagtgaacagggtaggtgagagggctggctgccttgaggattttataaatcatttctgasagtgcccaagtatctacaagccactaccagagagaaaaagagagtcgtatagcttgcttctgactccctcccatctccaaattgtaagcaagtgcatctcattggctggatgatcatagtaatgtgaaggtaaaggagtgtggggcgagtagctcccaggcttctagccccagtgataaagggcagggatggtagaaataacggcggcaaaaacaagacaacaaaaaccaatatccagtgcagttttgccttcattttctgggcctaccttttgtgtgcaagacactcaaaacactttcaaatgagttaaactctctaggttcttctctcaccacttctcccaggtgcactatgttctggaagacgcacagaatgtcatgcaactttctaaatgtatgtccatgcctttgcccttgtggt

SEQ ID NO: 523598 - DNA, 480 bp, Homo sapiens
cagtgaacagggtaggtgagagggctggctgccttgaggattttataaatcatttctgagagtgcccaagtatctacaagccactaccagagagaaaaagagagtcgtatagcttgcttctgactccctcccatctccaaattgtaagcaagtgcatctcattggctggatgatcatagtaatgtgaaggtaaaggagtgtggggcgagtagctcccaggcttctagccccagtgataaagggcagggatggtagaaataacggcggcaaaaacaagacaacaaaaaccaatatccagtgcagttttgccttcattttctgggcctaccttttgtgtgcaagacacycaaaacactttcaaatgagttaaactctctaggttcttctctcaccacttctcccaggtgcactatgttctggaagacgcacagaatgtcatgcaactttctaaatgtatgtccatgcctttgcccttgtggt

SEQ ID NO: 523599 - DNA, 480 bp, Homo sapiens
cagtgaacagggtaggtgagagggctggctgccttgaggattttataaatcatttctgagagtgcccaagtatctacaagccactaccagagagaaaaagagagtcgtatagcttgcttctgactccctcccatctccaaattgtaagcaagtgcatctcattggctggatgatcatagtaatgtgaaggtaaaggagtgtggggcgagtagctcccaggcttctagccccagtgataaagggcagggatggtagaaataacggcggcaaaaacaagacaacaaaaaccaatatccagtgcagttttgccttcattttctgggcctaccttttgtgtgcaagacactcaaaacactttyaaatgagttaaactctctaggttcttctctcaccacttctcccaggtgcactatgttctggaagacgcacagaatgtcatgcaactttctaaatgtatgtccatgcctttgcccttgtggt

SEQ ID NO: 523600 - DNA, 489 bp, Homo sapiens
ttcatcacgtttggtgacctaataagacacaaataatctcataatgaagtcaaaaaaatgagtttatgctttatatgaacatataatttttaatgtaacaaatttagcatcaacagcaagattaaatgaatataccatttgcctgcaaaataytttctccttaacttgttgaggtaggtatattgctatcatcccattctgagtcaagttggatttaggccaacattttctggataggtctttcagaaagaataaatacaggctgagaatctcttacccaaaatgcttgggccagaagtgttatcagatttcagattttttcaaattttagaatatctgcattaaaccacttgagcatccttactctgaaaatctgaaatgccccaatgagcatgtgagcatcatgttggtgttcaaaaagttttggattttggatttttgtatagtcaatctgtatgtgctggaatgaaatccaaagatttgacatac

SEQ ID NO: 523601 - DNA, 454 bp, Homo sapiens
ttaaagtgatttttgaattggtgwttatttgttctattttaggtttatttgtctcttgtctatttttggaggagatatggaggtttgtagctgccttgagtttccaaaccaacgattatacttctctgaacttagttccatttggtccatgtaatgtctactccagaattaatgtctgctaaaagagatcggatggaagaaagacaagttccttagttttaggacttttcttttttctattcccttcctcattcccatttagaaaaaataggttgtcttgaaatagttgatattgaagagaactaaaagacaaactgtagagttgttaatatctgtttaaatctgagaggaagaagtataatttttttaaagtaagaaaatgaatagacttgttttatatcacgcctgggtctatagttgataataattgttacttacctacgccttcttactc

SEQ ID NO: 523602 - DNA, 551 bp, Homo sapiens
tggtggatacaacatttgtcaaaacccatagaatatacaacaccaagagggacccctactgtaaactatggactttgggtgataatgatgtatcaatataagttcatctattgtaacaaatgtcccactctggtgatgcatgttgatattggggtaatgcatatgcaggggcaggaggtgggatatatgggaactctgtactttctggtcaatttctctgtgaacctaaagctgctctaaaaatggtctttttttwaaaaagtggtgaaaataattatattatctctatatagatattatatatattatctctatatagataacgtatatatatatataaaatcacagccaaaaaaaaatcctaagagattgttttcaaagctgtttaccatgtaaaccaaaaataaaattccaagccccccatccacctgaatggatgactctcttgtcaaaggcattcaaaaaacctgaaatactagttcaggccatgataggaatgggtggtcagaggtgtctcattatatattcctccccttgaaactcaggcacag

SEQ ID NO: 523603 - DNA, 642 bp, Homo sapiens
tgactcataagccaaggagatggcagggacctggaggatggagggtggggatgacaggggtcacaaagttcagaaggaaacccagcagtaattcaagctctaccattctgtcttgacgcagcctcaatccatcttgcaggaggtgcgagagctggatcataagtgggttgtcatgagttttagtaagatagctccaggcagaaagcagggagcttaggaggcagaattctgggaatctcttgctcaccagcttggcccttaccatgtcagtgccgagatcaatgcagaggatggttatggttcccagaggcaggggtataccgaggatgatgaacatcaggaagggcgtgatctcggggatgttgctggtcagggtgtacatgatggatttcttcaggttgtcaaagatcaggcggcctggggaggaaggtcaacctcctgtgagaagccctgggagaacacgcctccctcaaaccagctccgggacagacaggccacctcaaagaagtgtcacagtccaggaaagggtctggaggtcctagacctccagggtcccagtattgtttctaaattgtgtgccttttaatcagagccatgccgtctgtgtactstttgttcttagattcaccctagctaacgtta

SEQ ID NO: 523604 - DNA, 537 bp, Homo sapiens
actgggatttccagaaggaaaggagcagggccacttctgctagagtgagaagggcagattgggttctataaactcaccctccagatggagacgccccttcccattccatycctcctctcatcagaactaacccagggcacctgtgttagggaacagatgaaggatggaacttcctgatttgggggaggagagctgaacccaggaatgggtagaaggacaacactgggaaaaagtgagggtgggttctggtgtcttgaagtttaattccagtgagtgccccaggcagggtgaggcagatggggaagaagctggtgcagatttggaccccaaagaggccagtgcttaaagcctgcttctgttgcttaccaatacaaattctgactaaagatgtctggccagtctgctcttgctgtggtgtttgaattttttttctccccactgggactgctttaggctgcctgggtgggagggagataatgacaggagatttagggcccccatgtgagagatggccttgtttaagggtgctgaggaggg

SEQ ID NO: 523605 - DNA, 573 bp, Homo sapiens
taggccccagagagcctttctcccctcaccagggcagtctgactccagcctgaggccgggcttgtcagcagcatcgtctggaatgaaaaagggggataaaggtcagagtctagtctgaggcagccccattgtcctgagcatacctctgagcaggggcttgcaaggtggcagacatgtgaggtcacctcccaagtggggtataggtctgacctcttagcactgcattctccctggaccagcctcctcagctccacttctgatcccagttccaactggtagagccaggcacactccttctccacgtgtctaaacctcccggttgaccctgtgataaaaaagatatrggcaactggtaagaggagagggtgagtgtattagagtctagagcactggtttttaaactttttgacctcaggaccactttacattctaaaaagttactgaagactccaaagagctttggtttgtgtgggttctatctatgaacatttactgtgttagaaatgaacactgggacacatgaaataattattaatttttgcatgttaacaaaatgacgtatttttaatgaaa

SEQ ID NO: 523606 - DNA, 439 bp, Homo sapiens
ctggtggcaagtctgggactagaatggaggtctctcaccgctagtttttttgtgtttttcccccaactatttgtctcttggtttcactcagatgaccccacccccaaccctatctacaattccaacagagctgtcttttagccacctttttttgggaaggagtgggggcatggtgaggggaaggggtggggagaagaaygggtctaggagccttaagtgggcttctgggtctagaaagaacctccgaaggtcactttgacccttgcactacccctaggcagagtgagcctacctcctttcacttcccaccctcctaccggccccactcctgctacgaactctggatcactggaaagtaaccccacagccttcttagctagggtttggagttggggatctctatcaattataagtccttcatgctgcctagtactggcct

SEQ ID NO: 523607 - DNA, 629 bp, Homo sapiens
cttacacaagaaggcccttttggatattagtcctagtccttatagcatattttgcaaggtggtgtcatttaacagaagagaaacttgaggttaggcaggttaagtaccttgcccaaggccacacagtttttaagtggcttaggggtgacttcagcccaggcttgtctgtctgtccccaaagccccaaatcttcctacacctcactgtccctcctcccaagcctctccaccctgtaaactcagtcattcaacaaatattgattgggccaggccttgtactgggcactggagatgccatggtaaacaaggtgggcctgctcccctgccctcagggaacatagttctatatgttagggatacatttcataaacaagtcataaccaacccccagtatgagtatgatgagaggggtcttcagggaggtgaggtatcctctcttaccctgtggcctggggctgggaagragctgggggcaggttggcgttgagaactgggttggtgtctccctccagaggggataaggcccaaggagagaacagtgtcttcagcaggcccctctggaacccaggcccctctggaacccagactgcgggttccagaggcggccagcagagggagcccacagcccag

SEQ ID NO: 523608 - DNA, 608 bp, Homo sapiens
cagttgttttctaaaatggttgtaaatttacaatcccatcagaaatgtataaaatttccaatttctttgagtctcaaccaaactttgatattgttacatttataaattttttccacccaattggggtgaaatgacatctatattagccagaactcagaaaaccagacaccacacaaggtatttcaaacagagtgactttaatacaggaaattgcctacatagatgttggagagctgatagggccaaaagggaacacagaggtaactcagagataataactgcaggaagcaggtaccaacctgagggctagaggaataaaagaagtttgggaaccaggacctaggagctcagagtatgggtcctgcggtcctgcagagctggtgctgagacctaggaatggtatgtggctgctattggtatatggaaggattgtggtgaggctgggtttgggartacatcaagaaagtaggggctggagccaactgctgctgctggagtgatgctggcaggaaaggaagaaacaggaaccaagtcccttctctcctcatcttgccttccaatcttcctcgagtgcctttcgttgtgggaacctaacaggaagccagctg

SEQ ID NO: 523609 - DNA, 525 bp, Homo sapiens
tgtgaaactatgttcttctytggaaacttgtaggctcatctctttgtctctggcgttctgaaagttttcagtagagtggacctatactcatccattgggctgggcactcagtggctctctcaatctagagattattgaatttcctttgattatttacattcctattttttctactcctcttttccgaagcttccgttagaccttctggacttgtcctcaaatcattttttatattttctactgtttgtatctttgtattttattctagtttctggggaattgcttaactatcttccagcctttctattgaagttttcaattctgctgtcatacttttactttccaataccttggttttgtcattgttgttctctatgtagctgtttcttagagtattgtcttatttcatggctgcaataccctctttatcatatcagaaagatgtgataaaatctttctgaataaagtaatattagttttaaaaatattttattctccatgcataatctctcttttctctggaaa

SEQ ID NO: 523610 - DNA, 525 bp, Homo sapiens
tgtgaaactatgttcttctctggaaacttgtaggctcatctctttgtctctggcgttctgaaagttttcagtagagtggacctatactcatccattgggctgggcactcagtggctctctcaatctagagattattgaatttcctttgattatttacattcctattttttctactcctcttttccgaagcttccgttagaccttctggacttgtcctcaaatcattttttatattttctactgtttgtatctttgtattttattctagtttctggggaattgcttaactatcttccagcctttytattgaagttttcaattctgctgtcatacttttactttccaataccttggttttgtcattgttgttctctatgtagctgtttcttagagtattgtcttatttcatggctgcaataccctctttatcatatcagaaagatgtgataaaatctttctgaataaagtaatattagttttaaaaatattttattctccatgcataatctctcttttctctggaaa

SEQ ID NO: 523611 - DNA, 526 bp, Homo sapiens
ggtaatagatacatgtgaagacaatcatcctgcatggatatgccagccaacctctattaccccaagtttcagcccatgtcttctaaagagaccgtaggaaggcttgaattggacgatctgctctcccatcagctgccagggctgggccagggcaggaggggtgggaacgtatccttatcagttgtcagatccatcccacttttactgaacaccaacaagagcctggccccgtgttggggacgttcacatcagccccttggtaaatcccagarcaatctgcatccttactccttgcctctggctccaggaaggttctcagccctggcattccctcccaaactaaacagaggtgctttggaatcacggggacttgatatcatccctgccaacccgtgtactggtgctggggcctgagggctgactgtcttgaccacagtgggttcctctggaattccaaccattccagctttaggaaggactgaggatggattctggcatggtctggaccccccatttactttctctg

SEQ ID NO: 523612 - DNA, 526 bp, Homo sapiens
ggtaatagatacatgtgaagacaatcatcctgcatggatatgccagccaacctctattaccccaagtttcagcccatgtcttctaaagagaccgtaggaaggcttgaattggacgatctgctctcccatcagctgccagggctgggccagggcaggaggggtgggaacgtatccttatcagttgtcagatccatcccacttttactgaacaccaacaagagcctggccccgtgttggggacgttcacatcagccccttggtaaatcccagaacaatstgcatccttactccttgcctctggctccaggaaggttctcagccctggcattccctcccaaactaaacagaggtgctttggaatcacggggacttgatatcatccctgccaacccgtgtactggtgctggggcctgagggctgactgtcttgaccacagtgggttcctctggaattccaaccattccagctttaggaaggactgaggatggattctggcatggtctggaccccccatttactttctctg

SEQ ID NO: 523613 - DNA, 400 bp, Homo sapiens
gcctgaagtctactcagagagggatatgctgcactaagatttccaattaaacaaaggtgtattcatgtataaggcatgctgagcacctcctggccctcattgagacccttccaagkcctcttaatgttgttttaattccctcaccctgggcgatagtgaagatgcagagctggatgtcttccccctgtttcagccactgtgttccctttagagccactttgggtctctgatggagtctacctgggatcaggtggtggagaggacttcaaagaaaatgggaagaaggtttggttaggggacttaggagagaagagagtggaaaaggtatagggaggttccccagacccagttctcagccttccccactctcttcaccaatttacttaaccaaccctcatta

SEQ ID NO: 523614 - DNA, 202 bp, Homo sapiens
tgcactaagatttccaattaaacaaaggtgtattcatgtataaggcatgctgagcacctcctggccctcattgagacccttccaagtcctcttratgttgttttaattccctcaccctgggcgatagtgaagatgcagagctggatgtcttccccctgtttcagccactgtgttccctttagagccactttgggtctctgat

SEQ ID NO: 523615 - DNA, 507 bp, Homo sapiens
ccagctttaagagctcttagttcccctttccttccaacttttatttaatttaattcttttagtggttaccttcgtaacattagatattatgttttcgtccaacaaacagaataycatatcaacagtattctggcagtccagcttccatgcctattttttcttttttttttttttagatggagtttcattcttgttgcccaggctggagtgcaatggcaagatctcagctcactgcaacctctaccccctgggttcaagcgattctcctgcttcagcctcccgagtagctgaggttacaggcatgtgccaccacgcctggctaattttgtatttttagtagagatggggtttctccatgttggtcaggctggtctcaaactcccgacctcaggtgatctgcctacctcagcctcccaaagtggtgggattacaggtgtgagtcaccacacctggcttccatgcctattttttctactccttgaagacaaggagtcttatttttctttg

SEQ ID NO: 523616 - DNA, 507 bp, Homo sapiens
ccagctttaagagctcttagttcccctttccttccaacttttatttaatttaattcttttagtggttaccttcgtaacattagatattatgttttcgtccaacaaacagaatatcatatcaacagtattctggcagtccagcttccatgcctattttttcttttttttttttttagatggagtttcattcttgttgcccaggctggagtgcaatggcaagatctcagctcactgcaacctctaccccctgggttcaagcgattctcctgcttcagcctcccgagtagctgaggttacaggcatgtgccaccacgcctggctaattttgtatttttagtagagatggrgtttctccatgttggtcaggctggtctcaaactcccgacctcaggtgatctgcctacctcagcctcccaaagtggtgggattacaggtgtgagtcaccacacctggcttccatgcctattttttctactccttgaagacaaggagtcttatttttctttg

SEQ ID NO: 523617 - DNA, 513 bp, Homo sapiens
tcagattgactgcaactgactgatcttctagactaagggtatgcaaactttatgtgaagggccagataattttgttaggcttttgtggccatatggtttctgtacaactatctaactcagccatggcagtgcaaaaactagtcacagataacacatgaatgaatgaatgtgtctgtgttccaatgaaactttgcttcattttgttatgttaatttgttctacaaaaactgggttgactgaatttggcccaccagctgcagtgtgtcaatccttttctaaactcaccaggtagattaatatccagtggcatttcccaatgaaaagaaaatttaagtacttgttggcatattcacccaaaatgctgaygtgatattttatacatctttaatcttatctctgtaataatgtcatatgtataatttttcaaaacagatgagacatcccagcctagtgggagggaactgtgactttattggttaatttgtgtgtttgatctctctagtttaactataa

SEQ ID NO: 523618 - DNA, 528 bp, Homo sapiens
gcttcagagggatttaaatgtacaaatacatatgagacacaacgaagggaatataaaataaaaatggtccctgtattctctttggctacattctaattggcacggggacaggaggagtggagggatactaacacacacacacacagagctatgatttggttaagaccatgtggatttgtgtaatacagtataaagtatgatgatacaaggccaggggtggtggctcaagyctgtaatcccagcaccttgggaggctgaggcgggtggatcacagggtcaggagttcgagaccagcctggccaacatggtgaaaccccgtctccactaaagatacaaaaaattagctgggcgtgggggcgcgtgcctgtaatcatagctactcgggaggctgatgcaggagagtcgcttgaacccgagaggcggagattgcaccactgcacttcatcccgggtgacaatgcgagacttcgtctcaaaaaaaaagtatgatgatacaatatgcaagggagaaattacatctaactttgca

SEQ ID NO: 523619 - DNA, 610 bp, Homo sapiens
aaagagatttgaactcttcagactttttaacatgcccctgtgaacaggtattttcaggactcaaactaccacaatgaacagagtatagattttagattgctcttctagaaccatggctagaagaatctttcctttgtcctgttctaacctaggaatgaaaaacaccaccagtttgaatcgcctagatgaaaatcttttcctctgggtgttatttttccccactgaatgccacaccattgaaaatagactgctcatcccctcttcctttcttgtccytgtcccatgctcaccccaccctcctgtcctgtgtcttggagaagcacagggctccaccctgcaagcggcatctggcggaccctcatgagcctgtcgtgcaggccaggtcattggccccttccccaatcccggccctgctgtgctgctgccatggcgcatgctcctaactctgaacaacccacggcagcttctagccccgcatctggaaaaaggcccctttccaagcaatctcacgtttactggttgttctgggagtaagtggctaaatgtatattttgggggtatcccccaacaacagtttgttggccacaggttgaaaaggaaaggaataaac

SEQ ID NO: 523620 - DNA, 588 bp, Homo sapiens
ctataggtaggacaaagttaagtaaatttgtatttaagaaacaaatttatggtgtgtcattttttaatatgatgctagaatctctgggatcagagttaaacagcagctaaaccacttaaaattatagcaaaattttaaactaaaagtttcaatggtcatattacaacaacagattgttgtaacaatctgttataataacaatattataacagaatttgctgtgccccagaaattgtagaggccttctacttaaattctcaaaacaattctatgagctcagtactattattgcagctatttttgccctcccaaagtcaccyagtcatcaagtggcagagccaggaactgaacccaggcaataccactccagattcattctcctatccactattccatctggcctctctacgtgtgcctgagattttttcaacagttcagtaatcaacattgggtcacgtgaagttaattggaaaggacgtcagagaaatagtacaaactatttcacagttgaggcctgttccacgtttaagaactggttagtggtagaagcagaactacatatatacaacccacattcagagtaagcta

SEQ ID NO: 523621 - DNA, 466 bp, Homo sapiens
agttacataactgcttcctcctccacaaaccaatgagagcagataggagccccttgaaccccttccagccctaatgcacctctaatcctgcacaggattggcatgaggtgaaacaaaaagaatgtggttcaagtgctgttttatcaaaaatgttcctaggcccgggctgcccacggaactttttctgtacaagcatcaccgggkggcccaacatccctctcaggacagcagtagatctttaggaggctctagatcctggtgtcccagggtgcaagaagtgcgtgtttgtgttctccattcatcctgcattgaccctacatttaaaggccagttgcttccctgtgtccatcagaggcttccagagctcctacctgattccaggtggactaaatccattgtcaagttctcccggccccctagacctgcataaaagacagatttgttacaattggaagagaccctacca

SEQ ID NO: 523622 - DNA, 618 bp, Homo sapiens
tcgatgctaagtggttcctgctttggagaagagctgggggagggtccgggggatctgctgccctgtgggctggagctgctgaggtgcaagtggtaggagctccacatacatgagggggacaggctgcstaggtttcctccaacatctcagccatggcccacatcagaaagctataccaggacatggaggctggtggggaactttagaaagtccaggtcaacattttcgcatggactgaatgacccagaaaaagagatgttcaaatacagacctcctggcctgcatcagcctctcctagctacagataccagtgccccacccccggagattctgattcttcaggtcagcagaggggtactagaatctgtgcttttttaagctccccagggtaattctgagatgcagccaggtttgggccccactagcctggggtgattggggaccctgctgcagtgccttagccctgatgttacaattggaagggaccctaccaacatcccattgtgatctattcactttacagatgaccaaaccaaggcccagggaagttaagtgccccaaagggagccactggacaaaacagcattctctactgttatagaaggggattcaaggact

SEQ ID NO: 523623 - DNA, 502 bp, Homo sapiens
tatcaatgcaggtcaactcattgtaacaaatgtaccattctggtagagcgtgttgatagtgggggaggctatgtatgtgttggggtgggagtatacgagaactctctgcattytccctcagttttgttgtgaagctaaaactattacagaaaataaagtccattttaaaagttaaatgagataatatatgtaaagaacctgatacattgtaaaggactcaattaatatattaaagctcatatgtagagctttctatgtgcaaggagatatcccatatgacctcttggtctgatcttaactgattatcctttaaaataaatttctggagtggacttgctgggtcaagtgtgtgaaagtttacaatattttgtcagatactcattagaaatttgtgtcaacttacacttccataaataacatgcttgtctccccacgtcttcaccaacacttagtaacttcaggtattctaatatttgctaaactacttgtggctttcaaactg

SEQ ID NO: 523624 - DNA, 502 bp, Homo sapiens
tatcaatgcaggtcaactcattgtaacaaatgtaccattctggtagagcgtgttgatagtgggggaggctatgtatgtgttggggtgggagtatacgagaactctctgcattttccctcagttttgttgtgaagctaaaactattacagaaaataaagtccattttaaaagttaaatgagataatatatgtaaagaacctgatacattgtaaaggactcaattaatatattaaagctcatatgtagagctttctatgtgcaaggagatrtcccatatgacctcttggtctgatcttaactgattatcctttaaaataaatttctggagtggacttgctgggtcaagtgtgtgaaagtttacaatattttgtcagatactcattagaaatttgtgtcaacttacacttccataaataacatgcttgtctccccacgtcttcaccaacacttagtaacttcaggtattctaatatttgctaaactacttgtggctttcaaactg

SEQ ID NO: 523625 - DNA, 502 bp, Homo sapiens
tatcaatgcaggtcaactcattgtaacaaatgtaccattctggtagagcgtgttgatagtgggggaggctatgtatgtgttggggtgggagtatacgagaactctctgcattttccctcagttttgttgtgaagctaaaactattacagaaaataaagtccattttaaaagttaaatgagataatatatgtaaagaacctgatacattgtaaaggactcaattaatatattaaagctcatatgtagagctttctatgtgcaaggagatatcccatatgacctcttggtctgatcttaactgattatcctttaaaataaatttctggagtggacttgctgggtcaagtgtgtgaaagtttacaatattttgtcagatactcattagaaatttgtgtcaacttacacttccayaaataacatgcttgtctccccacgtcttcaccaacacttagtaacttcaggtattctaatatttgctaaactacttgtggctttcaaactg

SEQ ID NO: 523626 - DNA, 502 bp, Homo sapiens
tatcaatgcaggtcaactcattgtaacaaatgtaccattctggtagagcgtgttgatagtgggggaggctatgtatgtgttggggtgggagtatacgagaactctctgcattttccctcagttttgttgtgaagctaaaactattacagaaaataaagtccattttaaaagttaaatgagataatatatgtaaagaacctgatacattgtaaaggactcaattaatatattaaagctcatatgtagagctttctatgtgcaaggagatatcccatatgacctcttggtctgatcttaactgattatcctttaaaataaatttctggagtggacttgctgggtcaagtgtgtgaaagtttacaatattttgtcagatactcattagaaatttgtgtcaacttacacttccataaataacatgcttgtctccccacrtcttcaccaacacttagtaacttcaggtattctaatatttgctaaactacttgtggctttcaaactg

SEQ ID NO: 523627 - DNA, 613 bp, Homo sapiens
gccatgaagaagagcctctggaaaacacatggcccgctccatacccacacagcaaaaagcttgctgagaaggctgtactggcggctaacgggtggaatctgaaaaacggcggcaccctgtacacttgtgccttacgacccatgtatatctatggggaaggaagccgattcctttctgctagtataaacgaggccctgaacaacaatgggatcctgtcaagtgttggaaagttctccactgttaacccagtctatgttggcaatgtggcctgggcccacattctggccttgagggccctgcaggaccccaagaaggccccaagcatccgaggacagttctactatatctcagatgacacgcctcaccaaagctatgataaccttaattacaccctgagcaaagagttcggcctccgccttgattccagatggagctttcctttatccctgatgtattggattggcttcctgctggaaatagtgagcttcctactcaggccaatttacacctatcgaccgcccttcaaccgccacatagtcacattgtcaaatagcgtattcaccttctcttataagaaggctcagcgagatytggcgtataagccactctacag

SEQ ID NO: 523628 - DNA, 538 bp, Homo sapiens
acttgtgggattcaacagagattggtttgtggtaagagtgaaacaaatcacatgagcatatagtattaaagcaatctggtatacagacaatgcagacaatgatgttagcttactttataagagaatgtagtagaagctctctttgaatacatccacctggtgataactgtgctcctggacacacatgtgtgtaattttttaagwtgtgtctgtactcagaggacaagatccaaaattccaagggaaatggcaagaatattaagataatgccaaaatacttttctccactgctcagaaacagggaaaaatgaatgtccacagtaaactgaagaggtgcatataaaatctcagaaggaatctcttaactcctagaaattcttacatttgtaatgcaatctgatacaaacataggcaaaagacctgaacagacaccttgccaaagaagatgtatagaatgcaaaaaaccatgtaaaaagatattcaacatcatatgtcattagagaattgcaaactaaaatgaaaataagataccactgca

SEQ ID NO: 523629 - DNA, 615 bp, Homo sapiens
tccagttgaactttcaacccaactatttgtggaaattgctattaccaaattacttatgatgttgccaaaacaaatgatcaattctcttcctgttacatttcatgcatcagaagcatccaacatagtggaccacattctttttgaaatactttcttcacttgacttttacaacgccatccgctcctaattttcctcctgccggccaccgactcctactcagtatctttagctggcccctcctcctctgttcaacctctaaatgtcgatatgtctattccaggattcagtctagaaacttttccttttatccttgaatattcttaccctagcttatttcatctagtcctgggcttttaaaaatcactttacgctactcatgtccaagttgayctctctaggactatagcacaaggggtataattattctaaagtaacccagaagtttaataagctggccaagaagagggattttctttttcccagcatgagggactctacctagtatatgtctctatagaatgggtggctttctctcctaagaaaaggaaaaccctttgcacgagccccaaaaactctaggttctgggcagttgattttcccagataatgttgtgaa

SEQ ID NO: 523630 - DNA, 620 bp, Homo sapiens
atgcttacttagcacagcctttataaattttcccacaattgtcatctcacacaaagaagtgagacaatttaaggcctggacagggccgtctggtaagtaccttcatctctcccagatttcttatctgcacagtgaggattatatagctactattttgtagtgaagatcaaatgcattcatacatgtacagcacttagattactgactgacacataaataatcaataattattagttgttaatataccatttattctttacacggatgcagagtatccactttatagatgagaacaaaaaagaaatctcatactgtataaatgatttgtcccaaaccacaaggctagacaaagtcagagatggactcatgcctggtcaaggtgtgtagggtgagtggaggagaggatgaactcagtttccaccaggtgagctccactacactttacctgcaggagccagtttrgagagaggaaagttatttgaccaaggaacagtggctatgaaaccaggcagaccttgtttaaaatttatctttatcagctactagctgtgtgggccttggcaagtcacttaacaattccaggtacgtgtttcataatttgtgaagtagagctaataatg

SEQ ID NO: 523631 - DNA, 583 bp, Homo sapiens
tgtttttcagacaagtatcccagatgattcctcttcattggatcttggatcagatgttgagtatggtggtcctacagagtatctctggtggcttgccacaggactctggcatcctgtctcagttgatacctttgtcaatgccttggatatggacttagtagccagttccatcatatctactcagaataagaactagaagaagccaaggctaagtcagttaaagaaacaggatccaaaaaggtctcaaaagsctgggtggatacactgaccaagtgtattagtccattctcatgctgctaataaagacatacccaagactgggtgattttataaaagaaagaagtttaattgactcacagtgcagcatggctggggaagcctcaggaaactcacaatcatggaagaaggggaagcaaacacatccttcttcccatggcaccaagaagaagtgccaagcaaagggggaaacccccttataaaaccagcagaactcatgagaacccacccattatcatgagaacaacatgagagtaaccacccccatgattaaattacctcccaccagattcctcccatgagacgt

SEQ ID NO: 523632 - DNA, 583 bp, Homo sapiens
tgtttttcagacaagtatcccagatgattcctcttcattggatcttggatcagatgttgagtatggtggtcctacagagtatctctggtggcttgccacaggactctggcatcctgtctcagttgatacctttgtcaatgccttggatatggacttagtagccagttccatcatatctactcagaataagaactagaagaagccaaggctaagtcagttaaagaaacaggatccaaaaaggtctcaaaaggctgggtggatacactgaccaagtgtattagtccattctcaygctgctaataaagacatacccaagactgggtgattttataaaagaaagaagtttaattgactcacagtgcagcatggctggggaagcctcaggaaactcacaatcatggaagaaggggaagcaaacacatccttcttcccatggcaccaagaagaagtgccaagcaaagggggaaacccccttataaaaccagcagaactcatgagaacccacccattatcatgagaacaacatgagagtaaccacccccatgattaaattacctcccaccagattcctcccatgagacgt

SEQ ID NO: 523633 - DNA, 569 bp, Homo sapiens
gcttgatcccagatgtcaccactgcagatggttcccccaaacttgtttggctgcaagaggctccggtgtcggtactaaaccagattttgaacaagacacattcttgtcaaccaatcaatcaatcaaccaagacttgtgcagcctggtttcggctcaacataagaaataattatctaatgattgagacctgcctgtgaagctgtcttttgagggatgaatatgcataaacagtggtgtatcaccagaagtggcacaatcactgattggaacgttgaatagggcctccaagcatcaaatgaaaggcctggacaagayatttctagggtcttcctacttgctaggaataacctctgttccctcttcttgaagaagttaaattcctattaatctttcagtaacattcttcaagttgctcgcttccctgtctactagcacttggcatatgaagttgcaattgagcatccacgtagttctccatctctcccaccagactgtgagcaattttcatattgagggtagagaagagaggaccatgtcttatttggcttcatacacttggcacttgatct

SEQ ID NO: 523634 - DNA, 614 bp, Homo sapiens
aagggcagagatggagagggctcacagaaggcacccattgtcagctttgccccttggacaggyggaaatccaggcaccacctgtatgacacgctctaggactcaagccctggctgaacctctagctgtggctactctactctagctggggagctcctctattcagcagtggaatgtcagtcatcacactggggtgcctctctgaaaggaatgcaccctcaaaacaagctgggactcttctcagcctcacatccagccttctcctccctctcacagaacacccatatggaactgcaacccctaggtgtgctttactcacaggccaggcagagtgctgccctgtccttctcctgggtgttctgagtgcatggccaagtccccacctgatgcatggtggattctccttcccctccccctcctccaatctctgcctctcctctcttctctgtccctttctcccatggttctctggctcaatcttcttctgctcctctcacttccctggctttttctctcttcttcttggtttctccctcacttcttttctttccccttttcattctttctccctctcctactctcccctcctgctctctacccctcttgcttcttgtc

SEQ ID NO: 523635 - DNA, 614 bp, Homo sapiens
aagggcagagatggagagggctcacagaaggcacccattgtcagctttgccccttggacaggcggaaatccaggcaccacctgtatgacacgctctaggactcaagccctggctgaacctctagctgtggctactctaytctagctggggagctcctctattcagcagtggaatgtcagtcatcacactggggtgcctctctgaaaggaatgcaccctcaaaacaagctgggactcttctcagcctcacatccagccttctcctccctctcacagaacacccatatggaactgcaacccctaggtgtgctttactcacaggccaggcagagtgctgccctgtccttctcctgggtgttctgagtgcatggccaagtccccacctgatgcatggtggattctccttcccctccccctcctccaatctctgcctctcctctcttctctgtccctttctcccatggttctctggctcaatcttcttctgctcctctcacttccctggctttttctctcttcttcttggtttctccctcacttcttttctttccccttttcattctttctccctctcctactctcccctcctgctctctacccctcttgcttcttgtc

SEQ ID NO: 523636 - DNA, 614 bp, Homo sapiens
aagggcagagatggagagggctcacagaaggcacccattgtcagctttgccccttggacaggcggaaatccaggcaccacctgtatgacacgctctaggactcaagccctggctgaacctctagctgtggctactctactctagctggggagctcctctattcagcagtggaatgtcagtcatcacactggggtgcctctctgaaaggaatgcaccctcaaaacaagctgggactcttctcagcctcacatccagccttctcctccctctcacagaacacccatatggaactgcaacccctaggtgtgctttactcacaggccaggcagagtgctgccctgtccttctcctgggtgttctgagtgcatggccaagtccccacctgatgcatggtggattctccttcccctccccctcctccaatctctgcctctcctctcttctctgtccctttctcccwtggttctctggctcaatcttcttctgctcctctcacttccctggctttttctctcttcttcttggtttctccctcacttcttttctttccccttttcattctttctccctctcctactctcccctcctgctctctacccctcttgcttcttgtc

SEQ ID NO: 523637 - DNA, 517 bp, Homo sapiens
tccctatgaggacttggtgagtccatgctgaatggacaggcatgatcctctgcttcgtcatggctcttgctcccagggctgcaaggctgacagacgaggcyggggcagatgtgggcagctctcacagaacagctcccactgtctcctccaacccctccacagctggctagggaggctgagaaaggcgagaacgccaaaccaaagtgaaatggctgctcttgtcctcttcccgctctctctccacccacactgtctctgtctcctcggtttctttgcagctcagatgagtggcagtaggaagaggatcttgcttccaacatgaaaccattttcacaggcacagctggtgctgtgctttgccccctcctaatgttgctccaggagcaaagtgatttcagctgcggtattagaaacaggctgttgagtagtaacagcacattaatcttgagcatgtgcagaggtacaagtggcagttgtgagctgagacgttttatttgtatagaattgaggtttgtgac

SEQ ID NO: 523638 - DNA, 407 bp, Homo sapiens
tcagtttcccccagccctgctttccacatctgtgcaaatggcaacacagtgaaaggggtaaacaacatcttggtattattatgaaaatagttttgacctctagggcctcctgaaagggtcctgaggacccttgtagatccataacttaaactttaagaaccactgttcyagggcgtttaggttgaaagaaatgacacatttcatcattttctaaacaaaactgattgtggcttgaggaaattgactgtgcttagttttctgggattctctccccctcgcttggatcagacaagcttggcgtaggaaacaggtgagggccttggtccctgacggtggttggtgtggactctgctctttgccctggccctcctggtccgttccagggcaggcagctctgctggtagctc

SEQ ID NO: 523639 - DNA, 591 bp, Homo sapiens
ctcaggtgccccccaggtagggggtgagctgggaggaagatgaccactggccactccctcacctcccccaagccacatctctgccagtgaggcagacagaaaccagacaggggcagcgccccatcactggtcacactgaagggcaaccacagagcaggactagaccagactcctgcctcccggagcccagcagtctctcctcaaccccacgccttccccacatgtagcccagtcaagcctccccttacccaggaaatcttgaatttgataatcaagccatgtggagtaggagcttgacaaaagggaagaacatgctaatagtggaaatctgcctagaatgctcaaacctcaccacacagggtcctacagaaggaaaggtgasggcagagtgagatgcagctttcagtaaatattcctgctcctggggagtatctgggggaaacagggtgggctgtgttgccatattcaggcatgtgcaaaatctgtccccggggtacccgaggcaggaacagagaaggctaatctaaccagatagactagattaactaggaagggcaggagcctttcagggacattgacagggaagaagca

SEQ ID NO: 523640 - DNA, 587 bp, Homo sapiens
ggcttcccccttgactccaaagcaaggccatgactctgatcyggggttccagcctccccagtctattgactctccctgctggtggaggggagttgtgggggtaagggagatgacttcccagacgaggaacagagaagacatgaggagactggaaaagtggtgcagaggggccctgatgtgggaaccattctgctctcctcaggggcctccatccagtctccatctcaatggtcatcactgagactgcaagtcactgtacccaggagaatggcgcctttgccctccagaccaggaagccagggcagcagcaggttagggtgggaaggaactgaattcatggttggtaatgttgagtctgagtacccgagggtctaaaggaacagatgcgaggtcagcagttgactaagggtgaccctgaagttgcccactctgtaacactctgtcatctccctggggcctccagaccagccctcctctgtccttctgcctcttttctgaccattttcttccatagcccccactccaccttcatgaactccagctctcccccatatcttcagctcccccaggccacttgtcacccgcac

SEQ ID NO: 523641 - DNA, 383 bp, Homo sapiens
aaaatcactggatagaacatagcttttgactgccttacttcaaagcccagccctctatcaaatacagtattttgtgtaatctttttgtacttcactctcctctgttgtaaaataaggataataatggcagctacctcataggatggtcacacagaataaataactaaacacatctaacaaactgttactggtaaatagtgtttaataaaggttttatcattattttaaaaacacttctaatgaagttctttccattgaagcatttctaatttatcctaatgaatctgttccacagaataaaaaastaataatttagggtttgttatctacatcaatatcattatccaagtccactgtctgtctttcctcttttctcctcctgc

SEQ ID NO: 523642 - DNA, 594 bp, Homo sapiens
tttcttctttctgcagtcttctttatttccttttcctgctcccagctcccagttccctcttctaattagcttctcaggaaaggctttctgcaaccaaaattctggctgttgaataaaaagtagactagaatttcacataaggcaaagactcctgaggttggcagatgctgtgatccttgttcttgcatttgggagtgtgcttttctcaacagggaatatcataagtgaatactgcagagagttgcacatcaacattttattgcataattttcagaaataatcttagggaaatcaaagggagtatcaaaatattaatattggagtgtttgcattctgctcaattttcaaattaatttttaatttgtaattgatataatgtacatatttatggggtacagtgtgatgtttcagtgcatrtatacattgtataatgatcaaatcagggtaatttccatatctgtcactttaaattatcatttttgtggtgatgacattcaaaatcttctcttctagctatcttgaaatatacactaccttgttatttactctgtagtcaccgtactgtgtcatagaagaccagagcaaattctccag

SEQ ID NO: 523643 - DNA, 510 bp, Homo sapiens
aacagccaggggctggtcaggtggggttcggggtgctgtggcctagaggagcctggaatcttccagaaaaggatccaagaagctatcaaaagctttctggggccgtgagctttagcaactgcctaggaggcaccaagaaggctgttttacaacagcagagtcaggctgcaggtaggctgatgccgagagtggaggcttcgaaacatgaataatgaccgctacctgctctcaaaagaaaacatttggaaatgctcacagcatcagataggagctaagtgctaaaatgagagagctaactcctgaaaaatgggtgggatttattcaggaaaggattcggagggkcatgatacttgctcagaatggcctggcatatgcataagagaaaaagctttctccagatgtagagatggggatagtggaaaaggaagattaacacccagacacccagagcaacatccacagacaaaagagaagagccaggaatcgcaggcatcagcctagtgtttgccc

SEQ ID NO: 523644 - DNA, 561 bp, Homo sapiens
gtctctgtgcattctcacaggcatgcttgttcattttcttctctacttccactgtgcacatttcacattggtggaacattatgaataacccacgctgacagttgatgacttcagctcaccttctattgccctgcttctggccctaatagctacacatatagaaccttagggccagaaagtgcctttgggtcttctaggttgcaaattcytttgaacacctattgatgagctgcaccatttctccagaaaagaaaatgtgggtgtggcatgcgctgtaataataaaatacctttctggtgaaattgacccgatccaaactggcttcaatacaaagcaattgttggggtcaatatctgaaatgtctgtggaagagctggcttcaggggcaactttaacttcatggggttacaatcccactttacccccagccacagcagttcttttcacagtgtggcccttggccgtatcagggccttcccatataattctaggaggtagctccagtctccttccactgacactcagttttagcccagcaggcaagagcaagtctcttctagt

SEQ ID NO: 523645 - DNA, 606 bp, Homo sapiens
gtactctgaaaaacagcaaacactgttgaataaatttcaaaaaacctaaataaattttaaaataccctatgttcataaatcaaaagacctagtgttttttaaatgacaatactatccaaatctacagatccaaggttaagacagtgtgatattgttaataggacagacgtatagaccagtgggataaaactgagagcatggaaagaaacgcatatatttatagtccatcgttttttgacaagggtgtcgagacagctcagttaaacataaataggtcttttgaacaaatgatgctgggacaactagatatccagctataaaagaaataaattagaaccctyccttctaccatgaacaaaaattaactcacaatggattaaacacctaagtgtaggaagtaaaactataaaacttttagaaggaagcacagacgtctatcatcatgaccttgaattagtcaaagttcccttaaatgagatactggaagcacaaaggatcaatttgactttatgaaaattaacgtttttatgcttcaaagggcagcaccaagaaaataaagacaaaagccacagggtggaaggaaatttaagaaaacaatttacatag

SEQ ID NO: 523646 - DNA, 539 bp, Homo sapiens
gtggttcttggagaagacatagggttggggtgaaaacatctaggttcttgccagcactgctacctggctatggagaaagctattttacctgcaagtgtcagaattttcatcaatgagggagtgaatgacactgagcagacagaaccatttagaagaaaaataggctggcacgtataaaagcattgtacacactggaaatggcatacacattgaagacattatttttagtttataatatttcatatactttctatttagccacaggtattgagccttcaaatccatttttttaagtgcagaactttttttttcttgtagtgtattcagataaaagggcacaatataaataacctgtattctctcttgaacacttatattctacctttatttacccatatttgttttttcttattctttctcctcaattcacctattgctacttcaaagcaattgaaatcagagaaaagaagaattgctcactaacctgcccactgytgtaatcaaactctgtgaatggttccatcattcatgtaaaaata

SEQ ID NO: 523647 - DNA, 588 bp, Homo sapiens
tcaagctctgttaacttctgagattttgtttaggattgcattmaatctgtgctttatctggggagatttcccaccttcctggtattactttgcttgctcttcttttcagtctctttggctggtttccttcttatctccatgtcttgccctcagtgcctgagcaggtcccagggctccttagttggaacaacaatcttctctctctatgcataatcaccagagcaaggttcacagattccagcatgtttcacatcacatagatggcttgttaaacacggattgtaggaccccatccctgaagcttctaattcagtaggttggaggttaggcccaagaatttgtctaacaaatcaatgctgctattcctgggaccaccctttgagaagagctgttcacggagccttttttaaaaataccatctatatactgataaagttttatgctcagcctaaacttcatccaccttcctctgaactccaaaattccatgtacaactaacaatgtagtaactttaataatcacctgagactttatagattccagacctaactcctcattcccttcctcctacaccacactccatataca

SEQ ID NO: 523648 - DNA, 626 bp, Homo sapiens
tctgtgctttatctggggagatttcccaccttcctggtattactttgcttgctcttcttttcagtctctttggctggtttccttcttatctccatgtcttgccctcagtgcctgagcaggtcccagggctccttagttggaacaacaatcttctctctctatgcataatcaccagagcaaggttcacagattccagcatgtttcacatcacatagatggcttgttaaacacggattgtaggaccccatccctgaagcttctaattcagtaggtyggaggttaggcccaagaatttgtctaacaaatcaatgctgctattcctgggaccaccctttgagaagagctgttcacggagccttttttaaaaataccatctatatactgataaagttttatgctcagcctaaacttcatccaccttcctctgaactccaaaattccatgtacaactaacaatgtagtaactttaataatcacctgagactttatagattccagacctaactcctcattcccttcctcctacaccacactccatatacagttgatcagcaaatcctactggctgtactttcaaatgtatccagaatttgttctcagttctcaccacctccaccatgactgcc

SEQ ID NO: 523649 - DNA, 501 bp, Homo sapiens
aggccgagtgactttccaggtagggcagtcaattttgacattcccagtgcactctgagcacggggaaaggcaaaagagcaatcacataacccgggagaaaacaccctgagaaaytgccccataaattcagggatctacatgtggcatcgtcctcattttattctttacttggctcactttatcactagaaaatccaatgaggacttttatgaagacacacacataattaatggggataactcattaattaacaagccagctaatcgataagcaggttaatctacttaggcatctgaagaattaccgtgtagctctctatttacactgctatttagtctcgttccacttcatcagctttttggtggctattaaactgacagtgctggtcaccacatagaaaagctgatggattaatttctgctaacatgatattcttctggtatatgaatagcatattaatggcccacaaccagatgatggcatttcccatcaggagaaaaa

SEQ ID NO: 523650 - DNA, 457 bp, Homo sapiens
ctgtttgggggttcacatgtcactggtaagacagacaaagagcaggattcatggcattttctatgaagatgacaaaacttcatggaaaagtaaatgcttggggaggagacatggggaggccttgttgtacaggcaggtcagggatggtctagctgaggaggaggcaccagagctgaggctgacataagagaaggagccaaacatgcaaagaagcagtgggaaagtgctccaggcacagcaacagcaaatgccaaggctgtgagctgggcatgaaacgggtataattattacacagtagctctaattcaggaaggaggaagggccargtgtctggaagatgcagagtttggaatatggaagggaacaggcaaagctggaaacagtctgagcccataaaggctgcacatcagctctgtagccatcggtggagctgaaagagacaggacaaaggctcata

SEQ ID NO: 523651 - DNA, 667 bp, Homo sapiens
ctgtttgggggttcacatgtcactggtaagacagacaaagagcaggattcatggcattttctatgaagatgacaaaacttcatggaaaagtaaatgcttggggaggagacatggggaggccttgttgtacaggcaggtcagggatggtctagctgaggaggaggcaccagagctgaggctgacataagagaaggagccaaacatgcaaagaagcagtgggaaagtgctccaggcacagcaacagcaaatgccaaggctgtgagctgggcatgaaacgggtataattattacacagtagctctaattcaggaaggaggaagggccaagtgtctggaagatgcagagtttggaatatggaagggaacaggcaaagctggaaacagtctgagcccataaaggctgcacatcagctctgyagccatcggtggagctgaaagagacaggacaaaggctcataggaaaggcaggacctgtcctgagcttgaacaacagagacgaccttgagaaacctatttgcaaaatgcttcaagcataaatgccatttcctactataactttccatagtagcaggttgaattgaatcccccaaaatattacattcaaatcctaacccccagtatctatgaatgtgcctttatttggaaacaatctctttgtagatgtcatc

SEQ ID NO: 523652 - DNA, 574 bp, Homo sapiens
taagaaattaccttgggaaagatatgttgttattttccaaatgtgtttaagagattgttcactgcaaagcagaaatgcagtgaaaaaaaagagaaataagctaattttaagtcatccacgataaattacaaagggaaagatcaaggttcagacctaggacaggtttcaaggccagcatctgtctctaactcacttgcctctggtgcggccatcctgtctgtctgsactttctctctaaatgaagagcttgtcactctgtctctaaggaaccttcctagagccctgatattgaatgagtctgagtccatggcaaccaatcctccatctaaacctggagtctcagtgcaatttagaaaaggcctgttcctgtccttggaggagtttgtccaaaccaagattagacaattggagttagagcaaagggctcaaagtacaaacaggaacaacaggacatttacatgcagtcccagaaaagctaagaatcaaagttgcccaggaggccaaagcctttcctacccaccttgctcttctctcccatggacagcacctttacgagctgtgacccagagtttgc

SEQ ID NO: 523653 - DNA, 556 bp, Homo sapiens
cctcccagagcttggtctaaacttaaatatgcttgtatcagcctcagagataacccatatctctcatagatgttgaagccccaatacaaaagatactgagtggccctccctctaacgcaaatggaaatacctgtagtatttgagagttcttaagagttttctgttttaggactgaaaagcatttgactggtataatttctaggtataccacaagctcccatgtcracaaatttctttctttcatgaattctaagttagttagtccaacccagattttcagtgaatagacctaatcccatggtttgtcatggtctggcagcagagggaaaagtcaaggtatcaggactgggaaccaaaatgtgaggaacactgtggaataagcctaggttggagtttgctaggaatattgaccctgtggatagaaagtaattacagaattaaatgctcaaagaagtcggatttcagcagtcctggaatattgaaatgtaggaaacgaataaaaagcatagcaagcatgtttctgttatgtttctgtcactgccctaaatccagggga

SEQ ID NO: 523654 - DNA, 642 bp, Homo sapiens
tttgtctgaaatctgccaagttcaaaagtcagaaaatgaccctatcctcaaaagccccatcgttcttctcaactccatttctcttttgtctggaataactttcaagcaatgattagtgattttattcaatccatcaacactagtcagaattacatcagtctcttgggcattcagcaaaatctgacctgatagaaaacagcctaccaaaagaaaatttacaatctgaagagtggaaaaagagggaaaaagaatggracaaaggacaaggcaaagattgaggctgagacctaggaaaatttttgaaaaaagaaatttcagatcacttctggtttattgtcattgtatgaaacggaccttttaacatcaaaggatatctgattcagagctagttttcaaagaaaaaaaaagtgcttattcattagaaaagggtcatagtcttagtttctttacttcttgtttacctttagttgttgctaagaatgtttttctgctcttaaccaaggaatcactgacaccatttttcctcttgggcatatttttttcaatcagtaattaaacctcctgagacacatggatataaacactaagagtggacagaagcctcagtattttatgggaataactcgggatcttttatcacct

SEQ ID NO: 523655 - DNA, 155 bp, Homo sapiens
ctgcagcctggctattcacactgaccccagagagggaggtccgccatgtcatgaacaaggccacacggtaggtagacygtccatgcaaacaaataaatgcaaaactctctctttcttagtaatatcaaaaacaactgagttctttccttcctgat

SEQ ID NO: 523656 - DNA, 551 bp, Homo sapiens
tattttgctaataatcctctcccttttaattacatgtcttaaagccaaatcaccaaagggatacatagcaaccaaactcagggctttgctaatcatgccatcttactgaattgttgtggttttctaaatctgttttcagcaaaaaggatagaatgaaaacatttcccaaagcattgattacaatcatcacaacttgggaagaagactataggtatattttcctctgaggcaatcaagagacttgaaaactatactcttaaaataacacatgaaatactattataatttataaacagactcaacacagtctggtttctaactgacgcttcatggggttttcctgctgctttgctccatgggaaagactgagtcttctgatgctcagtactaaatttgtgtaagagcaatttgcacagtgtttaggacaagggctttggaatcagayctgaacttagatcctgggctctaccatttactcgctgtgtgacatggagcaagcttcatagtctctctgggtatgataatacttagctcacatggttctgaggatt

SEQ ID NO: 523657 - DNA, 551 bp, Homo sapiens
tcagtgtttctcaaactggagtgatatgtgsagtccttttaaaggggaaaaattgagacttgcaaaactgttaaaaaatctctaggagacctaagattaagtttcagaatgaccagcttaacaaacttaagacttatttttttaaatgacttttaattgcaaagtattgtctttatgatttaaaaaaaaacttcataaaaagtttaaaatctcattaaacttgcagacctcaagaatctacagctcccaatttgagaagtgctgattttgtctcgctccttccctttacagatgaaggaactcgggcctgtgaagacagtgactccctaagccacacagatggctattagcaaaaacggggcacaagcccaggctgcttgatttcgaaagcagagctttttccttcttcacacaagccctcctctgtttgtggcagagttcactatctgctccagacagatactggtattgtcctacaccagagacagggaagcagatggaggcgagaaggttcgaaggggaagtgatgtgggtgtggctgatgcagacgt

SEQ ID NO: 523658 - DNA, 666 bp, Homo sapiens
gtttccaaagagactgaaaaactagatagtgtccagatgaatggtggcaatcagaatgcagaagaacctggaaactacatcaaccgaggaaaaagcacagctgagatgtcaytttgtctgtgggactttcccagaatatccccatatacttaactagaataatttcctccttttcaatgcattgttcttggtgcattttaatctcacataacattatagaatagttagtggtatgtttatttcctgaaaaattgttatgctcctgaggccaatgactgtgttttattcgactttattttccaacacctttttcatggtagatattactgaatcactcttgtgacatcctttgctgattggctttcattttcttgaaattccctaatttaaatttgctaaaagaaatatattgcttggcatgagctaggtaacaacctctcagggatgggaatatctgcgtagggttggcagttagactagatcgtatttatttctactgaagattccgtgattcatagattcctctaattcatggttggtttaacagctggcaagcagagaatacagttctgaagcgatgggagcaaaggtggtatattttcactagaccgtatagtgaaatgaagggaggggaagttaaagacctgtgtaattcacaaagagtat

SEQ ID NO: 523659 - DNA, 669 bp, Homo sapiens
ccaaatctcaaccagcctctcctggtcagtcctggcgcttttgctgttgtcaacagaaactttggctttcccgttcccagcatgcctggctcctgagtgtgcacccgccatcgccatcgcagtctgcggacacatgcagactgtttaactggagcatataatcatttcatagtaaactcctaataaggcgttcccaagagtatcagcctctgtgacagcttgtcagacacaaatttcaggctgccttaggctgccaggtagaattatgaactgttgctgttttctctgtttttcagttagttatcttttgccattctaaatcatttaaatgatttgcggattttatctcagctttttttcttgatgayatattcctcccctcctttcattattatttttaaataaaattcctcagacttagcaggaaaggccacttgaaagtaaagtctcacaaaacaaaataaatgaggagcatagatttccctctgtgaccattttgtcactctctatgcattaagcaactgtgcattaagcttaataactttggactaatgttcaaaagggacaatggaagccttggaagtgacactgtgaatactgaagtccaaagggtaaagagaaagtgatatccttcttacggctgatgagggagtggcctcataaaaggga

SEQ ID NO: 523660 - DNA, 590 bp, Homo sapiens
ctagctactgcatcatgtggcaaatgaaacaaagaggtctgctttcattagccacacttccttaactaaaaatgctcagtctactgtgtgtagttttttttttttttttcccagcagaaagatgattctgacctgagctttttcaaaacaaaattttagggtctttaagaaaattatccactattaacttcagttaactaagaaagaaattgatatttgtaaccgtattttagagcgtatattaaagcttctgatgtatattggtgagccgagccaatttcatcaaattctctcaggcctgccgtcctccaaatctaactatgtaagacatccaaatattaaagaaaatccctgtcttttgggaaggggtgtctggaatgttcaaatagaaaaagtaaatataacttcatggttattttctctacaattatatgtacwaatgtttggttgtgagcatgctgtttaccataaaaactgaaagcaacctaaatgtccagcggtagagggttgagtagacaaaatatggtctatctctataaaagaaaacctcattattagtaataaggaaaaatgacatggaaatttcattt

SEQ ID NO: 523661 - DNA, 599 bp, Homo sapiens
tgcctattaagaacaaataatattcctgttttcaaacmccccaactttttaaaaagaaccattccttactatatcttattcatatgtgtggaaaactttttttaagtttaaaataagggaataatacatattttattattgtgttggtttagatgatttatgttcaaaatatgttaaaatgatgtttttaaagctgctggtaatttctaaaaggtcacagagagatatatacaaaaagataaaatttgccactagggaattagtacatcaaaaaggaaactgtatacattcagttatttttaagacacaatcactgtctcaattgaattacctggtgattaacagaaaaatattttagagggcagataaggcagtcttgatactgactgcatcaagcagattgttaaagaggtgggagataaaagtgaatatggaatttcaacattgtgaccctaacgtttgatagtcagataagactgtccactctacaggaagtgaaatacaacaaagcaggattagatcacaatgttcaaggagagatctcacttttgttttttttatgatgcaagaataaaagcattgtttgctctctcagatga

SEQ ID NO: 523662 - DNA, 599 bp, Homo sapiens
tgcctattaagaacaaataatattcctgttttcaaaccccccaactttttaaaaagaaccattccttactatatcttattcatatgtgtggaaaactttttttaagtttaaaataagggaataatacatattttattattgtgttggtttagatgatttatgttcaaaatatgttaaaatgatgtttttaaagctgctggtaatttctaaaaggtcacagagagatatatacaaaaagataaaatttgccactagggaattagtacatcaaaaaggaaactgtatacattcagttatttttaagacacaatcactgtctcaattgaattacctggtgattaacagaaaaatattttagagggcagataaggcagtcttgatactgactgcatcaagcagattgttaragaggtgggagataaaagtgaatatggaatttcaacattgtgaccctaacgtttgatagtcagataagactgtccactctacaggaagtgaaatacaacaaagcaggattagatcacaatgttcaaggagagatctcacttttgttttttttatgatgcaagaataaaagcattgtttgctctctcagatga

SEQ ID NO: 523663 - DNA, 639 bp, Homo sapiens
gtggaaagggaaagtaattgttagttaaaaaccctttttaagaattaattttatttaaagattgttamaaatctgtgtatttcagattaaacttaaaacataccatatctcacagaattttgtggaagaaatgaaataaatgaatattccttgacatgaaacccagatcctccatgagaaaagaaacctgacttgtgttgctcctgggtatagtaatctcagcctgatggaaatcaaatttcctaggaactcaatccataatgaattattctattacctgggaaagaaagggaaataatctatagatatacatttcagaagaaaagcataccattaactgacatatcttcccatcctgatatgaggtgattaaaataaacacaaaatctaatatctgcatcaaataatgaactaattttagaaattattacaaaaattttattttgttcttgtaggcatactagaaatatttgttgagtatctacaatatccaaaataccattccagagaaagtcacatttaaaagggatataagatgaagtccttcctagtctcagcacatgcacacacacacacacacacacacacacacacacacacactcacacaaataaaaagtatcaaaacccccaagtaact

SEQ ID NO: 523664 - DNA, 639 bp, Homo sapiens
gtggaaagggaaagtaattgttagttaaaaaccctttttaagaattaattttatttaaagattgttacaaatctgtgtatttcagattaaacttaaaacataccatatctcacagaattttgtggaagaaatgaaataaatgaatattccttgacatgaaacccagatcctccatgagaaaagaaacmtgacttgtgttgctcctgggtatagtaatctcagcctgatggaaatcaaatttcctaggaactcaatccataatgaattattctattacctgggaaagaaagggaaataatctatagatatacatttcagaagaaaagcataccattaactgacatatcttcccatcctgatatgaggtgattaaaataaacacaaaatctaatatctgcatcaaataatgaactaattttagaaattattacaaaaattttattttgttcttgtaggcatactagaaatatttgttgagtatctacaatatccaaaataccattccagagaaagtcacatttaaaagggatataagatgaagtccttcctagtctcagcacatgcacacacacacacacacacacacacacacacacacacactcacacaaataaaaagtatcaaaacccccaagtaact

SEQ ID NO: 523665 - DNA, 639 bp, Homo sapiens
gtggaaagggaaagtaattgttagttaaaaaccctttttaagaattaattttatttaaagattgttacaaatctgtgtatttcagattaaacttaaaacataccatatctcacagaattttgtggaagaaatgaaataaatgaatattccttgacatgaaacccagatcctccatgagaaaagaaacctgacttgtgttgctcctgggtatagtaatctcagcctgatggaaatcaaatttcctaggaactcaatccataatgaattattctattacctgggaaagaaagggaaataatctatagatatacatttcagaagaaaagcataccattaactgayatatcttcccatcctgatatgaggtgattaaaataaacacaaaatctaatatctgcatcaaataatgaactaattttagaaattattacaaaaattttattttgttcttgtaggcatactagaaatatttgttgagtatctacaatatccaaaataccattccagagaaagtcacatttaaaagggatataagatgaagtccttcctagtctcagcacatgcacacacacacacacacacacacacacacacacacacactcacacaaataaaaagtatcaaaacccccaagtaact

SEQ ID NO: 523666 - DNA, 639 bp, Homo sapiens
gtggaaagggaaagtaattgttagttaaaaaccctttttaagaattaattttatttaaagattgttacaaatctgtgtatttcagattaaacttaaaacataccatatctcacagaattttgtggaagaaatgaaataaatgaatattccttgacatgaaacccagatcctccatgagaaaagaaacctgacttgtgttgctcctgggtatagtaatctcagcctgatggaaatcaaatttcctaggaactcaatccataatgaattattctattacctgggaaagaaagggaaataatctatagatatacatttcagaagaaaagcataccattaactgacatatcttcccatcctgatatgaggtgattaaaataaacacaaaatctaatatctgcatcaaataatgaactaattttagaaattattacaaaaattttattttgttcttgtaggcatactagaaatatttgttgagtatctacaatatccaaaataccattccagagaaagtcacatttaaaagggatataagatraagtccttcctagtctcagcacatgcacacacacacacacacacacacacacacacacacacactcacacaaataaaaagtatcaaaacccccaagtaact

SEQ ID NO: 523667 - DNA, 622 bp, Homo sapiens
gagaatccaccccacaccccgccccccaccactagcagaaagccacatgcccaccaagcactgcctctctcctcctgccctgaagtgatcagaaagcaagagttcaccacgggggaaaacacgtggagtcaatttgtgcctcaagttagtccacagctttccacaatctacaagagatraggtggggatagcaacatcccaataggcacagcagcccagagcacttctcctttgcaaagggtatttgtccctctttttctttgtggcaggcagtgggtttgatttttctaaatgttcagtagaagattgttcagatttttctttctaaaactttctggagcttcagcagcactaacgtattctatatcaacatgcacaatggaaaaatattactggcaccaaataaataaataaggactatttaaggaaaggggtggggtgggaggttgctgggaacatctgctcctgttcacaacattcaagccggcccacctcgaagcgccccccagccctgctagatcttgatgctctgatgttcacaaagcagctcagctctcctccgagtcaccatgtcaacactggggatccaacccagtgttgaaaagctatgtggggacctcct

SEQ ID NO: 523668 - DNA, 627 bp, Homo sapiens
agctggagaatccaccccacaccccgccccccaccactagcagaaagccacatgcccaccaagcactgcctctctcctcctgccctgaagtgatcagaaagcaagagttcaccacgggggaaaacacgtggagtcaatttgtgcctcaagttagtccacagctttccacaatctacaagagatgaggtggggatagcarcatcccaataggcacagcagcccagagcacttctcctttgcaaagggtatttgtccctctttttctttgtggcaggcagtgggtttgatttttctaaatgttcagtagaagattgttcagatttttctttctaaaactttctggagcttcagcagcactaacgtattctatatcaacatgcacaatggaaaaatattactggcaccaaataaataaataaggactatttaaggaaaggggtggggtgggaggttgctgggaacatctgctcctgttcacaacattcaagccggcccacctcgaagcgccccccagccctgctagatcttgatgctctgatgttcacaaagcagctcagctctcctccgagtcaccatgtcaacactggggatccaacccagtgttgaaaagctatgtggggacctcct

SEQ ID NO: 523669 - DNA, 661 bp, Homo sapiens
ctgttgaccttggggtaagttacccaatgcctttgagcctgttaggtggaaataaaaatagaaaagtcagatatttattgcgagaattaaaagaggtaatgaattattaactagtttttttttttaagaaggagtctcactctgttaccaggctggaatctcagctcactgcaacacccgactccctggttcaagcaattctcctgcctcagcctcccaagtagctgggattacaggcacccgccaccacgcccatttttagtagagacggggtttcaccatgttggccaggatggtcttgatctgacctcgtgatccgcctgcctcagcctctcaaagtgctgggattacaggcttgagccaccgcgtccagccccaatatttttatataaccctaatctacctgtttgataagttggcgtttaaatttggttaagtgaaaatgccactgctagatgttttctcatatcacttacttggagttggtgaagttggtgagggcttttagtttggacagcatctatccttattktcttgaatatttacccaaccccaaatttctatcaacagttgggagatgatttcaaatattaaggacactgatttcattaaagccaccttggccacatttaatcgacacactaactgcacgtgctaaact

SEQ ID NO: 523670 - DNA, 556 bp, Homo sapiens
ctgtatctctaatccccttaggcaaacaattgatctctccaaatctcaattgcttcatccatktaaagtagattcaaacctttcttctgagaaggaagccctgcatcttttatgattgagaaatctgagttacaagtgtatttgtcatccacattactcaaatgattttggtcagatttaggagacacttccaagatttgggagacacttccaagatatttgtttttctagtaatccttttatatttcataataaatacttgattatgagattttgaagtttgtttctgaaattgaggggaagatgaggataaggaagggagtagaaataacaccaagaaaagaaactaataaacattctgacacttgttttgtaaccccagaaatgttggagcttttgtttaccagatgactgtcaggagaatccaataaaaacatttgcaaataaatctgtgccctagaatagtattaatagaaacacaagctctgaacactgccataaagtaaatcatatcagcagggcctcatgggtcttgtaccagagacagaggaattcg

SEQ ID NO: 523671 - DNA, 556 bp, Homo sapiens
ctgtatctctaatccccttaggcaaacaattgatctctccaaatctcaattgcttcatccatgtaaagtagattcaaacctttcttctgagaaggaagccctgcatcttttatgattgagaaatctgagttacaagtgtatttgtcatccacattactcaaatgattttggtcagatttaggagacacttccaagatttgggagacacttccaagatatttgtttttctagtaatccttttatatttcataataaatacttgattatgagattttgaagtttgtttctgaaattgagggraagatgaggataaggaagggagtagaaataacaccaagaaaagaaactaataaacattctgacacttgttttgtaaccccagaaatgttggagcttttgtttaccagatgactgtcaggagaatccaataaaaacatttgcaaataaatctgtgccctagaatagtattaatagaaacacaagctctgaacactgccataaagtaaatcatatcagcagggcctcatgggtcttgtaccagagacagaggaattcg

SEQ ID NO: 523672 - DNA, 506 bp, Homo sapiens
tgtcacctctatctaggtccagaacatttttatcacccccaaaggaaactttatgcccattaagcaatcactmctcagtccctgttgcctcagcccctggcagccacccatctgctttctatctctgcagatttacctatccttaatatttcatatcaaaggaatcatacaatgtgtattcttgtacgtcttctcctttctcctagcatagtgttttgaggttcatcacattgtaacatttatcagaacttcattcctttataaggttaaataatattgtgctgcatggatagagactacattttatttatccattcatccgttgatggacatttaggttgtttcatcatgcgcgtttgagtgcttgttgtgtgccagacactgtgcagactgtttaaggtcaaacttagattctcgctgcgtggaacttagccttgagcaaggaaaacagacttcatgtcaacgacttctccattgtgcgattgactggctgatgtgacttagtg

SEQ ID NO: 523673 - DNA, 413 bp, Homo sapiens
tgcaataagcttatctaaaggcttggactatcccatttatatgagtcttagtggattccrtatcaaactaatgtgaaaaaaaaataatgaggacagtttagttggaacatctttttttttttttttcttgagacagagtcttgctcttgccaaccaggctggagggcaatggagcgatctcggctcactgcaacctccacctctcaggttcgagcgattctctggcctcagcctccagattggctgggattacagatgcctgccaccacgcctggctaatgttttgcatttttagtagaggcaggatttcaccatgttgtccaggctggtctccaactcctgacctcaggtgatgcacccgccttggcctcccaaagtgctgggataacaggcatgagccactgtgcctggct

SEQ ID NO: 523674 - DNA, 166 bp, Homo sapiens
ctgagacacttaacatttaagctgttttcaagtttggcactcagacagataacagttggcaagcaaaatgtgtcatgcaggcccctaacagactttcccaaagtgtgctctgtgggatgtaatgcatcytttttggagcgggggaagggaagaggtatggtcacag

SEQ ID NO: 523675 - DNA, 599 bp, Homo sapiens
gttacatggggttctattttcatgaagtctcccaagtcactcgggaagagctgtgatgggaactttgaagaaccccaagaaaggtgagaacagtctgtcttcractcccttggagaagtgtccaggaagtcccacattctaatatgaggaaagtgggaggacagaaaccagatctcagattccagcatgaggggcagatgagctacgtttctgggccattacttaaggatttcaccaactctgttttgcccagctcatctcagagatcaatagagttgcaaacatttagcaattggcccaggcttcaagagccattgcactgggcaggaagacctccttttcacttggggcagaagaagcaggcatcctcagcagaatggatgaagtcagtcacagaggggaagaggcaggggtcagggcctcagtaaagggaggctggagcctgaagatcaccactcttcttttactacgtcatttcaggtgctctgacacacagagggatttggacacagtaaggccttgtttagcataaaggccactggatgctagcgtattttgaatcaagagaattcttgatataggcttgagtcaactctctc

SEQ ID NO: 523676 - DNA, 599 bp, Homo sapiens
gttacatggggttctattttcatgaagtctcccaagtcactcgggaagagctgtgatgggaactttgaagaaccccaagaaaggtgagaacagtctgtcttcgactcccttggagaagtgtccaggaagtcccacattctaatatgaggaaagtgggaggacagaaaccagatctcagattccagcatgaggggcagatgagctacgtttctgggccattacttaaggatttcaccaactctgttttgcccagctcatctcagagatcaatagagttgcaaacatttagcaattggcccaggcttcaagagccattgcactgggcaggaagacctccttttcacttggggcagaagaagcaggcatcctcagcagaatggatgaagtcagtcacagaggggaagaggcaggggtcagggcctcagtaaagggaggctrgagcctgaagatcaccactcttcttttactacgtcatttcaggtgctctgacacacagagggatttggacacagtaaggccttgtttagcataaaggccactggatgctagcgtattttgaatcaagagaattcttgatataggcttgagtcaactctctc

SEQ ID NO: 523677 - DNA, 613 bp, Homo sapiens
gctggcagagcctgggcacatgaactgggtaggagcagggacagagggcgaaggctctggacagaagcctaagggagtcggcacttccacactgtttcccatgttgtgggttgtggccacccatgatgaaaaggcataaacttaaaccatgtgtgcagaaaataatggcagcaaacaactgactataattttaaaagataaatataatttaaaaggataaataataaaatccagaataatgatgctgttgttactaattgtaattaagtgagaaagcagcttagggaacctaactgaaggggttatttattaataattgttttaggcactttgtatagacttccttggcaagcagttacctgttcctgcagagagaggaggtcactgtgagaagcccaagaaatgcatggaatatgcattttgccctaaagctgaatagtcatgtgttaaaaaaaaaaatttggcttaagccaaatattaccattagagaataaacttctgggttacaagaataaaaaacagattttattwaaaaaatttcgttattccaaaaattttattcataaaaattttaggagtcaaattttaaaaagtttgacgatatggtgcagaa

SEQ ID NO: 523678 - DNA, 477 bp, Homo sapiens
gctgctttccttctctctctttctctccaacataaaatgaaacagttgatgaaacctcaggaacccttcactggaattcaagtctcattttttctgctaatagtgttaaagcccatagtttattttttcattgtcaagagcatactccccgagttttttttttttttttcattttattgcaagagctttcaatgtgctcatgtatctcatacacaggaaaaggaattcctatctctggtattgcctggcaaaaggacctgggttaaggcagagagttcccgtatactcckgatgcaattttccatattattaacatcttacattagtgtggtacatttattacaattgataaaacaatagtgatacattattattaactaaaggccataatttattcaggtttctttagtttttacccaatgtcctttttctgttcaaggacagtatcagaatatcatagtctcctttagcacctct

SEQ ID NO: 523679 - DNA, 477 bp, Homo sapiens
gctgctttccttctctctctttctctccaacataaaatgaaacagttgatgaaacctcaggaacccttcactggaattcaagtctcattttttctgctaatagtgttaaagcccatagtttattttttcattgtcaagagcatactccccgagttttttttttttttttcattttattgcaagagctttcaatgtgctcatgtatctcatacacaggaaaaggaattcctatctctggtattgcctggcaaaaggacctgggttaaggcagagagttcccgtatactcctgatgcaattttccatattattaacatcttacattagtgtggtacatttattacaattgatraaacaatagtgatacattattattaactaaaggccataatttattcaggtttctttagtttttacccaatgtcctttttctgttcaaggacagtatcagaatatcatagtctcctttagcacctct

SEQ ID NO: 523680 - DNA, 534 bp, Homo sapiens
tattagcctatcttcaccttcagtgattctttctatggctgtgtatggcctaccragaagcccattaaaggtatttttaatttataacatgttttctatttctcacattcccttttgattatcttttagtgttttcatctctctacttatattccccatctgtttttggatactatttacttttccattagagcctttaacatattaattatatttattttacattttgtatctgataatcctgacatctgtgtcataactaggtctggttctgatgcttgctttgtctcttcaaagttttttgtttttaaaatccgtttgcatgccttgtaattttttttgttgaaacagggacatgctgttttgtgaggatttatgggaatctggctgtaattttttctgtgttcaatgtttgccatagctctagatgccagaggcttcaaactcctctagtgtccttgttattgtctctcctcttgactttgggatgccttaagtactccttttcagccagagtccacatcttgcagctct

SEQ ID NO: 523681 - DNA, 546 bp, Homo sapiens
gactaagattttttttctcagtcttcactgtctgtttttgtgcctgttattcctcagcaggccttccagacattttaagccgactgaccattgtgtttttcaagtctgtgatcattgcagctctctcagcactakagggagttcataagtccaggtttgccatgagtcttgagaaggctctaattttgtcacagctcttaggcccaactggacctgggagagacccaaggggagggtattcgggctgtgtgggaaggctgggcagagacctgagcctggaagactgtcctggtggccctcccagccacagatgcacctcccagcatgtttcttcataggcaggatagttccctgacttcagtgagaaaggttggagttgagactggggcccctcaggatctgttgtgggatggaggttagagagcctatctcattggctcagacaaatgcctgtctcctagcaggttcttgcatagatggggtagtttttcaactgtaccaggagaagctgggccaagactggaccccctcaggatctgccgtggg

SEQ ID NO: 523682 - DNA, 546 bp, Homo sapiens
gactaagattttttttctcagtcttcactgtctgtttttgtgcctgttattcctcagcaggccttccagacattttaagccgactgaccattgtgtttttcaagtctgtgatcattgcagctctctcagcactagagggagttcataagtccaggtttgccatgagtcttgagaaggctctaattttgtcacagctcttaggcccaactggacctgggagagacccaaggggagggtattcgggctgtgtgggaaggctgggcagagacctgagcctggaagactgtcctggtggccctcccagccacagatgcacctcccagcatgtttcttcataggyaggatagttccctgacttcagtgagaaaggttggagttgagactggggcccctcaggatctgttgtgggatggaggttagagagcctatctcattggctcagacaaatgcctgtctcctagcaggttcttgcatagatggggtagtttttcaactgtaccaggagaagctgggccaagactggaccccctcaggatctgccgtggg

SEQ ID NO: 523683 - DNA, 546 bp, Homo sapiens
gactaagattttttttctcagtcttcactgtctgtttttgtgcctgttattcctcagcaggccttccagacattttaagccgactgaccattgtgtttttcaagtctgtgatcattgcagctctctcagcactagagggagttcataagtccaggtttgccatgagtcttgagaaggctctaattttgtcacagctcttaggcccaactggacctgggagagacccaaggggagggtattcgggctgtgtgggaaggctgggcagagacctgagcctggaagactgtcctggtggccctcccagccacagatgcacctcccagcatgtttcttcataggcaggatagttccctgacttcrgtgagaaaggttggagttgagactggggcccctcaggatctgttgtgggatggaggttagagagcctatctcattggctcagacaaatgcctgtctcctagcaggttcttgcatagatggggtagtttttcaactgtaccaggagaagctgggccaagactggaccccctcaggatctgccgtggg

SEQ ID NO: 523684 - DNA, 661 bp, Homo sapiens
gttggttttttaggtcgagcagtacatttagagatagggtttgaaggaagtaggcttggatgtgcatctgattagttttccaattttctccccttctaggtaatactttctaatattcaaaacagaagccctaagcctggccctgctccccacgatcaagaactaggttttttcctagaaacaggacttcagagagcccatgtcctctatttcaaaaatgggtaagccatcttcatttttttaaatccacttcctaaagaaggaaagtagaaagccttacaatgctgtctccagtttagttattataataaaggaattttaaatatgaactaccattggaactttttttttcttttaaagaatgaacattggctgtttttgtctcttctctacctggctctcttgctttcccatgagatgtgaaggtgggagaagggagggagggaacccaagtcaaaagtacacagcctcaagaccagtggggtgggcctgatgggagccatgccttcccatgccctccmtccatgaatggctctgcatcggcctccccatttgttaaggaaaaagttaatgaattggaaatcctggcacacaggagcatcgccctttcagtggctgatcattcagggaattggatttgccaaatctcagccagttttta

SEQ ID NO: 523685 - DNA, 623 bp, Homo sapiens
cttttgtaaacaaagggtagcaaagcacatttaaagtaaccttgcttcttgttagctgtgtcaggtgtcctgggtaggcaaaacggattgtagtgtgttttcactggctttgaattgattttaattcaggtggggtggagataaattgatgcaaaaggcaaatgactgtcagccgggagatgcacccatggggttgtaccattttctaggttacatcaccgagtgctgcatgggaggccttgactcagaaagcaggaagtcaggcagggatggttcagaccttgggctcccctcaggtacttgcagccaagccagggaataaagtggtatggaagggcttttggacctctgtttttataatcaaacaaatagaccactcatcaccactatgcatctactttaaaaagctttcaatcttcccatataatctctttgcaattgtttagccctgctcagtgtaacctagacttagaaggcaggaaaaggagtccaagaggcccttctgtatcctatgggctgctgaggagggtgcttcctgggcttatgtctcagatacaacagcagcagcagcagacaggctcccacatcccatrtgattgtggggaggtgatcatggtgagggc

SEQ ID NO: 523686 - DNA, 589 bp, Homo sapiens
ttagagagcatttgtttccatcacttctcttgatacatgagattcagagaaatcctgttcactaattattcaacaaacattgatggagacccttactaggttacttactagtgccaaatactgttctaagtgaatgagtcagacccagtcgctggctttatggagtttatgtatcattggggaaacagttgattagcaaggtaatatgattttcttcagggtcacacaactgactagggcagagctgggacctgtcctcttgctcctgtcttccagttcagtcctctcatcagttgggccatactgaccatgccctgtcagtaccttcttgaaaatggagtcaggagcagcatagcaatatattacacttgaaaattaaggaccttaaaaagctagtctatcgtcttctaattggtctcacgtaattaaaaaaataaagataaagcaagtctagaygtaattatgtatgaataaaaagcatcagcccgatcttatctgttctgtttaaatgtgggctaggtcttgctcatcccttaatgccatcaaaaccttagtgtggaaacaaaagaatctctaacgattttaatta

SEQ ID NO: 523687 - DNA, 560 bp, Homo sapiens
tgctttctttctttcttttttttttttttccttcctgagatggagttttcgctcttgttgtccaggctggagtacaatggcacgatcttggctcactgcaacctccacctccagggttcaagcgattctcctgcctcagcctcctgagtagctgggattacaggcacccaccaccatacctggctaatttttgtacttttagtagagatggggtttcaccatgttggccaggctggtctcgaactcctgacctcaggtgatccacccccytccccttggcctcccaaagtgctgggattacaggcgtgagccaccgtgcccggcgctccagcagctttcaatgcactcaaatacccctctttccagaaacccttcctaatcttggttttggtagcagacatggtcgtggtttctcttcccaggtccttcccgctcagtcctccagctttgatctggacttaatttctgtacttggatattgaatgctgtctcacatttcacttggcccaaacagagctcttggttttattcctcctcacctcagtaaatggtaaaatggc

SEQ ID NO: 523688 - DNA, 560 bp, Homo sapiens
tgctttctttctttcttttttttttttttccttcctgagatggagttttcgctcttgttgtccaggctggagtacaatggcacgatcttggctcactgcaacctccacctccagggttcaagcgattctcctgcctcagcctcctgagtagctgggattacaggcacccaccaccatacctggctaatttttgtacttttagtagagatggggtttcaccatgttggccaggctggtctcgaactcctgacctcaggtgatccacccccttccccttggcctcccaaagtgctgggattacaggcgtgagccaccgtgcccggcgctccagcagctttcaatgcactcaaatacccctctttccagaaaccyttcctaatcttggttttggtagcagacatggtcgtggtttctcttcccaggtccttcccgctcagtcctccagctttgatctggacttaatttctgtacttggatattgaatgctgtctcacatttcacttggcccaaacagagctcttggttttattcctcctcacctcagtaaatggtaaaatggc

SEQ ID NO: 523689 - DNA, 560 bp, Homo sapiens
tgctttctttctttcttttttttttttttccttcctgagatggagttttcgctcttgttgtccaggctggagtacaatggcacgatcttggctcactgcaacctccacctccagggttcaagcgattctcctgcctcagcctcctgagtagctgggattacaggcacccaccaccatacctggctaatttttgtacttttagtagagatggggtttcaccatgttggccaggctggtctcgaactcctgacctcaggtgatccacccccttccccttggcctcccaaagtgctgggattacaggcgtgagccaccgtgcccggcgctccagcagctttcaatgcactcaaatacccctctttccagaaacccttcctaatcttggttttggtagcagacatggtcgtggtttctcttcccaggtccttcccgctcagtcctccagctttgatctggacttaatttctstacttggatattgaatgctgtctcacatttcacttggcccaaacagagctcttggttttattcctcctcacctcagtaaatggtaaaatggc

SEQ ID NO: 523690 - DNA, 594 bp, Homo sapiens
attgttttttacacacaatagtgactatataccctcttttgtgtcttgcttttttcagctatctttgtgattgtyagctattactgcataacaaaccatcccaaagcttagtgccttaaagcaatcaccttttattatttctcatgattctgggcttgccagggctcgctcatccatcagtggcctgctatgggtcagcccggtgactttgctgctcttggctgggctctcttacgcttatggagtcttgcctagacagctcagctctgcgccacgtggccttttatcgttcagcaggttggcctgggctaggtatgggctggcctaggcacgttctcgtggcggtcacagagaagcaagagggaaaaagtgcgtaagcccttttctaagcctctgcgtgcattaacatttccactgttccatcagtcagagcaagccctggggtcaagcccagggacagtgcaagaggccacagagcatgggattcaggaaacgtgaagacatggcctttcgtacagccaggccaccacagagtcgtatggagatctgctccatgtgtttatgggtgcacggtcctgctgcatggggtgcacc

SEQ ID NO: 523691 - DNA, 461 bp, Homo sapiens
atcgttcagcaggttggcctgggctaggtatgggctggcctaggcacgttctcgtggcggtcacagagaagcaagagggaaaaagtgcgtaagcccttttctaagcctctgcgtgcattaacatttccactgttccatcagtcagagcaagccctggggtcaagcccagggacagtgcaagaggccacagagcatgggattcaggaaacgtgaagacayggcctttcgtacagccaggccaccacagagtcgtatggagatctgctccatgtgtttatgggtgcacggtcctgctgcatggggtgcaccataactcagttaacaggtatcctgtcaaggaccttataggttgtctcgtatcttttgctatgaccagtagggctgtatgtagtaaacatccctatctgtacatctttgtgctgaagattgcatatatctgtgggataaccacttaaaactgg

SEQ ID NO: 523692 - DNA, 582 bp, Homo sapiens
agaggagaatagtacctattgaacaggaccaaacaggcacatggaaggggtktgaaagcaagtgtaattataattttatcatcattaatttatttaaaatgtgttacctaggctggggccagtggctcatgtctataatcccaacactttgggaggccaaggcaggagcatctcttgaggtcaggagtttgagaccagcttggacaacacagtgagacactgtctctacaaaaaataaaaataaaaaataaaaaataaaaaaataaataaaaagaaattagcaaggtgtggtggcatgcacctgtagtcccagctactcaggaggctgaggcgggaggattgctttgagcccaggaattcaaggctgcagtgagctgtgattatgccactgtactgcagcctggtagacagagtaaaaccctatctcttaaaaataaagtaaaaggtgttactcttcttagaaagggcatttcagaagtgagtttatctgtgggagcgctcttgtgtggcagggagataaattttgggttgcgtggcaattcattgttctttaaatcacacaactcagtcagccacttttag

SEQ ID NO: 523693 - DNA, 568 bp, Homo sapiens
ttgcttagggacatttttagattttgtaacatcaaattcactgatttcagtgtctgtaataataatagcaattggctccattcttttgctttcttctgatttggatttctcttcagtgatcccattttctttaaaatctgattcttggctcaattcagtatcttttggcttagtttcttcagctacaatctctgtactttcatagtcttttccatttggtgcactttctagggtactgttactggcttcttccacaatttgttgatctggaattgcaggtaaaggaggaacatcagaaagtactggctgctgatggtctgtttctgaagtttcaagtgggcttgcttgctggggttgaacatcttgtttttccttgatcgtttcaatttcttcaaggattagagttcccgtttgaatagcagaatgcccattatctaatccaagttctactgaaatcactttctctccagaagttrtgctattgctcacatttgattcacagacctcatcaccatctttccgtgagatgccttcacttagatcctgggttgacttagcctttgttgcc

SEQ ID NO: 523694 - DNA, 629 bp, Homo sapiens
tgcagtgagccgagatcgcgccacagcactccagcctgggcaacagagcgagactccgtctcaagaaaaaaaaaaaaaattaaaaaaataaataaataaaaagactgagcttgaatgtcatatcgcaagtattcaaagtgaggagttgtaggagagcaatttctttatcgcctgttagataattacactacaagaaaatgagtgatcaattatgagctactgtcttaaaagcacggtagggagagtgggagggaggttaaaaacggtgaaggcttgacagtgactaatgttcctggcagctcagcgtctacatctgaaacttgagatgggaagggagaaaaaagacttccagctataactcccttcracaattcaatagatatgagtgccagtggtcagatggcaggaagctggatgtggcgccacagtgaccactgcccttgaggagctatctaggcaggagagcacaggacgccgtacatgagacacatgcaacaaaagatacaatacacatgttctatgggagaggagggagggagagaaggaaagatcatcccttgataaggggaaatcaaacaaggtttggaaggaataacagacatgacagagaggagatggggaggaagcag

SEQ ID NO: 523695 - DNA, 337 bp, Homo sapiens
ggtaacactcagtggtgacactcagaacagaggagagagaaaacaattcctaatatttagagactggtccaatatagggaatgcttgggagggaaactaaaaggcttcagacttgcgggaaggaagaatggtgatactaaccaaaagacgggagttaggggtaacttggggatgaggatgccgagtacagttttggacatgatttaaaggctagatttatcctctcagcctagaaaaaaacccaggtcaaatatcttctttgttaagccctcctcttggcagaatgagtycctcttctggactctcatagcactttgcaataattatactgtatttt

SEQ ID NO: 523696 - DNA, 342 bp, Homo sapiens
ccaaagtcagagccaccaagccactccttcctcactacaggaggggtcaataatcagcggcttaggaagtgctttctgggcccccgcattgtcgtggatgcccttctgtattgtatttttactgaattgtttttgagctaaaatgccaaggttagagttgttatccccagctcaagaggtataagttctaacacaaggtaggggcaaaataagcckacaaggaaaggagttaagtcgatattttaaaaaagatctaggaaataagcttttaagttgctgtcctgacctaccaatgacttctcggctctagatgtggctatgctgcactttgttcaagtccat

SEQ ID NO: 523697 - DNA, 342 bp, Homo sapiens
ccaaagtcagagccaccaagccactccttcctcactacaggaggggtcaataatcagcggcttaggaagtgctttctgggcccccgcattgtcgtggatgcccttctgtattgtatttttactgaattgtttttgagctaaaatgccaaggttagagttgttatccccagctcaagaggtataagttctaacacaaggtaggggcaaaataagcctacaaggaaaggagttaagtcgatattttwaaaaagatctaggaaataagcttttaagttgctgtcctgacctaccaatgacttctcggctctagatgtggctatgctgcactttgttcaagtccat

SEQ ID NO: 523698 - DNA, 617 bp, Homo sapiens
gaagggaacaggagcaaaacctaaaacatgaattctattttgataaaaaaattttttgatcccaggggtgtctctgctgaaatataatggtggaaggkcctactgaaaaattctaggccaattataccacagaatatattttcaaacgttcctcaggcaaaggaaacagggtgagctcctttgcttatggaagggctcttagtaggctattaaagcagctcctgtccttatagcacacaatatttcaattttgttacctttccacgatctttttacctcttgagttctgacatgccttttaaaacattagaccatccaagcaagaggtcctgtgcctggaatgccttgtgctgagccttatattgggtgccatcagcaatgtggcaaatatagggatatgtcatctagcagagatataaaatcatcacttagaactggcttatctttggttctgatataccaggctctccctcttgtgccttgtctagacaaaactgcccagcaggtgtgggaagagatggaggtaaaaagggcaggtaggtgcttatgattgcaaacagtacatatgcctgccttcctatgacacctactagataattgctatattaggtattgac

SEQ ID NO: 523699 - DNA, 422 bp, Homo sapiens
tagttcaaacatatgactaagaaccccaatttcttctgtcttctttgctccatcattgtctgcatgttgacttaattcttaggcctcttgtcccacagtcacaagatggctgctgtggttccaagcaacatgtcttcacaaaaccacattcaaggcaagacaatggggacgagaacagagagttccgtttgctcagcagccatttaatagaaagcaaaatatttttcagaaccacctctcagcttctcccctaatcatctcctccaaccaacgggcttaaggaggcacccagaccctatcacgttagtctcccacgggaataagcagaaggmatataggtgcccagaaccctttactagaaaacatttgatcaggctcccagtgtaagcatgaggttccaccattccaccagggcaggcagg

SEQ ID NO: 523700 - DNA, 556 bp, Homo sapiens
cctcaccccagcaacccttcctctgagacgccatcttttctcatgcaagaggaagagacaacatgctcttcatatccaagacctcaagagataaggtttcctctgaagtcccacaaacccccatttagccttatcttttctgtgatccatgcttggtgggggggtctttcttttccctgtttcctccccgagaggcatccccaagactgcaccaggccctcagtgaatgccgaatgaatgaatgaatgaatgaatgaatgaatgaatgaaaaccggcaagcaagaaatatctggctgggagtgcatccgatgccagtttgggagctgagcccaccaccagaaaaggctttgagattgccgagggcaagtcttgtgtggaggaggtagcctgggcactggagcctgcccagccgcattcacactccagctctgtctcttccagctgtgcaccatgggcaagggacttaacctctctacacctcagttcccccatctgtaaaatggggkgactgatagcgcctgtcttctgggatcgctgtgaggttgcagaacttaa

SEQ ID NO: 523701 - DNA, 383 bp, Homo sapiens
tagctgggaccacaggcatgaggcaccatgctcagctaatttttctagtttttgtagagatgggggtctcactatgttgcccaggttgctctcaaactcctgggcttaagtgatcctcccacctcrgcctggccccactgagcctcactgaaggagtccttctgtgtttgcagaccagatgctggaacagagggatcatatttgactgcagtggaagccatgttaatgtatgcctcaccatctgtctctcataaaggtacagcagccttccctctttatctggctgaaaggtacagttagttttattgtcagaagcatgaaaaatctaggaccacttggatgggctcctatgggatgcacagagaagctgctgagcataaagc

SEQ ID NO: 523702 - DNA, 584 bp, Homo sapiens
gctgcatgccaaccctttaaagataaagaagttgaaggatagcctggctagacttcagtgactgagctcatcacagaggcaagacccaaaagttagccgtcttcatttctagttctggactgaataggtctaaagtgattgaaaaaaatcatatgattcctatgcatacatacatcatgaagtattattaccaaaagagaaaatgtccattgaacttgtcatttaattattataactattatattaaccctagctctgttgtttcttgtttattttaattttattgttatttctttattattattattattattatactttaagttctggggtacatgtgcaggacatgcaggtttgttacataggtatacacatgccatggtggtttgctgcacccatcaacccatcacctacattaggtatttctcctaatgctatccctcccctagtccaccatcccaactggccccgktgtgtgatattcccctccctatgtccatatgttctcattattcaactcccacttgtgagtgagaacatatgatgtttggttttctgttcttgtgttcttaatcaatcttttc

SEQ ID NO: 523703 - DNA, 538 bp, Homo sapiens
ttttctccttactaagaaaatgtgtttaataaaatgccttagccttttgagaaactgaatgagttttcaggacatgtattttacgtttcctccatattttgaacaatagtcgaccacctgttcacgtcttgctcttgtctcctcaaggctccaggacaagcaggggcttgagtgtgaggacttgtgggaaaggaaggaaacacacggggctctcttatgtraataacgtgattagcagaaagtataaaagaggcttcttcccctgttcacaaagcagattttcttcagaagctggcagagctcccagacaatttgctctggggacagactctggctaaattgctgccagtgccggcctctggggccttctagatttatgagtatgggcagccgagaggagggagcactccgtgggtgggggaaggacatggagagtagcaacaggcagggccggatggggtcacccagcgggagaggtggctgcgagcacgggacaggctggggggtgctcattgcccgggccaaggccactttagca

SEQ ID NO: 523704 - DNA, 538 bp, Homo sapiens
tgcaggtgtgtggccttatttctgggctctctattctgttccactgctctatgtgtctgtttttgtaccagtatcatgctgttttggtcactgttgctctaataatttgaagatggtaccatgttgcctccagctttgttctttttgcttaggattgccttggctattcaagctcttttttttggtcccatgtgaatttgtaaatagtttttttctagttctgtaaagaatgtcaatagtaaacttccattctttatggacagaataccttatgtgtggtactccattatagtatcaaaaaacaatctaagacaaggatcaatagrttgaattaaagaacacatctttactagaaatgaaaaagtctttaaacaaagtatgagtattttcaagatatagttctcatccaaagacatttaacaaagaactaaaaaactgcatagaaccgtttctctatttcaaaatatacaaactacaatctatatactagagccctacccctaccaataataactagggaaaagctcaaaggctccct

SEQ ID NO: 523705 - DNA, 412 bp, Homo sapiens
gcatacaaagtagctgacctcattttggtaagtaccatggacragctgctagaaggcacaaaactccctaaacatctggacagagctgggtcctaggttccagtaatacactgtccactagcaaaaagcctttatgctcttagtgtggagtagtctacggtttctcatctgtctctggtactttcagagtcatcagggaagcttctgtgaggtggtgatgtaggaaggtttgttttatggggtatttgggaagaaatcttcttggtcatatttatgacaactcttccaaagggtaactatttgtttacgtgctgacctcggatccgttaaaggtgaaagccaggacctttcttcttcttttcctttcctcttttttttttttctttatcctcctcctcttgcataccttaaa

SEQ ID NO: 523706 - DNA, 531 bp, Homo sapiens
ctttcttattaatagagttcaaaagacttaaggcctagagtctagcttcagctattaaaattatacatcagcatgtgtttctcctttattaagcaatgattcgttatacctttccccttagaggacacccacacttctttaaaaataagttgggcgaacatcgactgtgaatgtgtttttgttttcctaatataatatcagtgggagttgtacacacagatcaggagctgtacacacattattatctccaaataattartatttgtgtattatttcccttcatctggctatacatgaatacagaggcactggtactactcatcacaaaatacagtggtagctggttccagggctgcctttgtgaatactccctgccagtggctgaagagactaaggaagcacccctgctgagtcccctctcgtcctcctcagggagtatgcactaattctatcttctcctattgggaaggcagccaaaggcagaagcaaagaaggacagcactgtagttcctagagagaggaaggtgccaa

SEQ ID NO: 523707 - DNA, 591 bp, Homo sapiens
caggggggtcatggccaggtctggggaggaacrggggctgagtgagaagctccctggtcatgagggccaggctacccctccacccacccccgcacagcgtggagctgaaatgacggcgagtcttcccaggaggcgtggttatctccagggagctcccagcctcaccctcttgctcatatgtcccctcgacaaatctctgcctactgtgtcctccccgcctggacttgtcgctgccctgagtggggcagacagacagaaccatagactctcatggattgggctcccgtgacaaaggtgacgggaggctggggcacttctgcacacctgcacacagggaggccttccttaggaagtggccactgtgacaaggtgtggaaggcaagacacagccgggcagcaaggagagagtggcttctccgcagcggggaaagcaggtgccctgaactgggggtgctgactaaggagggtggaaaggggcccaggaggggatatccaggcaaggtgattttatcccagcagcaggagggagccatggaagggggctaagcaagggtctgtcatgagcaaatgtgtgtatagaaggtcatctcc

SEQ ID NO: 523708 - DNA, 589 bp, Homo sapiens
tattataccaggttcatcttctgctgtgtttgaaataagtacaatcaggttttgacttacttaggcaggaaagaatgctgcacagctagtctcaccacttcagttgyctctctaataaatataaagtactacaaagttaactgactcttaaaaatggtgttatctatgaagaatgattggaaatgtttggaatgaccatggtaaggtagcgaaagatcccaatgccacttgacttctggtttacatgtgaggctaaagggcacagacaggaaaaagtgttttattgatcagtgtgtacaatacgcatagttaattctggataaggttatatttgtttacttatgatctcattaaaaaacatttcaatatctgagtctagcaaaagtaacttccacgatgtataaatatgccccaaattactttgtacctttagccttatccccactggtattcttgtcaccctttcaccagtaattgtcatctgcttttaagagaccaataatgcctacatgtttaaaaacttatttttaggagaaaacatattacagtccccaaactcctttcatatccaacagtcaggttacttctg

SEQ ID NO: 523709 - DNA, 468 bp, Homo sapiens
tttaaccaataagaattttaattataaatcacagctgactctattactgcagctttccatagtctatacagtatttacactatgacaagttgatgagtctattctttaaaaattattttggaaatacatgaatactactacatattctgtggtgaaaaaaaaaacacacccaaataaaactcatctttatatttttatcacctgactatagtgatatcaaataacatttgatccggaatcttaggttcataccagtgctaccagtgctkcacaaagccaaacttatacttttttgaaggggaaggtgggaataaaggctgtgaagaatgataatcaaacagaagtcatctctacagcaatgaattaattgcccaagactttagagggatatcttcatactttgtcttgtcgagctgagttactgaatcatgcacttcacagctatatactagtggcaatatcatggtc

SEQ ID NO: 523710 - DNA, 468 bp, Homo sapiens
tttaaccaataagaattttaattataaatcacagctgactctattactgcagctttccatagtctatacagtatttacactatgacaagttgatgagtctattctttaaaaattattttggaaatacatgaatactactacatattctgtggtgaaaaaaaaaacacacccaaataaaactcatctttatatttttatcacctgactatagtgatatcaaataacatttgatccggaatcttaggttcataccagtgctaccagtgcttcacaaagccaaacttatacttttttgaaggggaaggtgggaataaaggctgtgaagaatgataatcaaacagaagtcatctctacagcaatgaattamttgcccaagactttagagggatatcttcatactttgtcttgtcgagctgagttactgaatcatgcacttcacagctatatactagtggcaatatcatggtc

SEQ ID NO: 523711 - DNA, 606 bp, Homo sapiens
ggcagtggttttcaccccgacacacacatccacagatagaactgaggctaagtcaaccatcacatttccaagatggaaaagagggtttgctcctttccctgttttcccattcatcaggctgcatttatacmcagtgtggccttcggctctcctcccctgtgaggctatacttcatgctcattttaacatcagttcccctatgtataaatgtagtggagcggaggtcacagagtgatgctggccccctgctccttcaaaggatggttctgaaaggcgactttccaccctcctctgattttggtgcttccacttacctttggatcacaatccagtctggcaatttgaggaacaaccaaagtcattgacaattcatgtttttgaacatccagcttttcaccatcctttactctgctggcttcccagtagggagtttaatatttttttcgggattctcggctcccagtgtggctggtattatagaagagacagcatctttgaaatgagggcaaaccatctacacggacaggtctcgggtcctcagattgctccttccggctgctccatcttctagaagcatgacagttttttttgtttttttgttttttt

SEQ ID NO: 523712 - DNA, 606 bp, Homo sapiens
ggcagtggttttcaccccgacacacacatccacagatagaactgaggctaagtcaaccatcacatttccaagatggaaaagagggtttgctcctttccctgttttcccattcatcaggctgcatttatacccagtgtggccttyggctctcctcccctgtgaggctatacttcatgctcattttaacatcagttcccctatgtataaatgtagtggagcggaggtcacagagtgatgctggccccctgctccttcaaaggatggttctgaaaggcgactttccaccctcctctgattttggtgcttccacttacctttggatcacaatccagtctggcaatttgaggaacaaccaaagtcattgacaattcatgtttttgaacatccagcttttcaccatcctttactctgctggcttcccagtagggagtttaatatttttttcgggattctcggctcccagtgtggctggtattatagaagagacagcatctttgaaatgagggcaaaccatctacacggacaggtctcgggtcctcagattgctccttccggctgctccatcttctagaagcatgacagttttttttgtttttttgttttttt

SEQ ID NO: 523713 - DNA, 687 bp, Homo sapiens
ggttcaagacgtatatttgcctcagactttgagctgtgggatgccccatgctgctgtgattcaaggaaaaggcagtggttttcaccccgacacacacatccacagatagaactgaggctaagtcaaccatcacatttccaagatggaaaagagggtttgctcctttccctgttttcccattcatcaggctgcatttatacccagtgtggccttcggctctcctcccctgtgaggctatacttcatgctcattttaacatcagttcccctatgtataaatgtagtggagcggaggtcacagagtgatgctggccccctgctccttcaaaggatggttctgaaaggcgactttccaccctcctctgattttggtgcttccacttacctttggatcacaatccagtctggcaatttgaggaacaaccaaagtcattgacaattcaygtttttgaacatccagcttttcaccatcctttactctgctggcttcccagtagggagtttaatatttttttcgggattctcggctcccagtgtggctggtattatagaagagacagcatctttgaaatgagggcaaaccatctacacggacaggtctcgggtcctcagattgctccttccggctgctccatcttctagaagcatgacagttttttttgtttttttgtttttttaaataagactt

SEQ ID NO: 523714 - DNA, 606 bp, Homo sapiens
ggcagtggttttcaccccgacacacacatccacagatagaactgaggctaagtcaaccatcacatttccaagatggaaaagagggtttgctcctttccctgttttcccattcatcaggctgcatttatacccagtgtggccttcggctctcctcccctgtgaggctatacttcatgctcattttaacatcagttcccctatgtataaatgtagtggagcggaggtcacagagtgatgctggccccctgctccttcaaaggatggttctgaaaggcgactttccaccctcctctgattttggtgcttccacttacctttggatcacaatccagtctggcaatttgaggaacaaccaaagtcattgacaattcatgtttttgaacatccagcttttcaccatcctttactctgctggcttcccagtagggagtttaatatttttttcgggattctcggctcccagtgtggctggtattatagaagagacagcatctttgaaatgagggcaaaccatctacacggacaggtctcgggtcctcagattgctccttccggctgctccatcttctagaagcatgacagttttttttgwttttttgttttttt

SEQ ID NO: 523715 - DNA, 656 bp, Homo sapiens
aacactgaggctctgcaagataaagtgatcacccatatcatacagctagtaagtgtctaaactgggatttgaattgagatctatctgattctttttttttttaataaaaaaatttttttagagacgggttctctctctgttgctcaggctttagtgcagtggcacaatcatagctcactgcagccttgaactcctgggttcaagtgatcctcctgcctcagcctccctaggactacaggcatgtgccaccatacctagctacttttaaaattgtttatatggagacagagtctttataactcgctatgttgcacaggctggtctcaaactcctggcctcaagcaatcctcctgcctcagcctcccaaagtgctgggattacagggataagccacatctcccagccagtctgaatctattgtgttttataagcttggatcagataatagaccaaatgttggggagagggtaaaagtggaggcagtataggttaacacataaaaaggagaattgaccaggtrcggtggctcatgcctgtaatcccagcactttaggaggccgaggtgggtggatcacctgaggtcaggagttcaagaccagcctgagcaacatggtgaaaccccatctctactaaaaacacaaaaattagctgtgcat

SEQ ID NO: 523716 - DNA, 656 bp, Homo sapiens
aacactgaggctctgcaagataaagtgatcacccatatcatacagctagtaagtgtctaaactgggatttgaattgagatctatctgattctttttttttttaataaaaaaatttttttagagacgggttctctctctgttgctcaggctttagtgcagtggcacaatcatagctcactgcagccttgaactcctgggttcaagtgatcctcctgcctcagcctccctaggactacaggcatgtgccaccatacctagctacttttaaaattgtttatatggagacagagtctttataactcgctatgttgcacaggctggtctcaaactcctggcctcaagcaatcctcctgcctcagcctcccaaagtgctgggattacagggataagccacatctcccagccagtctgaatctattgtgttttataagcttggatcagataatagaccaaatgttggggagagggtaaaagtggaggcagtataggttaacacataaaaaggagaattgaccaggtgcrgtggctcatgcctgtaatcccagcactttaggaggccgaggtgggtggatcacctgaggtcaggagttcaagaccagcctgagcaacatggtgaaaccccatctctactaaaaacacaaaaattagctgtgcat

SEQ ID NO: 523717 - DNA, 600 bp, Homo sapiens
tagtcaagtcttagggatagtagtaaaaacatggctgtacatggctggccaggcacagtkgctcacgcctataatcctagcactttgggaggctgaggtgggagggttggccaagagcttgagaccagcctggtcaacatagcaagacccgtctctacttgatttttttttttaaagtacatggcaaagggcattataaagtaagatttgtattagcttgtagctggttactgatgttcataggaagggcctcaaccataataatggtgaaataataaaatgagatgaataaatattagagaggtagaatagtacgtagaaaggtttagcacacattttgtttttctgcacgagtggttgttctctgctttcaaagtgctgaaacgaatgtcctacattgtctgccttccatgaggttctgaccgcccttgagaacagatgtacccactacagggtgaaggtgagaatgtaatttgaagctgaatgagaatggagctggattctaaaattatatcccctctcagattcacaagtgttcacacatttaggcaagaagccctaagtcctaaccctggacatgtggattgtccaggaccatcc

SEQ ID NO: 523718 - DNA, 603 bp, Homo sapiens
cagcgtccattaggtctcacaggtggaaagcatcagccaggattccaacccaggcagttaggatcatctggggtccctgaacttaaccagctggccatattgagacctgtgaggcatggtttgttgttggatgacacaggagggaagagcctgcaataattttacatgacttcaggtttctttgggttcatttgcttagcaaattcattgaacaccttctatacacgaggtatgaatacggtgaatacatattcattccacaagcatttttttttccttttttgagacggagtctcactctgtcacctaggctagagtgcagtggcgctatctcggctcacggcaacctccgcctcccaggttcaagcgattctcctgcctcagcctcccgagtagctgggattacaggtgcatgccaccatgcccggctaatttttgtatttttagtagggatgtggtttcaccatgttggccaggctggtctcgaactcctgacctcaggtgatctacccacctcggcctcccaaagtactgggattacaggcatgagcyactgcacccagcttccacaagcatttttttttttttttgagacagagtctt

SEQ ID NO: 523719 - DNA, 624 bp, Homo sapiens
ctgcccaagccaagacgggagaggctgagccaggttaggatccrggagctaggcgtgtgtggggctggctcgggccagagactgggcttctgggcttcgagatgactgagcgctcccgactgcaggtttccttcattgaagagaacaaaacagctcctccccacctcccgcgctggagaggccagctccaatttccctcccagttaatgctcattctgagtgaatggatccagaagacttaaatcctcggtcgctccttttaacctcctccatcgattctccactggggattctgaccagtttcgcctcctccagcccctccaaggaatcctcttcctcattctctcccctccattaccccaagctgcatccaccgttttctcggtctttctggggaggccgcagaaacacaccctcatcccaaacagggtgccctccacccctccctccctccctctccattctctgtcggaggatatcccacatgctcccacggtgcccagtagcgggaaccggccagctcttcccctcgccatttctccccatcctctcctcgcctcccggtcccccgcaccctaccgccgctgtctccaggttctagggggcggaggatcctgcccggcg

SEQ ID NO: 523720 - DNA, 628 bp, Homo sapiens
ctcttacccaggatgaaaactggtgcagcgggggtgtaggtggcttgttacccagctccacttcctccagctcagctccaagggcctttgggctctctctttcctcattcttccctgctgggggtggctcctccatctccatcttctctggttcctcccgggacctagctcgggactccagctcaggaaggccagaggggtggagggctgagaaggcctcagtctcaatgttyaccacacggccaaagtgcccatggcccacctggggctggctgtggtgccttttggccaactggatgctgtcccgcggggtgccaggagcccgcacctttggtagggtcagactgctgccaggaccaccttccctggcagaggtctttgtcccagggagcatccctctctgagcagtaaccagaccctcaccccaggaagctgaactacatctgaaggtaagaagcttcatgcatggctggtggggagggctctctcttcccagatgaggttgaaggggcttggcctctactgtttccccagaatggaccgtgctggaactagaatcctccaaggggcttgctgcttcagaaacagagtccttgctctgcagggcacctggggaaggtgcaagcac

SEQ ID NO: 523721 - DNA, 560 bp, Homo sapiens
agctgaggcctaccagtcaaaacagacactagtccaaacagaatagagattggcagcagaccacaggaatgccagtacccattgatactacttgccaaataactgtcctgaaaccaattaaatcatgcagtcaaggactgaaaaagtatatttcccccctcatcaaatgtctgaacttctgcatttattaagcaaggaaagacataaatagaaaggaaaataatgctaatacagaccgtagtgagtgaattgctttgagactattaactaccacaaagtgtacagaaagaaaacaacgtgatccagctgaagaggatgcatgcctgttaataacaaccagcttccaaacttaataatgatatcgattgcaaaaagtaaccacatgacaggtggtagactrttgcacctgcattgtagagacattaaaatgttcttccatttgactgctaccatccccactatcagcaaacccagtgtggatttaaatgccgtaattggtggtgtactagcatcaaataaaactatgtcttactagaaattatagatttttgaaacaatat

SEQ ID NO: 523722 - DNA, 382 bp, Homo sapiens
atgtgtaagcacctttcttatgtcaaatawaagtttcactgtagctcctggttctggtttgaaaatctgactcttcaagtgcagctcaacaggtgagagctctgaggcatacggaggcggtctcattacccaagggtctgttgggagctagaagcctagagaaaacacgttttagattttaattacttagttaattccatgctttactcagagtagcccttgaaagaaaatgcttgaaaattatttgagcagcattattatcaaaaatcatggccccactccacataagatacatgggaatttgggttggaggaagaaaggtatgcattagttaagcctctttttttttgaaaagcagaaaaaatctaactgaaactagctt

SEQ ID NO: 523723 - DNA, 382 bp, Homo sapiens
atgtgtaagcacctttcttatgtcaaatataagtttcactgtagctcctggttctggtttgaaaatctgactcttcaagtgcagctcaacaggtgagagctctgaggcatacggaggcggtctcattacccaagggtctgttgggagctagaagcctagagaaaacacgttttagattttaattacttagttaattccatgctttactcagagtagcccttgaaagaaaatgcttgaaaattatttgagcagcattattatcaaaaatcatggycccactccacataagatacatgggaatttgggttggaggaagaaaggtatgcattagttaagcctctttttttttgaaaagcagaaaaaatctaactgaaactagctt

SEQ ID NO: 523724 - DNA, 504 bp, Homo sapiens
cttaatgacaaatgatattgagcatatttttatatgcttatttgccatctgtatatcttgtttagtgaggtgtttgtttagttatcatccatttattaatttttttatttttgaattttaagagttctttgtctattttagataaaagtcctttaacagataactattttacaaatgctttctgccaatctggagcttgattttttattctcttaaccatgtccctccatttcatcatatcatggactgttttctgcataattatttctgcatttgaatcttctaaattaattagcaaatcaaaaaggacaattgtgttttactaactaaaacaatcctcttacgtttttgtcaggtttccccctgcagatattatgaaatgtctttacctattcaataatasctttaatagaactattgactctaggtcattaattttccagtgtctttgtagtgcccctggcctcttgtggtgctagaagtgacttgttcattggattgagg

SEQ ID NO: 523725 - DNA, 403 bp, Homo sapiens
gtgttagacgagagagatgcatataaattattaaaacacaggaccaagaatgacacacactttactgagatattgatgaagactgaatatatggaagaggaaaagattgtgaccacacacattcagttttggcccaaaagtacatatattacaacagcaggagagggcgagatggcattatagggagcagtgttgatttgaagtcctgctatcaattgtccagtgacataatcaaaaaaaacctagggatatagatctwgagttcagaaataagattgtgctgcaaaaatagatataatcattcttcaagtaattcttcaggttgcctggccatttaacttgcaatacaaacagctaattaaaatctaactaagaacatggaagtaaaaatcacaatacatac

SEQ ID NO: 523726 - DNA, 512 bp, Homo sapiens
caaagggcattatcaagggagtgaaaaggcaacctgcagaatgggagaaatcataatatatctgataagggtgtagtatcaagaatttataaacaatgagaggttctatagccagagacttctggaaaatatgtatctttcagcttccagacaaatagttgccactatgaagttatggttaaaaacaatataaaagaacaagaaatgctaaatgagaaatgtcttttatagctcattattctgaaataccttgtgccctctcttcagtttattttaattcaggaatacagtagttcatttaacaacaggggaaatctcattggagctgatagataggcagccctgcttgtgttttcattgttcctcctctaagcattgttttctactctgtttgttsgggctttttgcgtctattgtatatacaaagcatttccaaatcgcctttgaaggaagcagtttgacatgctaaattaaacgaagctccagagacatttgttttaggcaggaaaaca

SEQ ID NO: 523727 - DNA, 593 bp, Homo sapiens
caaattattcagtggcaatcatagagttcaaatgaatcattgttgtgtcctcttggaagagaaacattcttccwttgactagtaagacttctaagccatcatatcccaacatcatgtggaaggagagctaaatattgtgagtgatgcgtaggtgaaaaatgagtgttatctctcccagttccatcccttgagttttaaacacatataatttggtatgatttacatatattatattgctgggcaacattcaattctgctacagataacaagaaaaccaacctcctctgttaagtaagttagtaaactataaggcattttaagcaaaggtaaaataagtatgtcttgtgcatactaaacatagatagaaaggaaagaccaaaatatgcctaacattcataacatgctatatatacatggggtacctcaggcaccttcatacatgacatgtacacgaagcatatgagatactaaaattgtatgaggttgtggatcagttgcacattagtgacatccatcttgagcagatatgcactttgtctaagaaaaagaaacaacattcatagctgttcatcaagtaattgggaagctatagc

SEQ ID NO: 523728 - DNA, 611 bp, Homo sapiens
ttcatgctgctgataaagacatacacaaggctggataatttacaaagaaaaagaggtttaatggactcacagttccacatggctgtggaggcctcacaatcatggtggaaggcgaaaggcacgtcttacgtcgcggcagacaagagagaatgacaaccaagtgaaagggggttccccttataaaaccgtcagatctcatgagacttattcactaccaccagaacagtatggggggaactgcccccatgattcaatgatttcccactgggtccctcccacaacacatrggaactatgggagctataattgaagataagatttggatggggacacagccatatcctatcaccttgcaatcaacttttttctttccaaaaatccagtgcttcagtgttgggctttcccttgcacgaggcaaaccagaccatttgttgcttgttgacactcccccaagcagcattcccaggttccctgctggcaagacccacccttcttccagttcctagggcaggccatttgtgccttttaaggcttgaactccagcctgcatggcattgcctccctacaggtctctaagccaattctggagggaggttatctgtgtgattccg

SEQ ID NO: 523729 - DNA, 494 bp, Homo sapiens
tggtgaaaactttgcacatagtaggtgctcaacaaatattagaattagctgtggggagcagagaggacacagatctgccyaggggcaggggaacatcaccccatcgaactgaggtgaagagatggtggctttgatcacctgatgagctatgcctgttctgcccataattccaactctgttacagagcatcatttgtataccagcccctgtgctaggcactttatatacatcgttttgttttatctcccaacacctggcaagtattctttttttcattttatggtgaggaaactgatatggttttgttgtgtccccacccaaatctcatcttggatttagctcccataatccccacaggtcatgggagggactcagtgggaggtaattgaattatgggggaaggtctttcccatgctattctcatgatagttaataagtctcatgagatttgatggttttataaaggggagttcccctacacaagttctcttgcc

SEQ ID NO: 523730 - DNA, 472 bp, Homo sapiens
tgccaacttcaccgttccccactacttacttctaccccacccctagaagtactaaggacctacggtggataatctgtgttgcttacccttgttcagtgccctgccatgttgcatgyctgtcaccctctccccgaccctgtgagtttctggagatagagggttgggtatgtattactgcatacctgacactttgcccaggcactggcatagagcaggtgctcagaacctgagtattgcagcagggtttcttagctcctatcttaggtggagcttcccctccccatgccttccacgagtagagtatgtattaatgaactagctcttccaatgctaggaaatctatttcactttaatgaaatccaattagtgcctccactgtggagccctgggctctttcagactagaagatgctgaacgagaggatgccttttcctgtaacccagatgtgtctttcccgcctccatctcccttc

SEQ ID NO: 523731 - DNA, 643 bp, Homo sapiens
tacttgttgtttgcatgtgtgcttgtgtgtgtgtgtgtgtgtatacaaagcagagtgcccaatctgatggcaggaggggcagaggccagggtgaggactcaaagagccatcatgcctggttgtatgtgaagccaaggacctggcatttgggggtgggttctctggggcaggaccctgagctctttgcaacagccttaaaagaaagcctggactgtaataaccatggccaacatatattgaacacttgctatgtcccaagcactgttctgtgtgcttcatgtatgttttctcagttaattctcaaatmtctgacatgtaattgtccccattttgcagatgaggctggggagcctaagtgacttgctcaggggaccacagcaagaaagtgggggtcacagtcagactctggagggtgctgctaaccctggtgctggagactccatttgcagaagaggaaggaggatcagtgaggtgaagtcacttgcccagggtcacagaggtggtctgctgagatttacagcaggtccaggacaccagaggagtctgaggtcccacttggtggccaccctggaagaggtgagggtaaccaaagggaagaggacagagacccagagccaggcaggagctgtgcttgaatgcaaaa

SEQ ID NO: 523732 - DNA, 652 bp, Homo sapiens
gttccaccaagtcaggtgttttgattctagcacctgacatgtggcagtgttgttgtataaagtcacctcaaagggtgtgggtggctgggatggtggtgggtggagtgtctcatctgctgccataatccactggcaggagctgggtcctggaggggtctccccttggtacctacctccatgtaatagatcgctgccatccaaaattgctttaagagccttgggactgaaagcattgcccacaggaaagataagatggcgagaacatcaagaggatggaagccaagagtgcgtgattcagaatgatcaccaaatagcagagcatctcagacttggacacggccatctggagcaaggcgaaggccagcttcaccaggcrtggcaggctcccatgaaccctgtccggctgctcagctcctcatcccgggacatgctgggggacgaagtgaccctgccgtgagtcccagaaagacaggcctacagccccagacaagaaataccaataggtaaaaataatcctagatttttttcaaactctacacagggagcaattttttactttcctggagcactcagccacaaggttttccatttaacaggcacgccctagaggcattttaaaaaaatatgtcatttgaaaaagaaaaaaaaaaaa

SEQ ID NO: 523733 - DNA, 641 bp, Homo sapiens
tatgtatgtataatgtgtgtgtatatatataaaagacatatatatatatatatatacatgagatacctcatgaccaagtggagtttatcctgggaattcaaaagggctggtttattgttggaaaatcagtgaaatgcatatatcaatgacacacaatcacctcaacatgtgtgaaaaagtcctttgacaaaatttaatgttcattcacaattttttaaattcttggcaaattaggaatagaaggaaacttccttaacccaataatgagcaactacaaaaatcttcagctaatattatggtttatggtaaattacggaatgctttcttcttaagattaagagcaaggcaaggatgtacactctcaccatcttattcaacagagtccaagaagtcccagctactgtaataaagcaaaaacaaaacagaaaaaaacaraacaggcctatgctataagtatcagcttaacaaaatatgtgcatgatctctatgctgaaaattataaaatgctgaggaaataaaagacctaactaaatggcgagacatatcatattcatggattggaaaattcaatataataaagatgcaaattcacctcaaataggtctttaggtttaatataatttctatcaaaattctaagtt

SEQ ID NO: 523734 - DNA, 508 bp, Homo sapiens
ctatttacttgttgagttatttcatatctattattccatttagaccttgaaccctgtgagggcagggactaactttattcctagtgcctgtcacatgatttgaactaaataagtatatttttccagcctgcactactacktacaataaggagtttcttatatttacttgaaaatgttttcaaccttctagggatgacctctactattattattccattattgacctttctatgcttattattgacctttcatcttattattctgatttagtaagcagattttatgtctccttgtccataccattcaaggctatctagatttcaattgtatcttcagatttttaccttccaccttgatgagtcccaatgtgaaccctccaaagcaggttcctactgcactcatcagtttctttggttgagggatagtggccactatgtccttctcaggatgttggagacatgatgaaataaagacggtgatattagccccctaacggtaatcactcatg

SEQ ID NO: 523735 - DNA, 508 bp, Homo sapiens
ctatttacttgttgagttatttcatatctattattccatttagaccttgaaccctgtgagggcagggactaactttattcctagtgcctgtcacatgatttgaactaaataagtatatttttccagcctgcactactacttacaataaggagtttcttatatttacttgaaaatgttttcaaccttctagggatgacctctactattattattccattattgacctttctatgcttattattgacctttcatcttattattctgatttagtaagcagattttatgtctccttgtccataccattcaaggctatctagatttcaattgtatcttcagatttttaccttccacmttgatgagtcccaatgtgaaccctccaaagcaggttcctactgcactcatcagtttctttggttgagggatagtggccactatgtccttctcaggatgttggagacatgatgaaataaagacggtgatattagccccctaacggtaatcactcatg

SEQ ID NO: 523736 - DNA, 524 bp, Homo sapiens
agctatttacttgttgagttatttcatatctattattccatttagaccttgaaccctgtgagggcagggactaactttattcctagtgcctgtcacatgatttgaactaaataagtatatttttccagcctgcactactacttacaataaggagtttcttatatttacttgaaaatgttttcaaccttctagggatgacctctactattattattccattattgacctttctatgcttattattgacctttcatcttattattctgatttagtaagcagattttatgtctccttgtccataccattcaaggctatctagatttcaattgtatcttcagatttttaccttccaccttgatgagtcccaatgtgaaccctccaaagcaggttcctactgcactcatcagtttctttggttgagggatagtggccactatgtccttctcaggatgttggagacatgatgaaataaagacggtgatattagccccctaackgtaatcactcatgctgctcccacccat

SEQ ID NO: 523737 - DNA, 496 bp, Homo sapiens
gttttatttttttctctttttcttttttctcctcatactggtttggaaattatatattttctttgcattctttcagtagttgccattraaatatttttagttgaatatttcattatattcccattccatctttgtttttatatttagattttatttcaccaaaaattttaaaaactcatagttgaaaatatcaaatacttcctcatgagccttatatccctccctccttcccctgaaacaatcatttacatttcttttactggtcatgttggtatctacttccatgtctctaaaaaacattcatttctcaatttcttatatttctcaattttccagtttttggtattatctattgacttcccactctagaaaatgactgctcccaccatatatgtgccttctttcctcttcacgccctcacaatacagtcattttatgtttgcgtttgatatcaagcaatatatttacattaatgtaactatgcacaaactgttca

SEQ ID NO: 523738 - DNA, 496 bp, Homo sapiens
gttttatttttttctctttttcttttttctcctcatactggtttggaaattatatattttctttgcattctttcagtagttgccattaaaatatttttagttgaatatttcattatattcccattccatctttgtttttatatttagattttatttcaccaaaaattttaaaaactcatagttgaaaatatcaratacttcctcatgagccttatatccctccctccttcccctgaaacaatcatttacatttcttttactggtcatgttggtatctacttccatgtctctaaaaaacattcatttctcaatttcttatatttctcaattttccagtttttggtattatctattgacttcccactctagaaaatgactgctcccaccatatatgtgccttctttcctcttcacgccctcacaatacagtcattttatgtttgcgtttgatatcaagcaatatatttacattaatgtaactatgcacaaactgttca

SEQ ID NO: 523739 - DNA, 573 bp, Homo sapiens
actttttttttcttttctttattaccaagcttctgctttgcttcttccattcttctttcctgttttctaagggattactgaagtgttttatttttttctctttttcttttttctcctcatactggtttggaaattatatattttctttgcattctttcagtagttgccattaaaatatttttagttgaatatttcattatattcccattccatctttgtttttatatttagattttatttcaccaaaaattttaaaaactcatagttgaaaatatcaaatacttcctcatgagccttatatccctccytccttcccctgaaacaatcatttacatttcttttactggtcatgttggtatctacttccatgtctctaaaaaacattcatttctcaatttcttatatttctcaattttccagtttttggtattatctattgacttcccactctagaaaatgactgctcccaccatatatgtgccttctttcctcttcacgccctcacaatacagtcattttatgtttgcgtttgatatcaagcaatatatttacattaatgtaactatgcacaaa

SEQ ID NO: 523740 - DNA, 496 bp, Homo sapiens
gttttatttttttctctttttcttttttctcctcatactggtttggaaattatatattttctttgcattctttcagtagttgccattaaaatatttttagttgaatatttcattatattcccattccatctttgtttttatatttagattttatttcaccaaaaattttaaaaactcatagttgaaaatatcaaatacttcctcatgagccttatatccctccctccttcccctgaaacaatcatttacatttcttttactggtcatgttggtatctacttccatgtctctaaaaaacattcatttctcaatttcttatatttctcaattttccagtttttggtattatctattgacttcccactctagaaaatgactgctcccaccatatatgtgccttctttcctcttcacgccctcacaatacagtcatwttatgtttgcgtttgatatcaagcaatatatttacattaatgtaactatgcacaaactgttca

SEQ ID NO: 523741 - DNA, 496 bp, Homo sapiens
gttttatttttttctctttttcttttttctcctcatactggtttggaaattatatattttctttgcattctttcagtagttgccattaaaatatttttagttgaatatttcattatattcccattccatctttgtttttatatttagattttatttcaccaaaaattttaaaaactcatagttgaaaatatcaaatacttcctcatgagccttatatccctccctccttcccctgaaacaatcatttacatttcttttactggtcatgttggtatctacttccatgtctctaaaaaacattcatttctcaatttcttatatttctcaattttccagtttttggtattatctattgacttcccactctagaaaatgactgctcccaccatatatgtgccttctttcctcttcacgccctcacaatacagtcattttatgtttgcgtttgatatcaagcaatatatttacattaatrtaactatgcacaaactgttca

SEQ ID NO: 523742 - DNA, 579 bp, Homo sapiens
tgactgctatcttggtttaaaaatggagactctggagctggatgattgaatctctattacacccccaayttgggtgatcttggtcaagttctttaacttctctaggcctcagttcccttatctgtaaaatagtatgagaatagtcgctgtgttctaagattgctttgaagattaacatgagttaataatatctataatacttataagggtgcctggcacacagtaaccacgcataaatgctaattattatatttactattagtagtaattggacaggcaacaaagaagatccttcaactttctatgtctctcagtggtctgaaacttccatctgatactatttaaaagaatttgggtaagtcctcatacagaaaatgagtctttcttaattttggaatgatggtaaaacactgggttttagtcccaccaggatcttctacctggaaaggaactgagccaggtgggtgggcagtacagaaatggaaggagggagcagggaactaatgctgtctgcaaagacaagagaacaaggagaccccggggaatgcagaaactggcagcgttttccttcaactacca

SEQ ID NO: 523743 - DNA, 579 bp, Homo sapiens
tgactgctatcttggtttaaaaatggagactctggagctggatgattgaatctctattacacccccaacttgkgtgatcttggtcaagttctttaacttctctaggcctcagttcccttatctgtaaaatagtatgagaatagtcgctgtgttctaagattgctttgaagattaacatgagttaataatatctataatacttataagggtgcctggcacacagtaaccacgcataaatgctaattattatatttactattagtagtaattggacaggcaacaaagaagatccttcaactttctatgtctctcagtggtctgaaacttccatctgatactatttaaaagaatttgggtaagtcctcatacagaaaatgagtctttcttaattttggaatgatggtaaaacactgggttttagtcccaccaggatcttctacctggaaaggaactgagccaggtgggtgggcagtacagaaatggaaggagggagcagggaactaatgctgtctgcaaagacaagagaacaaggagaccccggggaatgcagaaactggcagcgttttccttcaactacca

SEQ ID NO: 523744 - DNA, 640 bp, Homo sapiens
ctaattttcctgccctctgtcacagtgtagtacacagtgagttccacaaaacatcatcctggccactacatggatggcacatcaatggaacccggtgaggagaaagaggcaagtactctgcttaccttggtaagataagtgtttggtagaggttgagagaaaaacaaaaaacaaaacaaacaaacaaaaacacctatgtcagcattttggtgtttggtacaaggttggacacttaccccacygttaagatcaagttattatacaatttgcgtctcctgccgccaaaaaaaaggaaaggtatttggaaggtctgtttatacatggggaaaacacctactacatttgggaatattgttttgtcccacttactgggtgccttggaggaaggccagttttgagtggggcccacagcaggaaagggtttcatagcaggttccatctgttgtccttcatccaatggcactgaagttctcagtggtataacataacactgtgtggggttctgacaagccaaaatagaccagtaacagcacagtcctctaggattctggagcaaaactatgccatctgcagcaaagaacctctcattgtttcaaaagcagctcctgtgtactacttgatcctagtacaaactgagcag

SEQ ID NO: 523745 - DNA, 474 bp, Homo sapiens
tgacagcaagatggctgcagatatgcaacttccaataatcaatcaactcttaaatgatcctcaataaacactgaggtaatcaccaggagccccacaccagcatgtctgtacccatctgttgctctatccaccttgatgcatgactgacaagtgttcacacatgcaccactggcaggctccgctccygctttggaggatgcaggcagggcgtcactcttggggctcccgtctcctggggagatagagtgagggaggggcactcacaaagcacctcccaagccagtttctgaccctgcgattgcccagcgtctgagggaactgacccgcaaactcactgagctccacagagttgcacctgggggcccagaaggggctgtcctggcctggtacaaagacccccggcagaagagctcaaatgtcctcaattctcccccagtacggggcacccaaaacatgcagctccattttaatgag

SEQ ID NO: 523746 - DNA, 474 bp, Homo sapiens
tgacagcaagatggctgcagatatgcaacttccaataatcaatcaactcttaaatgatcctcaataaacactgaggtaatcaccaggagccccacaccagcatgtctgtacccatctgttgctctatccaccttgatgcatgactgacaagtgttcacacatgcaccactggcaggctccgctcctgctttggaggatgcaggcagggcgtcactcttggggctcccgtctcctggggagatagagtgagggaggggcactcacaaagcacctcccaagccagtttctgaccctgcgattgcccagmgtctgagggaactgacccgcaaactcactgagctccacagagttgcacctgggggcccagaaggggctgtcctggcctggtacaaagacccccggcagaagagctcaaatgtcctcaattctcccccagtacggggcacccaaaacatgcagctccattttaatgag

SEQ ID NO: 523747 - DNA, 425 bp, Homo sapiens
tcgtttctcccactgaaaggggatagtgatatttgggactcacagttgatgtcaccatggcactggatgggaggtctacaggcctcaggggaccctctggtcacccyttcctctctgcaggtgcctctgctcttgagaaactcagggccaaggacaggtcactggatatgctgggggcaccagggctggtggggtagggggttccttggtgctggattcaccccaaccccagcagggagaaagagccttggacaggccctggcccagggagggggcggccaggcaggcctgactggggaggcccgggcatcgcgcttgggccaggggcctgtgtgagggaggcagcctccccttctctaggatggggccagtgcccagctctgcgagactcgtgtcctgcaccccacaccccagtggagaacagc

SEQ ID NO: 523748 - DNA, 638 bp, Homo sapiens
ggaaatgaaacccaggttccaaactctaaggggtccatgagctaccacacaagtatatcagtggcgggcataaatttggcagaattacaggatttttaagacagggagctgtggagcctaactctatgagaacataaatttttaaactgcattggtgccttagtttatccatcgttccaatggaaatagtactaagtttttctttttcttctcagttgactgaattatttccctagtctgtcttgttgcccctcttgatgcccacatgagaggacctgaggtaatttctgacagcctgggacaggttaggagaaatcaaaggtgtcacaaaccccattttaggagaagcctattttcctcatggaaccccaagaaytgtaagcagacaggtccctctcaaaatctaaggctcttgtgttagctgacctttttgatttgggtgagcatcagaaattagtagggaagagagatacaaagaaaattatggatttgaacatgtatttatggtaagaaaagttatgaagaaaataaattttatatgagagaggatcttgtgtggcaaattcttttcctgaagtagaatgactagcaaagaggggaacatagaagaagtcagaaagtgcaagtttgtcatagtt

SEQ ID NO: 523749 - DNA, 638 bp, Homo sapiens
ggaaatgaaacccaggttccaaactctaaggggtccatgagctaccacacaagtatatcagtggcgggcataaatttggcagaattacaggatttttaagacagggagctgtggagcctaactctatgagaacataaatttttaaactgcattggtgccttagtttatccatcgttccaatggaaatagtactaagtttttctttttcttctcagttgactgaattatttccctagtctgtcttgttgcccctcttgatgcccacatgagaggacctgaggtaatttctgacagcctgggacaggttaggagaaatcaaaggtgtcacaaaccccattttaggagaagcctattttcctcatggaaccccaagaactgtaagcagacaggtccctctcaaaatctaaggctcttgtgttagctgacctttttgatttgggtgagcatcagaaattagtagggaagagagatacaaagaaaattatggatttgaacatgtatttatggtaagaaaagttaygaagaaaataaattttatatgagagaggatcttgtgtggcaaattcttttcctgaagtagaatgactagcaaagaggggaacatagaagaagtcagaaagtgcaagtttgtcatagtt

SEQ ID NO: 523750 - DNA, 524 bp, Homo sapiens
atcaggagcaaattgcttataaacacgacattatggacatcttagtttaggctgctgtaatagaaataccacagatcaggggacttaaacaacacacatttatttgtcacagttctggaactggaaatccaagattaaggtgcttgcagattygatgtctggtaagcgctgtttcctggatttctgatggccaccatcttattattttcttacaggatggacagtagagggagggagagagagaaagagagagagagagagaaatagggggagagggaggcggatggggaaggagtgaggtgggggacagggagagggagaaggagaccttgtgcctcctccccttttacatttcatccgcaagacctagttacctcccaaaggctccacctcctaataatgatgcaggatttttctcagtcccttcattgtactcatgaggggagcaaacgtttacacggcccaccgtgctcaatcccttgcaggaaggagcatgtgagcaagcgagtgcaggacccagccag

SEQ ID NO: 523751 - DNA, 524 bp, Homo sapiens
atcaggagcaaattgcttataaacacgacattatggacatcttagtttaggctgctgtaatagaaataccacagatcaggggacttaaacaacacacatttatttgtcacagttctggaactggaaatccaagattaaggtgcttgcagatttgatgtctggtaagcgctgtttcctggatttctgatggccaccatcttattattttcttacaggatggacagtagagggagggagagagagaaagagagagagagagagaaatagggggagagggaggcggatggggaaggagtgaggtgggggacagggagagggagaaggagaccttgtgcctcctccccttttacatttcatccgcaagacctagttacctcccaaaggctccacctcctaataatgatgcaggatttttctcagtcccttcattgtactcatgaggggagcaaacgtttacrcggcccaccgtgctcaatcccttgcaggaaggagcatgtgagcaagcgagtgcaggacccagccag

SEQ ID NO: 523752 - DNA, 631 bp, Homo sapiens
ccaaaagctgacccatcctcgcccgaagtggagagctgattgcaatggaactttctagggccagggaaatattctataactggattatggtgtgattacactgaggtaggcttttgtcaaaactaattcaaatgtacacttcagtggggtatgtttccatgtgtgcaaattagattttcccaaagttaaactcaagttgatggacttatttcgaaaagaaaataagtgacagtaaacagcctaagtcactaagccaggctctaagtaatgtgccaggtgacatgccttcgggcccggttagagyatgcttctgggagggctggcccaaagccagggcagcctagtactgagcacttcaactggaagtgctttcaaaaaacaatcgcaggctcttccaggtcacactgaaatcaatctccaataaaagagaagggagacaccagttagccggcagccagaggaccccatcctcatcctagttctctgtcctatgccttctacttggcactatgcagattttaggagaaatgaaatagcaaggccgtggagagcaaagcattggtgtggggcctgtttctccccatccctcagccgcacacccgagtctgccccttgcttgggatccctccca

SEQ ID NO: 523753 - DNA, 647 bp, Homo sapiens
gagcattccaaccaccaaaagctgacccatcctcgcccgaagtggagagctgattgcaatggaactttctagggccagggaaatattctataactggattatggtgtgattacactgaggtaggcttttgtcaaaactaattcaaatgtacacttcagtggggtatgtttccatgtgtgcaaattagattttcccaaagttaaactcaagttgatggacttatttcgaaaagaaaataagtgacagtaaacagcctaagtcactaagccaggctctaagtaatgtgccaggtgacatgccttcgggcccggttagagcatgcttctgggagggctggcccaaagccagggcagcctagtactgagcacttcaactggaagtgcttkcaaaaaacaatcgcaggctcttccaggtcacactgaaatcaatctccaataaaagagaagggagacaccagttagccggcagccagaggaccccatcctcatcctagttctctgtcctatgccttctacttggcactatgcagattttaggagaaatgaaatagcaaggccgtggagagcaaagcattggtgtggggcctgtttctccccatccctcagccgcacacccgagtctgccccttgcttgggatccctcccagc

SEQ ID NO: 523754 - DNA, 609 bp, Homo sapiens
ccaaaagctgacccatcctcgcccgaagtggagagctgattgcaatggaactttctagggccagggaaatattctataactggattatggtgtgattacactgaggtaggcttttgtcaaaactaattcaaatgtacacttcagtggggtatgtttccatgtgtgcaaattagattttcccaaagttaaactcaagttgatggacttatttcgaaaagaaaataagtgacagtaaacagcctaagtcactaagccaggctctaagtaatgtgccaggtgacatgccttcgggcccggttagagcatgcttctgggagggctggcccaaagccagggcagcctagtactgagcacttcaactggaagtgctttsaaaaaacaatcgcaggctcttccaggtcacactgaaatcaatctccaataaaagagaagggagacaccagttagccggcagccagaggaccccatcctcatcctagttctctgtcctatgccttctacttggcactatgcagattttaggagaaatgaaatagcaaggccgtggagagcaaagcattggtgtggggcctgtttctccccatccctcagccgcacacccgagtctgc

SEQ ID NO: 523755 - DNA, 586 bp, Homo sapiens
aaacttcagtcatactctcatgtcttagctgctggggctgcagggagaaggttgatttgtcaccttgggcttccctccagtgggaggtgggtcaccttccgtcaagcatcccactatgaggcattggtctccaacaggattcatatcctgggcaggggaaaaatagactaagttgattacctgtaggtactatttttattcacatcttagagatgaggaaacctaggctcagagcggttctgtaatttatccaaggccacacagctattaagttggtactgcaaggttaagtgatgagcaaaggcacaggggacgagtatgttctgcctttttattaaccagttagctcattcaacaaaatataagttgagtcattattttgtgccaagaagtgttctagatgatgcaatatgatggtgagctgtcttcttctagagtggtycttatcctcttggtgcctataatctagcagagatgcagacatcaacatagaactatgaaataaagtatactattaccaatttgttaagtaagattaagaacaaaaatacagaatacaataagagaacctacattggatgttggg

SEQ ID NO: 523756 - DNA, 188 bp, Homo sapiens
cccagcagtcactaacctgttgaccatctcttggccaattgatttttttaatacttcatttttkagggcagttttaggttcacagaaaaattgaaatgaggatacagagagttcccatatattccctgccccacacatgtatagcctcctcccttatcaacatcccccaccagggtggcatacttgtg

SEQ ID NO: 523757 - DNA, 632 bp, Homo sapiens
gatattcccagcagcacttcagttgtcttggtatggcaccaaagtatccacaacattattccatttgattttttaaaattctagttaagaatcactaacttgtaaaaaccaaattggtcatgagctggagatgaaaaaatactgacctggctcacgcttagggatttagcacctggtcytgggcttagcacacagtaggtgacagaataatgctttaatccctacttctgctgatggaaacatctctctcgtagctccggccaaaaacatcaggtcatgctcaacacatctttttctgtcacatctcacattctttccttcaccttgtccagttgatgccaccttcaagatgcaatatattcagagtctggaccttctttcccttctctgctgctgccctgtaaatcggatcatcccactctggcttctttgcttaaaactctctaatcattctccattttattccgagtaaaggataaggctttacaatggcctcaggttctgatgggttttctcagcgctctcccttatcccgtcttctgcttttctgccctagctccctgctacagcaacactgcccttcattgttgaatcccccgagtgtggttcagccctggggcatttgcagcagc

SEQ ID NO: 523758 - DNA, 676 bp, Homo sapiens
gcgagtatcctgctcctaaactcagttccctaactcagcacccactcctgactcctgcttggtctactcctgcctcggtgatgttcaagctcagtacttcttccacttcagccctcaggcaggcaaaaacacttccttatgcctcaatgactaacatctgtacctatttattcatagcacaagtatcttggactcatgaattcctatatttaatcactcataattcattccttyatatactattttgatgttcatatttgatccattaaaagggccaatgagagtcccctcaacctggctcctgcatcctgatggcatgcccccatcacttctaaacacttccttactttctggcttaataaggtgctttgggctcatttgtacctactttgttccaggccctggggtcagccatttctcagaagaacactggttccttttaatggaattatagaccaagacacaggtactaggtgtgctcattgctgctggggtgtcttttcctcctggcccttgcagcagacagatctaagcaataagtgcatgtacatgcatgcacacatacacacacaaacacatgcatgtgcacatatacatacatgtacttattttggcaatcaagagccatttatttgtctatgtctctttcatcacagtgaaatccctggttcccaaa

SEQ ID NO: 523759 - DNA, 640 bp, Homo sapiens
atttatagttacttcctcaggatgttatgtaatcctagtattttatttttacccaaattttaaaaattaaatacagagctaaattgtttaaaattattaaataatattttcaaagttttttaaattattaaactccaaaagacaggattgggagtagactgttttaagaggttttgtttcctcttagtcagtaaatctgaattttggtttaaggcaattcttttttctttttggtgggttagaaaccatatagcaagagatactttgaaatgttccacacaattttggttttaatgggaaaaattgaaacatgtcttaaagtacttttataaatacaagagacgtgttgtgaatcagataaacatggataacaamtcacaatccaaaaccagtggcaattattgttgtggaaattgaggtcaaagaaagtagtgttctagaaagtattctagaaaatggacatttatgaaacaaattcctttaccaatagcaaagcagaatgtaaaaaaatcctcagcattttccactaaatagtctagctttataatacatgacatgagtccttttcatcatttaaagataattaaaaagaatcatttaaatattcctattttatataatatagaaactaatatattag

SEQ ID NO: 523760 - DNA, 563 bp, Homo sapiens
caatgtggaaaatgcttggaggcaggatggtgtgataggttctctggaggtttctgagaggggcattgaagtcgacttttgtttctctttttttcttctccctaagctttagtaatatgaaacctggcagggatgtcttaagccagctctgcacggaaggtggacctaaattgcctctaagctgatgagctgaccctccyctccactaaccctccacctccaccttttcatttctgagatgaaactttgaaaattattattattattattattattattattattattattattatttgcaggaagctgtgtctgcagactatgaacagaggaatcgtctccactgctcactgaccctaacccattgggtctctggctaaagcagaagagtcccacacctgaggggagggtgttcgctctgaacacacagcttcaaggatgttctgctctaatggaaaggctctagactgtagctaagactttcactcgtccagatatttacagtttgaaggacttccctcctgatatttttggcaataaaggagaaaatcatttctcctcag

SEQ ID NO: 523761 - DNA, 580 bp, Homo sapiens
ggctttttccttgggaaccttcaatatcgttttcttaagatctgctcccttggctcatagaaggctttttgaatctcctggcttaccaccagcattctgacagtcaagtaggaaagaaacctgggagcctcagtgrgcagcgtatacagattcactcaattcttccatgattttggtatagcaccgcagtcttcaaccatgcctggtgtctctgtagagttttgtttgagcatcttcggagaataaacctctgccctttgccagggtgaagggaggtatagtcaaatgctgaatgagggtggggattaagaagccataatgttccttaaacaggcttacacaagactgctgattttagccttatttatagcagtaactggtgccacaatttccaggctttgagaaattctgcgtggtaaattaaactaatttccattttctctaccctcaatttaggtttcagttttctcaggcctgacaagtcatttactactttctggctcctaaaattttataattatcttctttcctgattcttccgtttttatggatttatgcctttaaaatacattcatcgtta

SEQ ID NO: 523762 - DNA, 633 bp, Homo sapiens
aggggaagcatggtagctcttgggatgaaaagcctcgtcacgtgaagcacctgcctcaggtgaagtccttgcagcatctccagtggaaaggaggccattctctaataagasggaggatgctgcttcttccaggctggagaattcaaaaggatccaggtattcaaaattctcagggctttctacatctaaggctcaagggcccactcttatcagggcactggttaagacataagagatctgttagagatttctgtagctctatggttgcagtttactaaggccagccaaccccacaatccttataattcgcattcccccatactgttcaaatgcagaaactagtgattcatctgtcatctgtacctcattttcatctactagaggtgagccttttgatagtgatactggtcactggtgagtcactagttccagagtcccattctgaacatatacttcctgtagcaactctcttagcttgtgttttctcagaaagtggagcctgagatacaggcttgcacttaggaggtagttaagaggtgattccatggagctgggatgagagtttcaaaagaataaaacagaggagggaaaggcaaatgaaaggtttattatcaagtagtcactgttgtgggc

SEQ ID NO: 523763 - DNA, 609 bp, Homo sapiens
aaacttttacattatttaaacagtgtcgtatccacaaaataaacgatatgctgttcttggttcaccaagcaagcactttgccatctctgggtccccagtgaacagctactcattaaacccagatacatttggacatcagaccccctctctaacarggaaaggggtcaccacagggaggaatgcaggcctgccagtcagagtcatctcccaccagaaacctgctttaatgagcattttcttgcttctcagggcaatcctcatgctctcactgtgctctcagcaagaacacctgggattcttcagccttgccatgtgtggagaacagcccaaaaataggcctgctaagacttccaagatggattgctagactttgtgagtcacctctgaaaccaaaagctctgtgctttgtgatttttgtttgcatcattaggatgaggaatttcagcaaacctaaccacaattacctgtgactaatcttagcagatataaaagcaagtgtttcctctttcaaacccacataaatatacaaaaggcaaataaaaccttgaattggataacccattcccagctattcttcaataaaatattcataaaacaaaaactttgcag

SEQ ID NO: 523764 - DNA, 655 bp, Homo sapiens
atccatggaagctgtgcctccttgtaaaaatatggtgatggagaccacaagtaatgaaaatattagataatcacttataagcattgaccaacagtatctaaggccattactgtatagacgttctttagagtggctgggtctgttgcaactcacaatgggagataaaagaacttaatgtatgtagccttgttcaaaagtccatctaatttgaaaaacgttgatttagatcactcgaaagttccaaggaagacttaaatgcattgagtagtcactgtgagttgagaagaagtaaatagattatcaggcaaacaggtaatcaaaagctagtccagaaattcgaaaaggactcctgacaatgtcctggaagaatcacgtggtattataagataccgctcaaaggatagggaaagatggccaaagtacatcaaaatattattttytttattaaacaaaaataaaattgtatggaccataaaacggatatggagagttccaattttaatatgtacagctttatttggattaattgaaaggtgtactacctcctacaacctggtaaaattgcattccatattaaaattacagtacagtaaaccataaagtttacctataagactgaaaatgacagatctagaatgaataaggaaaatatacc

SEQ ID NO: 523765 - DNA, 600 bp, Homo sapiens
atgacttgaatgtgaatttcctgcctacgcaaaagaaggtttactctgagtccaggaagcatcatggtctatttatgataatagaaatttgtaggcatctggcttcaggtgaacctctctgatatttgacatcaatattagtccaggcacaaagctgtattttattttcttgcagggccttcatgatgaaatggaaaatattgatttgtgatcaccccactatagatcaatccaaacacatggattttgtgctttgttttatttaaagggcccaatcaaagatttctgttttgctttatattcaaagcttcaggtcagtgtttcccagatttcaatgtacataagaattccttggagtgtttattaaaaatgcaaattcaagagcaagcaaaactaatatttcacgaagaaaatcagaatagtgattatgactgggaggggcatgaaggaactttctgaaatatgtaaaatgcaacactttgctacatgtgttttatttcatagttacaatttttaacaaaaacaaacacatttttaaaatgcaaaytattgggctatgccataggggaaaaaaattgccacaaggattgggcctgtttt

SEQ ID NO: 523766 - DNA, 375 bp, Homo sapiens
tcattaactttcttattatgttagatgatttagttatatgtaggcaataactactcttatatctcaaaggatgctaatgtttgtgttttctcttttgaaattccttttctgttctgtgaactgtctctrttttttcctgggcctttttagtctcttttttggatttttcttttatttgtttgttttccccactgtttgtttatgttagaggcttttctcaaatgtctgagtttgggttgattcctcatatttacaagtgatcaccaaaacctatgtagcttgttgacagtcagcttttgctttaggtggatcagacagagagccagctcttgcattaggggctgctggaatgtcttgtctccagagccactcagc

SEQ ID NO: 523767 - DNA, 525 bp, Homo sapiens
ccttataatgacaaaataataatctcaggttccacgccctctgactctccagcccagtttcctagagacaactatctagagctttttaatttgctgctttggcagctattcccaaatcccaaataaaatgctatctggccattcttttatttatcagttttagacatcattcattaactttcttattatgttagatgatttagttatatgtaggcaataactactcttatatctcaaaggatgctaatgtttgtgttttctcttttgaaattccttttctgttctgtgaactgtctctattttttcctgggcctttttagtctcttttttggatttttcttttatttgtttgttttccccactgtttgttkatgttagaggcttttctcaaatgtctgagtttgggttgattcctcatatttacaagtgatcaccaaaacctatgtagcttgttgacagtcagcttttgctttaggtggatcagacagagagccagctcttgcattaggggctgctggaatgtct

SEQ ID NO: 523768 - DNA, 635 bp, Homo sapiens
tacttcttggaaattgctcttgcaaagattgctcatgaccttgcagaatcaatccagtgaacacattttggtcctactttacttggcatctcccttatgctcttcttcctcttctcatttgacacactccctgggcaatctcagccatactctgggcttcagctgtcacaaacagagttaggatttcttaacctgtatttctagctccagcagcctcctaaatatttctacctgggtgtcccacaggcatttctcactcaacatatcctaaccctgttygaatatttttcattctcctctccttataaacttgctcttcttgaactccccacctggtactgttcatatgtcccttcactggtgggaatagcatgattggaagagaaagaatgatcccacagggccaggcatgagcctggaagagaagtctatggggtgcaaggtagacacctaaatcaggtgcatgtgcaaagctagtaataaaatggtaaatgagctctgaatcagaggaacatgcactgactggatgccagacccaaggggacccaaaggcaggagtctgagggcctggagaatgacagtaagacaggacacctgggaaaactgcttggaaaaggcacagtgaactgaaacag

SEQ ID NO: 523769 - DNA, 546 bp, Homo sapiens
ggaggagtacattggtatagtgactataattttttctttcttccttgtcacctcgaaaaaaaattagtttttcccctctacctgatgctgaggtcctaagaccagggctgcaactrcaagttgccacagcagcgttggtttataagcaaaaaactgtaactatgtttttaaactttatgtcaaaattcctaagggcgtaatgggggtaggttgtgccttcactccctctagcaatattggggttaggagtgaatgcagctatattgcctggtggtaaatagcttattagttctgcacctatgtaaccttaccctgtctgaatgggaatgaactgaggaggagctacttgatagatttgtattgctccctacaatctacaccagcacagtggtgattctagtgtcccttccaaaggcaaaaagtttgggtgttacaggagagaaggagaaatcgtagctgagagtaaagacatgaataaatgggtcactgaggaaaatttaattttatattaacaaggcaaaatagtctcagagcaagagatgatat

SEQ ID NO: 523770 - DNA, 622 bp, Homo sapiens
caaacttctctggagtaaaatacatcattcagtggaaatatgcacaacttctgggaagctggacttatmctaaggtatgaaaggctgcctttgtacctcaacccagaccccttcccaatttttttttttttttgagacggagtctcgctctgtcgcccaggctggagtgcagtggcgcgatctcagcttactgcaagctccgcctcttgggttcacaccattctcctgcctcagccgcccacaggcgcccgccatcgcgcccggctaattttttgtattttcagtagagacacggtttcaccgtgttagccaggatggtctcatctcctgacctcgtgatccgcccgcctcggcctcccaaagtgctgggattacaggcatgagccacctcgccctgcccccaatttttaaaagtgccaaattattacttataagcgtaaaggccttctagaaaagattcagctgtaagatgggtagttgggttcagatgaactttaatctcagctgctctgtaacatgctaatgctaagccttaacattaaggcttattttatagggaaaatatttattttataaggaaaatataatgttggacatatatactattccttcagtacagcat

SEQ ID NO: 523771 - DNA, 578 bp, Homo sapiens
ccaagctgcggggcaccctgggtgttccaagtcactttccctctgcaggcaggaacctcatcctgctctgaaacagatgagagggaaacgcagaaaacagcttccagctcagccaggaaccttagagtcctgaccttttacctcgcctaggagtttgcaggggagagaacacacgaatttcrgattttaagcctaaataaaggaagccttagtttgaagtgcaagctctgccggacagggggcaccctgtgagccccatttgttaagaggacaatagtcagagagcttccaggctctcacaccagaaacaggaaatacagatttcacactgatctccttcccaggagcaacttgatcctctccataaatccgagcgggaagcatttatccaaacaacaaacaagcaaacatgagctgtgtatgggggatagagagaatgaaacccaggtccatcccggggagaatgctggtctatggcagtggggagcagtgaataaatgaggcgtacatccatggatctgggtggagagggtcagggtgtaacccaggacctttccagaggcatgagaaacagtcag

SEQ ID NO: 523772 - DNA, 636 bp, Homo sapiens
caccctgaccaccctcaaatgcctcattcagtctgtcaggaaactcctttagcctacagcaaaccacatctggaatttggtatctttccgccgtctctgtggctcccaacatgtgactaccacactagcttccaaatggtctcccagcatcaatttttgcccatccccactacacacaccaccaccaccaagagtatattcttaacagaggcaacagaatgatccttttaaatcctaagcaagactatgtcactcctctgttcaaaacccgacagtgactccccattttattcaggaaaaaaaamcccaatttgtctaactctcttgcctgcctcaaggtttgctcaaactttggaccaatcctcgattcctgcaagtcaatctatttatttttttccatagcacttactgccttctgcataccgctagtacatgtatgtaggcttaagtggtactttttgttgtgttgattctatcacctgtcttccctgctagaacacacagtcaggggcagggatctttgcctgctctgttcatagatgcatctccagcacctagaacagcacctggtatacagtagagatttaataaatgtttgttgagtgaatgaatgagtggaaaggtaaatttgggagt

SEQ ID NO: 523773 - DNA, 472 bp, Homo sapiens
tgcgcaatgaatggaacggtggaagagttggatttgaagggagaagagaaggctgccttccttactgagaaaatcaagatttgggagggtcccagtagcaatgtggtcatgagtcttctgcaagaacctgaagatgggtgtagggtcgggggatgggactgaaagggaaaggagagcatggaacattgggcagggtgagtagagacaaccctgtttgcactgcagttccccctccagctcaggctgcattcccagccctaaaacaaggggtcttcctgctcctgtaccactttgatccctggaagtgraataaaggctcttctggcacattttgtaacttaaaataaagcacaagagatatcacattagtttgcaagggctatcttaataaatactacatgccaggcagcttaaacaacagaaatttttgactcacagttctggaggttagaagtccaagatcaaggggttg

SEQ ID NO: 523774 - DNA, 472 bp, Homo sapiens
tgcgcaatgaatggaacggtggaagagttggatttgaagggagaagagaaggctgccttccttactgagaaaatcaagatttgggagggtcccagtagcaatgtggtcatgagtcttctgcaagaacctgaagatgggtgtagggtcgggggatgggactgaaagggaaaggagagcatggaacattgggcagggtgagtagagacaaccctgtttgcactgcagttccccctccagctcaggctgcattcccagccctaaaacaaggggtcttcctgctcctgtaccactttgatccctggaagtggaataaaggctcttctggcacattttgtaacttaaaataaagcacaaragatatcacattagtttgcaagggctatcttaataaatactacatgccaggcagcttaaacaacagaaatttttgactcacagttctggaggttagaagtccaagatcaaggggttg

SEQ ID NO: 523775 - DNA, 497 bp, Homo sapiens
aaacaaatttagttgggatagaacatcaaacacaatagcagaataataggaagaaaccaagagttgcaatgcagagggaaacarggccaggttgagggctcccagctttattcagggaaccttagaattgccgaagacttttaaatgtgaagtgacaggattacatatgttttaggaagctcaaactggctacaatttggaaggtggtttggaagggagaaagggtgagagaggagagacaagttgggaggttttcatagtggtccaaagtaagtagcacggtggccttgaataaagttgtggttttggaggtagaatcagcaatacttggtcattgattgggtgtgggtatgtaggacaggatgacccagttctcctgttatcaagaccagagtgcttgcaagaggtgtttgtggggacagatttataagaagtaagagagaagatactacatgtgtgaatgtaaccatgaccccaaaattctgcgtttctaacta

SEQ ID NO: 523776 - DNA, 562 bp, Homo sapiens
acaactatggaactgcacatggggagtgatgaaaggggcacttgaacaggtctggagaagggctaggggtgtcttgaacaggtctggagaagggctaggggtgtcttgaacaggtctggagaagggctaggagatcttgagactcacagacatgatggaggtgtgaactgargaattacaagtaaggctggagcaagagaggaaaaggaagggacacagggccaaggggatagagtggcttggtacaccacaagtggggcccctggagcccatggggggtttaagtggtaccgggtatgcatgcatgtcacccacaggatacagtcagagacgaggcaagcaagcagagggcatccaattgggccagagagggaggatgaggcctgtgaccaggcaggggcaactggaaggaagcgaggaggagaggcattcacggtgtcacgctgataggacttactgatggattgctcctggagggtgcagggaggaagaagatgcagccgaccttggtttcaggattactgaggccattcattgagataaaggaacatgggggaagggg

SEQ ID NO: 523777 - DNA, 593 bp, Homo sapiens
ttcattaactgagctcaatgtttcacatatgcattaattaacctaaagtttttaatccagattttaaatattgcatatttccccttcttttattgtgtttaatactttttaataatatagcaaataacattttaaaatggtcaaaacaagaaggagcattaacgattacccacattggtcttcatgctcctaacacatagatgcagctatagagcttgtaaccatggaatcggctggcaaacatccatcctgaggctcacagaggacggcagatcacaaacagataaaacagtcctccatgatctgtgtttatcatcttccctttaggaaaacatttgagaaatcactatctgaaggataattatttcattttctcttaagaaaatgaacactttgtgcaactttccttgacccagaggttgaccattatctataactaccacctgtatcatccttagtcaaagacgttacagtggggtaccatttatttcccttaggacttcaatgctttaatataatattttaatatgttatyatatttaatatatattaaatattgcattaattatatattaatattagatttttattta

SEQ ID NO: 523778 - DNA, 500 bp, Homo sapiens
gatttgatactggaaaagaggttaaccaggtgtgtttcgtcctcattaaagaaacagaaacccagaaaacctctcttcaggtaccactgattaacactgacaagaacaccactgattcttccccagacttgacattcagtgctggaagtcctgttaaatatggaattgcacactgagcgttagttagttgatttgccggaagaagccaagagttggatgcatgctgcttgccaaccatctatccaagtaccccagtggagcagaccccacatcacgtctggaagttgacatcacagccagaggtggtgatgccataaaaaggctggtcacagcagctatcgcgtttagggttaacctccagggccatcttttctcagttactcaagagaggcacagatgccccaaagcaaggctgactccaccaaaggtcctgctmaggacccagtggagactgaggtgtgacgggccaggcgaccttggttgtaaattaaagtgcatac

SEQ ID NO: 523779 - DNA, 339 bp, Homo sapiens
ataagtcctacagactgagggaaatgaaaattgcattacatatccacctttagtccacttctcttgcacagctcctgataaattgctttgcaacttaactggcaatactagttggtcccacatcccaccctcagcctyccacccaccagggtagatttctgaacttagtggaaaaagtcccacgtctccactaagtgcaggcactaaaccaagctattaggaaggggaaaggggagtgagggttcattagagaaatgctttgctagtggttcaaagtacatcttttctcagaataactcctttttttccctacattctatttcttaagtttgagagtag

SEQ ID NO: 523780 - DNA, 339 bp, Homo sapiens
ataagtcctacagactgagggaaatgaaaattgcattacatatccacctttagtccacttctcttgcacagctcctgataaattgctttgcaacttaactggcaatactagttggtcccacatcccaccctcagcctcccacccrccagggtagatttctgaacttagtggaaaaagtcccacgtctccactaagtgcaggcactaaaccaagctattaggaaggggaaaggggagtgagggttcattagagaaatgctttgctagtggttcaaagtacatcttttctcagaataactcctttttttccctacattctatttcttaagtttgagagtag

SEQ ID NO: 523781 - DNA, 631 bp, Homo sapiens
ctaatgtgcctgagaacacttttgctattcatgaataaaatatggagtggaagccagagaagtgcaatttaagtctcaccttagttgccctatgttttcaaactcagtacaatgtggtaaaacttacaaggcatactcggtttaaaaataagaccagaggttcctttataagtcctacagactgagggaaatgaaaattgcattacatatccacctttagtccacttctcttgcacagctcctgataaattgctttgcaacttaactggcaatactagttggtcccacatcccaccctcagcctcccacccaccagggtagatttctgaacttagtggaaaaagtcccacgtctccactaagtgcaggcactaaaccaagctattaggaaggggaaaggggagtgrgggttcattagagaaatgctttgctagtggttcaaagtacatcttttctcagaataactcctttttttccctacattctatttcttaagtttgagagtaggtaaatgtaaattttaccaaaaataaaacaagattataatgcaacacgtgaatcagccttttgaagggcacaggaagggaagtcacaactcccaacctcctcctcccaatccccactccccagac

SEQ ID NO: 523782 - DNA, 593 bp, Homo sapiens
agtcggcagtacagaggtattaaatgctccacatgtctgtagatcagtttggacttggcaacccctgctttggatgggagagttacaacaacttatatattcaatgatataagtaagcagatactccaagagaaacaacctcattaaaaattcactagaatgaagtctcrgaactgtcacttacacagtatgtgtacatactgtgtacttacacaaaaatagcaggcactatcagtcagctacctccaagccattcccaaaccttctacaagcccactttccaaattagagcagggaaaatcagatacttaaactccaagaccctttcacatctgttcagtaagctgtgaggaggaatcctgctggggaacttctaggaaagagtttgcttcctgataaaagagactgacgaatcagaagagtcccctgataccaccatttcccaatttgaaccccatttgtaagaacatggtacttggaggtggggaggccatcttgcaaccatgaaataaccatgcaacctgaggttgaagataaaagtccatcatgggaatagcagcataaagagaggaaagctctagatgaccttgctg

SEQ ID NO: 523783 - DNA, 599 bp, Homo sapiens
tctccagtactcaatatgattgaagttaggttgctactgtttagaagcactgttttaaaactgaggttttgatgccttaaaacatttttcatctttgttaccttgctgaaataaaatctaaaagttgcattgggtataagccaggatatattgtactttgaaatataagtaaacattttatcatccaatgacagacttataactaattagatattttcctgttgggatatatctagggaaattgatttcaaaaactgtttattaatagggactttagaaattctatttaagggctgggcgcggtggctcacgcctgtaatcccrgcactttgggaggttgaggtgggcggatcacctgagatcaggagtttgagaccagcctggccaacacagtgaaaacccatctctactaaaaataaaaaaattaggcaggcatggtggcgcacacctgtagtcccagctacttgggaggctgaggcaggagagttgcttgaacctgggaggcggaggttacagtgagccaagatcacaccattgcactccaacatgagtgacaagagcgaaactccatgtcaaaaaaaaaaatctatgtaagacta

SEQ ID NO: 523784 - DNA, 379 bp, Homo sapiens
tctttcttagaccaggaggttttctgagggatggaaattacatgytgaagatgtgggaaaagacagacgggtggaaggatcagggtccttgatgattcaccaccccagccctggatggctgatctcccaagttattttactggagaaaataaatcctcgtgtgttgaatcctgtgctattctatgcctcttgttttgcagccaaacctagttctaatggacgcagaagcccccaccccaaaacatcctaatttctctccccggtgtccagccagagagcgcccagaggatgacgacccacagcagggagtgacaaagctggctcagtttctgtgatgaccccttcccctgctcagccaggactcgatgccagcaggcgg

SEQ ID NO: 523785 - DNA, 379 bp, Homo sapiens
tctttcttagaccaggaggttttctgagggatggaaattacatgttgaagatgtgggaaaagacagacgggtggaaggatcagggtccttgatgattcrccaccccagccctggatggctgatctcccaagttattttactggagaaaataaatcctcgtgtgttgaatcctgtgctattctatgcctcttgttttgcagccaaacctagttctaatggacgcagaagcccccaccccaaaacatcctaatttctctccccggtgtccagccagagagcgcccagaggatgacgacccacagcagggagtgacaaagctggctcagtttctgtgatgaccccttcccctgctcagccaggactcgatgccagcaggcgg

SEQ ID NO: 523786 - DNA, 557 bp, Homo sapiens
ctcctctctcctcccagagcgggcaaggggcagccctgagggtgccagccacatgagggtcttccatcccagccagcccagcagcagccagcgtgggaacccggggaggagcactggcagccagggagggtcctgcrtggtggaaacagagctggcaaagcccgtgtgcttcgctcatatcctccctcgggacctatgggctcatggttcacacatgcttatatcatttccaagtacatggcagattagaagatgctgcgaatgagtaccttgtatatttttgttttttaattgtggaaaacatggaaaacataaaatttaccattttaaccacttttaaagtgtacagtttggggacactgagttcccactgttgagctgccatcaccaccatccttatatgctgtatgttgtatgctttgcagtttctacgctctctcatttaatctggggagtaggttgctacattcaggcagtgtcagtgctgagaaaaggcactgatagcaaggcaagaggggaaacccagaaaaaaaggagacaagcaaaagaaccagcag

SEQ ID NO: 523787 - DNA, 563 bp, Homo sapiens
ctgggaaacctgctcggagtcacagagcaggtgtgtaaaaagacaagaagcaaagtccaaggcccaccgcctctcatctcccgggttgccgctggagttctccacagtggcccactcgctgcattcttgatttgaggacggagccacagagaagaggtggcttggctggctgtcggtatctactggccttggaagaggtgctaaaaatctccctggatctttcagaattgaggccctgtgaaggcagaggggtaacgcgcacacctttctstttttccagcctggaaggaagagcaaggtgaaagtgaccaccgtcaagcaggtcagccagtgacactcagcagaagaggccatggctcctgcacagaggttgagtcccagaccacacaatcaaggaaaagcccctgggttactctccctaccccatctcccattgtccccactggctggagggccactcgagtttggagcctgtcctcagaggccaagtccctgacgcccgccagtctctggcccctttactcccttctgtgcccctcctggtgtctcctttgcacggagat

SEQ ID NO: 523788 - DNA, 563 bp, Homo sapiens
ctgggaaacctgctcggagtcacagagcaggtgtgtaaaaagacaagaagcaaagtccaaggcccaccgcctctcatctcccgggttgccgctggagttctccacagtggcccactcgctgcattcttgatttgaggacggagccacagagaagaggtggcttggctggctgtcggtatctactggccttggaagaggtgctaaaaatctccctggatctttcagaattgaggccctgtgaaggcagaggggtaacgcgcacacctttctctttttccagcctggaaggaagagcaaggtgaaagtgaccaccgtcaagcaggtcagccagtgacactcagcagaagaggccatggctcctgcacagaggttgagtcccagaccacacaatcaaggaaaagcccctgggttactctccctaccccatctsccattgtccccactggctggagggccactcgagtttggagcctgtcctcagaggccaagtccctgacgcccgccagtctctggcccctttactcccttctgtgcccctcctggtgtctcctttgcacggagat

SEQ ID NO: 523789 - DNA, 619 bp, Homo sapiens
actgtgattagtgcctttatttaaaaaaaaaaccccagagtgctctttatccctcycaccatgtgagaacacaacgagaaggtgctgtctacgaggaagcaggccctcaccagacactgaatctgctggtgctttaatcttggactttccaggctccagaactgtgagaaatcaattttggttgtttataagccattcaatttgtggtattttgttatagcaaacaggctaacacaccattactattggtcacaggagaactaagagaggtaccctggagaatcctctgcgtttcagatactttcctccctgtcctcattgtgcagcagcagcccagtttccccttgctaatcaggatcaatcactccagtgagtagagtcatttctttccttttctttttgtgttgattcagtggcttaaggagtccaaagcagccaggtgatagcctcatcttccaattcagagaaaccattgctgtgtctgatggtggcagggttccacctgacttctgaacagtacaaactgggaagctccatggagtgtggtaggtatgaacacctctgcttcttgtaagtgacattaatctctcaaattcccctgggataaagtatagcttct

SEQ ID NO: 523790 - DNA, 619 bp, Homo sapiens
actgtgattagtgcctttatttaaaaaaaaaaccccagagtgctctttatccctctcaccatgtgagaacacaacgagaaggtgctgtctaygaggaagcaggccctcaccagacactgaatctgctggtgctttaatcttggactttccaggctccagaactgtgagaaatcaattttggttgtttataagccattcaatttgtggtattttgttatagcaaacaggctaacacaccattactattggtcacaggagaactaagagaggtaccctggagaatcctctgcgtttcagatactttcctccctgtcctcattgtgcagcagcagcccagtttccccttgctaatcaggatcaatcactccagtgagtagagtcatttctttccttttctttttgtgttgattcagtggcttaaggagtccaaagcagccaggtgatagcctcatcttccaattcagagaaaccattgctgtgtctgatggtggcagggttccacctgacttctgaacagtacaaactgggaagctccatggagtgtggtaggtatgaacacctctgcttcttgtaagtgacattaatctctcaaattcccctgggataaagtatagcttct

SEQ ID NO: 523791 - DNA, 474 bp, Homo sapiens
cagcacacacaccagcgagcctcttctcaccctggctccccgctcctctaggagcaacttggggaattcctacacatttaatccctactgtgcgctaagtagcgaagatggtcgttccatgtcaccctccctgcaaccttgcaaggtgggtgctatcacccccaactaagcagggtggaggcgacagcggagaaaacgaggctcagagaggcagagacttgtccaaggccacatagttggaaggcaccaatgtgggggcttgaatcaaaaccagaggaaagatakgcccaacattcctgtcccttggctctgggagcccccgtggaggcagagatgagtgcaggagtgggtgcagaggttggctcctcaaaagaatgccagtccaggctgggtaaacgatgggtgctctgagcggtggggggtttccctcctgctgtggggcttcctgaaggaatcgtggtgggaagcaggggt

SEQ ID NO: 523792 - DNA, 474 bp, Homo sapiens
tgagctagccttgctccaactgaaccatcaatcactccccgctaatagctctgcaggcggccactctccccaccaaatttaaagcgagaatccgggctgctgggaggaagatgctgcagcccctaaccaccgtaattatgaagtcttgttggggagagatgcttatctttaatgttaagtgaacagagcaggagaccaaacgtcctgcctgcgtgtgtgcgtccatgtgcagaaacgtctgcctggaaacagggctgcctgagaccctgtcactttcaaagtggggatggagaaatgagctgggggcacttcttaccattaaaactgcaattaatgatattgataccttattcttttattttaaaatgttatcttttctctttaccttaaaaggaatcagttcactgtgaaataggtgggaaatayatgaacacaaagaaggaaattgagaccccataaggccctgccacaggc

SEQ ID NO: 523793 - DNA, 443 bp, Homo sapiens
cagtggcacatgcctgtaattccagttactcaggtggccaaggcgggaggattgcttgagcccaaccaagagctagaggctgcagtgagctatggtggcaccaagtactccagcctgggcatcagagtgagaccctgtctcaaaataaaaaaagtgctggaggctcatgttcccccgttgcagcgtgtgaccactgactgccaggcacactctaggatcaagctgctgcaagcaccaacaggacctgggccgaaactcgcctcctgaaacccacctcctgcttgtcttctcctgtttccataagcattgagaagcctgctctcctccgcaccccccagtaagccacctgagcacgaatccccacctgggcggatgtgggcagcacacaggtaatcccggggtkgccaccctgcccacaccacccaccgtgctcttcttcacat

SEQ ID NO: 523794 - DNA, 636 bp, Homo sapiens
caggatcccggcattcacgggcagagcctatctgtcagacactcgctggagaactgtggacactgggcacctgaggctccccctgatgcacctgtgggaaggcagggcttgcgggcagcctcagtgggtgtgggaaccagagggcaagaaaggcaggagcccccagtgccacacagggtggtgttgctgcgtgccaggctctgtgctgagctccaagcaggccagggagcagcctttctcaggatcctggccaggaagcgtggcctctgggagccaggccaggtgggccttgccccaaggtggacgctgctaaccctactccacctgcccagggatcacggccagcattcacagaccagcaacgtcagctcagttaatctcacagcagctcaggaggtagacaaggtcatcctccccactttccaggatgaggaaatgaggcactgagaggggaagtgacctgcccacgggcgcacagctagcattcagcagagccygcattcagacccgcaggccatctgaagccagagtcccagctcctagcaccccactgtgccacccatcccaaatcagtgtgagaacaggagccccggcccagggtcgggctgaagaccctccgcccctcccacctcccag

SEQ ID NO: 523795 - DNA, 524 bp, Homo sapiens
ctttattagtctttattacttcaggcagcacttttagaatgatgattcatctcttccctatataagaaaaagtagagatcaaatccagtaaataaaatatctgaaccatcaacaaaaaagaaagaatatgtgtcactacaaccaccattggctttgatgtattcttactggaaatgttaccacaatctttggctcacttttaatcaattacatttccccctagcatgtcaaatgctttaatttagtttttggcatttaatatactggaaaagccatttatttctatttctatgtatgcccctgaatccataaacattatcctttaaataacattacttttgaatccaaattaaggatactgtcaagcatagttagaccacttcrtttgaattgttcccagatattgtgttgggaattataatccaacttgatggaggaagatcttggatgataggcagtaattgtggcaggttgcagagattctttttcacttacctcaaggatgctgagaaaattgttcacca

SEQ ID NO: 523796 - DNA, 631 bp, Homo sapiens
ctggattggtcacagctcagcgtttgtcttatttggacatggtttcaacatttgcctgcctttgattggccgaaactcagtgattggtaaaagagtatattacagcatgtttacacatccagttaggttacagagcactatatatggggaaaccttcaggccaaacttaaaatatgtaagaaggcagcttttggctaaagttaacaccacccaaggaaatggaggaagttgtaaagcagtcaagaaagcgtagttttctatgtctcttttaaatagcttatgttttgaaaacctgagacacatattttaattgaaatgaatattttaaacacatcaattcaaagkgtaaaattatgagggtgatgcccaaaaagtaaaaatccttcaaaaataaagttcaagaataatatactttgaaatgttaacagtttttactttgggtgaagtgtatctcctacaatgaagatgcattaatttgtaacaagagaaagctaatatttttttgaaaatgaaaaagtaaacatagatttggcatccagatgatatagaatacataataaacacaaatacatacataccacatacacaaactcaataataataaaatcacatgcagtatagcataaacaaa

SEQ ID NO: 523797 - DNA, 604 bp, Homo sapiens
tctagttttattttgtcattggaatcaatacagcaaatataattataactaagaatttaaaatgtctgattttcttctatttttatgttgagttctcagctgcaaccaccgcccctggaaccaaaatatttgagttagaatcctggcaccatgactttcttggtgtgaccttggacaagtcacttaatttctgtgtctcaatttcctcctctgtaggacaggaacaataatagtcccttttcttgtcgatttattgtaagaatttaaggaaatcattgtatgtaaagtgtttagatagamcagcacttggcttgcagtaaacacttagtgctcttcttactacactggtagtttccttttgtgagactgtgctgcaccgacctccttacccactccttgaagttaaggcaaagtctgctggaggacctataccactgaaatggtcaccccatgcttctgggattaaaattaccattgtaaagagtcaattataaatacaaattagaacatttatctatctctaccacatttaacataaacaaagatgctgttttgccctttagtaaaccttctgggatgaattatatttttccaaacaccaact

SEQ ID NO: 523798 - DNA, 604 bp, Homo sapiens
tctagttttattttgtcattggaatcaatacagcaaatataattataactaagaatttaaaatgtctgattttcttctatttttatgttgagttctcagctgcaaccaccgcccctggaaccaaaatatttgagttagaatcctggcaccatgactttcttggtgtgaccttggacaagtcacttaatttctgtgtctcaatttcctcctctgtaggacaggaacaataatagtcccttttcttgtcgatttattgtaagaatttaaggaaatcattgtatgtaaagtgtttagatagaccagcacttggcttgcagtaaacacttagtgctcttmttactacactggtagtttccttttgtgagactgtgctgcaccgacctccttacccactccttgaagttaaggcaaagtctgctggaggacctataccactgaaatggtcaccccatgcttctgggattaaaattaccattgtaaagagtcaattataaatacaaattagaacatttatctatctctaccacatttaacataaacaaagatgctgttttgccctttagtaaaccttctgggatgaattatatttttccaaacaccaact

SEQ ID NO: 523799 - DNA, 604 bp, Homo sapiens
tctagttttattttgtcattggaatcaatacagcaaatataattataactaagaatttaaaatgtctgattttcttctatttttatgttgagttctcagctgcaaccaccgcccctggaaccaaaatatttgagttagaatcctggcaccatgactttcttggtgtgaccttggacaagtcacttaatttctgtgtctcaatttcctcctctgtaggacaggaacaataatagtcccttttcttgtcgatttattgtaagaatttaaggaaatcattgtatgtaaagtgtttagatagaccagcacttggcttgcagtaaacacttagtgctcttcttactacactggtagtttccttttgtgagactgtgctgcaccgacctcyttacccactccttgaagttaaggcaaagtctgctggaggacctataccactgaaatggtcaccccatgcttctgggattaaaattaccattgtaaagagtcaattataaatacaaattagaacatttatctatctctaccacatttaacataaacaaagatgctgttttgccctttagtaaaccttctgggatgaattatatttttccaaacaccaact

SEQ ID NO: 523800 - DNA, 609 bp, Homo sapiens
tggtatggttagctagtagcggctgttttatagagtatacaatgtgtagcagccggcaggagtcagatgataagagaaaaaggcatcaaaagccaatgccatctgtatggagattcaaatcatgaatttcacctcatttttttgaaactagaggctctatataatgtttttatagttatataacactaattaaatgccaactgtaaagtaggctctgaatggaatattaagaagaagtgacagtctctgcccggtgggttggcaacttaaataaggcaaacaaaacagtaagtaaattgcaaggggaatagctcacatggatagaaggtmgtattaactgattcctcttttcaccatgagtccttacacttttcagactgttttttccccaccctccatcagtcacctccatggtatgtgtgtgcactccaacctcactccttgtatattgcatagcgaacaagtgcttcagaagaaagtggcactattcaagcctgctgggtcttgaagtgctgacatcagctttctagggaacacattttgtattgataaatgtcaaaccccaaagaacaaatttaatttcaggcaagtccaaatttgactttccca

SEQ ID NO: 523801 - DNA, 609 bp, Homo sapiens
tggtatggttagctagtagcggctgttttatagagtatacaatgtgtagcagccggcaggagtcagatgataagagaaaaaggcatcaaaagccaatgccatctgtatggagattcaaatcatgaatttcacctcatttttttgaaactagaggctctatataatgtttttatagttatataacactaattaaatgccaactgtaaagtaggctctgaatggaatattaagaagaagtgacagtctctgcccggtgggttggcaacttaaataaggcaaacaaaacagtaagtaaattgcaaggggaatagctcacatggatagaaggtcgtattaactgattcctcttttcaccatgagtccttacacttttcagactgttttttccccaccctccrtcagtcacctccatggtatgtgtgtgcactccaacctcactccttgtatattgcatagcgaacaagtgcttcagaagaaagtggcactattcaagcctgctgggtcttgaagtgctgacatcagctttctagggaacacattttgtattgataaatgtcaaaccccaaagaacaaatttaatttcaggcaagtccaaatttgactttccca

SEQ ID NO: 523802 - DNA, 609 bp, Homo sapiens
tggtatggttagctagtagcggctgttttatagagtatacaatgtgtagcagccggcaggagtcagatgataagagaaaaaggcatcaaaagccaatgccatctgtatggagattcaaatcatgaatttcacctcatttttttgaaactagaggctctatataatgtttttatagttatataacactaattaaatgccaactgtaaagtaggctctgaatggaatattaagaagaagtgacagtctctgcccggtgggttggcaacttaaataaggcaaacaaaacagtaagtaaattgcaaggggaatagctcacatggatagaaggtcgtattaactgattcctcttttcaccatgagtccttacacttttcagactgttttttccccaccctccatcagtcacctccatggtatgtgtgtgcactccaacctcactccttgtatattgcatagcgarcaagtgcttcagaagaaagtggcactattcaagcctgctgggtcttgaagtgctgacatcagctttctagggaacacattttgtattgataaatgtcaaaccccaaagaacaaatttaatttcaggcaagtccaaatttgactttccca

SEQ ID NO: 523803 - DNA, 657 bp, Homo sapiens
acaattgttccatttccttttgttacactgcttttaaaaaataagacaaagtgtatatggtaagagaaaaaagctcatctgaaatgcaatctctattcctccctttctgttttacctgaatataattatatacttttacattatttaacccaaactacatatatatatatgtgtgtgtgtgtgtatatatttgtgtgtgtgtgtatatatatacattcaactttgcattgctattttctacatcattttataatttcatatagtgtagtgcctgcatactgtcctttgtatatgacatttagtgttttgacttataaacacttaccttaaaacactaatacattatgcagtgtactagtgttcattgtacagtgtactaatacattgtacaatgtcctctgttttggaaatttccccagaagaattgcataaggacagaaacaaagtgaaagatgatacccatttcaaaatttgatgaatactacaatatgatttgcaaaagacaatatatacggacacsaatgttttaaaaaagaaaaagataatagtttaccccctccctgatttatatttggtttattttttacttgatgatcagttttgctgctctaccttgaatatctttcaccattttagaaattaaatattttcatactt

SEQ ID NO: 523804 - DNA, 582 bp, Homo sapiens
cttgggatgctgaggcaggagaatcgcttgagcccagttggcagaggttgcagtgmgctgagattgtgccactgcactccagcctgggtgacagagggagactctgtctcaaaaaaaaaaaaaaaaaaaagtgtaatctttgctttcttgagctgttagtattgaagataaaatgtaagatctcatgtggctcagccttatgtttttattgtcttgcactttgtgtacttttgctgtggggttgctgagcatccttagataaagactgaaatcaggccagttgattctgctactcagtctaacatatcttttcagttgagccagctctgttgctgttatccttttgtttatttctgattagctttacattttgtgcctctttaaacttttttcatctttttcaacccagaaactcaccccaacagatttatactctgtaaatgtacttgcttcacagtttatttaggtcatctttaaggacctccctcaacttccttttatacttcaaattataatttaatttcacctttaatccttgtctacatatatagaatgagaattctctattctttttaggaatca

SEQ ID NO: 523805 - DNA, 582 bp, Homo sapiens
cttgggatgctgaggcaggagaatcgcttgagcccagttggcagaggttgcagtgagctgagattgtgccactgcactccagcctgggtgacagagggagactctgtctcaaaaaaaaaaaaaaaaaaaagtgtaatctttgctttcttgagctgttagtattgaagataaaatgtaagatctcatgtggctcagccttatgtttttattgycttgcactttgtgtacttttgctgtggggttgctgagcatccttagataaagactgaaatcaggccagttgattctgctactcagtctaacatatcttttcagttgagccagctctgttgctgttatccttttgtttatttctgattagctttacattttgtgcctctttaaacttttttcatctttttcaacccagaaactcaccccaacagatttatactctgtaaatgtacttgcttcacagtttatttaggtcatctttaaggacctccctcaacttccttttatacttcaaattataatttaatttcacctttaatccttgtctacatatatagaatgagaattctctattctttttaggaatca

SEQ ID NO: 523806 - DNA, 432 bp, Homo sapiens
gcttagataaaaatttaaaaaaagtttcagatccaaattttgctttcaaattaacaggcgcaaaatattccaggatatgaacttctgtttgaagaaagaatttagcttgggatacatagactggctatgattgaaatgcatrtattgatagtaaaatattttacaaacaaggtttttacatatattagaaagagtgaaaaacttagccctctttactgagcaatattagtaattgcaaggagcaagtcactggacaaacaaccctaccacgcagatggtttaggtgctgtcaaagcagaatcacccatttctatgtctttgagtgtgttttagagaagtgctgattgtcaaggagaataaaactttagtgaatgttgtttgtctttcctgtgaggagacaggaaacacaaccatttgtggtacatgaaacat

SEQ ID NO: 523807 - DNA, 469 bp, Homo sapiens
aactgatgagcaccttgagataaaagtagaatatacgagactgaaggcaaaatcgcatgaagcaactgaagtttttgaacagtagctaatagcataaaaattagggtgaagataatatctgaagaaaaggagatgagtgaacaaataattattgaatgcctattatgtttcaaaatatttgctgggtacatgacctttgatgcctctgtttgtttagtgaattctctttctgtagraagaactaaggctgagaaaagttaactgattttccaaggtaactcatgtagtgaatggctatgcttgtacttaaagtctggtttgtctgaatccacaatctattggttttttgatattccaggccctctccagggtgcctgagtttgttgtttcatcacagaattacacggaagagactggaaagataactcttcaaatgtcaaatcattcccctataaaaaattttgccaca

SEQ ID NO: 523808 - DNA, 623 bp, Homo sapiens
ccagcgatgtcttctctactgccttctctcctgggccctggcaacaggcttccctgtgaacctgtcaagtcttatgcactgaaagtactacaccttgaaagaaaggtgatctcctcctcagagcacagtgggaggagggcctccatgcggagaagcagccatcctcgcaactcctctccttgggaccaaagccaggctcagtacaggcttcagactctccctagagaccatcagggatcatctgccatctacccagattatggaggctccaggaatgaggttggtcttcatttgtggyctctccatcggagaggcctaagacttgtgtccctggaactaggactgtgtggagcagatgaacccctgagctgcgctggcaagtgatcctgcactatggaagagaatgggctgccccagggactgcacaggaaatgatcacagggcactgagctctgttgtaggcctggagttccccagagtgcttccttctctcatagactcaaggcaggtaacaaaacccccagtttccagagaagaaaagtgaggcgctcagaggggcaaggcctcctcacttgcatggcatgcacctcagggatgtcagatccccacacactcaccctttc

SEQ ID NO: 523809 - DNA, 339 bp, Homo sapiens
ggatctggaatcagaggcgctaagtcaagggtcaacatccctcagtgaaggggtagcagatgaggggtctcactccacttccatctgcctcgggctggggatctgaatcaccaacttgctttcatctctcctgcctttatccatcctgcttcctgtcctctctctctctctctcccaatgtcttctcttcctttctttcttcctctttttcctctcattttctttataaagagaatctacyaggtacaaggaaaatcacgaacctgctgacagctcagggattgcagttgcaattttttttctatatgtagatggatcttttcttaaatataagtgtga

SEQ ID NO: 523810 - DNA, 637 bp, Homo sapiens
cctacaaccatttctgggctgctcctctataccccttcactttcaacctatttgaaactcactcactcatcaggtcctggaccatgactttgctgctcttccaccattgctttattgttccctcttagaatgcgctttggccatatcctccagttaactcctacatactttcagacttcacttctagtttycctctgcaaaattgtcttgaatccccttctctcattcctgccttgactcttcacagtgggagattcatacctctttccacagcttgtgcattctccccatctgtcccgtcccactctactgtgggttacatgagagagggattttatttatcactgtgatcttcagtagcagaagtagtggaggtagtcatatttctttctggtcctgctgtgcttagcatagtattgagtacacagtaggagcaatggatatttttgaaataatatatgaaaaagataatttggagagtttacccagaatatgtcctagcccagggaatctcaaatccacaaagaaagggtcacatttagattcttgcagagagcaaaacaggatggcctgtggaagttctacgtttttactcccggggctcacagatcaatctagagatggagaatctttgtta

SEQ ID NO: 523811 - DNA, 572 bp, Homo sapiens
tagcactttaaggtctcattctcacacaggtttagatgagccaaaccggtggacaggagttcaccaggtaagccccaaactcttcctaggaaagctgactcacctgatgcacacaccccttcccagcctcttcctgctgtgtcaccatctgcgggaggtggtactctagtctcccctaagactcggcttgccacctgcaccagctccctgggcaaaggtcacctgtgttcttaatagagcagagaggccaggctttcagatggcaaattcactagagcatcacttctagccctaattgaggtcagggacagccattggccaaatgacacaccacatagcaggatgagcagaggtagctgacacagccacctcccgtccaaaatgtgaacgacggtccttcctttctgtaagaggccttcctgctttggctgtttttaaatccacctcctggtgacctgctggtatatcaaatcacttcctttccttttgggacagtaagagagctttaggatsgtgacgggaaataaggagatggattagaacaccaggaaagtgggcaaaatctaaggtag

SEQ ID NO: 523812 - DNA, 505 bp, Homo sapiens
ctgtcaatgcatggagagcttgctgctggtgcagcattaatcatatataggattctttcttatatctgttatctctacccaactggatatatctttagaatagttcaaagttttgttcatctttatatcctgtattcatctttatattctgatgacaccagtgtgtgcctcagtagttgtagagcaaatgaaaagagttggaggagtgcattagaatgtgtttcaatagttttattctttctttaatattattttacttggaatcattgtatataatcaactttttaatttgaattttcaagtgacttgattcttgatgtaaaaatatcattttacactcttagttatatttttcctggagtaattaatggagaactagacagttttgcattgccctcaatgtttagaataacaatcatttattcaacaaatatttgagagatttttgtatgtcaagaactggtccaagcactrgggaaacaagttctttcctcatggaagttgc

SEQ ID NO: 523813 - DNA, 452 bp, Homo sapiens
cctctcccagtccagtgattgtcaactacaattgattgcacctatgcagttcccatcacttcctccttagtaatgctgccactaccctagtgaaggccttttgcacctcttgccttggttgctgaattagccttttagctggagtgcctactataattytcttcctcttcttgttctcttacgcatggcttcatgtattttcccaaagcacaactctgttcctcttactctttttaaaaatatccagtctccaaacccctgaaccttctgttggaggccttttccatctcaacctggtgcgagtctccagtttccttctcccttatcctcatctcctgttgtatttgctgggttctctttgtcaggagcagtcttttcatcctttcagtccccttgttttagagtgcttttaagtcagcatgaaactacctgatgaactgtctttctgttta

SEQ ID NO: 523814 - DNA, 423 bp, Homo sapiens
gaccatgctgtcaggggccgctgaggacactgggtctgagggtcgtggcaaacctaagctggtttctgcaggtgaaactccacctcccgagggcaggcagtgggctgctccagccctggcccaccctcctggggtgtgggtgtctaagccccagccaggacagagaccccttgttcattcccggacctccatcacrcaacagcccgggccaccagccgcgctcacaaacctcagcccctccgggatgcggggcagcagtaaatgtatctggctctcaggtgtcgcaggccctgctcccttatcctgcccggagggcactgaggtctgggaggtgacaaggaaaactgctgggggccccggaagcagcgagtctcagccccaccccacgctacgcggagctgcagagcctctgccttcaaagca

SEQ ID NO: 523815 - DNA, 618 bp, Homo sapiens
ctgaatcaggagctacaccaaaattcctgagatagctttttaaaaatctaaaataaaagaagaaagtgttactgcagacagaggtgaaagaagccttgatacaggagggacaaaatccctggacggagggagctgagggcatgaaataatgaaacaaaacttgaaatacccaaagcaggatatgtgcatcagaattmttgttctttcttctaattgtttagggctgcaaatatttgatgtggttttgcttgacttaagatacatggtaattctttaaacagatatataataaacaacctagatgattatcatgtaggaaaggaacggttagttagcataatatatttgggagttgctcctttttgcgtgattagaaaactcttctggacgatgtaccccaggcatcaaggagtggtacagtacctcatcatggcttattgcttaagcatgctgcaggcaactactatatcagcatttaatggctcaaaacaataagatatgtttgtaagacacagaacattattcagcagtgcttctctattaccaatagatagattattgcttgagcttcaagttttcaataagtaagaagcatttttactaattaaaattgtgaaa

SEQ ID NO: 523816 - DNA, 618 bp, Homo sapiens
ctgaatcaggagctacaccaaaattcctgagatagctttttaaaaatctaaaataaaagaagaaagtgttactgcagacagaggtgaaagaagccttgatacaggagggacaaaatccctggacggagggagctgagggcatgaaataatgaaacaaaacttgaaatacccaaagcaggatatgtgcatcagaattattgttctttcttctaattgtttagggctgcaaatatttgatgtggttttgcttgacttaagatacatggtaattctttaaacagatatataataaacaacctagatgattatcatgtaggaaaggaacggttagttagcataatatatttgggagttgctcctttttgcgtgattagaaaactcttctggacgatgtaccccaggcatcaaggagtggtacagtacctcatcatggcttattgcttaagcatgctgcaggcaactactatatcagcatttaatggctcaaaacaataagatatgttygtaagacacagaacattattcagcagtgcttctctattaccaatagatagattattgcttgagcttcaagttttcaataagtaagaagcatttttactaattaaaattgtgaaa

SEQ ID NO: 523817 - DNA, 468 bp, Homo sapiens
ttcattctggagtgcctagctaagtttataaatcatatctttatacctgttgtaccaaactattcaattgaaaagtggtaaagatataacatggaaaaaaaatctttacaaagatttatgtctttcttgctctaatctatttatacatatagttaaaagcccattactaaaaaaattaaaatagatcaaaattctgtagatatgacaaagtaaattctgccccaaagaaaatgtcagcaaaaagctatattcagcttttaaaaaccatatgcatgttatccttaacatctcatttcgattttgtrtggtttatgtggcttcatgtactaataatctcacttacaaagaaatgtaagtggaatcaatattttcacaaatggttttgccaggtgtgttattcagggttttctatagagaaagaactgatagtatatatgtagataaagatatatgatagggaattaatta

SEQ ID NO: 523818 - DNA, 651 bp, Homo sapiens
ctggttttctgaggtccctctagtaagctgacatcactcaaaaaaaaaaagggaacaaaaacaggatttttcttcttcacaaataccctaaggggcctctccagctttcttgtttttttcaaaaaatacttcttcacagtctaatgtggttaaaaaataaagctctagagtaagacttcatgagcctataatattgcttagctgccgaagcagagttgtatcatgttgaacaagattcttaacacatttaatcttcttcctagatataaaatatggttaagggtatccaggtcayagggtcatcatccgtaggctaattgtataccttcagtaagaatccaaatgacgtccatagtacagtgtctggcatatagtgagagaccaatgcatgtggttttgtttttctttattttgttaattttctgtccttgttggtgttacagttgctgaactctaatctgcctaagtacccacccctggcatgtcactaacctcgttcaagtatccctcctgccagaagatgatctctggcccatcagtcagatctggaaaccctatttctgtgctccattaggatgacatattccccctcagccattatttttatgtactcattactcttctgtgaggattaaagatttttgctggaag

SEQ ID NO: 523819 - DNA, 637 bp, Homo sapiens
ttgaattgaacaccagttgcactcaggaataacctgctcaatataacattgtttatggaattccttctcatccctatttactaggaagtaaaatrttgcttcctagctttcttactgttgctttctgggatcacttccccagaagacttttgcttacacgctggtctcagggtctgcctctgaggaagcacaacctaagaccaaatgacccatgagtcaatttgcgttcaccctggggacatgcaccaaactttggagaccacttttctattacataaagtctgtatgtcctggactatagcacaaaagaacctcataatctggccctttcctactatgtgttattctttgtcaccctctctcctcacccacagtgaggtcacactgaatatctaaccactcgtaaaagtttcttcctcatttactattttaattcattgcatcattctatgatctgtcttctatatcagctcacaaatttattggaggtacaggtcatcttttgtgcctggaaccaaatatattttcaaataggtgaaagagaagaatgaacaaatagattaatggatcaatgaattaaagtacatctcaaacaccatctaaatagaattaactcatgaaaaaaaaaactttttca

SEQ ID NO: 523820 - DNA, 637 bp, Homo sapiens
ttgaattgaacaccagttgcactcaggaataacctgctcaatataacattgtttatggaattccttctcatccctatttactaggaagtaaaatattgcttcctagctttcttactgttgctttctgggatcacttccccagaagacttttgcttacacgctggtctcagggtctgcctctgaggaagcacaacctaagaccaaatgacccatgagtcaatttgcgttcaccctggggacatgcaccaaactttggagaccacttttctattacataaagtctgtatgtcctggactatagcacaaaagaacctcataatctggccctttcctactaygtgttattctttgtcaccctctctcctcacccacagtgaggtcacactgaatatctaaccactcgtaaaagtttcttcctcatttactattttaattcattgcatcattctatgatctgtcttctatatcagctcacaaatttattggaggtacaggtcatcttttgtgcctggaaccaaatatattttcaaataggtgaaagagaagaatgaacaaatagattaatggatcaatgaattaaagtacatctcaaacaccatctaaatagaattaactcatgaaaaaaaaaactttttca

SEQ ID NO: 523821 - DNA, 637 bp, Homo sapiens
ttgaattgaacaccagttgcactcaggaataacctgctcaatataacattgtttatggaattccttctcatccctatttactaggaagtaaaatattgcttcctagctttcttactgttgctttctgggatcacttccccagaagacttttgcttacacgctggtctcagggtctgcctctgaggaagcacaacctaagaccaaatgacccatgagtcaatttgcgttcaccctggggacatgcaccaaactttggagaccacttttctattacataaagtctgtatgtcctggactatagcacaaaagaacctcataatctggccctttcctactatgtgttattctttgtcaccctctctcctcacccacagtgaggtcacamtgaatatctaaccactcgtaaaagtttcttcctcatttactattttaattcattgcatcattctatgatctgtcttctatatcagctcacaaatttattggaggtacaggtcatcttttgtgcctggaaccaaatatattttcaaataggtgaaagagaagaatgaacaaatagattaatggatcaatgaattaaagtacatctcaaacaccatctaaatagaattaactcatgaaaaaaaaaactttttca

SEQ ID NO: 523822 - DNA, 637 bp, Homo sapiens
ttgaattgaacaccagttgcactcaggaataacctgctcaatataacattgtttatggaattccttctcatccctatttactaggaagtaaaatattgcttcctagctttcttactgttgctttctgggatcacttccccagaagacttttgcttacacgctggtctcagggtctgcctctgaggaagcacaacctaagaccaaatgacccatgagtcaatttgcgttcaccctggggacatgcaccaaactttggagaccacttttctattacataaagtctgtatgtcctggactatagcacaaaagaacctcataatctggccctttcctactatgtgttattctttgtcaccctctctcctcacccacagtgaggtcacactgaatatctaaccactcgtaaaagtttcttcctcatttactattttaattcattgcatcattctatgatctstcttctatatcagctcacaaatttattggaggtacaggtcatcttttgtgcctggaaccaaatatattttcaaataggtgaaagagaagaatgaacaaatagattaatggatcaatgaattaaagtacatctcaaacaccatctaaatagaattaactcatgaaaaaaaaaactttttca

SEQ ID NO: 523823 - DNA, 596 bp, Homo sapiens
gttcaattgaatgatctcagtacttaggaaaagctattaaacctgttacttactcaaatgagaaattcccataatttattgttcttatatttgacttacttctttttgctcctttaaattaactctggaattattatttctattattattgttgttgttgaagccaattaccatggaagtttgactccatgcaatacagtacgtgagtgctaagaaatgcccaaggctgctgtcaatcaaattaactggtgmgttacaagttgtttactgtactggaaaatgaagtgataaatgcgtgccaaccagtaaaatgtgacatttagtactggatataccaactttttaaattcatctaccagtgtgccaaaacatagttttaactgaacctccattatcagaggaagtgtataacatttagctctttaagtactgatgactatgtagttcaaaacttccacagcctgtgcatgtgggtggggagctgacttgcttccatctaacccgtttttgttctttttatgattgttggtcaatcactataagcttccacatgttcctttgattcaatcgaattatttgaatgactcatggttggc

SEQ ID NO: 523824 - DNA, 593 bp, Homo sapiens
ggtggcaaataataaatgacacaatacagcactttctatgtgtacacttcttggtcttatgctttttgttaatacttcattatactaaaataatttatcacactttattattgaatgtttaaaacaagtgtttttatatgctagtgtttaacatttatattaaggaacttacgtacaagttttatagacataatattatttccttctacttgactactatacacatatcgtcatttatttaggataaaatggatgttcttattctctagaaacttaaaatccagtacragaaaattttacaagtcacagatgactaaagtacaaaattaaaacctcaaaaaaatctgaggcatcatttttccccctttcattgtcttgttaataaatgaggtattgtttagggtcttgccaatagtcagagaataggcagaaaagtatgacacaagcataatagaagatgatttctcatttacataagaaatcaaagcaggtcaatatactgcatttagagattcaaagatctctgaatgcaagatgaagatatttttcatcttatggatccaccatcccttaagacctcatcatttggatct

SEQ ID NO: 523825 - DNA, 494 bp, Homo sapiens
ctgtaaatgccattgctgcccatttccccgaagccccagttctgcttgtggcaccggctcactcatcgcttattcatttatgaggccctcaggaggcagaataagcagactttcatataccagttttaaggttttgctgcattcaaacatttactaatgttacatttggaaatgtgtatttgttagctgctggtagtccttggtggtcttattacaagtgtcattaaagcatcataatatttggaggaatcgctctgcttcaagatattcaggttcattaatgaacattatccatctgacacatttggtaaacaccagagcttcagagaacagctcatcagggataagctgggccctctaggctcacttggagaagctcatgaactcactactgttcaccctcattaggcttgagatrcagagaaaaaaaaatactgaaaactgccaatatttgtaagttagaatttagagtctaatgtctttttttgtcattt

SEQ ID NO: 523826 - DNA, 492 bp, Homo sapiens
aggctcctggaagggggatgagagccccagaccattcagccttagctcagccttgaaaatagctgcttgcttcctggcccagggaaacggacatgctgcccggaggataggagagttggctgatggcgagtgagcgtgggttagtcgatgctagtgtttgtttacatgcctgggttacctggaagatcatgacacatgcagtcacttggttgttttgagaacrggccagagtgacaaagtgttcagttgccactgtggtcaagccataggaaatgagggtattcctagctgtgcctgtcttctaggccccaccacccctcctcagcctgctgggaagctcccaaagccaaaagaaagtctcggtggaagtctcactggccaggagagttgggacaagtttttatttctttttcttgatgaccttaggagaatttgaggactgaaaccctaaaatagtccctgagaaccagaaagtgtgagctggaaaggtag

SEQ ID NO: 523827 - DNA, 492 bp, Homo sapiens
aggctcctggaagggggatgagagccccagaccattcagccttagctcagccttgaaaatagctgcttgcttcctggcccagggaaacggacatgctgcccggaggataggagagttggctgatggcgagtgagcgtgggttagtcgatgctagtgtttgtttacatgcctgggttacctggaagatcatgacacatgcagtcacttggttgttttgagaacgggccagagtgacaaagtgttcagttgccactgtggtcaagccataggaaatgagggtattcctagctgtgcctgtcttctaggccccaccacccctcctcagcctgctgggaagctcccaaagccaaaagaaagtctcggtggaagtctcactggccaggagagttgggacaagtttttatttctttttcttgatgaccttaggagaatttgaggactgaaaycctaaaatagtccctgagaaccagaaagtgtgagctggaaaggtag

SEQ ID NO: 523828 - DNA, 620 bp, Homo sapiens
tccctctgtaggctgcatcattttacatgcccagcagtagtgtgtgagagtgccttttgccccrtagtctcaccaatccatatattgtcaattttttgtgctttttttttttttttgctagtcttataggtgagaaatgctacctcagtatagttttaatttgcatttttcttacactgaaattagagcatcttctcatatgtttaaggtcatttgcatttttttctctgcaaactggctgaagccccgctctatgttagggatagtccttttcctataacataacttgtaaatctttttttcatagcatatcatttgtttttttactttgcttatagcattatttccatgtaaaacgtctttttaattcatatgaccagatttttcaatcttcttttcccctaccttctggattttaagtcagttttttttcactcttaggttatagagaaattcacccattcttctactgcttgtgtgttttgtttttctcagaagatgctctaatccatgtggaaattatcccagaatgtagagaaatagattcaattttatttttttccatatgtttagttatcttgataccatttactaaaaagaacatcttttcccactaatgt

SEQ ID NO: 523829 - DNA, 620 bp, Homo sapiens
tccctctgtaggctgcatcattttacatgcccagcagtagtgtgtgagagtgccttttgccccatagtctcaccaatccatatattgtcaaytttttgtgctttttttttttttttgctagtcttataggtgagaaatgctacctcagtatagttttaatttgcatttttcttacactgaaattagagcatcttctcatatgtttaaggtcatttgcatttttttctctgcaaactggctgaagccccgctctatgttagggatagtccttttcctataacataacttgtaaatctttttttcatagcatatcatttgtttttttactttgcttatagcattatttccatgtaaaacgtctttttaattcatatgaccagatttttcaatcttcttttcccctaccttctggattttaagtcagttttttttcactcttaggttatagagaaattcacccattcttctactgcttgtgtgttttgtttttctcagaagatgctctaatccatgtggaaattatcccagaatgtagagaaatagattcaattttatttttttccatatgtttagttatcttgataccatttactaaaaagaacatcttttcccactaatgt

SEQ ID NO: 523830 - DNA, 634 bp, Homo sapiens
agaaatgtgttttctgaaaggaaagtatacccaaaacatcaagactgagagaaaaaaattgaaagcatttcatatttaatgtccctaaagaagcatcgtagggaatattaaactcaaaactttgctgggctttacctgtgttgagtatttttatcattttgacttacacacagaaggagaatcattctcttgagtgtttagcacctataaaggcgtgattcggctctgcctccaggaaggctgagacatcatatcccagagagtcctgggtgatcacagggaaatggctgaatatgaatttgttgggtcctggccatcataaaggcaaaagaagctatagccaagggatcccaggcaaacccctacctgtgtcatgcctgtcactagttctgttttctggggcttccacgtctctatctccccatcaccactctcctgcccctcgcctccctgactgcgccatggtttcattccaaggctaaatatttaatacgaagaacactctgcccaagktagaaggagagaagaaataagagaaactcctatgagaatgtgtgtatgatattaggctatccctgactcttcttgtaaaataatggtgtcaatttcagctgaatcatctagaaagagatgt

SEQ ID NO: 523831 - DNA, 528 bp, Homo sapiens
aaaaaaatcatcctaaagattagagatttctgatcctgctacatggcatgactagctagtccttcaagttaaaaaatatatccattggtgataaagaaacatattgaatattattgtcccctgagcctcttaccatgatatactcagctgtatgtgaaaggattttgagaaaacagagcctagcaaggggtctcatgccaatgggtcctgccaaggaggagggtcttctgtatttccagggagcagctatagacatggagcttaatgactgcctargtgttcaaactgccaaggcacacttcattccaaatatgaagatattcacaatgtacctttcaaatatttagaaaatatttctaacaggtactttgtaatttttaatggcaaaaagttagagtttagattgtgactgttcataactgccatcacttgcccccaaactttacaaatcagttcagtgttactttacatggttaaaggtctagtttgtatggctgatataatacatgctatgtaaataaatatggt

SEQ ID NO: 523832 - DNA, 528 bp, Homo sapiens
aaaaaaatcatcctaaagattagagatttctgatcctgctacatggcatgactagctagtccttcaagttaaaaaatatatccattggtgataaagaaacatattgaatattattgtcccctgagcctcttaccatgatatactcagctgtatgtgaaaggattttgagaaaacagagcctagcaaggggtctcatgccaatgggtcctgccaaggaggagggtcttctgtatttccagggagcagctatagacatggagcttaatgactgcctaagtgttcaaactgccaaggcacacttcattccaaatatgaagatattcacaatgtacctttcaaatatttagaaaatatttctaacaggtactttgtaatttttaatggcaaaaagttagagtttagattgtgactgttcataactgccatcacttgcccccaaactttacaaatcagttcagtgttactttacatggttaaaggtctagtttgtatggmtgatataatacatgctatgtaaataaatatggt

SEQ ID NO: 523833 - DNA, 642 bp, Homo sapiens
gtggctgccaccaaaaacagagacagaaacatacttgcgacgcatctgcctgcrgagaggacttcttctggtttgcacaatgggtcggtgtgtggtacctgtaaccctggcactgaggtatggtgcaaaaaaggaaaaacacgtttcctcacttcatagcttttctagggaagagagattgcaaagaatgaagtgtgatgatggctgtgaagaaggtcccaggctctgggacacaggacaagcacgactaacatagggggtcaggaaaggccgacacctgctgagcgggagttagctgggtgaagggacagttgagatacaacagcgtgctgtcagccctcacagccctcactcggtctcggtgcctcctcggcctcagcgcccactctggccacgcttgagaagcccttcagcccaccgctgcaccgtgggagcccctttctgggctggccaaggccggagccggctccctcagcttgcggggagatgtggaggaagaggcgcgggcaggaaccggggctgtaaggggcgcttgcgggccagcgcgagttccgggtgggcgtaggctcggccggccccgcactcggagcggctggcatacctgcaagccccgggcagtgaggggcttagcacctgggccag

SEQ ID NO: 523834 - DNA, 588 bp, Homo sapiens
gaggacttcttctggtttgcacaatgggtcggtgtgtggtacctgtaaccctggcactgaggtatggtgcaaaaaaggaaaaacacgtttcctcacttcatagcttttctagggaagagagattgcaaagaatgaagtgtgatgatggctgtgaagaaggtcccaggctctgggacacaggacaagcacgactaacatagggggtcaggaaaggccgacacctgctgagcgggagttagctgggtgaagggacagttgagatacaacagcgtgctgtcagccctcacagccctcactcggtctcggtgcctcctcggcctcagcgcccactctggccrcgcttgagaagcccttcagcccaccgctgcaccgtgggagcccctttctgggctggccaaggccggagccggctccctcagcttgcggggagatgtggaggaagaggcgcgggcaggaaccggggctgtaaggggcgcttgcgggccagcgcgagttccgggtgggcgtaggctcggccggccccgcactcggagcggctggcatacctgcaagccccgggcagtgaggggcttagcacctgggccagca

SEQ ID NO: 523835 - DNA, 566 bp, Homo sapiens
taactgaaagttacaaatcaaaatattcctggatttttataggagtcttttgggttgttttaagmaacttaagatataaacagaaaatgttattctgaacaaaagaatatgattttccatggataagttgttagcaaagacatttacctttgttgtgtaggatttactagaaaggaatttacctggtgtgttagcatcctaagggtgccatcacaaagtacctaaaactgagtggttcaaaacaacagttttaccatctcatggttctggaggctagagtctgaaccaaggtgttggcagaaccatgcttcctctgaaagctgtaggggaatccttccttgcctctagcagtctttggcatttcttggcttgcagctgcatcatgccaatgtctgccttccttattaaatggtgatttctttacatctctgtatcttcatgtggctctcttcctataaaaacgccagtcatattaaattagaggctgtcttcttataaggatggcagtcatattggattaggggtccaccttattccaaaatgacctcatttaacttaactaattg

SEQ ID NO: 523836 - DNA, 566 bp, Homo sapiens
taactgaaagttacaaatcaaaatattcctggatttttataggagtcttttgggttgttttaagaaacttaagatataaacagaaaatgttattctgaacaaaagaatatgattttccatggataagttgttagcaaagacatttacctttgttgtgtaggatttactagaaaggaatttacctggtgtgttagyatcctaagggtgccatcacaaagtacctaaaactgagtggttcaaaacaacagttttaccatctcatggttctggaggctagagtctgaaccaaggtgttggcagaaccatgcttcctctgaaagctgtaggggaatccttccttgcctctagcagtctttggcatttcttggcttgcagctgcatcatgccaatgtctgccttccttattaaatggtgatttctttacatctctgtatcttcatgtggctctcttcctataaaaacgccagtcatattaaattagaggctgtcttcttataaggatggcagtcatattggattaggggtccaccttattccaaaatgacctcatttaacttaactaattg

SEQ ID NO: 523837 - DNA, 636 bp, Homo sapiens
tgtgttatagaattttatattaraataataataacagtagtcatttttattttttgtcttctcaaattcttcggttatacttccagcaccaatggaccttaaatttatctcacttgatttttagcaaagctttgagcgattcctttgcatattcattttgccaaaggaatactcaccaaatggatcctgagtagattattttgatatattcaggttgtctcctcccatttaaaaatatacctttttgtatttttccaatatcattgcaattataatgctctaaagatggtggtgtggaagtggagtggagaaatatgcttcttgggcttgttctccagcttgattttgtttaactatctcttacaattattcataaaacaatttaagtaacatgtcataagtcacatgacttctaagatttttttcttcttaaattttttcttttttgcttttattagtattactatagacatgtaactgtacatatccatcaggtacaatgtgatatttgtatacatgtatatgacaaattatcaaatcagggtaaatagcatatttattaccttatttttcatttctttgtgttgggaacatttacaatccactcttctagctatttgaaaatatacaataaat

SEQ ID NO: 523838 - DNA, 664 bp, Homo sapiens
ctacacagcacacacacatacaaataagaagataaamattaaaagaactcctctgtgaaagtattatgtataatttttttcttttgtcaaaacattttttaatattatcttgtggcattttttcaataaaacataatagacatgcttaaaataaatctattttaaaatacattttttaaaaaatgcaaatattaaaaactatattcctaatcccaaagaatatagaaatagatccttaactggtcctcacttatgctccaatagatctcaaaaatacagcatctggcatgtcatacttcataaatcccatcacttttgaaagcttttttgtcccatatcttctattccaaatccattctagatcagtagcaagaaataagatcaaataaaacaacatattttggtaacattatctgaaacagtaccaaaatatgatgatttttttagaaacatgtcagttaacaccaggaagtaaacacagtagaactatttataaagaaattatatctaatattggtaaatttcaagatatttatattttaatgagctgaattgtttataagtaaaccagttagtgctagatgcagtttgcttcagttacctgaaattagaacagcaagttcattaaatatatataaatcagtggtgcagaggcactgcacca

SEQ ID NO: 523839 - DNA, 612 bp, Homo sapiens
aaatctgtcagataagctttacttatggacctaaagacagtagaaaatagcacttatagatttggtctctagtaccaagagagctgaattcaagtgctggcttcatcacatgatttatatgaccttragcctcagttttcccaattctaagttcaggatagtacttgtaaagaataaaagatacttcatttaaaacacctagcatagagtaagagcttagtaactgctggccattattaatggtagcattaggatactggcagtagtattatctaaaagaggcgggacaatataataataagagcccaaccttcttttacatcagtcagacctgtgtttgaagcaaatttccaatcctcccgttcctgtttccttcttgcatataatacacttcataaaattgctgtaatgattaaattacatgacatagacatacataaaggccctaatacaatgcctcatacattacagaagctctgaaatgtacatcattatcactggtggggatgaataacatggaatggtcagagagctttgaggaggaaagcactgacggcaccaggttcctaattcaaatggaacctcagcctatgtagaaaaccaccaaactca

SEQ ID NO: 523840 - DNA, 635 bp, Homo sapiens
gctggtgggtgtgtcttatggaaagctgcttttgccctgtccctgttttagcttgttctcaatttggccttgtgtccgagtcccacctcctgagtcaattactacctcctacctcactacctcacaggtgctcctgggactggtcttcaataagccaatcaacttttctgtaaggctagatgcttctggctgttggatgtgtgttaaagccagtgaatccaagagcattagctcatctttatgctgtaacatgagagcagatgcttgtcaaagaggccttggttttgctgcaaamccctgcagatctcagatactccaaacccattagttctgctgagttctgagaccagctagcaaagttatctttctcttaacctaggccccactcaaagctaggtgttctggggagggggttcttggtaaatgacttgtataaaaacatccaagtcaggtagataaggctgtgtctctgatcttaattcttcagctctattgaatcttggggccccgcaaagccttctgttgtacctctaccgaagttcattcaccccttcttgcctctgtttctctctgtaaaagcgtcactggcatagcagaacacacaaatcattaactcagtatagcgcatgtagttt

SEQ ID NO: 523841 - DNA, 635 bp, Homo sapiens
gctggtgggtgtgtcttatggaaagctgcttttgccctgtccctgttttagcttgttctcaatttggccttgtgtccgagtcccacctcctgagtcaattactacctcctacctcactacctcacaggtgctcctgggactggtcttcaataagccaatcaacttttctgtaaggctagatgcttctggctgttggatgtgtgttaaagccagtgaatccaagagcattagctcatctttatgctgtaacatgagagcagatgcttgtcaaagaggccttggttttgctgcaaacccctgcagatctcagatactccaaacccattagttctgctgagttctgagaccagctagcaaagttatctttctcttaacctaggccccactcaaagctaggtgttctggggagggggttcttggtaaatgacttgtataaaaacatccaagtcaggtagataaggctgtgtctctgatcttaattcttcagctctattgaatcttggggccccgcaaagccttctgttgtwcctctaccgaagttcattcaccccttcttgcctctgtttctctctgtaaaagcgtcactggcatagcagaacacacaaatcattaactcagtatagcgcatgtagttt

SEQ ID NO: 523842 - DNA, 603 bp, Homo sapiens
tctgcggctatatagggcgcgctgacaaatccctctggatggccacgcggcgctgggctgcggggcctgggtgcacttcgcgcctggctcggagggcgccgcctgcgggaggacctccgggagccgagctgcctccccgcaaacccggcccgggcccacgcgggctcagggcgccaggcggggtgcgccgaggtgcagctccccggcccyaggcttcgctggggtgggggtcgaggcctctccgcgggtggctccctccaccctgccgccccgcctcgcggctgggagttgcccgggagctgtgaattcactagaccagcattcacccagggcctgcgggggctgtgaaaggatgggaggactcggctccccaacccacctttacaaagccgaagtgtggctggtgaggtacccgacacgcacacactgcaccgtgatactgaaccatgcctgagtgtgcattttgtgcgaaatgggtcttagccatgatttccatgtggtgaacatcttttccaaaccccggattgaaacacgattatcaggtcaataacattttttctatgatttggagattgattcagatgggcaaaatcttacaaagtt

SEQ ID NO: 523843 - DNA, 575 bp, Homo sapiens
tatgctattgggtcctgtgaccctgtctcaagtaatcacagcattaacatacaagttatagctttcctttcacttgatgacataatctctttaattggtgtcgggaagcctgcatgtgaaagaaccgtggaaaacacctagagactataattttactctctccattcacagggcaaaagaaacaagccttaagaatgtagtagaaactcattacaacccataggctgtcaacacaaagccctcacatttcaaccaagggttttaggaatgatcaagtcygtttagttctaagttcggctggtgaactattaaccttttcagaaaaactggtgaatgctacatgtcacataatcttctttgagaaagctaagagggtggataatgttgtttaactgattagacataaatgtgagaagataatatttgcaaaattattaagtgtgctctctgaaagaaactactggagtgagactccctacctcttacgtttccacagccctttacataattctctttcataaattccacgtggctcatcatgcacacttgaaatggcccatttttatttggaagtt

SEQ ID NO: 523844 - DNA, 585 bp, Homo sapiens
tgctacaactgtatgataatcctctgttctcttgaaggccagggctgtatattttttttatctctggatctccaacttctagaacagtgtctggcacatatgggtgtcctgtgaatatttgttgaatgcatgtttcagtgagagtatgttgttaatatgtgggaaaccatttattttttgtgaaaatcattttgtattataaaatccttgaagtgtagaaactcacacatatagtaatgcttactaatctatttaaaaatattttaagtattatttaaaaattaataaatccaatgatctggttttaaaacaagtgtgaccatgttggatgcttcttaacaaagacgccagcmtaatctttttatagggaatcaacttaagccccatgcaggtcactttaattgtgtcctctagattaagaagatgagctattctgccctctcttgtcgttaccccttcctctctgccaggttaaaattttaatgggtatttaaatgcatatctttgaaatggtgactgaattttgaccagcaatttatggcctcgtcacagagggcataatcaagaaatcaaaatcctgtctgt

SEQ ID NO: 523845 - DNA, 585 bp, Homo sapiens
tgctacaactgtatgataatcctctgttctcttgaaggccagggctgtatattttttttatctctggatctccaacttctagaacagtgtctggcacatatgggtgtcctgtgaatatttgttgaatgcatgtttcagtgagagtatgttgttaatatgtgggaaaccatttattttttgtgaaaatcattttgtattataaaatccttgaagtgtagaaactcacacatatagtaatgcttactaatctatttaaaaatattttaagtattatttaaaaattaataaatccaatgatctggttttaaaacaagtgtgaccatgttggatgcttcttaacaaagacgccagcctaatctttttatagggaatcaacttaagccccatrcaggtcactttaattgtgtcctctagattaagaagatgagctattctgccctctcttgtcgttaccccttcctctctgccaggttaaaattttaatgggtatttaaatgcatatctttgaaatggtgactgaattttgaccagcaatttatggcctcgtcacagagggcataatcaagaaatcaaaatcctgtctgt

SEQ ID NO: 523846 - DNA, 570 bp, Homo sapiens
gtttcaatctgtggcttgggagaagggtatgagaagctcttctgccttccttctgttccaaagatggctgtttcagacattcttcagtgattcctttggccagtgctaattcctcaatttttagagggaggggctgagcagatctgtctgactcaggttcaagatccttctgggctgagtagtcagccagtgtgcttttctgaaccagaggcaggacactctcctctggcactttctctgctggagattctgctttggtgtctgaaggacttgacaaaggagacaggcctcctaccaactggacagtatgctgagrtactaatagctccctggtgtcagcatctgtattaggaggagataactgaatgaggacagcgggggctgggccttccatgggctctatttcttcttcgctatggagctgtggatgaggtggtggagaagatgcttcctttgttagtaaaggtggaggagtctcctcctcgctggcagtttgctctggcagcgctacaagtgaggccttctttcgatcttcagtcagtcgaggaggggaaggagacttcgattttt

SEQ ID NO: 523847 - DNA, 391 bp, Homo sapiens
gggtatgagaagctcttctgccttccttctgttccaaagatggctgtttcagacattcttcagtgattcctttggccagtgctaattcctcaatttttagagggaggggctgagcagatctgtctgactcaggttcaagatccttctgggctgagtagtcagccagtgtgcttttctgaaccagaggcaggacactctcctctggcactttctctgctggagattctgctttggtgtctgaaggacttgacaaaggagacaggcctcctaccaactggacagtatgctgagatactaatagctccctggtgtcagcatctgtattaggaggagataactgaatgaggacagsgggggctgggccttccatgggctctatttcttcttcgct

SEQ ID NO: 523848 - DNA, 570 bp, Homo sapiens
gtttcaatctgtggcttgggagaagggtatgagaagctcttctgccttccttctgttccaaagatggctgtttcagacattcttcagtgattcctttggccagtgctaattcctcaatttttagagggaggggctgagcagatctgtctgactcaggttcaagatccttctgggctgagtagtcagccagtgtgcttttctgaaccagaggcaggacactctcctctggcactttctctgctggagattctgctttggtgtctgaaggacttgacaaaggagacaggcctcctaccaactggacagtatgctgagatactaatagctccctggtgtcagcatctgtattaggaggagataactgaatgaggacagcrggggctgggccttccatgggctctatttcttcttcgctatggagctgtggatgaggtggtggagaagatgcttcctttgttagtaaaggtggaggagtctcctcctcgctggcagtttgctctggcagcgctacaagtgaggccttctttcgatcttcagtcagtcgaggaggggaaggagacttcgattttt

SEQ ID NO: 523849 - DNA, 520 bp, Homo sapiens
tatccccacagttgtcagaaaaaagcttttgtgagaccagcctgggcaactaaaatacaaaaatacaaaaaataagccaggcatggtggtgcatgcctgtwatcccagctactcgggaggctgaggtgggagatcacttgagcctgggaagtcgaagctgcagtgagccatgatcacaccactgcactccagcctgggcaatgggagtgagaccctgtctcaagaaagaaaaaaaaaaaaaagaagtttttgggtacagagttgatcccaaagactgtggtcactttaaagaaggtttctcaacctcttcactattggcattttgagctggataattctttgttatgggggctgtcgtgtgcactgcaggatgtttagcagaacacccactagatgtcagtagcattctccttcccctgcccccggccacccaccagttgtaataatcacaaacgtctccagatgtttccaaatgtctcctgagggtaaaatcaccccaggttgagaactactgccctag

SEQ ID NO: 523850 - DNA, 596 bp, Homo sapiens
ctggttcttctcttctccccatctctactctctgacagtggagcctgggttttttatggatacagcatggggggcagggaggaacatgggtggtttttgaaaaggcaaccattggagcaggaaaacaggaatacatgtcctcaatttgtgctacagttctaggcttgagsgtgggctttgccaggtaccccactttttcctgtctagaattttcctgccttctgtcccaaacaatagtaactgatataaaccatatttatgtaatactgtcagaccatacaccatatatacctttaaacaaaaacaaaattacaaatttgctaaaaagaaaagggaaacaaaacacaaccttaatggacaaaataagcatcatcattagatttagatataacatggattttggaatgatcagacagggagtttcaaataaccatgtttaatattatgacagtaatgggaaaagtagaaaaaatacaagaagaaattcatgattttagcagagaaacagaaattttaaagaagaatcaaaaggaaatgctataaattaaaagtaacagaaatgaaaacacctttgatttgctctctggtagaatgac

SEQ ID NO: 523851 - DNA, 612 bp, Homo sapiens
ttgattcttcacaactgatgagctttgatggattttgtgaagggaaaaatactatatactttaaacctaatgccatgaaatcatatctctatgaactaaaacttagagccttttcaagtggacttgtaaaaatcraagagaaaaatgcaaagtttcccaactacataatgtttaataaagcatgtgataaaataattcattcaaaatctagcagaaggatctgcttttaaatgtaagaaaaggccacttttagaataatttgaaaatgagtaaatccataatgtggcttgtttggtagagttttaggaatgtatgagtgagtaaaagcatttggaattcaaaatcctgcaagtcattattatggattctgcttttggcctagctagtactctgtactctatattaaagttacttgggaaaggcaactatgcaaattatcctatttaatttatctccaggcagaaatctgcagaaacttggaaaccctgaagaaaattgttgaaggttactcttgctcagatgacctcaaaattgaaacatagatttgtgatgctttttttgttgacatggacagcaaataaatgcggcagaccttgccaaaaatgacctcac

SEQ ID NO: 523852 - DNA, 612 bp, Homo sapiens
ttgattcttcacaactgatgagctttgatggattttgtgaagggaaaaatactatatactttaaacctaatgccatgaaatcatatctctatgaactaaaacttagagccttttcaagtggacttgtaaaaatcgaagagaaaaatgcaaagtttcccaactacataatgtttaataaagcatgtgataaaataattcattcaaaatctagcagaaggatctgcttttaaatgtaagaaaaggccacttttagaataatttgaaaatgagtaaatccataatgtggcttgtttggtagagttttaggaatgtatgagtgagtaaaagcatttggaattcaaaatcctgcaagtcattattatggattctgcttttgrcctagctagtactctgtactctatattaaagttacttgggaaaggcaactatgcaaattatcctatttaatttatctccaggcagaaatctgcagaaacttggaaaccctgaagaaaattgttgaaggttactcttgctcagatgacctcaaaattgaaacatagatttgtgatgctttttttgttgacatggacagcaaataaatgcggcagaccttgccaaaaatgacctcac

SEQ ID NO: 523853 - DNA, 664 bp, Homo sapiens
aaagtgaaatatactaattctgaaattattcgatctggtatagaacagatcgaaggtaagaataacaagcataggcaagactataaaaaggataccaatgggaggttaattattaacactaatcttttgtaagttttagctcgaggtcaccgatatcttcacattggtactttggatgctcttctgggttgacagggtaattctgttaacttcccagtcctttactcagctataatgaatccaataatctattccagtgaccttcactaccatatgagtagaaagaagtatggtgtaaggtccctgccagtctgggcttatagagagagcaagagaaggaagtacctttaccagtactagattccttgggttgaattgagtgggcctagttcatcggattgggcctccatcagttgtttcagttcctcttagatatggcacaamaaaattatatgtttaattaaatcagaggtttcttagtctagcaaaaaacatcagtgagataaggccctccatatatcatttcaaacggactcaaacctaactttgaaggggtgtttctaacatgtagtagggatatggggaggatagtccaagggatatcaatctcctgagacagtttcctgaagtgtcttttgataatatcatttttcatttctaactt

SEQ ID NO: 523854 - DNA, 538 bp, Homo sapiens
tcaactttgttgtaatcttccaaccccttgatgtctcaatgaatatctcctgaacccccattaacaatagaagaaaatgttatcgactttcaaaatactcaatggtattaatttttattagcattaactaacaccatatacgatacaattatttcataagaaagctggtgactatcaagattttgattgaggattttcattcacttaaaggatcatttaatgactatggggcaatatatatttttaaaattatcattatacactgggatgattgttaaagtcaaatgctgcaggctatcacattcttgaattacccctgtgtatcatttcagatcctttgtaacaagagctttgattactatgggtcattatatcattaaaatttgagatcagtattacctgycattcactctgcacaaaaaggtcatatctccattgacagcttggatacccttaaatcagtttcaaagattctcttatttcagttgctttatatttaaggctctgtatggtagtcctacttatataactcttacag

SEQ ID NO: 523855 - DNA, 606 bp, Homo sapiens
tgttcctttttattcactagctagctaactttttataactacagtaacaaaaaaaaactcattaaatcaagtttttacctagaaatgccttttaaaattaaatacaaattttaattatcagtatttatttttaacttatacttaatattatctagtgttggaaattagaaatctaactggttcttccttaactgatgcctaaatcatttatgtaatgtctggaatagagtattatatagaagaagaaaatagattagtggttgcttaagggctatgaagtagagtgagargataaggaggtgataactaatgtgcatggggtttatttttgcagccataaaaagagttgtaacattgactagcatgatgactgcacatgtctatgatacactaaacattattaaattcaatgccataaataggtgttatatgatatttgaataatagctcaataaagctgtaaaaaacaaacaagaaactattttttagccatatttgaataaagaatggctacatattctccaacattttcttaagtctattttgtgctgctataacaaaatttgtgagactgggtaatttgtaaagaacagaaatttatttctt

SEQ ID NO: 523856 - DNA, 513 bp, Homo sapiens
tattgaaaatatattttaaaagcaactgaaaaaaactcaaaaaatatttgacaatatacagttgaaaaatgcatgtaactcaagtgtacaaaaaatgtaatatgcagttcataatagaggaaattaaaataactatacaaaaaaagattgatttcataatcagagaaatgcattaaaaaagaatgtagacactgacttcataccttttacatagagtaattcaaatgtatcacagatctraatgtaaaatacaaaactatcaaacttctagaagttggcaaagagtttttagacacaccaaaagcatgatccatgaaagaagaaattgtcaagttgcacttcattaaaattaaaaacttctacttcatgaaagacactgttaaaagaataaaaagacaagccacagactaagagaaaatatctgcaaaatacacatccaaaaaagaacttgtatccaaaatacagaaaaatttttcttttttttttttttttttttggagacagggtcttatt

SEQ ID NO: 523857 - DNA, 584 bp, Homo sapiens
tgacataaaagtgttaaaaaaataatttwaaaaaaagcaatcacttcgccaccaccttcctactacaggtcatcgttcagctaaagactatttaaaatcaaacaggaaaagtaatgacactatcacttcatttaaataaatttacctttaaaatacctccctacattgtccttatttttttcatttctctccagacaaatggatacagtctctgattttagaaggcagttctcccgagcccccagtgggattaatgtcacacccggagtttcttctcttccggtggctgggacacggtcagacacagaatgatgaacttggacatggactcagattaagcgggtaagagacaagagagtacccaggtgcctcagaggaagcgagtgagaggcatgaaggacccagtgccaagctaggtacgtggtgggtgaggtcagaagaccgcaaggccgagtctcccaaacgttccgcgccaaaggcacaagccaggcacacgaaactagcaggcactaactgggtcaaagctttgggcctggggaataagggaggggaccatcaattcttaccggcccagaggccagcag

SEQ ID NO: 523858 - DNA, 642 bp, Homo sapiens
agcactgacaggtctcaaataatccgtggtcacttgtgtcatctcatactctcactcacagctagctttttcctgcagaaactaagattcaagagaagtcaccatctctccagggatcagcaaacatattctgtaaagggccagagagtaaatattttagctttgcaagcccagtggtccctgttccaaatactcaaccttgatccaggagtgcaaaaacagccatggacgatacataaacgaatgggcatggctrtgttccaatagaattgtatttactaaaacatgcaggaggacaggtgtggcccacaggccatagcttgccaacccatgatttttttatccattgttacatgaccaggaagggactgagtaagaatttgaatctgagtgggcctgacgtcttggagcccgtggttgtcccaatcctcatagccttgtacaaatccacttcccatgttgatttcaagacactctttccatccgggttgtacacaactcttcccctccattattgctcatgactggctgtggtcattaattcatatatttagcacaattcaaccactagcaattcctcatgccccaggctcacgcaaatataacaggagcacaagtgttggccccaaatgcccagttcaa

SEQ ID NO: 523859 - DNA, 511 bp, Homo sapiens
ggggtgatttgtacaaagcagcctgactgtgtctaaatccctccctggggcactgtttccaaattacagtgtggcaggtttgatccctgccaccccgccccacctgcctccgcaggactttcctccatcctgggccctgtgtgatgggatgacgagcccttccatctgccccaccgtccctcccagtcctcctccctcactccttccccacctrttggatctgtctgtccatttggcatggggtgaagcaggcggtgcctacccttcagctctcaaccccaggatagtgacagcagcaagcagacaattacattctagaaccaattaattaactgaatgctcccctgccagttgcttcatatcactgtcttatcaagtctgagagcactgtctcattaggcccatttaagagatgcggaaatggcagggcaagcagatcaccaccccaggtgacaaatggcctggatacaggtggatgggatgcctactcagggcctcctgtcctatttat

SEQ ID NO: 523860 - DNA, 588 bp, Homo sapiens
aataaataaataaaatcagataagaattgaaggaaattgagatccaaaagtctataaaaagatcaatgaatccaagagttggttcttcaaaagaacaagcaagattcacagaccaccagctagctagattaatgaagaaaaaaaaaagagagagaatgtatatttaaaacttacggaatttcctttgaaccagtaatttcatcaagggactctgcatttcagtggcccaaatggcaaagatttatgcccaacaatttccactgtagtgccataaaaaatggtaaaaatataagctatgtcagcagtagggggacacttaagtacacagagaaacgctcatacaatagaatattctgcagaactgagaagtatgagtatgaggcaacasagggaaactattcctatactcctgaattcaactgggaagctacaaacaagattcataaaaaatttcacctttgggttctttgctttactgcacagctttctgttttgttttgtttagataccattaaaatagaataccttgggacaacttcctccaacaaccccaaagcagactcagcaaccaagcatcaaaaaaccaca

SEQ ID NO: 523861 - DNA, 536 bp, Homo sapiens
ctgctcctaacctgtcctagtggctaagacaggccaacgtgtcccagtgagaagcgttggctgcccaagtctagcactgcctgtggagttgcaggatgtggttggcgaaaagaacaaggcatgtagagagaggcttcccagaggcctttgcagcaaagccacaagttggcggggcggggggacaatttgctgccttcactctcttttggtaatgcagatttttaaggctaccaaaaggaaaaaaaaaaagtcattttcttccaaaatactcttccttctcatgaaagggtaagcatggaaattattaggcctaagagacaatctgctgtgccagctttgagatctcatcaggacactggacagcctgcctttagaaaagaggccgaactccttcctgagcacgccgggcagtcctttcagtcttagtaaagcgtaaatcattgggtcaaggagcaaaaacaaaacagcttttaatgcctgcttggacatcaaacccwtctcacaaaacagcactttgatgagtttcatgtacgtga

SEQ ID NO: 523862 - DNA, 506 bp, Homo sapiens
ctgatagtcagcaaaacactgaagctctgagttccatagctgtagggaactaaatgytggcaacaagtgggaagcagagcacaatcacgtgaataggaagcagatccttcccgggttgagcctccagatgaggcaccaaacttgcccagctccttgactgaagcctcgtgaaacccgaggcagaggacctagtcaagctgtgcctagtctcctgactcactgaaactgtgaaattatctgtacacagtaaattgtgttaagctactaaatttgtagttgttttttatgaagcaatagaaaacgaatgcaaggatattggtgaaagagatggaatttgctgattataggaagaggagaaaatttcaggcaaagggaatgcatatgcaaaggcaaagtagcaagaacatatatcgtttatttcaagaatggtattgattcaggcattcctagagcaacaagaagagtggcaagtggaagataagagagcaactcaaagaggagtcaaa

SEQ ID NO: 523863 - DNA, 604 bp, Homo sapiens
cttatcactgggcattggttttcccactttccataatggtatagcccttacttacatggaaaacgtagtgctatcaagtgtgtctgtgactgaatgtccaaacttttctaaataaggtccactcccagaaggaatccaggtcctcctcatggcaccataagggagatgaaggaaagagatggactggcttcaattgtttaaaactggttggttgttcatgtcattcttatttttcttgcatctctcccctccatctccaaatgcaaggcctggggagaaataatctaaatgacctgtcctatgtcacttgtctacccctcagctatatgctgagaggaggcrtttagttgacagaccctctgacaaggcacccaagagtgtccttccccaaaaagaagtcggggctggggccaaaagagaaagaaatttgtaacaaatgcccctacaagagggagggagaaacaagttctcaaagcctaagctgttgtggtgagcatttgagaagtgtgtataactccaaccttcccctgttgttaagagaacgctgcattctcctctatcccccaactttctcatcaaaatcaggttgatcccttgctgtgaa

SEQ ID NO: 523864 - DNA, 537 bp, Homo sapiens
tttaatcattttagaaggtgaaccaattcccaggtcccaaccaaaaattcattgattaataatccaaaacttgatctacattgagatatatttttattttagatatctaaattcaaaaattgccctgagctgagataatgtctctcaggtctaccacccatttttatagtggatttaagcataggtgttataaactttataatccttataatggtatgtgtcccttaccaaaatgaagcttttagagaaactgacatattagtgattcagttgaaatatttaggaggatttgattgtttttaatcaacgtttaaatmatttaacttgttaaatgtatagattttgatttgctggttatagaaatcgtgttcaaatatttagacaatttttccttcagtaggtttgtgaatagattaaacaataaataaagcacaggtgatggtgtgtggtcctctccaggtaccaaaagctcctcagactttaaggatcctaacaacagactccaactattcaccttccctatgcccatgccctggc

SEQ ID NO: 523865 - DNA, 578 bp, Homo sapiens
ctgcccctcatcttccccagaatccactgccagcttctgttcmctccttaagccttttgccccaccagttctgctcccatggcccatggtcagcggcagacagcctcaccttccacctcactgagaacacagaaactccaagcaggaccctgcccaccaccacacttacaaactcaccttcctccccatctctgcttcctcctgcctgtctcggtgggagacgagttcctcctcctgtcaaggctgctatcctcatccaccagtcttggatccagtttcctccagacatcctgtcatctgtcactctcctttctactcactccttcccttcagcagctcttaaagtttaggagctcaagtctcttaaatctaagagaagataggcatggaagtagttgtagatataggtatagttatcctcagctctatctattcctgcaggtagttggcgtcagctcatctcctccttaaagcaaaatattgtagtacaaatgtctacactctcgatttgcacacctcgtaatcaccggtgaactatggcctccactgctccacctgaactgccctcagccatggct

SEQ ID NO: 523866 - DNA, 620 bp, Homo sapiens
actggcaggtacaggaccggtggcctccacatgcacattcacactggcagcaagggtagtgcctcgaacaacaattttaaaagaataaaacagcagaactcagtggcacatgcctgtagtctcagatatataagaggctgaggctaggggatcacttgagcctaggagtttgagtccagcctargaaactcagtgaggcttcatctttttaaaaaaaaattgattagaatgttacaagaataaaacaaagaggtacagtttgcaagccacttgtgattataacataggatcataacaataccaaattagaccaggcaccatggttcatgtctgtaatcccagcatggattgcttgatctcaagagttcaagacaatcctgggcaacatggtgataccccatccccacaaaaaaattaaccaggcatgatggtaggtgcctggagtttcagctactttggggactgagacaggaggatcacttgagcctcgatggttgaagctgcagtgagccatgtttgtgccactgcattccagcctgagtgataaagcaaaaccctgtctcaaacaaaaaaactaaatcccaaaaatccaagaaaatgggggaggggggaacaaagag

SEQ ID NO: 523867 - DNA, 660 bp, Homo sapiens
tcccaagatgctgtaggattatgtctagagtcaaactagccagaagcaatgtccaaaatacaccataacactgtgcagcaaaggtcctactaccacttgtttggcccaaacattctaggcagcactggatatctgaatcatcaattatttccacaaaccctgacccctctaccagtcaccctcactagaagaattaattccacatgataatagctccctcatgttactcccttctaagtcaaattgtacacccctttatctgattaacagagtctaagtcacatgacctaaatgcaagagaaactgggaatggaagtttgtggattctaccttagtaaggcaaagttatcattgggaattcctctaatacaggaagggtgttccagagacattaaggagccatataaatggaaaatgtccactacaatccatcacttggttgccccacatcaacattcattcttttgccacacttaaagtttccaagaacaaaaattatcccactgaacataatctttacyatcttttatataaaggaaaattagacttgactcagcagaactgaaataacccagtctcaacagttactgcttttaacttcaagtactgtgtctctaggtgatacctgctccaacaatagtttggtcacattttcaattt

SEQ ID NO: 523868 - DNA, 389 bp, Homo sapiens
ctaaaggtgacaacacctctcttctccctttccacttcccattctcctaagcttctccttcaggtcctcattgccctgaatttttcttaggacttggctataacatgaagctactcaccctgtccctccctgatcacctccaactgtccagagcccatttcgaggactgacrgtccttcattcccttcacagttgaaggagaaagccagcctgaccctggctgtggggacactccccttcccatcccaattcaactttgtcccacctgggagaatgtgccgggtggctggctggggaagaacaggtgtgttgaagccgggctcagacactctgcaagaggtgaagctgagactcatggatccccaggcctgcagccacttcagagactt

SEQ ID NO: 523869 - DNA, 355 bp, Homo sapiens
ttctcctaagcttctccttcaggtcctcattgccctgaatttttcttaggacttggctataacatgaagctactcaccctgtccctccctgatcacctccaactgtccagagcccatttcgaggactgacagtccttcattcccttcacagttgaaggagaaagccagcctgaccctggctgtggggacactccccttcccatcmcaattcaactttgtcccacctgggagaatgtgccgggtggctggctggggaagaacaggtgtgttgaagccgggctcagacactctgcaagaggtgaagctgagactcatggatccccaggcctgcagccacttcagagactttgaccac

SEQ ID NO: 523870 - DNA, 593 bp, Homo sapiens
cacagcttctagtcgtgagtgtgtgtcccctctctgctgctctcttctccctgcacatagtgacctgattcccagcccaagcacccaaggatttggaaggggtktgtgtgtgtgtgtgtgtgtgtgtgtgtgtgtgtgtgtgtgtgtatggggggggagggagagagagagagagagagagaaatagagaggaattaatgaagaaaaaaaaatgaggaaaaagaagagattttccctggaaaggcaggatccatatttccagcttaagaaaagacaccaaatccttctttgccttaatcatcaaccctataccaattctgatttatctttagtaatattcagaagcactaagaacattttcaattataagcaagatataagatgtttacagcatccctggcctcttcctactagatgccagaagcaacacccccttctccaccgcaaagttgtgacaaccaaaatgtctccaggcattgctaaatgtccccaggcgagggagggaggaggaaagaaagatcactgtctttcgttgaagaccactggctctctttcgttgaagaccatggtttagatacatgatataaagaagg

SEQ ID NO: 523871 - DNA, 595 bp, Homo sapiens
cacagcttctagtcgtgagtgtgtgtcccctctctgctgctctcttctccctgcacatagtgacctgattcccagcccaagcacccaaggatttggaaggggtttgtgtgtgtgtgtgtgtgtgtgtgtgtgtgtgtgtgtgtgtgtatggggggggagggagagagagagagagagagagaaatagagaggaattaatgaagaaaaaaaaatgaggaaaaagaagagattttccctggaaaggcaggatccatatttccagcttaagaaaagacaccaaatccttctttgccttaatcatcaaccctataccaattctgatttatctttagtaatattcagaagcactaagaacattttsaattataagcaagatataagatgtttacagcatccctggcctcttcctactagatgccagaagcaacacccccttctccaccgcaaagttgtgacaaccaaaatgtctccaggcattgctaaatgtccccaggcgagggagggaggaggaaagaaagatcactgtctttcgttgaagaccactggctctctttcgttgaagaccatggtttagatacatgatataaagaaggca

SEQ ID NO: 523872 - DNA, 500 bp, Homo sapiens
atcccaactccaaatctagttataagtacaatatagtgcgaattgaagaaaaaagaatattcaaaaatgtacacatactttgattgcaacagtatggaaaactatatattttagggaaaagcggaaagaatccttcaaaaatagaggtaattttctcataattgtaacttaaagaatggcttttttatttatttattctaattttttattctccttaaaattgtttttgttttcacaaatcacaaaaaaaatgaagaaacacaaaaatgcaggagggctttctcaaacatttkcttagatgctcagcaaatggtcttattttctgtttttcccatacagagcacattccccaggaagcagggaaaccacaggacatggtaccccgtcgcctggggcagaagatagggagtgaggaggacatcctcaggatcatccagagcctgagctgggaggaactacctaggaaaagctttaaggatgccctgaggcccgtggctggg

SEQ ID NO: 523873 - DNA, 500 bp, Homo sapiens
atcccaactccaaatctagttataagtacaatatagtgcgaattgaagaaaaaagaatattcaaaaatgtacacatactttgattgcaacagtatggaaaactatatattttagggaaaagcggaaagaatccttcaaaaatagaggtaattttctcataattgtaacttaaagaatggcttttttatttatttattctaattttttattctccttaaaattgtttttgttttcacaaatcacaaaaaaaatgaagaaacacaaaaatgcaggagggctttctcaaacatttgcttagatgctcagcaaatggtcttattttctgtttttcccatacagagcacattccccaggaagcagggaaaccacaggacatggtacccsgtcgcctggggcagaagatagggagtgaggaggacatcctcaggatcatccagagcctgagctgggaggaactacctaggaaaagctttaaggatgccctgaggcccgtggctggg

SEQ ID NO: 523874 - DNA, 588 bp, Homo sapiens
gccatctcagcaccttgatttttagctctcattttaactatcaaaagaagaaatatatctcctagttttccttgcagctaagtaaataacttctgtccaaggaagtataagcagaagtgtcctgtgtgacttccaggaagtcatctctgaaaaggaggagcttgcccttcttcaatccttcctctctcctgctacctggaatgtggatgtgatggctggaactctagcagccatcttagatcatgagggtcactcctygctgatggttcagcagcaagctagaaagagcccacgttcctgaaggccatgtgtctcttgcatcagtcctgcatttcgtacttctggatctcttcaaagtgaaaaagaaataagtttctcttgtatttgagtcactgttattttgggttttcagtcacatgtggttgaacatgatcccaactgatacaccaggcaagcttgatttctaaacagagatgaagtctgagggtatttgcagacctcatatgttcccgtccctgtggcagccatgaagcctgtcttctgtaaggggacacacagatccttgtgtaccttgcttaagaacaagag

SEQ ID NO: 523875 - DNA, 588 bp, Homo sapiens
gccatctcagcaccttgatttttagctctcattttaactatcaaaagaagaaatatatctcctagttttccttgcagctaagtaaataacttctgtccaaggaagtataagcagaagtgtcctgtgtgacttccaggaagtcatctctgaaaaggaggagcttgcccttcttcaatccttcctctctcctgctacctggaatgtggatgtgatggctggaactctagcagccatcttagatcatgagggtcactccttgstgatggttcagcagcaagctagaaagagcccacgttcctgaaggccatgtgtctcttgcatcagtcctgcatttcgtacttctggatctcttcaaagtgaaaaagaaataagtttctcttgtatttgagtcactgttattttgggttttcagtcacatgtggttgaacatgatcccaactgatacaccaggcaagcttgatttctaaacagagatgaagtctgagggtatttgcagacctcatatgttcccgtccctgtggcagccatgaagcctgtcttctgtaaggggacacacagatccttgtgtaccttgcttaagaacaagag

SEQ ID NO: 523876 - DNA, 626 bp, Homo sapiens
aggccaggccctggggccctgggggagccacarcagcggggtgtgttgaagaatgcttgaaccaagagctgggcttctgtgggtggggaagggtgggaagagcatttctggcagaaaaaactgtgcacaaaggcctggggggagactagccgcacatgggggttgtgcatggcctgatgggaaggtccccgtcagcaatggaggaggtggaagctgggaggccaggcaggcccagagtggagagcctcgaatgctgtggggctcctggtctcggtcctgagggcctctgacctttccaggccggggtatgtgccataactgatgtgcacgggaaggataccccacggcagtggagggggtggattgcccagggcagggagaagcacagccggggcaatagtggggaacaggggagcccgctctctccaggtggcccctgttcagtggggaccaaggccatgacgacatggtgggagaggagctggtgaaacgcccagtgtgtgtggggagctgggtaactgtgcagataggcagcctaagggtgggcctttatgcaagcttgttctccatcactgctcccaccctcccgcactgtctttggccacgtgagtgggaccagggatgac

SEQ ID NO: 523877 - DNA, 631 bp, Homo sapiens
caggaaggatgcaggaaggagtgaaaccggggcccgtccctcctctctcatctctgtccttctcttggccagcctcactctctctccagaccaccttcttccacatggcaggaaatatgccacgggcagctccgaaggtttgtagcttgccactccatgcaaggtggctctctctctttctcagttctcattagcaacatctcagggacagggtgattggctacctaggttagatgctcacctatggaccagtaagctgtggccagaaggcaggttgtccaagaacaggctgcacctggcttaaccatggggaaggggaagggagtttctgggcacatgggagggagggctgggcagagaatagatgtctgctccrggctcccagaccaccaagcctcctatttcttctctgtgtgcaaatggctgtgcctagcgccggccaggggcccagggtgtgaagagggaagggaggtgggtggagagggtgggtgagaccagctatgggggcactgagattccagagcctgctgtgagacaggcgggctggagacttctctcagaatcctttcactgagtaaagattctctatttactcaaggtcatgcagccaataataataagccaagaactg

SEQ ID NO: 523878 - DNA, 561 bp, Homo sapiens
caaattcaggaaatttaacattgatgcaatactttaatctgttgcccrtatttcagtttttccaattatcccaataatgtcatttacagcattttttttcagttaagcatccaactgaggatcatttattgaattgagttgtcacttctgtttagagactccttcactctgaaatgtatccttagcttttgttgccttttaagacctttacgtttttagagcatgcaggccaatcatttttgtagagtgaccctcagtttaggtttgtctgatgctcctcacagtagattcatgttttgcacccgtggcaggaatgccccagagtgatgcggtggcctcctcagtcccagatatcaggaggcacatgtggcaggtttgttttattcctggtgacaccagctccaatagtttagttaagatggtggtgtccaccaagtttctctgcagtgggagaattttaagagttgtggtttgtctaaaactgagagatgaatcaaactgggagggtatttagactttgctggatgatggccccaaagctgctctgaaaatgctgtgcag

SEQ ID NO: 523879 - DNA, 420 bp, Homo sapiens
cctattaagcgcccatgagcagccaagctctgtacrtggccagggagagaaaaagcagaagccacccctaacctcatggagctttcagtctggtagcaaataaagatattaatcaaataatcacagcaccagacacataattataaatcatgttttaaaaatgcttcatgggagatgtaaaaggagccctgagaatatataacctaatctggggttccagagaaatctttcccaaggaagcggacttcgatttgagagctgaggtcgacattataccatttaggaagatggttggagctaagttttggagtgactcttgatgctaccgcaacgcacttctcagcagataccagtgatgccatacaattggagaggatgctttcataaagcgtgaggtttcctggtcacattcttggctca

SEQ ID NO: 523880 - DNA, 506 bp, Homo sapiens
agttcacctggctccaggaggcctgttcccatcaggaaaagcccctgcatccattgctgggatggtcatttcttttttctttttctttttcttttttttttttttttttttgagatgaagtctcactcccatcgcccaggctggagtgccatgctgcgatttcggctcactgcaacttccgcctccggagttcaaacgattccactgtctcagcctcccraatagctgggattacaggcgcctgccaccatgcccagctaatttttgtatttttagtagagacggggtttcaccatgttggccaggccagtctcaaactcctgagctcaagtgatccactcgcctcagcctcccaaagtgctgggattacaggcgtgagctaccacgaccacgccgggatggtcatttctaaccacctttttgggtgaacagcaggtttttcttctccatcctgaatgtttgatgtcactaggaaatggaaaaccccggggtgtgggaaaggcaca

SEQ ID NO: 523881 - DNA, 506 bp, Homo sapiens
agttcacctggctccaggaggcctgttcccatcaggaaaagcccctgcatccattgctgggatggtcatttcttttttctttttctttttcttttttttttttttttttttgagatgaagtctcactcccatcgcccaggctggagtgccatgctgcgatttcggctcactgcaacttccgcctccggagttcaaacgattccactgtctcagcctcccaaatagctgggattacaggcgcctgccaccatgcccagctaatttttgtatttttagtagagacggggtttcaccatgttggccaggccagtctcaaactcctgagctcaagtgatccactcgcctcagcctcccaaagtgctgggattacaggcgtgagctaccacgaccacgccgggatggtcatttctaaccacctttttgggtgaacagcaggtttttcttctccatcctgaatgtttgatgtcactaggaaatggaaraccccggggtgtgggaaaggcaca

SEQ ID NO: 523882 - DNA, 579 bp, Homo sapiens
ggcgtttaggtgattgacagctttttaaatattatgtcagcactgaagacattcatcttcccactctgcaggttagaagactgaggcttagtgatgtcggagggccccacagctagtgagtgaggaagccaaaatgtgaacttgatggctttttttgacttaccccatgtttgtgtgtgacagccatggctgtggcgggggtgagagtgggtacagagatgccagcttgggtttgccattgttagaagtgaagatgacacctcagtgctgcagattttgcaggaggggactggagccaagccacaracttttctctgttaggagatgggttcttggagtgggtgtggtgtctgaccatccggggagatggctgaagctggggatctgggaaggctcccagaagggaggtggcctggggaaccaggggttcagtccttccaggatggactggcttgatggtggcttttcaagctcgttctgttcccagccactgggcatcctgtccatcctggaggaggaatgcatgttccccaaggcctcagacgccagcttccgggccaagctctacgacaaccacgc

SEQ ID NO: 523883 - DNA, 561 bp, Homo sapiens
ccaagaaatgatcctgggcttcaggtcaggagtcaggccctcgagtccgcttcctgcctgcttctctctacacgtgactcaccgcggacatcgaccaagtcatcgcgctctgccactgcgcctgtgtcctcgtcaggtcactccatctatagattctgggagcctgatcaatcgtagttcctggggctttctctgcgcccgacaccaaaccatgtctaggggaaagggagggtgtctgggatacagtggtgagcagaacggcctgggatcctttatcacgaaatgcaggttacaggggaagacagcagatccatacacaaagaaacgcagtctcaaactggataagttgtgtaactggrtaggttgttgtgaaattaaataatggaagggaaagggattagtaaattgtgacatcatattctctgtcagatgaaaaccctgtcctaatttctatccaccagatagcatgttgtctctaatactcattttttcagctaacttctgtggcaggatggcactgactccccccacccaacacacacacactttttcccttcctag

SEQ ID NO: 523884 - DNA, 474 bp, Homo sapiens
ccccgtgccccaagggatggagggaaaggcccctcacttctgggagaacccccttggatgaacacagcrgccaatgagcaaacagaaccagaggagctacaggaaaatgaggcagaggggcaggcttgggggaaggcagcattctctggtacccaccacccctgcccagggctcagaagcctttgcctgggtccaaaggccagggacaagggaggcttggctcacagatggggggtgggggtcacccatatcttcctccccactctgggactgactgacagccaagaaaccggcaggagctcacacagagctaatgctaaatgtcctcttacctctgggtggccctgggccccagggttctgaaggaaaggtgggcatggtaccctgtcctcattatggggactgaggctctccatgacctagggccctcagacccagggggaccaagggcttctaggacttccctcccaccaa

SEQ ID NO: 523885 - DNA, 469 bp, Homo sapiens
ccccgacccctgcctgccacattcatcgacaaggccccttccctcagcagctctgggcctttctctttgcctacatttccacttgttttctcaaaggcaccaacacctcaacakgtccaatcacactcaagcctggccctgctgcagcagtcccaccaagcaccacggtcacacatcacacagaggcctggttaactgtgacacttcccccgacttgccatccaggcctgtcactgctgggtcctgtgttcccaggacaccagctccctttactaaaaggtatcccacaggaactgagtcatcacacggtgccaaaagtgatcttcagaatcaggactctgatcctgtcactcccggtgaaaacacttccacagcttcccactgcatttagaacagacatttcctgacttaggaggaggttatgtcctgataaacccatcgtatttgaaaatgccgttaagttgaaaac

SEQ ID NO: 523886 - DNA, 458 bp, Homo sapiens
ctcagtaagcagtcggctttgcctgtctgaagttcctgccggcccctgggaatagccacgctgtccactcttgctttagaggggcagtaggttgagaaatccattgattccaaaggtagtaaggggccarcgacttccatactcagttcctggggtggctatgagggttagaagaaagcttggggcagtgcctgccataaggaagtctggaaagacgggaggtccgactgcagtgtcacacctgctaacactgaggggacagtgggcttccaccagctccagggcctcctctcgagctgaggtcagggaccagacaaggagatcgaggccttccgaagacagcccaacaactctccttgcagggacactcttgtacttactcgtggtggtcactgaagctctgaagaagcctcaaaaactgtatcttcaaggtgatgtcctgaaacacatgcacagcc

SEQ ID NO: 523887 - DNA, 562 bp, Homo sapiens
gcagtcggctttgcctgtctgaagttcctgccggcccctgggaatagccacgctgtccactcttgctttagaggggcagtaggttgagaaatccattgattccaaaggtagtaaggggccaacgacttccatactcagttcctggggtggctatgagggttagaagaaagcttggggcagtgcctgccataaggaagtctggaaagacgggaggtccgactgcagtgtcacacctgctaacactgaggggacagtgggcttccaccagctccagggcctcctctcgagctgaggtcagggaycagacaaggagatcgaggccttccgaagacagcccaacaactctccttgcagggacactcttgtacttactcgtggtggtcactgaagctctgaagaagcctcaaaaactgtatcttcaaggtgatgtcctgaaacacatgcacagcctcaatgttaggaccacagccacaaggttccaaaataacacaagcagacactctggtgggagcctgcttctctaagcctctgtcctcatgtaccatgaggacttttctttagt

SEQ ID NO: 523888 - DNA, 356 bp, Homo sapiens
tgccagacaaaagcaaaagtgccctgtagaaatgcctccagggctgaggctacacaggtatccaagggggaaactaaccccactgacctcaagtgatctgcccgccttggcctctcaaagtgctgggattacgggtgtgagccaccatgcccgggagcacgkttctataggtggatgaaaattacaataggataaaacagcaaataaggaaaagcaggctgctagctcatgcagtgggcagccccctccctgcctggagtgaaatgagatccccatcacagagattacaaggggaagtggctagagggcctcaggcagaatttttttttttttttttttttgagacacagtctcac

SEQ ID NO: 523889 - DNA, 666 bp, Homo sapiens
tagcagtgcggggcgggtcyagaactcacctgcggactatggaggccgtgcgtgtgggctggggcagggctgtgagcacaagtcaggggtgaggccaggacggccacagagggtgtggtgtggcaagtcaagtagctccttgaggaatatcgcagggttcttctgaagactggggcctggggcctggggatgggaacttgcgtatccctcccaaaaccctacctatggggggagaatgtggtggcccatgcctgtaatcccagcactttgggagggcaaggcgggcggatcacctgacgtcagaagttcgagaccagcctggccaacatggtgaaaccccgtctgtactaaaaatacaaaaattagccggtcgtggtggcacgcgcttgtagtcctagctaccctgggaggctgaggcaggacccaggaggcggaggttgcggtgagccgagatcatgccgttgtactccagcctgggagacagagcaagactccatctcaaaaacaacaacataaaccctacctatactctctcttcagacctactcaggcctcttctgtgtcaccatcaacccctacaaatggctcccagtctatacggcctccgtagtggctgcttacaagggaaagcgccgctcagattccccgccccatatatatgcggtg

SEQ ID NO: 523890 - DNA, 621 bp, Homo sapiens
ctgctgggaactgccaccgtatcggcaggttggaaaacaaggaccagtagctaataggtatacttacttttcagtttctgtccccggatagagatcgtaggcctcataagaatttctacaagaagctataaaaaaaattagataaaatcttcaaaattaattcaaagtataacttataaaatgattttgccataaccattcatggcccatgtatctgtcacagtattacaagacccttttgttccaggaggcagttaaggttcagtaaggctcctgactgcagcaagtcaggagacccaggttctagtcccagcttggccacctacttgcccttctctggcctcagctttctcatttttgaaaagaagtattttagattaggtaatctctgggatctaaygcggctttaatttctgaaaagctgcagaacattattactatgattcttctgtttaaagaacatttgtaagtttattttaaaaggactcaaaagatacaccataaattgttaacactgatttctacaggtttgggggttatatgcatgtgttttttattttacatactttaatacaattttgcacaaactgtttaaaataagcatgtatttaaaaattcatt

SEQ ID NO: 523891 - DNA, 624 bp, Homo sapiens
tatctcccatttcaaaagttaaattcccaaaccattaagcagtagtaacagcagtagtaataataaatagctacttacatcaacacctccaaacaagtcaaaaatrtaagtatttggataagtggtttcttgggtaagtttcctctcttcagtaacaaatgccatagcctccatggagagaagaggagaaatttcctagtttttttaaaaaaaagtacatacattgttttagtaaccaacacagaccagacactaaagcatcagtttgagctttagtcccaactggagttcccatgaacacaaagacagtccccaatgaaccacacttcctagtattcaggcccctgtaaagccccttctcacactaaatctgggctggtatgacacacctcaactaacagcatgtggtagaagtgacactaggccacttccagcacaagccttaagaaagccaggctcacacctgtaatcccagcactttgggaggctaaggtgggcggattacttgaggccaggagtttgagaccagcctggccaacatggcaaaaccccatctctactaaaagtacaaaaattagccggatgtggtgctacacacctgtaatcccagctactcaggaattt

SEQ ID NO: 523892 - DNA, 575 bp, Homo sapiens
ttatgtatatttacccattgtacaaagaatggaagaaagaaaatttgaaaaattggcaggggaaaaaatgtttctccccattcctatcacagccagtcacatgacacttaggttcatttcctcgaaatcctttatccctttttttttttttttttttttgagatggagtctcactctgtcgcccaggctggagtacaatggcaccatctcagctcactgcaaccttcgcctccagggttcaagcaattcttatgcctcaacctcccaagtagctgggattacaggcatgcgccaccacacctagctaatttttgtatttttaatagagacatggcttcaccattttggccaggctggtctcgaactcctgacctcaagtgatctacccaccttggcctcctaaagtgctgggattacaggcgtgggccactgcgcctggcctatccattttcttttatagacacagatttcatttcatatcctactttttctctgaaaatgtattttgaatgctgctsatggcaagagtagttcatgcagtggatgagtttcatacgatgcatttctgcagtccc

SEQ ID NO: 523893 - DNA, 594 bp, Homo sapiens
tattcttatttttattctttttcaagatagtattggcaaaatctatcttgttattcttagcaacataaataagaagtattttgggggtaaagagcatattagaaagaagtttaaaaattttctgtcttttgttatatttgattttcaggaaaataaggtgaaaaaacatctattttcatacaatttctttggatttaattatacaaatagtcattaataaagtaagaataatgcatggtttactggataaaatttgaaggatttctgttaacactgaagccattctttaaacatgctggaatttggaagtcagattttcttcagcgtctttgataaacttgtgggttttttttttatcatgttgatttttaaagagtgtttttggatttgtatctccctttatttatagtttattgtgttaaaaccctcctaattgccactcctcatcctaaccctgggaaaaattcttgttattggttactcccattccttagggatattatataagcttttttacctactactccaagaaatctgcattatatgggcaytattatgtattatattcaataaagaaattatagggcaaggcag

SEQ ID NO: 523894 - DNA, 632 bp, Homo sapiens
ataacattatccttctcctccccagcattcataatagtttcyagtttgacttctttgtgattatttgattaatgtctgtttccttgaccacgttttcctggtccgtgagggcagggaccttgcctgattttgcttatcatcataattcttgagccctgcataggcttggtccagaagcagattccagtgagtgcttgtgtgttgtatgaacgctgtactcggaagtactacatcatgctgtcctattttatgctgataaatgaacttcaaataattttactagaaaaaacatttatttattatatgtatgcaaaataagtcttaattaggaacattaatacagatatcctaaataaaatattagcaaattatatctagtagtgagcatatcaaaataataatacagagagtaatactaagactgtttcagaccagtaaatgaaataatgactgtaacatgggaataaaatatagtttggagatttgatagaaaatgtccatataaagtcttttgtgccttgtgtctttttagtggtatatttttggttaaatataaccaaaaaacaggtatatttaaccaattttcttggttaaaaatgatcgtattctaaatatattaaagaagggatatg

SEQ ID NO: 523895 - DNA, 632 bp, Homo sapiens
ataacattatccttctcctccccagcattcataatagtttctagtttgacttctttgtgattatttgattaatgtctgtttccttgaccacgttttcctggtycgtgagggcagggaccttgcctgattttgcttatcatcataattcttgagccctgcataggcttggtccagaagcagattccagtgagtgcttgtgtgttgtatgaacgctgtactcggaagtactacatcatgctgtcctattttatgctgataaatgaacttcaaataattttactagaaaaaacatttatttattatatgtatgcaaaataagtcttaattaggaacattaatacagatatcctaaataaaatattagcaaattatatctagtagtgagcatatcaaaataataatacagagagtaatactaagactgtttcagaccagtaaatgaaataatgactgtaacatgggaataaaatatagtttggagatttgatagaaaatgtccatataaagtcttttgtgccttgtgtctttttagtggtatatttttggttaaatataaccaaaaaacaggtatatttaaccaattttcttggttaaaaatgatcgtattctaaatatattaaagaagggatatg

SEQ ID NO: 523896 - DNA, 632 bp, Homo sapiens
ataacattatccttctcctccccagcattcataatagtttctagtttgacttctttgtgattatttgattaatgtctgtttccttgaccacgttttcctggtccrtgagggcagggaccttgcctgattttgcttatcatcataattcttgagccctgcataggcttggtccagaagcagattccagtgagtgcttgtgtgttgtatgaacgctgtactcggaagtactacatcatgctgtcctattttatgctgataaatgaacttcaaataattttactagaaaaaacatttatttattatatgtatgcaaaataagtcttaattaggaacattaatacagatatcctaaataaaatattagcaaattatatctagtagtgagcatatcaaaataataatacagagagtaatactaagactgtttcagaccagtaaatgaaataatgactgtaacatgggaataaaatatagtttggagatttgatagaaaatgtccatataaagtcttttgtgccttgtgtctttttagtggtatatttttggttaaatataaccaaaaaacaggtatatttaaccaattttcttggttaaaaatgatcgtattctaaatatattaaagaagggatatg

SEQ ID NO: 523897 - DNA, 480 bp, Homo sapiens
taattaggaacattaatacagatatcctaaataaaatattagcaaattatatctagtagtgagcatatcaaaataataatacagagagtaatactaagactgtttcagaccagtaaatgaaataatgactgtaacatgggaataaaatatagtttggagatttgatagaaaatgtccatwtaaagtcttttgtgccttgtgtctttttagtggtatatttttggttaaatataaccaaaaaacaggtatatttaaccaattttcttggttaaaaatgatcgtattctaaatatattaaagaagggatatgtattaaattgtttctttgcttttctgattcaattcctctcaccgttacccccagctctcagccttccatctccccattcctttatttcttagttatggtagacttccagacttccgataacacattcctgttttttttggagagttccactaggcatttctccacatggc

SEQ ID NO: 523898 - DNA, 480 bp, Homo sapiens
taattaggaacattaatacagatatcctaaataaaatattagcaaattatatctagtagtgagcatatcaaaataataatacagagagtaatactaagactgtttcagaccagtaaatgaaataatgactgtaacatgggaataaaatatagtttggagatttgatagaaaatgtccatataaagtcttttgtgccttgtgtctttttagtggtatatttttggttaaatataaccaaaaaacaggtatatttaaccaattttcttggttaaaaatgatcgtattctaaatatattaaagaagggatatgtattaaattgtttctttgcttttctgattcaattcctctcaccgttacccccagctctcagccttccatctccccattcctttatttcttagttatggtagacttccagacttcygataacacattcctgttttttttggagagttccactaggcatttctccacatggc

SEQ ID NO: 523899 - DNA, 213 bp, Homo sapiens
gtaaatatattgtaagtaaacaagtgagaaagcttacaggagaaagagcaactgtgagagactagtatgttgtcrtttaagattttggaaggggaacagttctaagtactaggaagttccatgaaaacataagcaggggtgatttctgtgttgcagagagggtaaaataacttgcatactaggtaattgagagctattgacatgggtgttgaa

SEQ ID NO: 523900 - DNA, 597 bp, Homo sapiens
tggcttcaaaattcctggtctaggaaggctgaagtccttgtaggttttggagggcccctgtgtttagtagcctttgctcagtgctgatgtttcatgtgctgcttctgttcctccctctgctgttcattcaaatatattacacttggaaagtagttcttgtctcttcattccagcataaccttagggtccagtttttagaagtttgaatgtttacactgggttatcattattcactacagatgcatttccaagtatcacagtgaacagatgatcagmtgattctttctacattagcatagaaaagagtccccaggtgtgagaatgggtcctggtaagggttgtatgatggactttcttattttcacagaggaggtattcagtaaaatgtttctgaagatgatcttgatcagaggatggggaggaggaagagaaagaaaataaagggggtaataaattaatgaagtggctaatgaccatcatgtggctgactcaatatacactcttatccatgtaccaaatttcactgaatctaagggacttttttttcacattttttacaataaatttttacaatagtttttttcacattttaatatt

SEQ ID NO: 523901 - DNA, 597 bp, Homo sapiens
tggcttcaaaattcctggtctaggaaggctgaagtccttgtaggttttggagggcccctgtgtttagtagcctttgctcagtgctgatgtttcatgtgctgcttctgttcctccctctgctgttcattcaaatatattacacttggaaagtagttcttgtctcttcattccagcataaccttagggtccagtttttagaagtttgaatgtttacactgggttatcattattcactacagatgcatttccaagtatcacagtgaacagatgatcagctgattctttctacattagcatagaaaagagtccccaggtgtgagaatgggtcctggtaagggttgtatgatggactttcttattttcacagaggaggtattcagtaaaatgtttctgaagatgatcttgatcagaggatggggaggaggaagagaaagaaaataaagggggtaataaattaatgaagtggctaatgaccatcatgtggctgactcaatrtacactcttatccatgtaccaaatttcactgaatctaagggacttttttttcacattttttacaataaatttttacaatagtttttttcacattttaatatt

SEQ ID NO: 523902 - DNA, 544 bp, Homo sapiens
tgtcttaaagttcaagacagagttaatatattctgtctatttgcaactttcatcagaatgaagtcaccttcataacaatgacttgtagcatgagtttgtcctcatttgccatttttagctgaaattctgagtgaaaataaaggaaaataaatcactctgtccttttctttctctttttaccttacagatttggggactgcttttaaatttcacagtgacagggatgagagcaaaggagaaaatatctttttagtaatttgcaaagctaatttgagtgattagcttcatgaatgytagaagagtaaacctggaattcttagtctcactgaataattaataagtaattctgagtggaccaaactgagatgaagaatgaaaaatgagaaggcaaggagcacacagttcttagatctccctgttttatctctataagcaatacactgctttcaacatttttcagtgtctaccatttattgaatatttagaagataatgcactactatgtcatgcttagggtatctgaaagacaaagagatgtgaatcc

SEQ ID NO: 523903 - DNA, 560 bp, Homo sapiens
tttggtgcaagtgggtacaggctgaagctcctcagtgctcactcctgaagattttcagtgcctttccatttttcattagccccactgtccacatgctcttgaccattctcagagtcgggatctgaccatgactctagtgaccttcaatatatataatcataarttggtgtcctttgtcttatagttgtttcctgaagaatcgtctcaaatgtatacaaatcctggcatttaattgtgggaatggatctgctactgtgcacaaaagtgagttgcttaagaatgccttatctatttcacattggagtgctatagactgtaaatctatggacatgatcttgggaaacctctctgacctatctcagagtaatgtttttaaacacataaaatacacaggattgcaaagaaatgaaataaatagaaatacagtttcattaataaatcaaaatttaagacctgtatgaatatcattttcatctagactgtaaactccctgagatcaggaagtatgtctcgttcattgatttatcctaagtgcttaacacagtgcatagttcagtcac

SEQ ID NO: 523904 - DNA, 641 bp, Homo sapiens
cgagaaagtactgtccctaccccagggcaaggtgatttctgtgactgtgattccatcagttagtattcaaaatttgcatgagaaattgtatccctttgggtcacttatcatttttccaagccatgctgtgggagagggtttactaaatagtatcttaattattttcagaattccaattctgtgcctgtttatttccctccacctccatttccccccataattaaaggtgtatggtatttccctttctcgtttgtacccaccactcatgttactcagtctgtaagtccaacaaagaattgagcagtattcctttgatgctgagccatagagtggtgacttaactttagagaaaaaccaggaagaattgcttaggctatgaaacagtcgagttctccttcaaccccagattttttccatatctctctcaaattctcaagcacagagattctcattttttccaaccatgtccagtggagagttttattatttatccaggaaagtaacattatcacatattagaggtagagatcatttctcttcaataacctgccctatggactaataaaaactttctaggtctttactgaagtcatgtartttcaaaaggtgctatagtttcacagagcttctatcagtagggt

SEQ ID NO: 523905 - DNA, 577 bp, Homo sapiens
ggcgcccaagctcaggccgtcgcccaggtccccgatggggatcctatgtcccgccgccgcgcggagctttcccaacacggcccgctggctgactggcccccgcgtgggttcgggcagtgggcgcctgtcgggcgtctttcttcctgcggcggagcaggctcttctaaggcgctggccgccagccccgcgatacggcgactgaggaggcggcgtggtcagcctgacctcagcctgcgttccgggagcctcccgcccgcgcccgctgagctgcccgcggggaccggctgcggccctactgcgcagggtcggctccaggggtsggggcgagcgctcttttttgcagggtcttcctctgagcccgcactggcccggcggccatcgaacctccggagagctcgaggcttgacttcttcatctcctcgccgggccccagaggcccaaagcccaggattctgggcgcagcctcccgccgggctgcgcagggacggtcgcccaggtcgtcaggatctctgccgtttaaccccgatgcagttctcaaaagctgcctgcaattactgtcaagtcaggtcactttagt

SEQ ID NO: 523906 - DNA, 639 bp, Homo sapiens
ctgtggctgggaggagcagcactgggatgaggagagaaatagctaaggaagtacggctgccatcggtttgggactgggcctgagttttcaccaaggtcacttcctaaaagccttcctgacaagagtgagggcagaagagcaaaaccaggagccactcccataggctgtcgtgagagtggagaagcagctatattagcaccatgtgcacccttgctttctctggcacactctccatctctgctcagattctaatccaagtgcgcatttaccttttctccatagctcatcctggcttttagggaagtgctgttctcagtcacctgtggctgctcatcagcaggcaggagttctctaggcttcctctctattttaccatttagtttgtctctgcgtgattaacccagaaaatttgcccgacattgactcagtccccggatttgaagagatagcctcatccttgaaactytgactccttattcaatacttttatctttataagtcctattttcatcttgaaatagaaactgggaagtgcctcttaatctacacctagatctcagcctttacgttgaggggttacttgaatgttctcagggttacagttacactagaagtttggtttgtatttagcattaacat

SEQ ID NO: 523907 - DNA, 614 bp, Homo sapiens
tgggttacacatagtaccccctacccgactcctcctccctgcaaacttcacatccacccacaacctcagaacgtaccttatttggaaccagggtcttcacatatataattaaggtaagaatggagatgagatcaccctggattaggtctaaacccaataagtgcatcctcgtaagcaacagaaaaagatacacacagagacccagagaaggccatgtgcagacagaggcagagactggagcaatgcagccacaagccaaggaaggccagggagaccagcaggcaccaaaagctggcggggatggcaccggcggtttctcccctgagtctccagcaggaaccaaccctgctgacaccttgatttcagacttctggcctccagaacagtgagagaacacatttctgttgtttcaagccacctggtttgcagtaattgattatgacagcctaggamactaacataagagggaagcaggcgccagctctacccctgcagggaaagtggagttgaagctgacaacaccgaggaggctgggctcaggcgggaatgaggctgagcaggaggagaggggaactgctccgtgccaagtggagaagggagggcaggcccttgca

SEQ ID NO: 523908 - DNA, 504 bp, Homo sapiens
tgtctccgggaatcgcggcagccccgccccgcccgcctgcacctgccgggagccccgccccctccgcgcgggctggcgggacgcgcgccctcggccccgccccactccctccgcccctctcactgcgggggcgcgccatttcgcgcctccgggccgctcggctgccccaggggcgcctggcaaacgtggagtcgctcggttttggaggcatgctttccaaactttctaattcacagggtctttgcacgcagcccctgccccacaacaccttggcagtctctgagacttctggggctcttctcccgggcagctcccgtgcctgtccggtcccggagttgaatagtttttgaagtaatgagacgggaacgagacttgggacgaactggagaaaaacataaccgcgaaaggaggaggcggctatcacttactggctgtgtcagaagtcgccgggracgcgttgctcccgaggccgaagggcccagagagctccagccaggcagcggg

SEQ ID NO: 523909 - DNA, 597 bp, Homo sapiens
tctcgtgttttatttttaatwtgaattttagaattaccataaagagaaaatatctctgttcagacttcaaatactaggacaataatgtcacttacttcattaagaccaggatattttaaccccagcaaaaccggcaaagaaccaacagatttgctatgtatggcctctattgatatgataagtaatgcctttttatacttgaagagtcatcaatcatcttcggcctagaaaaagtgaagaaaggaaaaaaaaggtcctgaagaaatggttaaaaagattgttcaaggcaaatatatatttaaaaaatataaggttatggagagttttactgaactccacgaacttgggaactggcaaaccatttttacttctgtataaggcacattcagggaacaaattagacatttgttgagaagctgcaagacaggttaattaactttcttttatagaacaaaaggctaccatttaatgtgaaatcctcaggaggctactctgaattgagtgattcaggcagtaagatttattccgtttgaattccattcgcgtttattgattccttcatctaagaaataaacaatcaagaaaaaaacatgaagc

SEQ ID NO: 523910 - DNA, 597 bp, Homo sapiens
tctcgtgttttatttttaatatgaattttagaattaccataaagagaaaatatctctgttcagacttcaaatactaggacaataatgtcacttacttcattaagaccaggatattttaaccccagcaaaaccggcaaagaaccaacagatttgctatgtatggyctctattgatatgataagtaatgcctttttatacttgaagagtcatcaatcatcttcggcctagaaaaagtgaagaaaggaaaaaaaaggtcctgaagaaatggttaaaaagattgttcaaggcaaatatatatttaaaaaatataaggttatggagagttttactgaactccacgaacttgggaactggcaaaccatttttacttctgtataaggcacattcagggaacaaattagacatttgttgagaagctgcaagacaggttaattaactttcttttatagaacaaaaggctaccatttaatgtgaaatcctcaggaggctactctgaattgagtgattcaggcagtaagatttattccgtttgaattccattcgcgtttattgattccttcatctaagaaataaacaatcaagaaaaaaacatgaagc

SEQ ID NO: 523911 - DNA, 597 bp, Homo sapiens
tctcgtgttttatttttaatatgaattttagaattaccataaagagaaaatatctctgttcagacttcaaatactaggacaataatgtcacttacttcattaagaccaggatattttaaccccagcaaaaccggcaaagaaccaacagatttgctatgtatggcctctattgatatgataagtaatgcctttttatacttgaagagtcatcaatcatcttcggcctagaaaaagtgaagaaaggaaaaaaaaggtcctgaagaaatggttaaaaagattgttcaaggcaaatatatatttaaaaaatataaggttatggagagttttactgaactccacgaacttgggaactggcaaaccatttttacttctgtataaggcacattcagggaacaaattagacatttgttgagaagctgcaagacaggttaattaactttcttttatagaacaaaaggctaccatttaatgtgaaatcctcaggaggctactctgaattgagtgattcaggcagtaagatttattccgtttgaattccrttcgcgtttattgattccttcatctaagaaataaacaatcaagaaaaaaacatgaagc

SEQ ID NO: 523912 - DNA, 632 bp, Homo sapiens
gtacagtattaatagtataagaatctgcttccaaatctatcccttggttcccaaatccaagcatcctggcttggggagagagagatcatacattggtggctggtttcagagcatatagtataccttgtaggaaagcatcataggctttcaaactgttgtctgtaagctaacgtcataacattctttaataagacatttcactgacttaaaagccacatgcttcagggagatagtctatatggtaggttgcagataatagttagaggctcacaawcacatttcctatcttcctggagacaaacttagattacatttctcagtatcctttgctcttaagtggaataatttgaatgagttcctgtcagtagagtatgggttaaatttaatgataatcacctctaaacctgggtcattgacagcctactccctccatgaaatcctctgagaagcccttcggtagcttcatctcctcagctgagtgcagaaaacaaattgagggagggaggcctgggatctctgaatgactgtggacagagcctttcactctgcccactattacactgtgaaaatggaaatcgaatttttaaaaattatctatgtgttctgtcatattaattatattaaacccttta

SEQ ID NO: 523913 - DNA, 595 bp, Homo sapiens
gcagggctctggctggatttgatcctattgatcctgatttggggctatgactgccaaggaaaacattcttactccccctctcaccatgttggaaaggaaagcattgaccatgtggccatgcagtgatgaagtttggggcccagctgagacagggctctcaggcaactgaatagcttcatgcagataagactaagcataccaaatgaaatttctgtggccagttagacatcccaaaacatctcttcagtgcacatccctcttgccctctttgccttctgcctagactgttgttaattgttgctgtggtttctttttaactgcatggcttagaattctaatcctgtcttcctgattctgttggagaagtcatcttagacataatagcatgaccccatttaaacccattcagtggctcttcttagcctacagcctaatttcctaaagtctggaattttgtcgttgagaagcataatttattcattcaacacttacttcctgagtactwatcttatgccaggtattgccattcttctaggtactgtggatagtccttgtaatcaaaatacagtaaaacctcacactcctgaagcttgta

SEQ ID NO: 523914 - DNA, 641 bp, Homo sapiens
cagctgattattattattattaktagtagtagtagtagtagtagtagggtctacttcatttccaccacctttttttctggggcatagtaagagttaacttctaaacaaactcacactactttgcaagcaacagcaaacacccagtgtaatactgtccttataaaatatgtctttccataatgtgacccaaagcatagagaatatttttactccagcatttcctgccattaatgttttccttttgcaatcttcacatagtgttatgagtgagttgtgtgttacaaaaagctacataaacactctcaccttgtaatctactgtaatggcattagtaaggcagctctgggtttcactcttctttcctaagtgtaacaaacacaaaatttttataccattcagcagtagaggagaaaaatatctcttaagaatgaggtgtaagaggtagacagcgctgtattgaggtggtactgccactctgacagcaactgagtatatgaagtttggcaaaattcccatcccaattggggagctaccaagtcatcacacatgcatttctgttggaatcattttatttctaccctaaatgataatagaacatatggatttggggatagcagagatgaaagccatttcttccttgt

SEQ ID NO: 523915 - DNA, 641 bp, Homo sapiens
cagctgattattattattattattagtagtagtagtagtagtagtagggtctacttcatttccaccacctttttttctggggcatrgtaagagttaacttctaaacaaactcacactactttgcaagcaacagcaaacacccagtgtaatactgtccttataaaatatgtctttccataatgtgacccaaagcatagagaatatttttactccagcatttcctgccattaatgttttccttttgcaatcttcacatagtgttatgagtgagttgtgtgttacaaaaagctacataaacactctcaccttgtaatctactgtaatggcattagtaaggcagctctgggtttcactcttctttcctaagtgtaacaaacacaaaatttttataccattcagcagtagaggagaaaaatatctcttaagaatgaggtgtaagaggtagacagcgctgtattgaggtggtactgccactctgacagcaactgagtatatgaagtttggcaaaattcccatcccaattggggagctaccaagtcatcacacatgcatttctgttggaatcattttatttctaccctaaatgataatagaacatatggatttggggatagcagagatgaaagccatttcttccttgt

SEQ ID NO: 523916 - DNA, 386 bp, Homo sapiens
ggtcaggttagagtgtgagtgccaatggctcacaggttcccaaaggcactggggcagagataaaatcgatcacaatttcagcccatgcgagaaacacttccataaatcacttggtagatgatgaaaacaaataatacgttccatgatgcrttcactcttctttgagttgtccatatgttgggttcacgtgacagcaggttgaaggtgacatgagttcagattaagccagacaccattatacatgtctgtgactgaacagccctttctctgttcttgtattcacatttcaattggtcttcttgttcacttctcaaaatattgtagtaatgtagtagaaattaaaagagcttaacatatacttgaactcagtctgctatgttgaaatg

SEQ ID NO: 523917 - DNA, 449 bp, Homo sapiens
atcatcttttgttatttgtatgaatagtggtatgagctttacaacaattctaggaggtcaggttagagtgtgagtgccaatggctcacaggttcccaaaggcactggggcagagataaaatcgatcacaatttcagcccatgcgagaaacacttccataaatcacttggtagatgatgaaaacaaataatacgttccatgatgcattcactcttctttgagytgtccatatgttgggttcacgtgacagcaggttgaaggtgacatgagttcagattaagccagacaccattatacatgtctgtgactgaacagccctttctctgttcttgtattcacatttcaattggtcttcttgttcacttctcaaaatattgtagtaatgtagtagaaattaaaagagcttaacatatacttgaactcagtctgctatgttgaaatgagatggca

SEQ ID NO: 523918 - DNA, 632 bp, Homo sapiens
aactggtggaacagaaggttagtggagttaaggctgggaagcagatgggtgatagggatggagccagcaagaaactgggagacaggataggaggatgtgcgaggcttatgtgctgtcaggcaggattcttcatagccttaggcagaattcaatctagctgggcactcaagggaggggctgctatcatcttttgttatttgtatgaatagtggtatgagctttacaacaattctaggaggtcaggttagagtgtgagtgccaatggctcacaggttcccaaaggcactggggcagagataaaatcgatcacaatttcagcccatgcgagaaacacttccataaatcacttggtagatgatgaaaacaaataatacgttccatgatgcattcactcttctttgagttgtccatatgttgggttcacgtgacagcaggttgaaggtgacatgagttcagattaagccagacaccattatacatgtctgtgactgaacagccctttctctgttcttgtattcacatttcaattggtcttcttgttcacttctcaaaatattgtagtaatgtagyagaaattaaaagagcttaacatatacttgaactcagtctgctatgttgaaatgagatggcag

SEQ ID NO: 523919 - DNA, 541 bp, Homo sapiens
tgcggtgattcctcccaggagcagtggtgatagtagcagtacttccagtagtgatttttcttcccctgctttccttgtcactccattttagtggtaaactttttgagtgctgrggttctttgttagatctcatgctctgtccctttctcagacgggcattcagtctggcatctttcatttaggggatgaaacatgacaaattatttctcagtagccgagacgaaccagctttttgttggtaattcaggggcttctgagggaacagctagtgggtgtgtggtttccatgagtcctctgaattcgatgagagtggccaatgtgtggcagcaatgagtcaagacacctgtgcacctagcgtagagaacaggtattttgctggatttgattgaagatattcttccatggcaccttatgtttatattttctatatcgattattaatgaaagataaagatctgttgacttgtctgcattccatgatagactgtaagcttcaggagggaaaggatcatgtttctttttttactcatccaacaaatgtt

SEQ ID NO: 523920 - DNA, 541 bp, Homo sapiens
tgcggtgattcctcccaggagcagtggtgatagtagcagtacttccagtagtgatttttcttcccctgctttccttgtcactccattttagtggtaaactttttgagtgctgaggttctttgttagatctcatgctctgtccctttctcagacgggcattcagtctggcatctttcatttaggggatgaaacatgacaaattatttctcagtagccgrgacgaaccagctttttgttggtaattcaggggcttctgagggaacagctagtgggtgtgtggtttccatgagtcctctgaattcgatgagagtggccaatgtgtggcagcaatgagtcaagacacctgtgcacctagcgtagagaacaggtattttgctggatttgattgaagatattcttccatggcaccttatgtttatattttctatatcgattattaatgaaagataaagatctgttgacttgtctgcattccatgatagactgtaagcttcaggagggaaaggatcatgtttctttttttactcatccaacaaatgtt

SEQ ID NO: 523921 - DNA, 582 bp, Homo sapiens
agcaatcctctcgcctcagcctttcaaagtactgggattacaggcatgggccaccatggctagcaggaaattatttttaaacaaaatttacatttggctcccaattataccactttctagctatatggccttggacactttacctatttatttagagcctcagtttctccattgggaaaagagtttccaggtagatcctccttctgtgcttcagtgttttggcttagaggtagaggtgttttggcgtgttttgtaaatccaaggagaggctctgactagagccagcaagcccagctawttctagattctgatagaatgggtttcctccttgggcatctctctcgctttcacactttaagaccctgaggttgcagggaaaatagggtgacttttgttaaagagctgcaactcggcagttgtgttggaggtcatggtgcttcgtcagaggcagcagtaatgtgtttatttatcactgcctactgaccatatgtcccctttcccttcagtttgttctgcccaaggccgttggggtccgacagagatcaacagtgtttctaccgagatgcagcagctcgtcaaaac

SEQ ID NO: 523922 - DNA, 359 bp, Homo sapiens
tgccccatgtgtcactaaggtgacatcaatcctggtatctggagccgctaatccctgggggaaggtcctgtggaggagagaaagtgctataactggacatttgggagccgagtcctggtcaccttggggctgcttctcaggggaacctgccaagtgctgtcaaatcagaacatgtcctccgcagggaaaagatcccatgaaggcaagcccagggttgtcasagggtcccaggaaccagagtagcatgaaagctctgaggaaggctgggagcagggtgaggctagctatctcacagtttgggccctgtcactcccagttcctccccagaatcggtagggcgtctctcacttccacccctg

SEQ ID NO: 523923 - DNA, 619 bp, Homo sapiens
tggatgagatcctatgaatcctcaagttcaaccttttcaccttcaagatgagaaagaggcccaggcccaccatagtgttgctacctgtccagggttacctagccagtctctggggcgttcatgttgtttccactgtcactgttcacctcaaggtgtcttctgagtccaggaatctaagaactctttgttaacctgcctatcggcacactatagggaatgacattctgggcagctcaaaacattaagaagccctttgccaagacacagatctcagggaaatgcttagctcaactgagctgaactaatctggataaatcacctgacctagaccagcctacgccatcatatggcagccaaagtctgtgaattgcacttaccatgtgactaaaaagtgcttactggcccaaaggaaaagatgttgactattkatcttggtatctaagggtacttccccaaggctcagcagagtggaacacataacttgttacctctggggttggaccttgtcaccacaatctcagtttcactcttgctactggatatataccacaaatgcacttgtaaaactgcccagactcttaaagctgaaggcacttggggaatacaaagatgaaacagg

SEQ ID NO: 523924 - DNA, 625 bp, Homo sapiens
aactaagtaacttgctcagctcacacagcttgtaagtggtagagttgggatttgaatccaggtaccttgattgcagagctcaacatatgcacccgacccctactccaggcctctctcatctcagcctcctccctgctgctggcctaagcctcttttggggctagcctgcaccatcaccgtggcaacctccagtaacccctcccattagcccacaacttgcagccaccctgtcttgttcacactttgagctctcagcccacactgttgctgagggggaccaagagggttatctcttgtcctgtgtttgcttaaacatgccaggcatcaggctactgtttttatttagagacatggtctcaccgttgcccaggctggagtgcagtagtacgatcatagctcactgtagcctctagctcccaggctcaagtaatgttcctgcctcagcctcctaattagttgggactacaggcgtgcaccatcacatgcggctgattttttaaatttttgatagagacaaggtctcactatattgcccagrctggtcttgaattcctggcctcaagcaatcctcctgtcttagcctcccaaagtgatgggattacgggaattagccactgcacccagc

SEQ ID NO: 523925 - DNA, 561 bp, Homo sapiens
cttcacctctcaataatacctaagtcaatgggtgtggctgtgttcttataagcttttatttacaaaaataggtgacagcagtgtgctgatctataacttactgtaaaaaaaagattgtagaagaagaccacatgagacaacccatgaaggtagcccgaactcttgtgctggaatgtccttgagcaggagtgcacatactmcatcacattaattccatttaactcaattgactgagcctcactacatggcactcgaatggatcgtagtttgtttttctctcaagtttcttgggaggcaatgccaccaaacatttgagaagtagcattgtgaaggaagtaagaggttgggattctggaaccatactgcttaggtcatagttctggctctgacacttaagacatatgtgacctttgcaaaattaacttaacctccctgacttaacctccctcagttgccctatctgtaaagcttgggtgacaataactgtctttctctctcaaagggttgttatggggactaaacgggtccaaatcacctgaggctttctaaagattccaaaac

SEQ ID NO: 523926 - DNA, 523 bp, Homo sapiens
gctgctgtaacaaattaccacaaacttagtggcttaaaacaacacgaatttattatcttgcagttctagagagcgtaagtctggagtgggtctcactgggctaaagtcaaggtgtcgcagggctgcatttcgtgtgaaggctttaggggagaatctgtttcctcatctttttcagcttctagaggcctcctgcagtctgcagctcagagccccttccttcctccaccttcaaagccaacaatggcattgctgcaacctctgcttcccttgtcacatcgtctctgattcttctgcttccttttccatcttttaaggatccctgtggggtaattcaggataatctccatattttgtgatcgttarccgtatggacaacaccccctttgccttgtaagatgacatatttacaggtttcagtgacgagggcaaagaagggcactcacatctttgtgggggagcatcattctgcctacgaacacctaggctactatttttttttctttttgcagggaaagatggagtt

SEQ ID NO: 523927 - DNA, 587 bp, Homo sapiens
gaatgtgctaatggagatcagagatgaggaaggtttgtataacctctagagagatctttctttagatatctacctggcatcttcaagtctatatattcttttcttcccccttccccatttgttgtccaacacccartgctctgtccaacatccaatgctggtcagtgatcaaatctgcctgctttctactactagaaggagattaaaaatcattgattcaaatcatatatttattaaatcaataaacatttattgataatcagctctgttgtaggagctggagatatagcagtgctctagggtttgttgttattattgttctgtggaatacattcatcatacacttaattgaacttgtatcattcatgaagtagtagctcaataaatgatgaagagccatggacggtaattgttgctggccactgtttttacaactgtgttgtgaatttacaataagtagcatctattctcacaacacgaactcagcaattatgaatggatttgattggaagcagtttagtgcattcttatgtttgaagtcagtctttagtcctgttgtagagattgcagaaaatttttgtgtgagg

SEQ ID NO: 523928 - DNA, 493 bp, Homo sapiens
acattctaaaatgttgtcattcattcattcattcattcaacatatgtgcattctgtgtgcagatcactatgctatgtgctaygagtaccctggtaagacaaccattttctgtgtgatttatactgtcatagtacttacaaactagtgggaaaaacaaattgatcagataatcacaatagtatttatttataaattgagatcaatgcttaaagagaaagcagggcttacaataaaatattctgacttacatgtggatctggaatcttgaaaaagtgaaacttaagctgaaatctgagtgataaggaagagtcaactagttaaggggtataggttggaagctttccaggcagggcaagcagcatgtgccaaggccttgaggaaggagggaacatggtattttcagaaagtgaaagcaggatactgtggccgcgtgtggccagtgaggggagaatagcataagaaaggcctctttgggcctggccttgaaagggtt

SEQ ID NO: 523929 - DNA, 493 bp, Homo sapiens
acattctaaaatgttgtcattcattcattcattcattcaacatatgtgcattctgtgtgcagatcactatgctatgtgctacgagtaccctggtaagacaaccattttctgtgtgatttatactgtcatagtacttacaaactagtggraaaaacaaattgatcagataatcacaatagtatttatttataaattgagatcaatgcttaaagagaaagcagggcttacaataaaatattctgacttacatgtggatctggaatcttgaaaaagtgaaacttaagctgaaatctgagtgataaggaagagtcaactagttaaggggtataggttggaagctttccaggcagggcaagcagcatgtgccaaggccttgaggaaggagggaacatggtattttcagaaagtgaaagcaggatactgtggccgcgtgtggccagtgaggggagaatagcataagaaaggcctctttgggcctggccttgaaagggtt

SEQ ID NO: 523930 - DNA, 648 bp, Homo sapiens
acttgaagtagctctactcgaatgggtattttcattttgaacatatatgtatataattaacatttttttgtccttatgtaggcagtgtttattaagatgacacaaagcattgaggaaaaatttgaagccctttcactttatagccaagtttaaaagagaatgatcaaacctaaacttttgggcaattcagcctctatttagctttgccctagccactgaatgaccttgaataactcaccaggctaatgcactcactgaatttagcttgcctttgttccaataactaaatttggatgcctgtttcgctttaagcacaagtaattacattatgtatttttaacccaccaattagttttgcatagagctaatggatctgattataacctaagaaagagattttggctatttttctccttaaatatttcatggacagagacataactggcaatactgatggaaaagaagtagaagacaagaagagtgggctaaatcagcacgatttacaaattctttgggagatattgcattacactggtacataagtctctctttaagccaatggatgatgtcatcctacagtgctattgtaagcagtcacacrtgtgtcttaaggtttgtatatgtgtgcctacaccagtgccttaactg

SEQ ID NO: 523931 - DNA, 598 bp, Homo sapiens
agcaatcagacctggtacggtagctcctccggtatcaagtggaacccgtgtttctaccctcatgctccaccgtcctctacccgtcatacgcaaaggcctctctgggtctgagttgcsagctgctctagccatcaagtccacattacagcctggaagaaggggaggaaagtagaagggcataaagggagcccctcctaattgagtcagctccctgtaagcagctctcccagaatttcaacacaacaattccactcattggccagaacatggccacacctagctgcaagggagatagggaatgtagttttaaattctgtgcaggaatatgaacagctaaaaaccaggattttgttactaagaaataagggaagaatagatgggggcggtggggggagagtagtcaatatcacagtggttttatgttcatattatttcctggctcttggggctaccatgtagaaaatcaaaacacctctttctgtttttgttatgagctatggtttcttaatttagaaatctggcttaatttagaaatcctgtttcttctgtgaagtatcatttctttatttggcaatcttgactgactcttgctttcttc

SEQ ID NO: 523932 - DNA, 462 bp, Homo sapiens
ctgggttggtgaatgtaagttatttttgtacatttatttgccttaggaatgatctgtaccacagctaatttacaactgagtgtcctttctaatataatgaaagctaaagcaaatttactaggttgtctaatgaagggaaagttctgcttaataattgacttaagttgtgaacacgttattttttgaaacatacatttcatggttttaagataytatgctataaattaatgctcaggatttataaatagcataatttactttcatttccataagaacttaatatgtaggcacatataatctcatgtagaagcagcacacaaaaatattcgagtattactcatagtacaactttgcaaccttaggtgagtcagatatgtggattgggtagatcctatggtatactgcaagttacaatatggtactcaatttaaaattcatttacacatgtggcttaatttacag

SEQ ID NO: 523933 - DNA, 462 bp, Homo sapiens
ctgggttggtgaatgtaagttatttttgtacatttatttgccttaggaatgatctgtaccacagctaatttacaactgagtgtcctttctaatataatgaaagctaaagcaaatttactaggttgtctaatgaagggaaagttctgcttaataattgacttaagttgtgaacacgttattttttgaaacatacatttcatggttttaagatactatgctataaattaatgctcaggatttataaatagcataatttactttcatttccataagaacttaatatgtaggcacatataatctcatgtagaagcagcacacaaaaatattcgagtattactcawagtacaactttgcaaccttaggtgagtcagatatgtggattgggtagatcctatggtatactgcaagttacaatatggtactcaatttaaaattcatttacacatgtggcttaatttacag

SEQ ID NO: 523934 - DNA, 507 bp, Homo sapiens
agtgggggcagaatctcccctcagagtctgtcctggactgaaagattaggggctgttactttaggaccagctcaaagaatcttctaggctttgggaatcatggctgctcgccacatccactccagggtgcttgctcagtgtccasgaggcccagggccgatactgaaaactcagccatgggcttcagaacaagacccagctgtctcaggctcttggctctggcaagcaggatgtctcactgtcacaaacccagaattttcaccaaggagaaggtgaccaggggaacaggccggagagcggcctccagtgttgatgactgtttaagagccaaaatattccagtaattgtgtgacatggggatccctggcccaaataacgctgcaaccacaggaataggctcactgccaggaaaccaggaaaccgatatttggagcaatagacagactactcttgtacagtggaaaagtccttgcagaagggaggaagatggaaggggaaagcccaaaa

SEQ ID NO: 523935 - DNA, 464 bp, Homo sapiens
tgtgtgttctcttggcctcctgctccctgggggagtctccttccattaataaccacctttaacctccctttcagcttcttcccccaaacctgggaagtccctccttccaagccacagctccctctgccccacctccttcccagccttctcatcaagaagcaatctgccttgaccatctctttgacttctcagcctgctggccctgggctcctgctcccaccttcccacccagatcaccctggtggattccatggaccagtgaccatcctcatctacttgaatgttctgctgcatctgacactgacagtgayatcccttgtcctcccttgtttactgccctggtcctcctccttcccagccatcatcacctttgtgagctctctccctctctgctcaggcttatgccgagggtctcagcgttctatgcttcatcctcttctcttgtcctctccttgccccaggac

SEQ ID NO: 523936 - DNA, 710 bp, Homo sapiens
gctgctcccatgctccctgtaccccattcttctctgtcctcatccccttgtatgccccctgcaacccatcccattccactccagctatactggtttccatggtattcctgaaagaagcctcagggactttgcttcttgctttctctgcttagagggttattcccctacatatgcatttgactgaattcctcattttcttcagaacttcccaaaagtcttctcaatgggaccttccctggccatcgctcttgaaatgtaatttccgacccatgatattccatagcccccttccctgctgtatttttctctccttagtacacaccccatctaacctgctgtggatcttacttcccaagcactcttgaatgcctgtgtcctcaactaagctccattagggcaggcttgagcatgtctcgtctacctttggaacataagatccctcagaaagtgccttttcagtgagtgagagaatgtacaaataaatatgatcatgaggaggcttgacgatgcctacatgcaagaatgtaatgtggaaacattcttcaagaggttttacaagtgaaaaaggtacacggcctggagtcaggaaaccagtgtctcagttcagtgtcaccattagttccctgggtcactttcagcaggacatattctacctacagggccccaggttagaaytggatccctctgcagtggctacctccaactttgcc

SEQ ID NO: 523937 - DNA, 377 bp, Homo sapiens
ctgctgtgacacttacctgggcaggagcaattggccccattttctcagggtctgtggctgcagagcagctccacctgcttcattttccccgggtcagggaggaccagcagcgccaaggcatttcctctgtattctatctggaggacggtgcaagccaaatcctggtcatagaggaatctgtgcatttccttttggtgcatcatggggacctggagagaagtcctctcatccacaaagaaacttkcctgcttctgggtctggtagcgactgaaagggtgcttccacttggcttaggacacaaaacccataaggccatgagaactcttttcaagagagcaactctgggtagacacacacaaaaccacagttcctcttgg

SEQ ID NO: 523938 - DNA, 634 bp, Homo sapiens
caaattacatacaaaatgaaccccatcaggctaataggacttcccaacaatacttaaataggcagaagagatatgttgtgtctttgtttttatttatttcaaataattaaaaaaaatttttttaatagtgctgaatrcctaactcaagaagttaggaagacctcaaattaatgatctaataccacatctacaggaactaggaaaacaagaacaaactaacctcaaagctagcagaagaaaataaataactaaaatcagagaggaactgaatgaaattgagaacccaaaacccattaaaaaatcaataaaaccaaaaggatagagcgctagctggattaacaagaaagaaaaaaaaaaagagagaaagagaagattcaaataaacacaaccagaagcaacaaaggtgacattacaactgatcccatggaaatacaaaagatcctcagacactattatgaacacctctattcacacaaactaggaaatctagaggaagtacacaaataaattcctggaaacacacaatctcctaagattgaatcaagaagaaattgaaatactgaacagaccaatattgtattctgaaattgaattggtaataaaaaaaactaccaaatcgaaaaggccctggacc

SEQ ID NO: 523939 - DNA, 634 bp, Homo sapiens
caaattacatacaaaatgaaccccatcaggctaataggacttcccaacaatacttaaataggcagaagagatatgttgtgtctttgtttttatttatttcaaataattaaaaaaaatttttttaatagtgctgaatacctaactcaagaagttaggaagacctcaaattaatgatctaataccacatctacaggaactaggaaaacaagaacaaactaacctcaaagctagcagaagaaaataaataactaaaatcagagaggaactgaatgaaattgagaacccaaaacccattaaaaaatcaataaaaccaaaaggatagagcgctagctggattaacaagaaagaaaaaaaaaaagagagaaagagaagattcaaataaacacaaccagaarcaacaaaggtgacattacaactgatcccatggaaatacaaaagatcctcagacactattatgaacacctctattcacacaaactaggaaatctagaggaagtacacaaataaattcctggaaacacacaatctcctaagattgaatcaagaagaaattgaaatactgaacagaccaatattgtattctgaaattgaattggtaataaaaaaaactaccaaatcgaaaaggccctggacc

SEQ ID NO: 523940 - DNA, 618 bp, Homo sapiens
tgacagcacttggctgagtccgtttctctccaacacaggacaacattgaagcagcattttatgggattagctgaggcctttcttgatattgatacaatgttcattcattttgctcctgtgctcaatccttctttcttcattcccctacaagcattgatcctgagagcacatcttaatraacctcctgcacacaagccaccttctcagagtattcttcctggggacttgacctgtggtatcttctatgtttgaatagtttcatggtacatatgggaagaatcaatgtatattttcccaagtgggacttgagctgtgcctaaattagcatcatcttctaaaataatgtaaagttcatacttgttaatttaatacattaaagaaagatatcacctttagacatttttttgtagcatgatatcttgaagtgtgaccttctcatcaagaaattataaaaaaggctactacttaaaagagtaaacagaagaacaaaagagagaaaaggagctgataatattttttttatctccacaaaatcttgattccacacatatgtaccgggccaagacagaagtgatttgatgtgatccatattcacgtttgcatagctgatgttgtctg

SEQ ID NO: 523941 - DNA, 614 bp, Homo sapiens
atatgaaaaaaatacaatacacttttcacacacatagtctttcttgtgtacttaaacaatgttatgaattgagatatgaagcctggtcattagaaagtacattcctttgtaggtaaagacattaarattgttaccttttactgcatttattttctattagctttgtcttgtcagctcttcccttgcatcccagggtatgaagtcaccattttgctccaggcatcactgtgttctatgtgacttgtgcttctgggcttgtgcagtaccatagccctgcttttcttgggtaaaatggtagcgtctgccttgaaaccatataacatgaaggcttgtcctaaaatatttctcttctttgcttgtgaggcaaccaaatgttgctcaatctagcctctgttggttccacttactcattactttggaaacgggctgttttctggtaagagtgcacattaatcttaggcaagtgatataggtaggctttgcgtccgcacccaaatcttatctagaattgtaatccccagttgtttagggagagacctggtgggaagtgcagtttcccccatgctgttcttgtgatagtgagtgagttctcatgagatctgatggcttataag

SEQ ID NO: 523942 - DNA, 614 bp, Homo sapiens
atatgaaaaaaatacaatacacttttcacacacatagtctttcttgtgtacttaaacaatgttatgaattgagatatgaagcctggtcattagaaagtacattcctttgtaggtaaagacattaaaattgttaccttttactgcatttattttctattagctytgtcttgtcagctcttcccttgcatcccagggtatgaagtcaccattttgctccaggcatcactgtgttctatgtgacttgtgcttctgggcttgtgcagtaccatagccctgcttttcttgggtaaaatggtagcgtctgccttgaaaccatataacatgaaggcttgtcctaaaatatttctcttctttgcttgtgaggcaaccaaatgttgctcaatctagcctctgttggttccacttactcattactttggaaacgggctgttttctggtaagagtgcacattaatcttaggcaagtgatataggtaggctttgcgtccgcacccaaatcttatctagaattgtaatccccagttgtttagggagagacctggtgggaagtgcagtttcccccatgctgttcttgtgatagtgagtgagttctcatgagatctgatggcttataag

SEQ ID NO: 523943 - DNA, 584 bp, Homo sapiens
tttgtgtctttttctgttcccagtgttttctggtggctaaaagaaaagaaaaagcaagcatgataaagactaattaagagttgttcctcaaatttccttgaaattagaagttgattcactgaaataattcacatttaataactcagaataagcaaaactttgaatctttttttttttcctttttaaactgacatttactggaactggtaaggcttggtttttaggtggttgcattgtgaatggtagctgaaaacataataataatgaaaaaatataaaatggtagtaaaagttaatatgctctgtgttggtaatagttaaaaattacagagaagctgaatatctgattgggtaaagaaatatttttaaggcatgaaaactattaaatatgaataataatgagtattcattacttatcagatgtaaatatttacctaygcagtctattcacacacacacaaattattactctgacttcttattgcactgccttgtaactttttctgagcacgcatagtgcttgaaaccaaaattatgtcattcttcaggatgataggtcttataaagacttatctgtcaagtagc

SEQ ID NO: 523944 - DNA, 666 bp, Homo sapiens
cttcaaaggcatcatacagggcagtgtggtggatactgtaaacccccattcatccgcaaacactattgaggaccaactatayatccaccactaaagaggtgcatttgaataaagcccaacccttgtgctccgatttatagactatagacgagtgagggaggtaggctatacttgtgttgtaggaattacaatgcaatgtgataactgcagaacaacagacttgtgaggttcccccctttgctgacccctcccactgaaatgtgagaacagatgtggtggcaatgccagagcacccccagagaagccggtcacaggcctccagcagcagttcatcatcactcagccacgatggaaatataagccaagcactagagcccctcatcctcccacactcccacagagctctttggggtgtttttctttctttcttataaaaactatagaattttcatttgtctctgggaaggaaagcctttctctggggcccctcgttcttcccctcattctctttctagtctcgtttttcttttttctcatgtctgttggtgtctctgatgtccttctcctccacggttctgacaccaccatcctctcatcatgctgccccccacccctaaatgacaccatgtaaactgccaagtcctgactacacaaaagtatttcttt

SEQ ID NO: 523945 - DNA, 417 bp, Homo sapiens
cttagatacatcttagctgtgttttattatcagagggcccctggtacctcttaaccacgaatgaagttaaaacagttaaactgtttaccccactaacgcccccatcaccacacagtagcagagaagtgtcttccaacttcatgaactgaggaaagagggaggtatgttttgataacaaggagagaagtccaacaccagactaggtcagtgctaaagagatcggcctgattaggtgctgcagtgacaggctctgagcaaaccagcagaaacagaaagacagtcagaagagatgacaaggaaggttggatctgatatgaggaatgaggtctactaaacattacctttgcctccagcagcccacatgttacatgtgtaagggaaatcctagtgggygccaatcagactcgatcagcctga

SEQ ID NO: 523946 - DNA, 627 bp, Homo sapiens
ggaatgggcagtagaaaccagcgctggggagatggaaggtaagaagaataggcggacttagggctgatgaggaagtttaaagcagaactggtagagtgcttgatgtgtttgagaaacaaatcgttgcatgtgatttagatgtgatgaatggagagtgactgaaggttggaggtagaggtaagggccaggttacacaaagcctcatagaccaggatatgatggctgtsctttatcataacctcagtgtgagaccctgtaggggctctgaacagaggggtgacatgacaccattcacatgttagaaaaatctttttactgctaggtgagtatgggttggacataggaaagagtggaagcagagactgtttaggagccagtgcacttgcagtagtaaggacaggaaagtctacaacctggatggagatggatagcagtggacaggttctataaatggaatttgagggtagaattatcaggtatggctgaaagatggaatatgcggcagtgaggggaggagggagccaatgatgactcctaggtttctagaatgagtgactgtgtgcccttcactcttcccttatttctctatagtcttttggatataatatcattatttctgttactcca

SEQ ID NO: 523947 - DNA, 604 bp, Homo sapiens
tgtcactctattcacagctattctccagctcgaacctcccttctgagtttcagacccatatttccaactgcctgctgcacatcaaatgcaatatccccttcttcatcacccccgtgctcaaaaactatgaatgcttcctaattgatgaagaaattgagagcaaagatccatgtctggtactcaaaatcctctgccacatagacaccagctcattttaggagcactgtccacagaagtggcatgacattgtgggaaagaatatgcagaaggggatgggtagcatccgcttgggttggacatgagcacattgaatatggggctgtgcctggattatccaaggaaatgaagagctgctcctctttaagaaggcttttcacaaaaatactgttcatcttagaatcagacgcatcccagtttataataggtgtctgaaggaaagtctagtggaaattggctgcttttgtctgcccaacacccctctgtcccttaagatggaaatgtgccagtcatagtttctgtctctctttccttaatggcagttccatggcataagcatgtgacccagcagggccacacaaasgcccgccagaggtgtgcatatgga

SEQ ID NO: 523948 - DNA, 663 bp, Homo sapiens
tatttttgcaccttcgtaaaaagatcaattggctatttatgtctgtactaaaggttactggttaagaactcagccactggaatttsattatctgagtttaaatcctgtttcaaccatttataggatggcgacccaacctcagtttactcattttgttccatgaagaaataagcggggagagctaatgttcaaaggccctcagtaatatgactaccctaaatctacaaatctaggtttgtggaagagctgggatttgaccccaagtcatttgactttctgtttataactaattggactttagtacactgcattttttaaatgattctttcaaatccttttcacaactttggaaaaatgcttatgcttcctcaagttgacttttcatacacttacacgtgagaaaagcaagctatttacctcttcatgggaataaaatcttactctttgtaatttctgcagaagaattttaagcccaaaatattcacttgggatttccagaatataatccttatttttgattactcatttcatgtatctcttctgtttttatttgtgtgtgtgtgtgttatcattgtctagtagcttaagataacaagctccaagtagattcggatatgcaagtgttccaaacagataaataaaattgattaataattgatacaa

SEQ ID NO: 523949 - DNA, 484 bp, Homo sapiens
acatgccattcttcctccgaggtgtttccagatggaagtgggaggccacaaaagcaacctaaagtgcttaatcttagaaacttcttcgtgccatttggagattgaatcaaagaactaacttctgactctaaacaaaacctcttaatgtgaggttttaacatcatattaatatcatcagtatccaaccctaaaagcaaaatgagaatatctgtaccaattcagtgtatcttaataatgaatacttttaagcactacctctcaattccatctttatcacctttaaaatatgccagattatttctttactttctcatctatattgtcactgtctacaagacagtgaagtattccatctaaaaggcaatcaagtaggtcaaattgaaaatgtgccatcatgtaaataagccaaaaaaaggaaaaatgaraaagagagggagaatgtgagcatgtgagtgagagagaaaggtcaagcaatttgctgaat

SEQ ID NO: 523950 - DNA, 557 bp, Homo sapiens
caagccatgaagattatccaaaaactctcaggtggaggctaggcgtggtggctcacatctgtaatcctagcactttgggaggctgaggtgggaggatcgtttgagtctaggagttcgagaccagcctgatcaacatagcgagacccccatctctcttttttttttttttttgtatttgaaatttttattttaggctgcaaaaacaaaaacaagcaaacaaacaacaaataacttgaaaataggcttgtcaaatgatgtaaattcatcctttccagggaagcggaaggtagaccatcctgcttcactgctgcttgcactctgttgggttttgatccttctttgggtcatagtctggatcattttcctcatctcctccttcttccccttcctcatctgcttcttcaccttcttcatcataatcatcaccccatctcttaaaaataataaaccaaaaattctcaggtggaaaaactatgaccttcactattgtgctgcacactacgcactggcaccgggaggaaagrgtggccagcctaccccaactgcacacctgggac

SEQ ID NO: 523951 - DNA, 557 bp, Homo sapiens
atgagtcttgatttaaagtactgaatttgaaataatagttaagcaagtagaaacacctagttatcctcagggatgtgatatcatctctcagaaaggaagaaaattgtagatgcagattggagagtatctgcacagaggtagtgactgaagctgtggaaataaataagatccctaagaggagaaaagagaaatgatcagagaaaaaagacagcatttaaaaaaatactctgcctctttcagttctatcatgttgtgtgtgttcatacatatctaagagcaaataagggagtaaacctggcagaagttagccatttaaaaattcatgtttctagcttctgcttatgycatagctaccaccggaatgatgttcttcatagtaaggacaagacaaggtatgctaatggatttttcttagtaatttcaatatgagtaagttatgtttcagaatcttttttattcaagatatttctatttcgcacaccttctttaaagtccatttctctatgatagaaacctgtaaagtgggaactatattggtgtacacaatttcatagtta

SEQ ID NO: 523952 - DNA, 664 bp, Homo sapiens
aacaagaagttataattctaggcaaccaagtatagtttttaaggaagaaatatttctgttgtggagcactgtaatttatctacttgccatattttraaataaaaaaggagaaggggaagtatgatgagcaggaggaggagtgggaggatgagggaaaaaagggaggaaaaggaagaggagaagaaggagaaagagaaagatggggagaagaaagagtaggaagaggaaggaaaggaggagaagggggagggaaggagaagaagaaataagaagaagaaggaaaagaagaaggaggaagaggaggaaacagcagcaaccttgataattttcaatccctttattctcaaactctcaccaccgtatatagcaaaaaattggcttttggtttgcacagggccatagtaatgcctttttaatcctttttatttattaattgattaaacaaatatttttgagcacttgctctatgcaaggtattgtgttcatctctgggacatctagtgaatattacacacatagtccctgccttcatgtagcaacactaaagcagacattctccttaggatgatgtgccaaatcctgaatgctaagtgctgccctgcatttttgagccaagtatttaattacctatgaaaataaattgatttctgatttacaaaacatc

SEQ ID NO: 523953 - DNA, 634 bp, Homo sapiens
tgcctcttttgcaatgtcttattgcacaaccattcccatattgtcatgccttttacactacaaaggcagaggtgaatagttgcaaccaatacaatgtggccarctaagccaaaaatatttactacctagacctttaccaaaaaaagtttgcccactcttgccttaaataatctagcacactgccttgcatggcatagaaggtcaataattagctagtaaaagaaatgatagaaaggaaacagacaacagcagaatgctcaagaaggaaactaagattgataaggaaaaaaaatgaggctcctagagctgaggtgtcatcttagaggaaaagtaagataagttaagtgtaagtacttgtaacagtgttagtcatgtggtagagataaaataagtgtttatttttaaaaggaaaaacaatagaaagagactttatgattccgatagcacccagaatccaggtgagcagttttggttgcatattcaggtatctaatggcccatggtcaggtgctccatctgtgccaggtctcaggagcctgccatgagctggatttcaaatgtagatatctgtgctgcagatgtcaaggtcttgtacggatttccagagctctctgtctctttccacctctttcttc

SEQ ID NO: 523954 - DNA, 634 bp, Homo sapiens
tgcctcttttgcaatgtcttattgcacaaccattcccatattgtcatgccttttacactacaaaggcagaggtgaatagttgcaaccaatacaatgtggccagctaagccaaaaatatttactacctagacctttaccaaaaaaagtttgcccactcttgccttaaataatctagcacrctgccttgcatggcatagaaggtcaataattagctagtaaaagaaatgatagaaaggaaacagacaacagcagaatgctcaagaaggaaactaagattgataaggaaaaaaaatgaggctcctagagctgaggtgtcatcttagaggaaaagtaagataagttaagtgtaagtacttgtaacagtgttagtcatgtggtagagataaaataagtgtttatttttaaaaggaaaaacaatagaaagagactttatgattccgatagcacccagaatccaggtgagcagttttggttgcatattcaggtatctaatggcccatggtcaggtgctccatctgtgccaggtctcaggagcctgccatgagctggatttcaaatgtagatatctgtgctgcagatgtcaaggtcttgtacggatttccagagctctctgtctctttccacctctttcttc

SEQ ID NO: 523955 - DNA, 634 bp, Homo sapiens
tgcctcttttgcaatgtcttattgcacaaccattcccatattgtcatgccttttacactacaaaggcagaggtgaatagttgcaaccaatacaatgtggccagctaagccaaaaatatttactacctagacctttaccaaaaaaagtttgcccactcttgccttaaataatctagcacactgccttgcatggcatagaaggtcaataattagctagtaaaagaaatgatagaaaggaaacagacaacagcagaatgctcaagaaggaaactaagattgataaggaaaaaaaatgaggctcctagagctgaggtgtcatcttagaggaaaagtaagataagttaagtgtaagtacttgtarcagtgttagtcatgtggtagagataaaataagtgtttatttttaaaaggaaaaacaatagaaagagactttatgattccgatagcacccagaatccaggtgagcagttttggttgcatattcaggtatctaatggcccatggtcaggtgctccatctgtgccaggtctcaggagcctgccatgagctggatttcaaatgtagatatctgtgctgcagatgtcaaggtcttgtacggatttccagagctctctgtctctttccacctctttcttc

SEQ ID NO: 523956 - DNA, 634 bp, Homo sapiens
tgcctcttttgcaatgtcttattgcacaaccattcccatattgtcatgccttttacactacaaaggcagaggtgaatagttgcaaccaatacaatgtggccagctaagccaaaaatatttactacctagacctttaccaaaaaaagtttgcccactcttgccttaaataatctagcacactgccttgcatggcatagaaggtcaataattagctagtaaaagaaatgatagaaaggaaacagacaacagcagaatgctcaagaaggaaactaagattgataaggaaaaaaaatgaggctcctagagctgaggtgtcatcttagaggaaaagtaagataagttaagtgtaagtacttgtaacagtgttagtcatgtggtagagataaaataagtgtttatttttaaaaggaaaaacaatagaaaragactttatgattccgatagcacccagaatccaggtgagcagttttggttgcatattcaggtatctaatggcccatggtcaggtgctccatctgtgccaggtctcaggagcctgccatgagctggatttcaaatgtagatatctgtgctgcagatgtcaaggtcttgtacggatttccagagctctctgtctctttccacctctttcttc

SEQ ID NO: 523957 - DNA, 551 bp, Homo sapiens
agcaattgtttgggaaataaaacttattgaaaatgatgagatctactatatatatatatatatatatatagttatttttttttttatatctataatgtaatataattttctcgtcaatcaaattgaccaagaaggagccaaaaacaaacragaaaattcacaacaaataaatgggcaaactacacaatgaggcaaaacagaagtgtacactcaagtggccaaagacatagggaaaaacaagatgctttagcatcccattaatcagggaaacacaaattaagtaactataagaaacatttgcacacgtcagcctgactaaaatgttaaagtgtgatagtatctattgttgttggaatgtggggagagtattccctcatacattactgaagaaaacataaatttttattgcactatcaaaagtaatctaaaaacacctattaaaataaaaaaaatccaaagatcctttgaccaagtaagctcattcttgagaatctattccatactaataaatcactatcagtaggggaaatatatacaataatgcagctttt

SEQ ID NO: 523958 - DNA, 610 bp, Homo sapiens
cccaatctagttataaaaaaaawttttagtagaacgacatcctgcaatacacatgaccagtactctttataattgtaaaggaagttcattaaaaacaagaaaacaggaatatctgagaaactctcagtcaataagagcccaaggaggcacgataaataaatgtagtatggaatcctggatggaacgagggaacagaaaaagaacattaaaactaaaaatcagagtcagttgtagattttagttaatgacgtatcaatattggtttatgattataacatatgtaccatactaatcatattcatgtaagatgttgatcattggaaaacagtatgtggctgggggtagttaatgtgggagctctttactatccactcaatttttctgtgttacaaactcattataaaaatagtctattaataaaaatgaaaggtaaatatctcaaggcaaatgatcacaggttggaagaatagtttgctgtagaattctgtggaatactgagggctcttgggctcaaagaactataatttggcattgtcagagaatgagggtttcctgatagttgcataattattgtaatgtatcacctatacatgaattattcattttttat

SEQ ID NO: 523959 - DNA, 529 bp, Homo sapiens
taattttctattgaagactcaattttttgggtgttttgggatgatttttaaatgccatgaagagctaaaatcatttttactatgatccttttcactttagtatgtctattatctcacaaactatgcttaaaatatttgcatttgtacccctgaacttaaaatataagtttaaaaggtacgttaagtgaagataatttcttcacaatatgagactagaagrgttgctgagagcccatagtctgattcttcttattttaagctaaaattgaactgtgtgccaagtcctttaataaaaattttaggaagctgtaataacattttgattctcacaataatgtaagtatttgttattgtcatcatcatcatccatattgttttcccagttgtgaaactgaaatttttagtgtaagcaatgtgccacagaacacacaataactaatacaactggctttcaaacatgcacatatgtgaaaataaagcccaccacactatacagtatcaaagaagaagtcacaaaactaggtctaca

SEQ ID NO: 523960 - DNA, 529 bp, Homo sapiens
taattttctattgaagactcaattttttgggtgttttgggatgatttttaaatgccatgaagagctaaaatcatttttactatgatccttttcactttagtatgtctattatctcacaaactatgcttaaaatatttgcatttgtacccctgaacttaaaatataagtttaaaaggtacgttaagtgaagataatttcttcacaatatgagactagaagggttgctgagagcccataktctgattcttcttattttaagctaaaattgaactgtgtgccaagtcctttaataaaaattttaggaagctgtaataacattttgattctcacaataatgtaagtatttgttattgtcatcatcatcatccatattgttttcccagttgtgaaactgaaatttttagtgtaagcaatgtgccacagaacacacaataactaatacaactggctttcaaacatgcacatatgtgaaaataaagcccaccacactatacagtatcaaagaagaagtcacaaaactaggtctaca

SEQ ID NO: 523961 - DNA, 514 bp, Homo sapiens
tgcgtccaggctactaataatcccctcagagatatttattatttgtattccagtatctctctgtttacattgctcatctgttttttcatactgtatattttattcattataaaaaaaagatgtgatgtagttaaacctttagtaatgtagtggtaatatttggggataggggaagcattctgcagtcttatgattaggtctcagtcgattagtatgcttgtgcttctgaactrtgaacttcatgtgtgattctcatgtctttttccctctccattgggtaggataggatacctagagtgggctcgagttgagtattttcctcctcctaagtgggagtctagagccagttagagatgggtgctttggttccttgggaccagttaggctctaataaaacccaatcaggttgatacctggttaaataacttctcctgagagaagaacataagaagaacagaatggtctaatgtatttcaaaataatttctcttcttgttggcctgctctaagaaata

SEQ ID NO: 523962 - DNA, 305 bp, Homo sapiens
tgggaggggtgcagcagtgagagtgcggggcttggagtccarctttgttggctgtgtggccttgggcagggagcttcacccctctgagctttagtcccctcctctgttagacagggtcgactgcccccagcctgcttgcatgatgagggtttaaggacaatggacacagcagatcccacacagtcttgatacttacagattctcaatgcctcggtgttactgttgttcccacgtgccagcctgaacttagcacccactgctggcttcctcctcccctctctcggaatggacccaatgggccctgc

SEQ ID NO: 523963 - DNA, 623 bp, Homo sapiens
ggagggtgttgctgctgtcaggggagatctcatgttgacctggacaagagcgtggtagaggagataaagaagatcttactgagaagtaattacaaaatcttattttagatrctcattttccaaaagagaaagttgacagatgatatgtcttgcccacaggcattaccgtgctcagaattctcctacatgacatttgagctcactcttggaaaactgaaccctgcattggttccaccagtggccagggacggacgttcccttgagttgggcctcagtttcttcatcagccagtctgagacttgagctcatgttcctctggcctcagctctgtgactgtctgtgcctgcttcctgggagctgacacctgatatttgcagcatctgctttttccaaggacatttagggtcttgcaacttgggtgattttaatagatacggtcctctaggaagacagaggccagttgaggaaaagcggcaatggcaggggtaattagggaagccatcttaggaagtagtgggcctggacggggtacagaaataaggagggcatctagctggaagaaaggaaaccttcctgggtgcagaacaggactgtatggtggccctggctgtttatggtcaaca

SEQ ID NO: 523964 - DNA, 516 bp, Homo sapiens
tggcaacttaaggagatagtggactggtgttgcaaagaacatctcaagtgagtacaaatttcagcctcttcttatgttaagtgcagggggaagagtagaggactgggatcaagaggtgaccaacaactgcaggcatctggggaccggcaagcttccgaggaggctaagaacttttttgtctttggtcaattcacagtgctcctataaatctttgaacaagacatagttgtttacatacttcccctttaaccctaaagttagttttaaaaaccacatgattgctgttgttgcatattatctcagtgctctaaaattatccttgcctatgtgcagtaatgggtaaagaacccttmaacaaaaagtggagtcagttatgtcacttctttgctgtttcactgctacagaagcctatgaaaagtagtagaaagtttgtgaaattatgggatgtgcacacttggaaacacttctgttgtggcagtaggaagataaagtactaaattagggataaggcaatgt

SEQ ID NO: 523965 - DNA, 642 bp, Homo sapiens
tggcaacttaaggagatagtggactggtgttgcaaagaacatctcaagtgagtacaaatttcagcctcttcttatgttaagtgcagggggaagagtagaggactgggatcaagaggtgaccaacaactgcaggcatctggggaccggcaagcttccgaggaggctaagaacttttttgtctttggtcaattcacagtgctcctataaatctttgaacaagacatagttgtttacatacttcccctttaaccctaaagttagttttaaaaaccacatgattgctgttgttgcatattatctcagtgctctaaaattatccttgcctatgtgcagtaatgggtaaagaacccttcaacaaaaagtggagtcagttatgtcacttctttgctgtttcactgctacagaagcctatgaaaagtagtagaaagtttgtgaaattatgggatgtgcacacttggaaacacttctgttgtggcagtaggaagataaagtactaaattagggataaggcaatgtcatggtcastaagatataagaaaatacaggtaagataagggagaggaggaggctgcaaagtgctggccttcttgtgacctcagaaatgatgttagccaggactttaagttaatgtcaaccaaagat

SEQ ID NO: 523966 - DNA, 515 bp, Homo sapiens
ccctccatgttgcacctgtcagatggaaatgatgaaaataactgatgattatcacagtgtgctgaagktggcatgcttatctaccatgatggggggtatgagtgattaaaatcattctaaaggacagtttagcaacatgtttccaacattgcgagtggctaacctctttaaccccaaattccatatctaagattttagtttaaatggtacatattaaagaagaaaatacatattcatctcaattgatgagaaaaaacctttcataaaattcatagcctttcatgattaaaaaataaaaacctcttagcaaaatagaaatagaagaggacttccttaacacaaagaagagatgtattcaagaaaaatacccgagggcaagaactgtgtctgctatataccagagcctatccctggctcaaggtcagtacctaaaaagtctgtatggaatgaatacaggaaaaagggaatggtccctggccgtgttttcagccccatcttctgattcccctttacac

SEQ ID NO: 523967 - DNA, 525 bp, Homo sapiens
ggggctgttcgatatgccagcacccaggtcccacccacagagagtctgagtcagaaggccagggccagtgcttgaatttgtgcctcctggccggtgtcaggaggttctgatgcagagggtctacagaccaggttttgggaaacactgtcccaaagtgtaggagcccatgctaaaggctgcttgttccggatggctttgtcatgtcgggctagtttcaaagttcccatgaggagcttgtaataatgaacaagcaattcacagctaacacactggcattcagaagtgtttaacgcagcrtactatttaatcctcagaaagtgttcatccattccacaaaccctggatgagaagctacattaagtaaggagtgaacaatgagaccctgggtttgctagcctcacaaagcttagacagcaggggggacatgggcatggggcagacagcctgtgggctggatgctggtctggtgacatgacagccacccccctctaatgtctgcatcacagaaaggaagccaggagcaag

SEQ ID NO: 523968 - DNA, 588 bp, Homo sapiens
tgagcatcggcaagctactgccttaaaatccaagcttcccaagtgcacaatttctgtcccttttaagggctcacaacactaacgatttcacatgaaagggtcgtgactgatttgagcaagcaggcggtacatgacaggggctgcacgcactggtggtcagagagaaacagaacagggcagggagtttcacagtgttcttctatacaatgtctggaatctatgaataacatcggtttctaagtcatcagttgatttttaactactaggtttaggccaggcaggcccaggtccagttttgggcctggcaccaggctgcctgtttttgatttcacttccttgtttyttttctttaaacaggtactgagtataaaacaatatgaaagggtctctctcttccctcatttgttgacttgagtacacctaggaacagggagcacaaaaggtgtggggcatgacttgcccaaaatcagagagtggtgggtggtggactcagattcaaatacaggaggcctgcctttaaagggaaatttgcactgaagggaattttaaaatttataaagtgtttttctgtgatgtattaataataga

SEQ ID NO: 523969 - DNA, 588 bp, Homo sapiens
tgagcatcggcaagctactgccttaaaatccaagcttcccaagtgcacaatttctgtcccttttaagggctcacaacactaacgatttcacatgaaagggtcgtgactgatttgagcaagcaggcggtacatgacaggggctgcacgcactggtggtcagagagaaacagaacagggcagggagtttcacagtgttcttctatacaatgtctggaatctatgaataacatcggtttctaagtcatcagttgatttttaactactaggtttaggccaggcaggcccaggtccagttttgggcctggcaccaggctgcctgtttttgatttcacttccttgttttttttctttaaacaggtactgagtataaaacaatatgaaagggtctctctcttccctcatttgttgacttgagtacacctaggaacagggagcacaaaaggtgtggggcatgacttgcccaaaatcagagagtggtgggtggtggacycagattcaaatacaggaggcctgcctttaaagggaaatttgcactgaagggaattttaaaatttataaagtgtttttctgtgatgtattaataataga

SEQ ID NO: 523970 - DNA, 558 bp, Homo sapiens
agctctaagctgcaggcactttctccaccattgacaaggtggtcttcccaggggaggtgttccttggcctgggcctatggggatgtgcctgggaggatttggatttacagataagttaaacccgtgtacrctaagcatctcctctgtgcttggccctggactgggttgtggggacacagatgagttatgtccagccccttcctccaaggagcccagagtccaggcagcgtggcagcatcccaggtgcagcacgcagtgtgaatcatgagatcctgcctgcctgagtacctgggcttagcttggtgctggaaaataccctctgatctctgggcctgtgtcctcacctgtaaggggacaggctagacttcaccacctctcaggccctcctggatctcatacctttgaatctttgtattgtgttttctggaaccagaagcaatagtcgctgtccttggtactgactggtaaaggagtgctgaaatcaggatgggggtttctgggaatttggaagccccaacatctatctcgatgctccctgatactccccaccccaatcag

SEQ ID NO: 523971 - DNA, 569 bp, Homo sapiens
ctgtgactgattatgtctctgtcttcctctgcaaaagtaagaggcagaggaggagacgtgagcactggcctgggagcacaggaaggatatggttaacttctgaccatgactgatgcatggtgtcctgtcccatccactccacaaagattcttctgaggaccacctggaacaaaggggttaaggtatctgtctacacagagtgctctgaaattgcaacacacacacctttgccttatgaataaatatatctctgcttgttctctttgtggatagaagatagagtttaaatcacaaatcactgatgaagagatcattgtgctcacatttcagtatgtagctacttccaagttcctaatatttagttttccaatcacatagacctctgctaccaacccaggtgaaactacacttaattttgacaataaaaggattttgaaacattattgcatctgaatcttgtatctttatgattcttcagtgaaaaaatttaaatacacatatctatctaaatatatctatctctatatattctttmatctctgctatgtatttactttttatttatctat

SEQ ID NO: 523972 - DNA, 629 bp, Homo sapiens
ttttaaaaataacaaactacatgcaacaacatgaatgaatctcagacacaacatcgagtaaaagaagtcaagcaaaaaaaaaaaaaaaaagtccagagggcattattccatttacacatgagttcaaaaccaggtaaaactatagttatgtaagtcagaatcgtgtttaccttgggtgggagtaactactgtctgcaagatatccccacataatctgggcttctgagggctagaaaatgagtatcttgatctgggtagtagtgattacagggtgttcactttgtaaaactttaaaaataattgagcttgatgcttstgcacctttttgttacacttcaaaaaaatttttttaatcaatggagcttggtaacccaaagaggcaagggtatgagggagaaataaaggatgacttccaagtcttcaggaatgactgactaggcagttccataaactgaacaattaaacaaaaacaggggcagaaagcagggaccatgtcctattcattttttattcaagtatctaccacagtacttaacacagagtcactccagcattacaagatactcctattattttcatcccaactttttgaccaccacttcttggtctcctttcttacttcctttctg

SEQ ID NO: 523973 - DNA, 567 bp, Homo sapiens
tgtttaatccgccattttgcctgttagtgcacatgcttgagcccactcacccaactcctgagatcttactgggaagctgctgatcaccagtttcaggtgttcctgtctattgggagacctttccctggcactggctgcaaccaattattattttatagagacagttctaacaacctcctgaccatcacctgatggttgcctgacattcctggtgaggggcgcctctcctgctctgctcatcacgtctgcctgactgccacytgtaacgagcatgtttcagaaactgaaaaaaacagcgcacaatgcagtagggggagggagggtgcagagtgagccagaaggagagaggaacccaaggagggagaagcagatcatgctgccccctgggtgtgcttttaccctacgggctcaggatgggaagccatcagaggggtttagcagagggaccgcctgatcattgggacaagtgtgggaagaatgaagtcaaaaacttccaatcatcataacatgaaaagacaaaccacagattgggagaaggtgtttcccatttgtatcaccagcaaaggg

SEQ ID NO: 523974 - DNA, 544 bp, Homo sapiens
ccatgattcagttacctcccaccaggtcccttccamgacacatgggaattatgggagctacaattcaagattagatttgggtgaggacagagataaaccatatcactccctgaagggaaggagtaagtggaaaaggaattattaaatgggcacttgccatatgggtgcagtcgcatgatccatttaatcatcacaagccctcttggggttcagtatttgacccctaatgcacagatgaggacattgaggcttgaaaacattaaatgatttatttgcccaagatcacacaggtacaaagttgtagagacaagattcgcgcccaggccttagtcacttccactctctggactgtcttctacatcaaacatcaggcactcagatcaaaggagcattttgaacaggcagccagatcaccataaatcacccaactggactgtctcattgtaaccagaaaggagcaacagacacaaaagctgttttcgaaaaggaaaagaggatctcagtggccgggggaggccattcattaagggggcttatttgcctg

SEQ ID NO: 523975 - DNA, 544 bp, Homo sapiens
ccatgattcagttacctcccaccaggtcccttccacgacacatgggaattatgggagctacaattcaagattagatttgggtgaggacagagataaaccatatcactccctgaagggaaggagtaagtggaaaaggaattattaaatgggcacttgccrtatgggtgcagtcgcatgatccatttaatcatcacaagccctcttggggttcagtatttgacccctaatgcacagatgaggacattgaggcttgaaaacattaaatgatttatttgcccaagatcacacaggtacaaagttgtagagacaagattcgcgcccaggccttagtcacttccactctctggactgtcttctacatcaaacatcaggcactcagatcaaaggagcattttgaacaggcagccagatcaccataaatcacccaactggactgtctcattgtaaccagaaaggagcaacagacacaaaagctgttttcgaaaaggaaaagaggatctcagtggccgggggaggccattcattaagggggcttatttgcctg

SEQ ID NO: 523976 - DNA, 483 bp, Homo sapiens
gctagaagacaggaaaatgtggctaattgagactaaagactgctctgagtagctttctaattttccacagttagttcctttttattctgcagtggtgtccttttggtaattgactttcaaataatacttgttacatatcatacttaaacaggagtatttctggcagggttgagctatacaatggatctagaagtggatttcattaagggaaccagctctacagatctgaggcactccctcagtgccagccacacactaatgttcaagaaacatggcccatgagatatgtccacacagttatcagtgtacagaaatcgcagcattatttgtgtgtgcatgcagcaaccacacagaygatcacagaattctcacatcttttctctcatttttcctgaccctgtgagtttaaaaggacaagaaacaaatgaggacactagattcatcaaaattggatcatgaagcatgttactgcacatctactat

SEQ ID NO: 523977 - DNA, 660 bp, Homo sapiens
ctgcttttattaaatattttatttcctcgattgattcgtactctttcttgaggatagaaaaccttttggaatattttccaaccagaatgaggggatttcctaaatatatgtaaaaaattcggttgtcttagcttttaaaatatagcatattaaaaatattcaccttttcttgggaccattttgtccctgcaatgaaactcaacactaatgtgcataatcctccagatccatgtaaaccaatacgttggctgcytaagacagcagaaacacacgtagtcaaaacaaggaatcctctcttcaatgtaagttttttctagaattagatagatatttagaaattagtttatattaaatatataatacaagatttgacattatctattacatatgtttgaccctttgatattatgtctttaaatgttatattaaatgtctaaaattttgattttctttctcaccatacattttagcagacttactaccaagtaacaaaatttccaattagtaacgtttcttcttctgccacatctctgatactagtatcagtaaaatagttaaagtattactttaagtgaagaagaaaagagacccataaaatctccagtttcatataacatgtccaatgaattcttaaaaaatatttgaatatctctttggtca

SEQ ID NO: 523978 - DNA, 542 bp, Homo sapiens
tttttaaaaacccagtatgttttagtaaagttgctgttctaaaaatcccacctgtcaccaggataaccgaaactgctccctctacactccaactgtatttttagtttttacctcaacaagtagcaatgyaatttacacttggtaagcacggattcctgaaacgccaaaatcaaccgggaacctgatttaactccaccacgctcttaacaatgaaagctacaagcagaagagaagtgtgaccttaaaaacttccacacagccgaagaacagtggcagaacagactgaagcacgtatcttcgcggaacagaagaaaacttccacacaagcaatactgcaacacggaggcggggcaagggcttaaaaggaaagtcagccaacagggaggggtgaatataagcaaagcttccgtgaaaaaaaacttatcgaggtgtagagcaagacaagacagacaaatttttccatctccgtacaccccccttcagagcccaacacacagcaagtgctctagataggtttgctcaactcaagggaagcttctgcc

SEQ ID NO: 523979 - DNA, 495 bp, Homo sapiens
atggaaaacagttctaggttctttccttcatcaagaacttgaagtacagatactctcagtggccaattaagggtagaaaggacatcctttgaggtgagtcaagccagtacctatcttcaggcccagaatttatgcagaaaacagttctgaatcttggctccacctccaaaaacaaaataaatgacagagtcccctgagattctgagttctttctcagtggtaatagatataaaccagggacaactgtttcaacttcagatgttgttgggtttagctggctttttggttcagttgtgtttggttctcgatgtgccttcttaggagcctaacatgagcacatgtaaaaaaattattttcctaaactgtctatcaattgtcagtggtgggagatggctcagttttatgctgagaagggtgacatagtggttgccaagggtaatcygcagtgacaagctcaagagttggtagtgactgaaagctgttttttcatctata

SEQ ID NO: 523980 - DNA, 601 bp, Homo sapiens
tattttctcacaaccagttttacaaaacatccagagggaactgacacagcgtgtctttgccagaataccttcttacacgtcttcttcccctacaccccagagtttcatatacataaaaacatggaactaagcaccatgtttttatgtatatgaaatcgattgtcagatcatttagcagtggttatattgaaagtggagagtgaaaaaaagaggtagtgagggaaaaagatattgaatctatccaatcatctttgtaggatataagaagtctcatggtacaggtatagtcaatgtgaaaccttaacaatgcattaattataaagctcaagcagttctgagataagatgattttggtttatggggatacaataaatttgagtctgcagcatatgaaagaattttcccagatattgcgctttctttttcatttttctcattttaatcaatagaatgtaaggataaagtacaamatgtatggaaagaataaaactttcctgcgtcctcctgactataaaaaggtgagtgaatcatctgcttaaacaccaacccagtcattttatctcctgtgtccttgaatgagaagctgggctgggcacccctc

SEQ ID NO: 523981 - DNA, 539 bp, Homo sapiens
tgcccgctggaccccagaatgtgcctgcacaaactccactcccgaaatcatcacaggccctccttgaaccygagccagccgagggcctggagaacattccggacagaaatcaaaatgacatttcaggtgctgggtgccgtgactcatgcctgtaatcccagtacgttgggagactgaggcaggtggatcacttgaggtaaggagttcgaaaccagcctggccaataaggtgaaatgctgtctctactaaaaatataaaaagtagccaggtgtgggggtgcgcacctgtaatcccagctactggggaggctgaggcagaattgcttgaacctaggaggaggaggttgcagtgagctgagatcacactactgcactccagcctgagcaacagaccgaaattctgtctaaaaaaaaaaaaagtgacaatcagggtcccctgtcaacaacagtgaggacgaagtcatctactgagctctcactgcatccatggactaactgatttaatcttcacaacacccagagaggggagcactattatta

SEQ ID NO: 523982 - DNA, 539 bp, Homo sapiens
tgcccgctggaccccagaatgtgcctgcacaaactccactcccgaaatcatcacaggccctccttgaacctgagccagccgagggcctggagaacattccggacagaaatcaaaatgacatttcaggtgctgggtgcsgtgactcatgcctgtaatcccagtacgttgggagactgaggcaggtggatcacttgaggtaaggagttcgaaaccagcctggccaataaggtgaaatgctgtctctactaaaaatataaaaagtagccaggtgtgggggtgcgcacctgtaatcccagctactggggaggctgaggcagaattgcttgaacctaggaggaggaggttgcagtgagctgagatcacactactgcactccagcctgagcaacagaccgaaattctgtctaaaaaaaaaaaaagtgacaatcagggtcccctgtcaacaacagtgaggacgaagtcatctactgagctctcactgcatccatggactaactgatttaatcttcacaacacccagagaggggagcactattatta

SEQ ID NO: 523983 - DNA, 539 bp, Homo sapiens
tgcccgctggaccccagaatgtgcctgcacaaactccactcccgaaatcatcacaggccctccttgaacctgagccagccgagggcctggagaacattccggacagaaatcaaaatgacatttcaggtgctgggtgccgtgactcatgcctgtaatcccagtacgttgggagactgaggcaggtggatcacttgaggtaaggagttcgaaaccagcctggccaatawggtgaaatgctgtctctactaaaaatataaaaagtagccaggtgtgggggtgcgcacctgtaatcccagctactggggaggctgaggcagaattgcttgaacctaggaggaggaggttgcagtgagctgagatcacactactgcactccagcctgagcaacagaccgaaattctgtctaaaaaaaaaaaaagtgacaatcagggtcccctgtcaacaacagtgaggacgaagtcatctactgagctctcactgcatccatggactaactgatttaatcttcacaacacccagagaggggagcactattatta

SEQ ID NO: 523984 - DNA, 617 bp, Homo sapiens
ctgcttagccctgtaaacttctataagcatgcccaaaagtcacctcctcagtgaagccttccccggcttcctcaggttgcctcttctgcattcctatgacattttattcacctgtctatcacaagactctccagtttatgtatttctaataataaagtaaccttaaggaagctgtgacccatgagggtcaatgaccaagaccttggagaagtgatgtgtgcaagatgcacagttctgcagccagaacgatgtttgaaagcacctccatttgctactttcaaaagaacataaagagcgtaatggaaattcatcatgtttggttgcctggccccatttccccttcataaccatgacagttttgattcaagggcttgccctcctccatttacagatagggcactgggcttacagcacccctcccctccacacaagacagacagaagtaggcacatgaaccacaccaagtcagtcagatagcccactttggaacctgagtctcaagcaaagggacaaagaggctgacattgttggtgtttcattccatcgcagaaactgcaccttgatcagactgtttctgctacctgcmtcatagcctgcagcctgccttgctcctactc

SEQ ID NO: 523985 - DNA, 519 bp, Homo sapiens
ctcccccttgagaagggcatgtgctactcagctcatggcatctgggctctcattgataatggggggtaggttggaagattcttggaagccacagcaagacacaccacacctgggctctcataatcattttgccaccctagagagctccagacacacgattggccctctaacagaggaacattttaatacaagtgtgtactgctcaaggactcatttgctaagttaggggcagactccttggtaccaccaaatcctatttttcctaaatcggtcaatgtattgtcatatcccctgtgtgcagttttaactctgtgagtctggatttgaatggaggcccagctttattctagctgtgcaactgtgggcaagttccatcttctccaaagttagcttcctcagggtattgcaagaattaaatagcaaaatgcacataagtgtcyggcgtagagtaagtgatagcttcctttcttttcctcattttaatcaattacccagttggtggatgtgataacaaatgaa

SEQ ID NO: 523986 - DNA, 603 bp, Homo sapiens
gattgcttgatactgtagttttaatttgagttatagcatagagatggtgatgctatagaggaaaaaacccgcaattayttttgcaccaacctaatattaagttttatatttcacatttgtaggcttgtttcatcaacggagcagtttccaaggcttcaaggaaacattgttctatgttttctctcatccatccccctgtggagggatgttgagaggagagtcggttttgaaggtgcagttcttgctttcatagcatgtagttaaaataaaaaccacagtgtagtgttctgacatcccctcttgctcaggcatagggcatatttggtgaaccttggccattctgacaactgttctggcagctgtttcttgtgtcattcttttctgggctttattgtaatgtaaacccaccaaacaagatttctggcagttctgtacatggaaaatataaggactcaatttgtaggtaagtggtttctatcctggagaaaacaaagcccatcatactggatgttcacatcagctgggctgtatgacaatgttggtgagtcagtgctttgaaggccctaaggttaaatgttttgaataccacccccatgcatagta

SEQ ID NO: 523987 - DNA, 603 bp, Homo sapiens
gattgcttgatactgtagttttaatttgagttatagcatagagatggtgatgctatagaggaaaaaacccgcaattatttttgcaccaacctaatattaagttttatatttcacatttgtrggcttgtttcatcaacggagcagtttccaaggcttcaaggaaacattgttctatgttttctctcatccatccccctgtggagggatgttgagaggagagtcggttttgaaggtgcagttcttgctttcatagcatgtagttaaaataaaaaccacagtgtagtgttctgacatcccctcttgctcaggcatagggcatatttggtgaaccttggccattctgacaactgttctggcagctgtttcttgtgtcattcttttctgggctttattgtaatgtaaacccaccaaacaagatttctggcagttctgtacatggaaaatataaggactcaatttgtaggtaagtggtttctatcctggagaaaacaaagcccatcatactggatgttcacatcagctgggctgtatgacaatgttggtgagtcagtgctttgaaggccctaaggttaaatgttttgaataccacccccatgcatagta

SEQ ID NO: 523988 - DNA, 603 bp, Homo sapiens
gattgcttgatactgtagttttaatttgagttatagcatagagatggtgatgctatagaggaaaaaacccgcaattatttttgcaccaacctaatattaagttttatatttcacatttgtaggcttgtttcatcaacggagcrgtttccaaggcttcaaggaaacattgttctatgttttctctcatccatccccctgtggagggatgttgagaggagagtcggttttgaaggtgcagttcttgctttcatagcatgtagttaaaataaaaaccacagtgtagtgttctgacatcccctcttgctcaggcatagggcatatttggtgaaccttggccattctgacaactgttctggcagctgtttcttgtgtcattcttttctgggctttattgtaatgtaaacccaccaaacaagatttctggcagttctgtacatggaaaatataaggactcaatttgtaggtaagtggtttctatcctggagaaaacaaagcccatcatactggatgttcacatcagctgggctgtatgacaatgttggtgagtcagtgctttgaaggccctaaggttaaatgttttgaataccacccccatgcatagta

SEQ ID NO: 523989 - DNA, 603 bp, Homo sapiens
gattgcttgatactgtagttttaatttgagttatagcatagagatggtgatgctatagaggaaaaaacccgcaattatttttgcaccaacctaatattaagttttatatttcacatttgtaggcttgtttcatcaacggagcagtttccaaggcttcaaggaaacattgttctatgttttctctcatccatccccctgtggagggatgttgagaggagagtcggttttgaaggtgcagttcttgctttcatagcatgtagttaaaataaaaaccacagtgtagtgttctgacatcccctcttgctcaggcatagggcatatttggtgaaccttggccattctgacaactgttctggcagctgtttcttgtgtcattcttttctgggctttattgtaatgtaaacccaccaaacaagatttctggcagttctgtacatggaaaatataaggactcaatttgtaggtaagtggtttctatcctggagamaacaaagcccatcatactggatgttcacatcagctgggctgtatgacaatgttggtgagtcagtgctttgaaggccctaaggttaaatgttttgaataccacccccatgcatagta

SEQ ID NO: 523990 - DNA, 470 bp, Homo sapiens
ggtatccagcacatgcctcctggggttcgggatgcactgttcttgacctcacagagcatttatttaagctgaaagtcatgtgcctgctgtgagattgggtgctctgagtgtacacracagaggaaatctggctggtctatgttatttccttggaatgtctcttggagtcagctgtgatgcccccaggggttcaggcacaagggagaaaaatgagtggacatcctaaggctctctgaggatttcctggttgcttccaactcaagttgagtattacaggaaggtttggaaggataaaagccacaaaaatggcagtttctattttctctcacctccatttatcagcctggtcacagcagcaagtaaccaagaggtcctaaatgcagtgtccaaactgtatgtgggcccaagacctgccaaggtattcaagtacagccacactgaagctttgctttctaggcacaaagtttgat

SEQ ID NO: 523991 - DNA, 551 bp, Homo sapiens
gttaaaaaaaaaaactgggcgtaatgacacatgcctgtagtcccagctactggggaggctaagatgggaggatcgcttgagtctggggacttgtgggtgcagtgggctgagactgcatcactgtactccagcctgagagacagagcaagatgctgtctcaaacaaaacaaaagaagtggtagaaagtcaaataaaccgtgacacataacagaaattagaatatagataaagatctgccatttagaaaggcagcaggaccagatgactttatcattaacatcgatctagcctcaaaaaacagacaattccttttcttataactacacacagaagaagatgaaaggatcccataagtgatggtatgaarcaaggataggctgaataacaaaatcagataaaaatacctaaaaagagaactataaatcaatatttactaataaaaacataagtattctaagtaaaaatagaaattttagtttattcaaaaaacagcatacttggccaagtagattttattccaagtgtactggtttttgaagggaagcccggcc

SEQ ID NO: 523992 - DNA, 504 bp, Homo sapiens
ttgtcatttttttgtgcatttctttcacacctaaaattaatgctctcaaggtttaaatttttatttgtaaaactggcatctttgtccaaggtarctcttttttacatccaagaaaagcaatttgtcaaaattaaagcgtactgcttttatcattatcctccataagagaactgatcatattctttttgcttatctctaagatatgcttttcccacttcttcacattcctgaaattgggatgcatgtgcaatatgagtgtgtttgatgtggtaggtttttccccctagaaaagctattttaaagtcaatgtatatgtcttctattcatctgtatcttaaaactgaagaaatgtgctcttttggtatcttatactttctttagtggtaagtttcaagtaagacaaatatgtgaagctcctgggtttctagggaacagacacagactcaggctaccttaaggagaaggcagattactgtaaacataagaagggacttaaactagaat

SEQ ID NO: 523993 - DNA, 504 bp, Homo sapiens
ttgtcatttttttgtgcatttctttcacacctaaaattaatgctctcaaggtttaaatttttatttgtaaaactggcatctttgtccaaggtaactcttttttacatccaagaaaagcaatttgtcaaaattaaagcgtactgcttttatcattatcctccataagagaactgatcatattctttttkcttatctctaagatatgcttttcccacttcttcacattcctgaaattgggatgcatgtgcaatatgagtgtgtttgatgtggtaggtttttccccctagaaaagctattttaaagtcaatgtatatgtcttctattcatctgtatcttaaaactgaagaaatgtgctcttttggtatcttatactttctttagtggtaagtttcaagtaagacaaatatgtgaagctcctgggtttctagggaacagacacagactcaggctaccttaaggagaaggcagattactgtaaacataagaagggacttaaactagaat

SEQ ID NO: 523994 - DNA, 651 bp, Homo sapiens
ctgactgctcgggaaaggcatttgtgtgtcacctgaatgaaggctgatttccatggatggcagccagagggacaaagagggaggaacaaagagggcagggaggatatccaggtaaagagaatgagatgaacctctggattatcttttgaaaactggactctgatcttggggccagaaaatactattatgtgagtgttgayagcctttctgtaccttgctagcgagccagaattttctttaccttctttcttccatcctctaaaaggggagctctattttcgctagctcagttatgaggcctctgtgatgcagaatcaggcaatgtgcacagaaacacaaactggattctgggaaaggcaaaagaataggagcagatggaaaaggacagtaaagggagacaacaggctggacactcggggagaattttttttggcactgagaattggagaagggaaggaatttgggggaagaaactgatgaccactttggagaacactgtaggtggcagagacaatcaaataaccacaaagtggcaaatctgccttggaatttaatttggaaccagttccgttggacctggagttcatgctaccaaccttcatgccctcctgtgacagcaagagagagccaggagcttttcaaagagatgac

SEQ ID NO: 523995 - DNA, 451 bp, Homo sapiens
tgctctacctttctgcttccctaagccttcacttggggtgaaggcttcactgggtgcctcctctgccgccttcccccgccaatttctacctctcccccatcccatttttccttttccttcctctcagattatcccaaacatctttcctcactcccactctgcccctcattcattcaacaatatttttgagcacccactatgtgccggccactgtgccaggtactggggctgcaacagtgaacaggacagataagttctctgctactggagggagacagaccaataaactagatgcttgcagatagtgacaaatgctctaaggaaattaacagagagatggaatggagtaattcaggaaggcccctgtatctcagggtcagggckgcctccaggcagagtgaacagcaagtgcaaaaaggaacttggcacgttcagaaagaaagtggcctgt

SEQ ID NO: 523996 - DNA, 597 bp, Homo sapiens
ggttgtatagcctatggaagacaaagactgaggcccaagaatcctttacacactcaagaatgttacctgccagggtgaaagaaatatttgcagatataaacagacttagagactatcttgcctacttaacccatatggggaacatattcatrtttaaagaaaaactgtaaccaaacagtaaataacactgaacaccatcaaagaagatgaggggagaagaaataagtgaggaacaatacgatatgtacatgtgtttcatgcactcaatgtgggtttttgaaatggaagtcacacattacaggggaaggtctactgagaatcaattacacgcattctcaatgggagcgatattgccccaaagggactgaaatagtgttactctttcgatgactaacacacagatatacatagaacacatatgcagtatatctgtgatattataatatcatgggaggcagtattaagaaaaaatatattagaaggctcctcaggaagataataataaaaaacaggtggagaaatgctgatctatgatcaacaggataaacaatctcagtaaaagttatactaaaaatggaggtaggctttaaggtatta

SEQ ID NO: 523997 - DNA, 597 bp, Homo sapiens
ggttgtatagcctatggaagacaaagactgaggcccaagaatcctttacacactcaagaatgttacctgccagggtgaaagaaatatttgcagatataaacagacttagagactatcttgcctacttaacccatatggggaacatattcatgtttaaagaaaaactgtaaccaaacagtaaataacactgaacaccatcaaagaagatgaggggagaagaaataagtgaggaacaatacgatatgtacatgtgtttcatgcactcaatgtgggtttttgaaatggaagtcacacattacaggggaaggtctactgagaatcaattacacgcattctcaatgggagcgatattgccccaaagggactgaaatagtgttactctttcgatgactaacacacagatatacatagaacacatatgcagtatatctgtgatattataatatcatgggaggcagtattaagaaaaaatatattagaaggctcctcaggaagataataataaaaaacaggtggagaaatgctgatctaygatcaacaggataaacaatctcagtaaaagttatactaaaaatggaggtaggctttaaggtatta

SEQ ID NO: 523998 - DNA, 274 bp, Homo sapiens
tccaggattctccatccccaggcaacccaccccagccaataccatatggatcagagataagtcctctctgccmaaccctgcccagaatcatgaacaaatagatactatttctttaaaccactatattttaggagacattatggaacagtaaatcctgaaacacttacttaaactttagtagagatggaaaagtgtagaacacagttagtaaactcattccattcttctttagttatggccttcgtgttttttgtttttattttccagtaacttt

SEQ ID NO: 523999 - DNA, 274 bp, Homo sapiens
tccaggattctccatccccaggcaacccaccccagccaataccatatggatcagagataagtcctctctgccaaamcctgcccagaatcatgaacaaatagatactatttctttaaaccactatattttaggagacattatggaacagtaaatcctgaaacacttacttaaactttagtagagatggaaaagtgtagaacacagttagtaaactcattccattcttctttagttatggccttcgtgttttttgtttttattttccagtaacttt

SEQ ID NO: 524000 - DNA, 274 bp, Homo sapiens
tccaggattctccatccccaggcaacccaccccagccaataccatatggatcagagataagtcctctctgccaaaccctgcccagaatcatgaacaaatagatactatttctttaaaccactatattttaggagacattatggaayagtaaatcctgaaacacttacttaaactttagtagagatggaaaagtgtagaacacagttagtaaactcattccattcttctttagttatggccttcgtgttttttgtttttattttccagtaacttt

SEQ ID NO: 524001 - DNA, 274 bp, Homo sapiens
tccaggattctccatccccaggcaacccaccccagccaataccatatggatcagagataagtcctctctgccaaaccctgcccagaatcatgaacaaatagatactatttctttaaaccactatattttaggagacattatggaacartaaatcctgaaacacttacttaaactttagtagagatggaaaagtgtagaacacagttagtaaactcattccattcttctttagttatggccttcgtgttttttgtttttattttccagtaacttt

SEQ ID NO: 524002 - DNA, 589 bp, Homo sapiens
tggagtttttttcttccttgagttttccaattttctacaataaactactctatttttatctttggggggaaaaatttttcctttttactgctgccaattaagaaaaaattcccacacagcaaaytgatttagtgatttgaatgattaacaggcttgccttctaaaaaagctcctaaactaggcagatttctcaggtctttctttcatgcctgtacctgtttgttaccagtgctatggtaagatatgggagatgtatgggaagtggggggaagagagaaatacagtagagagaaatgaggggtacaaataaccacctgctgttctttaaatatatcatgtcaccaaacacagatgagaaagatcaggcgaacaactgttcattgaaaatatttaaccaaatacctactgcatacaatatgcttaccatagcagtctgcccactgtcaataagtaaatgacaaagtcccttgtatatttatccattcattcaaatatttatgaagtacctataatgcatcaaaggcactgagctagcatgcagaatagacaggagttcagcaatcaatcagataaaatcagccctcaatag

SEQ ID NO: 524003 - DNA, 501 bp, Homo sapiens
tgggtccttttatattaggatcctattagctggctttggaatgatgataacatagcttggccagttcaattaccacattttgtctgtcgttttcgtctcacgcacttaatgtctgctttgtacaagatgaaagacacttagtgcaaattcccctcgaaaatgaacacaartaagttcacagagtcataaattaatgacaggcaatctttcatttctacctgcttgtatccttttgtctgattgctccattagtctctattctctgaagtttcaaataaagaaaatgtaatgccacatttaagtataattagaatggataagtgaacagaacagagagaagcattctcagtcattaattgtcctaacgggcttaatctgggtaatatgaataacgaatatgctaaataaaataaagaaaatgcacattatgcttagaagcaaagtaaaaaccagtgagagagagaataggcacacaggaggaaaatacaggatgtgcgttgc

SEQ ID NO: 524004 - DNA, 501 bp, Homo sapiens
tgggtccttttatattaggatcctattagctggctttggaatgatgataacatagcttggccagttcaattaccacattttgtctgtcgttttcgtctcacgcacttaatgtctgctttgtacaagatgaaagacacttagtgcaaattcccctcgaaaatgaacacaaataagttcacagagtcataaattaatgacaggcaatctttcatttctacctgcttgtatccttttgtctgattgctccattagtctctattctctgaagtttcaaataaagaaaatgtaatgccacmtttaagtataattagaatggataagtgaacagaacagagagaagcattctcagtcattaattgtcctaacgggcttaatctgggtaatatgaataacgaatatgctaaataaaataaagaaaatgcacattatgcttagaagcaaagtaaaaaccagtgagagagagaataggcacacaggaggaaaatacaggatgtgcgttgc

SEQ ID NO: 524005 - DNA, 501 bp, Homo sapiens
tgggtccttttatattaggatcctattagctggctttggaatgatgataacatagcttggccagttcaattaccacattttgtctgtcgttttcgtctcacgcacttaatgtctgctttgtacaagatgaaagacacttagtgcaaattcccctcgaaaatgaacacaaataagttcacagagtcataaattaatgacaggcaatctttcatttctacctgcttgtatccttttgtctgattgctccattagtctctattctctgaagtttcaaataaagaaaatgtaatgccacatttaagtataattagaatggataagtgaacagaacagagagaagcattctcagtcattaattgtcctaacgggcttaatctgggtaatatgaataacgaatatgctaaataaaakaaagaaaatgcacattatgcttagaagcaaagtaaaaaccagtgagagagagaataggcacacaggaggaaaatacaggatgtgcgttgc

SEQ ID NO: 524006 - DNA, 298 bp, Homo sapiens
aactacaattccacatgtcagaataatgttcacttaccccatctgattacaaattagaaataattttactgactccattttatacccaccatrtactttttattcatatctgcttcatgtcagcacatacattaggcacctatgtttaagtagaacttgtcaacactctggaaagaagaatatataaattaactttaatggtatatcccaacatgctatttttatgtgactacatgttccattttttttatcagctactctacagtctgaattactaaaccatttataatgtagacag

SEQ ID NO: 524007 - DNA, 298 bp, Homo sapiens
aactacaattccacatgtcagaataatgttcacttaccccatctgattacaaattagaaataattttactgactccattttatacccaccatatactttttattcatatctgcttcatgtcagcacatacattaggcacctatgtttaagtagaacttgtcaacactctggaaagaagaatatataaattaactttaatggtatatcccaacatgctawttttatgtgactacatgttccattttttttatcagctactctacagtctgaattactaaaccatttataatgtagacag

SEQ ID NO: 524008 - DNA, 591 bp, Homo sapiens
tttgtctacattttctaactggttaccatggagactacttcatgcagccttaactaatatacataagtactttcactacttcttggacaatgcaaaaaactcctttatgttaatcattgtcaygtaccttgatatggtttggctgtgtccccactgaaatctccagttgaattgtatctcccagaattcccacatgttgtgggaggcacccagggggaggtaatttaatcaggaggctgggtctttcccatgctattcttgtgatagtgaataagtctcacaagatctaatgggtttattaggtgtttctgcttttgtctctgcctcatttttctcttgccactaccatgtaagaagtgcctttcacttcccgccatgattctgaggcttccccagccatatggaacggtaagtccaattaaacctcttttttttctcagtctcaggattgtcttaatcagcagtgtgaaaatgaattaatacataccttaaatctacatatatattttaagactcattccttttacccctggctgcttttaattttttcttttgtctttggttatcaacagttttataataatgaatgta

SEQ ID NO: 524009 - DNA, 552 bp, Homo sapiens
atgaacgcacagagcgcatgagggaggctgtctccagcgccctgatgtccagcacagctacaaccccttttgcagcctcaggctgggaagtggggatgggggctgagggagggcaggagctgggatggcatggcggggacggcggagaggaccagccacgctgcttggagaatgtggtcttttcagagcagccctttgaaatcgagcaagaataactttaaacaataagatgcttctctctccccctcagttgttgcccaggcaacgccagagtgctcaacaactgtttagttttttaagaaaccaaatctccctccctttggtcagctaccgccaggaagatgaagaggcggyggcgctgccccttgcggcccattgtgttggacccgggtcagccgcctgcagcagtgacatttaaatctgatgctacatattatatatgaaccccgagccgcactccttcacgacttgtgctccctaaccggggaggcttcaatctcccaccccagacttcttgcccgcttgtggctctggcagtcctggggagtcaca

SEQ ID NO: 524010 - DNA, 489 bp, Homo sapiens
cattcggccacttttctctgtcatcgtaactgtaaataaggcatctgggagtcctcccagcactttaacagatttaacaagcagtagcatgcgacccgcagtccaaatggattttttaatawtgaataagcatttatttaacaagtaataacagttttaccaccctccggatcctcggaagtccagaggtcttgcattaacgccttacacaggcatcttctgctgctatcttttgtccatttttctggttgtttttctcttattgattggcaaaagctctttgtatattaagggtattaaccctttacctgtgatatgcaaatattttaagtctgtataattattaagttttccttagggcatatagaagtttaaatgttttatgttgcaaggtgtttttttgtttgtttgttttttgttttaatttagagacttctgagttttcagaattgcttgtgagcctgaggaaacctgtggctctgttgcaga

SEQ ID NO: 524011 - DNA, 538 bp, Homo sapiens
gcatcttctgctgctatcttttgtccatttttctggttgtttttctcttattgattggcaaaagctctttgtatattaagggtattaaccctttacctgtgatatgcaaatattttaagtctgtataattattaagttttccttagggcatatagaagtttaaatgttttatgttgcaaggtgtttttttgtttgtttgttttttgttttaatttagagacttctgagttttcagaattgcttgtgagcctgaggaawcctgtggctctgttgcagaaatcctcagctgagttcaaacacaagagccctggccatggagtacaactgtgggtgaatgcctctcttgagacctcggtggcctccatataataatgtgttgaaatagacaacctctcagctgccccctgcaggaatgtcccatgattgtaagatgggattttgcagggaagaggctgcagtgcactctgagagaggtcccagccatacagtctttcacaggtctatctcccccaccacttccagcccctttgagaacagg

SEQ ID NO: 524012 - DNA, 651 bp, Homo sapiens
tgtagggaacatacagcaaaggaatgggacaagcacagttacttttaggaccatttgaactggctttagagtggagttgaaaagcagttttgaggaagaaatctgtacccctaagcctcaaaggatggtcattggatctcatttagctttgtttcactagagcagaaactaagtttccccctaggagccccaagaacatattactcctcaggtagatattctgccaatcaaagggtggaagcagatatccctgggaactcacctgggaagcccgcatcatatagaagtcagggtagttctttactgactcctaataacgtgttttaagcagaraaattgtattattagatttgaaatctagaaaatattactttgaaacacaaaaggaaagaaaatcataacaaagcagaggtgactgtggaagctggtgtgaagaatgggttgaagagagatgagaatgaatagaaggagacccggaagttgtttgcagcaattcaaatgtgtggagagggtggatggggtgatccaaggaaaggcaatgcaagtgagaatggagaaaaatgggtgagtgaattcaagaaatggtactttattttctttctaaaaagtgaccctaatgctataactctttattttacagttctttcacag

SEQ ID NO: 524013 - DNA, 546 bp, Homo sapiens
ctggttgtatttagggcttagttgaagtctgaaaccttgattttagtggcaccaacctgtgagcttaggagatgtattcctcccctccagttgcacctagtagacccaaaattagacaactgtattaattcaggatttgaggttgttacagaaggaaataaggcaggagaggattcttaggatctaagttggctaggagaagaaatgaaactaggagaagactaatagaatgcagaagggtcccaggacttaagtttctgagggacagtcatgggtgagcacaaggagtgtgaacaggtagtgaaaaatgtcctcaaagatgaggcaatcaaatgacttgattaatggtttattccctaaggctctaaagcacatggaatggatcattttggctgctgcagaaaccatgggtaagagaacatggtgaggtcctatagagcctaccamcccaagtcaaggagagccacaagtttcagtgtatgcaaatatgaggtcagcgccggtttggggaataggaaagacgcaggggctgtgtcgacttttgga

SEQ ID NO: 524014 - DNA, 571 bp, Homo sapiens
gggtgtgaaggagaatcaaacagaatratttgcctcagaccttgtgtcctccctttcagtaaaacattcctttctccatggttggccctgcactacttccttcttctccctccgcatagctattatttattgcctactccattcccatcaccaagttccacaagtgttatgtgcattactaaatctgggcggggaactgtgaattgccttgccatttttgttagtcagctactttgagagatggacaccaagatgggatgaaacatgcagttgttttacaaggggaaatgcttgtgtgaaaggaaggagggagggagctagagaaggccaggagagccaccagccccaagaaaaggagagagggagagaagcctgggttgttggcattctgaaggaaggagcattctaacaaaggttctgcaaaaccctcagggagtccttgagccaaagtcagctagcaaaggagtctcttgtctgttaggactgggtctgactctgtactcagcactccgtcattggtggggtgcatctccaggggaggcgtggccaatggattttaaagcacagcagc

SEQ ID NO: 524015 - DNA, 460 bp, Homo sapiens
gtcatcttgagactttctttgcttttcttctctattggatattcagtttcctggatttcaggtcttctcattttcctctagtagttttgttaggtcatggttggtatggcatggttgggatagygtgttcacacagctatctcgtgagtcatactcctccaatccagcctgctcgcttcccgtgtctgtcatgtagttgtcaccctgctatctctccctccagtttttgcagaaatttcctttgtcttcactcttggtcttcctctcccatcccccatgtatcctatatctttctctttcttggtttatttcatcactcaggtggaaaagatgctccagtggattactgggaaaagggggagcatggatgataaaggtattgagaccttacacgtcagggaatttttttttttttttttttttgagacggagttttgctcttgtccaggttggagtgcag

SEQ ID NO: 524016 - DNA, 561 bp, Homo sapiens
tctgtgctgaccatggcttccatgttcagaaacccccaggcctttgagttatcatgaagcttgtgggatgtgctccaagcctcctgccatagaaaaactgccatattgctcacaataattcactattatttgtttccccagttaaaatgcgcacaatactggccacaaaaagaagaaaaagagatgatctttgaagacacaaatttgaaattaacattgatctctgaagatatcaagtcatattatacagtgcgacagctagaattggaaaaccttacagtgagtatagcacacacttcagcacttcaggcggctmctggttcacatgcctcttcctttatcccttgggtgatattacctaatgtcagtgttcctggcttttgtataccccgagcaagatgtggtttgggcactgtggtgagcggagcttacttgtgtacctaccaagtgcccagggagggtggaggccacagtgctctctctgacctttaacaacagttaacaccagttcttagggaaaggagagtttcttacccaaaagactggttcctgcttgtgcag

SEQ ID NO: 524017 - DNA, 595 bp, Homo sapiens
gcagaggagtgtcctcagccctcccttctgctgcctctgcgctgaggaggaggaaaggaacaccctggaaatgcaaggcttccttagaacagagagctctggagccctccacgctcatgggcatgcagtccagggagtgatctcatggacatgggcttcatgggtctgcagccgagagggggacgcaggtgaccgctcagccccaggccaagggggcagccagggtcggccaggaatgagggggtgggagcagcaaggagggccttcctggagaggtgagcctcctccaaggagccaagcccgggaggccccggaaagtgtccccccaaccttccctgtggctttaatagtcaggggttcagaagcaagaagggaagcaaaaccagaaaggcaggcaggggctrcagagaagttctaggcctcgacctgactgaggggtgggagtgagggacagatgaggacccgtgagggcagggacacccttggcagaggctggtgcaggaacccagggccagagtgtggccaggccaccaggggcagccagccaggcctccgctctccccaggctggacgggactcacttccactgcacctc

SEQ ID NO: 524018 - DNA, 511 bp, Homo sapiens
tttacctgcccagcatccatcccctccctctagtagtagcacctcaattttcctctggggcacctccccagctctgctttttatacttgtggtttgggggaaaggtagcctgactaatcaacatgcacacacacatttgcacatgcacacatgcacacgggattgtttggcaaatccacattccaggcctgcgttagtyaacatattctgctcccctgggccaagaagtatggggatcaagcctggccagtagccagccaggagttcagaattcacagaagggagaagtgttttttcccctggcattgctaacctggggaacatatacctgggacttccagcctcctccttttgccaccatgtagggaaactggggccaacacagagaggaacaaacagagtcagaccaaatctccatgacagtgagttcctggatctagctatgtctaaagctgaacctgcccgtggactttgcagttacatgagccaactggctctcttttttagctta

SEQ ID NO: 524019 - DNA, 611 bp, Homo sapiens
acccgtgtgaccagggccctcctcagggacacggccattctgagactcaarctgactcaccaggagtggcaacgacaacagaaggcccttcgaatagcaatgttcccatttagtggacatccccgacgtttttcctaaagcctccaccagcattagtttccttttctgtaaaatgcggatgacgacgttctgggaggctaaggtgcttgcccaagatttcaacatggcagagccaagattccaacacagagaggctgcctgcaaaccctgcagcctctgagctggcccgtgagatgctgcctgccacccattttggggagtcccctgccttagaccttgtccttggcccaggagaactgagggcatcctttgtatagctctgttttcatagtgggtgagggtgggcacatgtttggctgagcgtggggtgaacaatagacccggtgccaaggtttccaaagccctccctcccacccctcctctcgctccctcagggcagatgcatttggggtcactgtggaagctactctcatgaatacctgtgtgacaaagggctgcttcatagaagagaaagtctctttgcccaacactaagcccaacgccagttaaac

SEQ ID NO: 524020 - DNA, 508 bp, Homo sapiens
agtccaaggaccctgggcactctcaagcccaactgcagtgacaaaagttctttctttttgtctccaccccatcagcttttgagggtatggctctggtagcccccatagtataacctctgtctggtggccggctcaggttttgggggatgtggagggagggtcagggatgccagcctgggccatcacccgcttgcayaggtctggaaatcaatagctgtgtctgccttggaggagggcagagaactttccagtggcttctgttgtgcagttttttatttttaaccatagagtccagcacgggagtcagactgcctgcattcaagtcttatttccttccatcctctataggtgaccccttgagtgactgtggccaagaaacaagttaattaaaatctctccaggcctcagtttcctcatctgcaaagtggggagaatgatagtgcctttttcacaggattcagcggggataaagtgaagggatgcatttaaacctggcacacacaataaa

SEQ ID NO: 524021 - DNA, 508 bp, Homo sapiens
agtccaaggaccctgggcactctcaagcccaactgcagtgacaaaagttctttctttttgtctccaccccatcagcttttgagggtatggctctggtagcccccatagtataacctctgtctggtggccggctcaggttttgggggatgtggagggagggtcagggatgccagcctgggccatcacccgcttgcataggtctggaaatcaatagctgtgtctgccttggaggagggcagagaactttccagtggcttctgttgtgcagttttttatttttaaccatagagtccagcacgggagtcagactgcctgcattcaagtcttakttccttccatcctctataggtgaccccttgagtgactgtggccaagaaacaagttaattaaaatctctccaggcctcagtttcctcatctgcaaagtggggagaatgatagtgcctttttcacaggattcagcggggataaagtgaagggatgcatttaaacctggcacacacaataaa

SEQ ID NO: 524022 - DNA, 508 bp, Homo sapiens
agtccaaggaccctgggcactctcaagcccaactgcagtgacaaaagttctttctttttgtctccaccccatcagcttttgagggtatggctctggtagcccccatagtataacctctgtctggtggccggctcaggttttgggggatgtggagggagggtcagggatgccagcctgggccatcacccgcttgcataggtctggaaatcaatagctgtgtctgccttggaggagggcagagaactttccagtggcttctgttgtgcagttttttatttttaaccatagagtccagcacgggagtcagactgcctgcattcaagtcttatttycttccatcctctataggtgaccccttgagtgactgtggccaagaaacaagttaattaaaatctctccaggcctcagtttcctcatctgcaaagtggggagaatgatagtgcctttttcacaggattcagcggggataaagtgaagggatgcatttaaacctggcacacacaataaa

SEQ ID NO: 524023 - DNA, 569 bp, Homo sapiens
cacagtgcaaaatcatctaatcccttaagaaaaaattgcaagttcattgcttgttctgtaatccatcagcaaggtctgcaaaccatttaagctcagtcatgcacaagtgattacagaaagaaccatacacaaaataggttttcatattaaatggctattggaaagttatgtcccagctatattcctgtgttttgaaaaggaaaatggtcacatgaaacatcaatcaacagcttgagctcagtgaaatgactgaaataagcatttataaataaatgaatccaactggctaaaaatgaagaagtaacttatttaaagttccaaggtctttacttatgagagtatgatcaagctgtgaccaatgatatgaaaagatctgcagattgtatattatcatagaaatgaagatgtcactccaaggttagccccatttgaatttattgatgatgatagtctttaacgcacaaggctaaaatgcytgaatgctttaattgagttacaaccttatgagtaaaaagcatatgatgaaacactgaatatataaaggagaattgtaataaaataagaaaagg

SEQ ID NO: 524024 - DNA, 574 bp, Homo sapiens
tttcctttacctattcagagaatgtggccacatatttatcattctgaattcttcttagtgatgacactctaatgcgatagttgattcatgtttccaatacacatcttacactaaatgcaatattactcaaagtccaacctagatttcaaaggctcaaaagaagaacataatcctttcaactcaaatttaagcattaagactctgtttaatcaactcgtgagcaacggagaagtcaggaatggaaccctggactctaaaccacaggttgtactttgtagatcaactgacaataattacaaagactgaccaactagcctgtgtacactttgtggggagaaagataatatggaacatatttggcctctggaaaattgcaaagaaaaacagctgaagtccacttttttcccctacaacrgaattcatattctatactcaggtattttcttcacgtagctgggattacaggtgtgcaccaccatgccaggctaattttgctcaacaaagtgcctactgtggcctcctataaagtcacatactgttcctacaaaggcatttttcagagctacccaggaaa

SEQ ID NO: 524025 - DNA, 611 bp, Homo sapiens
gctgcctagcaaccgaatgctctgcctgccctgcaggtccggaagagtccctggagttgatctctgtctggtgtctgtcctacttcttccattygctcgtttccatccctttcgctttaccttccgattctagaaatacaaacaagtaaacagcttccacagtaccatccacccatcaagacctaaagtcctaaatcctgaaattgtccgctgtttctcgaggtccttcccaccgaatctcaacatctgaactgcaagtggtttgcttttactcattttacagatgagaaactgagatagactcagagaagagaaattattaaaattgcattgagttagggagctggaactgcaatctggttgactacaagttgctaatacatttgttaattcgactcacatggtgattccggattgtaaattggtgacagttttaccaaactagataatgtgtgcaaaaaaaaaataataataataataatttttaaaagctttgtgaaacatcgtctcctggcacttgctgtttggcaagggtttacttgtgcagagtgatttcttcaaacacaattctgacttttctctagaaatttgcacagatgacaaatatgctt

SEQ ID NO: 524026 - DNA, 611 bp, Homo sapiens
gctgcctagcaaccgaatgctctgcctgccctgcaggtccggaagagtccctggagttgatctctgtctggtgtctgtcctacttcttccatttgctcgtttccatccctttcgctttaccttccgattctagaaatacaaacaagtaaacagcttccacagtaccatccacccatcaagacctaaagtcctaaatcctgaaattgtccgctgtttctcgaggtccttcccaccgaatctcaacatctgaactgcaagtggtttgcttttactcattttacagatgagaaactgagatagactcagagaagagaaattattaaaattgcattgagttagggagctggaactgcaatctggttgactacaagttgctaatacatttgttaattcgactcacatggtgattccggattgtaaattggtgacagttttaccaaactagataatgtgtgcaaaaaaaaaataataataatartaatttttaaaagctttgtgaaacatcgtctcctggcacttgctgtttggcaagggtttacttgtgcagagtgatttcttcaaacacaattctgacttttctctagaaatttgcacagatgacaaatatgctt

SEQ ID NO: 524027 - DNA, 578 bp, Homo sapiens
aaatgagggacaacaataaatataatagttgttttaaaccattaagtgttaggrtaatttgtttcacagaaacagatagctaataacccatcatacttttacacatgctgctttttagtttttgttttccagagtgaagagtccttccttgtgaaatctgtcttcatacaggtcataccccctttggaatcactgtgtcacatgtcttgatttgcagggcaagactagttcaagcacagccctgaggacaattaccagggcacgcaaggcttatgggagaacccccatgtttgtgggtaagggtggggggacttggaaaggagaaagaaaagaaatgaaggagtaggagggggaaggagctagaaaaaggagggggcaggaagtggaggagagtggcatatggctgaggaggctggtggtcctcaccaggcagccttagattacccaatcatactgcttactcatttccagggaggccctggatgaccttctccctacaggaactgctgagtcatgcacacagccagacagggcgtgggaaggtgtctgccactcaacctcaaggctgaggacaccag

SEQ ID NO: 524028 - DNA, 592 bp, Homo sapiens
ttaattcatggcgtgtctcggagcatctattttcccccatgccagcgttattttgaagcaaatctcaggtatcctattattttatccaaattcatttcagcttgtgtctgtatatgcataaggactcctttaaaataaataaatgtctgagagttaataagtcactgtagaggcttagtacataattgtggaaggagtgaatgaatgattatgtattttgacagacttacagcaagagtatttctttcccattttgttccagattccaaagcactttccgtgtcaaaatctgcatcccttccatgcagaggacgtctcttcttgtgtctgccatgcttagtcttgctccacctggcgccttcttccaccaacctctcagcatgcctgctgtgggttgcaggggcctgggggwaatgcatccaattttccagaggggcaataaggcccctgctcctgcccagctcacagactggcagaaacccctgagaagtgttccatctagtcagtctctgggcattaggggacaaggccttttagaaataacaaaagatgttcttgcaacccacatgctgacacagctcatgtcaaggac

SEQ ID NO: 524029 - DNA, 511 bp, Homo sapiens
tcccccaccatagtgacaagatggctgcacaactccagcctgcatcctctctgagtcaccctcttgtagatgagcatgcttagcagaagtccctgtccctggttaggtcatgtgcccaacacggaaagcttccttctggctaagggataggaataaccatagagctggatcagtggagataaggtggccaaccaaaccacatggactaagaattggggtggggtgggggtgggctttccatacaaaaatggaggctttcattaaaaaaaaaaggaataaatgctggggagtaaaattaaaaagtcccctaatgggccacagacaatgaggcartgggacatttcaagggcagtgaaaggcaggtcagcacctgggggaagtcacgccagcatggttctggagtcaagttcaaatctgcccgctaccactatggcaaagaggcttcctgatcaccaaaaaaaaaggtgcttccccttccattatagagcatttgtgacagttatgaaggtgt

SEQ ID NO: 524030 - DNA, 321 bp, Homo sapiens
gtggctcttcatgatctgcagcctttgagtaaatgatatttaaccgtctaccagcttacccaatacatatgagtggagaaaaaaccaggacagttgctctgaaaacatgtgtttgaaaaagagaaacaacatggtatagtccatggcatataccacatccttttggagagggatagcaaagctccctggcttggctgtaggatgagttcctggactagccaatccagttttcttaggttttgttctccttgatrccctccatagacaggagagatggatattgggatgaattgcacttttgggaatttcattcttttgcag

SEQ ID NO: 524031 - DNA, 598 bp, Homo sapiens
ttctgttagtgtaaattcaggtattatcagttagaaatgcgctcatccacaagtaacagaataatatctggctagcagtagtttaaataagcatgtttcttattcccacataataatatatctagaggtaagcagtcaccagcattaagttggtgactcaatgacatgaagggccaatgaactgtgattcgactggccttttccartagatgaaatgctgcagcttcagccattgtgtctgcatttgaggaggaagaagatcaaagggccttctgtagcgcctctgtttctttctttcttttggtatgtttttagaaacaaggtcttgctccatcacccaggctggagtgcagtggcatgatcatagctcactgcagcctctaaagtcctgggctcaagcaatgctcctgcctcagcctcctgagtagctgggacaacaggtgcacaccaccatgcccagctaattaaaaactttttatagagacaggttctcactatgttgcccaggctggttttaaactcctgggctcaggcaatcctctccctctggcctctgaaagcactgggattacaggcatgagccaccatgccaacctat

SEQ ID NO: 524032 - DNA, 598 bp, Homo sapiens
ttctgttagtgtaaattcaggtattatcagttagaaatgcgctcatccacaagtaacagaataatatctggctagcagtagtttaaataagcatgtttcttattcccacataataatatatctagaggtaagcagtcaccagcattaagttggtgactcaatgacatgaagggccaatgaactgtgattcgactggccttttccagtagatgaaatgctgcagcttcagccattgtgtctgcatttgaggaggaagaagatcaaagggcctkctgtagcgcctctgtttctttctttcttttggtatgtttttagaaacaaggtcttgctccatcacccaggctggagtgcagtggcatgatcatagctcactgcagcctctaaagtcctgggctcaagcaatgctcctgcctcagcctcctgagtagctgggacaacaggtgcacaccaccatgcccagctaattaaaaactttttatagagacaggttctcactatgttgcccaggctggttttaaactcctgggctcaggcaatcctctccctctggcctctgaaagcactgggattacaggcatgagccaccatgccaacctat

SEQ ID NO: 524033 - DNA, 628 bp, Homo sapiens
tgcccaacttctggctcctatcttccttcctccccaagcaacttcctccaccctcctccctcaggacctgggattcatctatcccaacctggggctgcctttcctactgcctcctgatgtgctttcctgtgacttccccctggagctccagctcctatgcctcaagactgccacatcctctttcacccacctgcaggccagaattcttgtgacctcaggcaagccttctgaatgccgattcctagcctcagctaacagctctggcctgttgctgtctttgttagatgctgtgatacacccgctctgccagacttctttccttcactgaacactgtgtctcctgggctttcatcaccccagctaacttgccttaactatttgtactagttatgagtgtggaatttgagatcaggaaacctagatttgaacttcagttctaggttttagttgtgtggtgctgacaagtgctttaatctctctaagccttaacttcctcatctgtaktaacagtaacaatataccctgaactcataatatggctgcagagttataagagataatgtgcttattattattggggttgttgttattacatatgccctgcattatatatgctgctttttgcctt

SEQ ID NO: 524034 - DNA, 585 bp, Homo sapiens
agctcctatctggaatctgctgtaaccatggcagaggacaagaattcaagaagggcaatattaaatmatgagagtacatttaaagcaagatcagatctggcatgcttcattttcctttggccaaagaaagtcacaggaccaagcccaaagtctttggggaagtgtgttctgccttcagggaagcataacagggtaaggaggcaataaattattgggaacaaataacatgatctaccatacactccaaactcatggtggtgaccgccaggggaggagctggaaggggaatggaaagaggagtcagtgaatgaagaggatgttatctagaactgtaatataattttataaaagacttgatacaatatgacaattctgataatgaaatacagatatttgtctaattatgcttggtattttgctttctgttttcacagaaattatgaattgatgaggggggagattaaaaatggagttggaagggagtagttaagaggcaattgcagaattccaggtaaaatgataaagacctgaattattaccctagcaggagaaatgatgtaatggagttattgaaaaactagaatt

SEQ ID NO: 524035 - DNA, 605 bp, Homo sapiens
tgcctcctgtacagctccattgggataggaatttcaagctgaattttaactcctttttttttttgagacagggaagtctcactctgttgcacaggctggagtgcagtggcacaatcactgtagccttgacctcccacactcaagcaatcctcccaccccagcctcctgagtagctgggactacaggtgcataccaccacacccagctaattttattattttttgtagagccaggacctcactatattccctaggctggtcttgaactcctatcctcaagtaatcctcccaccttggcttccaaagtgctgggattacaggcatgagccactgaactragtgaattttaactcttgatttctccctccatcaactctttcagttgctcaggccaaaaagccatggaggcatctgtaactcctttctttctcacacattcgacagccaatccatcagcaaatccctggcagctccacttctaaaacatacccagaatctgctcacacctccctgactccactgccaccacccaagccaagccaccatcgtctctcacctggatcattgtggtccactctatgtttctacccttgacatcccaacggc

SEQ ID NO: 524036 - DNA, 564 bp, Homo sapiens
ctgcctcctgtacagctccattgggataggaatttcaagctgaattttaactcctttttttttttgagacagggaagtctcactctgttgcacaggctggagtgcagtggcacaatcactgtagccttgacctcccacactcaagcaatcctcccaccccagcctcctgagtagctgggactacaggtgcataccaccacacccagctaattttattattttttgtagagccaggacctcactatattccctaggctggtcttgaactcctatcctcaagtaatcctcccaccttggcttccaaagtgctgggattacaggcatgagccactgaactgagtgaattttaactcttgatttctccctccatcaactctttcagttgctcaggccaaaaagccatggaggcatctgtaactcctttctttctcacacattygacagccaatccatcagcaaatccctggcagctccacttctaaaacatacccagaatctgctcacacctccctgactccactgccaccacccaagccaagccaccatcgtctctcacctggatca

SEQ ID NO: 524037 - DNA, 583 bp, Homo sapiens
caaaacaaaacttttcctatatacatttgtcctttggtagccgtgggagaatggggaacttgttccagaaacttcatagacaccaaaattcacagattctcaagtcccttgtataaaatgccttaatattatcatataactgaggtacaatctaaagcatctctaaactactcataatacccaataaaatgcctacatattacttcatggagattcaacagagtacttgacatgcagcaaatttaggttttgctttttggaacgttgtgggtwtttttttttttcaaatattttcaatctgtggttggttgaattcatggatatggaacccacagacatggaaggctaactatatttctttcatttacataccgttttgacattgtataagtgcaaattgtccaataaaaataccataattcataaaatattttagaaatgtatcagtaagccttttgccagactaactgctttgccctaactacccactcaaatactgacacttgttccacggagcagataggctctagtactctagatttacaaaagaggtggatttcaggtacctagcatgtaactaggc

SEQ ID NO: 524038 - DNA, 607 bp, Homo sapiens
ctgcgggaacagatgctctggaacctaagggccaccttcctctcaccccctacgtttcctcagctcctgggaaggaagagtgatttgacaggagtaaggtgtgtggcctggttctggtcaaaggcagaaacgcaagcgtggtccccaccatccctgagaaatcacagcacaggggtggcagtggcttggacagcaggtgagagtttaaattggtgatagcagagtcctgaggtgctccaagtgttgcagtcaggaccccatatccctcacctggtcccctaaggcttcaccttcagggaggaagacctgggtagccacatgggcaggygaaccaaagggggccagagagacaagcatggacaaactaggtttgctaagggagaccttggggtatagcactttctctggtgcaaaatcaatgagggagggcatgtcaggaggaccaaagcgtcctatttggatgggaatgtcaaggccagctcctgagaagggactaagttggaggacgcatttggagttcaagtcaaagaaagcagtagtacagggaacctctcccaaccccattcgaatccctccaagatgatttactgcactgacaggagccctt

SEQ ID NO: 524039 - DNA, 635 bp, Homo sapiens
tttcttcacctgtttctttttcatcatctccgaacagacttttcatggccttttgttgtgctataacgctagaatctgagggagcttccacttgcatctctgagtcttctccatcatcctttagttctccttcttctaaaataacccctgtgtccactttggaaactctcatatctaagacaccatctatccaagctaattcagcatcttttgccttacaaaactgaagagagctgacaagtgagtcttttaacctcacctagacatgcaaaggagggggagagaaataaaacccacagaatacatattaacaaattaaatataacctattatcattttctacctctggtaatatgttaaaattggaaaatctttcactcatctgagtcccacaatgacctgcaatgacctcattacctgcagatcattgggcccctgcctactttccaaaatagagattcttaaccctgactacaaaatggaatcacatggcaattaaaacaaaaagtatatcagagygtcatatccagtgtttctaacataactggtaagattaagaccagaaaaactgagtccctctgaccctcacgaagctccccagatgattcttatgtgcagtcaaggttgagaaccac

SEQ ID NO: 524040 - DNA, 569 bp, Homo sapiens
tagtgcctggacaagccctcgttctggtcttggctccatcacaaacctgtgtgacaatgggaaagtcacttcacttcttggagcttgaagctcctcatctctaagtgatcggggagcccctcccagttctataagtcactccaagcccctcctgtactaaatgccccctaargaaaaagcagaatactcagggagtgaccttttgccctccagcccaggctggctctggcagtccttgctgtgagttccgccagcctcccgcttctcagcagcttccgaacggcaggcctgctgacttgggctccaaacccctaaattgggaaatgttcaactgcagattgtttacattgtgtattcagagtatgaagtggtgtttgagaagtgttgccatggaaacagtgaagtgaggaggcagctaactatgaggggaaataatccaatattaacattcacaagctatgctcctttactgctgtaaatgaaatatcacattattggacagcccctcaaggcagccactgcccatgtactgggccatagtcttaaaaattggaggaaactacctccag

SEQ ID NO: 524041 - DNA, 628 bp, Homo sapiens
gggtcttgaagcaaagtcttctagctctaaacctgggaaccagccagggacatgatcaggggatttataaaaatgctatcattgataattatgactgcacagacacctcttaccaagtgaaatacagttggttctacctatgctggccatgccccaaactctactttaggtagaatgagccaacacaatgttacatgaaagatttatatttgtaaagttttcttaaaagaaaaatgtctgctaaaatttcttcctaagtccatacaattgcttttctgaaatcatccactatagggtcttggttaagcatcaaaattcttgtgtaagtaatcagcatttcctggcaataaaaatctcagagaaacagaggattggactgcaataataatccctcttgatatgatacataataaatgacatcatctaccaatgttaccagcagtgggaaaggttctcgtccctcacatggggcttatyttaattctcttgtgttgctctaccagaataccacacaggcttggtaatttgtaacttataatgggcagatatttattggctcatagttctcaaagttgacaagtccaacatcaaggtgctggcatctggcgagggccttcttgctgcatca

SEQ ID NO: 524042 - DNA, 547 bp, Homo sapiens
gattgatttgttccagaggtgggggaaattggggcaagagatggttatgccarcaattgattgtagccttaagcctggtgctgcaatccgcacacttgagtaagcctaagaaagataagaatcgcctgtcttgggtgatccctgagccccacccctgagatttagataggtatgagctgagtcctgggaatctgcatttccagcaaccaactcaggtggttctgttgctgtccatggaccttgttttgagaaattctgctcactgtgatttgggctaaagagaggcccagacaaaatgggggaggaggccagaggacacagtcgggggagcaggaaggcttcatggaggcggtgctgctgcgggtataaacgaagggcttcaggaaccaaggggctagagaaggtggttccagaaggcttccctggaagtggcaatgaggatgggagatggcgcaaatgagggagacccagaagatgctgtcatcccaaccacaccgtcaacaccatggctcccatcctctctggatcttgtagctgagaccacaag

SEQ ID NO: 524043 - DNA, 547 bp, Homo sapiens
gattgatttgttccagaggtgggggaaattggggcaagagatggttatgccaacaattgattgtagccttaagcctggtgctgcaatccgcacacttgagtaagcctaagaaagataagaatcgcctgtcttgggtgatccctgagccccacccctgagatttagataggtatgagctgagtcctgggaatctgcatttccagcaaccaactcaggtggttctgttgctgtccatggaccttgttttgagaaattctgctcactgtgatttgggctaaagagaggcccagacaaaatgggggaggaggccagaggacacagtcgggggagcaggaagscttcatggaggcggtgctgctgcgggtataaacgaagggcttcaggaaccaaggggctagagaaggtggttccagaaggcttccctggaagtggcaatgaggatgggagatggcgcaaatgagggagacccagaagatgctgtcatcccaaccacaccgtcaacaccatggctcccatcctctctggatcttgtagctgagaccacaag

SEQ ID NO: 524044 - DNA, 547 bp, Homo sapiens
gattgatttgttccagaggtgggggaaattggggcaagagatggttatgccaacaattgattgtagccttaagcctggtgctgcaatccgcacacttgagtaagcctaagaaagataagaatcgcctgtcttgggtgatccctgagccccacccctgagatttagataggtatgagctgagtcctgggaatctgcatttccagcaaccaactcaggtggttctgttgctgtccatggaccttgttttgagaaattctgctcactgtgatttgggctaaagagaggcccagacaaaatgggggaggaggccagaggacacagtcgggggagcaggaaggcttcatggaggcggtgctgctgcgggtataaacgaagggcttcaggaaccaaggggctagagaaggtggttccagaaggcttccctggaagtggcaatgaggatgrgagatggcgcaaatgagggagacccagaagatgctgtcatcccaaccacaccgtcaacaccatggctcccatcctctctggatcttgtagctgagaccacaag

SEQ ID NO: 524045 - DNA, 435 bp, Homo sapiens
tcattaagaacataggtttcaatatttctgcttcactgtttgagaayatagcttccatccacaagctttcctcatggtccaagatggctgttggagctccagccattgcatctcaggctgctggctgaaagaaagagggaagagcgcaaaaagggacatgcttcgaggtgagtcggttctttaaacagacttccttacacacagcagttttgcttacatcctgttggccagaacttgatcacatggacataccaagctccatgggaggctgagaaatcttctcttttgccccaggcggcaagaggcccaactgggaatcaaaattcatttcttaaggagaactgagagggcagatttttggttaggcaacgaacaactttagccatcgtgacccagccaagaaacctaagctcagctctgccccacgccctgccc

SEQ ID NO: 524046 - DNA, 435 bp, Homo sapiens
tcattaagaacataggtttcaatatttctgcttcactgtttgagaacatagcttccatccacaagctttcctcatggtccaagatggctgttggagctccagccattgcatctcaggctgctggctgaaagaaagagggaagagcgcaaaaagggacatgcttcgaggtgagtcggttctttaaacagacttccttacacacagcagttttgcttacatcctgttggccagaacttgatcacatggacataccaagctccatgggaggctgagaaatcttctcttttgccccaggcggcaagaggcccaactgggaatcaarattcatttcttaaggagaactgagagggcagatttttggttaggcaacgaacaactttagccatcgtgacccagccaagaaacctaagctcagctctgccccacgccctgccc

SEQ ID NO: 524047 - DNA, 571 bp, Homo sapiens
aagaggatgttttggacttactgagtttgaggtccctctcagattaccaaatatccaataagtcattgaataaatcagcctggaactcagaagagaracacaatctagtaattgatattaaggtttgtcctcatacaaaagagttaattgaggccatgctagtcagtgaatggaatctcacggaaaagttatatgaggtattaaaattgggctgaagatgtaaccttaaggaagacttaccctaaaggcagagtattaatatattatttaattagtttaattaatagcaggacttttgcctgtttttaaatagtgatttttttcctaaaggaatcagctttttttttttcattgtgtgtgctttttttattttagagttacaagagttatccctcaggagattccttttaaaaaaagcaggattcatggatgatatgtaacataatttttccgtcgattactggtattatatctaaaataacttgagagtttgaggcctgaggcattaaaaaaatgaggaattcatcttgctttcaaagtactcaaagaaaaactgttctaaaacatttca

SEQ ID NO: 524048 - DNA, 571 bp, Homo sapiens
aagaggatgttttggacttactgagtttgaggtccctctcagattaccaaatatccaataagtcattgaataaatcagcctggaactcagaagagagacacaatctagtaattgatattaaggtttgtcctcatacaaaagagttaattgaggccatgctagtcagtgaatggaatctcacggaaaagttatatgaggtattaaaattgggctgaagatgtarccttaaggaagacttaccctaaaggcagagtattaatatattatttaattagtttaattaatagcaggacttttgcctgtttttaaatagtgatttttttcctaaaggaatcagctttttttttttcattgtgtgtgctttttttattttagagttacaagagttatccctcaggagattccttttaaaaaaagcaggattcatggatgatatgtaacataatttttccgtcgattactggtattatatctaaaataacttgagagtttgaggcctgaggcattaaaaaaatgaggaattcatcttgctttcaaagtactcaaagaaaaactgttctaaaacatttca

SEQ ID NO: 524049 - DNA, 623 bp, Homo sapiens
ctggctactttttacaattattatttattgtagagagaggatctctccatgttgcccaggctggtctcaaactcctgggcataagagatcctcctgcctcagcctcccaaagtgctgggaatgagccactgtgcccagcctgctgcctggttttataaataatattttcatcttatgaaattgaaaaatatgaccyattcgaaagcactttggaaattgtgaaataaatatttattaaatgactaatttcaagtatcacaaatagttatttaaataataatacattatacagaaaatatatggattttgcctgaaatttcatcacaagttaaaaaatacattttgaaaagggatatgatgaattttgttaatgttagtctttaaactgagtcattctgcttgagcatttcaaaatggagaaaaaggttaaatacttgctgaataagatttgtcctctgatttgcttctggtctgtcactattttgtagataacttgaaatctgtgtgaaattacagaattcataggtaaaaaggggatgtaatattttttggagaaaattgaactatatgttcagtgaatgtaaactcttcttactgatgttgtcatactcttttaaaagtag

SEQ ID NO: 524050 - DNA, 474 bp, Homo sapiens
gcactaaaacaacaccagcagatgggatatagcaattcatttattcaaactgatcatagagcttaaaragctaggcaatttggagaattaatacagaattaatattaggaaatccaatgttaatagaaagggtgtgtgtgagattagtggtggttattcaggcatttccatttttaccatatgataagatctgaaccttctgaaacttgtagtaatagaaggacccatttttccttctgtgaaggacccatttttctaaataaccagttgcaccctgctttctgtggcactgcagacttctcccagttctggtcctgcaccctctaaaggtgacaaggctgtcctggactgatggagccacctggggccatcagcctcccacctcctttctggcttcttaggaaacctgtctgtttttcttctgtttacacacttgcaacacagttaagtttccaacagattgccttttctttt

SEQ ID NO: 524051 - DNA, 480 bp, Homo sapiens
tgctgaatggggctttgcaaattctgagctcattgtttacaaataacttcaaaaaaaattttaagtgaagcttatatttaatgaaactttagaaagtaagctttgcttttttcttaastatacacttaggcagtctttgaatagaaatctaatattatcagagggatgaaattctgtttttgttttgtcgttattggaagaggagtgaaagaattgaatatcaggtattgtgctagatattttcacccatcataaaaagaaatcactcatccttatcgtttctgcattaactttgtgaggcgatgttattacccttatatcactatgaaggagttgaggtaattcttcccttccttcccatgataagtggtagagctcaggtttggttcttagaattcagttaaaaagtctcgtgattggcatttccccaataggctaggagccttaattactcaactgtttacattttgaatttttttt

SEQ ID NO: 524052 - DNA, 480 bp, Homo sapiens
tgctgaatggggctttgcaaattctgagctcattgtttacaaataacttcaaaaaaaattttaagtgaagcttatatttaatgaaactttagaaagtaagctttgcttttttcttaagtrtacacttaggcagtctttgaatagaaatctaatattatcagagggatgaaattctgtttttgttttgtcgttattggaagaggagtgaaagaattgaatatcaggtattgtgctagatattttcacccatcataaaaagaaatcactcatccttatcgtttctgcattaactttgtgaggcgatgttattacccttatatcactatgaaggagttgaggtaattcttcccttccttcccatgataagtggtagagctcaggtttggttcttagaattcagttaaaaagtctcgtgattggcatttccccaataggctaggagccttaattactcaactgtttacattttgaatttttttt

SEQ ID NO: 524053 - DNA, 525 bp, Homo sapiens
gatttctctctttacatttatttgttttcttagtttcattatgatatatgaaactaacatatcctttgtatgaggattcagtggttacatctgaaagcaaacaggaagttattattttgcttgttagaaaaattcacttcccttaatgtagcttttcccattattttactctcaaacatttggtgtacttctgttttacatgtgtttcttgtaagaagaatatggttggatttttaaaaattaactatctttyagctgacaagcgtaattcttttttatttaattatgatcattgatatatttggatttattttcaccatctttttacactttctatttgatgaaattcctactccatttttttctcctccaatattttggaatgtatagattctaattttttaatagttaaagttattaattagattcagcctccttctaaaacctagagtattttaactctttctcagcttataagctagtattgtccagtattttatttctattaaaaagtcttgtgaaatg

SEQ ID NO: 524054 - DNA, 577 bp, Homo sapiens
gtgttttttttcactcagtgttatgtctgagattcatctatgcagttgtgtgactatagcttgctcatttatattataccaccaatgcttaccacatcatgtgagtgtaccacaattcattatttattctgctcttgatggatgtttggatttttttcaatttttggctctttttatcccagmttgactaaggtataattgacaaataaaaattgtatgtatttacagtatacatgatattttcaaatatgtacacattgtaaaacgattaccacaatcaagctaattaacatatctcttatcccacatagttaccatttttggtttgtggtgagaatgttgaaggtctactctcttagcaaattaccagtatacagtatacagtattatttactatagtcaccatgctctttgttagatctctgtaacttactcatcccacgtaactaacattttataccctttgaccattttttggttcttaatactgctgtataggtatgtatatgtgaaaattctagaagaaggccgggcgcagtagctcacacctgtaatcccagcacttttggaggcctag

SEQ ID NO: 524055 - DNA, 588 bp, Homo sapiens
agaaaaacaaagttcatacagactgttatttgttctcagttctctgatggttagtgacatagctatgataagaactcatacctcctaatgtctcaaaacatttatctgctaaattaaacttcactcccaaataataattaggtttgtgtgtaaatgattaattaaaaatcagagcatggagcttctgagctggttctaatatttaggatatttaagaattatttttaaggggccggrcattgtggcttacgcctgtaatcccagcactttgggaggctgtggcacacagatcatgaggtcaggagatcaagaccagcctagccaacatggtgaaacattgtctttactaaaaatacaaaaattagctgggaatgatggtgcgcgcctgtagtcccagctactcgggaggctgaggcaggagaatcatttgaacccgggaggtggaggttacagtaagccgagatttcgccactgccctccaacctgggcaacagaacgagactccgtctcaaaaaaaaaattatttttaaatgatggcaatgaagtaaaatatttttagttgaaaaaaatctgcttttgggctaagtg

SEQ ID NO: 524056 - DNA, 410 bp, Homo sapiens
gccattatggagtcattaaagaaggactgggaagtggagtgtagcacatgatctaktcatttaagctgaccatggctgtatttggtttgcctaatgagtgggtatggcttcaaaatttgaaaaattacatttgattttatgcttattttcatgcttattttaaatccccctaaatgtaaggttcttgtaatggacaaatagaatttagagcttttcatgactcttgaccttctgtctcagtaaaatttaagaatttttaagaacaggtcgcaatgaggagtcatttagttgtaagggacagaaacccaattcaaactggccatagaaaaggaaataaattggctattataactgagagttctagggatatcccagtctcggagatagctggattcaggggttcaaagaga

SEQ ID NO: 524057 - DNA, 156 bp, Homo sapiens
ccaacacgcagtcctcagccaaaacccagggcccccgccactggaactgactcctctccaggcagcactcccagcactgggcatcccctcaccttgccctggagaagcgctcccacccaaggggccaatgcastcattctcgcagataatcttttt

SEQ ID NO: 524058 - DNA, 625 bp, Homo sapiens
tgtcagagaaggcaatttattccctctcaattttattcctcttggctctgtgtggcttctgcagtaattttgaatggaaattgaaaggtacaacttaatgtgtttcataacaagggcaacacataattttctttaagaaggatgaccttcagattactttcaaattgcttatagctttggggttgtatactcagaacatattttcagtatctttgagtcatgattaattcttaagtggaaattttgagggtgtgaagattaaaaaaaggacaatgaaaaacataacagtattaatttatcattttcatctatttaaaaattgtaccataattggattggaaggatcattaagtgaatacaaatttagaattcatattatgtcagttgtttagaaaacgtaaaattcatttttaactcagagcttgcatttctgaatatttatactttctcaattttttgatcaaagaaaggaaaatgtgtrtatatatatatatatatatatatatatatatatatatgtatatataaattcatgttctgttttaaatgtttagcctttttacaatgtgaccaggattcaactcattcatatcaaatctcagtaaaattactccttgagtttcgg

SEQ ID NO: 524059 - DNA, 517 bp, Homo sapiens
aaaactactggcatgcacaatttttaaaagatactaactttcaaatacgtgcatgtattctcaaagctataaaagtgattatgttatttgtcccaggaattctatatttaggactttctcctaaagaaataaataataatatgtgctgagaaaatttctgccctatcccaaggtagaaaastttttgattaaattacgcacagccataaaattacatgtcatgaagccacttaaatggtattttgagaaatacagaatggcaataaaacacacttctgatatattgcctagtaaaaaaaagtaaaagacaatgtgctaatgacttgtcaaaaccagataaaccatatttatatatttatatgtatgtacagaaatatacgtgcaaaatattaacagtggttatttctgggtggtgagattaaaactatctgcttatctatttattttatttttatattttttgaattttctctcatgaacatgtggactcttaaaatcaggaataaaagaggtactg

SEQ ID NO: 524060 - DNA, 517 bp, Homo sapiens
aaaactactggcatgcacaatttttaaaagatactaactttcaaatacgtgcatgtattctcaaagctataaaagtgattatgttatttgtcccaggaattctatatttaggactttctcctaaagaaataaataataatatgtgctgagaaaatttctgccctatcccaaggtagaaaagtttttgattaaattaygcacagccataaaattacatgtcatgaagccacttaaatggtattttgagaaatacagaatggcaataaaacacacttctgatatattgcctagtaaaaaaaagtaaaagacaatgtgctaatgacttgtcaaaaccagataaaccatatttatatatttatatgtatgtacagaaatatacgtgcaaaatattaacagtggttatttctgggtggtgagattaaaactatctgcttatctatttattttatttttatattttttgaattttctctcatgaacatgtggactcttaaaatcaggaataaaagaggtactg

SEQ ID NO: 524061 - DNA, 616 bp, Homo sapiens
ataaaagaggtactggatatagtaagactttctaacatcattatcttagatcttctgtgcccctacaaacaaacaaacaaacaaacaaacaaacaaaacatgaatgacctcattagatgacctcactagatgggtcaattatacaattaagttaaaatattcagaagaagttttatccatttgaaccattttatcacttgtgttgattctccctcagaggacttaggagatgagaaacactgattatatgagcgcacgagttttagggagaatagtaaatgctgaggaaaagataatgtgytagtgggcagggaggctttgtcctgccactaaggagttgtgctgctctagaaagcagtataaacaggttcagcactcatatagtcagtgtttctcatcatcaatatttaccatgaatctctaaattatattttcctttctgaatgtttgattaggaaatgcatctacaaccacaactgtgatagacagcaaaaatggatctgtgcccaaatcccccggaaaagtgctgaagaggacagtcacagaagacatagtgacgacgttcagctcccctgcagcctggcttctggtcattgccctgataatcacgtggtca

SEQ ID NO: 524062 - DNA, 562 bp, Homo sapiens
aaagaaagcaaaagggctatttatccagagtcataaatgtctaatstaaataggcaatacatagtttattgtataatagaggcttttaaaatatacacagttgtaatgtctataatgtaaattatgacctagagttttaagtaaaagacacttggttaccttactctacaaaatttcatttcccttgagcttgcattgactgaagtatttccctatcagatgaaatgccagtaacataggcattgcccatagaaattaattgcagctctccaatggaagctctactgtgaactataagtatgccttattttaagtaatctaatctaaaaatctaattataggtagctgtgcattttataaaataagaacaaattcctttcaatgataatttctgtagtacacttgtacattgttaactttacaaatatttgatttatatgcaattcttgaaatatgtgtattataaaaatgaaagaactatataaattatggcttcaataacagtttcaaaatgtaaattatactcacatatttaatgttaattttgatagacacaattcaa

SEQ ID NO: 524063 - DNA, 562 bp, Homo sapiens
aaagaaagcaaaagggctatttatccagagtcataaatgtctaatgtaaataggcaatacatagtttattgtataatagaggcttttaaaatatacacagttgtaatgtctataatgtaaattatgacctagagttttaagtaaaagacacttggttaccttactctacaaaatttcatttcccttgagcttgcattgactgaagtatttccctatcagatgaaatgccagtaacataggcattgcccatagaaattaattgcagckctccaatggaagctctactgtgaactataagtatgccttattttaagtaatctaatctaaaaatctaattataggtagctgtgcattttataaaataagaacaaattcctttcaatgataatttctgtagtacacttgtacattgttaactttacaaatatttgatttatatgcaattcttgaaatatgtgtattataaaaatgaaagaactatataaattatggcttcaataacagtttcaaaatgtaaattatactcacatatttaatgttaattttgatagacacaattcaa

SEQ ID NO: 524064 - DNA, 676 bp, Homo sapiens
ctccctgcattttccttgttatttgtctctcctattccacatatayataatttacttgttctacatatattcttcctattataatcctctcatgggaagaagtgtcccttcttataatttatctatctcagtcttatacaatcattcctcctacttcctcagcaatcttgctcattaattatctcttgtttttcttgtagtttcatgaccaccctccttattggctctttcccgtcttcatttatgcattctccattactttcaatcataacctcaatatttcctcacctctctgctccaatctttcattattctcccaccagtggctacatttctttaaaatgtatctccaatcattatgaccatatctcgccttccatttcctgtttagatttctgcaatctgaaacccaccttcaccaccactgcaataaaagcttcttgtgattgtaatcagaaacttcactaaatctcatgggcatgttggaaacctaatctaatttgatttttttcccctagtacttgacactgttgaattgttattcttactgaaatgttctcttttgtttgttctggttgctttcacacttagtttttctcctatctttctggctgctctaagtaaatgtgatagctggtttctttttatgtgttacaaattggtgtttcacagggtt

SEQ ID NO: 524065 - DNA, 492 bp, Homo sapiens
ctgagttggggtacccctctttgctcttcaaactcattttttagttttatttcaataattgttggggtacaggtggtttttggttgcacagataagttctttagtagttgtttttgagattttggtgaactcatcacctgagcagggtacactgtacccaatatgtagtcttttatccctcgttcccccctacaacccttccctctgtgtcctcaaagtccattgtatcattctaatgcctttgcattttcatagcttagctctcacttataagtgagaacatatgatatttggttttccattcttgtgttacttcacttagaataatgcccmcagctccatccaagttgctggaatggccattacgtgattctgttttatggctgagtggtattccatggggtatgtatgccacattttatcatttgttggttgatgggcatttaggttggttatatatttttattcaaacttattttttaaaaaacagat

SEQ ID NO: 524066 - DNA, 349 bp, Homo sapiens
acatacatattaaaaattgtaattgttaaattatcactacttttccaacaaatggatggaaatttccttataagtagaaaatataggactactatcatttatatttaaatatatttttaaaaaacaggttgcttcatcacatttgcctgaatactgaaaaaagtaaaatttaaaaaagaaacttgggtcttagttcttgcacttccataaatttcctgaaagtagctattggcaatatgaggaatctacaattttytgcctacagtcttaagcagaagctttatatgaagtatttatcattactagtgaatacatctgcatgaacttatggttaccttgtgtgcctttg

SEQ ID NO: 524067 - DNA, 725 bp, Homo sapiens
attcctttagtgagaattgtgatggcaaatcggcttcaccgcaggtgtcagctctgattgctggtaggtacagccaggccggctgcctggaggatcgctgtatctagtgtgcctagtagaataggccatgattgattattgatatctggaaaaggtagttgttgtagattraattgtgtctcaagaaaagatacgtagaagtcctaatccctggtacctgtgaatgtgagcttatttggaaacagcgtctttgcaaatgtaggcaagttaggatgagatcattctggattaggatgggtgtccttataacaaaagtgaaaggtggagacagacacacagagaagagaaggccttgtgaagacagaggcagagactggaatcatacatctacaagccaagaaatgttgaggattgctggcaaccactagaagctaagagagaggcctggaacagattcagagggagcatggcctttgctgactccttgatttcagacttctggcctctagtactaagagagaatacattcctgttgttctaagccatccggtttcaggtactttgtcatggcagccctagaaactaatataataatctgaatattggaaagctttcaaatgcaggattgttaaaatgatcactcatttaaaaacacaccctaccatcttgataactgaaggaaggtttcctggagggactgggctgtgactgtggtgtgctccagc

SEQ ID NO: 524068 - DNA, 725 bp, Homo sapiens
attcctttagtgagaattgtgatggcaaatcggcttcaccgcaggtgtcagctctgattgctggtaggtacagccaggccggctgcctggaggatcgctgtatctagtgtgcctagtagaataggccatgattgattattgatatctggaaaaggtagttgttgtagattgaattgtgtctcaagaaaagatacgtagaagtcctaatccctggtacctgtgaatgtgagcttatttggaaacagcgtctttgcaaatgtaggcaagttaggatgagatcattctggattaggatgggtgtccttataacaaaagtgaaaggtggagacagacacacagagaagagaaggccttgtgaagacagaggcagagactggaatcatacatctacaagccaagaaatgttgaggattgctggcaaccactagaagctaagagagrggcctggaacagattcagagggagcatggcctttgctgactccttgatttcagacttctggcctctagtactaagagagaatacattcctgttgttctaagccatccggtttcaggtactttgtcatggcagccctagaaactaatataataatctgaatattggaaagctttcaaatgcaggattgttaaaatgatcactcatttaaaaacacaccctaccatcttgataactgaaggaaggtttcctggagggactgggctgtgactgtggtgtgctccagc

SEQ ID NO: 524069 - DNA, 623 bp, Homo sapiens
aatttattaaaagcctccttgtcaaaatagcataacaatcaatcattgttggggaaaaactttaacttaaaataagtggctggccacttatctcttgtctatttggtctcaaatcttcctccacgtgttcgcattttatactcttcaaaaaatgcagaggtttgaggatgcattggattgttggcttttatggatggcagagttaatttaattccrcaatggaactccatgaattctgcccctatgggtagaaggtgttacagggcccacagggacccaacttcaacagcaagggatctcatggttcaaaaacatgaaattggcaaacgagagtacaagagtgtacctttgtctattttatatattatatacataatcagatccatcccaagcatatggcccttgtgagggaagatgcagtcattaaaggcattggctgaggtttgacctgcttcaatctaactttccatgtgctcataaaattggactctgctctgagataaaagaattctgctttcttcaaagagaatgctcagcgctcctgctccactttcaggagcagccttctgctctgcagcctcccagatccaggctataaagagtgcttttggttctcacttgaa

SEQ ID NO: 524070 - DNA, 623 bp, Homo sapiens
aatttattaaaagcctccttgtcaaaatagcataacaatcaatcattgttggggaaaaactttaacttaaaataagtggctggccacttatctcttgtctatttggtctcaaatcttcctccacgtgttcgcattttatactcttcaaaaaatgcagaggtttgaggatgcattggattgttggcttttatggatggcagagttaatttaattccgcaatggaactccatgaattctgcccctatgggtagaaggtgttacagggcccacagggacccaacttcaacagcaagggatctcatggttcaaaaacatgaaattggcaaacgagagtacaagagtgtacctttgtctattttatatattatatacataatcagatccatcccaagcatatggcccttgtgagggaagatgcagtcattaaaggcattggctgaggtttgacctgcttcaatctaactttccatgtgctcataaaattggactctgctctgagataaaagaattctgctttcttcaaagagaatgctcagcgctcctgctccactttcaggagcwgccttctgctctgcagcctcccagatccaggctataaagagtgcttttggttctcacttgaa

SEQ ID NO: 524071 - DNA, 742 bp, Homo sapiens
aggaaccagagtgcaagagagttgagagtcagctaggatttcagccctctgacctgaacacacacatcttaagctttacgttgttgggtcctgcccataggtgtggacagtttggctcaaagggcttgaatgttcctggagcaggttgtatgtctcagatgagatctgtctctgtgtggggcagaagcagaaatatctgccttgtcttatacacatggaacaagtaattatacacaagtaatccctcatgaggcagagctaaaacatacagttctagacacagttctagaaaaaacaaaaacataaataaaaccagtttttcaccagaattcattatttaagggaagttaagggtaccagttgtatctcagggagggccatgaggtgacaacattatgttctgctattaagcatccctggatgatactctaagagaaataatactggtttggatgggccactgaaataagctagggtatagtaagtagcagttcctgactgcagatgtaagctcttttagaagsaacacatagcgaaggaggaataaaatggcagtaacaatagtaacccatcagtcagcagtgaaatggaagcctgccctgtcctgagactgtgaaaattgaacaatgatttgttgcttgccttcatgcctcatttacattattttgtttgattctcacaataatcctaatagtggatatcattatatttcaaaaatgagaaaaccagctaaaaagtgaca

SEQ ID NO: 524072 - DNA, 622 bp, Homo sapiens
gaatgtctttttgaagctctccaaaaggattttgtaactgaagcattaaaaaaaaaaaaacagagataatatgcatttgacagtgaccttagaaacatcttaaatatcttttgacatcttcagttcatgtttcagaaaaaccgttgtttcttcaattatatctgataatgtggtacattttgtaaattacagagaaaccatggcttttgcaaaacgcttatgtatagaaaagatatggcacccgatttagtcatttttgtaataaaataaaacctgacccaacatatcataataaaagagcaactgaagtagaccagattaatctgtccccgagaaatgcccgactcatctttttcctgaagcatcagcagaagtgtggttttcttttgtaaaattaactccacrttaagagtcttttatctttaaatttcttcctggcaattattaatttgggagatcaaccagagccataaaaatctccatgcatttagatctaaccatcgcttttattccttttgacgctgatgcctggggtaatggtcaggccaaaaacaattaagcagaatgtaggtcagttcaccaggtgataaatttacccatcctttggatcctcactgaagtt

SEQ ID NO: 524073 - DNA, 573 bp, Homo sapiens
tacctagtagggctgtttggaggattaaacaatacaaagaaggtaaaatgcctatcatagtcactcaataagtatttcttattttcctgattacaaattaaataaatgattgataatcatcaaaatgcatttgtataatgtgctaggtgctgtcctaagtggctagaggttgatactattgctatcctcacttaatagatggaaaatacagttttagagatgaaaaataacctagagggaatggcacatgggacctgtggctgagaagaggccctaggaattctgtggctgccagaagtgagacctaggagtggacgtgggctattgggcytcctccttgaccggatccaggccttccttgcatcttggacagtccgtctcacagaatttgggactgtgcagagtgagaatccaatgagctgcctgaaactggtgctcaccaagaatttatggaagtttttattgctatttccaactgagaacttttcttcaatcatttatggaaaacataaaagccagtgggaatcaactaggataaaacaaggtcagaaccactcttccagatgctgagca

SEQ ID NO: 524074 - DNA, 527 bp, Homo sapiens
gtttttcattactacagtttttattactgtagaggtgttctgtggtctggaacataaatattgaatattctaacaaataaaaagaaatgaaggtgcaagccttataacctttcactgagggacataaaaagagtctgagtcaatggaggaaaatagtttgctcatggatgaggagacttaacactgtacagacgtcacttctctgaaacttactcagttcaatgcaagtccaataaaaatcccaagctcatttttggttacttggccaattagttctgaaacttacaataaagggttgatgtggtttggatggtggtcccctccaaatctcatggtgaaatgtaatcctcaatgttggaggtggggccmggtgggaggtgtttggatcacgggggcggatccctcatgaatggcttggtactgtcctcacgataatgagtgagttctcactctgagttctcaggaggtctgcttgttggcacctcccaccccatctcttgctcccgctcttgccatgtgatgcactg

SEQ ID NO: 524075 - DNA, 641 bp, Homo sapiens
ccctaggctggaagtattttagctctgaatctgctgttagagggtctatcattctttgtcatttttttctctcagatactgctctttttagtttagttttatttattaatatcttcctactgtggtgcttaacgtctcctttccccctcctccaagggtgagaggtctggttgaaagatctctactagctacgcagtaatttttttataattcttccttccttcaaatgtgtctttttgtgacccaatcgaacgctggcaatgaagttccttatctccatttgacttgtgcatgaagccaacactcagaaatcctrcttcatcccttaccttttctctttgtagctaacccaaaatgtgttcagttttactaaaagctgaagctctccacaaacttctgagtatagtgtactctggccgaaatggcagccactttttcaatatttttcatgttaattacatttaactacacttagtttcatgaaattgaaatttacaaaaaaggaggaaaaaaccatggggtgggggtggggaaatgtggtaaattatatttttagagaaataccagaagtagttttgttttatttcaaaaaaaagtaattaaaaatcgtttaaatcattcataacttctataaagttctt

SEQ ID NO: 524076 - DNA, 641 bp, Homo sapiens
ccctaggctggaagtattttagctctgaatctgctgttagagggtctatcattctttgtcatttttttctctcagatactgctctttttagtttagttttatttattaatatcttcctactgtggtgcttaacgtctcctttccccctcctccaagggtgagaggtctggttgaaagatctctactagctacgcagtaatttttttataattcttccttccttcaaatgtgtctttttgtgacccaatcgaacgctggcaatgaagttccttatctccatttgacttgtgcatgaagccaacactcagaaatcctayttcatcccttaccttttctctttgtagctaacccaaaatgtgttcagttttactaaaagctgaagctctccacaaacttctgagtatagtgtactctggccgaaatggcagccactttttcaatatttttcatgttaattacatttaactacacttagtttcatgaaattgaaatttacaaaaaaggaggaaaaaaccatggggtgggggtggggaaatgtggtaaattatatttttagagaaataccagaagtagttttgttttatttcaaaaaaaagtaattaaaaatcgtttaaatcattcataacttctataaagttctt

SEQ ID NO: 524077 - DNA, 619 bp, Homo sapiens
ttcttattctaagactgagacttgagtcacatgtataaatttgccttttagtgttataaaagtatgtgaataagtacaagtacaaacacattaatatataaaataaatatagaaaacctattattgaatttcagctatttagagcatgttatagttctgttaaatttggaaattgaatatagagatagttgtggaaacaaacatatgtttctcgatttttttattaccagtgttttaagaagaaaaaattgatcatagcccaattcccactctgttagtagttagctgttaccttggatgaagtcacctcatctcctcaggcctagtatcctcatctggaaattgaagaaatttaattaaatgctatataaggctgctttcagttctaaaatcctgcaatttatgcaagttttgaaaatgctaggtcataaaatattatttttgggaggaagtgaagtaggtaaactgccaatggcagaagcacatattttaaatattccctgcatctaatatggttacttgattctgtccaaactactgtgaaaacrcacgtgattgtgtagctatttctgtgacctgcatattaaaaggtttaaattctcagatgttccaagagcag

SEQ ID NO: 524078 - DNA, 323 bp, Homo sapiens
ctgcttaacactatctgtccaaagcatctagtttactttcaagagaagcttatctaaatgctaatgggtaactcaattaagaaagaaatgatgagtataaccaaatagttaatgcagaagaatctcygtagtcctcaaaaggcctcaaatacatactgtcaatcataaaggtaaaaaagttgtcaaagttttgagcgtgggtgataaaaaatatcgtttccataatgctcagcatacattcgagtatccagaatgaactcagaagcattttctttttctttcttttattttttttttaataagaaaaagatgtgtctcaaact

SEQ ID NO: 524079 - DNA, 323 bp, Homo sapiens
ctgcttaacactatctgtccaaagcatctagtttactttcaagagaagcttatctaaatgctaatgggtaactcaattaagaaagaaatgatgagtataaccaaatagttaatgcagaagaatctccgtagtyctcaaaaggcctcaaatacatactgtcaatcataaaggtaaaaaagttgtcaaagttttgagcgtgggtgataaaaaatatcgtttccataatgctcagcatacattcgagtatccagaatgaactcagaagcattttctttttctttcttttattttttttttaataagaaaaagatgtgtctcaaact

SEQ ID NO: 524080 - DNA, 323 bp, Homo sapiens
ctgcttaacactatctgtccaaagcatctagtttactttcaagagaagcttatctaaatgctaatgggtaactcaattaagaaagaaatgatgagtataaccaaatagttaatgcagaagaatctccgtagtcctcaaaaggcctcaaatacatactgtcaatcataaaggtaaaaaagttgtcaaagttttgagcrtgggtgataaaaaatatcgtttccataatgctcagcatacattcgagtatccagaatgaactcagaagcattttctttttctttcttttattttttttttaataagaaaaagatgtgtctcaaact

SEQ ID NO: 524081 - DNA, 608 bp, Homo sapiens
agtaggctcctctgccaaatttaacttgtacatttctaaatcacttacatattttaaaggattaaaattaaagatgagattaaaaacttttctctttgcttcaaagggagaaccaaaatctccacagagcctaactgacaacctttgttgctgcttggaaagggggagggaaaaaaggaattgcttgaagtgtttccttagttcttaacctcttgttttccagccagtgttgttttggactaaacattggaatgttgagatagatcgcgatgcttaccttggctttactcaaacctaaagtgacattgaagaaattgatcctggatatttgtccatttctgagcttggctgtgactccagtccttaggagggtggttaatttgacatgttctggcagaattaattttgctgccataccagtaactttctcctaataaatttttctctctggagatttcaacactttaaaagatgatacarcgtaccttttgcaaagcagaggatgataaggttcatgtaggcaatggagtaaatgattacttctgcaccccaacatataattatggaagcaggatgaaggaactttgaatatgcttgctagtggcaca

SEQ ID NO: 524082 - DNA, 590 bp, Homo sapiens
ccagttatggcggatgctatttcacatatatctaaaattggtttacatatcaagatgatttatttaaactagaccaacatccacattcatttatgctatggaaatcagctttgattgtcttcgtagccaacttggaaaaaaaaatctggtaaaatcatttagtctctgagtttgctttacgagtgattttctctgggaaaagaagtgggggacttctgctaaattggggatctgggtaaccgagcatctctgggaggaacaaaggaatagaacagaggggctaattgtttaattagtaaatgtctgcttggttaatgacatattaatgagtttttaagaccgtcatatcatttaccataaaagacccatgtgcctatccctggatgtactgtataattaagtaatgtggcccagaggagttaatcatttaaaaccytgtcatctttctcaagtttgcagatagaagagctagcacagaaggcacctgccaggtagagtcagggtggcacataattctgaactaaattgtctctctgcaacggctgcacagtcagatgtctgcccaggagcagaaatttttttttcttttg

SEQ ID NO: 524083 - DNA, 621 bp, Homo sapiens
gacatgcaggagaaagtggttaatttttaccataaatatcagggaagacttcatgcaaaagayaggctttgagtttttcatgtaagtttagatcagattctgagagatagaggtatgggaaagagtgaagtaaacagcacataagaacagtcatgaagaaggcaatttcagtgtgcagcatttagagcttgggtcagaaaagcaggtccactacaagtgggagctggttgctatacactgaatgtttgcagtccacaaaatcaatatgttgaaaccctaatctccagtgtgatggtatttggaggtggggcctttgggaggtaactgggcttggatgaggtcatgggggtggaactcatgatggaattggagcctttacaagggaatgaagagacaagagctctctttatgccacgtgaggatacagcaaggccccaatctgcaagccaggaagagtcgtcacgagaaccagaccatgcaggaactctgatcgtggacatttcaacctccagaactgtgatccagtaagtgttgtttaagccacccagtctttgttattttttatagcagcctaagcggactgagacacgtgaaggtggactgagacacatgaagcagtca

SEQ ID NO: 524084 - DNA, 621 bp, Homo sapiens
gacatgcaggagaaagtggttaatttttaccataaatatcagggaagacttcatgcaaaagataggctttgagtttttcatgtaagtttagatcagattctgagagatagaggtatgggaaagagtgaagtaaacagcacataagaacagtcatgaagaaggcaatttcagtgtgcagcatttagagcttgggtcagaaaagcaggtccactacaagtgggagctggttgctatacactgaatgtttgcagtccacaaaatcaatatgttgaaaccctaatctccagtgtgatggtatttggaggtggggcctttgggaggtaactgggcttggatgaggtcatgggggtggaactcatgatggaattggagcctttacaagggaatgaagagacaagagctctctttatgccacgtgaggatacagcaaggccccaatctgcaagccaggaagagtcgtcacgagaaccagaccatgyaggaactctgatcgtggacatttcaacctccagaactgtgatccagtaagtgttgtttaagccacccagtctttgttattttttatagcagcctaagcggactgagacacgtgaaggtggactgagacacatgaagcagtca

SEQ ID NO: 524085 - DNA, 630 bp, Homo sapiens
tgggtttatgataactacaaatggcctgccattgtctgggaggaagctgtcttcatctccccttttatttccattctcctgtcctccccagcagaaagctataaacgttctctgaaacagttcagccactgaaagggcaactgcagaggtcttgattgtcctaaaaaggccccgcggatgggtgggtgggctggtaggtagctgaaggcaggtttgggacctcattctccatcactgttaggtaacctttgggcttcttagactcaacctgcctaaaactgagctctgatctccccttcttccaccccttgctgtcttccccatcttacaaaatgctaacttcatcagtgccagattgyattttcctaaagtggccacagtaatatccctcatctcacatgtccttctgcagtgtgaccttgccactttcccatcaagaagtagaggtaatttttccatcctcttgaaacaggccaggccctgtgactgctttgaataatacagtagggtagaagtgatgtggtgccagtttggggcacagcccttaaccagcctggcagcttctacttccacctggaagccagccatccctatgtaagaggtgggactatccaaggaccaccgtgctgt

SEQ ID NO: 524086 - DNA, 584 bp, Homo sapiens
tcctttctccctgagcttatcttctggatagamtgttgtctttctgggactgttaaatattctcaataaaactcaacatgctctccaaaatgttaggttgatgatgcttttgtagccttatccatttacttattctgtccctgtaaacaggagtcatagatttaaggccatgtgactctacttagttcagtatggacctctcagatgtgctatccaagaagcagcaaactagggcacccagggaacaccagaactgtcttgtccattagtttagcttttttgttttatttttggtcacatgcaacagaaacccctttgactagcttgggcaaagaaaaaaaggacagtaatttgttagaaggtccatgggagtacctcggaaatcaaaggaaggcttgaacaactaagatttggaatgaaatggggttacccctgatagtttagtagcaggagtgtccggatcctctcttcactgggctcccatgaacacaacacagcccaaaagatttccagcccatagatgttcaagtagatgtcaaattcccaagaagcagaatgtgccagacccacctggggtcgtgcat

SEQ ID NO: 524087 - DNA, 383 bp, Homo sapiens
tgcgtccccccatagctcctgactcactctggccttgggcagaccctcatggccatggaccrgggatggggaggtgagaatcctcttttgttccccatttccatacagggaagcatagttgtgaatctccgtgaatcccactcctccatcccagtagacctcctgacccttgccacaaccctggacatcacggttgtcctcagagtggactttccactgctttactacacatctttgtcaggaaaatcaacacaaaaaaagtgagctctacaggaaaataacttccgtgctcctcttagcatcaactcacaaggctaaacaagatctgttttgtttattcacttcctgctgaggcaaatcagtcctgactactaaaatggagg

SEQ ID NO: 524088 - DNA, 383 bp, Homo sapiens
tgcgtccccccatagctcctgactcactctggccttgggcagaccctcatggccatggaccggggatggggaggtgagaatcctcttttgttccccatttccatacagggaagcatagttgtgaatctccgtgaatcccactcctccatcccagtagacctcctracccttgccacaaccctggacatcacggttgtcctcagagtggactttccactgctttactacacatctttgtcaggaaaatcaacacaaaaaaagtgagctctacaggaaaataacttccgtgctcctcttagcatcaactcacaaggctaaacaagatctgttttgtttattcacttcctgctgaggcaaatcagtcctgactactaaaatggagg

SEQ ID NO: 524089 - DNA, 567 bp, Homo sapiens
ctattcaaaataaattttaaaaagacagttttagggctagtcagccagaacctaagtaataatagaaataaatatgcactgcctgcgacagactaaaaaatggagacatttccctttggaaggacaaagtcaatgctatgtataatcaaagtctacaaaccaatatgagcaggaataagtggctagaccctgcygtggggttcctccttcaaaaaagaaatatgcacaggggtttcatgctcaataaaataacaatatttatttcatttttagaattttttaaaataacacttcccctatgaagaactcaagatacatatgtaaacttttaatttataacaacaagctttcctaatatttataattcttttaaaggaggggagagagggactatgaggtagacaaaaaggtaaaagaagaagcatgcaggtgaaagaactgcctaacagcgtgcaggagagaatgagtgaaatacattccacaggcaaagggcccaccaaccaataatagcaaaaccatccagcaataggaaaagagaagtttttgcctagtgatagattcataact

SEQ ID NO: 524090 - DNA, 612 bp, Homo sapiens
ctgggtgtggcggtgcatgtctgtaatcctagttacttgggaggctgaggcaggagaatcgcttgaacccgggaggtagaggkcgcagtgggccaagatggcaccactgtactctagcctgggcgacagagtgagactccatttcaaaaaaaaaaaaaaaagactcaagaaagactgggccccagcgccagcctgcctcagagcccaagccctccaagttcagttccttttcataagcatcctcaccagaaaccacatctttctggaggtgactgaagtagatttctcttccctgcagctaaacaaataatcttaaatatctatatccattatttccattgtccagagctgtcgaatgtacataaaactgtaggagtatatgttggctataaatcagcttcagcacagactctggaagtggaatttaaaaattaagttcgtgatactagtaggttgtgtttttagttctggtcatttactactcctcacaaaagttcaatgtaaaacagattgagagctgtgcagtactcaacctatatatgacattatttgctagctaaagagagttggtgcacctgccttacagacatttatacactaagatagctatac

SEQ ID NO: 524091 - DNA, 550 bp, Homo sapiens
gctaaggtgagaggaacccttgagcccaggaggtcgaggctgcagtgagctatgatcatgccactgcactccagcctggacaacaaagtgagaccctgtctcaaaaaaaaaaaaaaaaaaaattgtgtgaggggaaataacctaaatgtccaaccatgggagaattagtaaaagaaatcacagyaactgcatgtgactgagtcctgtgttactataagtcacatcttaaaaatgacttactaacaggagcatgtcattaaatgatgtgcaccttaaaaacttagaaatttcaattgtttatttttaaaaacatctacatagcactatgtgtcaggcactatgcactttgttcatctgaactcatctttttatggcgagagatacaataaaagtcaaaatacaacggtctggaatttcaccatatgaattggtgttaaaatctgataggtaaaaagaactgtagagacagactgtaataggtaagtaggcacaaaagacataaataggctgttcacagaaaaaaggcaataaacattaaaggatgcttaaa

SEQ ID NO: 524092 - DNA, 550 bp, Homo sapiens
gctaaggtgagaggaacccttgagcccaggaggtcgaggctgcagtgagctatgatcatgccactgcactccagcctggacaacaaagtgagaccctgtctcaaaaaaaaaaaaaaaaaaaattgtgtgaggggaaataacctaaatgtccaaccatgggagaattagtaaaagaaatcacagcaactgcatgtgactgagtcctgtgttactataagtcacatcttaaaaatgacttactaacaggagcatgtcattaaatgatgtgcaccttaaaaacttagaaatttcarttgtttatttttaaaaacatctacatagcactatgtgtcaggcactatgcactttgttcatctgaactcatctttttatggcgagagatacaataaaagtcaaaatacaacggtctggaatttcaccatatgaattggtgttaaaatctgataggtaaaaagaactgtagagacagactgtaataggtaagtaggcacaaaagacataaataggctgttcacagaaaaaaggcaataaacattaaaggatgcttaaa

SEQ ID NO: 524093 - DNA, 550 bp, Homo sapiens
gctaaggtgagaggaacccttgagcccaggaggtcgaggctgcagtgagctatgatcatgccactgcactccagcctggacaacaaagtgagaccctgtctcaaaaaaaaaaaaaaaaaaaattgtgtgaggggaaataacctaaatgtccaaccatgggagaattagtaaaagaaatcacagcaactgcatgtgactgagtcctgtgttactataagtcacatcttaaaaatgacttactaacaggagcatgtcattaaatgatgtgcaccttaaaaacttagaaatttcaattgtttatttttaaaaacatctacrtagcactatgtgtcaggcactatgcactttgttcatctgaactcatctttttatggcgagagatacaataaaagtcaaaatacaacggtctggaatttcaccatatgaattggtgttaaaatctgataggtaaaaagaactgtagagacagactgtaataggtaagtaggcacaaaagacataaataggctgttcacagaaaaaaggcaataaacattaaaggatgcttaaa

SEQ ID NO: 524094 - DNA, 616 bp, Homo sapiens
ctgctctttgacttacgatgaggtcgcattgggataagcccatcataaattgagatactttcaacttaacaatagtttcatctgaacataaagtcaaggatcatgctgaaggcatatcacttttgcactgttgttttctgtcaagcagtytatattttcaaaggagcattcttgtagctactattgagactaaacatggggatggtggcaagggcagaaatagggagataaattggaagtcagttgcaacagctcaggagagaaatatatcctatatccttctgagtgagtccagtatcaagtctggtctttgaacgactagttaactctaagacttaagagccagcaaaggagactggggagtggctgggagagtaggaggaaaaccaggaggaggtggtgtcatgggagttaagggaaggctaggaaaagttcacgacgtcaccaaatgctgagaggtcacttaagggaaagagaggctgccaagggtcctttgagttttgtagttaggtcatagttgacctcggcaatagaaataattttaagaaaattcatgccaaactatacaaaccaaagtttctgtttgataatagtttttataataaggatgcaaatt

SEQ ID NO: 524095 - DNA, 533 bp, Homo sapiens
acagcatgggctgctaggttcctgtaaagccaacctttgtttttttcagcttattttgcacattaatttgtgtaacaagctcattcttgttggtctctgatctggtttgactctgtgtccccacccaaatttcatctcaaattgtaatccccacaggtcaagggagggacctrtaatccccacatgtcaagggaaggaggtaattggatcatgggggaggttcccccaggctgttctcatgatagtgagtgagttctcatgagatccgatggttttgtaaggatctcttcccccttcactcttagctctctcctgccaccatgtaagacgtgcctgcttccccttccatcatgattgtaagtttcccaaggcctccgcagccatatgaaactatgagtcaattcaatgtcttttctttataaattacccagtctcaggtatgtctttatagcagtgtgaaaacaaactaatacagtctctaataccattctcccaatatcatttctacaagaataatgtgagccacatggaag

SEQ ID NO: 524096 - DNA, 545 bp, Homo sapiens
tcaaaagagctctattaagtaggtattattcttaccaccttgtattggtctgttttcatgctgctgataaagacatacctgagactggggaatttacaaaagaaagaggtttattggacttacagtgctacatgactggggaggcctcataatcatggtggaaggtgaaaggcacgtctcacatggtggcagacaagagaagagagcttgtacagggaaacaytcccttataataccatcagatctcgtgagacccattcactatcacgagaacagcatgggaaagatctgcccccatgattcaatcacctcccactgggtccctcccatgagatgtgggaattcaagatgagatttgggtggggacacagccaaatcatatcaccctgattttaaaaatggaggaatgtggtcacaaagagatgaaagaatttgtccagtgtcacccagccagtctagctccagagccagtgctcataattccctctcaataaatgactactattgtttttaatgatttgtccaaagcagtattaactttttca

SEQ ID NO: 524097 - DNA, 657 bp, Homo sapiens
gcgacaagaatcagaatccatctcaaaaacaaaacaaaagaaaacaaaatcccataatgccaaatatacgtgaagaatttgctaaaacctgagttgagcccaaatattgagtttattttttaaactcaaatttgtattgaacttacttcagaatgtttctaaagtatagcctgaactgctgccgatcttcaacattttcaaaactatggtactataacaaaattaggccatcaatatattctctgaatgaaattggacttgatttagcacctctgtcttaagtctctgaattgagctttctyatagcagtagggtcctcatcgtctgcatacaccactaccaatttgtttattaatcttttctgacaatacctctcccccttttaaatagccttgtttctaatttggaagtgtcattcttagtgaaactaaaatgagttgcaggattgatcagtttttgttgatcagttttattcattttctcatttttttctttcttatgcttttggatattaacagaagaaacataagcagcagttcgtaaactgcctctcaagcatcagagggaatttgatgctgtgagatttaggctttcttctcaacttttccatgggtgataatgtccccaccatgactcttccagcagaaaatgcccaga

SEQ ID NO: 524098 - DNA, 657 bp, Homo sapiens
gcgacaagaatcagaatccatctcaaaaacaaaacaaaagaaaacaaaatcccataatgccaaatatacgtgaagaatttgctaaaacctgagttgagcccaaatattgagtttattttttaaactcaaatttgtattgaacttacttcagaatgtttctaaagtatagcctgaactgctgccgatcttcaacattttcaaaactatggtactataacaaaattaggccatcaatatattctctgaatgaaattggacttgatttagcacctctgtcttaagtctctgaattgagctttctcatagcagtagggtcctcatcgtctgcatacaccactaccaatttgtttattaatcttttctgacaatacctctcccccttttaaatagccttgtttctaatttggaagtgtcattcttagtgaaactaaaatgagttgcaggattgatcagtttttgttgatcagttttrttcattttctcatttttttctttcttatgcttttggatattaacagaagaaacataagcagcagttcgtaaactgcctctcaagcatcagagggaatttgatgctgtgagatttaggctttcttctcaacttttccatgggtgataatgtccccaccatgactcttccagcagaaaatgcccaga

SEQ ID NO: 524099 - DNA, 622 bp, Homo sapiens
cagtgtcctgttagaagccttcaacttgccaagcacagatccattcctttgaaaaggtcactgtgtgaagagctgcctaccagtggctgactcacacaagcatctattcacgctcattttcctacatgaatagttccagggttaccagagttctagcctcatctcaaggccttcatttatttattttcccagagcagtctcatcaggctatgaagttccagcttgctttatgttgatgactgctgagtctacatctgctgctctcacttcttctgaattctgaagaagaaatttcttaggctgcattccaggccctttgtattctctcccagacctgccatgacagcctgaatttccactgctcagatttatgtgtcgtatgtcctggaataactgaactattrgttattttctataaatactccatatttttcagtcttcatcctcctcacatttaccacctctgcatgtgtgttcattggttctttatctacatttactccttggctaggtaatacgattcaatctcaaggttgtacatgctctctatatctttataacttccacatttacatctccagatgtgactctatgtttaaattctaggctcatatatctaact

SEQ ID NO: 524100 - DNA, 400 bp, Homo sapiens
gtgaaaaaaggttttggatagaattaaagggagaatattgtttcatctgattttccaagaaatatttttcttttttttttccgtttgtgagaaataacactttccagcatgtatgcctcttaaaatttatttttcttctactctgtttaaatgggagagagaacatattttctatgaagatgaccatttagagaatttcctctgtgctacctcacagagaacataaaagggtaattatagagacttttccttgttatagtatttcattyccgcttttcttctgagttttttttagacatctgacttgcctcttttccctaccaaaatgactatgcttgacattcaactttgatgattatgtcagtgactttcaggtttctatctaatgattcatcaagtt

SEQ ID NO: 524101 - DNA, 601 bp, Homo sapiens
aaattgaaaacataaaagtatcaaaaggaaatggatgaattccccttgatgattggctaatttgtctacacatttaaaaagtggcaaaaatattgtaaatgaagtcaaaatgcaacwgacaaaaataggagaaaatattcacaatgtctagcacaaagggctaatatctctaatatgtaaagaaccattgaaggaagaagagccaaatatcaaatagaaaaatggagaagtgaagcaatcaacaaaccagacaaaaaattattctcaccatatgaaaaaatttaaatgcatgtataattagacaggcacaaattaaaacaatattgagatacaatttctcacttattagactggcattaaaaatattagcatgttcttttagtgaagctctgtggaaacaggagttctcatggccagcaagagctgaactgagctgccagttgtgggagaagtcaattaaaacaacagccaaggaggaggagccaagatggccgaataggaacagctcgggtctacagctcccagcgtgagcgacacagaagacaggtgatttctgcatttccatctgagctttgaagagagcagtggttctcccaccacg

SEQ ID NO: 524102 - DNA, 450 bp, Homo sapiens
accatattattagaaccccttgagagccagcctattcttctgctctacagacatggacactcaggcttagggaaggatgaagtgatttgccagcctgtcagtggtggggccaggctaccgactccagtcatrgggttccagccaacatctttaaaccccataccatagccaagcatctgaagccaggaagaattgagaaattatggaggggagaatttcaaggagaaaaggttgaggtttaaagcagtcagccatgaggggtaggggaaaagtcccagtgtacaagacatggctgttgacagtctgtgaacaggaccaaggaggcagcggatgatgagaacatgctgctctaccacttatgggtagagtgggcatataattgttggccaaaaccaagaccttttgagagcgagagggcactgttaataattgtaccgggaagactgcaat

SEQ ID NO: 524103 - DNA, 450 bp, Homo sapiens
accatattattagaaccccttgagagccagcctattcttctgctctacagacatggacactcaggcttagggaaggatgaagtgatttgccagcctgtcagtggtggggccaggctaccgactccagtcatggggttccagccaacatctttaaaccccataccatagccaagcatctgaagccaggaagaattgagaaattatggaggggagaatttcaaggagaaaaggttgaggtttaaagcagtcagccatgaggggtaggggaaaagtcccagtktacaagacatggctgttgacagtctgtgaacaggaccaaggaggcagcggatgatgagaacatgctgctctaccacttatgggtagagtgggcatataattgttggccaaaaccaagaccttttgagagcgagagggcactgttaataattgtaccgggaagactgcaat

SEQ ID NO: 524104 - DNA, 478 bp, Homo sapiens
agacaggttttataattcacttaataaaatcatatctcaggctgcaggaaaggaatgtcaaatctgatttgtgccaggcaagttcatcgtcattagtccaaaagaggagagaggtctattggaaatgaggagctgctgctttccatctcaccctcggtttttagtttgtctctcttcagtttttgttgctgctttccctcgtgtactcaggattatgttttaaacactcacaacctggacgattttggttttgtttacttattggctgtatgtttacctcaaccaggccaaaggttctatggactctggactggatgcactactgatttacttttttttctgatggtgggggtggggagatggacttttgctcgtctcccaggctggagtgcaatggcataatctcggctcactacaacctctgcctcccttrttcaagcaattctcctgcctcagcctcttgagtagctgtgattat

SEQ ID NO: 524105 - DNA, 643 bp, Homo sapiens
ccctgggtctccttatgcacaaattaaaaagatgcacagactgtctgagatagaggagagggaatgtcccrtgaataaacactctgtgtcaccctttcttaccttcatgctgtctatgaatgtgtagtttgtatgctcatgatgatgtacagagtatttccatcacatgtatgttcataaatataataaagtcataacaatagtatattacagttcatagcttagaaaaacaaatgcttcaaaaattcttaaagaacattcaggctgttagacacatgtctattttatactacttgttatctatgtttccagataaatatatataaatttgatttgaaaattacaactatagtatatctatacaatagaatatcactcaataatacaaataattaactgccaatgcacacaacatcttgaatggatctcaaagacattataatgagtgaaagaaattagtctcaaaagattacatattgtttggtaatatctatatgatattctccaaaagacacactctagctatgaaggatagatcactagttatcaggggtcaggaatcagtgaaggagctgagaatgaagggatggcttgaaggaatgtttggggttgatggaattgttttgtatcatgattctggtgt

SEQ ID NO: 524106 - DNA, 643 bp, Homo sapiens
ccctgggtctccttatgcacaaattaaaaagatgcacagactgtctgagatagaggagagggaatgtcccatgaataaacactctgtgtcaccctttcttaccttcatgctgtctatgaatgtgtagtttgtatgctcatgatgatgtacagagtatttccatcacatgtatgttcataaatataataaagtcataacaatagyatattacagttcatagcttagaaaaacaaatgcttcaaaaattcttaaagaacattcaggctgttagacacatgtctattttatactacttgttatctatgtttccagataaatatatataaatttgatttgaaaattacaactatagtatatctatacaatagaatatcactcaataatacaaataattaactgccaatgcacacaacatcttgaatggatctcaaagacattataatgagtgaaagaaattagtctcaaaagattacatattgtttggtaatatctatatgatattctccaaaagacacactctagctatgaaggatagatcactagttatcaggggtcaggaatcagtgaaggagctgagaatgaagggatggcttgaaggaatgtttggggttgatggaattgttttgtatcatgattctggtgt

SEQ ID NO: 524107 - DNA, 643 bp, Homo sapiens
ccctgggtctccttatgcacaaattaaaaagatgcacagactgtctgagatagaggagagggaatgtcccatgaataaacactctgtgtcaccctttcttaccttcatgctgtctatgaatgtgtagtttgtatgctcatgatgatgtacagagtatttccatcacatgtatgttcataaatataataaagtcataacaatagtatattacagttcatagcttagaaaaacaaatgcttcaaaaattcttaaagaacattcaggctgttagacacatgtctattttatactacttgttatctatgtttccagataaatatatataaatttgatttgaaaattacaactrtagtatatctatacaatagaatatcactcaataatacaaataattaactgccaatgcacacaacatcttgaatggatctcaaagacattataatgagtgaaagaaattagtctcaaaagattacatattgtttggtaatatctatatgatattctccaaaagacacactctagctatgaaggatagatcactagttatcaggggtcaggaatcagtgaaggagctgagaatgaagggatggcttgaaggaatgtttggggttgatggaattgttttgtatcatgattctggtgt

SEQ ID NO: 524108 - DNA, 643 bp, Homo sapiens
ccctgggtctccttatgcacaaattaaaaagatgcacagactgtctgagatagaggagagggaatgtcccatgaataaacactctgtgtcaccctttcttaccttcatgctgtctatgaatgtgtagtttgtatgctcatgatgatgtacagagtatttccatcacatgtatgttcataaatataataaagtcataacaatagtatattacagttcatagcttagaaaaacaaatgcttcaaaaattcttaaagaacattcaggctgttagacacatgtctattttatactacttgttatctatgtttccagataaatatatataaatttgatttgaaaattacaactatagtatatctatacaatagaatatcactcaataatacaaataattaactgccaatgcacacaacakcttgaatggatctcaaagacattataatgagtgaaagaaattagtctcaaaagattacatattgtttggtaatatctatatgatattctccaaaagacacactctagctatgaaggatagatcactagttatcaggggtcaggaatcagtgaaggagctgagaatgaagggatggcttgaaggaatgtttggggttgatggaattgttttgtatcatgattctggtgt

SEQ ID NO: 524109 - DNA, 634 bp, Homo sapiens
agaaatgttgcccataatgatttcaaatgccttagaatgattawtattataaatttagaaagatatttttgtgtagatttatttttgatttttacgaaaaataatgatttttgagagtttttatttcatagtttcacggtaagttgtcttgtttaatggtcctctaatgagtgtcagggtaagagatgtgattaaatataatattgtggcaaaaggagatgtctatagaataaaaattgtgaaataatcatattctaaaattgttctaattagggtagtctgacatcattagaatttcattactctaatatgatcatattaaaatgccaaaaaaagagtctattataaacatatttagaaaacttaatcagcattcccagttttctctcatacacacatataaatatatatgtttctgaaattatcaaagaaccatgtcttaatctgctcaggctgctagaacaaaatgctattaactaggtggcttataaacaacataaatttatttctcagagttctggaggctaagaagtcctagatcaagttgttggcaaattcagtgtctggtgaaggctcacttcctggttcatagacaaggaggcatcttttcaccgtgtactcacatggcagaaag

SEQ ID NO: 524110 - DNA, 634 bp, Homo sapiens
agaaatgttgcccataatgatttcaaatgccttagaatgattattattataaatttagaaagatatttttgtgtagatttatttttgatttttacgaaaaataatgatttttgagagtttttatttcatagtttcacggtaagttgtcttgtttaatggtcctctaatgagwgtcagggtaagagatgtgattaaatataatattgtggcaaaaggagatgtctatagaataaaaattgtgaaataatcatattctaaaattgttctaattagggtagtctgacatcattagaatttcattactctaatatgatcatattaaaatgccaaaaaaagagtctattataaacatatttagaaaacttaatcagcattcccagttttctctcatacacacatataaatatatatgtttctgaaattatcaaagaaccatgtcttaatctgctcaggctgctagaacaaaatgctattaactaggtggcttataaacaacataaatttatttctcagagttctggaggctaagaagtcctagatcaagttgttggcaaattcagtgtctggtgaaggctcacttcctggttcatagacaaggaggcatcttttcaccgtgtactcacatggcagaaag

SEQ ID NO: 524111 - DNA, 634 bp, Homo sapiens
agaaatgttgcccataatgatttcaaatgccttagaatgattattattataaatttagaaagatatttttgtgtagatttatttttgatttttacgaaaaataatgatttttgagagtttttatttcatagtttcacggtaagttgtcttgtttaatggtcctctaatgagtgtcagggtaagagatgtgattaaatataatattgtggcaaaaggagatgtctatagaataaaaattgtgaaataatcatattctaaaattgttctaattagggtagtctgacatcattaraatttcattactctaatatgatcatattaaaatgccaaaaaaagagtctattataaacatatttagaaaacttaatcagcattcccagttttctctcatacacacatataaatatatatgtttctgaaattatcaaagaaccatgtcttaatctgctcaggctgctagaacaaaatgctattaactaggtggcttataaacaacataaatttatttctcagagttctggaggctaagaagtcctagatcaagttgttggcaaattcagtgtctggtgaaggctcacttcctggttcatagacaaggaggcatcttttcaccgtgtactcacatggcagaaag

SEQ ID NO: 524112 - DNA, 634 bp, Homo sapiens
agaaatgttgcccataatgatttcaaatgccttagaatgattattattataaatttagaaagatatttttgtgtagatttatttttgatttttacgaaaaataatgatttttgagagtttttatttcatagtttcacggtaagttgtcttgtttaatggtcctctaatgagtgtcagggtaagagatgtgattaaatataatattgtggcaaaaggagatgtctatagaataaaaattgtgaaataatcatattctaaaattgttctaattagggtagtctgacatcattagaatttcattactctaatatgatcatattaaaatgccaaaaaaagagtctattataaacatatttagaaaacttaatcagcattcccagttttctctcatacacacatataaatatatatgtttctgaaattatcaaagaaccatgtcttaatctgctcaggctgctagaacaaaatgctattaactaggtggcttataaacaacataaatttatttctcagagttctggaggctaagaagtcctagatcaarttgttggcaaattcagtgtctggtgaaggctcacttcctggttcatagacaaggaggcatcttttcaccgtgtactcacatggcagaaag

SEQ ID NO: 524113 - DNA, 600 bp, Homo sapiens
taatgggtacattgaagaccactaagaagacctcctgtggtaccatctcttaacccaaacaatgcttcctctggtgaagtatggtgaccccagccccttcagttcctgccccatcagtgtaactctggggacccccctacgccaaccaacagtctttcaagacaacttgatcctggaaccttttacatatttgtctgatgccttgcggggcatacattcttgcccctcaaaacaatgcaagggaagcttacccagccactaccccagttcttcttgccctactactgtgcactgccccagccaacctcccacatttagacttcttcaggggacacctgtgaagctttctagtgaacttggctcttacagcagcccaaggcaagctaatgagtttctgaaccccaaaagacattcagctagggaatgtcatgtgacatgttttccccttcaarcagacaacccaaagcccatgagaagttatcgtggtataaccccaaagtctatgagaagttatcatggttttattgcatcctcttcatttggctaatgaaggagagcaaaaagaaataacaacctttcctcttctcttgtctcctccaa

SEQ ID NO: 524114 - DNA, 578 bp, Homo sapiens
gagtgtgccctgcattacagaatagggcacagttatcttaacatccaatgaaacagagtatttggcaaagataacttcaccccaggtctattgtaaccctgtaatttttatagaggtgacactccgagagaaagggactgaacaaggacaacgtccaggctcatggaagcttgcagacactgtgattccttgccacagaacagcagttcaagaagtttatttcacagcttttctccaacagaaccatttcctagagaaaaaggaagcctacctaggaaaatctaacatgaaaaaccacgttctaaacttccctttctcttcttatattttagacagacaacacagagtgctctgggaggaaaaaggaggcatgttcccagggaagaccaccagctcagataagtgacagggcagccacagctccaggactaaggcattggtggctgctatgtaaacagcaggaggcagggcaaggaccatcagctccccctctgtgtacasatcatcaatggactccccctataatggaaacccctggcagaatgtgagctgttttgagtgagctggtgggagtggca

SEQ ID NO: 524115 - DNA, 578 bp, Homo sapiens
gagtgtgccctgcattacagaatagggcacagttatcttaacatccaatgaaacagagtatttggcaaagataacttcaccccaggtctattgtaaccctgtaatttttatagaggtgacactccgagagaaagggactgaacaaggacaacgtccaggctcatggaagcttgcagacactgtgattccttgccacagaacagcagttcaagaagtttatttcacagcttttctccaacagaaccatttcctagagaaaaaggaagcctacctaggaaaatctaacatgaaaaaccacgttctaaacttccctttctcttcttatattttagacagacaacacagagtgctctgggaggaaaaaggaggcatgttcccagggaagaccaccagctcagataagtgacagggcagccacagctccaggactaaggcattggtggctgctatgtaaacagcaggaggcagggcaaggaccatcagctccccctctgtgtacacatcatcaatggactccccctataatggaracccctggcagaatgtgagctgttttgagtgagctggtgggagtggca

SEQ ID NO: 524116 - DNA, 600 bp, Homo sapiens
ctggaagggagggaaacctttttgtcctctctgcttcataacaaactatatttatgctggaggcatcaaaagatagaatcagcacacggacctcacatcctactcctggtacaaaaaacactgatggtgaactgagctgttgcagataaagcacgtcaaagggccagggctgcttctggcagaagctaaacaagaggaggctggcaggcgtgcatgacgacagcacaaacaygttttatgcagagaagccttttggcatccttttccccccaaacaagttcccaaaccaaagcttgatgtttaccttcggcgagtgggtcaagggtgtgtatcatgagttggaagatgctattcctcatgagactgttgtggagggaggcagagcttccacctcgctggagacgcggcttagcctgagcagagaaaccaaagagatggttagtctcaggaatgaaagacaagtgcattatagacaagatcctcacctagtctggtggccactcatttctgtcgcatgatcacacagtattgagccaaagattttcaaagcacatttcaaagcccctgagggaatggctctctcacattctttcctactaa

SEQ ID NO: 524117 - DNA, 632 bp, Homo sapiens
tacgttacaaattcaattttaaaggggtttaattacacgggaagtaactagtgaaggtgacaaagaaatgattttaatgtgtatagccagtgggttttgggttggcctagtgttgtgaatttattttcaaggccattaaatacatggcaagtttattctaacccatgggatattacagaagacaacttcttcaaaagaagactaacatgactctaaggattaatcttggcattcttatgatgcwttttgctttttaacccccttaattttaaacacacaaaaataccactcatttgggctgtattaatatgaaagcccaattcctggtagtcagcatgctatggattggcttaacaaattcctataaataaataaataaataaatttaatgaatacatttataaataaatttcctatagctgtagaaaaagtctgttaagccaatctatagtacacacacaactattctttgaggattgtttaaaagaattcataaactacatcctgaaggtctcagatcagggctttggtgtgccaacgcagactcccctcaccatttataacagcaagactttggcaggccatcatctacttatgagaaaatattctgtaattcaaacctttattcaatt

SEQ ID NO: 524118 - DNA, 632 bp, Homo sapiens
tacgttacaaattcaattttaaaggggtttaattacacgggaagtaactagtgaaggtgacaaagaaatgattttaatgtgtatagccagtgggttttgggttggcctagtgttgtgaatttattttcaaggccattaaatacatggcaagtttattctaacccatgggatattacagaagacaacttcttcaaaagaagactaacatgactctaaggattaatcttggcattcttatgatgcattttgctttttaacccccttaattttaaacacacmaaaataccactcatttgggctgtattaatatgaaagcccaattcctggtagtcagcatgctatggattggcttaacaaattcctataaataaataaataaataaatttaatgaatacatttataaataaatttcctatagctgtagaaaaagtctgttaagccaatctatagtacacacacaactattctttgaggattgtttaaaagaattcataaactacatcctgaaggtctcagatcagggctttggtgtgccaacgcagactcccctcaccatttataacagcaagactttggcaggccatcatctacttatgagaaaatattctgtaattcaaacctttattcaatt

SEQ ID NO: 524119 - DNA, 405 bp, Homo sapiens
tggttcatgagctgtagtttgctaatttgtttctttaaatattgcattaaaatatttattttgatgaccaagattttgggtacccccttaaattttgtgcctgagtgccatcctcaccttaccctaattccagccctgggtgttatcttctattctaagttcaaatggtaagctaatgaaagttttaaagcaaatgactgataggatttgatttaagttatacaagtgggctttggttgctgtgtagtttggcgggagatcwaaagtggggactgggagaatagttaggaggctgatgcgtcagtctagtgattttgctctggtccagaccaagtcaccaaagaccattcagatgtaaagatggtggccacttccctgtctgcatatctacgtgacatctcagca

SEQ ID NO: 524120 - DNA, 566 bp, Homo sapiens
gttcatgagctgtagtttgctaatttgtttctttaaatattgcattaaaatatttattttgatgaccaagattttgggtacccccttaaattttgtgcctgagtgccatcctcaccttaccctaattccagccctgggtgttatcttctattctaagttcaaatggtaagctaatgaaagttttaaagcaaatgactgataggatttgatttaagttatacaagtgggctttggttgctgtgtagtttggcgggagatctaaagtggggactgggagaatagttaggaggctgatgcgtcagtctagtgattttgctctggtccagaccaagtcaccaaagaccattcagatgtaaagatggtggscacttccctgtctgcatatctacgtgacatctcagcatttgtcttactcctgttgattctctcatggttgtccctctgctttactgacttctcagtcttgggaactctgccctcttgtgttctcacacaatcccttggccttaaattccatcaacagaatctctagttctgaatttgtctcctccaaacatgcatatcca

SEQ ID NO: 524121 - DNA, 626 bp, Homo sapiens
tggttcatgagctgtagtttgctaatttgtttctttaaatattgcattaaaatatttattttgatgaccaagattttgggtacccccttaaattttgtgcctgagtgccatcctcaccttaccctaattccagccctgggtgttatcttctattctaagttcaaatggtaagctaatgaaagttttaaagcaaatgactgataggatttgatttaagttatacaagtgggctttggttgctgtgtagtttggcgggagatctaaagtggggactgggagaatagttaggaggctgatgcgtcagtctagtgattttgctctggtccagaccaagtcaccaaagaccattcagatgtaaagatggtggccacttccctgtctgcatatctacgtgacatctcagcatttgtcttactcctgttgattctctcatggttgtccctctrctttactgacttctcagtcttgggaactctgccctcttgtgttctcacacaatcccttggccttaaattccatcaacagaatctctagttctgaatttgtctcctccaaacatgcatatccaattccaattgccaactcaccatttctattgaatgtctagtgggcataataaacttaac

SEQ ID NO: 524122 - DNA, 626 bp, Homo sapiens
gttaacaggttaggttaattgttctctgtttgcccctccatatcaaatcttcactctcttcactctgctgtatgctccaggaggccaacatttaggtgttgaatcaatgatatcctgccctggggcttcctattggactcaatcaatgggagataccagtgggagacccaggagaccagaggttgggaggagagagagctcggaatactgattttcttagctccyttctgtctagatgtaaaaggccaagggctggtttctctccccaaggccactgtccagcagcccgtttctacagccacaggtatcagagggttccagtttccctctctcccttgaaccttcacgcaacgaacgtacacaagtgctttgtagacccttgctggtttcctggaactctactgtttacaagttgaattgtgtcctctcaaaaaagctatgctgaaatcctaacccccagtactttaggatgcaatcttatttggaaacaggattgttgcagatgtaattagttaagataaggggtagggaggtcctagtccaatatgagtcgagtccttagaagaagatggtggtggaagacagagagacacacagagggaatgaaggcagagattccaattatg

SEQ ID NO: 524123 - DNA, 638 bp, Homo sapiens
cttcctctgctttttttaaaaaggatttatgaagtgctgtgtacagataggcctgttggtttctttcatagaaacaggagcttggttatattacatgtgactaagatccacagggtgaggggagggaggggggcactaaggtgatgctgatgcttctgtaagccacactcacaatccaaccagtcacaaagtctaattccacccctaaatatcttcaattctgtcttttctgctccatttccactgccctggccttattctgaggctttgcctagactactgcaatggtcttatttgcactcttcttcccttatctttcttaccacctgtctacccccagcacctttcacctatctttctcatcattatcaaggtaatcatttctaaacacaaagtgaaamtataacacctctcaatcctgcacatactgtgattttgcgttggaattttactacgtctcctaatttactgaatctttcagaaccccgttgaggttccctcctccatgcagcattcctgaatgcccccatccctaacgttaagtcactttcctcctgtgtgtctgttccaactatacacttttgttgttgtgctcatcttatcaaatgtaccttaacctacttgttttctgcccttta

SEQ ID NO: 524124 - DNA, 630 bp, Homo sapiens
tgtttcaaaaaaggtttagagtraaaaatacacattatgagtgcagtaaagctagggacccaccgtgaaaaatcagctacacaaatttcattcctagcataatgctgatgcaaaatttcagtgcagggcatttgccaaagggagaggagggaaaggtttactatgaaatcctttgaaaggacagtacattaactattgaacacttactgtatgctagacgctgtaagtgcggcgaggtaaaactctgaaagcaaatcccccacaggcaagatgcagtttagtgggacagaaggatgaacctgaacaattataaaactgatagcaggaaacacaggtctttgctcctagagtgctactgaagcaaagggaaaggaactattgcctcagcataggtttctgggagattacatggatgttgagcggtatcttgaaagatggaggagctcattgtctttatggaaatggaagagtccagaaaaggtgatgggcatttggtctgaccacacctagccattgtgatcaggtgatcttcatttcacattcagtgtcctgcctggaaattgtgctctgaacttttttttttttttcagtttccaagaaacataaatttattttttcatgaaatgtgtg

SEQ ID NO: 524125 - DNA, 586 bp, Homo sapiens
tttcaaaaaaggtttagagtaaaaaatacacattatgagtgcagtaaagctagggacccaccgtgaaaaatcagctacacaaatttcattcctagcataatgctgatgsaaaatttcagtgcagggcatttgccaaagggagaggagggaaaggtttactatgaaatcctttgaaaggacagtacattaactattgaacacttactgtatgctagacgctgtaagtgcggcgaggtaaaactctgaaagcaaatcccccacaggcaagatgcagtttagtgggacagaaggatgaacctgaacaattataaaactgatagcaggaaacacaggtctttgctcctagagtgctactgaagcaaagggaaaggaactattgcctcagcataggtttctgggagattacatggatgttgagcggtatcttgaaagatggaggagctcattgtctttatggaaatggaagagtccagaaaaggtgatgggcatttggtctgaccacacctagccattgtgatcaggtgatcttcatttcacattcagtgtcctgcctggaaattgtgctctgaacttttttttttttttc

SEQ ID NO: 524126 - DNA, 586 bp, Homo sapiens
tttcaaaaaaggtttagagtaaaaaatacacattatgagtgcagtaaagctagggacccaccgtgaaaaatcagctacacaaatttcattcctagcataatgctgatgcaaaatttcagtgcagggcatttgccaaagggagaggagggaaaggtttactatgaaatcctttgaaaggacagtacattaactattgaacacttactgtatgctagacgctgtaagtgcggcgaggtaaaactcygaaagcaaatcccccacaggcaagatgcagtttagtgggacagaaggatgaacctgaacaattataaaactgatagcaggaaacacaggtctttgctcctagagtgctactgaagcaaagggaaaggaactattgcctcagcataggtttctgggagattacatggatgttgagcggtatcttgaaagatggaggagctcattgtctttatggaaatggaagagtccagaaaaggtgatgggcatttggtctgaccacacctagccattgtgatcaggtgatcttcatttcacattcagtgtcctgcctggaaattgtgctctgaacttttttttttttttc

SEQ ID NO: 524127 - DNA, 586 bp, Homo sapiens
tttcaaaaaaggtttagagtaaaaaatacacattatgagtgcagtaaagctagggacccaccgtgaaaaatcagctacacaaatttcattcctagcataatgctgatgcaaaatttcagtgcagggcatttgccaaagggagaggagggaaaggtttactatgaaatcctttgaaaggacagtacattaactattgaacacttactgtatgctagacgctgtaagtgcggcgaggtaaaactctgaaagcaaatcccccacaggcaagatgcwgtttagtgggacagaaggatgaacctgaacaattataaaactgatagcaggaaacacaggtctttgctcctagagtgctactgaagcaaagggaaaggaactattgcctcagcataggtttctgggagattacatggatgttgagcggtatcttgaaagatggaggagctcattgtctttatggaaatggaagagtccagaaaaggtgatgggcatttggtctgaccacacctagccattgtgatcaggtgatcttcatttcacattcagtgtcctgcctggaaattgtgctctgaacttttttttttttttc

SEQ ID NO: 524128 - DNA, 631 bp, Homo sapiens
gcctacttaagggtggagaatgagaggagggtgaggatcaaaaagctacctattgggtactatgcttattacctgrgtgacaacataatctgtacaccaaacccatgacacacaatttatgtatctaacaaatctgcacatgttccccgaacctaaaataaaaatcaaaaaacaaaacggaacaagttcactgtgtttggggtatgtaatgtataaaatggcatgttactcaccccttgtgtacatagtcctcaagttacttaaagtttatgagccattatgaaactctgtaggaattcgtgtgatagactcgaaggtgaaatcaattagggagcaaacagacaaattcctttgtccatttgggtggtcccacatatcaggccatagctatgacggaaaatgtttcctgacttcctcacaccgttcacattcctcattctgaaacattgtaccaatgtgttccacgccgtgtttctcaacttcttcttgagcttccaactttgggatcataggaccactttcctgtttggggttttacctttacacttgactttggtacttacttgctctctggctttgacctttgcattcctccttgagtccaaatcagattcctaccagttactacttt

SEQ ID NO: 524129 - DNA, 625 bp, Homo sapiens
cctacttaagggtggagaatgagaggagggtgaggatcaaaaagctacctattgggtactatgcttattacctgggtgacaacataatctgtacaccaaacccatgacacacaatttatgtatctaacaaatctgcacatgttccccgaacctaaaataaaaatyaaaaaacaaaacggaacaagttcactgtgtttggggtatgtaatgtataaaatggcatgttactcaccccttgtgtacatagtcctcaagttacttaaagtttatgagccattatgaaactctgtaggaattcgtgtgatagactcgaaggtgaaatcaattagggagcaaacagacaaattcctttgtccatttgggtggtcccacatatcaggccatagctatgacggaaaatgtttcctgacttcctcacaccgttcacattcctcattctgaaacattgtaccaatgtgttccacgccgtgtttctcaacttcttcttgagcttccaactttgggatcataggaccactttcctgtttggggttttacctttacacttgactttggtacttacttgctctctggctttgacctttgcattcctccttgagtccaaatcagattcctaccagttact

SEQ ID NO: 524130 - DNA, 541 bp, Homo sapiens
tcggcttcacgaggatgcatgactcaggctcattcagtaagtaggccccacctctgggctgtagggcttgcagggactggtaagaagctggatacttgactcaaactggtgaaatgctgagactgttggaggaagcactggaaacaggggttgtctttcctctggggatggtaagctgatgagatgtaagctaagatctactggtggctttcttgtttactgtacaaggaacctgcctgagaatagaactaactgacagaaaagcaaagttgaatgcagaagacacacagaaagaggtaaaggccaaatggtactgcctgaggcctccttagatctagccattctgtagctactggacaattcagtttcataaactactgtggcttttctcttttttcctttttgcataaatgaacacaagtgattctrtaggcttttatatattcagtctggttccaaatccttttcccctataattcactagattacacctgatgctgaataatgaatgtgcacagtacacagtggatttcgatagaat

SEQ ID NO: 524131 - DNA, 404 bp, Homo sapiens
gcaacaggcaatttcagctgccactgcaagacagacctgagactgagtactaattccaccatgggctgcaagtccttaaacttctcaatgtctccatktttctttttgttacaaggagttaacagcactctcatgcatttggagtctacagagtaaagccaagggtctagaaagaaacaaagatgcctagaaccagaggtttgtctggaaaatgaagatgtgaatgaatcttttattcagcataattttggcatcccacatttcttctgtaggcctcttatatcagtttctttcatagtacaaccagaaactaacaatatgtccatttcaaaaaatatcacaaattccagagcaatgtatgtgataaaaagtaaaaaaaaaaaaaaaaaaaaaaaaaaaaaaag

SEQ ID NO: 524132 - DNA, 583 bp, Homo sapiens
tgttagagttcattaccttaagggaatgatagatgtcgggggtggattatgagctttttctttttataactttgcattatttgccttttaaagcacatggacacatacacaaatacatattatttttaaatttaaaatagcaataaagataatcccaaataaaagagagataatgctatctaagtagacaattctagacaacgctttgacatgtgttaagctaataaaccttagggatgaaatgtatatgccgtaattcctaacataatttggggtctatgaggggacccacaataaataatgtatttctttcccaccagaatatctttttttttctgatagaggatgtgttggaaggcataactttgtgtgagagtccagtggacctgctgactgcactgtagaattaggccatcttatctccctagtccagggcagctctttcaggacaagccttctaggtaaggtgtataccrtgtggcaaagaactctgtctttccatggtaagcttagtccccaaaggaaaacaagaaggtttcctgaactactcatccccgcttattctttctactttgacagagaa

SEQ ID NO: 524133 - DNA, 583 bp, Homo sapiens
taaaatggccacattcttcttttggaaatgcgaagtgacctttggtttttgtggctgtgtcatacactgcagggctaggagcagtctaaatgataagagccgggccattttttagttttatatatgtttaactgctattttctgtgtatgatagagttagtcattttcacttgcttagcttattgacccaagaaagaaatgatgaccacattgtgtttggtggccatgactacaagcaacacaaagagcttctggaagttatggtaaaataggggtgtgtgagagggctactcagtgacggcttgcttacagtaagtggctgccactggtatcctccctcatgccaaatttcatgtcatgcatgagagaacgcattctcagaatctctgaccataactccctggacttatcagaaccctgggattcacatcattcaggattctgggtggcagaactgggggagggctgtgaatttattatttggttaacttactggaagaagagaatgggttcttttccttttaccccgasaactccacccttgtgtagatctctttcttattgcttctgtggaaagcccaac

SEQ ID NO: 524134 - DNA, 610 bp, Homo sapiens
ctgggaaaagtaagattatattgttatattctttatttggttgctgcatgatattttcttttatagataaacttttaaacaagttttctcctttacaacatccttgtgcagtcacatatcttcatgcaaagacacaagggctccctattgaatttaggttagatttagtgtttatccacaattgtgcttaagccatgccctccacattgccaaggataatcaagagttggctgtaattgcttataccctwgattttggaatgtgtgattaattatatgtaaatattatttccttttaattggtgttttcagtataaatggcctaagttaaaattttttttcagtgcttgtttcttttataaccataagatcatttttcatgttcctcattgatttcctatggaaataaaaataaaatgcattgaaatttgtcacatgaatttaaattgcaagtacagctaatttagctacttagtttaattaaaatgcctactatgctagacagcagcagtatattagaaggatcatttatagttctctgcccttaaggatctgaaaggctaattgaaagtcagacatgtaaacaactaacctgtgaaagaatcaaataa

SEQ ID NO: 524135 - DNA, 610 bp, Homo sapiens
ctgggaaaagtaagattatattgttatattctttatttggttgctgcatgatattttcttttatagataaacttttaaacaagttttctcctttacaacatccttgtgcagtcacatatcttcatgcaaagacacaagggctccctattgaatttaggttagatttagtgtttatccacaattgtgcttaagccatgccctccacattgccaaggataatcaagagttggctgtaattgcttatacccttgattttggaatgtgtgattaattatatgtaaatattatttccttttaattggtgttttcagtataaatggcctaagttaaaattttttttcagtgcttgtttcttttataaccataagatcatttttcatgttcctcattgatttcctatggaaataaaaataaaatgcattgaaatttgtcacrtgaatttaaattgcaagtacagctaatttagctacttagtttaattaaaatgcctactatgctagacagcagcagtatattagaaggatcatttatagttctctgcccttaaggatctgaaaggctaattgaaagtcagacatgtaaacaactaacctgtgaaagaatcaaataa

SEQ ID NO: 524136 - DNA, 610 bp, Homo sapiens
ctgggaaaagtaagattatattgttatattctttatttggttgctgcatgatattttcttttatagataaacttttaaacaagttttctcctttacaacatccttgtgcagtcacatatcttcatgcaaagacacaagggctccctattgaatttaggttagatttagtgtttatccacaattgtgcttaagccatgccctccacattgccaaggataatcaagagttggctgtaattgcttatacccttgattttggaatgtgtgattaattatatgtaaatattatttccttttaattggtgttttcagtataaatggcctaagttaaaattttttttcagtgcttgtttcttttataaccataagatcatttttcatgttcctcattgatttcctatggaaataaaaataaaatgcattgaaatttgtcacatgaatttaaattgcaagtacagctaatttarctacttagtttaattaaaatgcctactatgctagacagcagcagtatattagaaggatcatttatagttctctgcccttaaggatctgaaaggctaattgaaagtcagacatgtaaacaactaacctgtgaaagaatcaaataa

SEQ ID NO: 524137 - DNA, 569 bp, Homo sapiens
aagaaatatttcatgtggattcatctcatccaggaaccaagctgtgatgggagttagtgaattctgaataatggttgatacatctgctggaaacattcagcattgtgaatactatctttctgtcgcatagcttattcagtactgctttctttgttggcaccaactgcactttcagaaagaaaaaaaatacctccaaacccaccaggaayactttccatatgaagatttcttactatgtctcttggatgctggctttccaaactcatccaatcttagcgtagtttctaaggtttctttttacaccctgggaaaggttggtttcatagaagctaaaatagatcttagaaatcaacaagctcagtaggattttattatttgaaactctagggttcctctgtggtatctcagaagctatgggaggagttgagtgaatgaggagaagggagggtatcttgcttcagctccagcaccttcacctgtatctgtttcagacattgggctctgtgtaaaatttccattgaccatgtatgtcaaccaaaatttggggctgatctaaaagtgattagccc

SEQ ID NO: 524138 - DNA, 569 bp, Homo sapiens
aagaaatatttcatgtggattcatctcatccaggaaccaagctgtgatgggagttagtgaattctgaataatggttgatacatctgctggaaacattcagcattgtgaatactatctttctgtcgcatagcttattcagtactgctttctttgttggcaccaactgcactttcagaaagaaaaaaaatacctccaaacccaccaggaacactttccatatgaagatttcttactrtgtctcttggatgctggctttccaaactcatccaatcttagcgtagtttctaaggtttctttttacaccctgggaaaggttggtttcatagaagctaaaatagatcttagaaatcaacaagctcagtaggattttattatttgaaactctagggttcctctgtggtatctcagaagctatgggaggagttgagtgaatgaggagaagggagggtatcttgcttcagctccagcaccttcacctgtatctgtttcagacattgggctctgtgtaaaatttccattgaccatgtatgtcaaccaaaatttggggctgatctaaaagtgattagccc

SEQ ID NO: 524139 - DNA, 622 bp, Homo sapiens
tgatttaaatattcttttgaagtcatctacatgcctccagaagttaaaaaagaatatatctgaaaccctaacttggctatagaatagrttggaaagtacagagttcgttagaattacattattatttgtaatctgggataaatattgaaattgtaataagaaaagtaagtcttacctaaaatacaaggactttgaagaaaatcacatgataagacaaaactgtcaaacaagcttgggttaacgtggactcatttggttccagaaaagctcagagtgaagacagctcgtgaattctgtcatcaggcagtaaggcctgtatcgcatgtcactttgctttgtttttaatatgtggttcaagctatgccaggcctgccgctgtgcgggagatgtactttctgacaaaataaggcattttcctggcatcagatccttttggaatttttactggtttgcataaacccggcgagttcctatttcccacacatatccagtgcagtcacacttggcattgcggatttatggtggtcttgaagcctgtcagtgccagcgtggtcagttccttagcaccactggaggttattctgaagaaatgaaaccaggtattcgttcatccattatttaa

SEQ ID NO: 524140 - DNA, 622 bp, Homo sapiens
tgatttaaatattcttttgaagtcatctacatgcctccagaagttaaaaaagaatatatctgaaaccctaacttggctatagaataggttggaaagtacagagttcgttagaattacattattatttgtaatctgggataaatattgaaattgtaataagaaaagtaagtcttacctaaaatacaaggactttgaagaaaatcacatgataagacaaaactgtcaaacaagcttgggttaacgtggactcatttggttccagaaaagctcagagtgaagacagctcgtgaattctgtcatcaggcagtaaggcctgtatcgcatgtcactttgctttgtttttaayatgtggttcaagctatgccaggcctgccgctgtgcgggagatgtactttctgacaaaataaggcattttcctggcatcagatccttttggaatttttactggtttgcataaacccggcgagttcctatttcccacacatatccagtgcagtcacacttggcattgcggatttatggtggtcttgaagcctgtcagtgccagcgtggtcagttccttagcaccactggaggttattctgaagaaatgaaaccaggtattcgttcatccattatttaa

SEQ ID NO: 524141 - DNA, 552 bp, Homo sapiens
taacaatctgatttcttttttctcctgaagagtcatacattttgtctgatctgggagaatgcaggcttttgtatcttctaggctcaaagacacttggaagagagaagtctctggtggcgttttcagattcaacctgtggactgaaacagagtygatctctaggcacagttgttaagtaggcatctctatgtcgcttttcatcctgatctcctcctctgtgcttacccctttttttccttcagctcttcatctcttcatggacgctcctgtccccaacccaatgctcattgtgtaggagtcgatcatctgccatcttcactctattttgaaggcaaaagacatttttaactgcctcagaggtatttgcatcattaagcaccatttataactgacagccccaaaaaagtagtaggatacattagaaagtgggtttagttgggtgcccaagtacttggatttttgtcctgatgctgccattaactagctgtgtgaccgggtgaaagtcactttacatctctggacttgaattttacaatttataaaataaggagg

SEQ ID NO: 524142 - DNA, 552 bp, Homo sapiens
taacaatctgatttcttttttctcctgaagagtcatacattttgtctgatctgggagaatgcaggcttttgtatcttctaggctcaaagacacttggaagagagaagtctctggtggcgttttcagattcaacctgtggactgaaacagagtcgatctctaggcacagttgttaagtaggcatctctatgtcgcttttcatcctgatctcctcctctgtgcttacccctttttttccttcagctcttcatctcttcatggacgctcctgtccccaacccaatgctcattgtgtaggagtcgatcatctgccatcttcactctattttgaaggcaaaagacatttttaactgcytcagaggtatttgcatcattaagcaccatttataactgacagccccaaaaaagtagtaggatacattagaaagtgggtttagttgggtgcccaagtacttggatttttgtcctgatgctgccattaactagctgtgtgaccgggtgaaagtcactttacatctctggacttgaattttacaatttataaaataaggagg

SEQ ID NO: 524143 - DNA, 539 bp, Homo sapiens
acagagtcgatctctaggcacagttgttaagtaggcatctctatgtcgcttttcatcctgatctcctcctctgtgcttacccctttttttccttcagctcttcatctcttcatggacgctcctgtccccaacccaatgctcattgtgtaggagtcgatcatctgccatcttcactctattttgaaggcaaaagacatttttaactgcctcagaggtatttgcatcattaagcaccatttataactgacagccccaaaaaagtagtaggatacattagaaagtgggtttagttgggtgcccaagtacttggatttttgtcctgatgctgccattaactagctgtgtgaccgggtgaaagtcactttacatctctggacttgaattttacaatttataaaataaggaggttggacacatgatytctaatcttccttcttggcatctaaatctatgaattcaaagcatggtgggggcagagatacatctttttcttatgagggaaacccttgaaattgtttcatcatctattctggtttaaa

SEQ ID NO: 524144 - DNA, 671 bp, Homo sapiens
ggtttaaaaaagtactatcattttgaatgataatgatgccatttgtagattttcagccatgccctagggctcagtagactgagcctgaagtagcgatttcatctatctttcatgtaaaactactacttttttattttttgcatatttatgttaaaatacctgtagttatattatagacttaattctacattctgatttttttccagttaatgtaaagttgccatgagtggttattcattcttcatgttgtgtcatcatttttgtggctgtgtaatattccgtctagagactgtactgtacttaaccggctatgcctttaatatttaaattatttcaaaggcgttttargttattttgaaggatattttctgtattctaaataacctgctataatacataatacagttttcccttgttttggattatttccttaggattatttttgaaataaatcagtgaaggaagtgaacatgttggtgattctttatacttattgctaaattgctttctaaaacatttctgtgatttccacatggcagagtaagagtggccacatgtgcctaatgaagctacagagtgaaggattccctagatttagtgcaactggaaatgattctcacctgagacgatgctgagcccatcctggtttcaaaaaaatatttttaatgaat

SEQ ID NO: 524145 - DNA, 466 bp, Homo sapiens
aaaccatatcaactgggcatacagcaaattcaagttttgctttttaaaactttgtggaaaatgttttcaagtattttccatttgagcttggttgcattcatgaatgcaaaactcacagatacagaggggtgactatatgcatttaatatccctaaaggctgaaagtcatacaaccttagagatagaaagctctcaaagatgactgaattcaaccacttcacttcacagatacagaaactgaggcccatagatgggaatctcaagatcacaaagggattcagcattagaagcaagtctcctacaacccrttcatggatcttttcccttcataatgttgccttccttctcccagtgataaaggtgagatgtggatgaagtctaacaatgagctgtgcatcagaatgtcatggtctaaaatttttcaggcaatgattaacattaatatctgccttgcaaatggactcag

SEQ ID NO: 524146 - DNA, 533 bp, Homo sapiens
gctggggcccaaaagaatccgcatgtgtcaagatgaagcataggtttcagtctgaatttaaatcttgattccacccatgatcgccaacttgcatgaccgtaggcaagttatttcccctctcatggcctctgtttctcatccataaaatagggagacaaggagccacctttcaagatcaaagtagaatttcataaattaatccatgcacacaatatgtgctcaatggcagtttatcagttttccatatatttatactatattctcaacgatgcttcactttcaattaaattggcagtgccttcaaacaaaggaactttccatttttctgccattttctttaatacaatgtactagctaactttttaatatccttaagtaaatacactattggaaggagcaaaaatcctggagtaaatctttttgcaaagcaagaaaaaaaaatagaatgattaaaggttagaactagaatggtccttagagatgatgaartttaattccctcatttcacaaaagggggaaaggctcaaaaaaag

SEQ ID NO: 524147 - DNA, 632 bp, Homo sapiens
ctttaaaacatgaggatttcaaagaatgttgatcttttattcctttgtgctttgcctgctctgcatgatgttcctatttttcatttctttcatgttttttacttttgatatgcttttaaataaaagttgcacaccactaagggcacatgattaccaagatgtcacttttttcattctgcattgtctaaaagactcaagtagaacatgtttgtataaagtctggggtctcccttctgagtgatccagaacacagatctagaaggagacagtgtctatcaagagtgttcctgtgtaagcttccatcacatttctcctggaagttgacaaaaagtctccaattattcctgccacaygttcttatccatatcttctcctagggatgaatgaatgaatgatcaaatttcacctgagttaagtgtcatgacccaaagaaataaaaaataattataataaaagctaatgttcatgaaaaacactaaatggcacagcacatggtactgtaagtgcattaaaatgtaatcatcacaatagtcctgagacacagatattacgatcctcatttatatataagaaaactaggaatcagagcagtcgagcaattttcccaagatcacacagcaagtaaatggtgg

SEQ ID NO: 524148 - DNA, 555 bp, Homo sapiens
gtttctcaagatgtacacagacaagatgataggattatatgatcctcaggcaaggagtaatttttcttgtcagttagtcccatatttcagctcccatcyatctcacatagaagatgaagtactatgttttaatgcattaaaaataacagtgagcattttttgaagacttttctattccaaacacagtgctcagtgagaaatgacatgcagggattcatttaatttgtagagcaacaccatgaatttgataatcctattggtgtcactatatagaggatgagactgaggccccagagagtttgggttcctttcctaagttacatagccagtatatagcagaacaaaactcagacccacgtttctcaaattccaaagcctaaatgcttaacctccatgggtcactttcatctccataaacagcctgtatattaggttgtattgtttccatgcaacccttgaaaaagttgaaattttttaaagtttgatgctcctgtgatcaggtgatttcatcaatgtcacaaatctaggaattaggactcaaacacaggtctcaac

SEQ ID NO: 524149 - DNA, 555 bp, Homo sapiens
gtttctcaagatgtacacagacaagatgataggattatatgatcctcaggcaaggagtaatttttcttgtcagttagtcccatatttcagctcccatctatctcacatagaagatgaagtactatgttttaatgcattaaaaataacagtgagcattttttgaagacttttctattccaaacacagtgctcagtgagaaatgacatgcagggattcatttaatttgtasagcaacaccatgaatttgataatcctattggtgtcactatatagaggatgagactgaggccccagagagtttgggttcctttcctaagttacatagccagtatatagcagaacaaaactcagacccacgtttctcaaattccaaagcctaaatgcttaacctccatgggtcactttcatctccataaacagcctgtatattaggttgtattgtttccatgcaacccttgaaaaagttgaaattttttaaagtttgatgctcctgtgatcaggtgatttcatcaatgtcacaaatctaggaattaggactcaaacacaggtctcaac

SEQ ID NO: 524150 - DNA, 592 bp, Homo sapiens
cactattcaaaaataaatcatgcatttgtgtagcatatgtaagtaattatagtagcatatgtgtccttgttactagactgtgtgctccttgaaggcacagtctgtgtcttgttcctctctatagcacattttctaacacagtatctggcacacagtaggcaaccaatgcaagataatcacagtgatggggctatagcgagggtgatgctggtagtgatagtagtggtgtagcatagtggtggcggtagtggtcatggttgtagtgatggtaggtactggtaataactgggggagggggtgagacttggctgttaatttctcttcaaagagtagttatttggaattctcttctcagttggagccaaaaagtggaaatgaaacaaacaagcttttctggcagagagaaagaatctgctggaaggtcagacaaccacaagactagaattacacatgactcttcctagagcagcatgaacagaaaatgctcacaggattggaagtctgaaaacccgagggctggaaagraccattcagatctacagagtattttacagccttcaaaacattgaaagtctcttaatttttctacaga

SEQ ID NO: 524151 - DNA, 459 bp, Homo sapiens
gcatcaggtcaatgcagcacaaggaacaggctgagtccctgcactacttttttttttttttttaaaccaagtctcactctgttacccaggctggagtacaatggcacgatctcggctcactgcaacctccacctcccaggttcaagcaattctcctgcctcagcctcccaacgtagctgcgattacagatgcctgccaccacacctggcgaatctttgtgtttttagtagagatggggtttcaccatgttggccaggctgctctcaaactcctgacctcaggtaatccacccgcctkggcctcccaaagtgttgagattacaggcatgagccaccatgcccagcctgcactacttctcataaagccccccatcaatcaaaaacatctatttgggatgttgcacaaacaaacaaacaaacaaaaaccttgattgtattaagccactgagatttaagggtt

SEQ ID NO: 524152 - DNA, 611 bp, Homo sapiens
ctgtgtggcaaatgacatgctcaggtttccctcctactgaagtggcaccggattttgctgttgggggaatgcaaaagggtcaggcttcttcactctctccatgactcaggggtggtaggaacagaggcagygactgctgggaattgaactcacagaagaaagctgaatcatggctctagtgctcaggccggggcaggatggctgagttgggaacctgtcaccaaagccagcagcctcatttggcagagtaagggaggcaggaagtcatggagtacatagtctgccttctgctcctctacacctaggctgtggttatatgcatgtgctgaagacacatttaagtggtttaagtattcaacctccttgtaccctcctggactggtggcagaaacagtggtgcgggtggctatcacaaagggcttgccagtgacctctgagagttgggctgtccaaggaatgtagagctatggctgccatgttcaggcagtagtggggctggtgtgctgggtgtcagaagcctgcaggcctcatatggcaggaagcagcagaggcctggcgctgtggtcacgcagtctgcctactgcttctccatacttggctgtgatatctgt

SEQ ID NO: 524153 - DNA, 624 bp, Homo sapiens
tgtgtggcaaatgacatgctcaggtttccctcctactgaagtggcaccggattttgctgttgggggaatgcaaaagggtcaggcttcttcactctctccatgactcaggggtggtaggaacagaggcagtgactgctgggaattgaactcacagaagaaagctgaatcatggctctagtgctcaggccggggcaggatggctgagttgggaacctgtcaccaaagccagcagcctcatttggcagagtaagggaggcaggragtcatggagtacatagtctgccttctgctcctctacacctaggctgtggttatatgcatgtgctgaagacacatttaagtggtttaagtattcaacctccttgtaccctcctggactggtggcagaaacagtggtgcgggtggctatcacaaagggcttgccagtgacctctgagagttgggctgtccaaggaatgtagagctatggctgccatgttcaggcagtagtggggctggtgtgctgggtgtcagaagcctgcaggcctcatatggcaggaagcagcagaggcctggcgctgtggtcacgcagtctgcctactgcttctccatacttggctgtgatatctgtactgtaagcacagg

SEQ ID NO: 524154 - DNA, 611 bp, Homo sapiens
aaataccttgaataatgtttttacatagtttgaatagacactctattatctcttatctatttattttatttttatttatttattttttttagacggagtcttgctctgtcacccaggctggagtgcagtggcacaatctccgctcactgcaagctccacctctagggttcatgccattctcctgcctcagtctcctgagtagctgggactacaggcacccgccaccacatctggctaatttttttgtaattttagtagagacggggtttcactgtgtaagccaggatggtctcaatctcctgayctcgtgatctgaccgcctaagactcccaaagtgctgggattacaggcatgaactaccgtgcccgggctattatctcttattttaaacatgtataacatttttaattatttgtggtaagacaggactactagaaataaacttcccctttatttatttatttattttttgactgtctttagtttgccttcatttttgacagatcattttgttgaatataagatttctggttcacaatgtattatattttactccgttatctatgtcatcctattgccctcaggctttcattgcttctaattaaaagtca

SEQ ID NO: 524155 - DNA, 513 bp, Homo sapiens
tgaaaagtgttgaactggaggacaaagtgttttgctttaaattccattattaaaaccacatgatctccaagtattcatatatctttctacttaatttgacttctttttatttagattagcttcttgactgattgtgcaccctcttgggagaggatctatgtatttgataagcagaatgagaaattcaattattgctatggtaaatttatcttcaatttgacatttaccctcagttgaatattttcactcaattggagagtccgttacccatctctttttttcaaattatccmtgtctctgtagttatcttttactgttcacaagacagttttcaaagcttagacaactagcatagaagttttctccaggaagttaacttgtctgactctgagtatcttcatatttataacagacataatatttagcttataatacttttaaaagcaaaataagattataagaggaagtgctttacaaaaataaaaatgtattacaaaattaaatgtattctcc

SEQ ID NO: 524156 - DNA, 513 bp, Homo sapiens
tgaaaagtgttgaactggaggacaaagtgttttgctttaaattccattattaaaaccacatgatctccaagtattcatatatctttctacttaatttgacttctttttatttagattagcttcttgactgattgtgcaccctcttgggagaggatctatgtatttgataagcagaatgagaaattcaattattgctatggtaaatttatcttcaatttgacatttaccctcagttgaatattttcactcaattggagagtccgttacccatctctttttttcaaattatccctgtctctgtagttatcttttactgttcacaagacagttttcaaagcttagacaactagcatagaagttttctccaggaakttaacttgtctgactctgagtatcttcatatttataacagacataatatttagcttataatacttttaaaagcaaaataagattataagaggaagtgctttacaaaaataaaaatgtattacaaaattaaatgtattctcc

SEQ ID NO: 524157 - DNA, 646 bp, Homo sapiens
ttccccctctcttcagttatagaagatcccatttatgcaaagttcttgctttctttgcaacaggactcagaatttaccacttaaccctggaaggcacatctgttccttaaatcaattatgttaacttcactgactacaaatgaagggycttcttgtatttttctatttacaaatgcttgaattttttaatataaccatctttataagaagcatgtatgctaactatattttgatatatacttaaatctcaaaaaggagaaagttgccataactgtctctttagtatggcatactaagccaataaacattgttaaaattgtacagttcacatatttgtttttggtaatagagttcactgtacaaaccaagaagccaacttcatattaaatctttgtccatttcttggatgtttttaataacaactaatttctgatctaggtcaacagttctatcacgtaccttgctttatcctgcagcttttgtcttatcaaaaaaattgctttcatgagatgattatcataaattacacacaaatatagttaacaactgttttaatagcactagactgaatgaaagcaatacacttttcagaggtcattttatactacatgttttgataagacaaaaggaactgtgcataacttat

SEQ ID NO: 524158 - DNA, 646 bp, Homo sapiens
ttccccctctcttcagttatagaagatcccatttatgcaaagttcttgctttctttgcaacaggactcagaatttaccacttaaccctggaaggcacatctgttccttaaatcaattatgttaacttcactgactacaaatgaagggccttcttgtatttttctatttacaaatgcttgaattttttaatataaccatctttataagaagcatgtatgctaactatattttgatatatacttaaatctcaaaaaggagaaagttgccataactgtctctttagtatggcatrctaagccaataaacattgttaaaattgtacagttcacatatttgtttttggtaatagagttcactgtacaaaccaagaagccaacttcatattaaatctttgtccatttcttggatgtttttaataacaactaatttctgatctaggtcaacagttctatcacgtaccttgctttatcctgcagcttttgtcttatcaaaaaaattgctttcatgagatgattatcataaattacacacaaatatagttaacaactgttttaatagcactagactgaatgaaagcaatacacttttcagaggtcattttatactacatgttttgataagacaaaaggaactgtgcataacttat

SEQ ID NO: 524159 - DNA, 646 bp, Homo sapiens
ttccccctctcttcagttatagaagatcccatttatgcaaagttcttgctttctttgcaacaggactcagaatttaccacttaaccctggaaggcacatctgttccttaaatcaattatgttaacttcactgactacaaatgaagggccttcttgtatttttctatttacaaatgcttgaattttttaatataaccatctttataagaagcatgtatgctaactatattttgatatatacttaaatctcaaaaaggagaaagttgccataactgtctctttagtatggcatactaagccaataaacattgttaaaattgtacagttcacatatttgtttttrgtaatagagttcactgtacaaaccaagaagccaacttcatattaaatctttgtccatttcttggatgtttttaataacaactaatttctgatctaggtcaacagttctatcacgtaccttgctttatcctgcagcttttgtcttatcaaaaaaattgctttcatgagatgattatcataaattacacacaaatatagttaacaactgttttaatagcactagactgaatgaaagcaatacacttttcagaggtcattttatactacatgttttgataagacaaaaggaactgtgcataacttat

SEQ ID NO: 524160 - DNA, 646 bp, Homo sapiens
ttccccctctcttcagttatagaagatcccatttatgcaaagttcttgctttctttgcaacaggactcagaatttaccacttaaccctggaaggcacatctgttccttaaatcaattatgttaacttcactgactacaaatgaagggccttcttgtatttttctatttacaaatgcttgaattttttaatataaccatctttataagaagcatgtatgctaactatattttgatatatacttaaatctcaaaaaggagaaagttgccataactgtctctttagtatggcatactaagccaataaacattgttaaaattgtacagttcacatatttgtttttggtaatagagttcactgtacaaaccaagaagccaacttcatattaaatctttgtccatttcttggatgtttttaataacaactaatttctgatctaggtcaacagttctatcacgtaccttgctttatcctgcagcttttgtcttatcaaaaaaattgctttcatgagatgattatcataaattacacacaaatatagttaacaactgttttaatagcactagactgaatkaaagcaatacacttttcagaggtcattttatactacatgttttgataagacaaaaggaactgtgcataacttat

SEQ ID NO: 524161 - DNA, 623 bp, Homo sapiens
gtatgtaatcctcacaacaattcttccagataggtacttttattcccattttactgataaggaatctaagacttgttcaatgtttcactgcttttaaagggtggcaccagtgcttgaacccaggcccgtttaacatccaattccttccttctaaactactaactagactgttctttgcatgtgtgttacatataggtatatatagactacatagtaggcaggcaataaatatttgttgaatgactattctgtagtgtatgtatttgctcagaactatcaagtttattactgtccttagaaattgatgctaatcatgtgatcttctggatcagagtatagctaaaaagattcatatcataayatcaggtggagcccagaacaatgagtattaaagtgagtgcttagataatatggtaatatctattacaagcacccacttataataggtattacttataataggttgtggctgaaccctaaagcacctggaatagtctttataattagttcctcaacaaatatttataaatgtattctagtatcttaggtaccatgtaggtattaggttcttgataaatatttcttcaatacatcattattgcagtccctttttatcactgttt

SEQ ID NO: 524162 - DNA, 596 bp, Homo sapiens
aatctcctggggctgaggcccgtctctgttaagcgtctggagatcagagctgagttgggctttgaattcattctaagtggtgacaagtgggaaaaaccaagactagagcctgcaaccactgaggcgtttgacgtttaagggtcaaattagagaagccaggttcagacttcaaatctcaagggtcaaggcaggttaagtcaaatgaggctggaagcaggtggaaaagcccagggttggaagtcagcacctggagcagagcaggaagcgagggcagggtggggtctggaggcaggtaatgactgaatgtttgtacaaacatcctgtgtgtggttgatgggtgaaggtagctttaaatgtgctggcagcacaagctacataatttatggggygcagtgcaaaatgaaaatgcagggcctccttgctcaagaattattaagaatttcaagacagcaacagcggaccattaaaccaagtgtgggagccttctgggtgcaagtcctgtgcacctgtacaggtcgcttgaccaggaggccagccctgtgcgctggccagtggggaagaaaggcagtgagctcctgctgtatgtattgaagcag

SEQ ID NO: 524163 - DNA, 645 bp, Homo sapiens
aaagattgtttcttattcgattgttcccatactaggcctgccatgttttggatgctaaaaacaaaagttaatgagaatcattcacattaaaaactgacttaaaactggcagcaaattctttgaggtctagacatcttctgaagacttagcttatccctaaacacaaacaaaaaattttcttacctggggcccatggccccatggaattcaggggttaaatatgccaaatgttggctgggctcatgcctgtaatcccaagcacgaggttaggagtttgagaccagcctggccaacatggtgaaaccctgactgtactaaaaatatgaaaattagccaggcgtggtggcgtgtgcctgtaatcccagctactctggaggctaaggcgggagaattgctcgaacccaggaggcagacgttgcagtgagccgagatcacaccactgcactccagctctgggcaacagaccaagactccgttttggggggaaaaaaaaaagccaaatgttgtrtatgtgttcttttttaaaaaaatactgtgttcatttttgaggataaaagtgccaaggttttcatcagattctcagacatctgtaacctaaaaaaagcttaagaactgctctttgtgcgtagtgtagagcagtctgaa

SEQ ID NO: 524164 - DNA, 633 bp, Homo sapiens
acaagcagaaaaaaggatacaacatttagactcaatttaactgcttttaaccatttgtgcattgtraagtgcttcaaacacaaattatcatgtgtgttttagcacaaccagcctaaggctatcagagataaacctgtcaaacttactgattcactgcaacgaggggaactgcacaccaggagtcatgggtatctcaccaacccaaagaaaggagtgtcattacaagatttggggctagggtggagttgaggtgaaatttacatcaagcagtgtttaaaaaggttcaaaataaagcaggactgtatataaaaacgtcaacatcagatctggattgtgaaggctcctctttccttggaaactacaaatttaagataaatgtggaaagttgtgtccagaaacccttaatgggaagctctgacctgggttggaaatcaagaatgcttctctacaaggcaagagtgggaaggttccctcttattgagagaactttaaacagcaaaatttcttatatattctatggtttttgagaccaaggtttctcagtgaataagaaagcagcagaccttcgtgggggtcgttatgacattatgacacatcaccatttcctgttaactctgcagctgtacatcggtg

SEQ ID NO: 524165 - DNA, 633 bp, Homo sapiens
acaagcagaaaaaaggatacaacatttagactcaatttaactgcttttaaccatttgtgcattgtaaagtgcttcaaacacaaattatcatgtgtgttttagcacaaccagcctaaggctatcagagataaacctgtcaaacttactgattcactgcaacgaggggaactgcacaccaggagtcatgggtatctcaccaacccaaagaaaggagtgtcattayaagatttggggctagggtggagttgaggtgaaatttacatcaagcagtgtttaaaaaggttcaaaataaagcaggactgtatataaaaacgtcaacatcagatctggattgtgaaggctcctctttccttggaaactacaaatttaagataaatgtggaaagttgtgtccagaaacccttaatgggaagctctgacctgggttggaaatcaagaatgcttctctacaaggcaagagtgggaaggttccctcttattgagagaactttaaacagcaaaatttcttatatattctatggtttttgagaccaaggtttctcagtgaataagaaagcagcagaccttcgtgggggtcgttatgacattatgacacatcaccatttcctgttaactctgcagctgtacatcggtg

SEQ ID NO: 524166 - DNA, 554 bp, Homo sapiens
tggttcactagagatagagcccctcgggggagccttcctgtttcttataaagaatattttctttagatttttttgaagtcttcatttgttactttcattctacattctcttaaggccacagaccagcttctctacatgttaccttgatgtcagcaccagagaggtcatctttagccataatcaaatcgtccagggttgtatcatcagccagcgtcatcctgcttgtgtgaatctgaaagatgtgcttcctagtcttttcatcakgaagggggaactcgatatttctgttaatgtggcctggtctgataagtgctggatccaaagtttctattcagtttgtggccatgataactttcacatctctcctacgatcaaattcacccaactggttcaacagtttcaacattgttcactgaatgaatttctttctcaccaccagaatttgagtcatatatttttgttccaatggcatcaatttcatcaataaacacaatggatggtgcatgctcttcagcaactcaaaacaatttccatacaaattcgggcccatcacc

SEQ ID NO: 524167 - DNA, 576 bp, Homo sapiens
agctgtatctctctcactgctgaactaaggaggatcttatttctgtaacccatgttgcaaaagttctgtcagagagtaaaaaagaaatgcttggcacagacaggaagactctgcatttcattatcaagaatatagaagtaactcggacttctaagtagtttaacataacgttaaacaaattatgtgataaaggggtgggggtggaagtggggattccctaacagccctatttatatgtaagatataaaaaagggagtgagtcttgtgctgtccacactttcacatacattttcgtagatttaaaatcagattaaaaaaacgtagccaggcattgtggtgcacacctgcagtcccagccacacaggaggckgaggtgagaggatcttttgagcccacgagtttgaggctgcagtgagctagaattgcactgttgcactccagcctgggcaacagagtgagaccctccctcaaaaaaaaaaaaaaaattcatgatttttttttttccaagagggactttttttttaaaaccttctatttactcccaagcattttcaagagtaaaatgtcacatcctcc

SEQ ID NO: 524168 - DNA, 576 bp, Homo sapiens
agctgtatctctctcactgctgaactaaggaggatcttatttctgtaacccatgttgcaaaagttctgtcagagagtaaaaaagaaatgcttggcacagacaggaagactctgcatttcattatcaagaatatagaagtaactcggacttctaagtagtttaacataacgttaaacaaattatgtgataaaggggtgggggtggaagtggggattccctaacagccctatttatatgtaagatataaaaaagggagtgagtcttgtgctgtccacactttcacatacattttcgtagatttaaaatcagattaaaaaaacgtagccaggcattgtggtgcacacctgcagtcccagccacacaggaggcggaggtgagaggatcttttgagcccacgagtttgaggctgcagtgagctagaattgcactgttgcactccagcctgggcaacagagtgagaccctccctcaaaaaaaaaaaaaaaattcatgatttttttttttccaagagggactttttytttaaaaccttctatttactcccaagcattttcaagagtaaaatgtcacatcctcc

SEQ ID NO: 524169 - DNA, 616 bp, Homo sapiens
ccaaagcaccccagtttcaactggtcaaagcctgtttcaacacctaagtaaaccccagagttcttgaagtgtttctttccatcacagagttaacggcgtgctttcaaaatggaatctatttactctgatccaacaatgatttacacctataacaagccataaactgaatagaaaacagaaataaaagtctcagcccaggatagagaatagagtttatctcttgggctggctctgatcagttggcactggctgactgtaatatctcctgggcagcccgaggtactactgacctcagttagaaaaaaatgctgtgatcaattagcaatgtctgacatgaaaatggagccacatttggggaggtgagggaataacagtatctgtccagcaactaggtaaaaacccaagatactctattttttgaataccagattcttcagtagtttctaaaaccctttaagaattttgcaagaaaaagttgtgtaacaatccatgaatgcacattacttttgagagtatctgaactgataattatgggcgttcagcatttgtcaaatgcatgttragttcctgaggagaaaggaatgtcttttcctcctcccatatctttacagtaccc

SEQ ID NO: 524170 - DNA, 639 bp, Homo sapiens
agagtataaaagaatacatctcatctaagagatcaataaaaccaaatattactatataaaaaagttcagtaagaacataagctattttatrtgagctcttttataatataaaaggaaacactttccaactcattttatcaagccattacataatgtcaaaacaagacaaagcattacaagaaaagaaaagttaggctgggggcggtggctcacacctgcaatcccagcactttgggaggccgaggcaggcggatcacgaggtcaggagattgagatcatcctagctaacatggtgaaaccccatctctactaaaaaatacaaaaaattaactgggcgtggtggtgggctcctgtagtcccagctactggggaggctgaggcaggagaatggcgtgaacccaggaggtggagcttgcagtgagccaagatcacgctgccgcactccagcctgggtaacagagtgagattccatctcaaaaaaaaaaaaaaaaaaattagagaactagaaacttcatagacatcaaatttctcaacaaaatattggtaaataatattgagcaatatatttaaaaaggcaatatggcatgaccaaatggggcccatcctttaaatggaatgttggttctacactgaacaatt

SEQ ID NO: 524171 - DNA, 626 bp, Homo sapiens
gtgacgaggattggctgttattcccattggacggatgagaaaactgaggctcagagaggggacttgggcagcaggcaggacctggcactcatctgtgtctgggtccgctggggcctctttccctggtcacctcgctttcctggctgcatcggatctcgtgcctcccctttgacctttgccttctgccctctgctctgtgccctgtgctccctactcccgcagagcactgctcctgctttcgatgccaacagcatttactgtgaactgacctcacttgcctgaagaagtgtggggagggtggggaaggggtggttggctctccagccccagagtgctctgtggccctgggagggcatgggtggcacctgagccaggctcccacggttccgcctgcagatcgcctcaggcatggcgtacgtggagcggatgaactacgtccaccgggaccttcgtgcagccaacatcctggtgggagagaacctggtgtgcaaagtggcsgactttgggctggctcggctcattgaagacaatgagtacacggcgcggcaaggtgggcaggggctgtgtggtatgtcgcgcttggcctgggacaggtcacgtcccgctctgagccccagttttttcct

SEQ ID NO: 524172 - DNA, 602 bp, Homo sapiens
ggttatagagcaagggggtgatctgtcacagttggggagtttgataatgtgccctctggcagcaaggaagaagaaggaaggtgcagaggctgtgaggggctgcggtggcagtagggaagaaggaaagaggttggtccacgcaggtgtggctcctccgagatgtttaataggtactcagggaataagcatgggagacaaactatggagggctgcgggtggtgaggatggggragggaaggctggtcaggatcactggggacatgagtggccttccccagctttgacactttgctatggctgtcccctcggtctgggatgcaccctccttccctcctcctcccctttacccagctcccttcttctcacagcaccccttcctgtcaccccacaagtgggcatcctgccttggggctcccatgacccctgggcaccacctcattgttgctgctgttcccatcttctcttgtaattatttgtctctctgtacctgcctcgtacccaggccaggggtggcggagggtgggcctggcactccagttctctctggagattttcctcgcctgcctagcatggggctgagtgcactcagtggatcctgggag

SEQ ID NO: 524173 - DNA, 569 bp, Homo sapiens
gcccacttctctctaacctgtagagaaactctcatcttgatctgtctcccttctgtcccctctctccttccatcatcagaagagctggggagggagccattggcttcagtgttgccacccctgcttcctctgtgccagccaaggtgctcaggcagggccctctacccacctcctgtgtgccagatcttcagtctcttgtcctttgcacgttcatctgcccaatgtgagaggtccctgtgggtgtcttatgggctcctcctcaccattggctacaatgacctcttttccttcccttcccaaacccatctttcaagaataacacactgtatgtcccctttgatgaagcctctgctggcttcttycccccaggacccccatcatctcccaagagctcccccaaggaacagccaggcatgccttggtttgggcacttttctcccctacgagactgtgaaccttgatgtcagggtcttctgtggatgtcagcacagaggaaggctagggatgtgtgtggctgggtggggaaggggatggacagatagacggaagtcatgtatgtctgtgggttt

SEQ ID NO: 524174 - DNA, 487 bp, Homo sapiens
agcacctccctgaagggtgtcatcagcctcctagagcaaaggagaagggtgaaagggacaggggaagtagagggcatctagaactttctctctccaagccctttatcaggttttgtttccagtctctgggttacttcatccacccatcatycccatccacacatccatccagccaatgtgcatggatcccctcccaggtgccatgtgcggagtggcataccttttggagggtttggctcccctgtgagcccatgctgggcctctgcctgccacccccactgcctgctggcatggctcacgccccctcttgttttcaactttcttattgacgtctactcccccttctcttcctgtatctgactttgtcttgctcatctctgctctttccctctctctagaggagagttattgaattttgctctgaggctgtgcgtcattcttgcagtgtatctctgtgtgtgtgtgtgtgtgtgtgtgtgtgtgtgtg

SEQ ID NO: 524175 - DNA, 529 bp, Homo sapiens
aataaaatattgggggaaatgagttgaaatatctggaaaaataaaatttagataatggctagagaaaattttcatggatttgggattcaacataccacccccagcctcattattatccccattgtgttcaagctctctcttcctcgtggcttattcattcrgtcttgatcatctctggccatcatgttctaagtgatgtggatacgatggtgggacaaggtggctctctgactgtggaacatgcatcctttcacttttctgggggagtggagacagacaagcaatagtgagatgttctataaaaaagaaaaaaaataccacggaaacagagtgaggagagggttcagctgccttacggagagggctcaggaaaggcctctccaaggtaaaatagaaggggaccctcgaagtcaagtaatacctggggaagccctagcttgtgcggagagcctctgtatgttgtgcagaaaactgtcttcaaaaattggaagatttctgaagaagtaggtctatttggtgactggaacca

SEQ ID NO: 524176 - DNA, 529 bp, Homo sapiens
aataaaatattgggggaaatgagttgaaatatctggaaaaataaaatttagataatggctagagaaaattttcatggatttgggattcaacataccacccccagcctcattattatccccattgtgttcaagctctctcttcctcgtggcttattcattcggtcttgatcatctctggccatcatgttctaagtgatgtggatacgatggtgggacaaggtggctctctgactgtggaacatgcatcctttcacttttctgggggagtggagacagacaagcaatagtgagatgttctataaaaaagaaaaaaaataccacggaaacagagtgaggagagggttcagctgccttacggagagggctcaggaaaggcctctccaaggtaaaatagaaggggaccctcgaagtcaagtaatacctggggaagccctagcttgtgyggagagcctctgtatgttgtgcagaaaactgtcttcaaaaattggaagatttctgaagaagtaggtctatttggtgactggaacca

SEQ ID NO: 524177 - DNA, 640 bp, Homo sapiens
cctcctcacctctgtcttccactctcacaccttttcttccagcgtcagctttcatggaagccagtcaataattmctgtttgcaggccgatttattagtgtgattaaagttctgtttctgaatagaagctttggtgctgcctgccttttccaggtacccaagggtgattctggttatacaaagaggttctgtaaggcagctcagacattggggccaatccttctggtcactctggcaaatggcccattttgataagaacattaaatcatccaaatcctttagggttacacgggggtcatttgctcattaatcaccagtggcctgagaagctaaaggtttcccaaagctgagccatctctgccctacaggatgatgtgacgtggcccattgtctcagttcagctgagcatccctgggctgagcccagttcttctatctgagacatggattgggccttacagcccagagtgaggtctctgcaccagcagcatcggcattacctgggggctcgttagaaatgcagactctcaaaagccccaccatagacctcctgtatcagagccctgtttggacaagatcccagggattcatgtgcatggcacagtttgagatgctctgcattatcaatccaggtagggaagc

SEQ ID NO: 524178 - DNA, 640 bp, Homo sapiens
cctcctcacctctgtcttccactctcacaccttttcttccagcgtcagctttcatggaagccagtcaataattcctgtttgcaggccgatttattagtgtgattaaagttctgtttctgaatagaagctttggtgctgcctgccttttccaggtacccaagggtgattctggttatacaaagaggttctgtaaggcagctcagacattggggccaatccttctggtcactctggcaaatggcccattttgataagaacattaaatcatccaaatcctttagggttacacgggggtcatttgctcattaatcaccagtggcctgagaagctaaaggtttcccaaagctgagccatctctgccctacaggatgatgtgacgtggcccattgtctcagttcagctgagcatccctgggctgagcccagttcttctatctgagacatggattgggccttacwgcccagagtgaggtctctgcaccagcagcatcggcattacctgggggctcgttagaaatgcagactctcaaaagccccaccatagacctcctgtatcagagccctgtttggacaagatcccagggattcatgtgcatggcacagtttgagatgctctgcattatcaatccaggtagggaagc

SEQ ID NO: 524179 - DNA, 617 bp, Homo sapiens
aattaacagagttcaaaacacgcaacagttttgtctcttttctgcccataatcagacaaaatcaaagcctccctgatgaatttgctcaaccattttctctttttagatctaggtattagttgtatctttgaaagtgattgatagtcctctacataacaaaatgatctcttcccctcctcactcagaacattctcagttaagtttactccgatgcccaggaggcttctgaggtgttatcaccttctccccacacttggggaagcagctaacacaagtgggacatactacctgggtatactaatcactcatctgcacaggtcaaggataaggttcatgtctgaattgacttagaatgacaggccttagttacttggatatcctatttgaatcttgaaaataaacagtgtcacccaaagatcagttgaaggtggatcatcttgttttaatgtttaagtaaaaatggttcaagtccccaccgagcaggatagtggaaaaaccagcaacaagtaacctcctccctgagcctcccaatatycctagggattctccgggggttatagtctttttggtcacttttgttcttactatctctttcctttgaatccttgctttcacaa

SEQ ID NO: 524180 - DNA, 466 bp, Homo sapiens
gtggggaaactgatagaaataaaggagccgaggttcccttttatgtgagctcaggaaacccatcgtacacaaatgttaaaayggagattgttcttcagagcaaaagagacctacagaacaaattgtaatcacttgtgtcagtggcattacaaaattgggactatttactgtcttctttcttaaacattaagccttaaacatcacccagtcctgtgccttttcttctaattaggcacagtagtggtgggagtttttctggttgcaaacaatagaagccaattctggaaaacttcagtaaaaagattatttattggaggctggaaactaggtttagaaagaggacagaaaccagtgctgttctgggtgcaggcagagctaatgatttagccagctatgctaagtactttctctggaatacatgccctccacccattttcccattctttaattttcttacaaggaaagg

SEQ ID NO: 524181 - DNA, 617 bp, Homo sapiens
gtaatagggtaacagaagttatctctagggttgtgagtaagtttattttctttaaactttttcttctttcttgaattcttgaagaaaaaataaattacactaaagatrtcttaatcagccagcattctttaaatattaatacattttgctgataaattatacctgtaaggtcatcttagacatcaagaatcaattcatgaaaggaacactgcagtctatcagtaagccaatgacaatagagattaggcatttgactatgtcaagaaaacactatttataccttttaatgagaaatgcagctctagtgcctaaatttaaattccactacttgaaaacaaaacatgaaactacatatgtgatagattaccaaatgaattttttaaggcaacaggtttgtaagatttgtgggaggtatgtaatcaaatggtagactacttacaatctgatgatattgttcttttgggatgttcagatatgaaactgtaacttcctaacaactagatcaagtttcttgaacagttccagcaacacaatttatttaatagttattattgccatttgatcatattcatgaatttattagatacctcctctgttagtcagcttaggataggcta

SEQ ID NO: 524182 - DNA, 470 bp, Homo sapiens
gctgacaactagtccccctctcaggggcacataatgagagaactgtcaggcagatgagtgtccagcgcggaaatatttaattaatgagctcttgtcttgcctctaggtaattcttcacagtcctaaggatagagagcgagcaccctctgatcaatccagggaattaaaaaaacacacacagtcactgctgaaagaatttcagttttcattttttwaaaaaatccaagttacctataaaatttcacggacttattttttttaacatgcttaaatttttaaaggaggagactgccatatgacctagacttagcatttcatattttagatcttaggtctttaaaaaatatatataagagaaagctactatgaattcattccttttattcatacttttaataactgtaatttggtcatttaaacagcacttccatagattagaaaacagtagcacaatacgtgcgaggtattta

SEQ ID NO: 524183 - DNA, 597 bp, Homo sapiens
tgtggatactgaaatgaagcacagcaggtgggacagcggtactcaattttcaaaatctgtgccctaaaatgtgtttgcttaaaccttgtctcaccaccctttaggggcctccacatccatcaaaaccagaccccaggaaaggaattcaggcttctatttctcactagcgctttcacaatcgctgctatgattcagaggttgtctggaaagttcagtagccaaaagttccctccttcttcctagagtgataaattaaatcacttccagttcccagggtgggtggaggggggactggccttgcctaggtagccacaataactttgaaaaggacatasaattcctcacaagcatgagttaacagcattatgttgtaaggaattcattttctcaaaataatacatgggtaaggtgttaataatgccattggctgtttctgaaagccatggatgaggaaagaaaagtttgcattttctgcgtgttggaagattttaagcttttcaggtgtagtgcgttacactaaattcttacattgactttttatataacgtgtgcttactggagaactaccgctttccccttctaaggtgaatgtggatg

SEQ ID NO: 524184 - DNA, 654 bp, Homo sapiens
tggttgcgttgcttcccttggtgaatattcttctcctaaaaaggcataagtaagttgatgaggaagcaaaatctcctgagaagttaaaaataatttaatcttatctaatctcgtcaagaaggttccacaaaatttaacaaattgaatttgaaattagaacatgaaagaaagaaattatatcatgaaataaarctctgtcaaataactaaaagatcgtactgtaccttatcctaaacacttgctactctgtcataaaaacctttaagattgaactgacatacctgtgattatttcattatatgattattataaactactggataaattacccattaaagtcatttttaatccaattaaaatcatgacagttctagttgactcaattcagtctcctaaatcatctgtagaaaatactgtagaataaattaagtgcccaacagttaatgtccttttgcacagtattttagaatcatagatgtttgggactaaaagggacttcgtatttagtctaaccccattttatatggaagaaactgaggcacagagattatgacttgcccaatgttacacagcgaatctgtgaccagaatccaggtgtcttcatttttagtttagtttctgctctgtcgagccaattattctcatattttttca

SEQ ID NO: 524185 - DNA, 654 bp, Homo sapiens
tggttgcgttgcttcccttggtgaatattcttctcctaaaaaggcataagtaagttgatgaggaagcaaaatctcctgagaagttaaaaataatttaatcttatctaatctcgtcaagaaggttccacaaaatttaacaaattgaatttgaaattagaacatgaaagaaagaaattatatcatgaaataaaactctgtcaaataactaaaagatcgtactgtaccttatcctaaacacttgctactctgtcataaaaacctttaagattgaactgacatacctgtgattatttcattatatgattattataaactactggataaattacccattaaagtcatttttaatccaattaaaatcatgacagttctagttgactcaattcagtctcctaaatcatctgtagaaaatactgtagaataaattaagtgcccaacrgttaatgtccttttgcacagtattttagaatcatagatgtttgggactaaaagggacttcgtatttagtctaaccccattttatatggaagaaactgaggcacagagattatgacttgcccaatgttacacagcgaatctgtgaccagaatccaggtgtcttcatttttagtttagtttctgctctgtcgagccaattattctcatattttttca

SEQ ID NO: 524186 - DNA, 516 bp, Homo sapiens
agtcctttaggggaagtcacttttcaggctgtgacacatttaagtagaaattaaagtaggtcatcctgctactaaagcacaacccccaagcaagacaataaaacaaatctgacttgttgggaagggtcaaggctagaatgagcaaatctcattggaggcaaaaagagtctatccccaatattcaaccctatgaaatttacactagccaacacaaattcagagccattcttggtcttcaaaatttgtcagtaatcattatacaccccctgagtcagatgtataaatgaattcagagttggttcactgccctgggttcacatacaaatacatttagagtaggatttacgggaacattggctgcgaagtacggtccacrctctccctgcagccatcagcccctctttcactaaatggatgaatgcaaaatgcaaaccaaaagatgaaaggaaaagtgaagaagaaacagaagaaaagtatgaaaagggaactaaaataagaacatagaaggggcacaaa

SEQ ID NO: 524187 - DNA, 468 bp, Homo sapiens
gcctatttggagatgtggttctactagggattatttattacccgtggggtcccctgtccacttctgggctctaggatcttcttccaactcatgggaatttcttcaaagtctrgtggtcttttgactgcatgttttccaaatcgagcactccacgcgtttccccaaaacaacaccaacctgcaagaggtctggagctgggtcatccaggggtccccactgtgtattcagggtatcctaaattggaaactgcctttgccttggggctttctgttttataaagttaattttcaactttattcattttcttagtcttggatcccacagatgagtcgtctttaagaaagcagcttgtgactgggaaccttgtctcactcccctttgtgaacctcaggctgtcctgggcttgatgtataataagagctcaacaggtgctttctgttgcagtcaacaggtgctttctaaacagaa

SEQ ID NO: 524188 - DNA, 468 bp, Homo sapiens
gcctatttggagatgtggttctactagggattatttattacccgtggggtcccctgtccacttctgggctctaggatcttcttccaactcatgggaatttcttcaaagtctggtggtcttttgactgcatgttttccaaatcgagcactccacgcgtttccccaaaacaacaccaacctrcaagaggtctggagctgggtcatccaggggtccccactgtgtattcagggtatcctaaattggaaactgcctttgccttggggctttctgttttataaagttaattttcaactttattcattttcttagtcttggatcccacagatgagtcgtctttaagaaagcagcttgtgactgggaaccttgtctcactcccctttgtgaacctcaggctgtcctgggcttgatgtataataagagctcaacaggtgctttctgttgcagtcaacaggtgctttctaaacagaa

SEQ ID NO: 524189 - DNA, 584 bp, Homo sapiens
gtaattagttcttaaagtctgcctacagatttgtttatagatgtatataaatccatacctatgtttgctggttctaaattcaaataaagtagtgtaaattacaaggttgctaatgttgaacattaatgttcattctagatgaaaacatgaaaatcttacctcctccagcaactaatttaatctggttgattaggaaatgttcctttatgaaaatgatccattcacactttaagtggatgtttacaggtgtttagactcacactgagcactaagcttagacttaaactaagggtggacgtcagatcatttgtaaacataaactatgctatctccatgagaaaaatgacctttcttcaaatcccttgagtactatgattgtcattgatttgtataagatgagcaatcttcttttccaggctagatcattggtttccgtattttaaataattaaaatcattcagctcttacctaggaaatactagytctacaatatagtagaattagatccatagatcgccttttcactatttttaaggaatagtaataaaactagacactatttggagaaaagaaaccaaaatagc

SEQ ID NO: 524190 - DNA, 593 bp, Homo sapiens
atgataaggttatggatataggatagataatacttcttaagcaaccccgaagaggaagcatagcttagtgcaggcttaaactagagcccctgattcaaatccctgctctaccatttcctctgggggcagatgaattggcctgccygacactcagtttcatcacttgtgaaatgggaatggtaatagtttcaaattcatgaggtaatagagacaatagagatttcagtagaagtcaagggttgtgaatgtgtccttatattttctaagggaaaggctgcttgtgaggaagttcttcctgcctttcagccacagataatggcaactcctacttggtttattatttatctctgtactctccatgactgagcattagatgaagtggaaaccatcattacaggaagttagtccacaagaggatgtgttgttggtaaagtgtgagggactgcagaaacctgggctctcattcctcgcctgtttccagctagcttatctgggcaacattaggcaagtcgaacaacctttctggacgcagttccttccctatagcctgaaggcacgagaccagctaatccccccagcactatgatagtcat

SEQ ID NO: 524191 - DNA, 505 bp, Homo sapiens
ctgggaagagcccagtatcattcagaatatatttgggtctgctgggtacatgttcagcaggacagaagggcttggagtttgaacactttttaacgtaaatatttctgtgctcaggcaggtgggcttgcacagttagaaaagccctcaccctagtggacatggtatttgtttcatattttaatgctagtgatttctaccccttcctccaattcaacaaacatttattaaacctcttggaggtgcttaggactctgtgaggtgcttgraatcataacaaagaggtaaacttgaattaacgacaaaccaaagtgaaccaattgttcaagaatcttcttaggaattaattccattactgggagcaataagaaagtcacttcccatcctcacacacacgcaacacacacacgtgttcaggtagaaaagccctctaggtaaaaataggcagggctttttgcacagtgcccgcaggccttgcctgggcgacccatgatgaaatgctgattaa

SEQ ID NO: 524192 - DNA, 400 bp, Homo sapiens
ctcctgtttttcccttacagtctttgttgctgcatcctctttcactgaattgttgatgtgagaccctagactcycctgttttttcgttacagtctttgttgctgcatcctctctcactgaattgttgaattgtgagaccctgtgagggtcggcaccctgtgatactggccaggaaagggttgttgcaaggggatcatgggattgttgaatgggttttgatctggattttgatgttggaaatcaagttcccaaatgttttcaaccttgggtaaaggaacatgtaatggtgttttttaaggctgtcatggaatccttttgtgtgtttaattgctttgttattttagtagaaatgtcagggtgtcagaggaacaaaagccatgggtctgagcccaagcaagaa

SEQ ID NO: 524193 - DNA, 400 bp, Homo sapiens
ctcctgtttttcccttacagtctttgttgctgcatcctctttcactgaattgttgatgtgagaccctagactcccytgttttttcgttacagtctttgttgctgcatcctctctcactgaattgttgaattgtgagaccctgtgagggtcggcaccctgtgatactggccaggaaagggttgttgcaaggggatcatgggattgttgaatgggttttgatctggattttgatgttggaaatcaagttcccaaatgttttcaaccttgggtaaaggaacatgtaatggtgttttttaaggctgtcatggaatccttttgtgtgtttaattgctttgttattttagtagaaatgtcagggtgtcagaggaacaaaagccatgggtctgagcccaagcaagaa

SEQ ID NO: 524194 - DNA, 660 bp, Homo sapiens
tggacaattgttccatttccttttgttacactgcttttaaaaaataagacaaagtgtatatggtaagagaaaaaagctcatctgaaatgcaatctctattcctccctttctgttttacctgaatataattatatacttttacattatttaacccaaactacatatatatatrtgtgtgtgtgtgtgtatatatttgtgtgtgtgtgtatatatatacattcaactttgcattgctattttctacatcattttataatttcatatagtgtagtgcctgcatactgtcctttgtatatgacatttagtgttttgacttataaacacttaccttaaaacactaatacattatgcagtgtactagtgttcattgtacagtgtactaatacattgtacaatgtcctctgttttggaaatttccccagaagaattgcataaggacagaaacaaagtgaaagatgatacccatttcaaaatttgatgaatactacaatatgatttgcaaaagacaatatatacggacacgaatgttttaaaaaagaaaaagataatagtttaccccctccctgatttatatttggtttattttttacttgatgatcagttttgctgctctaccttgaatatctttcaccattttagaaattaaatattttcatactt

SEQ ID NO: 524195 - DNA, 573 bp, Homo sapiens
ctgttaaatgcttccagccagtcctatccaggattttgaaaattatagccatgtttttaatggaataacaattattgaagacagaaaaatggagtcagaggggaactagaaacttacagataatattgatttaaaaaatatagctcatagggctctaagaacttttgagtctcagaagatgtgtttacaagtacacatgaagttttctattcaggttttttgggaggttttttgtttgtttttgtttttgttttgagatggagtctcgctctgatgccgaggctggagtrcagtggtgcgatctcagctcactacaacctctgcctcccgagttcaagcaattctcctgcttcagcctcccgagtagctaggattataggcatgcaccaccacgcctggctaattttcatatttttggtagagacggggttttgccgtgttggccagcctggtctggaactcctgacctcaagtgatccgcctgcctctgcctcccaaagtgctgggactacaggcgtgagccactgtgcccaaccaattcagggtatgttttatcacgacttccaattattt

SEQ ID NO: 524196 - DNA, 573 bp, Homo sapiens
ctgttaaatgcttccagccagtcctatccaggattttgaaaattatagccatgtttttaatggaataacaattattgaagacagaaaaatggagtcagaggggaactagaaacttacagataatattgatttaaaaaatatagctcatagggctctaagaacttttgagtctcagaagatgtgtttacaagtacacatgaagttttctattcaggttttttgggaggttttttgtttgtttttgtttttgttttgagatggagtctcgctctgatgccgaggctggagtacagtggtgcgatctcagctcactacaacctctgcctcccgagttcaagcaattctcctgcttcagcctcccgagtagctaggattataggcatgcaccaccaygcctggctaattttcatatttttggtagagacggggttttgccgtgttggccagcctggtctggaactcctgacctcaagtgatccgcctgcctctgcctcccaaagtgctgggactacaggcgtgagccactgtgcccaaccaattcagggtatgttttatcacgacttccaattattt

SEQ ID NO: 524197 - DNA, 596 bp, Homo sapiens
tccagacagaccagatgcctttccctggacttcactgttctcagagagctaccaaggattcatgacaggatttcaacacacaatgggggcttgggagaggtataattacccagactcaggaggaagatatattttcctaagagctactccatgaagtagtaagattttaacagtgattttggctgtagttgcctctttaatgaacaaatgggggctctgaggttccttgtattatgatgcagtaatggcacgggaggaaagtgacagtacgtagtaatagaaattagtacacaagtactttggcaccaagttcagttacatacccrggaggctgtgcttagaggaacttgggtttctaaaaccagctatgtcttggactgccccaaaatgaggatgatagagtggtggctgttcaatgaatcttcaaaaaaatgatcatcacagtgggaagcttacaatagagctggcttactgtaggaaatcttatcaggaacacttgtgttcttgttaaacatttaggaaataccaagccaatgaagatgcaattaacatacaagacaaagcaagtgtgatgtgggctatatacagaaaaatta

SEQ ID NO: 524198 - DNA, 654 bp, Homo sapiens
aaatactatttcttagatcaacgatgaaaattttaattaacagtaaagtgttatgggtgtccctatcattatcaacagacaaataagtaaggagcaaataaagacaccagttctaatggccagatttagtattcatattatatgtattcatatatgtctgtgtattctagccaatacaatatcaaacaaacaaaacagatgcatgtaagtggaaagagataacatttcatcccaatatataattgcctgtgtaaaaacaaaacagacagccaggcgcagtggtgcacacctgtaaccccagcactttgggagcctgagacaggcagatcatggggtcaagagatcgagaccatcctggccaacatggtgaaaccccatctctactaaaaatacaaaaattagctgggtgtggtggcaggcacctgtagtcccagctactcgggaggctgaggcagaagaattgcatgaggttgcagtgagccgagagtgcaccactgcactctagcctggcaacagagcgagactccatctcaaaacaaaacaaaacaaaaaaacaggtataaacacacatacataaacagaaacttaaaamactaaaactacaatagcttttatatttttgtgtattattatacatatatacatacacacaga

SEQ ID NO: 524199 - DNA, 466 bp, Homo sapiens
taacttgcctgaagaagtcacacagcttgcatgaagtagggccaggatttaaacccagacagtctggctccagagcctaggtttttaaccctctcacaagctgcctctcaaaagtattattctggccagtctgaaataagcaacatgcaatttccacttttaagtttcattttaccttctcaaaatgcagtgtctcagaagtcttgactatttgaaatcaataaggcctttgagyagtcaaaagggatgttacaaagactatacacaaaagcgtgaatattcagtccctccgattcccactcaatgcctatttactcaatctctctctatctccctccttctgtctctccctcccttcctctctctcttacttacacacacacacacacacagagagagagagagagagagagagagttttgttatccactttcaagctcccagtaagtgagaaggaaatgatagt

SEQ ID NO: 524200 - DNA, 473 bp, Homo sapiens
agacttgcctttaccacaccccttattattcggaagtgtctgccatcactgccctgccatgcccctgcaggcaggagagcatcttttctttttctgtgtccctcatgcctggcacagtataggaactcaagttaagcttgttgacctgaacagaccgaactgcctcttcagcatccacaccagctattttctgcatgtcctcaactctctacctccttccccttcagaattatggcttgccccawatgtgcccattttctctacttcacaaggtgagtattcagcacagttgtgctgcacattaagtaaaactggtgttaggaaaagtctgcattgttaaaaaaaaaaaaaaagtaagggtgattgttgctctttataaaaggctgctagccttggtttctttaacaaggaaactccaagcagtcacaaagagtacatgcctgcaaatgccaatcttcaaactgaatgtgatt

SEQ ID NO: 524201 - DNA, 473 bp, Homo sapiens
agacttgcctttaccacaccccttattattcggaagtgtctgccatcactgccctgccatgcccctgcaggcaggagagcatcttttctttttctgtgtccctcatgcctggcacagtataggaactcaagttaagcttgttgacctgaacagaccgaactgcctcttcagcatccacaccagctattttctgcatgtcctcaactctctacctccttccccttcagaattatggcttgccccatatgtgcccattttctctacttcrcaaggtgagtattcagcacagttgtgctgcacattaagtaaaactggtgttaggaaaagtctgcattgttaaaaaaaaaaaaaaagtaagggtgattgttgctctttataaaaggctgctagccttggtttctttaacaaggaaactccaagcagtcacaaagagtacatgcctgcaaatgccaatcttcaaactgaatgtgatt

SEQ ID NO: 524202 - DNA, 573 bp, Homo sapiens
ttagtgctggtaagtgaagaaacagaaactaagtgatagagaatgggaactaaggtagaaataactaacaaagatcactgtgcagaaccgtagtggtgttcagagtagatgcgcaagtccatatgcatgtagcaaatacaagtctcaacccacaaaataaagtgaagatgaatatattttaattttgttaataaagttattttaatttctgttataagctctcttccaccaagacagaagcacggtcacatgcctgggtaaaaagaatatcccagatacccaagactagacagcatgcaggggtgacaggcttattaacttcacactcactgggccatcagtactttacttataacctcattcatggttttgaagttttaaaaaaatgttgccaccttgttattttgttactcctctcttataagtgattttcagataagcagaaacacattaaagggaaagtttatttgrttcatttgcaaggcagagtccatggatttcttttggctatccctttttgcactttcaatggaacaaacagtgcaatttttatcccttctgtttttagagcag

SEQ ID NO: 524203 - DNA, 491 bp, Homo sapiens
tattaatggttttgtgagattgtggttgatacgaatttttttaaagttctacttttctatcttttcaaaattttcatatgtgtgcattttgtttataatttatatccaaatggactacatgatatgttgcccaggttcctcctcctctcttctctaccctcawctattaagacgtaggctctcattcacctgctgctggaggactgaaggctgacctccccgtgttgagacccagttctccaatccagcaactgcccttcactgagcaaagctgccactggagagagttgcctcttccaaggtcacatgcccttcccacaggaagtctgcatctagtgactgtagttataggactctaaactcctatcccctttaccccaatttgagagaatgctacagggccatccagcttcagatttcactctgcaattagttgtgggctttcttaaaacttcttcacgacccaccttctccctctgtctgatcatggt

SEQ ID NO: 524204 - DNA, 491 bp, Homo sapiens
tattaatggttttgtgagattgtggttgatacgaatttttttaaagttctacttttctatcttttcaaaattttcatatgtgtgcattttgtttataatttatatccaaatggactacatgatatgttgcccaggttcctcctcctctcttctctaccctcatctattaagacgtaggctctcattcacctgctgctggaggactgaaggctgacctccccgtgttgagacccagttctccaatccagcaactgcccttcactgagcaaagctgccactggagagagttgcctcttccaaggtcacatgcccttcccacaggaagtctgcatctagtgactgtagttataggactctaaactcctatcccctttaycccaatttgagagaatgctacagggccatccagcttcagatttcactctgcaattagttgtgggctttcttaaaacttcttcacgacccaccttctccctctgtctgatcatggt

SEQ ID NO: 524205 - DNA, 647 bp, Homo sapiens
tcatttgcttaattaatttttttaaaatgttaatarctttaggggtgcaagtggtgtttggttatatggatgaattgtatagtggtgaagttgggcttttagtgtacctatcacctgagtagtacacattgtacccaataggtcatttttcatccctgagcccatcccactctccctccgagtctccagtgtccatgataccactctgtatgcctttacatactcatagcttaactcccacttatagaagtgagagcatgcagtatttagttttctgtttctgagttaattcacttaattcgttcttttttatggctgaggagtattttatggcacatacaccatatttctttatccactcatctattgatgggcacttaggttgattttctatctttgcaattgtgaattgtgctggaattaacatgtgcactcaggtgtcttttttatataatggcttcttttcctttgggttgatacccagtggtggatttgctggatcaaatggtagatctacttttagttctttaaaaaatcttcatattgtttttcatagaagttgacctaattgaaattcccaccaggaatgtataagcattccctgacaaaggggaatttacattgcagatggaattaaggttgctgat

SEQ ID NO: 524206 - DNA, 647 bp, Homo sapiens
tcatttgcttaattaatttttttaaaatgttaataactttaggggtgcaagtggtgtttggttatatggatgaattgtatagtggtgaagttgggcttttagtgtacctatcacctgagtagtacacattgtacccaataggtcatttttcatccctgagcccatcccactctccctccgagtctccagtgtccatgataccactctgtatgcctttacatactcatagcttaactcccacttatakaagtgagagcatgcagtatttagttttctgtttctgagttaattcacttaattcgttcttttttatggctgaggagtattttatggcacatacaccatatttctttatccactcatctattgatgggcacttaggttgattttctatctttgcaattgtgaattgtgctggaattaacatgtgcactcaggtgtcttttttatataatggcttcttttcctttgggttgatacccagtggtggatttgctggatcaaatggtagatctacttttagttctttaaaaaatcttcatattgtttttcatagaagttgacctaattgaaattcccaccaggaatgtataagcattccctgacaaaggggaatttacattgcagatggaattaaggttgctgat

SEQ ID NO: 524207 - DNA, 604 bp, Homo sapiens
atctcctaatgatatggcactgccaaaagccagagaagatgggagtctcacacatacaaactctcatatattcatgtccagaacagtgatagctcgtatttctcagtatttgccctgtctagctaagtgatttatattgactagctcatttaatcctttgaggcaggaactattcttctcaccattttagagatgaaaaaactgatggcacagagatgtcacattatttgtccaagttcccaaagccattttaacttctaagcccacactttaaatcactatgctatgaagtgctatctcacacacactggaattcagacacagggaaaaaagatcccagtgagacaattgcagcatcagattaggcatatggtacttcgagagtgccttgtctagcatgaagtcagaaaacaagttgagtggcctttatcrctctgagtcttccgtcttttgtttaagcatcactgtgcccagagttggcatttatcatatggctacatttaactaaataaaaatatcatcctttttcaacatatgaaaatccccaaacttcaaagttgactccaaaatgtgcttgtttttaaaaattggcactcaagtattt

SEQ ID NO: 524208 - DNA, 598 bp, Homo sapiens
cagttggattttcttttacttagggctaaaatctcttaactattaaagacaatcaggaatccatcaggtgaaaacatatgttttaagcatagacaacagacaatgaatcaaatcacacagtaatttggttaactaagtaaaacagcctattaaatatgactagaatcagtgtggtgtggataggtttaagagtaagaaaagaaggctggagaaagatcgttatggtagtatgatcaaagackaatattccttggataaagattttcttaatgcttacacactaattttaggtgcagataactttcagttatttcaatgtaaacatgcaatttgtatacctgtaaataaagtagagtctttttcctttttatgagcattagactgaatgttgaacataggagaaaagtctgtagaacccagtgatcttctacatgcttgtctatgctgtgaatatagaacattcaaaggccctgcattttccatctaaacatcaggaaaaatggaaaattatcttagaaactatttctttccgtgtatattaataaataatttatgcttgagtattcacatttgcaatattgaattatgataactaaca

SEQ ID NO: 524209 - DNA, 492 bp, Homo sapiens
agatctgtttcctcacttcagtaatattaatcacagaattatatatggagtatttacacatcattgggtgaaactgaataaatattgaaatatatcttaaaaagttgttcaagataagaaagactgaattaaatgttctcacttaggtacaagtrtactctatttggaaaggtcaactttgtgggttgataaattttacatcttactgggtagaattactagcaaaaactcttcttagtattaaatgatgtctttttatcaaaacattgccgttaggtatcctgtttttcattgagggaatattgattctgtacacagttttttaaaacatagcttatattacttcttttctccacgcttctcccttttccttggcccacttgctcctctcatagtggaatgtatataggcctcttttgttatccacctgcattcaccagtttcctatttcactgccaacctagatcatacccagtgacctgctgtgctgca

SEQ ID NO: 524210 - DNA, 527 bp, Homo sapiens
atcagctgggcattgtggcgaacgccttatagtctcagctacttgggagactaaggcaggagaatcgcttgaaccagagtcggaggtggcagtgagtggagatcgtgccaccacactccagcctrggcgacagggtgagactcagtttcaaaaaaaatattataataaaaaaatgaaaaatataaattttagaaaggcagccaacaaaatctacaagagggtcagcactacaattaaatagaagaatctaaaaataacctgaaaacctttgccatcttaagatatacacctcaattttaagatgtatattagcatgcgtcatagtttaattaacagtgtcaattgatgacatcttagatttgatgaaatatgtttagaaatttcaagggtataaataaaaaatactcacattagagaataagctagtattcagtaaaaacagactaaggtaaaaataaaaacaggtcaatattttaaaaactggaaatcttggaagtaagaaatataaatctagattacatggacaa

SEQ ID NO: 524211 - DNA, 527 bp, Homo sapiens
atcagctgggcattgtggcgaacgccttatagtctcagctacttgggagactaaggcaggagaatcgcttgaaccagagtcggaggtggcagtgagtggagatcgtgccaccacactccagcctaggcgacagggtgagactcagtttcaaaaaaaatattataataaaaaaatgaaaaatataaattttagaaaggcagccaacaaaatctacaagagggtcagcamtacaattaaatagaagaatctaaaaataacctgaaaacctttgccatcttaagatatacacctcaattttaagatgtatattagcatgcgtcatagtttaattaacagtgtcaattgatgacatcttagatttgatgaaatatgtttagaaatttcaagggtataaataaaaaatactcacattagagaataagctagtattcagtaaaaacagactaaggtaaaaataaaaacaggtcaatattttaaaaactggaaatcttggaagtaagaaatataaatctagattacatggacaa

SEQ ID NO: 524212 - DNA, 527 bp, Homo sapiens
atcagctgggcattgtggcgaacgccttatagtctcagctacttgggagactaaggcaggagaatcgcttgaaccagagtcggaggtggcagtgagtggagatcgtgccaccacactccagcctaggcgacagggtgagactcagtttcaaaaaaaatattataataaaaaaatgaaaaatataaattttagaaaggcagccaacaaaatctacaagagggtcagcactacaattaaatagaagaatctaaaaataacctgaaaacctttgccatcttaagatatacacctcaattttaagatgtatattagcatgcgtcatagtttaattaacagtgtcaattgatgacatcttagatttgatgaaatatgtttagaaatttcaagggtataaataaaaaatactcacattagagaataagctagtattcartaaaaacagactaaggtaaaaataaaaacaggtcaatattttaaaaactggaaatcttggaagtaagaaatataaatctagattacatggacaa

SEQ ID NO: 524213 - DNA, 523 bp, Homo sapiens
catgaaaaatattttgaggaggctgtggaatgtggtgaattattacatctagaggcagaaggaggcaaaacaatgacataaaaaggaargcaaaacttgaaccagatacttacagacaataactacaagagataaataaaactgatagtacgaggaagaatggggaaggattgtggttgttggtgatttagagtcagaaggctgggaaggtctctctagaagaagaaagttaactgagattcaaatgatatgaataatccagtgttttgaggttttggtctctgaggtgagatcacgttggcagcatttgaggtgtagaaagtattctagtgaaactgaagtgttctgagcctgagaagaattgtatgaaatgatgtaggagatgtgggctgggcctttttgtgacagatgctggtagtcacatgatgagggcctagttaggcttcatttagaaaatgcatccgaattatgaactactatccaaatacatttaaaatattctggtgtattttgtaaagttaaa

SEQ ID NO: 524214 - DNA, 523 bp, Homo sapiens
catgaaaaatattttgaggaggctgtggaatgtggtgaattattacatctagaggcagaaggaggcaaaacaatgacataaaaaggaaggcaaaacttgaaccagatacttacagacaataactacaagagataaataaaactgatagtacgaggaagaatggggaaggattgtggttgttggtgatttagagtcagaaggctgggaaggtctctctagaagaagaaagttaactgagattcaaatgatatgaataatccagtgttttgaggttttggtctctgaggtgagatcacgttggcagcatttgaggtgtagaaagtattctagtgaaactgaagtgttctgagcctgagaagaattgtatgaaatgatgtaggagatgtgggctgggcctttttgtgacagatgctggtagtcacatgatgaggrcctagttaggcttcatttagaaaatgcatccgaattatgaactactatccaaatacatttaaaatattctggtgtattttgtaaagttaaa

SEQ ID NO: 524215 - DNA, 598 bp, Homo sapiens
aaggagtgtgtccactggggaccaggtgattctgctcagtgcatgggcactagcagtccttcccttaggtttctttccttactgggattatctgggtttaaaaggagattcctggcacgttcagctctggartacaaggctttttgggctgccatggtgtttttgggttttggtttgattttttaattttgggttgattttttaatttttattttttgctttgcttttatcgttttaaaattgaaattcatatgaaattaaccatttgaaagtatagcatgcagtatatttacaatgttatgcaaccctcatgtctacctagttccaaaacattttcaccaccccaaaaggcaaccccatgcccattaaacagttgcttcccattcccccagcccccgtctccgtggatttacccaccctggatatttcatacaaatagaagcacataatatgtgaccttttgtgactggcttctttcatttagcatgaagttttttaagtttgccataatgttttactatggcattctctggcgtagtggtgtttattatttggtcaaagttattcatatgttctctgttttgggtaatgtcatcat

SEQ ID NO: 524216 - DNA, 598 bp, Homo sapiens
aaggagtgtgtccactggggaccaggtgattctgctcagtgcatgggcactagcagtccttcccttaggtttctttccttactgggattatctgggtttaaaaggagattcctggcacgttcagctctggaatacaaggctttttgggctgccatggtgtttttgggttttggtttgattttttaattttgggttgattttttaatttttattttttgctttgcttttatcgttttaaaattgaaattcatatgaaattaaccatttgaaagtatagcatgcagtatatttacaatgttatgcaaccctcatgtctacctagttccaaaayattttcaccaccccaaaaggcaaccccatgcccattaaacagttgcttcccattcccccagcccccgtctccgtggatttacccaccctggatatttcatacaaatagaagcacataatatgtgaccttttgtgactggcttctttcatttagcatgaagttttttaagtttgccataatgttttactatggcattctctggcgtagtggtgtttattatttggtcaaagttattcatatgttctctgttttgggtaatgtcatcat

SEQ ID NO: 524217 - DNA, 603 bp, Homo sapiens
tgatacggggcaacctccagggagctggtcctagggaaccaagcccctctttccttctaaccyttctcccaaagaccactcaggctccctcatgtagtgggtctgtcttcccccaaacccaaaatctgcccccaggaaagggtcagacaactcacttagagggatctgtggctggtaggactgaagctgtctagggaaaaatgaatctgcatttttccagtgttccagggcagaaaccacaggacggcctctctaggggtggggtttcaggcatccaccaccgcgagggtgtcactgcgcaggggcctggcatccctcaaagggtcaaggccttgaccacttcctgtgtccagaagaggtgcaaacacggggagggacagtctggtcagaggctcagggagtggggctggcaggctttggtctctgctggtctcccagcctgcggctgatgcacgtctgttgaattttgcaacagtccccatccctcaaggaggtggtgagtcctagccatgttcttggctcctcttttctgatgggatgagacaggggagagtaacgcgaaaatgtggtacaggatgccgaagtgcttgtcagcgctggggg

SEQ ID NO: 524218 - DNA, 285 bp, Homo sapiens
tcaagtgatgctagtaggactagcatcctagggctgctttttttttggattggactgaaactttaaacttttttttgtaaagtgcagaaaaacaaaaggtgaaatcttgtaagaaaagagatgattaacaaaaggaaggtaacttgccttttgatttctgagagaaggtagcagttgggtgtttcaaatggcagagctgatctttcctgctgackccagtctgtaacagagtaagatatttggttgccataaatgcaattaacaatcccaattaatgtgtttgtt

SEQ ID NO: 524219 - DNA, 656 bp, Homo sapiens
gaggaggcaaaaaatgggcaaattccttggaagccctgctgtgtctccctggtactgaattttgtaagcacgcgatacaggagacattgaaaattaaagaggaagtatctccctcctccaacatggggagagacgctgttggaagaagtttctgaagtggtttcccatcgcaccaagaggccagtgggatggatccccgcgcataattcaaaggaacgcgcgcgtctttagctcttcggggttggtaaccaagtggtccggccgggcgcaagtcgccttggaaccggctgcagcccaagtctagctgggcccgggactgagcggcacccttggcctctcagaacctttctcgcggtgagtggaagggcggctccgcgcgcgggcgcttcggggccggtcggttgcgaaatcagggggtggattttcatytacccaggagccgctaagcccgtaggggaccgagcatcacccaggccctgggtaccctgagttgcctcctgagccccaggacggtccgatggtgcagagctcccaggcagaagttagtttcctgatacacacacagcagtgagcaaagtgcgcacaagtgagccaaaccctgaagacgcaggttcgcggactcccatcccagcgttagagtcaaggagacagaagag

SEQ ID NO: 524220 - DNA, 550 bp, Homo sapiens
ggaaggaaaatccctggtttgtgtgggtcattttggctagtcttggattactggaccataggactcatgggaacgaatggcaggttcaggtgggttgtaacttgaacattaagaacttttaacaatctttggcaagattgaaacttgaaattttatcctgccactagtggagaatgtcatgaccacatctgccatctctgcatttggaaaggggaacccggtcttgtttggttcttgctctgtgccagtgcagagggttgattagaatggagggagactgaggtagggaggcagtaggcatcatggaagagaaggatgatgtgtgctggtgcaagctcagtcatggagaggatggaaatttgagatccgtgcatcagcaattttgagagccaagttagaatcaatgggactcgatgagtaattgaatagacggggtggaggaaaaggagattcaaagattgattcctggctgaagctcaaggacagaaarcaggacagtatagtgagtgatgaagattgagtgctcaggaatccatcctgggcttatatc

SEQ ID NO: 524221 - DNA, 725 bp, Homo sapiens
gttttgtattggctgagaactgccttttggcgtcagcttttctggcctgcagaatatgctcctgcaatcaatgaaaaccctcagaagagatatgcaggtgcttgagacaggcagccatcaatgtgtgtaagaactgtccactgaagctgctggtgacttccaggcttgactggggagatatggcagggcactcaacagcgtctgtggcaggaytggaatccaaaatgtatagcactaaaacattaaacatcagcaggccttcatttgagaaatgggtgatcagagttaaatgttctaaagtattaaaggagaaatgttaagatattagtataagactattaaagtaaatgtgcaaggtaaaatttcaaagtttccactaaaagaatagaaatggattgtataacttctaaatcagttaagaggggcagaggaaaagatacaaaaagaaaaacaaataataaagagaaatatcagattgacctgggtgcaggttacaggtgataagtagagcaataagagagaagctgtgggggtggagcctaggcatgtgtacttttcacaagctcctcagcgattcttacacattctatagtttaggaaccacttgaatatagccagagcaacattctcaatggcttcctggaaaattttcatgggaaataaacatgcggcagaagcagtcttttgtttcaaaaagcacctccttgtggcagctttaaaatgca

SEQ ID NO: 524222 - DNA, 369 bp, Homo sapiens
aaacatagaccaataagttggtaaattactagagccctttctaagcccttgggctacaacattgagtatagaatctctattatgggctaatattaataaattcaacctgaaccaattttatattcctgctgcaattttataaatttaattgaatttataatttataaatttatattaatatgtaaaattatatataatttaaaattaatataatttaaccatttatataatacatagatgtatcacttagtttataatttaaaaattataattttgcagatttaatttacaatattatatttctacacctttaatatctatttctatacaatttcttgaratttctgtgtattcattgaaaaaaatctt

SEQ ID NO: 524223 - DNA, 567 bp, Homo sapiens
tttgggtgtctcccagaagcatctgaaaaatttctagagggggtctgttgaagatgtgtaactagtacaccccaacccccaacctcagtggaaarcaatgcccagggattaggctatggaagggcaaaatggacccattcaaatttcctcccagggaccaggccctattaaccctgggaaatgtccttagctggtgggggaaaggttggcgatcaggaatacatatgtgtagtttttgttagaagccatccatagcacacccgagggatgaaaggcctccaagtgggaactggaacgatcaaattcttgctgattattaattgggccctaatttcagaaagcaatgctgtttttacaaattggacctgactttaaagaacaaaacacaaaaaacaaaaagagtagaaaattttatgctaaaaaagattcgcaatgaaacaatcagtagcacattgcatctgttaagtgtcccagctccctgtaatggttatgtttccaacggttgtttctttccaagataatggtgtaggtgttacaccccaatcttcatgtccacattctgcaggt

SEQ ID NO: 524224 - DNA, 580 bp, Homo sapiens
gcatgcagctgcccatggcaaaggctgctctctgccattctggaatagagacctgagccattccctgccccacgccagccctgaccccaactttctattgccaaaattcatatgaggactgagccttggtccctcagtaggctcagtatcaaggtccctttggattaggacaacctgaggaagaatggtgtagaatccacctcagggagaggatggttacagattccttaagcctggaaggaaggcactgaagaggacttgaggacaggaaactcttttaaagggacgtggcatttccagagagaaagggtgcgtgagagacatcttctgtgtccatgagtacagctagaagtcatttaaaataacctgtcttgagtggaggaggctccttgaccagagttagaaacagaratgtaaagaggaagatgagctccccgcagagtggagactgcctcctcccaggcgacagggcctggtttgcccaagttaagtccctgtgtctttgtgagcagagaggtctccagcttgctttctggggcttactttgaaccaaagtgagatttccaagacagtaactggc

SEQ ID NO: 524225 - DNA, 547 bp, Homo sapiens
gcataatgtggttataaagagcctaagctgctgttgtatatgcctcccaagtctccccccatcacctctggaggtggggacttaaccrgagaactctccctttggagtatttatggcctcaaggaggctggctttaaaactgaaatgtttctgacacctgagcatctagtacacggagatgggtcctctttgtgtctaaactgtatttgttctaaggactcaagtgtatccacacaggtttggagggcatgtgaggtgggaccactaagacagatttgatggagatctggaagtctaagccacaacattgattcaaggatactggagcagtgtcacaggtaggggagtaccttccttgaagtagcccctgagtatgtttgagatgaaagggtggatagagactctcatagaagagcaaatgaaaaggtaaaattgcattattacactctccaggacacttggagagaacaattagccaacagcattggggtcagtagaaccaggaactggcactctcagcacaaatgtcagcagcctccatattaca

SEQ ID NO: 524226 - DNA, 547 bp, Homo sapiens
gcataatgtggttataaagagcctaagctgctgttgtatatgcctcccaagtctccccccatcacctctggaggtggggacttaaccagagaactctccctttggagtatttatggcctcaaggaggctggctttaaaactgaaatgtttctgacacctgagcatctagtacacggagatgggtcctctttgtgtctaaactgtatttgttctaaggactcaagtgtatccacacaggtttggagggcatgtgaggtgggaccactaagacagatttgatggagatctggaagtctaagccacaacrttgattcaaggatactggagcagtgtcacaggtaggggagtaccttccttgaagtagcccctgagtatgtttgagatgaaagggtggatagagactctcatagaagagcaaatgaaaaggtaaaattgcattattacactctccaggacacttggagagaacaattagccaacagcattggggtcagtagaaccaggaactggcactctcagcacaaatgtcagcagcctccatattaca

SEQ ID NO: 524227 - DNA, 621 bp, Homo sapiens
ggcattcagtctgtgtccaggtatattgttttgttttgtttgtaactgtttatttttctactacaaacagttttatgacaccttgctaaacttgatacacatatctttgagtcctgccactgttactaacatgggatcgatttccaaaagcaaaatggttgggtaaaagggcacatgcattcttagtttaccaattattgattgtttgttttctaaatgctgtagcaatttatacactcaccatcttctctttatgagagaaacactcaaattattctcttctagctattttgaaacatacaatagattattgttaaaatattctatattttaaatagaaaagcttgtacatgctattgcaaagattttttwaaaactaaaagtcaaccgacagctatccaaatgacaaaaatgttaaagtacagtaacattcaaaattgagcttgagtcattgcttatttttcccaccagattttaattacactaacaattttgtaatagaacagatgtagaaaggaaccagcatcccttcctaaatattttcctgatcttgctcatatgcatttgagtcttacagatatggttctagcacattacaatttttcacttttaatttttact

SEQ ID NO: 524228 - DNA, 596 bp, Homo sapiens
ctgagatgcaaggcgaggagaaacagatgctgcttttttcatgacagaggctgcaaagtcacattgaaaaaggttgtaagggattggagagattattgtgaccatctttggaaatagtccaccacaatagaaatatatggaccttgcatgggaacacagaagaatgtgtatctgacctaggctgggaagacaacttgcttcagagaggcatttgacccaagtcttgaaagcagagtagccagttgtacaggcatagaaaggcattccagcagagggaaaggctgttagaaggatataaaatatcagagcaytatgcctttggccaatgaaagatgagttcatggtaggaggttcaggatgcttaatggaaagaaccaggtgggaaaagattgtaaaatgcctttgtcttagtttacattccccaagaaacagacccagagataaagatttgagtgcaagaaatttattagggaggtgaacccaggaagcacagaggaaaaatagtgaagtgaggcacagaagggaaggaagccgatacgctcatgagcaagttaccattgttggcaactgggactgagacttgtcggggacatctg

SEQ ID NO: 524229 - DNA, 596 bp, Homo sapiens
ctgagatgcaaggcgaggagaaacagatgctgcttttttcatgacagaggctgcaaagtcacattgaaaaaggttgtaagggattggagagattattgtgaccatctttggaaatagtccaccacaatagaaatatatggaccttgcatgggaacacagaagaatgtgtatctgacctaggctgggaagacaacttgcttcagagaggcatttgacccaagtcttgaaagcagagtagccagttgtacaggcatagaaaggcattccagcagagggaaaggctgttagaaggatataaaatatcagagcattatgcctttggccaatgaaagatgagttcatggtaggaggttcaggatgcttaatggaaagaaccaggtgggaaaagattgtaaaatgcctttgtcttagtttacattccccaagaaacagacccagagataaagatttgagtgcaagaaatttattagggaggtgaacccaggaagcacagaggaaaaatagtgaagtgaggcacagaagggaaggaagccgataygctcatgagcaagttaccattgttggcaactgggactgagacttgtcggggacatctg

SEQ ID NO: 524230 - DNA, 462 bp, Homo sapiens
ttgggagacatatcccagaactcccgtttttttcagtgatgtcttaaaaggggtaagtgactagcctgggccaagccacaagtcatcccaaagccctgcacattctgaactctcagcccgctgttctattytgcgcagtatatgcatgaccctagaacgccactaaaaataagcagtaacattaatatgcccgtctaaaaaaagtgagtaccttatgatcaggattttaattgtggctcaggattgtaactctccctgtaaagcacggtcaaattaaattgagaaaatactgcttaagtagcctatttaataacagtgctattactgcattggcatccatttggcttctagagtgggatgaatagaggtccctacaaggctagaagagggcacagtgatgccctgtaatgacacccatcggaatgattcatgtaatagacagtgatgggttgtcaggaagtg

SEQ ID NO: 524231 - DNA, 462 bp, Homo sapiens
ttgggagacatatcccagaactcccgtttttttcagtgatgtcttaaaaggggtaagtgactagcctgggccaagccacaagtcatcccaaagccctgcacattctgaactctcagcccgctgttctattctgcgcagtatatgcatgaccctagaacgccactaaaaataagcagtaacattaatatgcccgtctaaaaaaagtgagtaccttatgatcaggattttaattgtggctcaggattgtaactctccctgtaaagcacggtcaaattaaattgagaaaatactgcttaagtagcctatttaataacagtgctattactgcattggcatccatttggcttctagagtgrgatgaatagaggtccctacaaggctagaagagggcacagtgatgccctgtaatgacacccatcggaatgattcatgtaatagacagtgatgggttgtcaggaagtg

SEQ ID NO: 524232 - DNA, 635 bp, Homo sapiens
gccatttaagatttagacccaagccttctattaattctggatctcattaatctatcatttgtatttgttatttttctctaaccctttccagctctcatctactcccatttcacctcctcactcttctgactcttgtcctccacgtctcttgctatgttttcagcagtgtctaggcccttcgtgctatttctgaagtcaccttcataattctcytattattccatctaatcttcccttatcatttggctttaaactcttgtgagtttgtgatgagatattgatgctagtttttaactgctctgtgcgatactgtattcgtgatatttggtttcccttcgcctaccgccatgattgtaagtttcactgcttttaaatttgtcaatctcctccacctcccccagcttcctctcctccatttctttctgcctttcttcttgcagtgtctttctatagatcctgtgatacttccatagcactcgtcttcattagtatgggcttcctgaaccagcaattatcggtggtgaatgtgaggcagaggacggagccatctaacttccttgtgaagttcctctttgcagagtggtatgtgtgagtgagctctctttttcttctctctgcccagcagagattggcag

SEQ ID NO: 524233 - DNA, 635 bp, Homo sapiens
gccatttaagatttagacccaagccttctattaattctggatctcattaatctatcatttgtatttgttatttttctctaaccctttccagctctcatctactcccatttcacctcctcactcttctgactcttgtcctccacgtctcttgctatgttttcagcagtgtctaggcccttcgtgctatttctgaagtcaccttcataattctcttattattccatctaatcttcccttatcatttggctttaaactcttgtgagtttgtgatgagatattgatgctagtttttaactgctctgtgcgatactgtattcgtgatatttggtttcccttcgcctaccgccatgattgtaagtttcactgcttttaaatttgtcaatctcctccacctcccccagcttcctctcctccatttctttctgcctttcttcttgcagtgtctttctatagatcctgtgatacttccrtagcactcgtcttcattagtatgggcttcctgaaccagcaattatcggtggtgaatgtgaggcagaggacggagccatctaacttccttgtgaagttcctctttgcagagtggtatgtgtgagtgagctctctttttcttctctctgcccagcagagattggcag

SEQ ID NO: 524234 - DNA, 626 bp, Homo sapiens
gcaggcttttcacaggaagtggtagtagaagtcttctgagcagctatgctttgctgctgactgtaatgtttcattatctctcacatccattmatttctttccatctccacaactactgtgatccttgtccaagccttgtgagctctagtcaaaagcatggctaagtaagggagcaaggggatggaaaagccatttgaggtagggtttcgacagggggtctctaaagggttttgaatagaaaggagcagtactttttaataatttggcagttgttaggtgggctttactgtagaaagatggaggtagaaatactggatgttattgtaccttttctggtgagccgaatcagttggctgaagaaaagatacaccaggacttagagaaggggtgaaatgaacaaattttgtcaatgattggagaaacgaaggtgaagctagaaggagaaacccaaagagaagttggttttgagcacaggccagtacagcttgcaacaggttttctttggcttctatagtttaacaaagaaaaaaaaaaccctgaatttgttgccacaatcaaatccagagatctcacataaaaatgcacggtttggcaacattgaaaccatatttctaaaaggcagtctt

SEQ ID NO: 524235 - DNA, 475 bp, Homo sapiens
tggaggacagggaagagaagggaatgtcagatcctcatgccatcgttcagggccattcatccatctctggatttcctgtacatgagccaacaaattcctcatgttgcttattccactttgatctgagtttctcctcttgcgatttgaagaatactgactgatatagtcattctaacctatatattgctatttggattttatttatttttaatkataagaaacatcatccgggactaggaaagggtataatctttctggcctcaagcaatttaatggagcataattatgcatggacctagctagagatcccagtcctgaaatcaacagtattttatttctttatttttgttcattttacatagatgttctatccagtatgcttttcaaaaatatatttaattgttggtttggaggcataatgtggtggctacacacgtgggctccagattaggttgccaccttcattttttcactt

SEQ ID NO: 524236 - DNA, 475 bp, Homo sapiens
tggaggacagggaagagaagggaatgtcagatcctcatgccatcgttcagggccattcatccatctctggatttcctgtacatgagccaacaaattcctcatgttgcttattccactttgatctgagtttctcctcttgcgatttgaagaatactgactgatatagtcattctaacctatatattgctatttggattttatttatttttaatgataagaaacatcatccgggactaggaaagggtataatctttctggcctcaagcaatttaatggagcataattatgcatggacctagctagagatcccagtcctgaaatcaacagtattttatttctttatttttgttcattttacatagatgttctatccagtatgcttttcaaaaatatatttaattgttggttyggaggcataatgtggtggctacacacgtgggctccagattaggttgccaccttcattttttcactt

SEQ ID NO: 524237 - DNA, 644 bp, Homo sapiens
ctgggcagtttttctgctttatttgtctttggctggggtcaatcactcagatgcatttggttactgaccaggctacaaagctctagaagacttcactcacatgtttagttcttctcaatgataccctctctcttcacaaggtgtctcatcactcagtaatctggcttgagctcccttacaacatggcatctagcttccccagagcacatgaaagtggaagctgccagcttcctaagggctacctctggaactggcacactattatttccactgtattctattgggcagcaaatcacaaggtcaagaggagaggaaataactgcctcttgatggaaggagcagcgtacctccagaggagggaagggattgttggtggccatctttggaaattgtttagtgtagttttcttatttgtttattatagttttcttatctattaaatgagatgttgaattagggagtttctaagggcctgtcaaactctacatttccgtaatactatacttttttttttttttgagatggagtctggctctgtcgcccaggctcgagtgcagtggcacgatctcggcttactgcaasctgtgcctcccaggttcacgctattctcctgccttagcctcccgagtagctgggactacagt

SEQ ID NO: 524238 - DNA, 626 bp, Homo sapiens
gcgggtgactgactggcagagtttagtataggtggcctagaggtgtggctgggttggatggaccattgaagcaacctagaaagtgtgagccagacattgccaggcacccttaagaagtagccaaatgtgctgttttctgtggacctgctctttggaccagcctgctgccaccttgccatgggaggatttgatgtgtgtgccctatgcttttgcaagcagctttgctttcctctgaaaggcatcatctctgttcacaaatgacatgacttcgtttcttagctcaaggcaaaatttgctctttgagtttgtttcctagggctgttgtaacaaacaaccacaaactgggtggctttaaacaatagatatttattgtctcatgggtctggatgcyagaagtctgatatcaaggtgttggcagggccatgctttctctctgagggctctaggggagatccttccttgcctcttctagttttggtgtttgttggcaaccctaggccttcttgggtttgtaaatgcattgcaatctttgcctctgtcattacacagctcttctctctgtgtctctgtcttcttctcttagaagaacaacagtcatattggattaaagatctaccctaatgagc

SEQ ID NO: 524239 - DNA, 396 bp, Homo sapiens
ctgccatggtagttggcatcaggttgtaattcagcattagggtactctgactgtgaaattgttgttcccgggtctttcaattatttctgtyattcaattataaagatagtggggaacatggagataatctcattccagcttatagttttgcagttgaagaaactaaagccctgaatggaaaatgactgagatcaccgagttgatagtcaccagcagagcaccgtccccactgtggaacagtgaccaccatgggtgaaattgctctgattttgggctgtaatttatctgaaccagtaagttggacagccttggcaacactataaagtagagggtcgctctcctgtacctcatttcccaagtgtggtaggatatcgccttgatacagaccagattctc

SEQ ID NO: 524240 - DNA, 562 bp, Homo sapiens
atgtgtgttagcactattgttcytcagcactccctacctcacctaagcccccacgaacttcggatgccacttcaggtcttcctcttccaagaggccctccctgaccatcacaggctatgagcacctcaggtaaacatgcttctgatcagcgcccagatctccccaagtcagcatgtcaggtgtgcgcctccacaacccataacaatcacaatggtgatgatggtgatggtggtgatgatgatgatgatgacgatgaatggttattgagtcctgaaaacaggccaggagttgcatttcactctctgagccacctcatttaactgaccaagggtgatgaggactcaggtgtcattcctgcacccaccaggcctcctgacaggagggaaggattaggacacacattccaagcacctgctgtgtaccaggcacatttatacaggttgactcccttaattctgtgggatctgcattaccattacccccattccacagaccagaaaactgaggctgggagcgtgaggtgaccggcctggggtcacacagccagtgagagacagagggt

SEQ ID NO: 524241 - DNA, 574 bp, Homo sapiens
agctgctgaggcgcagagataagattcagacccagacaatctggctaggcccctggcacttgagcacaatgccacactgtaaaaaattctcctgtgcaaaatcccccagctcacatacccacatagtcaaaagacaccagaccatcttagtccccagaagtctgcacaaaaatgcttagcaattatataattcaaaacaatcacatcatgtaataaaacataggcacatatagaagcaatttttttcattcaaaaaatacttaatgagcatctactatgtagcaggcattgttggtgctggagatcaaaatctctatyctcttggcatgcctgtgacattccagcgagggaggcagacaataagtaataaataagtaaaatgtccagtgtgttagctagtgggaaaaaaacaacgcaagcaaaggaagaaatggtgaggtggggatgtgcggtgtcagaaaagacccagtcaagaacatgattttgagcaaaggcctgaaggaggtggagggctgagccacggggacactgggaggtgggagggagcgcattccagacagcacaggtgcaaggg

SEQ ID NO: 524242 - DNA, 556 bp, Homo sapiens
acagtttgaaagggtgaggtttatgatttgtgaattcacatctcagtttttaaaactttatggggaaaaaggagtaatgaaagaggagctgagagagccaagaggggcaggtcttgtgcgacattccaggccagactaaggactgcttttatgctaagtgagatgtaactgtaactgattagggtctcactggatccctctgactgcrtaaggagaacagaatgcgggaggccagggcgagatcaaaagagtcaactgcaacggccctggccattcccggctgcgcgtcctcaggtacgccacttcccctctctgcagctattttcctcatgcaggaagtgggcctgaaaaatccatcccccacagggcagaggtgagagctaatagacagtaaagtgctgttatgatgcctatgcatggagggtggagtaccgatcccgccaaacagtttttaattatgcaaatgagtttcctgaacagaaaacaaggggcaccttcctttgtctcaggaagcagaggttcatctcgcatcaacagccctcccagcccagaggca

SEQ ID NO: 524243 - DNA, 556 bp, Homo sapiens
acagtttgaaagggtgaggtttatgatttgtgaattcacatctcagtttttaaaactttatggggaaaaaggagtaatgaaagaggagctgagagagccaagaggggcaggtcttgtgcgacattccaggccagactaaggactgcttttatgctaagtgagatgtaactgtaactgattagggtctcactggatccctctgactgcgtaaggagaacagaatgygggaggccagggcgagatcaaaagagtcaactgcaacggccctggccattcccggctgcgcgtcctcaggtacgccacttcccctctctgcagctattttcctcatgcaggaagtgggcctgaaaaatccatcccccacagggcagaggtgagagctaatagacagtaaagtgctgttatgatgcctatgcatggagggtggagtaccgatcccgccaaacagtttttaattatgcaaatgagtttcctgaacagaaaacaaggggcaccttcctttgtctcaggaagcagaggttcatctcgcatcaacagccctcccagcccagaggca

SEQ ID NO: 524244 - DNA, 556 bp, Homo sapiens
acagtttgaaagggtgaggtttatgatttgtgaattcacatctcagtttttaaaactttatggggaaaaaggagtaatgaaagaggagctgagagagccaagaggggcaggtcttgtgcgacattccaggccagactaaggactgcttttatgctaagtgagatgtaactgtaactgattagggtctcactggatccctctgactgcgtaaggagaacagaatgcgggaggccagggcgagatcaaaagagtcaactgcaacggccctggccattcccggctgcgygtcctcaggtacgccacttcccctctctgcagctattttcctcatgcaggaagtgggcctgaaaaatccatcccccacagggcagaggtgagagctaatagacagtaaagtgctgttatgatgcctatgcatggagggtggagtaccgatcccgccaaacagtttttaattatgcaaatgagtttcctgaacagaaaacaaggggcaccttcctttgtctcaggaagcagaggttcatctcgcatcaacagccctcccagcccagaggca

SEQ ID NO: 524245 - DNA, 564 bp, Homo sapiens
tgtgtggacttcagcaagttactcagcctctcccggctttagtttccccatctgcaaaataggtataatgatgatattgacctcagggagttgctgcaagggctcaagaagcatgtggcacagtacctggaacagagcaaggcctcagtgggtgtccttattatgacaactctggtccttttctcaagggatttctttttgcggtgtctgaagattccctgagggcagagaccttgtctgtcttgttccagccacatgccagcacctagcacagtgyctggcacacagtgggtgctgaatggccatttattgaatgaataagtcgattagtggatgaaagcatcaactgcccacaccctgaccccggcctcgctcctcctgagagatgcacagaagccacccaccctcccagcaaggggggaagcacaagaccctgggtcctgacggccaatggccacctgcctgcaccagctttcagtggccccagtcccgccagcctgaaatagtctcgcctcccctggcccagaatcaagggatcgtctgtcagttccatcctggggaagg

SEQ ID NO: 524246 - DNA, 564 bp, Homo sapiens
tgtgtggacttcagcaagttactcagcctctcccggctttagtttccccatctgcaaaataggtataatgatgatattgacctcagggagttgctgcaagggctcaagaagcatgtggcacagtacctggaacagagcaaggcctcagtgggtgtccttattatgacaactctggtccttttctcaagggatttctttttgcggtgtctgaagattccctgagggcagagaccttgtctgtcttgttccagccacatgccagcacctagcacagtgcctggcacacagtgggtgctgaatggccatttattgaatgaataagtcgattagtggatgaaagcatcaactgcccacaccctgaccccggcctcgctcctcctgagagatgcacagaagccacccaccctcccagcaaggggggaagcacaagaccctgggtcctgacggccratggccacctgcctgcaccagctttcagtggccccagtcccgccagcctgaaatagtctcgcctcccctggcccagaatcaagggatcgtctgtcagttccatcctggggaagg

SEQ ID NO: 524247 - DNA, 521 bp, Homo sapiens
ctgctcaggttcaaatcctagctccccacttgctggccgggtggccttgggctggtttccttgcttcaagatcctcagtgttttcatcagtataaygggaacgatcatggtacctagctccaaggtcctccccggggttccatgggaagtacttagcacctagaaagttctctgtaaatgtttgttcttactattattgcatgtgtgaagcccaacacctagaaagttctctgtaaatgtttgttcttactattattgcatgtgtgaacggccctctaagcctggccccactctcaaatggcccatacaatccctaatcacccgtgtttccggaccagagattgtatcgtctctgcaggggataaagtgatccacatagtatccgcctctagactgtagtcattttatggacagaaacattgcttatttattcctgttccaaaagcctaggattttcctcccattggcctctcaatactgtaagtgcctaaggacacagggagagaatggggtggcttctg

SEQ ID NO: 524248 - DNA, 657 bp, Homo sapiens
agaaaggcaagtgggcgactgggcatgaaaccttgggaattaaatgtcctgggtcctcctgaccccacctgagcccacagcagctccttcccactccactggctggrcagaagcagccacagctccctgtgtgtagccagcagaccctcccttgtgcaatctcattgaagtatatacttaaaatgggtaggttcttccagatatcatttctatttctttctctcttttttttttttgagaccgagtttcgctcttgtcactcaggctggagtgcaatggcatgatctcggctcactgcagcctccatctcccaggttcaaacgattctcctacctaagcctcccaagtagctgggattacaggcacctgccaccacacccacctaatttctgtatatttagtagagatggggtttcaccatgttggccaggctggtctggaactcctgacttcaggtgattcgcctgcctcagcctcccaaagtgctgggattacaggcgtgagccactgcacccagccagatataatttctatttcgatgaagcatatttttttaaagtgctgatctgcctgtcagcctacttcctgcctggggtctcctctgacaagcccacaggaggtttaccagcagtggctgccccgctcccacacctgtga

SEQ ID NO: 524249 - DNA, 657 bp, Homo sapiens
agaaaggcaagtgggcgactgggcatgaaaccttgggaattaaatgtcctgggtcctcctgaccccacctgagcccacagcagctccttcccactccactggctggacagaagcagccacagctccctgtgtgtagccagcagaccctcccttgtgcaatctcattgaagtatatacttaaaatgggtaggttcttccagatatcatttctatttctttctctcttttttttttttgagaccgagtttcgctcttgtcactcaggctggagtgcaatggcatgatctcggctcactgcagcctccatctcccaggttcaaaygattctcctacctaagcctcccaagtagctgggattacaggcacctgccaccacacccacctaatttctgtatatttagtagagatggggtttcaccatgttggccaggctggtctggaactcctgacttcaggtgattcgcctgcctcagcctcccaaagtgctgggattacaggcgtgagccactgcacccagccagatataatttctatttcgatgaagcatatttttttaaagtgctgatctgcctgtcagcctacttcctgcctggggtctcctctgacaagcccacaggaggtttaccagcagtggctgccccgctcccacacctgtga

SEQ ID NO: 524250 - DNA, 521 bp, Homo sapiens
agggaaggtgttaccacctaatagaatcaggaagctctaaataacgatgaagtgcacatgctgcagggggccttacaccatccaggctttacagctaaatcccagagaggttaggctacgtgtccaagttcacacagcaaattagggcagagcagggagtgtgcccagccctcctgactttcagtcccagggttcattcagcccatctaccctgagcaattgctggacacctgtgagcacatttcatagtcaccgcatctccacaaaagcgagaatcagaacacccatcctacagatgaagacctcaggctttgagaagggaaggctctcccaggacctttctcacccacctgaggccccacctttggacctacttaagggctcctgaaggtcccctgaaggmtgggcctccaagcccaggactaaactcagagctgtgtggctcctccaggaaggacctccgaaggtccatgtcttcctgaacttcccatcaaccttctcattctaccagtctcacccag

SEQ ID NO: 524251 - DNA, 571 bp, Homo sapiens
tttaaaacaacacgtctcttctaaaggctctctcacatcatgctcttatagggacagagctaacacatctactataagggaaattcactcttccttaaagtgagaccaagcaactccttgatcgaaaaagcaaaacaacaaacaaaagaaccattcatatttcctgtgtagataaaaagttaacatagtaggtaggcctgattgtttactcttagaaaggcctacttaaaagaacagcccttggctgacatctgggaacttagatttcaggagggttcccaaccaccctaactgatatgagttgttcactgtgcctaaattgtttatgcaaacaatacggcttatgctgaacacctgccttccttttgggaatctrgaagctgggtatgtgccaagcagtggcttcctacatgatcagcccttgataaaaaccctgggcaccgagtctttaacaggtttccctagtagacatttcatacatgttatcataacttgttactgggggaattaaatgtgtcctgtgtgacaccactgagagaggaccttggaagccaacacatggtttcccctg

SEQ ID NO: 524252 - DNA, 545 bp, Homo sapiens
gtgtagacccaggcagcctgtgcccagagcctgcatcacactgtcaccgcaccatgggccacctcaccacatctcctcccttcaatgggaggaaccagattccttaacaaccaagtgtctcaagatgaggcccagagggaactcatgggtgatgaggctatatttacacacacacacacacacacacacacacacacacacactctctctctctcatgcatgctcactttcttcaatgagttgttgcacatttattgagcatctactatgtgctggcactgtgctagggacatagataacyaaggcagggctcctttacaccaggccttgttagctaggaaaagggaccagcaaaacttctgacccacctgtaggtgcagtggggagacactgtggacacactgcctagtcacctaacgatgactgctttctccccagctccccaggaagttttcccacagcctccagggttctgccatgtggaccccagttttgtgaaaagtggttctaagattctgatatcttgactgctatagcttttttga

SEQ ID NO: 524253 - DNA, 518 bp, Homo sapiens
cacagcgttgtgaatgtacaaaatgccactgaattgtataatttaaatggttaaaatggtaacttttatactttgtatattttaccacaataaaaaagaaaaccccagccagcatgagattcacacaccacaaatgagctatatgatgaccaagcccagggatgggcagattcatgaggccttctctgaccaccagcccttcgtcgkgtacatgcaccataatatgtgcacatactcgtgtttgatttgtctcaactagatgacacattttttaaactctgggaccatggtgtatatttctgcctttttctatgtcccctcaccatctaacatattgctgcagatacaggaagcccataaaacttgagtggtagattcactggttgccaaattgaacattgtggtctggatcaaataggcaacaaggagccattaaagtttcccgagggacacagggacaatatgaggcagcacgtctgaagacagatccactaacagtgggcagggtgggttggaag

SEQ ID NO: 524254 - DNA, 645 bp, Homo sapiens
tgtactccacataagcatcgtaccggctcttaatcactttattattattttttaattaattaattaattaattaattttttttttttgagatggagtttcactcttgttgcccaaattggagtgcaatggtgtgatcttggctcactgcaacctccgcctcctgggttcaagcgattctcctgcctcagcttcccgagtagctgggattacaggcatgtgccaccacactcagctaattttttgtatttttagtagaggcagggttttaccatgttggccaggctggtctctaactcctgacctcaggtaatccacccatctcggcctcccaaagtcctgggattacaggcgtgagccaccatgcccrgcctcttaatccctttatacttttattttttaatgttccagtatcatcagattggcaaaactgacatgttagaacttaaatatacttgataagtagaagaaaaaaataaggaaatttttttgtcccctggaaatctttatggatttacaatttactctctgtccttggtctaggaaagcctgcctcacacattgttgtctggtatgttctttaccttaatgactaagaatttaattatattccaaattgggactattttcctaaatattcccaggta

SEQ ID NO: 524255 - DNA, 615 bp, Homo sapiens
tttcctgagttttcagtttgcagactgcagactgagatttctgagcctccataatcacatgagccagtttttcatagtatatatattattgrttttctttctctggagaaccctgcctcatacaggtagattttagcttagtctaaggaagaacctactattgaaaatagctgctggaaatttgattggactatcttaggaggtagtaaatttcttgtcaatggagatggtcaatcagatgttgtagtggggcttccagcattggctaaggtttggctagactatcttggaagtccctacgagtcactgctaatgggagatatcagtttcaagggagaatgtcaaaatattgcatctggaaagaacttcagaaactgcttagttgcacttccttactgttcagaggaggaaaatgagaccagagaatgcaaatatctcattcaaggtcaaatagccaatgtattttaggggatttgtgtgacagaaggctatctttttggttttatttagaatccagtaaaatgcaactgtattttgagtgatctcagtctgcctttgtgggtaggagaaactgggtgcctactgaatgtagaaagtcttttattttatttcaga

SEQ ID NO: 524256 - DNA, 615 bp, Homo sapiens
tttcctgagttttcagtttgcagactgcagactgagatttctgagcctccataatcacatgagccagtttttcatagtatatatattattggttttctttctctggagaaccctgcctcatacaggtagattttagcttagtctaaggaagaacctactattgaaaatagctgctggaaatttgattggactatcttaggaggtagtaaatttcttgtcaatggagatggtcaatcagatgttgtagtggggcttccagcattggctaaggtttggctagactatcttggaagtccctacgagtcactgctaatgggagatatcagtttcaagggagaatgtcaaaatattgcatctggaaagaacttcagaaactgcttagttgcacttccttactgttcagaggaggaaaatgagaccagagaatgcaaatatctcatycaaggtcaaatagccaatgtattttaggggatttgtgtgacagaaggctatctttttggttttatttagaatccagtaaaatgcaactgtattttgagtgatctcagtctgcctttgtgggtaggagaaactgggtgcctactgaatgtagaaagtcttttattttatttcaga

SEQ ID NO: 524257 - DNA, 590 bp, Homo sapiens
gttagatgggtagattgcaaattttttctcccattctgtaagttgcctgttctctctgatggtagtttcctttgccatgcagaagctctttagtttaattagatcccayttgtctattttggcttttgttaatggcaacatcttaactgcgtgtttccaattctttttaggtcaaccttcataaattaaaagattaatatctactgggataaggtattttgttttctgtctttttattaaaagaaaaaaacaggaaaggttttttacagaacaataattccagcttggtatttgtctttgaagatcttgtatatgtccttcaacctaagggaaacacctgcctttctggctttcccagtttacgaaaacaatatccagaagaggagatataataatagaattttttgttgttattagaatagagagttgaaaaaaatagcaacacttctctagtctaggcttgcctcattattcacgtgaatttctgtggaattttccgacctgaagaaaagcaaatgatttttatgtaaacttacttgaaataaatttaacctatattattgattccttaatttaatgtgcacatgagt

SEQ ID NO: 524258 - DNA, 590 bp, Homo sapiens
gttagatgggtagattgcaaattttttctcccattctgtaagttgcctgttctctctgatggtagtttcctttgccatgcagaagctctttagtttaattagatcccacttgtctattttggcttttgttaatggcaacatcttaactgcgtgtttccaattctttttaggtcaaccttcataaattaaaagattaatatctactgggataaggtattttgttttctgtctttttattaaaagaaaaaaacaggaaaggttttttacagaacaataattccagcttggtatttgtctttgaagatcttgtatatgtccttcaacctaagggaaacacctgcctttctggctttcccagtttacgaaaacaatatccagaaraggagatataataatagaattttttgttgttattagaatagagagttgaaaaaaatagcaacacttctctagtctaggcttgcctcattattcacgtgaatttctgtggaattttccgacctgaagaaaagcaaatgatttttatgtaaacttacttgaaataaatttaacctatattattgattccttaatttaatgtgcacatgagt

SEQ ID NO: 524259 - DNA, 231 bp, Homo sapiens
ctgagcccggggggtgccggcctaggctacaggtggggaggactcccggtggcctggtggaaaagctgccctctctcacccaggcacrccacggacaccagcaccgcaagggctcttttgtgaaaaatgtctccgccagcacgctctcaaaagcttctctctgaatccgctcatctgaggagtccagaggatctgggccattcttttccagtctgcacaaggggagggagg

SEQ ID NO: 524260 - DNA, 231 bp, Homo sapiens
ctgagcccggggggtgccggcctaggctacaggtggggaggactcccggtggcctggtggaaaagctgccctctctcacccaggcacgccacggacaccagcaccgcaagggctcttttgtgaaaaatgkctccgccagcacgctctcaaaagcttctctctgaatccgctcatctgaggagtccagaggatctgggccattcttttccagtctgcacaaggggagggagg

SEQ ID NO: 524261 - DNA, 231 bp, Homo sapiens
ctgagcccggggggtgccggcctaggctacaggtggggaggactcccggtggcctggtggaaaagctgccctctctcacccaggcacgccacggacaccagcaccgcaagggctcttttgtgaaaaatgtctcygccagcacgctctcaaaagcttctctctgaatccgctcatctgaggagtccagaggatctgggccattcttttccagtctgcacaaggggagggagg

SEQ ID NO: 524262 - DNA, 660 bp, Homo sapiens
ctgttgcgactgcagaaatggctgttgcatggagaaaacatgagaatgaggctagagatggtctgtgtgggctgctggaccctgcactgagtggttacaggagaaccagaactgggaacgacaggtgtctttctaccgggctttcctggcagtgtctcactggcaccctctagtgacgaagcgtagcattgtgccatctagggaagtgacagcaactccagggttacatgagaggaggctctagagccaagagacaatcaattgctaagtgactcagcaggtgcaggatgctcactttaatcttggttaaatctgacaggcaacttgtgagtctgatcctttccagaagtctcccccttcaaggacaggacataaggaactcactcactgataaaacaacttaatccttgttcacaagcagctagggacagctacgtccttctggactctagtactgtggagataattatttgggactgctttcccctgacagccactgggttgtaatgtggctcgtgctgtggcttttgagaagccatcatttggcagtcagttggaaacgtggaaaastatagtttaggtacacagtttaaactataatttaggcatatttaaatagaggctatataaaaatagaggcatatttaaatagaggaaata

SEQ ID NO: 524263 - DNA, 654 bp, Homo sapiens
gtgtatccctgtgaatgtggagccctgcatgctgcataggtcacacaggacctatggtcaacagacaagagtcaattgaccatgatagtaattttacatttattgacaataaagtgcaatttataaaaattttcttaataagatcctattgaaaaataccttattgaggaaaaataccagtgatgtttgataagaggtagattcagttaagaaatgaattacagtgtatgaatgtgcaccaagaataatgtcttagtgagcttaggctcccatacaaaataccatagaccaggcagctcaaacaacagaaatgtatttgctcacagttctggargccccaaagtcgaagatcaggatgccagtgagaggtgacagcatgctggcagccctcgcttgctctccctgcctccttggcctcggcgcccattctggctacgcttgaggagcccttctctgggctggctgaggccggagccagctccctcggcttgcgggaaggtgtggagggagaggcacgggtgggaaccggggctgcgcacagcgcttgcgggccagctagagttccgggtgggcgtggggttggcgggcccgcactcggagccgccggccggccctacctgccccaggtagtgaggggcttagcacccaggccaa

SEQ ID NO: 524264 - DNA, 654 bp, Homo sapiens
gtgtatccctgtgaatgtggagccctgcatgctgcataggtcacacaggacctatggtcaacagacaagagtcaattgaccatgatagtaattttacatttattgacaataaagtgcaatttataaaaattttcttaataagatcctattgaaaaataccttattgaggaaaaataccagtgatgtttgataagaggtagattcagttaagaaatgaattacagtgtatgaatgtgcaccaagaataatgtcttagtgagcttaggctcccatacaaaataccatagaccaggcagctcaaacaacagaaatgtatttgctcacagttctggaggccccaaagtcgaagatcaggatgccagtgagaggtgacagcatgctggcagccctcgcttgctctccctgcctccttggcctcggcgcccattctggctacgcttgaggagcccttctctgggctggctgaggccggagccagctccctcggcttgcgggaaggtgtggagggagaggcacgggtgggaaccggggctgcgcacagcgcttgcgggccagctagagttccgggtgggcgtgggsttggcgggcccgcactcggagccgccggccggccctacctgccccaggtagtgaggggcttagcacccaggccaa

SEQ ID NO: 524265 - DNA, 524 bp, Homo sapiens
cagggctgtcattaggcacgagagcatcccagaaagcaaaagtgcccaaaaaatggactcagatgccccctcgcatctgagtattcctgacagcatgtgaacattaattattaattttctgtacctcagttttccsaagccaatctttaggacaaaaaaaaaaaaaaaaaaaaggaagaaaataacttaaatgccaatttgtagttaaagtttcctctttgccttgaagacatcaaagcctgtaatagtttgcctgtagggagtttaattcaaacacagagcggtaaggagatccgggctggtccacacgatcgtctccacaggtctgggcgacctgaaagtgctgcggattggccaagcccagcacggccagtccagtgaacacacgcagggggcccggatggcaccgtttggcgccgaacccctcggcctctctccgcctcccgcccggctcctaacacccggcgccccaagactgagcacgcgtcctccgggtcgcggagcgggcgaggggtcaccgaggc

SEQ ID NO: 524266 - DNA, 595 bp, Homo sapiens
ctgcgagtggctcccttgcttgttggcacacgcacacacagacacacacatgcacacatgcatacacacacacacgcacacrcatacatgccctcagctccccgaggggtgagatgagatgggatggaagcgtgatgccccacaccattttgactcccctggatacaagaaaattataacattttgccccttttaaatgctttacttgacagatttgaaaagcttgaccaatagggaaaacatgccctaattatagcttttgatatggtttgggcagaagctaagccaaacctgcttagcttggtcagcagaatggccccaaggtggccctgcgtgtgttgtgatacgtgcgggtggaggccatccatatggctctggcagtgcttggtgagggcagcactgcccttggaccctggcaagtggcaccccaggccctgcattctgatggccgcatgctggtctctgctggccatgccaacccccacaggggcaaggggcctatggagccagcacacacccacctcccagtccgcaggcccctcccaggcctgcttccccaggggacctcttggtgcctgcgtgagtgtccctgggc

SEQ ID NO: 524267 - DNA, 595 bp, Homo sapiens
ctgcgagtggctcccttgcttgttggcacacgcacacacagacacacacatgcacacatgcatacacacacacacgcacacacatacatgccctcagctccccgaggggtgagatgagatgggatggaagcgtgatgccccacaccattttgactcccctggatacaagaaaattataacattttgccccttttaaatgctttacttgacagatttgaaaagcttgaccaatagggaaaacatgccctaattatagcttttgatatggtttgggcagaagctaagccaaacctgcttagcttggtcagcagaatggccccaaggtggccctgcgtgtgttgtgatacgtgckggtggaggccatccatatggctctggcagtgcttggtgagggcagcactgcccttggaccctggcaagtggcaccccaggccctgcattctgatggccgcatgctggtctctgctggccatgccaacccccacaggggcaaggggcctatggagccagcacacacccacctcccagtccgcaggcccctcccaggcctgcttccccaggggacctcttggtgcctgcgtgagtgtccctgggc

SEQ ID NO: 524268 - DNA, 443 bp, Homo sapiens
atcaagactttgtggaggagctccaaagtgggtagaaaagtacgttcacccttacagggagackggcaggcagcctttttccttctcggtagaaaaataaactcctgttccatagagtttggatttggaatttattgtatccacaaccagcagtcagcaaaatacaaaatgatcccaagtgataaaaaccttaagtatagtaagtaatttaagtaaacataaattctctctggagaaaaccatgatctcatggctattaagattcccattgattaagatgagtgtaatatatgctctccagaattatcaaacacatgaggaaacaaaacatgattggaaataaaaacaacaagcaatagatttaatcacccacagtcttcaaatattggcattacgggatatgtaacacaaaataatcatgtataaaatgtttaaagaaagac

SEQ ID NO: 524269 - DNA, 443 bp, Homo sapiens
atcaagactttgtggaggagctccaaagtgggtagaaaagtacgttcacccttacagggagactggcaggcagcctttttccttctcggtagaaaaataaactcctgttccatagagtttggatttggaatttattgtayccacaaccagcagtcagcaaaatacaaaatgatcccaagtgataaaaaccttaagtatagtaagtaatttaagtaaacataaattctctctggagaaaaccatgatctcatggctattaagattcccattgattaagatgagtgtaatatatgctctccagaattatcaaacacatgaggaaacaaaacatgattggaaataaaaacaacaagcaatagatttaatcacccacagtcttcaaatattggcattacgggatatgtaacacaaaataatcatgtataaaatgtttaaagaaagac

SEQ ID NO: 524270 - DNA, 503 bp, Homo sapiens
acctttcctggctcttctggtgagtggtatggaaaatgatggagaaactgccatatgttttcataatggtcagaccaatttacatttccatcaacagtatactagggttcccttttctccacacccttgccagcacttatcttgttgttttttttttttttttgtaatagccatcctaataggtatgaggtggtatctaactgtggttttgatttgtgttttccagatgacttgtgaagttgattcagttgtcatatacctgttggccatttatatgtcttctttggaaaagtgtctgttcaagtcctttgcccactttttaatttgttagtgtatgtttgctattgagttgtatgagttccttatagtatrttgtggatattaactcttcatcagttatatggtctgcaaatattttctcccacactgaatgctgccttttcattttttttatgtgtatacttgacttttaaaatcagtaacaaggtccatacaattcacat

SEQ ID NO: 524271 - DNA, 617 bp, Homo sapiens
gttcatctgtttgtatctcccactaaactatgagctttggggtggcagtgtcyggtcagtcttgctctctcccttctgctagctttgtttctaacactgttcctttatataatgagaccatgataaggatttcgcaaatgaataaactgacttcctccagggcaggagtcttgtaatatttatctttctttttccagttcctaatatataataaccactcaataattactagttaagcaaatgcatgccctcttcttactatatccctgtgagtccaaagatccatgctcggtttcctatttctgattaactgagtcacctttagaaaagtaactttaagcctcaatttccttctctgtaggatgcagtaatacttcctcatctgactacttggaactttttaagcaaaaataaactatatgggtaaaaattactcagcttttaccatgtgctaaaggcctgatgtatattaaagaatgtaatcctcataacaaaccttaaagtaggtattgttatccccattttacagataaggaaactgaagaacagaaagtttaattaacttggccaataccacacagcaggtcaatgttccagatctgaacctaggggctctg

SEQ ID NO: 524272 - DNA, 617 bp, Homo sapiens
gttcatctgtttgtatctcccactaaactatgagctttggggtggcagtgtccggtcagtcttgctctctcccttctgctagctttgtttctaacactgttcctttatataatgagaccatgataaggatttcgcaaatgaataaactgacttcctccagggcaggagtcttgtaatatttatctttctttttccagttcctaatatataataaccactcaataattactagttaagcaaatgcatgccctcttcttactatatccctrtgagtccaaagatccatgctcggtttcctatttctgattaactgagtcacctttagaaaagtaactttaagcctcaatttccttctctgtaggatgcagtaatacttcctcatctgactacttggaactttttaagcaaaaataaactatatgggtaaaaattactcagcttttaccatgtgctaaaggcctgatgtatattaaagaatgtaatcctcataacaaaccttaaagtaggtattgttatccccattttacagataaggaaactgaagaacagaaagtttaattaacttggccaataccacacagcaggtcaatgttccagatctgaacctaggggctctg

SEQ ID NO: 524273 - DNA, 557 bp, Homo sapiens
tccctagctggaagtaccttccactcacatgtacctgtggagcttggcatctggtcaccctccggcggggcatccacctctgagatctgaactttgggcacagtcaggggcttcagagtggttctgggagtggagaagacaaaggggaggggggagactagtttaagccctgtggagagacgcccccrcacccgctggaccccactcctgaaaggggagcactttgctagtgccaggctgggtactggcacacatcaggtgatgaagggtgcagatgggctgcgcggagcatcccgtgaaaggctggcccagctcccaggtcaagcagtgggtggggcagggggagttccggagggagaagatgttcttttgcagcaactgcagtaacacacccaaccaattcatcaagcccaggatggataataccaaggaacaaaacccacgtgttgcctgcactgcttctaagcatgtatggattctatggcttacttggaaaactctaatagtggccattcgttttgcagggtaagattccagtttagactcattgctgttga

SEQ ID NO: 524274 - DNA, 557 bp, Homo sapiens
tccctagctggaagtaccttccactcacatgtacctgtggagcttggcatctggtcaccctccggcggggcatccacctctgagatctgaactttgggcacagtcaggggcttcagagtggttctgggagtggagaagacaaaggggaggggggagactagtttaagccctgtggagagacgcccccgcacccgctggaccccactcctgaaaggggagcactttgctagtgccaggctgggtactggcacacatcaggtgatgaagggtgcagatgggctgcgcggagcatcccgtgaaaggctggcccagctcccaggtcaagcagtgggtggggcagggggagttccggagggagaagatgttcttttgcagcaactgcagtaacacacccaaccaattcatcaagcccaggatggataataccaaggaacaaaacccacgtgytgcctgcactgcttctaagcatgtatggattctatggcttacttggaaaactctaatagtggccattcgttttgcagggtaagattccagtttagactcattgctgttga

SEQ ID NO: 524275 - DNA, 597 bp, Homo sapiens
gcaattaaattgtccccttctattcagagggcattagccagacccagagcagccgagggacacactactccagccaggactccctgggaacacaacggacaggacggggagcagtgtctgagtccattctggctgccggaccatagactgggtggcttctaaagaacagaaattcatttctcacagctctggtggccaggaagtccaacgtcagggtagagtcagtgtctggtgacagccctatcctcacagacagtgccttctcactgcgtcctcacaccgcggaggaaaaacaatctcccttggccttttataagggyacttagatctaatcacatcccagaggccccacctcttataccagcaccttggggtgaagtttccacataggaatttgggggagacacaaacattcagaagatagcgaacagccaccagccaactcctcctcctggaagtcttccaggataccacatcttttgagcccccaaagtttctgcgtcttgacttcccctttacttcacctccaggccaggctctcgggacatgtttttatctatagcagcagccctgacgctcttacaagtccaagttcag

SEQ ID NO: 524276 - DNA, 624 bp, Homo sapiens
ggggacaatgaactacccctcccattcacaggccccgcagaccatccccaccccattcccagaaaaaccccgatgcttggtaactgacaggcacagccccttcctggcaagctaccgcactcccatccccggagctgcccctgcctggcccaccgacacaggaggaactgaaacacagcaagggccatgctggggtttcttcaagcatgtcagcctacgaagccgccactcttctgccaccaactgtggcccagcccggcccagccctccctgcccaagctgtctgcacaggcctgggttcccagacgcgactgtggaagatgggaggaagcggtcctgggactcctgccggaaaggcctgcctccagctccaccccagtgggagggtggccaggtgagtgacccagaaggccaccgctgggcccacccagacaatggcctcgcagaccggaggagcagccacatgtttacagggaagccccacyggcatccacaagtgcctgacctttaggatggatgttgcagaaggaaattcagagcgcttagccactaatcagagaggcagggcgctggagcgggacgaaaaaggaagcataaaggaagcacagactccagaaaaaagca

SEQ ID NO: 524277 - DNA, 537 bp, Homo sapiens
gacaggcacagccccttcctggcaagctaccgcactcccatccccggagctgcccctgcctggcccaccgacacaggaggaactgaaacacagcaagggccatgctggggtttcttcaagcatgtcagcctacgaagccgccactcttctgccaccaactgtggcccagcccggcccagccctccctgcccaagctgtctgcacaggcctgggttcccagacgcgactgtggaagatgggaggaagcggtcctgggactcctgccggaaaggcctgcctccagctccaccccagtgggagggtggccaggtgagtgacccagaaggccaccgctgggcccacccagacaatggcctcgcagaccggaggagcagccacatgtttacagggaagccccactggcatccacaagtgyctgacctttaggatggatgttgcagaaggaaattcagagcgcttagccactaatcagagaggcagggcgctggagcgggacgaaaaaggaagcataaaggaagcacagactccagaaaaaag

SEQ ID NO: 524278 - DNA, 512 bp, Homo sapiens
accaaccctaaaggaaagtcagccccatgaaaagcagaactgctcctccacgtggcccgcagaggcggctctatcaaacctctgtacacccggacgactrcctaagattaataaggtagccacccactgggcagggccaggtgaagagaccctgagcgccctcccagactcacgcttttaccaactcactggaggagccgtgggcgcttcggggaactcacctaacaaggaactcacagcatttgcctcagagcaaatgtcccagagaaaagccacctgacccactcccgtgacccctgaatagagtcacgtgacctggtttccctgttctgggtcccgcagcttcctgagctgacctgcgggcaaactctgcctcagcagccccccaactacgtggcaccatggccccgactgtacacaaaagagccatccttgccctaaatgtctgtgtgatgagctgtaagaccctacacggcactttaggaaggggcactgattatctgaggctacca

SEQ ID NO: 524279 - DNA, 512 bp, Homo sapiens
accaaccctaaaggaaagtcagccccatgaaaagcagaactgctcctccacgtggcccgcagaggcggctctatcaaacctctgtacacccggacgactacctaagattaataaggtagccacccactgggcagggccaggtgaagagaccctgagcgccctcccagactcacgctyttaccaactcactggaggagccgtgggcgcttcggggaactcacctaacaaggaactcacagcatttgcctcagagcaaatgtcccagagaaaagccacctgacccactcccgtgacccctgaatagagtcacgtgacctggtttccctgttctgggtcccgcagcttcctgagctgacctgcgggcaaactctgcctcagcagccccccaactacgtggcaccatggccccgactgtacacaaaagagccatccttgccctaaatgtctgtgtgatgagctgtaagaccctacacggcactttaggaaggggcactgattatctgaggctacca

SEQ ID NO: 524280 - DNA, 512 bp, Homo sapiens
accaaccctaaaggaaagtcagccccatgaaaagcagaactgctcctccacgtggcccgcagaggcggctctatcaaacctctgtacacccggacgactacctaagattaataaggtagccacccactgggcagggccaggtgaagagaccctgagcgccctcccagactcacgcttttaccaactcactggaggagccgtgggcgcttcggggaactcacctaacaaggaactcacagcatttgcctcagagcaaatgtcccagagaaaagccacctgacccactcccgtgacmcctgaatagagtcacgtgacctggtttccctgttctgggtcccgcagcttcctgagctgacctgcgggcaaactctgcctcagcagccccccaactacgtggcaccatggccccgactgtacacaaaagagccatccttgccctaaatgtctgtgtgatgagctgtaagaccctacacggcactttaggaaggggcactgattatctgaggctacca

SEQ ID NO: 524281 - DNA, 478 bp, Homo sapiens
tggccccgactgtacacaaaagagccatccttgccctaaatgtctgtgtgatgagctgtaagaccctacacggcactttaggaaggggcactgattatctgaggctaccaccacccatctccccagagtacctgaggcctcatggactccaccagttaaagtcccccctgcaccccatgccacactatggacaaaacattcaacaaccagccctacagccactgggatgggtatttagcagggcaagcgttgggcacacacaaaggatgcttgaaatagaaaggcagagaycctccttctcgagcttcagggaagctagtgtccacacaactccacttctacctggtttgaatctctctctctgcacggcacctgctccctcaaagtcatggcgaatcgtgagcccacatttccaaactcatcaccacacagaaaaccctgagattaagcagcagtgggtctgggccccaagggccag

SEQ ID NO: 524282 - DNA, 613 bp, Homo sapiens
ttaactataagttaaagcctgtcttaggttggtttcacccaaaagtagatcgtgaaacaagaattcaagttcaagtacaaagggagtgtacaaagtacaaagtacactccctttgtacttgaaatgtacttgagatgaggaagtgagcaagctaacactatgagcaattgagattcggtcctgcaagggaattcttagagacagcacagaacatgccccaaacttatctcaaaagagaggcgaggaagctggagtatttgcacaccttctcccatcagtcattggttgagaccagtggaacatgggcaggagactgacagcatctattacattattcagtatcccacagctaggaaatggtaagatgcaattcaaactccaaatccaatactctttcatgacatttataaaaatgagcagttaatcacacttcactgaatgccaactacggttaaagcaccgtgctgatgaaggaaatctactttgccaaatcactttgggtcgacatgttcaaagaaagcacaggtatttctctgccaattttcaccaattgaaggaacaggaaagggccttggaagtcattttgccygttccacaggaatggatgagaggg

SEQ ID NO: 524283 - DNA, 505 bp, Homo sapiens
aaaataaaaatttagctgggtgtggtggcatatgcctggggtctcagctcctcaagaggctgaggtgggaggatcgcttgggcccaggaggttgaggctgcatgagccatgattgcaccactgcactccagcctgggcgacagagagagaccctatgtcaaaaaataataataataataaatataaataaaaaataaaacttcttcttggagacagggaagtgtttaaataggacagtgtgtcattacagtaaacaactggacsatgttgtgaagagtattagggaggtagcaggagggaatttctaccccttgctttataaacccagctgtggcagttctcagctactacagattgaagatagaggctaaacatcttgttccattccaagcacactgctgagacctgccctgtttctcgctctggaagagaggaggagatgagtcctgggactactcttggggtcactcagtccatctcccagcctctccgtgagactctctgg

SEQ ID NO: 524284 - DNA, 450 bp, Homo sapiens
actcgctcagccattcctaagcagctcacgtatggaacgcagacacgaagcctggctccggggcaccaggaaatagaccaagaagtcaaagcaaaaccaatagcaactgggatgtctcaggtgggtcagagcatccaaaggattgaaaacaaggtgtagggttgtccgccacaccaactgggctcctaagatggcacaaactggcgagaagacctgaacctccaaacagaagccatgtggagatggagagaggtgggccgcagagcactagggacagagtgaggccacgctcasggaagtggggatgatgtggctgcagatacagcagatgtgggcgcagccccagttggccagatatggagggcacacagtccccttcccctggaggaaggcacgaaaagggacctcagatccctggtctcctctcagccaggctcctcaaaggggcca

SEQ ID NO: 524285 - DNA, 538 bp, Homo sapiens
gctgactcgctcagccattcctaagcagctcacgtatggaacgcagacacgaagcctggctccggggcaccaggaaatagaccaagaagtcaaagcaaaaccaatagcaactgggatgtctcaggtgggtcagagcatccaaaggattgaaaacaaggtgtagggttgtccgccacaccaactgggctcctaagatggcacaaactggcgagaagacctgaacctccaaacagaagccatgtggagatggagagaggtgggccgcagagcactagggacagagtgaggccacgctcagggaagtggggatgatgkggctgcagatacagcagatgtgggcgcagccccagttggccagatatggagggcacacagtccccttcccctggaggaaggcacgaaaagggacctcagatccctggtctcctctcagccaggctcctcaaaggggccatcaccattccaacccaatttcaacagaataaaaatgaggggagtggagcacttgggatatgtctaggctgcaccccaacactta

SEQ ID NO: 524286 - DNA, 540 bp, Homo sapiens
attggttcatacattcattcatcatttacaaggtacttactatatccccagsctgccgtagacacagcctttgctctcccgaaaaacacgttctaggcgccgggattccagatacctgggaaatagagtgcacgcagctgttgagaggcctcgcgcttggcttctcctatcactgaggcgcagaggtgctgtggacagcccagacccacacggcgcccgaggtgaaacagaaccctcagtctccctatgaggccactggcactctcggctgtccccagagctctccgacttagagctgaatgcaaagtaagcgctcgaaatgcagaagtagccggggccgcccacggcacctgcctcgctcggggcgagagaagacgccaggctgaggtcccagcgacctcaggcaccagctccgaaggagggcggggagaccgcaaaggggaagtgcccggagggccaacggcccccgcgcaccctgcgcccctctgaagcgcgccgcctccccgcgccggggactgggacctgcctctggggaatccg

SEQ ID NO: 524287 - DNA, 577 bp, Homo sapiens
cctgattggagatgggcaagactggctcatgaactctctgtggttttgaagatagggtggcatgagaacgtctaaagcctatgtctggagttacgtcgtactgttaggatggaaaacaggctcttgtaagatgtctctggaaaaagttaagtcaacaaaataaagtgaagccaagcatggtggcacactcctgtaccagctactcgggaggctgaggtgtgaggatcacttgagcccaggagtttggggttacagcgagctatgatcatgccactgcactccatcctgggtgrcagagtgcgaccctgtctctaaacaaaattggttttaatttcaaaaaagaaaaaaaagtgaaatttgaaaggagcatattttgctcttctatataaaataaccattgcagacctaagcttcaaagtaaaggagccagggaggagagttgagatgagtgagtgactggtaatttggtggccaggtaattcttctctgattggcacagtttttactcctggcctcttgtttctgatctgaaagacgaattaaccagtttaatagttggtagttggtgaagatggct

SEQ ID NO: 524288 - DNA, 630 bp, Homo sapiens
taccttgagcaagaagccccagaaagcagcccaggcaggcatgtcagcagggaggctgtcctggcagcatgctgtccaaggggagaggccaacgctctacccctgaggtttgaggccagaggaaaagaaccaacctggagattctgcaattctgttttctcttaaggttgctttggccgtttagggtttttcatgaaggacagaaacagatccattccttgaaggcagaaagaagtttgtactgccccgcacttgacaatgtttaattacatttgccacttgaatcagagttgaaaatatcttcctttttttctgtttgagagtcttgctgtgcatccctcaggctggctggagtgcggtggcatgatmtcggctcactgcaacctccgcctcctggctgctgggttcaagcgattctcctgcctcacccttctaagtagctaggactacaggagcacaccaccatgtccagctagtttttgtggaaatggggtttcaccatgttggccaagctggtctcaaactcctgacctcaagtgatctgcccacctcagcctcccaaagtgctgggattataggcatgagccaccacacccagccgaaaatatcttccctttgagacttggtggc

SEQ ID NO: 524289 - DNA, 555 bp, Homo sapiens
agttgttctgtaaatatttgcagaaggaatgacagaagaaagaaaaggaagaaagaggagagagatacctgggtgaccaggygttcctgtgacaggccaccatctgcctggctctcctgcgactctgtctggttgctcgcctccagtgcttcaattctctgtccaaacttcctgacttctaaagctgcagctttctaaggccacttgtctcgcccttggaggatgtggcttcctgcttttaaaaggcactttttaagcacccagttacctactgagggtgagacaagcatcgggtttgccccacttaacaagctattttgaatatatggaatatattcagccttaaaaaaaggagattggaaattgtggcacatgctacaacatgaatgaaccttaaggaggttatgtgaaatacaccatagtcaaactcattgaaacagaaagtagaatgatgtttgctaggggcttggaggagaaaaaagtggaaagttgttgtttaatgagtaatagaggttcagttttgtgagatgaatagttctagagactggttgcacg

SEQ ID NO: 524290 - DNA, 555 bp, Homo sapiens
agttgttctgtaaatatttgcagaaggaatgacagaagaaagaaaaggaagaaagaggagagagatacctgggtgaccaggcgttcctgtgacaggccaccatctgcctggctctcctgcgaytctgtctggttgctcgcctccagtgcttcaattctctgtccaaacttcctgacttctaaagctgcagctttctaaggccacttgtctcgcccttggaggatgtggcttcctgcttttaaaaggcactttttaagcacccagttacctactgagggtgagacaagcatcgggtttgccccacttaacaagctattttgaatatatggaatatattcagccttaaaaaaaggagattggaaattgtggcacatgctacaacatgaatgaaccttaaggaggttatgtgaaatacaccatagtcaaactcattgaaacagaaagtagaatgatgtttgctaggggcttggaggagaaaaaagtggaaagttgttgtttaatgagtaatagaggttcagttttgtgagatgaatagttctagagactggttgcacg

SEQ ID NO: 524291 - DNA, 412 bp, Homo sapiens
cctagctactcgggaggctgaggcacaagaatggcttgagccggggaggcagaggttgcagtgagccgagatgatgctactgcactccagcctgggtgacggagtgagactccatctcraataaataaataaataatcctcactcccttctcctctgtggatctggttttacctgggagtcagtgcaccagggcatagctaacagcagacccttcactgttctggccctcgttatgggttccatgcaggaggctgatgggggatggtcaccgggagacggagattctaccgtgactttgcatttggctgccaagcggccttgcctatagccttccttcccaccttgaacttgagcttcctcatctgaagatcacaatggttctgactgtccatcattttccccagcacacat

SEQ ID NO: 524292 - DNA, 550 bp, Homo sapiens
tgagtttttagttttttgcaaagatgaggtcttggtatattgcccaggctggtctcaaagtcctgtaggcttgttttaaaaaatactccatcttggccaggcacggtgactcacacctgtaatcccagcacgttgggaggctgaggtgggcagatcacgaggtcaggagttgagaccagcctggccaacatggtgaaatcctgtctctactaaagataccaaaaagttagctgggcgtggtggtgcgtgcctgtaatcccagctactcgggaggcagaggcaggagaattgcttgaacctgggagacggaggttgcagtgagatgagatcatgccattgcactccagcctgggcaacagggcgagactctgtctcaaaaatacaaaaacaaaaacaaaaactccatctcccccaaaagttaggggagacagaggaaacaagattttctaaatgtttgattttttttttctttaaccaggggaaagcatgaacacagcccccatgaccacagatgaygcagccgagtttcccacttttggggaaattgcag

SEQ ID NO: 524293 - DNA, 664 bp, Homo sapiens
ggcagcacaacacaaaggtcttgcattkctccctccaaaaggtgagacatgctctaaatataaaaaaagaaagttcctatgcggcacagtccaaaatcgtgatgaaacatttcaaattctggcatcttctagaatactgaatacaatttgggcaatgatttgcctgaaaaagtcttgacaattgcctgttgtatttctaaatagcacctcattcctctcatttacatcctggtttaaaagataaattataaagtcaacctatttatgatgaatgctatcgtatcacaaactaggagtataggtttgcaatccattaccatatttatataggtctcaatatctatataaatatttaagataaaacctttatcttgaattgtgtttacctgtagcatatgttgctatcttgacaatggttccatggggtagccaggggaagcattatttatcccttttgtaagtaagaaatctgttacttgacaagggtgtgccaatgctattttgtgagtggcagagagggtattagaccctgtgtcttctgattgctctaacctttggatcaagcacaccagcttcagttattaaaggtaatcaatctcacctttaattcattagattgccccaggaagacagtaaagatggctgaacaagtaagagatttcaa

SEQ ID NO: 524294 - DNA, 598 bp, Homo sapiens
tgcttttacacctagtatgcaatttctcatctccataatttagaaaatatgtatgtttaaatcagatgtgacgttttattgcaatttataggactatttaatattgagctttaaaattttaaatatattgtaatactttctggactaacacttgtcttgccatctttgagccgcatattaacatattttcacctgcaggtaaaattagccaatattagtgtattttggatgacgtctaattaatcatagcccttagaccaagatggctgtgaccgggttatttattgaaatgttgacccaatgcggacaactgggcgaaagtcttatggttttttcttgccttcagtcggaattaaatcattgatcccagaagaaagggaccaccacagtgctacggaaaacaggaattgtgagaagttatgggatccattttagcttgatttactcacagmctccttaagcacacttcataaggtaatcacagctatattttgtttcccaaactcctcaggctattatgtcttctctatgctgtgtcctctgctagacatgactgcctctgtttcctcttctaactctgagtcatcaaagttgcaaa

SEQ ID NO: 524295 - DNA, 594 bp, Homo sapiens
gtgctattcccatctctctgtcttggccctaacacagtaccagctacagagtacgagctttgtaactggttaatggatggcagtgtggattccccttcttttcttaaaatcagagcctaacacaggcacagtgagatgtttgctatttatgtgatgatttcgtattaggacaagattgccttttttgggggcagcttaagggatattctatacttgtgaattaaattatatataattatatatagaatggtagtcatgcacacctatgcaatgaacacattagtggataggtaaaaaaactgtggtcatataaggcttcagaatttgggattcagyctctatgaggagagtcctcaaaggtagaacagcattttcaatactgaaaacctcacgccgtggagttcttttgactccccagatgctggtcataggccaggatttttggcttttacactgactagctgtagaaacttgaggaatcaaccactctgggccttacttttgccattcataaaataattaaccttaaaaactgccaaaattagatgatttccttggaaaggtctttatatattgttcgatttattgagttat

SEQ ID NO: 524296 - DNA, 514 bp, Homo sapiens
attttggttgttaacatctgaaggagcttttgaaatattttaactcactgtgtggtttaacatccctgtacctcaaggcatcttaacatccagtaaactatttaatactcaatcatttgtgaaataaataagggaagtcacagccaatcagcttagataaaggtaagccagaaacaaaaataattcctacaatactacctttctttcaatgagagaaagaaaaagcaccacagatttattagaaatkgatttaaaatgacctggggttggtgctattgaagaggtatatttcacaagtagaaaagatgaaagaaagcctttcagctttggatttatagctcttctcttgtaacccaaagaaaaagcatcaccgagtcgccagctgttttgtatctcatgtggcaatcaataattcaggtaaacattaacttggagtaaatctggtatcttggtaccttcacttttgcaggtcaaaagaggccaatcttttcctaagaaagacatacccgcttta

SEQ ID NO: 524297 - DNA, 603 bp, Homo sapiens
tctgtttttcctattatcttttcataagcccatattacaaccaaatttttacaccaagtacagaatattaaatattaatttaaaagaacttgagggaaatcatattacaacttcatggtaaatttaatttaaaatgctaaaagcaaattctttccctgtacgttgtatttgtgtttttagaaacaggagcatgcaaactgattctcatttttattaaatgactatctgtaattgcaagattctcagagagtcagaaagtgaagcccacgctccatgagaaatggacaagttcttattatttgacaatttatttcccaaggctttctaatcatttcacccaacaaccaattgaatctatttaaatataatcttcccttgcaatactacatggctaaaaaacatattagctctaaaaatattttctttaagaaagacaaagatgcattaaaaatcagttaaagtcatagttgyatttttttaaaagggaggggaatacctacagacaaacaatgtaaatccatttaattatttgtttatttattttcttttacctcagcacattcatttgacaaaatgctttattgtagtcttccaataatcctt

SEQ ID NO: 524298 - DNA, 183 bp, Homo sapiens
gccttggttacagtggcctggcatgtgactsaggcccccaaatcacatttctttaaggttaaaaataatttagagttccaacaactgggtcgttagattgcttattttcacagtggtgacatgctttagttccattcagattttggggcactggcagaactcactgggtgtaaaacatgtagc

SEQ ID NO: 524299 - DNA, 493 bp, Homo sapiens
tactccccgattgttcctataggtagaatctccaatactagaatcatgaaatctttttgcttaagaattgcttaaggtgtttttctgatcctgaattccagtgcaacagctaatgctaaccagtctaaagacccctaccaaggaactggcttggcacatgaatgctgagtttcttcatgtccctgtcccatgacttcacctctcacttcttgatgaatcagaaatgctcacattttggcccttgtccagactccttaaaaaccctatccccaaacccaaaaccaaattgtaggttacctcccatctactcatttggctgccctatgaaaattaaactctctctttttcaatccctgttttcttamtatatccatttgttgtgcatcaagtaacaaatctgttatgatgatagtggcatgaaaattattttaaactgaaaatgtctgaacagacagaagctgcagaaagaaacactatttaaacttaaccagag

SEQ ID NO: 524300 - DNA, 495 bp, Homo sapiens
gcatgactcctaaaccataatttctaatattgtggctaatgttagtcctacaaagtgaatctagtccccaggcaagaaggaggtckgctttaggaaagggttgttattgtctttgttttaaactacaaaccataaagcaagtttctcccaaagttagttcagcctaccccgggaatgaacaaggacagcttaaagcttaaaagcaagatagagttagttaggttagatctgtttcactgtctcggtcataattttgcaaaggtggtttcagaaaggtgtcatgatgtgtacaatatcatctgaaaaagaataaatgagaagcctagctctccaataaaaaggcaacaattaatgactgctactgtagaaaggtgaattttcaaaaacagagaagtggtgtaataaatatagctcaggtaatataaaaggtcagggaaaaaaagtgtgttttttccccagctctgctacttataacttgatgagacttttcgataa

SEQ ID NO: 524301 - DNA, 552 bp, Homo sapiens
gcttatgctgccattctcccctctccttccccttccctttcccctaggggagggaccagcgggagtggaactactctttcttcccccgaggggaaaggaaaggggagttctgaatgtttttcttactaccagaggtttgtatgaggttcaaccccctgaaatttgcagaaggctcaaccccttaaaccagggrtgtcttgccttgctgctctggaaggttgacctgtttcctccctttccccctctgaaggtcccttgcacacttcccactcatgttgtcctctctggctgctccccaaagggagaattaggcccctcttagtgttggctcactggtataaatcccacagaaggatctgccctaagccacaggaggcttacagaaccgcggagaggacccactcactccatccagcagtaggacttgtcataatccacacgaacgacacggcaagtagggttgtttgtgatcattcatacacacacatttagccctccagaatttgaccaccaaggaagtactttaccggctctgcggcttctccttccctg

SEQ ID NO: 524302 - DNA, 552 bp, Homo sapiens
gcttatgctgccattctcccctctccttccccttccctttcccctaggggagggaccagcgggagtggaactactctttcttcccccgaggggaaaggaaaggggagttctgaatgtttttcttactaccagaggtttgtatgaggttcaaccccctgaaatttgcagaaggctcaaccccttaaaccaggggtgtcttgccttgctgctctggaaggttgacctgtttcctccctttccccctctgaaggtcccttgcacacttcccactcatgttgtcctctctggctgctccccaaagggagaattaggcccctcttagtgttggctcactggtataaatcccacagaaggatctgccctaagccacaggaggcttacagaaccgcggagaggacccactcactccatccagcagtaggacttgtcataatccacacgaacgacacggcaagtagggttgtttgtgatcattcatrcacacacatttagccctccagaatttgaccaccaaggaagtactttaccggctctgcggcttctccttccctg

SEQ ID NO: 524303 - DNA, 617 bp, Homo sapiens
acagctgacttgtatattaaataattaaataaacataatacagttttcattgaccaaaaattggcacataagagtttttttgtataaacatttttttctcccacgatgaaacttgaaactcaagggagcactttgcaagaaaaatgacaatgtaatattttctctatcaactttgaataaaagccaaataaattaagtcacaacgtgtgtctacggcatcaaatgtatattgattaactctttctagaaaaagcctaaaggcaaagaaaaaagtcaaaattgactgagttttaggtcaatgtatccagtaatattctgggatgaagtcaagataggaaaattgtgaagatgagttcatgagagaaaggtaaaatgtgtttatttagtatatgcaaataaaaatgtctaatacgtagttaaaatataggattggctcgttctttttcatggtatttcagagggaagtacctcttcagagtgaacatgaatgtttccctctcagtcactagctgctagaaacgcactgaaatggacagtgaacacaaacatcataccttttatgagaagcgtatggccatagaagttgctgytaatgctgactgcagagtgaaaagctt

SEQ ID NO: 524304 - DNA, 614 bp, Homo sapiens
ttgattggacttatacgtagaagttttgtcctctgccatgtgtcaccactaatgtctctgttaaaatttttaaaattcttatatttttactttttagtttggctttctagcatcatctgcataacttaayggtcagccaatgactggtcaaagattgtgttcaaacaccttaagcccataaaacctaccttctaccattggatctgtgtgtgatttgaagatgacatccaaagtttatacagtttccatatctgcccagattttattttcctgacagtcttcttgggtgtacagagagtccctagttagtcagagatgcatggagaatgtatacaacccctctatggctctctcacttccaggatctccctattacatttctggttgttctgtaagcctgccattcatcccaaccaggactgcaaccttagactagaaaagctgcaggcttgcttcattcatttcttattgagttcactgcttttaccgaaaacattgctttttttcagacacgagcttttgactcagctccaaagcaagtccaccatttctggcagcaaatctgctggttttcacagccaactctaccccgctgtaactactctgccaatcaa

SEQ ID NO: 524305 - DNA, 614 bp, Homo sapiens
ttgattggacttatacgtagaagttttgtcctctgccatgtgtcaccactaatgtctctgttaaaatttttaaaattcttatatttttactttttagtttggctttctagcatcatctgcataacttaatggtcagccaatgactggtcaaagattgtgttcaaacaccttaagcccataaaacctaccttctaccattggatctgtgtgtgatttgaagatgacatccaaagtttatayagtttccatatctgcccagattttattttcctgacagtcttcttgggtgtacagagagtccctagttagtcagagatgcatggagaatgtatacaacccctctatggctctctcacttccaggatctccctattacatttctggttgttctgtaagcctgccattcatcccaaccaggactgcaaccttagactagaaaagctgcaggcttgcttcattcatttcttattgagttcactgcttttaccgaaaacattgctttttttcagacacgagcttttgactcagctccaaagcaagtccaccatttctggcagcaaatctgctggttttcacagccaactctaccccgctgtaactactctgccaatcaa

SEQ ID NO: 524306 - DNA, 468 bp, Homo sapiens
gtagttatctcagatctatgcatcacattcctagcaaatttatcccatttgaagactggattagtggagttcataaagacagtyagggttttaacctcatcaaaactttgccggtaaaaaaaaaaatctaagtatattggtttaagaagcaatgctatgtgacttttgtgtgattgcctacccattcagtttcagcatttcttttgtgagtggctcaaaacacttcacagttattttttaatcctcatgtcattttgaggatgtgatgatttctaagctgtaaaagctttctgaaataattatttttcctggtaacttagtgtcattattattatcattttacactttatatgttggtgtgatctttgtcttttgtgatatattcaactattttcccttacattgacttgtcctaagctgatacaattagcctttgaacaataggtttgaactgcataggtccactta

SEQ ID NO: 524307 - DNA, 571 bp, Homo sapiens
cagtttccctggatttcagacagacaattcaccttgtaaacagatgatgtaaagttacagtatccataaatacagaatastactataaatccattttcattttttctctagctcactttattgtaagaatacagcatataatacatattacatacaaaatatatattaatcgactttatattaccagtaagacttctggtcaacagtaggctattaatggttaagttttggggtggtcaaaagttatatgtgaatttttgactgtgcaggaggtctgcacccctaacccctgtgttgttcaagggtcaactatatatctacccatttcaatgtaataattttaacttttgccttgtcagaatttgtgactctttttaaatataaaatgttgctctttatcaactaatttattacttataattttctttgtgacaaaaagcaaataaccaaacttgaagaattatttactaactatgatacatcactaagactctttgataaagtgtttaaactttaattgcattgactttatggcagttttttcacttatttacaagttatattatcattg

SEQ ID NO: 524308 - DNA, 571 bp, Homo sapiens
cagtttccctggatttcagacagacaattcaccttgtaaacagatgatgtaaagttacagtatccataaatacagaatactactataaatccattttcattttttctctagctcactttattgtaagaatacagcatataatacatattacatacaaaatatatattaatcgactttatattaccagtaagacttcyggtcaacagtaggctattaatggttaagttttggggtggtcaaaagttatatgtgaatttttgactgtgcaggaggtctgcacccctaacccctgtgttgttcaagggtcaactatatatctacccatttcaatgtaataattttaacttttgccttgtcagaatttgtgactctttttaaatataaaatgttgctctttatcaactaatttattacttataattttctttgtgacaaaaagcaaataaccaaacttgaagaattatttactaactatgatacatcactaagactctttgataaagtgtttaaactttaattgcattgactttatggcagttttttcacttatttacaagttatattatcattg

SEQ ID NO: 524309 - DNA, 571 bp, Homo sapiens
cagtttccctggatttcagacagacaattcaccttgtaaacagatgatgtaaagttacagtatccataaatacagaatactactataaatccattttcattttttctctagctcactttattgtaagaatacagcatataatacatattacatacaaaatatatattaatcgactttatattaccagtaagacttctggtcaacagtaggctattaatggttaagttttggggtggtcaaaagttatatgtgaatttttgactgtrcaggaggtctgcacccctaacccctgtgttgttcaagggtcaactatatatctacccatttcaatgtaataattttaacttttgccttgtcagaatttgtgactctttttaaatataaaatgttgctctttatcaactaatttattacttataattttctttgtgacaaaaagcaaataaccaaacttgaagaattatttactaactatgatacatcactaagactctttgataaagtgtttaaactttaattgcattgactttatggcagttttttcacttatttacaagttatattatcattg

SEQ ID NO: 524310 - DNA, 438 bp, Homo sapiens
tttggtttggttcatacagtgatttttctttttaaaattagatgccaacaattaaaaattgggagatttcaaataaaaattagaagatagtggcaacaattggttgagctgaggatggtatgggcatgggagttcccctgtttaccacagtccctgaacctgccacttccctgacactgtttggatcttgttgatgtacgagttggtgacacccattcggtgttcacagatgccagtgtcttccccgtctgtgagyctgacccctaggacctcaccaatcccactgaggtcaggctttggagcccctgctttctcatgctaactcctcctctgcccacctgatccccagagctgctgtgggatgcttggggccatgtgggattgaggggttggaggtctctggagagacagggtccagccattttaaccaaccccagt

SEQ ID NO: 524311 - DNA, 571 bp, Homo sapiens
ttacatggaagtcatatcccggatggtgagacccccccagttcccttccctcaattggctttcaggcccccgtgatacagtcttaaaccccaggcaggagactggagagtccctttcgggagccgctgactggcccaagaggaaagagctacagatactgaaygaccttccctctctctgtccctctctcctttcttccataaatattgatcaagtccttactatggaataagcccatttttagaccctgaggatatagcatacaacaaagttcctgccctccaagagcttatgttctaatgggaaggagacagaaaaaaaacaaatttatcagcgttaaaaaggggctatggagaaacacaaaacagtgttaagtagacttggaggaacacattgctttagttaacatatttagggaaggtctcttgggtaaggtgacaaatgagctaacacctacacaactggaggacacagccatgcagatctgaaagggcatcccagtgagaaggcacagaaagcactagtgtgctgggcaggggtatcctagtgaaacatctaatccctgcctgat

SEQ ID NO: 524312 - DNA, 571 bp, Homo sapiens
ttacatggaagtcatatcccggatggtgagacccccccagttcccttccctcaattggctttcaggcccccgtgatacagtcttaaaccccaggcaggagactggagagtccctttcgggagccgctgactggcccaagaggaaagagctacagatactgaacgaccttccctctctctgtccctctctcctttcttccataaatattgatcaagtccttactatggaataagcccatttttagaccctgaggatatagcatacaacaaagttcctgccctccaagagcttatgttctaawgggaaggagacagaaaaaaaacaaatttatcagcgttaaaaaggggctatggagaaacacaaaacagtgttaagtagacttggaggaacacattgctttagttaacatatttagggaaggtctcttgggtaaggtgacaaatgagctaacacctacacaactggaggacacagccatgcagatctgaaagggcatcccagtgagaaggcacagaaagcactagtgtgctgggcaggggtatcctagtgaaacatctaatccctgcctgat

SEQ ID NO: 524313 - DNA, 623 bp, Homo sapiens
ggtctttgtatacgcagaaagtagcagaaagttgtcttcgtaataaggtactcttatgggaaagcagaagtagcatctttaagtgtagcaactgttggagacaggatatatagtagttaagagcaaggactctaggccaggctactcttcacttatttgttgtgtgactgtgggcagttcacttaaccaatgcctcagtttcctcatstgtgaaatgcaggtagtagctacctcatagccttgttgtaacaccaaaatgagttaatatatgtaagagcatttagaaggtgctgataaagaatatgtgctttgtgttagtgttcattattgcaattattaggaagcttaactttaaggaatctcttttgtcatatccaccttccatgataagtggccttaaaaataggcttgtacaagtccaggcatggtgggtcatgcctgtaatcccagctactccagaagctgaggggaggatcgcttgagcccaggagtttgaggctgccgtgacctgtgatcatgccactgcactccagctcgggtaacagagcaagacccagtctattaaaaaaaatttttttaatgagtttggacacatgggttgtgtacacactgtatggttccat

SEQ ID NO: 524314 - DNA, 623 bp, Homo sapiens
ggtctttgtatacgcagaaagtagcagaaagttgtcttcgtaataaggtactcttatgggaaagcagaagtagcatctttaagtgtagcaactgttggagacaggatatatagtagttaagagcaaggactctaggccaggctactcttcacttatttgttgtgtgactgtgggcagttcacttaaccaatgcctcagtttcctcatgtgtgaaatgcaggtagtagctacctcatagccttgttgtaacaccaaaatgagttaatatatgtaagagcatttagaargtgctgataaagaatatgtgctttgtgttagtgttcattattgcaattattaggaagcttaactttaaggaatctcttttgtcatatccaccttccatgataagtggccttaaaaataggcttgtacaagtccaggcatggtgggtcatgcctgtaatcccagctactccagaagctgaggggaggatcgcttgagcccaggagtttgaggctgccgtgacctgtgatcatgccactgcactccagctcgggtaacagagcaagacccagtctattaaaaaaaatttttttaatgagtttggacacatgggttgtgtacacactgtatggttccat

SEQ ID NO: 524315 - DNA, 623 bp, Homo sapiens
ggtctttgtatacgcagaaagtagcagaaagttgtcttcgtaataaggtactcttatgggaaagcagaagtagcatctttaagtgtagcaactgttggagacaggatatatagtagttaagagcaaggactctaggccaggctactcttcacttatttgttgtgtgactgtgggcagttcacttaaccaatgcctcagtttcctcatgtgtgaaatgcaggtagtagctacctcatagccttgttgtaacaccaaaatgagttaatatatgtaagagcatttagaaggtgctgataaagaatatgtgctttgtgttagtgttcattattgcaattattaggaagcttaactttaaggaatctcttttgtcatatccaccttccatgataagtggccttaaaaataggcttgtacaagtccaggcatggtgggtcatgcctgtaatcccagctactccagaagctgaggggaggatygcttgagcccaggagtttgaggctgccgtgacctgtgatcatgccactgcactccagctcgggtaacagagcaagacccagtctattaaaaaaaatttttttaatgagtttggacacatgggttgtgtacacactgtatggttccat

SEQ ID NO: 524316 - DNA, 519 bp, Homo sapiens
aaaatatttttctatactgaataagcctcttccccttcagggcaggtgtttttaaataaactaactttaaacatggagaatcargaagccagcttctctgcccgcccccacccccacccacaccacacagtcttataacagtggacagcagacattgtaggacttctgaccttgcagttcagattttgtggaaacggggcaaaagcatgcttgtacttctaagctcctcggaatgacctttttgagttatcgtggtgaaaacaagaagcccttagagaaacttcattcttaaaacaagcacataaaacaagtgcatgtgatgctggcacagtttgggtgaaaacatagattgtttgcagaatgtctacagcccattcctttctcctgctcttcctttcactacagctcccagcctgacagtcttggggaaatagacatgaggcttttcaacaaacaatcagtacgtgaccaaacttggcaacacatgctctgcctctgtttgtgacagaggcttgcaga

SEQ ID NO: 524317 - DNA, 519 bp, Homo sapiens
aaaatatttttctatactgaataagcctcttccccttcagggcaggtgtttttaaataaactaactttaaacatggagaatcaagaagccagcttctctgcccgcccccacccccacccacaccacacagtcttataacagtggacagcagacattgtaggacttctgaccttgcagttcagattttgtggaaacgggkcaaaagcatgcttgtacttctaagctcctcggaatgacctttttgagttatcgtggtgaaaacaagaagcccttagagaaacttcattcttaaaacaagcacataaaacaagtgcatgtgatgctggcacagtttgggtgaaaacatagattgtttgcagaatgtctacagcccattcctttctcctgctcttcctttcactacagctcccagcctgacagtcttggggaaatagacatgaggcttttcaacaaacaatcagtacgtgaccaaacttggcaacacatgctctgcctctgtttgtgacagaggcttgcaga

SEQ ID NO: 524318 - DNA, 519 bp, Homo sapiens
aaaatatttttctatactgaataagcctcttccccttcagggcaggtgtttttaaataaactaactttaaacatggagaatcaagaagccagcttctctgcccgcccccacccccacccacaccacacagtcttataacagtggacagcagacattgtaggacttctgaccttgcagttcagattttgtggaaacggggcwaaagcatgcttgtacttctaagctcctcggaatgacctttttgagttatcgtggtgaaaacaagaagcccttagagaaacttcattcttaaaacaagcacataaaacaagtgcatgtgatgctggcacagtttgggtgaaaacatagattgtttgcagaatgtctacagcccattcctttctcctgctcttcctttcactacagctcccagcctgacagtcttggggaaatagacatgaggcttttcaacaaacaatcagtacgtgaccaaacttggcaacacatgctctgcctctgtttgtgacagaggcttgcaga

SEQ ID NO: 524319 - DNA, 658 bp, Homo sapiens
atatgtctttgacacacctgaaaggaaactcccacgccctcaccctcctttgatcagggttgcaggttggcgccgaagacccaaggactgcagtgctgctcacgtgccatgccgtcctggggagactcccaggctgatgctgatggcgacagaggccggagctctggggacagcggaggggcaggcaatgttgtgcgcagttacccagggcaggcagcactggaatggaaatcactaagtaggagacggagccacatcaagccaccatcgtcaaatgaggtccttttgatgaggattaggagaaaagcttcttggaactgctatttttcagtccccagttgagtactgtggtgtgggggaagcacggagtcccagttctgcgttcctgacgctgatgggcaggtggctgcctctccaatgcttcgataaacacaactggaggggcagctaagccacggcagtccccggcaggtttggccacgccagaactcggtatatgtttatctacatggacttcggaacagtgaattagcagcgggcrtagtaactatttccttgtcagcctcccaagcttaaaggctggatccatgtcaggaatgacaggtgagtaactcagccacacgagtgactattaactccagtgtccacaggttgattt

SEQ ID NO: 524320 - DNA, 543 bp, Homo sapiens
ggggatttcggtgggggaggaggaatattggttgtcaaaggtcttaaatgagaggagaacaaaagatttccaaaagatggttcataaatcatacaatgtgaaatgaackcagaaagaagggtgaatatgttggtaatttgcaaggtttttttaaatggagaagtagccaagcaaatgaatactaaaaaagcacctatagttgcactcaaaatagaaaatccaattttgattatgatacatgttttatataagaaaaatacatttaaaattgatctctctccaattacatttttacatagctcatttctgccattcattttctcccttacatagagagagaaaaaacttggccttacaaagacagagctgatggtttgaaatcctactctactatgtactaagtttgtttatttttgttacttggcctcttggagttttcgttctcacattattcttgagttattattagagtaacataaaaacgcacatgcaggcactcagtggtactaaattacttttccttataaaagaaaaattgcatgg

SEQ ID NO: 524321 - DNA, 609 bp, Homo sapiens
ctgtcttcaacaatggctgaaccatttacaattccaccaacagtatataaaccttcctttttctgcacaacctcagcagcatttgtcactttttggctttttactaatagccattctgactgatatgagatggtatctcactcactatkgttttgatctgcatttctcttaatggtcagtgatgttgagcatttttcatacacttgttggccgagtgtttgattttatactaattcttcacatgctgaagcaaagtgtagctcctttttttctatttttcaagatcatagtttttgcgatgctctttatatatggttagttttgcgacttaaacctctttagtccacatgtacacattccttaagttgagatagcttacctccatacttggagcaatttaaggataaatagtttatccagctattgtagaatactattgtctgaagacataggccttatttctttagctacaacacatttccccatagtctgtgaccatattattgtacgaagaggcatgattattgaaataaatgtcagtggctcaaaattacatgtgcttcaatttgtattagaattaaagtgaataccagggagatgtgaagtaat

SEQ ID NO: 524322 - DNA, 509 bp, Homo sapiens
ttctcccactcccatatcatcaccataaccatttttgaatgttacaaaatttaccaagatttttgcattggccataatttgctcataatgataaaagtaacttcaataaatgttatttaaaagtcaattttctggctgggcatggtggcttatgtctgtaatcccagcactttgggaggccaaggtgggcggatcatgaggtcaggaggtcgagaccaggctggccaacatagtgaaaatccgtctctactaaaaatacaaaaattagccgggcatggtggcgagtgcctgtagtcccagctacttaggaggctgaggcaggagaatcgcttgaacctggtaggtggaggttgtggtgaaccgagatcgcrccactgtactccagcttgggcaacagagtgagactctgtctcgaaaaaaaaaaaaatagtcgattttctgagatagcccatctggctgtggtgggaaacctgggggcctcttagtgctacacttctccctgttctggc

SEQ ID NO: 524323 - DNA, 683 bp, Homo sapiens
agtacaggggcaaatgctgaacacctgaaccagcaggaagggacaaaatgttgagggatcatatatgatcttaaggcttagagatcaattcaatgtggagataaagggataaggaatgtaatgattttccattttgggttgagatgactatactgtaaaactaatccatttataagatataggaagattagcagtgaaagatgactacactgaatttgagttgctgagggactttgcaagccatcagggagagaatgtttctgaagcttaggggaggtttctgaaataggatttatacttgagagagatcagcagatagtcccataaaacgggatgataatgtcccagaaaaaartgaagccaagagggctgtgaattacaaggattaaacacacaagcaggacaaaagagggaggaaaggaggaaaataaggtgaatctgaaattagcaaataaatggggaaagaacaattcaagaaggacgtgattaatagtgtcaagtgccatagaagaggccaagtacaaaggttgttattaggacacagccattaggagtgacctaatgtgacatagcctcagccattttgaggattaaagatgataaagtgggcaggtgcctaattgtgttgtattacaaaagattgaatgtgtagtgaatgcaaaagtagagggaggcaaagtcag

SEQ ID NO: 524324 - DNA, 683 bp, Homo sapiens
agtacaggggcaaatgctgaacacctgaaccagcaggaagggacaaaatgttgagggatcatatatgatcttaaggcttagagatcaattcaatgtggagataaagggataaggaatgtaatgattttccattttgggttgagatgactatactgtaaaactaatccatttataagatataggaagattagcagtgaaagatgactacactgaatttgagttgctgagggactttgcaagccatcagggagagaatgtttctgaagcttaggggaggtttctgaaataggatttatacttgagagagatcagcagatagtcccataaaacgggatgataatgtcccagaaaaaaatgaagccaagagggctgtgaattacaaggattaaacacacaagcaggacaaaagagggaggaaaggaggaaaataaggtgaatctgaaattagcaaataaatggggaaagaacaattcaagaaggacgtgattaatagtgtcaagtgccatagragaggccaagtacaaaggttgttattaggacacagccattaggagtgacctaatgtgacatagcctcagccattttgaggattaaagatgataaagtgggcaggtgcctaattgtgttgtattacaaaagattgaatgtgtagtgaatgcaaaagtagagggaggcaaagtcag

SEQ ID NO: 524325 - DNA, 547 bp, Homo sapiens
tagactgcatgcatttcctcaccactctacactgcctctatttagatcagttaataattgaccaatggcaggaaatcaaaagggaggagaatgggcacctgagtagagagagatttccaaaggataaataaagattttgtgaaaaatyagtaaaagctgtcaactaaatgagtacatagtggttaggaccataggctctggagtcagactgcttgagcttcactgctccttagctctgtgaccctggacaaattactgaacatctctgttcctcagtgtctttatgtatgaagtggagataatagtatctacctatagcattgtcgtatgggttatgtaattaaaatacctacaacctcacctgacaggtagaatatactcaggagtgttagtttttactaaaactaacatttgaaaaaaatgaccctctttatgattatgttctgcaaaccagataccctctcctctttctatagaagggattagctagaggagagggtggcagcctccagctgcattagagcctcgtggacaacctagggaacat

SEQ ID NO: 524326 - DNA, 248 bp, Homo sapiens
tggcagaggccaagggaataccttggtcataggcagagagggactggcmcctcactgtaaacacacagcatcatgcccagtaagggtttaacctgctgacctgatgtgggcaaaacagcagaatggcaaggtgcatattcatgacatggctcacctgaacacaccagcctacaacactttgagaatgatgaaaagatagaacatcaaatctgtttagggttacgccattcccatatgagaggaaaaag

SEQ ID NO: 524327 - DNA, 546 bp, Homo sapiens
ctgcacttgcctttggttccaacatgttgggcatagacactcctcggtccattctcattgcaggcatgtggccatctgggagtgtctgcaacagaaatgccagttccaggtgaggcatgaaatagtctaggaaactgaagggagtactcttgggctcccaattccctgttgggtctccaatcctaaccactattttatttgtgtcatctaaatgaccatgtatttttcaaaatgagatccttgctgtatargaacaggaatacagctcttttgcaatcaagttggggagagatcttggcttgatggttatggacaaattcctgaattaggctccatgaatgaaagcatatagtacatttaaaagatgcccaagtctattattgttagtttcttatctttaatcatgattttctatgcatttttcttcttttcttattctccatcacatttctttctttctttttttaacaagattgaggttctagtgagaaaggaatgtcatgagggcaaactgctctctcctattggctaagacatcagtgtctt

SEQ ID NO: 524328 - DNA, 604 bp, Homo sapiens
gcctcctgggaggcctgatacagggtatctgtcaatgatatggaagcctgataagctgctgggcttgagagggagcagccctgggcttgaattctggttctgcaacttaatacctctgtatctcyggacatggtgtttaatctttctgaagtcctcatttcttcatctatgcaggtacaatgttatacattcttatagagcagaatctcagaattccaaggaactctaaagatttgtaaaccaccgaatccaagatcaatgccagtgaggcatctatgaagggtagcgggaattccaggtaagggtgtgggctccggggttataatatgtggacttctaaatcctagtcttgctagttattggcgtatcacgctgggtatgttaactcaatttctataccagcctcctgatttctaaaatagagatgaaaatgctgcagttgctaataacaaccacatctacttcactggcatgttgtgaacattaaataaaatgtttagcaaaaatgcttgcatggagtgaacattaaatgcattttttttttttgagacagagtctcactctcacccaggctggagtgcagtggcgcaatcttggctcaatg

SEQ ID NO: 524329 - DNA, 604 bp, Homo sapiens
gcctcctgggaggcctgatacagggtatctgtcaatgatatggaagcctgataagctgctgggcttgagagggagcagccctgggcttgaattctggttctgcaacttaatacctctgtatctccggacatggtgtttaatctttctgaagtcctcatttcttcatctatgcaggtacaatgttatacattcttatagagcagaatctcagaattccaaggaactctaaagatttgtaaaccaccgaatccaagatcratgccagtgaggcatctatgaagggtagcgggaattccaggtaagggtgtgggctccggggttataatatgtggacttctaaatcctagtcttgctagttattggcgtatcacgctgggtatgttaactcaatttctataccagcctcctgatttctaaaatagagatgaaaatgctgcagttgctaataacaaccacatctacttcactggcatgttgtgaacattaaataaaatgtttagcaaaaatgcttgcatggagtgaacattaaatgcattttttttttttgagacagagtctcactctcacccaggctggagtgcagtggcgcaatcttggctcaatg

SEQ ID NO: 524330 - DNA, 604 bp, Homo sapiens
gcctcctgggaggcctgatacagggtatctgtcaatgatatggaagcctgataagctgctgggcttgagagggagcagccctgggcttgaattctggttctgcaacttaatacctctgtatctccggacatggtgtttaatctttctgaagtcctcatttcttcatctatgcaggtacaatgttatacattcttatagagcagaatctcagaattccaaggaactctaaagatttgtaaaccaccgaatccaagatcaatgccagtgaggcatctatgaagggtagcgggaattccaggtaagggtgtgggctccggggttataatatgtggacttctaaatcctagtcttgctagttattggcgtatcacgctgggtatgttaactcaatttctataccagyctcctgatttctaaaatagagatgaaaatgctgcagttgctaataacaaccacatctacttcactggcatgttgtgaacattaaataaaatgtttagcaaaaatgcttgcatggagtgaacattaaatgcattttttttttttgagacagagtctcactctcacccaggctggagtgcagtggcgcaatcttggctcaatg

SEQ ID NO: 524331 - DNA, 604 bp, Homo sapiens
gcctcctgggaggcctgatacagggtatctgtcaatgatatggaagcctgataagctgctgggcttgagagggagcagccctgggcttgaattctggttctgcaacttaatacctctgtatctccggacatggtgtttaatctttctgaagtcctcatttcttcatctatgcaggtacaatgttatacattcttatagagcagaatctcagaattccaaggaactctaaagatttgtaaaccaccgaatccaagatcaatgccagtgaggcatctatgaagggtagcgggaattccaggtaagggtgtgggctccggggttataatatgtggacttctaaatcctagtcttgctagttattggcgtatcacgctgggtatgttaactcaatttctataccagcctcctgatttctaaaatagagatgaaaatgctgcagttgctartaacaaccacatctacttcactggcatgttgtgaacattaaataaaatgtttagcaaaaatgcttgcatggagtgaacattaaatgcattttttttttttgagacagagtctcactctcacccaggctggagtgcagtggcgcaatcttggctcaatg

SEQ ID NO: 524332 - DNA, 598 bp, Homo sapiens
attccttggccgggtgcggtggctcacgcctgtaatcccagcactttgggaggccaaggcggtcagatcatgaggtcaggagttcaagaccagcctggacaatatggtgaaaccctgtctctactaaaaatacaacaaaaytagtcaggcgtggtgtcgcgcgcctttagtctcagctactcagggggctgaggcaggagaatcgcttgaacccaggaggtggcggtgcagtgagttgagatcacgacactgcactccagcctgggtgacagagtgagactcctgtctcaaaaaaacaacaacaaaaaagaattcttcacatttgacaaatcgagcctcctccatgtgttttcatattaacgcagtgtcagggccgggctggtcagctaagatggctgggctgcaccacaccaatgaacaaggccccaaatgtgtgggaggtgaaggctaacacatcgcttactggctgagctgaaaggaaaatagagctttgggtgacttcccatctcttctgtgtaacaggagccttcttgacaaaaggcaagaagacaaatagcccttctggaaacaccctgtctataccagggcaaaacctcac

SEQ ID NO: 524333 - DNA, 626 bp, Homo sapiens
ctggactggtcttactaaatcactttcagctgtctgaaacagtgcattaaatccagagattattttaggtgtacccatttttacaaatctaataaaataatattcttccttttctagtttaagaactcattcatatgcatatttcttaagttaatgctgatgaaaattaaaagaaacttggtacccattttacgtgtaatcctcctcctccaagtcagactttgaaggttgatagcactatcaggtatttcggcaaggtagaaccacctacctgatcttatgagaagagtcttctgctgctgctgtcaaaggaaattcagtagaatttggagatttagagtattcatattcttatgaattccccaaagtgtctcaatttctagatgtaacattcaataattttcgcaattcatacatcacaggcatcaaccagttagaatggacacctgatcagttagtatgtatgctcaccaccattaagtcttctgtcaaatgttaccctratttaaatttttaaaaattgtgtatatttatgaagtacaatgtattgttttcatatgtttgcattgtgggatgattatatcaagctaattaacatgcatcacctcatatacttatatttttgt

SEQ ID NO: 524334 - DNA, 631 bp, Homo sapiens
cagaattatttttataaggaattattaatcccaaatattttcaactctatatttcatatttatttggggctaccaaaggactgttaggacattggtaaaataaaaaacaaaccatctggtcatctcactttgaagtcaaataccgaattatgcctcagggtcataaaagtctgacacgcacaaacacacacacacacacacrcacacacacacacgcatgagacagtcacaacccagatatctcttaatttagtcaataaatactgagaatcaatatatatacttagcaggtactaaaaatacagtactgtgaggaagacagacatgatccttgccctcatgaaactaacattcattgggagagacacacattaaacaataaattatttaatcataattatagtaagcatgagaaggagatatacattgtaatcagagacccaatctagcacttagaatcatatctgatgcatagtaataagcaaatgctagttattatcatcatctaacttccacagtataatattgagtaaaatactgtcagtttacagataaggatgctagagcccaaaggagttaaacaagttgcctgaagattatacagctagaaagtggtagagtggggattcaa

SEQ ID NO: 524335 - DNA, 629 bp, Homo sapiens
ggcccacaagtttcctctttatgtttttatgtgggtagaaaaggaaaccctctggaaatgttgcttcagcaaaggttactgtaacttatatgcaatagatctcaatactcgtagatagaagagcttactttgttttgtggcttgatttattttaactgaattgagcagataatcgaatagcacatggacagactcagtaagaagttcagtcactccttatgtgtttcttaaatataatacttcaacataatactttcccattattgctgacttaatattctacactgctcagtatctacatatgttctaaaaccaattctctgacaactagatgccttttaattcaatttaattctgacactaactacctagagttagcacaggccttacaagtttgtacaaacagttgtgaagacaagactacactcacttcggatatcaactgcaaatctcagggccacaggcrcacctgactgaccagttataaaatcaagagttctcaccactcctttcagatttgataatttgctagaatgactcagaattcaccaaaatcactgtatttacaattactgttttgttatgaatgatacatatcaggaacagtcaaatggaagaggcatataggc

SEQ ID NO: 524336 - DNA, 513 bp, Homo sapiens
gccatagaaataaagaccttttcaaagtaaaatgaggatggcataagaattacaaattcaaaagaagttacgcttctaatttaatatcaaaaatggtgcactattccctttctttttaattttgtcaaaattgcatgacctgagtgygtctaatatacttttattagataatttctagtatcagaaaagctaaagccgaaaaaatggaatagatgaattccccacagcattcagtaggatgggctttaatctttaatcttttattcttaagacttataatatttctaattgtcttctgcatgctctacctccatactactttctatcttattttccatttaaatctaattacctataatgggctttcttaaaaacaaaccatttattttgctttctttctttaccacatcattttcaacaacaaggcacattttctagcattaacacacacagaaggatgaacaaatctataaaactttctcagattttattactgttcatgttcagactttg

SEQ ID NO: 524337 - DNA, 619 bp, Homo sapiens
gaaagtggggaaaatatcttataaaaacacagcgaaaagccagcaggtgaacaaatagagtttaaaagtcataatggaaattttatgtagttgagaaagctgagttggttatgtgagttttgtaaatgtaaatgcatatgtactagatgtagcargaatgaggggaacaagatgtatttagggtttctgcctttaggatacttccctagaggtgaacagagaaaaagtcaaagaacataaaaagaatctggcgactgaccaacaattgctgccggcaggaccaactgggtcaccagctttcccaggaaaccctaaccttactttgggaaatgttggatctgatgggagctgagggaaggtaaattgtaaagcacagacttcaaattacttttacccagttacagcttcaggtgacattggatgttaagtttaaggaagcgaaaagtagtattcaaataaagaaaaatactctcggttttgtacaatagtatgtcccaagtgttcagtttttaaaggtcatcgatacattttccaaatatttaaatcaatcatgcaagaaaaagaagtggtgagctgggaaatgccgtctgaacacacttgatctaaagcctggggataa

SEQ ID NO: 524338 - DNA, 634 bp, Homo sapiens
ctgggcatgttgataagtgacagctcttaactatattccccccaaccccaagccttgccctgtaccgagggccatgtcccrttccagcacagccccattcaatggctggttaatgcaggagtagaaaggccaaatctctttcctcaattcaggatcattctgaagggccatccctgttccagagctccttgtgggtgggcaggctttggtgcgactgtttcaacctctccctctgcctaccctggcttccctcattccttcataaggatttacgctgaaagctcctcccaataaattccatgcacacaagtctccatctcagaatctgcttcctgggaccaaccaatgacacctcaaccccagtgtatcaatacctgtgaaaagaatctaaagttcaatgctctcagactaatagataatgagttctacatttgaaatgttagcaattaattatgacctaaaaatcaataatccttcaaatgctaagattctatgatgattttataaatatctgctgattgatgggattgagttccagaaaaatcctgggaaaatagattcagtctataattccattactctctaatctattcttagaaattagcccaatatttattcttcacaccttttctag

SEQ ID NO: 524339 - DNA, 634 bp, Homo sapiens
ctgggcatgttgataagtgacagctcttaactatattccccccaaccccaagccttgccctgtaccgagggccatgtcccgttccagcacagccccattcaatggctggttaatgcaggrgtagaaaggccaaatctctttcctcaattcaggatcattctgaagggccatccctgttccagagctccttgtgggtgggcaggctttggtgcgactgtttcaacctctccctctgcctaccctggcttccctcattccttcataaggatttacgctgaaagctcctcccaataaattccatgcacacaagtctccatctcagaatctgcttcctgggaccaaccaatgacacctcaaccccagtgtatcaatacctgtgaaaagaatctaaagttcaatgctctcagactaatagataatgagttctacatttgaaatgttagcaattaattatgacctaaaaatcaataatccttcaaatgctaagattctatgatgattttataaatatctgctgattgatgggattgagttccagaaaaatcctgggaaaatagattcagtctataattccattactctctaatctattcttagaaattagcccaatatttattcttcacaccttttctag

SEQ ID NO: 524340 - DNA, 634 bp, Homo sapiens
ctgggcatgttgataagtgacagctcttaactatattccccccaaccccaagccttgccctgtaccgagggccatgtcccgttccagcacagccccattcaatggctggttaatgcaggagtagaaaggccaaatctctttcctcaattcaggatcattctgaagggccatccctgttccagagctccttgtgggtgggcaggctttggtgcgactgtttcaacctctccctctgcctaccctggcttccctcattccttcatraggatttacgctgaaagctcctcccaataaattccatgcacacaagtctccatctcagaatctgcttcctgggaccaaccaatgacacctcaaccccagtgtatcaatacctgtgaaaagaatctaaagttcaatgctctcagactaatagataatgagttctacatttgaaatgttagcaattaattatgacctaaaaatcaataatccttcaaatgctaagattctatgatgattttataaatatctgctgattgatgggattgagttccagaaaaatcctgggaaaatagattcagtctataattccattactctctaatctattcttagaaattagcccaatatttattcttcacaccttttctag

SEQ ID NO: 524341 - DNA, 646 bp, Homo sapiens
tccttacctcctctagccattcattctcctttggattctagtagttcttaaattttttgcaaataaatatcttgtgagagtgttggcatgtggattcctatacttatggagactttgctttgggccacctgaaatgaggtcctgcaatctacatattagcaaacctaggtggttccaaagcattggtccatggaccacatttagagaaccgcctgcatcaagataagcacaagtattgcacaaaaccccactaaaatggctcccaaggtctgagcttcttcagacacatcattaatttaggtaatttgggcacattagctaatgaggtcagtgtggaagatgtttgccccaatgccttgatctgctccagctccatcttgcaagtcctcttcctcctctgcttcaggcctcacccaggcgmtggttgttctcaggctattgatacaatcttggtcttaagattcccgtgagggtttattgaaaatggggcaatatacagtttcttgtaatgacaaccacaccatttcctttctcaatccctcccttgttctgcagctctcacttaggtttcacagagaagcagtgaacaacttgtccttcccacccacccacctgcacacacctacctgaacccctccattccatg

SEQ ID NO: 524342 - DNA, 646 bp, Homo sapiens
tccttacctcctctagccattcattctcctttggattctagtagttcttaaattttttgcaaataaatatcttgtgagagtgttggcatgtggattcctatacttatggagactttgctttgggccacctgaaatgaggtcctgcaatctacatattagcaaacctaggtggttccaaagcattggtccatggaccacatttagagaaccgcctgcatcaagataagcacaagtattgcacaaaaccccactaaaatggctcccaaggtctgagcttcttcagacacatcattaatttaggtaatttgggcacattagctaatgaggtcagtgtggaagatgtttgccccaatgccttgatctgctccagctccatcttgcaagtcctcttcctcctctgcttcaggcctcacccaggcgatggttgttctcaggctattgatacaatcttggtcttaagattcccgtgagggtttattgaaaatggggcaatatacagtttcttgtaatgacaaccacaccatttcctttctcaatccctcccttgttctgcagctctcacttargtttcacagagaagcagtgaacaacttgtccttcccacccacccacctgcacacacctacctgaacccctccattccatg

SEQ ID NO: 524343 - DNA, 624 bp, Homo sapiens
taggtcagcttaatttagagcagctcacatcactaacttcttcccccatagcaaaaaggactaacacccaaaaaggggttcaatctctctttctggtaaaagcaggaactgaaaccaggaagtgaacacattcaagaaacaactggaaaaaaacccagtggggctggagtttttgtgaatttgcttggaatttcctctaacctccctaggtatagatgaagtgcccaccattggcagggtgcttcacggggtgttccctaatccctgcatgaggctgggaatgtggatcttcatgcttcacctcagagaaatgagaggactgggcaaaatcgttattctcagactctccatgtcagttaccagtaatatattcaaaagacattttsagtgtggcacagaactactagctttttagtcttccaagtgaggacattaaaacataaataaataaacaagttaaaaactagcatgtaccagcagcatcgcttcataaaacaaaggagatgttaagaccaaaaaaaataaaaagtggaaaggaataatctcagaattaaaaatgggatgtcttcaactttattttaactcattattgcagactgacaaaaaatttgttacagaccattt

SEQ ID NO: 524344 - DNA, 626 bp, Homo sapiens
gggacgtggcatttccagagagaaagggtgcgtgagagacatcttctgtgtccatgagtacagctagaagtcatttaaaataacctgtcttgagtggaggaggctccttgaccagagttagaaacagaratgtaaagaggaagatgagctccccgcagagtggagactgcctcctcccaggcgacagggcctggtttgcccaagttaagtccctgtgtctttgtgagcagagaggtctccagcttgctttctggggcttactttgaaccaaagtgagatttccaagacagtaactggctgtaagatatgaccttacaacgttaaatccagcccagtaatagagaccgcatgggttcttttcctccagaaaattccgtgatctgtgtatgttcactcggccaatacttgtgagcaggacgggctgccaggctctctgctttgtacaaggatgccacggggggaggagacagatgaggaccctgccccaaggagctcacttacattaaaggggagggaggtagaccaaaacaaacatcagggaaacacagaagagacttaaacattaagacaggtgttctctgagggctagaggcaggatgataggctggtggtaactaggggagata

SEQ ID NO: 524345 - DNA, 576 bp, Homo sapiens
ataatgaatgtagtttcccttatcccaatgctgttataaaatcaatggaaactcctataaatgattacrtttataatcagagaaacatggtagtttaaaccataacatttacatagaaatacaaacaaacaatagagcatgatgtaaaaatttgcttggtttcaaagaatttttcccttgtggcaggcccctttggccaatgtgagttcaaactcttctaccttgttggtagagagacttaaaacattatagagtttactctcaggatgaaaaaaggccaaaggtaagacggtctgtgaatgagaccaaccatggtgagctcactttcagaatctcagcatcagagagacctgacttccctcctcccaacccttcacaccctcctactgcatcttcactccaataatctttgatggctttttttctgtgtttttccataattcgcaccatttcagatgattagcacttgtaagtgtactggagttcactgggaaaaaaagcatccatgggttgtgcctgctgactgccttgttttgctgcgtgtctgcacaaaacagcaggaagtggtcaatgcac

SEQ ID NO: 524346 - DNA, 608 bp, Homo sapiens
gtatccctatctccagcagccacctcctcatccagaagcccccaacgacagtgtagaccttccatagccaagggaggagtttgtttgcaagttcaggagctccctgagctacagacctcattataaacmtgagctaaagatttgttgaatgaaaccaagaggattggaatatttgctctgagccaagcactgtatatgaaatagatttcttgtgacgatatattggtattggggggacaccagggtggaaattgtgactggtaagcactgccttgggtaccaagtttctttactgcgtgcctctgcgtacttccacttgcctctctgcacttcctttgtccattcattaaacagggatgaaaacatagattcctaaaggactttcaacttttcaggtgacagtcattaggtgccaacataaaatgaacacaaactgcagagtgtgtgcacatcttccccaagaatccctgagtggtctctgagggctccaacttcagggctcctttaatatccccttttcccatttatatgcaatgcttcatatttctcccgatcaatgcgccctgagagaaagttctattctctgaggtgtactaattacacctgct

SEQ ID NO: 524347 - DNA, 681 bp, Homo sapiens
agggtatccctatctccagcagccacctcctcatccagaagcccccaacgacagtgtagaccttccatagccaagggaggagtttgtttgcaagttcaggagctccctgagctacagacctcattataaacctgagctaaagatttgttgaatgaaaccaagaggattggaatatttgctctgagccaagcactgtatatgaaatagatttcttgtgaygatatattggtattggggggacaccagggtggaaattgtgactggtaagcactgccttgggtaccaagtttctttactgcgtgcctctgcgtacttccacttgcctctctgcacttcctttgtccattcattaaacagggatgaaaacatagattcctaaaggactttcaacttttcaggtgacagtcattaggtgccaacataaaatgaacacaaactgcagagtgtgtgcacatcttccccaagaatccctgagtggtctctgagggctccaacttcagggctcctttaatatccccttttcccatttatatgcaatgcttcatatttctcccgatcaatgcgccctgagagaaagttctattctctgaggtgtactaattacacctgctaattgctaaatcaagctactgtatcaacacagtttagtttgagtcaattcctaatattgccccattatga

SEQ ID NO: 524348 - DNA, 521 bp, Homo sapiens
ggaaagagaaatacttaacaaggacccagagaataacatgggaccaaatatcttatgcmtttagtactattaaaaaatacctttttcaccacaaaagccagacctgctaattttcccaccaaaaacaggcaacagtgcaacatcgctgacacttttactttagatctttggacccaagactttgacagcagggtaaactgcttgacaataaaatcttagttaaagccacttgcacttgctagtggaaatacagctatcacacaacagggaaatggcagagctgcaattcatgaattttcatttgtgtcaatttcttcacagtgatggctgaagacactaacattagaacctgtagaaagaacatgaggctgaaagtagaggacatattcattaaggactgcgtcacacacttttgggttcttcaattcttcaagatccaatcatggatgatgattttgatttaaaaaaatacagcttttccaagtcaccacttacctgctatactgcagagaaaaagctgt

SEQ ID NO: 524349 - DNA, 542 bp, Homo sapiens
gctgagtatccctccccagcattgcagcagccaggtagaatttccatgacctcccaggccaagaagaacatgagctgcacatgctgagtggcccaggaaaagaaaagatggctaagatatatgcaagaatacatgaaatatatgaaaacttgccttgcttatttggataaatcattccatttctgccagggtacagacagtcccaaagggtggcatcttcctctctcattcatggggtgagttttgagctgttttcttgcagagacratgggtggagttgactcatctgtgttcactttggtccagcacctgtaggccaggtggctaccctcagtgagaaccctttgcctcattcatcctaaagcaacctactttgtctcacccactgttgaaactctgaatgcaagccccatttccttgtttcccattgtttcatttgcctcttgtttatgagcttccctcatgactttgatacagcaccaacttggctccaatccacattccctcccttcctagtgacataggcaagtatccaccatggt

SEQ ID NO: 524350 - DNA, 542 bp, Homo sapiens
gctgagtatccctccccagcattgcagcagccaggtagaatttccatgacctcccaggccaagaagaacatgagctgcacatgctgagtggcccaggaaaagaaaagatggctaagatatatgcaagaatacatgaaatatatgaaaacttgccttgcttatttggataaatcattccatttctgccagggtacagacagtcccaaagggtggcatcttcctctctcattcatggggtgagttttgagctgttttcttgcagagacaatgggtggagttgactcatctgtgttcactttggtccagcacctgtaggccaggtggctaccctcagtgagaaccctttgcctcattcatcctaaagcaacctactttgtctcacccactgttgaaactctgaatgcaagccccatttccttgyttcccattgtttcatttgcctcttgtttatgagcttccctcatgactttgatacagcaccaacttggctccaatccacattccctcccttcctagtgacataggcaagtatccaccatggt

SEQ ID NO: 524351 - DNA, 542 bp, Homo sapiens
gctgagtatccctccccagcattgcagcagccaggtagaatttccatgacctcccaggccaagaagaacatgagctgcacatgctgagtggcccaggaaaagaaaagatggctaagatatatgcaagaatacatgaaatatatgaaaacttgccttgcttatttggataaatcattccatttctgccagggtacagacagtcccaaagggtggcatcttcctctctcattcatggggtgagttttgagctgttttcttgcagagacaatgggtggagttgactcatctgtgttcactttggtccagcacctgtaggccaggtggctaccctcagtgagaaccctttgcctcattcatcctaaagcaacctactttgtctcacccactgttgaaactctgaatgcaagccccatttccttgtttcccattgtttcatttgcctcttgtttatgagctyccctcatgactttgatacagcaccaacttggctccaatccacattccctcccttcctagtgacataggcaagtatccaccatggt

SEQ ID NO: 524352 - DNA, 379 bp, Homo sapiens
agcaaccttctttgcaactgcagccttagagcccctttgccatgtaatctgacacatccacaggttctggggattaggacatggacatttgttggggcattactctacctatcactggtacagaataaaaagtcaataaatggttctattcattaccagtactccctaccaccttctttctctactgtgaaattacctatgcccttcagtttttcaaaggcagggcagaagcctcagctctggtagaatctgacrtgctggaggttgaaagtgagaaaggcagtctttgatgggcttaggggagtggggaagtgaccagcccttacctggaaggttgtgtgcaggtctgggaggcacaggcaagtaagtagcttgaggt

SEQ ID NO: 524353 - DNA, 618 bp, Homo sapiens
tagcaaccttctttgcaactgcagccttagagcccctttgccatgtaatctgacacatccacaggttctggggattaggacatggacatttgttggggcattactctacctatcactggtacagaataaaaagtcaataaatggttctattcattaccagtactccctaccaccttctttctctactgtgaaattacctatgcccttcagtttttcaaaggcagggcagaagcctcagctctggtagaatctgacgtgctggaggttgaaagtgagaaaggcagtctttgatgggcttaggggagtggggaagtgaccagcccttacctggaaggttgtgtgcaggtctgggaggcacaggcaagtaagtagcttgaggtgctttaaccaggatagtgacaaacttgggagaagagaaaaccctgagcagaaacttcatatgcctcaaaggttggtagatggagaagggattcagcttcattttctgtaagtgtcrtgattaagtgtgtgcaccttgttcaggccaagctgggttgccatcccagctcatctactcaccaactgcctgacttggagcaaatgtgctcctctctctgacctccagtttttcatctataa

SEQ ID NO: 524354 - DNA, 487 bp, Homo sapiens
agcagttgtaaagtgtgataaaaagacccagtcctggctaaggtatacagcacctcacccagtttctgcctagtgcctgaaggcgctgcagctaattaaaccacctcttagtcaacatcccagtcactcccatctgggagactgattggaaaggctcagtttgagaaacttcagaggctagaagaamctcccaggcctgagggccaaatcctgagctcttttaacctcaagctcagggttccagtggctcttggaaggggaatgagtactcatgctttctagcagaaggaccacattttggagggtccaatttagagatgttgatgcttggtagttgggtcctaagatatccttcacggacaagtgcatcttcccgggtcctcatcagtttccccaaaggccttgttgggtgaacctagagtggttcctcgttccatcttccctcaagagtgctgggagcattgaggccaccatccttggtcagggc

SEQ ID NO: 524355 - DNA, 487 bp, Homo sapiens
agcagttgtaaagtgtgataaaaagacccagtcctggctaaggtatacagcacctcacccagtttctgcctagtgcctgaaggcgctgcagctaattaaaccacctcttagtcaacatcccagtcactcccatctgggagactgattggaaaggctcagtttgagaaacttcagaggctagaagaaactcccaggcctgagggccaaatcctgagctcttttaacctcaagctcagggttccagtggctcttggaaggggaatgagtactcatgctttctagcagaaggaccacattttggagggtccaatttagagatgttgatgcttggtagttgggtcctaagatatccttcacrgacaagtgcatcttcccgggtcctcatcagtttccccaaaggccttgttgggtgaacctagagtggttcctcgttccatcttccctcaagagtgctgggagcattgaggccaccatccttggtcagggc

SEQ ID NO: 524356 - DNA, 655 bp, Homo sapiens
atcctgttgctcctataatatctagtcatatgaaacaatattaaagaaaaccagtacatttaatatgcttgaaaaagtttgttcttttaagcaagtaaccaattcttctttgaaatcttgtttatattgcttatttgttgagaaagtttccttcctcctttttatttaattaacaatagtaatttcagcccactaacacttakagagagtacttactatgagtcagggactgttctaagcagtttgcctgtgttatctcacttaatcttcataacaactctgtgagacatgtaggaattataattacgattcccattttacagatgaagaaactgaggcaataatggtttagtcatttgccaaggtcacaagctaaaaaataaaagagccaagactcgaatcacacagtctgcttccaaagtccatgctgtgctatacttgttttctaattcttctttgagaattatcaaaaattttatattagtgatgtagagtctctatagaaagcatatttaatccattgtctgctacgtatgttctgtaaccatgtctaactttgatatcagaagaagtcatttttttaaactcaatattcttaaattgaagaattttagagaaaatgaaagactaccttcatttgaataatatctctcag

SEQ ID NO: 524357 - DNA, 628 bp, Homo sapiens
tctactttttcacctctttgtcactcattgttctctaattaaatagagattggataacgaaaaataatcttttaaagaaaccaagagcctctgcctttctatgattccaagtagctttgaagtaaaactgccagtaacagaagaatgctaatgaggtgagtctatgttttacctagaactagattaggtgaaagacatttagcattttctcacctcacgttcttggcatagaatgcatctcgctagtgtagactgtagacattggtttctgattcttccaaccaacacaccgtacctgaggacccctgcccacaatttgcatcccagctcagataattcaaaacttcttctgggaaccatcactggctcccaggattttgggcaagattgccatcttctgtatgccaattgtacattgaacattagagaactcttcaagctttataataattccctatttacawgtaaacctgtctatccccatacatggttttctcccaattccttaacatgtgccaaaaccttgaacaaataaaactatttgttgaaaaaaaattctaaaaaggcagcccccagccactgccacctcttcattatcattccttgctattatatcattccccaaaaa

SEQ ID NO: 524358 - DNA, 540 bp, Homo sapiens
gtgttgtaggttctgtgcagcatacggtttcagtgctgcataaataaaccattgttgtattcattctcttaagtttatgaacagcagaataccagaattgttttgtttcaatccaagcctcaattactgcttttagagaaatacactgtttaattagcaccactggatttcctccccaagatagatgtaatgtcttatgtagcaattagtattttggaattgtgttataatttgtgctatacaaaattaacctagattgagatcacaggtgttcttttgaggtatttttaacctgattttttaaaagttaaacataactgctattcctttcaaaaagcctaccaagaaagtctcctccttcagctctagctgagcatttaaaagcaggagctttggaggaagcagggcttggattctactcacggttcactctgtatgactctctgagagtcaatttcaccrtgtataaaagaggattatttattcctacattttagggtagttgtgaggattaaatataataccctttgccagtagact

SEQ ID NO: 524359 - DNA, 634 bp, Homo sapiens
tgctctcccactgttctggtgactagggcactgagaaggtggcattttctaggtggtggcgctataaagtgttgaagcctaggtcagcctgctgagtaattctgtggagaaatcctctctcctgccccactcatacccacccatatggggcatagactctgagaaaaacattaaattctgttgtgttaacctgcttagatttgggagttgtttgctatcacagtttatcccacccattcatgmctaagacaggcagccaatggtcagatagatattataaagaggtcaggatacttgacaaagtgattcaaaaacgcaagtataagcataagaaataattcagtaaaattctgaaaaagaagaataaatagcaagactctgatattttagatattaaaatacactgtaaagttacaataggaaagaatgcaggaagaggcagacagatcaatgaaagagaagggatgtgagaataaatgaaaatttagtgtgacataaaggtgtcatgtctaagtacctgtgttcctatatgctaaccagagtcttagagtgtgagatggaagcactttctctattctctcccagaagacttgccctgatagagccatctaggaactgggtccaccaacacaag

SEQ ID NO: 524360 - DNA, 654 bp, Homo sapiens
ataaacatctgacattttcatttgcaagtattcatgtttcatyttagataatgttccctctatttacttcttcagcagcaatgcatcaaatatcctacagtgtaatccttctctcagcacttatcaatgaactatgaaatagtattaaatagaattaattagaagttttaatgaatcatgtctgtcctcatttattatacaatgtaattttcaaggagtgattaattacaagttacagatgagtgaatggttaatgtagtttgttaaccttactaagaagcgactgtacacagcaagctgcttctcctctgtttattagcacgtggttatgtaccaccatcagtttaagtgaatgaaaaggttttagtaactttccaattaatgtgcactgtaagctaataatttactccctgattttctttcctgtgcatcatgtgaacactgttgggattcaaaggtagaatttcgccattttcattttggtgtgtttctatatagctattattttgcagctatgatgtccacctgcgctgcagttattttaagtagatcccatttaatacaaggtggcttgtttgaaatgaatctccctgcatatttccttgaagaatataccaatttaccatatcattactgtcattatctaaaaagtgg

SEQ ID NO: 524361 - DNA, 654 bp, Homo sapiens
ataaacatctgacattttcatttgcaagtattcatgtttcatcttagataatgttccctctatttacttcttcagcagcaatgcatcaaatatcctacagtgtaatccttctctcagcacttatcaatgaactatgaaatagtattaaatagaattaattagaagttttaatgaatcatgtctgtcctcatttattatacaatgtaattttcaaggmgtgattaattacaagttacagatgagtgaatggttaatgtagtttgttaaccttactaagaagcgactgtacacagcaagctgcttctcctctgtttattagcacgtggttatgtaccaccatcagtttaagtgaatgaaaaggttttagtaactttccaattaatgtgcactgtaagctaataatttactccctgattttctttcctgtgcatcatgtgaacactgttgggattcaaaggtagaatttcgccattttcattttggtgtgtttctatatagctattattttgcagctatgatgtccacctgcgctgcagttattttaagtagatcccatttaatacaaggtggcttgtttgaaatgaatctccctgcatatttccttgaagaatataccaatttaccatatcattactgtcattatctaaaaagtgg

SEQ ID NO: 524362 - DNA, 628 bp, Homo sapiens
tctactttttcacctctttgtcactcattgttctctaattaaatagagattggataacgaaaaataatcttttaaagaaaccaagagcctctgcctttctatgattccaagtagctttgaagtaaaactgccagtaacagaagaatgctaatgaggtgagtctatgttttacctagaactagattaggtgaaagacatttagcattttctcacctcacgttcttggcatagaatgcatctygctagtgtagactgtagacattggtttctgattcttccaaccaacacaccgtacctgaggacccctgcccacaatttgcatcccagctcagataattcaaaacttcttctgggaaccatcactggctcccaggattttgggcaagattgccatcttctgtatgccaattgtacattgaacattagagaactcttcaagctttataataattccctatttacatgtaaacctgtctatccccatacatggttttctcccaattccttaacatgtgccaaaaccttgaacaaataaaactatttgttgaaaaaaaattctaaaaaggcagcccccagccactgccacctcttcattatcattccttgctattatatcattccccaaaaa

SEQ ID NO: 524363 - DNA, 628 bp, Homo sapiens
ctttttgcacagtgttctcatagtttttrtgaagaagagggtttttcgaggtccttactcctccatttgcatttaattcacctctgctgactttttaactgcattttataataatttccgtagtagttactctagtgattaaaatatgcatatcaacttgttagtatcctatttcagactaatgttgacttaattctagtcaaatgtagaaacttcgcttcaatttaaatccaccaccttttcttttctttgtgcttttattggcatatatatacatagaatgaccacggcggacccttaagcactgcaggtgttcagggtgccaaccccctgcacagttgaaaaaataagttttgattctccccaaacttaactactaatagcctactcctgaacagaagctttcagataacatcaacagttgcttaacacatattttgtataggtattatagagtgtattcttacaataaagtaagccagaaaaaaaaggaaaatgttcttaagaaaatgataaggaggagagattgggtgaggtagctcatgcctgtaatcccagcactttgggaggccaaggcgagtggatcacctgagatcaggagtttgagaccagcctgaccaacaaggtg

SEQ ID NO: 524364 - DNA, 627 bp, Homo sapiens
ctgccctccatcccttcctgggagccatggatcaaaactattactgctgtctctggaggccaaacaccagaggctggtgttttgttttagaaaatacagtttatcccttttcaatgacaaaagaaataatgttcattatagcamagttggaaaaagcaccaaagttaagagcccataggaaaatcatccctaattccaagcccagaccacccctgtaaaattttgactcatatattactcctttttgtcttcttttttaaggcatattttacagtctgtaccacagcctctctgtatctacatacttagattttccacattatataatggatatttcctatgttattataaattattcttaaacattctttcaatagttgtataatattgaggatgactaaatcataataaagagaagctgctattttctgctttccacacactattccaagcaatgtacatacattcttcccatgtgactctagcaaaagcccagtgaggtaggaattagtctcatcatataaattgataagaaaattgaggctcaaggttttagcaatgtgtttaacaatgcttattaaacagccaaagcgggatttagacacaagttggcttgactccactttc

SEQ ID NO: 524365 - DNA, 627 bp, Homo sapiens
ctgccctccatcccttcctgggagccatggatcaaaactattactgctgtctctggaggccaaacaccagaggctggtgttttgttttagaaaatacagtttatcccttttcaatgacaaaagaaataatgttcattatagcaaagttggaaaaagcaccaaagttaagagcycataggaaaatcatccctaattccaagcccagaccacccctgtaaaattttgactcatatattactcctttttgtcttcttttttaaggcatattttacagtctgtaccacagcctctctgtatctacatacttagattttccacattatataatggatatttcctatgttattataaattattcttaaacattctttcaatagttgtataatattgaggatgactaaatcataataaagagaagctgctattttctgctttccacacactattccaagcaatgtacatacattcttcccatgtgactctagcaaaagcccagtgaggtaggaattagtctcatcatataaattgataagaaaattgaggctcaaggttttagcaatgtgtttaacaatgcttattaaacagccaaagcgggatttagacacaagttggcttgactccactttc

SEQ ID NO: 524366 - DNA, 586 bp, Homo sapiens
tgggtctttaccactctgtcttatctatgagaaagacttgttttctatttgagatccctctacccctaattcccaaaccaagacattttttctaccccttgtgcctgttaaatggcacttaggcattcagaaaataaacacattaastaccaaggggttaccaagagccccttaaaagttctaccttcctcaaattcagtgtttttcaccctatgtgctctctccttgtctgtctcatgtcctcttgggatcctgatatgtctctttgcagtaagtttgtgaatctaactttccttcttttttgttattgaagacccagagtttcatctgtcagctggatacctccatgtgaatgtctcagttacctccagctcaacaagcagctgaacacatgatctttcccattgaacttggggtcagcctcccaagaagccaggctctaaatctcccagccatctctatcttctcctcttttagctccctttgctgcacaggtggcagacctcctcttcttttctcttccacacctggtgtcttagccctggttcctctaatatggacaatgagacaatgaaatagctcctca

SEQ ID NO: 524367 - DNA, 586 bp, Homo sapiens
tgggtctttaccactctgtcttatctatgagaaagacttgttttctatttgagatccctctacccctaattcccaaaccaagacattttttctaccccttgtgcctgttaaatggcacttaggcattcagaaaataaacacattaactaccaagggrttaccaagagccccttaaaagttctaccttcctcaaattcagtgtttttcaccctatgtgctctctccttgtctgtctcatgtcctcttgggatcctgatatgtctctttgcagtaagtttgtgaatctaactttccttcttttttgttattgaagacccagagtttcatctgtcagctggatacctccatgtgaatgtctcagttacctccagctcaacaagcagctgaacacatgatctttcccattgaacttggggtcagcctcccaagaagccaggctctaaatctcccagccatctctatcttctcctcttttagctccctttgctgcacaggtggcagacctcctcttcttttctcttccacacctggtgtcttagccctggttcctctaatatggacaatgagacaatgaaatagctcctca

SEQ ID NO: 524368 - DNA, 556 bp, Homo sapiens
tggctggctgcgttaagtaggatgctgaactggcagatgcggctccatcagacaggtgcctgcaatgcacaaaagggacagtaggtggcgctgcatcattccatatgaatcttcctggaaaggtggttgagagaaatggggaatwgtgtgaactgggtttcccctctcttttcttgtttatagccctcctgtgctgcaggaaacaactgacgcccgtgaggctgcacattgtgtgattctgtgtgtgtgtgtgtgtgtgtgtgtgtgtgtgtgtgtgtgtgtgtgtacactggctgctctggcctgcctgcagcatttatgatgtggagacctttggccacctaaatattgtgcacatatcatattgctatttgtctgcaatgtttaaaaaagctactagaagaaataagaatgattcaaactattaagctgagatcctaaaacagagtttctcaaatttcactgtacgttaaaatcatactaatctcttcaaagcagattatgatgccatacttccaggaatcctaattcagtgggtctgggataagacccagaa

SEQ ID NO: 524369 - DNA, 556 bp, Homo sapiens
tggctggctgcgttaagtaggatgctgaactggcagatgcggctccatcagacaggtgcctgcaatgcacaaaagggacagtaggtggcgctgcatcattccatatgaatcttcctggaaaggtggttgagagaaatggggaattgtgtgaactgggtttcccytctcttttcttgtttatagccctcctgtgctgcaggaaacaactgacgcccgtgaggctgcacattgtgtgattctgtgtgtgtgtgtgtgtgtgtgtgtgtgtgtgtgtgtgtgtgtgtgtacactggctgctctggcctgcctgcagcatttatgatgtggagacctttggccacctaaatattgtgcacatatcatattgctatttgtctgcaatgtttaaaaaagctactagaagaaataagaatgattcaaactattaagctgagatcctaaaacagagtttctcaaatttcactgtacgttaaaatcatactaatctcttcaaagcagattatgatgccatacttccaggaatcctaattcagtgggtctgggataagacccagaa

SEQ ID NO: 524370 - DNA, 556 bp, Homo sapiens
tggctggctgcgttaagtaggatgctgaactggcagatgcggctccatcagacaggtgcctgcaatgcacaaaagggacagtaggtggcgctgcatcattccatatgaatcttcctggaaaggtggttgagagaaatggggaattgtgtgaactgggtttcccctctcttttcttgtttatagccctcctgtgctgcaggaaacaactgacgccygtgaggctgcacattgtgtgattctgtgtgtgtgtgtgtgtgtgtgtgtgtgtgtgtgtgtgtgtgtgtgtacactggctgctctggcctgcctgcagcatttatgatgtggagacctttggccacctaaatattgtgcacatatcatattgctatttgtctgcaatgtttaaaaaagctactagaagaaataagaatgattcaaactattaagctgagatcctaaaacagagtttctcaaatttcactgtacgttaaaatcatactaatctcttcaaagcagattatgatgccatacttccaggaatcctaattcagtgggtctgggataagacccagaa

SEQ ID NO: 524371 - DNA, 625 bp, Homo sapiens
tttgattttcttctcactctttccttattttggtctcttaatcatttcttccccattccccttctgctaaaagataactagtgtacttcttctagatataaaattgtgaattcaatttgaaaaggacacaatattyaagataggtcataaaccaacaacagtaataacatacaagttacatgtaagtacaggacggcgctgtcagaacccagactgttgtccacctgcacggtcacacggaaaatgcccacgttctgatagacgtgtttgatcccatcttccatggagctgagattgacgtaagacaccgcgataccatcgccaaagtccacttggatgagtgtccgctgaacatcaccctgaaaaacaacccaacatcagaggaaatgagttagtattcggctgctcctgcctaggggactggggactacggcttgtcctagtccctggctcaggcatgatggcagccctggctcactcctacagctaggagcatctgcctgcctttgacagaatccctgtgacattccctggcaggcaagagtttgctacgatggatacactccaaatctgaaggacaccaactactgtaagtttcaggggtttgaaaattaatagtgcttga

SEQ ID NO: 524372 - DNA, 625 bp, Homo sapiens
tttgattttcttctcactctttccttattttggtctcttaatcatttcttccccattccccttctgctaaaagataactagtgtacttcttctagatataaaattgtgaattcaatttgaaaaggacacaatatttaagataggtcataaaccaacaacagtaataacatacaagttacatgtaagtacaggacggcgctgtcagaacccagactgttgtccacctgcacggtcacacggaaaatgcccacgttctgatagacgtgtttgatcccatcttccatggagctgagattgacgtaagacaccgcgataccatcgccaaagtccacttggatgagtgtccgctgaacatcaccctgaaaaacaacccaacatcagaggaaatgagttagtattcggctgctcctgcctaggggactggggactacggcttgtcctagtccctggctcaggcatgayggcagccctggctcactcctacagctaggagcatctgcctgcctttgacagaatccctgtgacattccctggcaggcaagagtttgctacgatggatacactccaaatctgaaggacaccaactactgtaagtttcaggggtttgaaaattaatagtgcttga

SEQ ID NO: 524373 - DNA, 496 bp, Homo sapiens
ctgcacatgccctatcttctgttcccaagcaagttctttgtcctctctggcttctcttccaagaggtgctggcactgctgaaagccaaaatttcctcaccaaagcagctaggacagagtgttcccaggatgtctggtttgaatcatgctgtataggtgtttcttcactttcaaaactgagctcyggaagatgactctaaaatgtccaaatccatgcataattacggagtattgtcagtcttctccccttgcctattcaaagatggttttctaaagcacacgtctttctccaaatgtgcagacctcctgagcttctgtgcaagcaaaacctacagtgaacttagatgctctgacctgggggatgaagagtcgccagtgaagaggatagtgcagaaggttttacaatttttctagagaactcagatctgtcaagaccatgaatttcagagacagcacactttgaacacatcaaatcatctgcctagatttatgacatt

SEQ ID NO: 524374 - DNA, 520 bp, Homo sapiens
acttctgcctaccagttctctcaaacgaatgcctcccaaatcagttttgttgagttcttcagactgattggggcctttgccatttatcctgtgccttcaggttcttgcattggatttctctgggaagctgagttattgtgttgaaagtctataggctcattaggttctcattagtggtccagaggacatccatcttgagtgagtctccaagcacagagatgccacctctcactgcatgcttgggtctcagtgcaaaacaccttcaatcagctttctaaaagtcaggcatggtttgaaaatgyccggcatcttagactcaactttatggacttctctactcctcttccagttggttcttggattaattgttctttatttttaaggccataatgatgcataaatgcattgtgtgtgcttgtgtgcgcgtgcatgtgtgttcttcttgcatctgccacagtgagtctgggatggaagtacgactgctcctttgccttctgctgctaatgaaggttctgtcatg

SEQ ID NO: 524375 - DNA, 645 bp, Homo sapiens
ataaatatcgcaaaggaatttacaattcagagaaaaaatagattatgatagatatatgactcaacattcacagatctcatagagactgctacagtaatggtgtagcacagaaaacactggctaaactggatatttctactcagtctttcatgagaggttatactggctaaatgatcaaacctcacattaaagagacttcagtttttgcagaytgatgctcttttgcttatttcttgttttagctttaacagggaaaattattctacagaattaacctatataatttatcagattcatagaaaattaaaatgtacaattttaggatgacaaacctttaagatttttgaggttcagcgttatctagccattatcgttttatactgttgggtctgcagcaaccactttatgtatgtatatatttgatttcccaagtttatttgcctagagttagtggtagagcccaaataagatgcaatcaaagcttactttccactcttctagaccagaggtcagcaaactttttatataaacagccagatagtgaatgtttcagttttgcaggttatgtagactttgtcacaactacttatctctgcacttactgtatgaaggtgaacacagacaacacataaaagaatgtatgca

SEQ ID NO: 524376 - DNA, 626 bp, Homo sapiens
gaatcaaaatgtgcatttaataagattgctaaataattaccatgcatattaaagtttgaaaagcactgcccaaaggttcagcaacccctagccagtctcctctaccctcagccctaagaaaacattcaccagagaaacccaaagtactaaccctcatgttagtgtgttcaaagacttagctgcttatcaaaatctaaactgagaggttctgcaggaatcctccagtgaaaaagggtaaaagatagcctgcataactgatgatgttttcagagcctgtttgtcctggaagatagaattaaagcaaaggtagcgcggaggcagtaacaagtgcccctggggtgggaatttcaaattctttttcccccattcataactctagagaagtacaatggaagctaccacagtccaaagcttgctgactcagaccaaggcctgctttcttctttatgggatgtctgttcatatgctctagcctgcattttaccctttgcccaagatagtagwcataaaacaacttccaaaaaccaaaaaaattaaagctaagtaaccaaaacaaacaaacgaaaacaaagattgcatataaccacaaaggtagaagaacaacgtagaacaattcttgttttcgg

SEQ ID NO: 524377 - DNA, 541 bp, Homo sapiens
caatttacattcaggaagcacaaaagttcacttgtacatttcctaacaatgctaaggagttatcaaacacatgtttcgaagactctgacwttataaggtatgttttcgtggcagttaatatattccaaagaggtattgttcaaagcttgactattttatgagtcactggtcacctatgtgaatattacctgatggggaacaatgaaatgcacgttaactaaatagtgtggtaaacagcagtgccaaagaatcacccattaagtcctcacttcttgctatgaagatttaagtttatgtcattctcactttctccgtacctcttaccaaactgcagagacttcatccacaagggagaatgtttatcttagtaaaaggacacaaatgagaaaatgatgcagctccctccgtaattacttagcatactaaccagcatggcagggaggcagaatggcagggaaacgtacttaagttgattcaagaaataggggatgcgtgtgggcggactgaaaagggtaaacaccaataatataatattttttgc

SEQ ID NO: 524378 - DNA, 541 bp, Homo sapiens
caatttacattcaggaagcacaaaagttcacttgtacatttcctaacaatgctaaggagttatcaaacacatgtttcgaagactctgactttataaggtatgttttcgtggcagttaatatattccaaagaggtattgttcaaagcttgactattttatgagtcactggtcacctatgtgaatattacctgatggggaacaatgaaatgcaygttaactaaatagtgtggtaaacagcagtgccaaagaatcacccattaagtcctcacttcttgctatgaagatttaagtttatgtcattctcactttctccgtacctcttaccaaactgcagagacttcatccacaagggagaatgtttatcttagtaaaaggacacaaatgagaaaatgatgcagctccctccgtaattacttagcatactaaccagcatggcagggaggcagaatggcagggaaacgtacttaagttgattcaagaaataggggatgcgtgtgggcggactgaaaagggtaaacaccaataatataatattttttgc

SEQ ID NO: 524379 - DNA, 619 bp, Homo sapiens
actccttttcttcctgtggagtgttccattgagtgtctatgccacaaattatgcatttagcctgctgttgatggacttcaccttgtttccaawacgcggctatgatgacagacctgctgtggacattgttgtctgtctttgggttgacctaacaccctttcccataggtctttacctaggactggagctgacagcctgtctttgcaggttggtaattaaactctgcaggattttggggctccattagccatttctgtcagtgggtggagggagaatccacgttgggtgcatatttgaatgagctgttcctcccagactcctgactggtgaaggtcaggggaggggactccgggcagctccagatcccacttgatcgttcagcatctgaggaagacgcccagagaaggagcctctcccagagctgcagtgagcccttttcagcaggggcaactgggccctctccttagccaggcgtggctgaggtcttatgggaacctgcagtgcctcactgagaggagaaggtgccctagatgttctcttcctaaaaggatgtggtaaatagaacaacttggggactgagcagtcagcgggactggcgtcttgaccaataagtagaaaa

SEQ ID NO: 524380 - DNA, 619 bp, Homo sapiens
actccttttcttcctgtggagtgttccattgagtgtctatgccacaaattatgcatttagcctgctgttgatggacttcaccttgtttccaaaacgcggctatgatgacagacctgctgtggacattgttgtctgtctttgggttgacctaacaccctttcccataggtctttacctaggactggagctgacagcctgtctttgcaggttggtaattaaactctgcaggattttggggctccattagccatttctgtcagtgggtggagggagaatccacgttgggtgcatatttgaatgagctgttcctcccagactcctgactggtgaaggtcaggggaggggactccgggcagctccagatcccacttgatcgttcagcrtctgaggaagacgcccagagaaggagcctctcccagagctgcagtgagcccttttcagcaggggcaactgggccctctccttagccaggcgtggctgaggtcttatgggaacctgcagtgcctcactgagaggagaaggtgccctagatgttctcttcctaaaaggatgtggtaaatagaacaacttggggactgagcagtcagcgggactggcgtcttgaccaataagtagaaaa

SEQ ID NO: 524381 - DNA, 619 bp, Homo sapiens
actccttttcttcctgtggagtgttccattgagtgtctatgccacaaattatgcatttagcctgctgttgatggacttcaccttgtttccaaaacgcggctatgatgacagacctgctgtggacattgttgtctgtctttgggttgacctaacaccctttcccataggtctttacctaggactggagctgacagcctgtctttgcaggttggtaattaaactctgcaggattttggggctccattagccatttctgtcagtgggtggagggagaatccacgttgggtgcatatttgaatgagctgttcctcccagactcctgactggtgaaggtcaggggaggggactccgggcagctccagatcccacttgatcgttcagcatctgaggaagacgcccagagaaggagcctctcccagagctgcagtgagcccttttcagcaggggcaactgggycctctccttagccaggcgtggctgaggtcttatgggaacctgcagtgcctcactgagaggagaaggtgccctagatgttctcttcctaaaaggatgtggtaaatagaacaacttggggactgagcagtcagcgggactggcgtcttgaccaataagtagaaaa

SEQ ID NO: 524382 - DNA, 576 bp, Homo sapiens
tcaggacctctataccaaactcttaaatatcatcacaaatcaatggccatgtgtttccataatatacttttggggagcatactgtgtaccctgggtaagtgasagaataaacgtttctgaatgtgagcttcctaaaatggacagcgttgtgaagatcaggtaaggctatatgtgccaaatgttgggcacagagcctggcatgttacactctcaaaagttgtacttatgtctgagaaaatgctacagagaggcccccctgaaggcagaccggccaggtttggtgcataccatttactgattaaaaataatagttaccaatctttttctcattgtaaaagcaatatttggtcaggtatgtatcagccagacctctcggagaaacagaaccagaaggacatgtatacaggaagaactcactcatgcaattatggaggctctgaagtaccatgacctgctgctgtcttcaagctggagactcaggaaagctggggttgtgtttccatcctaagtccaaaggcctgagaaccagggtagtggcagtgtaaatcccagtccaagggcatgaggagacggatg

SEQ ID NO: 524383 - DNA, 597 bp, Homo sapiens
tgggagcccagcgggctctaggagggccccctagccaccccatgcgtggccttgagcaagtggcttaatctctctgggcctcaggcacagatcgtccctgctccctgcaaagccctgcgcactccctgcaaaccttggcaggcagcgggtggcagaaacctccagtgtctggcccatccacggagctggattccagtctcgattctgccacttcctggctgtgtaggaatttgacctctaggagctccagtttcctcatctagaaaactggaataacgaaatctggcgtggagactcgaggtgagaattcagtctgctccctggttgggacaccacagggatgagggaccccctgaacggtgaccttctgggccccctgcctggtatcatccagagatgtgtggggagctcactacctctgtcctccttctgggttgaaccctagcctcacaggcactggaggacgcatctagtctatcargctatttactgagtgcctcaaaacccagatagaggctccagaagaaaagcaagcatgagagagtcagggaggccagggtgggggtcagacctcgatttaggttgtggtccaggaag

SEQ ID NO: 524384 - DNA, 639 bp, Homo sapiens
acacttcttgggcacctactatgtacacgaccatgagggcactttgcctgcaatcctatcatgtgcctttcccaatataatagtcagtgggaggaacgtgacaaacctattccacagaataccctcagataaaatgagaacttttccaagatcaactagttttcaagaagcgggaagatttggatccagcagggcttcagaacccagaaccaccaccaccacccaccaccacattacgctagaggatccatgggcactgtgtaaagtgaaaatgcctgtgcacacaaggggaccctcaccactaagcctcctgagcagcttccctgggccaggtttctgcttccaatcctagatctccacaggccatgcccggggctgcaccttgttcctgccgactcacccaccccaacgatgggaaatccaattgccggtcaactccctgagccggatccctggttcctggcgacattccgtggagcctgcaggtccccttcacasctgctactgattacagctacttaactggcacattaaccacagagtcagaaattaggagctgctctcagctctccgcttaacatcaccgcatcacttgacctgctgtttcttcagcctccccttggcctcctctacctccag

SEQ ID NO: 524385 - DNA, 601 bp, Homo sapiens
tgctactgattacagctacttaactggcacattaaccacagagtcagaaattaggagctgctctcagctctccgcttaacatcaccgcatcacttgacctgctgtttcttcagcctccccttggcctcctctacctccagccatgcgggctgctggaatgccccactcaatcacacctggtgtcacaggcccttgctccagsctcgatgttcccaaacaacagccctctgtcactcgtcaataccagcaagtttgccatacattggcaattgtcgtctgggtttaaggtatcatccagtgctcccaatctaagtctctggggaaactgcacactccttgccatgaatcacaggggtgtgtttcactgggtggccaaggatgccctgggctttcctctcgccactgccctcaggcacggccacccagccttgctgaacttccttctacactggatcaagtggtgatctgcttcccttcccttcctttgcctgtgccattccctctgcctggagcaccattctttccctcctgcttttccacctggcccaccctaccctccctcaccctccctgttaccaccagtgggtttagcactcatgtc

SEQ ID NO: 524386 - DNA, 601 bp, Homo sapiens
tgctactgattacagctacttaactggcacattaaccacagagtcagaaattaggagctgctctcagctctccgcttaacatcaccgcatcacttgacctgctgtttcttcagcctccccttggcctcctctacctccagccatgcgggctgctggaatgccccactcaatcacacctggtgtcacaggcccttgctccaggctcgatgttcccaaacaacagccctctgtcactcgtcaataccagcaagtttgccatacattggcaattgtcgtctgggtttaaggtatcatccagtgctcccaatctaagtctctggggaaactgcacactccttgccatgamtcacaggggtgtgtttcactgggtggccaaggatgccctgggctttcctctcgccactgccctcaggcacggccacccagccttgctgaacttccttctacactggatcaagtggtgatctgcttcccttcccttcctttgcctgtgccattccctctgcctggagcaccattctttccctcctgcttttccacctggcccaccctaccctccctcaccctccctgttaccaccagtgggtttagcactcatgtc

SEQ ID NO: 524387 - DNA, 614 bp, Homo sapiens
gcttgaggttctcatacacgtttgtccattcagcatatttactagccagtgactggtagccaggcatgcaccaggtgtctgcgtgtgaagttgaagaaggaggagtccctggccctcagctcaaggtcacgatgtggtctgactgatgcaataacaggtggatatgcacagtaatgggagagggaaggggaggagatcgaccagcccttagggagaaggtggaccagagagkcttcccagacaaaaagacctgggctggatcccagcaaataagtatgaacgttcttggcaggcaaagtaagtgtattcatctgttttcacactgctgtaaagaacttcctgagactgggtaatttataaaggaaagaagtttaatcgactcacagttcagcatgcctggggaggcctcaggaaacttagaatcatggcagaaggccaaggggaagcaaggcaccttcttcacaaagcatcaggaagaagtgttgagcgaagtgggaagagcccgttataaaaccatcagatctcgtgagaactcactcaccatcacgagaacagcccaggggaaactgtcgccacgattcaactacccccacctggtctctcccttgacatgt

SEQ ID NO: 524388 - DNA, 610 bp, Homo sapiens
cccctgctgtgtggagagggtcaggaatgggcccagatccaccctcccacctggcgactgcatttattgagtgcctgctctagtcgccacccaacaagtggctttctttcacttccatgcatgtgtcccacatgatcctgcctcccagtctttatgcccrcaggccttccctcatctacttagcagacatgcattgagcccctactgtgttaggcactgggaagagagcaggggacaaggtgaacacagtctctgctctgttaccacgtggaggaaacacaatacacagcaaagtgaaccagtcgctaaataagtcaagattgcatggggctgcagaggaaacgaactgagcactgtgcatcacgtgggggcagtcaggagggctccctggaggaagaggcacctgagctgaatgcctagagatgagaaggcaagggtctggaggaggagcatggactagggttaataaagcaagagaagcatttgcacagttcctgccatacagtagggctccctcaatgtcattcatgctgtctgcctagtataacaccatataaccacaccatccttcagctaccgagcactttataatttatgtagtgcagagcac

SEQ ID NO: 524389 - DNA, 640 bp, Homo sapiens
catattcatgtttaatttcaaagagctaccagctttggttcgacaacctgcacttcctcacagggctctttgagagtcatcagggtggagattcagttctcccaccccatcaccatcactggctaacgtaagaagaaatctagggaccagagcaatgrtcttgcagggaattcactgttccttttcctcgcccctctgcaggaagaaaatgggtgattcctcactatggtagatcaccaccaaagaagactgccaacaattcctcccttccctgtatacatacacttcatcaagatgtgcagtctccttcaccccctttgaatctaggctgaccttgttattgctttgacaatagaatgtgatggaagaaatgttctaggacatctgatcccaggctttaaaagtcctggcagcttctgttttcttgctgggatgaagtcggctgccatgtaagaagccaaactaccctgagacctccatgctatgaggaaagctaagttagcaacatagtggaaccatgtagctatccaagttggtcctcactgtttaagccatcccagacatggtgaagcatatactagccatctcccctgtgccctgtggaatgggatacatcaaaagggcataaaggggcctgcca

SEQ ID NO: 524390 - DNA, 526 bp, Homo sapiens
tctttcagacaagatcagaacaacccttcagctacaaagcaaacaaattaactcagagtggagagtgagtaaaatttaatgacatttacgcaggatgataaatttgccccagtgtgtgcaataaatagaaataatgtagggagaaatgcccatatgttagagaaacttcaggaaaaataaacacttttttatgtgcacatggttatttataaatagtttcaggttggttgtytatgttgtccccttgtaaaattgttgagattcgggcccataacactttatgccttcctgaagcaatatccaccttcaactctgcaaaatctatttgtgcatgggtctcacctgcccttctaggacaataaattcacccaggaaaaattcatgtcttcttcctttctgaatcctcagcgttgcacatagtaggtccttataaaggtaactgctgaagggacagaggaaagaacatctaacagattatctacaaacctgagggtctgtgtttgtgtgtgtttgaaacaatactgtg

SEQ ID NO: 524391 - DNA, 530 bp, Homo sapiens
tcccactgttctgctggctttgtctcctctcccagcagccacccccacaacagaggtttgggataaattagggatatcaaagaatggtgccctcatcagactcagtccttcttggtttcgcttcctcaccatggccctgcccttggtccctcatccaactgagagccactgggacctgggggcctractgtgctgcgctctccattgtgggaaaacatggggcctcctactatttctgcatccctggacttcactcctggcaggctcaagagtgactcattcttcctccatttactgtagacctgctctgtgccaggtagtgtgtgaggaacatgcctccagaagtttaagaccaaggagaggagcagaagagagtacagagagctataaagcagtggatatgtggtgtaaggaagacagcaactgcaggaagaccctccaataaggaacacctgaaccgggggccacccgtcttcatccctgaactcaaatactggttggtcttatttggagcagccctagttgttgag

SEQ ID NO: 524392 - DNA, 599 bp, Homo sapiens
catggccccaagggatggggaaagatttggttcataaccaacaatctaatttctctcactgggaagcagatcaagtactgcagcaggacagaagtatgcagatgtgggttttggctggtggcagtggtactttttcccaatagccaaaccactttgtagtaaactttcaaatcaaggcacatcttttggcaatggtcagtgcctaactagtttcagggtctctccaagttcatttcagtcgctctcctctttagccaaagagctctccaggcccacttgtcccttcccttggcctcaggcctacctccaagtccaggacctcaggtgcacttggccctctacattcactggctcccagccctcgtyatgggcactgtgagcccgaaccatctcaccgtgctctggaaccctaagcccactggctctcatgtcagggtcatccagattcatacaccaaaacaaagacttgagtgcaattttaactgggggctagaggataatgatagcagaaaacatcatgagagtattggaaattgaaaaggaaagagaaggaggccaacaaagaggtgggttatcaagcaagttaccactgcaggcag

SEQ ID NO: 524393 - DNA, 602 bp, Homo sapiens
gtttcttaatcttagctgcagaaaagaatcacctggagagattttttttaaaaaaaacctggatgtccaagtcacactcagaacaattaaatcaaatgtatgaggatgggatccaggtatcagtatttttttaaaactcccatgtgatttcgatgtacagacaaggttaggaaccctcagtgaggattatatgcccacaaagaaaaataccatgctagctgaggactgctactacctctataagagaatacacactaaacaacccataaaaagcaaagcaaaccaaagtactgcaactataaatctaaaagaagaatcagtagaaatrccaagtatgaaaaaaatgtaataactgaaataaagaactcaataatgggttgaacagcagaatgaaaacaatggtgtaatggattaatgtgctccaaggtcaggatgaagaacaagtcaaaacacatggagagtcgggagcaatgtaaaaatacacataaaaaggtaagaaatatagcacatagaggtgtagaatgagttctagaaagagagagaaaaataaagaaatgtgattgttaaaaaataatgatcaagaagttcccagaattaaagat

SEQ ID NO: 524394 - DNA, 570 bp, Homo sapiens
tatcaacaaaacaactaaggtcagggagcatttcttgtgggaagcttgctactaccagtggcttcttccagaaagactgggctctatatatatcttcaaaaatattttaagccttctttcaaaaaatcaaaactgtgggcaggccagagaaaaggcataatgtcttcttgtttctaagaagtcatcatgttctcatattgaccagagagctgggaaagaggaagtatgtttctaggaaactccttcaaacaacaaaataatgaactgaataaaggactatagtgtcccaggcctgagcagtggggaggcaccgttcctgccctggaaagtggctgtcagtcaggacagaaaactcttgtcaaataaaaagggggtatatgtgttcccctcattgacttcccaaggcacaggaaccttgttttccatatyttcaggatacttcacaatgcctatgcagtctgggccatttgccattagctgacatattcagggctgaatgacctcctaagaaagatgtatatctgaggccacctgatacgagcccctccaagggcattcctgagggggggt

SEQ ID NO: 524395 - DNA, 589 bp, Homo sapiens
tcctgaaacttgagggttctactggattccatctttttatttattccactcttttagtcagaggttgtgattcatttaaaatttctgttctgtgagaatcttgttccactccagtccacatggcactatttcctttgatgacaaagaaagagagaaacataagcttacttaaaggtttctgtaaaatgtatttccaatatgttagctatctctattttcaattatrcagattgtaaagcccctacagcctccaacatattctgagtaccaaagcctaggaatagagtccatcctgtgttcctgctaagattctgtgtgtactctctcatctcttcctttgccttaataaaataattgtaatgctcttggaattttgatggggaagtaatgcctagattgattttgaactgaaaatgtctctcaaattgcatgaactgcctcagctacaaactccaagattttaaaaaatgaccataacatttagtctttattctctttcttcaaaatttagcccccaaatttcaagaacatatttggatatattcaacatattttatagtctatgattttgaatattacttttgttcaa

SEQ ID NO: 524396 - DNA, 589 bp, Homo sapiens
tcctgaaacttgagggttctactggattccatctttttatttattccactcttttagtcagaggttgtgattcatttaaaatttctgttctgtgagaatcttgttccactccagtccacatggcactatttcctttgatgacaaagaaagagagaaacataagcttacttaaaggtttctgtaaaatgtatttccaatatgttagctatctctattttcaattatacagattgtaaagcccctacagcctccarcatattctgagtaccaaagcctaggaatagagtccatcctgtgttcctgctaagattctgtgtgtactctctcatctcttcctttgccttaataaaataattgtaatgctcttggaattttgatggggaagtaatgcctagattgattttgaactgaaaatgtctctcaaattgcatgaactgcctcagctacaaactccaagattttaaaaaatgaccataacatttagtctttattctctttcttcaaaatttagcccccaaatttcaagaacatatttggatatattcaacatattttatagtctatgattttgaatattacttttgttcaa

SEQ ID NO: 524397 - DNA, 589 bp, Homo sapiens
tcctgaaacttgagggttctactggattccatctttttatttattccactcttttagtcagaggttgtgattcatttaaaatttctgttctgtgagaatcttgttccactccagtccacatggcactatttcctttgatgacaaagaaagagagaaacataagcttacttaaaggtttctgtaaaatgtatttccaatatgttagctatctctattttcaattatacagattgtaaagcccctacagcctccaacatattctgagtaccaaagcctaggaatagagtccatcctgtgttcctgctaagattctgtgtgtactctctcatctcttcctttgccttaataaaataattgtaatgctcttggaattttgatggggaagtaatgcctagattgattttgaactgaaaatgtctctcaaattgcatgaastgcctcagctacaaactccaagattttaaaaaatgaccataacatttagtctttattctctttcttcaaaatttagcccccaaatttcaagaacatatttggatatattcaacatattttatagtctatgattttgaatattacttttgttcaa

SEQ ID NO: 524398 - DNA, 647 bp, Homo sapiens
taggatcaagggcattgggatacagaagtctgctagtgactaatcagatcctctgttctctctgtaggggttctggaagcaggacagactccactggactgagtaaatccctggtgctcagtcataattcagcacaaagagaaatactagatcatcattagtctgggtaggttagggctaaagattaaatgctaaagagacatagcctcacttgtgtctccaggtcaagtaatgggccttaccatcatcatcactattataattttttttttaatctctgcagatcaaggctcaggagcagccctgggaggcccacactttctcaaagttgaaattcacttacttactcattcagcaaatatttctataacgtctgctatgtgtttggcaccagagttacaatattagaagagaaaaaaacaaaaagtccttgatctcaagaagtttatatgctggtagggggagacaataatggtagatgccaggagggagtcgtgtgtgtgtgtgtgtgtgtgtgtgtgtgygcgcgcgcgcgcgtgtgtgtgagatactaggtggaggaataaagcagagtaaaatatcagagagtgagagtggaaagtgcatcttacatgaatggccaaggaatgtgtttctgagcagggatc

SEQ ID NO: 524399 - DNA, 644 bp, Homo sapiens
aggggttctggtgatctggagagagatgtgttctcccttcaaggggcttgaagtctttagctggaaaattaaatgcaagtatttggacagtaaatgaatgaaggaaagaaagaatgaatgaatcctcgagcctggagaacctcagttttctcatctgaaaaatagagatcctctaaaaaaagacttattgagtccttacttggtgataagcatcasgtttggtacctgtttctttaggttgctgtgaggaccaagtgagatgatgcatgaaaaatgttcagtgcagtttctgatatattgtaagtgttcagtaaatgtttagcattatgaatgtttattattattaccattgttattatcagcatatatttaaagctttattgttttcaaagttatttttaaatgccacctctcttaatagtcataatgacttagtgagtcgttactgtttttctgccgtttcacagatgaagaaactgagactcagggaagagatgtatcccatcaatgccggtaaacggcaggcccaacactgaatctcgttaaatccaactgtttccacctcctccatattgtcttctaaaaagagaagaactggcaggagaaatgccacacggtgggaaatccacgatgggtatggttgg

SEQ ID NO: 524400 - DNA, 545 bp, Homo sapiens
atctaattcctttgtgttttatttctgtcattcaacattgtgattttaaggttgacacataatcctctgtgtagcctcaatttgttccttttcatttgtatataggattttgtttgcttgtttgtttgtttgtttgtggcagagtctcactgtgtctccaatgccggagtgcagtggtgcgatctcagctcaccgcaacctccgcctcccaggttcaagcaattctcccgcctcagcctcctgagtagctggaactacaggcgcccaccatcacgccacactaatttttttgtatttttagtagagacaagttttygccatgttggccaggctggtctcaaactcctgacctcaggtgatccacctgcctcggcctcctaccctctcccccagattaactttctgagtatctgcgacataagttgaaatatagatggccagctttagctctaactcacccgaaagtgtaagcactgaaatgagacaaactaaatattgttgaatcctaattcctcatttcagggacagagtatctgattgtctta

SEQ ID NO: 524401 - DNA, 553 bp, Homo sapiens
aacaggatgtatatgtagtagatggatataaggggcgatttattatagtaattggctcatgagattatggagactgagaagtcctataatctgctgtctgtaaactgtagaaccaggaaaactggtggtgtaattccatctgaatccgaaggcctgcgaactgggctagccaatggtgtaactgcctgttgagtctgcaggcccaagaactataataggagctctgatgtttgagggcacgaggagatggatgtccaggctgaaggagagrgtatttgtccttcctccacctttccattctgtgtgagccctccgtggattggaggatgctgcccacagccatcatcacttagtgagtgatctttactcagtctattgattcaagtgctaatttcttctggaagcatcatcacaaacaacccagaaataatgttttaccagctctctggacatcccttagcccagtcaaggtgacacacaaaattaatcatcatacccagtaagctattggtcatttccatttacaaatgaagagatgtagataagaatttaa

SEQ ID NO: 524402 - DNA, 597 bp, Homo sapiens
agtagtttgaggtcaaggttgctgcttggccaactctcaccttaagtcctattctagtaattaagctcttgctttgtttcttgtactccaattctaatacagaatcactaytttggatcctagaacaataggctcttctgtgctctatttctcttaccttaaagtcttgcttcatgtggctgtgtccccactgcacagtctcagactttcccagctctggctgcaattgcccagcacctaccacagtaccctgagcaggggaggccttcaatggctgccaaataactccaggtattgccttggcttgttgcatagcactaaatcagcacggtgctacctttctccttctttggacttcctgctaagtgcatgttagccctgtggagtctctcagttccatctgcaacctacctggagttaaaccacccccagctttgccactgtggaagggagttcagggaggggtctggaacccatcataatggagactcttaagtgagagggtgcaagcaacagggtgacaggagagcacagagcatctgagatggaaagtcagggcacagtgaaggaagaggccggtgcccaagataatcttca

SEQ ID NO: 524403 - DNA, 492 bp, Homo sapiens
cacactgaagatgagggagaaccagagaagaggattgtctctattttgttttttatcccttcttttaagctttttattcatcaggaaagtttttactcagtgccaaatacacactaatcaaactgctttcctgatttcacactgtgagtataacactggatagaaattatggggggcagataagataaataaatatgattccttcctgtctggaattcaaccacacagaaagaaaggaaattactaagagtcaaataatccaagtaaggcattacatgagttcggtgcaggaaagagaaaccatrctgtttagtttggggaaagattgctttagtaaactaggtgcagaaaaaattgtggaagggctgaagagtctgctctccactgacccttggagaccacctcctagaacatgatagaactgaccgcaagggaaactagtacctttgaagccaccaccagattggtcaagttcaagagctcattctgaca

SEQ ID NO: 524404 - DNA, 538 bp, Homo sapiens
agctgccaacactgtgtggccgtggaaattgccttggggcactcatcagattatagaatgggccctggaacaccgagaccactcatgcctcaccaccctcccacccctcgactccccattcacatacacacaactcgcccttagcactcaggagaagggatgtggaatattgctgcagaaatattttgtatctctacaactccatttttgccacttgagaacagccaagagtaaaggaagataatctccacttcagtttaaccttaaaaatccagcacwacttcagctaattctcagaacctagttcctggccaggatcaaggctgcaacaggacctgagacatatagttctcagctttctagcctccaagtttcagtgaagtaccctagaagcggttttgaactggggatgattttgctaacacacctcgggtctgtgctactggcatctggcgagtggaggccaggaatgctgctaaacatcctacaacacacaagacagcccccacaataaaagattatctggcccaaaatgtca

SEQ ID NO: 524405 - DNA, 538 bp, Homo sapiens
agctgccaacactgtgtggccgtggaaattgccttggggcactcatcagattatagaatgggccctggaacaccgagaccactcatgcctcaccaccctcccacccctcgactccccattcacatacacacaactcgcccttagcactcaggagaagggatgtggaatattgctgcagaaatattttgtatctctacaactccatttttgccacttgagaacagccaagagtaaaggaagataatctccacttcagtttaaccttaaaaatccagcactacttcagctaattctcagaacctagttcctggccaggatcaaggctgcaacaggacctgagacatatagttctcagctttctagcctccaagtttcagtgaagtaccctagaagcggttttgaactggggatgattttkctaacacacctcgggtctgtgctactggcatctggcgagtggaggccaggaatgctgctaaacatcctacaacacacaagacagcccccacaataaaagattatctggcccaaaatgtca

SEQ ID NO: 524406 - DNA, 577 bp, Homo sapiens
cctgtccagcatcctcaccttagagatacctgaatgcctcaacaccaagatcttagtttccaccctaccctagccgctggttccctccaatgtttgctgtgtgtctattatgtgccagggactgcactcagccctagagatgtaaagaaggcgagctgcataatccctgccctcatgggacttaagagtctcctgagacaaaccaacagcacaacgctcacccatcaccttggttataccttggcccttagagcctgaatttcttctgcaaagaactaggacaacccaccttgtrgctccaacttgctctttcgccacttctgtcatttccttacccctggaatatctgcttttatttttttaaaaaactcttatgaagacgttcagttctttatattctctcaggctgtcagcatcgcttgggctttccttgcccagcttgggacccttggacagctctttaaatgttactaaatccggaactcctctaattctgaccctaacccattggattccttctcctcccccaggctgctggacactccggaaatggcaacttgcttcattacaaatgaat

SEQ ID NO: 524407 - DNA, 457 bp, Homo sapiens
gaactgatggctgctggcccgggctgagaagaaagctgccagcaaaggggaggtccccactggagaccacctgtccttggtgcaggggttgacactgttgctaccttgtgggagaacaaggtggctcaactggtggtgactgcgcacgacatggatcctttccagcaggctgtcttcccatctgccctgtatcatgaaagggggttccctactacatcatcaaaggaacggccagactgggacatctagtccacagggagacctgcaccagtgttgcctgcacacaggttaactkggaagacaaatgagctctggctaagctggaggaagctaccaggaccagttacaataatgggtatgctaagatcactgtcaccggggaggcaatgtctggggtcataaatctgaggcttgcattgccaagtggcaaaaggcagaggtcaaagaacttgccact

SEQ ID NO: 524408 - DNA, 628 bp, Homo sapiens
tgggcttttttttttttttttttctgttttacatgtacattttcatttgaaggaatggttttgctgctaaaaataacagtgtgaaaaacatagcctccaagggggaccatttaaagattttaagcagtgatgtgacataattaggtttttgtttcaaaaggtcgctttgacacctgaacacatcgtggaggctggactggagggaagtgagactggagagacccagagagaaggcagagcaagaactggctactctgggctccatcccagggtcagcatccactttagatggcgccggggttcwcggcttgccagtctccacctagctgcttctcccattcatatttcctgcctggcccatgaccacctttgcctttgcaacccctgcctttgactgtttttcgtcttgtatatccagtcggccaccaaattctgttgtttcttccctcagattacctcagatttgttcctctctccattactatcccatcatcctagattagacacttcaggcttgggtttctccaggaacctcttcacggttcttcttgctttcagtctgtctgcccaccaatcttacatcgccactgcttagcttctcttggttcttcatgacatattgcagtac

SEQ ID NO: 524409 - DNA, 596 bp, Homo sapiens
ggtgttggggtggtgaggaaggtagagggttgagcagaggccagatcacgaagggccttgacatttgaactgtatcctgagcgtgatagggagccctgaaaggttgtaaaaaagaagtgacttacctggtccgggccaccctcgtgaactctagtcccacacttctgccagaccctgtgtctgtgttatttactacgtattcctagcctccagtgcagagtctggcacatgatgccttttcacgtcctttccttgtccctttcttcctatcagccactctgtcttgtccccggcctccatctccttgcctttcctgttttggatcgtgtgttcattctaaggtgcccagttgccagtcygctctggggggctggcctttgggttgtggataccatttggcacccaaatggctcatgaggggaaagtactcccaaatgtctagagtgcaggttctcatccttcctcttcctgtgtctaagatttgaaaaagtaggtaaaataatgaaagcaactacgaggaaagtgaagaagtcgactgtacaggagaaaggattctgttgaatccaccgactaggaccacacgtgactcaatatct

SEQ ID NO: 524410 - DNA, 596 bp, Homo sapiens
ggtgttggggtggtgaggaaggtagagggttgagcagaggccagatcacgaagggccttgacatttgaactgtatcctgagcgtgatagggagccctgaaaggttgtaaaaaagaagtgacttacctggtccgggccaccctcgtgaactctagtcccacacttctgccagaccctgtgtctgtgttatttactacgtattcctagcctccagtgcagagtctggcacatgatgccttttcacgtcctttccttgtccctttcttcctatcagccactctgtcttgtccccggcctccatctccttgcctttcctgttttggatcgtgtgttcattctaaggtgcccagttgccagtctgctctggggggctggcctttgggttgtggataccatttggcacccaaatggctcatgaggggaaagtactcccaaatgtctagagtgcaggttctcatccttcctcttcctgtgtctaagatttgaaaaagtaggtaaaataatgaaagcaactacgaggaaagtgaagargtcgactgtacaggagaaaggattctgttgaatccaccgactaggaccacacgtgactcaatatct

SEQ ID NO: 524411 - DNA, 550 bp, Homo sapiens
cagcatccacctctctgactgcctctttccactgacccaccagataagcagggtggctggaacagggctgctagcaccttcctggccactaggggagctctgccccctctaacaataaattctcacacctgggtcaagctcttcacttttagygctaccctaggcaggagtgtcccaacccaatcaagagcggtgcctacccgaggcagcctcaagttgggatttttctgcttgctaatggcttcaatcagttttgtggccatagttctcttaggctcagacacttacaggcatattatttttagcaaagcttcttttgaaaatttgaatttggtcaaggactggatttgttgacataccctgagtagctatgaagaacagaatgtcctggtagccacaaggaactgtggtagctgctgtcccagcagcagcagaacgacactttgtgaggcttaggtgctggccagggaggtgaggataacaggagtatgacttctcaggcacaacttccccattggataactttagggtccgggtgcaaggaggaagg

SEQ ID NO: 524412 - DNA, 609 bp, Homo sapiens
tccacactctgtccaccctgagggctgaggggacctttactcaaatcatgggccaagaaactggcctaaagtatggatttgtgtctgcacagtcaccatgttctctgtatgggggcaggaaatctatgctttcccccacacctctgcacacagtgtcttcatcttcaccacattcttccatgatatgagagctagctagctactctgagctccccttctccgtcgcactggggacctgcacatcgttagcacgttcgttcctgtggtctgaaatggcgttcccattcagtcaccatgccaccttgatttctcatgagaactttggaaagatagaggggatctctctattgggggattataggacaatctgactctcagagtcctgagaagctttacagactcaactatgtcctgaggcattgtcggaagtggcagtgtcatatcacatcccagctcaaaggagtgcattttgatgaagattaatatagtttaaaacccctccattcccattgcagaatygccacaatctctttcctgtgttttcctcactcctccataatcagaaaagttcattataagcaagcgtccagaaactataaggaaaggtag

SEQ ID NO: 524413 - DNA, 577 bp, Homo sapiens
gttcattataagcaagcgtccagaaactataaggaaaggtagagaagtgagcctgctaatgttacttaacccccaagtagactttttacccctgaagtgtcacatctgggaatcttttcaactcatctctaggctcttggcaccatgtgacatgcatgtgagcactgcaaaaactcttagatggtttcagactgctcaggccttgtcagcaaggatatcacagaaagcaagacaggccttcctggcatcctgcattactaggtcagacatatgtctaaattagaaaaatcatagttctcatctgggagaaagcaggggcaaatgtgctgaaactgaggggcctgggtcctcctggagattcatccagagatgaggaagaagagkctgcaaccatgctgcagagagagatcttggccctttaagctgggtgagaagcatataccccagttttgcttgattggcccctttttaggcctgcccccacagtgcctcattctatttttatgttagacactgtttctctttcgtattgccagatgccctttctactgtggctcaccaaatcctccagcaacag

SEQ ID NO: 524414 - DNA, 550 bp, Homo sapiens
cagcatccacctctctgactgcctctttccactgacccaccagataagcagggtggctggaacagggctgctagcaccttcctggccactaggggagctctgccccctctaacaataaattctcacacctgggtcaagctcttcacttttagcgctaccctaggcaggagtgtcccaacccaatcaagagcggtgcctacccgaggcagcctcaagttgggatttttctgcttgctaatggcttcaatcagttttgtggccatagttctcttaggctcagacacttacaggcatattatttttagcaaagcttcttttgaaaatttgaatttggtcaaggactggatttgttgacataccctgagtagctatgaagaacagaatgtcctggtagccacaaggaactgtggtagctgctgtcccagcagcagmagaacgacactttgtgaggcttaggtgctggccagggaggtgaggataacaggagtatgacttctcaggcacaacttccccattggataactttagggtccgggtgcaaggaggaagg

SEQ ID NO: 524415 - DNA, 593 bp, Homo sapiens
aagacagagtgagagagggaggccagggaacaggctggacagctgtcaggaactccttctccccatctctaccccatctcttttctgtccttctctgtaccccaaattggctctacccatggcagctcctgcctctccagggagctgtgtgtacaatgctctcgacaagcaggagtgcttgcttagaggggagagggagggtgctggagccagaaagggcaaacctcctaaagctggaggtaaaattggagcttgcctgagaaggctggaagcgagagaagtgggaaagtgaaagggttatcacagaataaaaaggaaaggcaactttagccacatcatcattaacaatagaaatagccacagactcacaaatatctggatgtttgcttttgtcaaatctagcttaaaatagtgttttctattagtgctgtcatgcagacctagatgttcagtccaacagctctctagttaataagccagtctctgcactagaactctactgcgttacactcggggacggaattgtctatawgggtgccactcagagtgtggcatgaggaccagcagcattggcagtaccagagaactagcta

SEQ ID NO: 524416 - DNA, 512 bp, Homo sapiens
ctccctttcacaggccatgcagtttctttttttttttttttggggggtgcggtggcgcaatctcggctcactgcaagctccgcctcccgggttcacaccattatcctgcctcagcctcccgagtagctgggactacaggtgcctgccacaacgcccagctaatttttttttttgtatttttagtagatatggggtttcacgtgttagccaggatggtctcgatctcctgatctcrtgatccgcctgccttggcctcccaaagtgttgggattacaggcgtgagctaccgcgcctcgcaggccatgcagtttctagcagaggcaggtcctggggaagggagggcaatggaagatacagatgtgggggcctcacctggtagtcatggggcaagatgggtgtgatctgacggcaggtgagggtgacattctggccaggaagctgatagacagtccaggctcggggatagagggcatggtagaaagcaaagtacccacacaggccccagttccagc

SEQ ID NO: 524417 - DNA, 637 bp, Homo sapiens
aaggcagactcccagcaagaagcccaagaggcaggcctataaggaatacccatggctgtagcaaggggctccctgccaaggccagcagagagctgggggcaatgcaggggcagtgtgagggatgtctactcagcccctgggcttgcagtaggaggcaaaaccatggaggttttggaaaaaatccataaaaactggtcaaacactgagaaaaagggcagagcaaggcgagcgccagtaaaggaaaatgagaggagcagggcagccwcgtgttaagagcatcggctctgagtcagattgtctttgagccacggctcagccactcaacacctgtgtaactgtgggcaacttatttagcctctctaagcttcagtttcctccttcacaagttggagttaacaataacagttcctccttcttaaggctgttctgagataatccactgcttttaatactcagttaatcaacaggaccttcggtgagactcataaaactaaacaggttctcttactccatgctagatccactgaattgggatgtgtagggcgggggcttgggaatcttctcttttttttttaaagcccccgagtgattctgatgataagccaagtttgggaaattgtaaaataacatgcagaaa

SEQ ID NO: 524418 - DNA, 477 bp, Homo sapiens
tttcttagatgcactgacccctaaactcctaacagcttgatagaactccttccccacacctacctactaggaccctgtgatacactgatttttgattacttcatgctacctagacttgactgcctcactcttrggttattaggtacttaatactgctatcttcagctcacatctgtggtagtacccattgcttcagaaaaacccttaatcacagctccctgccctgtgacttttccctgtcttcctgaacacagattgttttcttctcattcactaactatatcctgtcattggcttttactcctgctagcttctgatgcttctaccttaatctttttcttccatagtgtccttgaagtggagattgcattttgaatttgtaacgtcccgagaaccaggattggtactcctaccccctgtggaacagcccgaacctaccacctggacaggacctgagcaagtacctgtagacacctt

SEQ ID NO: 524419 - DNA, 512 bp, Homo sapiens
caggggcactgcgtgcccatgtgtacctgcctcagcaccaccagtgtcacagccctggctgcacccattgccaaggaagaaagaaccatgtggttgaaacacatctactgtacctggccctgtcagacttgggaggacaggttcttgtcttgttgtccttgatgctgtttccatcagcatccacctgttatctctcctcaccctgaggagctcaacccaccctgattttgtcattcwttttttttctcattcgctcattcttttattgagtctgttatgccatgtactgtgctaggcactgaggacacagtattttgtagagataagggaataaacacacatgaatacaatgaagtttgagcaatattaagcttcagaaatattactgagaaaatacagagtcttattggagtacacatatttgggagaacatagtttgtaaaggaagtaggaaggtttgtgctgtgatctaataatgattttgaggtaatcagatgaaaagtcggaagaaa

SEQ ID NO: 524420 - DNA, 639 bp, Homo sapiens
gtaatgtagtgtgtctctgttattacacattatttagaggcaaaccaggctaagagagcttaaggtacctcgctacgtattaggaaaattataaaatttgcatatatgaaattagatagaagaaaattatacaattttcataattatgaaaattgctagataaacatattgtcagtaytaatttttctttaaatagatggactattcacagagagattaaaatgagggagattttaagaaggagttaaagaagagaggttgacagaccctacaaacatattgaaactgactttagagggaactccacaggaaagatatccaaagcgaagtcctccggacaaacctgtttttggctcaagtagtccatgccccgggccacgtcggcagcgaagtgaaggagctgctgggaggacagtgtggacgcggtgctattggcaatggcaaatgctgggtccgtctccagcacacggctcttgcgaaggaagtccagaaggtttccatggggcgcgtactcaatggccaggtacaagtagcctggagggaaggaagagagcatcgactcatcagtggccctgaacagctatgacatttaagagatgtgctgtggaaattgcctataaactccattttgtctaaaaa

SEQ ID NO: 524421 - DNA, 639 bp, Homo sapiens
gtaatgtagtgtgtctctgttattacacattatttagaggcaaaccaggctaagagagcttaaggtacctcgctacgtattaggaaaattataaaatttgcatatatgaaattagatagaagaaaattatacaattttcataattatgaaaattgctagataaacatattgtcagtactaatttttctttaaatagatggactattcacagagagattaaaatgagggagattttaagaaggagttaaagaagagaggttgacagaccctacraacatattgaaactgactttagagggaactccacaggaaagatatccaaagcgaagtcctccggacaaacctgtttttggctcaagtagtccatgccccgggccacgtcggcagcgaagtgaaggagctgctgggaggacagtgtggacgcggtgctattggcaatggcaaatgctgggtccgtctccagcacacggctcttgcgaaggaagtccagaaggtttccatggggcgcgtactcaatggccaggtacaagtagcctggagggaaggaagagagcatcgactcatcagtggccctgaacagctatgacatttaagagatgtgctgtggaaattgcctataaactccattttgtctaaaaa

SEQ ID NO: 524422 - DNA, 571 bp, Homo sapiens
cactagattgctggcattcatggcttttaacattcagaataccaattccctgggtttccaggaaaaatgtaaaggtaggcaattaagaagctgatrgtgggggctcccctactataatagtagtggtagtggagaaaacctctgcatggccaaggatggggcaggtaggagccatgaatacctttgggcagtaatggctgaaccacatcagaggctaaatagtccagcctcggcacctccctccaaaaacaaggcaaaccacagcacagtctataaatgggactagacagacattcagatagaagatgcaactttaaaaaaaataggcaacattcttaagatcattatctttccttatatccatatggaatttgtctgttttataaaaactctggcaggaaagacaggaaaagagcatcttacctcgatgttcacatgctcctaagagattgatgatgtttggatggtgtccaagtttacaaagaacttccagttctcctgcaaagtccctgtgatcatctttggaggcatattctgggaagaaagtcaagggttgtgattcttctttgtt

SEQ ID NO: 524423 - DNA, 579 bp, Homo sapiens
agtgacttacgactggagaagcttctacacattgatgttgtgtgccgtgtctttcactacaaactaaaaactagacccagtgactcttctgtgtattcaccacatggtttgttttggacgtatgtccatgggtagcaaacattcccagaagcttaaaagtagggtaatttttcttgtctgcatatcatttcctttcttccaagaacattcaagatgcaagaaattattttaatcacgtgaatgttctaccaaataaaacagatttgggctctttcctataaccaaaagtaataataagaaggaggattctgaggtggttcatatggattctcagggcacagaatccaaatctatggggttgcatttacgctactgttgttattggcctttaaaaaacwgattatgttctgagtatttacagcatttcatttatagaagttacctctgagatctcccaagagattactaatgaagtaacgaaagggggccaaatacaaatcaactttggtcacctcacagtctcctcctctgtaacacaagagactcagaaagcaaaatggtccagaagagatagtgctg

SEQ ID NO: 524424 - DNA, 605 bp, Homo sapiens
tactaaataatgccatcagtgatatgatgttgtagccttctttaagtaattcttattctacttgtggcagtgattttcctcccctgttttccaattattttgtagcagaaaaccacctggcagttttaaggttttctccatccctaaaatgtctttgtaytacatgcaaacaattactgagaagtatgatgttggcttggttttatttttcctcaaaggtgaagcagattaactgattttaaagttctctgggtctttttataagtccttcagaagaaatgctaagagtttatagctgggatcactttaatattaagtatactcaagtcactcagaaattttaagtccaagcatttttcttaatgatgtgctatcagaaagacattgggatacatagttgaaggatggcaacctacaaactttgctatatttgaatcagaggagcaaatcccagctttaggaatctggttgtggaacagtagtacaattagatgagtgatcagctatcattgcgtacgtgcaggtagcagcacagatgtggcagtctcacttctccattttgtgagtttaagtaattttatactttgtgtttattctacctcttc

SEQ ID NO: 524425 - DNA, 605 bp, Homo sapiens
tactaaataatgccatcagtgatatgatgttgtagccttctttaagtaattcttattctacttgtggcagtgattttcctcccctgttttccaattattttgtagcagaaaaccacctggcagttttaaggttttctccatccctaaaatgtctttgtattacatgcaaacaattactgagaagtatgatgttggcttggttttatttttcctcaaaggtgaagcagattaactgattttaaagttctcygggtctttttataagtccttcagaagaaatgctaagagtttatagctgggatcactttaatattaagtatactcaagtcactcagaaattttaagtccaagcatttttcttaatgatgtgctatcagaaagacattgggatacatagttgaaggatggcaacctacaaactttgctatatttgaatcagaggagcaaatcccagctttaggaatctggttgtggaacagtagtacaattagatgagtgatcagctatcattgcgtacgtgcaggtagcagcacagatgtggcagtctcacttctccattttgtgagtttaagtaattttatactttgtgtttattctacctcttc

SEQ ID NO: 524426 - DNA, 605 bp, Homo sapiens
tactaaataatgccatcagtgatatgatgttgtagccttctttaagtaattcttattctacttgtggcagtgattttcctcccctgttttccaattattttgtagcagaaaaccacctggcagttttaaggttttctccatccctaaaatgtctttgtattacatgcaaacaattactgagaagtatgatgttggcttggttttatttttcctcaaaggtgaagcagattaactgattttaaagttctctgggtctttttataagtccttcagaagaaatgctaagagtttatagctgggatcactttaatattaagtatactcaagtcactcagaaattttaagtccaagcatttttcttaatgatgtgctatcagaaagacattgggatacatagttgaaggayggcaacctacaaactttgctatatttgaatcagaggagcaaatcccagctttaggaatctggttgtggaacagtagtacaattagatgagtgatcagctatcattgcgtacgtgcaggtagcagcacagatgtggcagtctcacttctccattttgtgagtttaagtaattttatactttgtgtttattctacctcttc

SEQ ID NO: 524427 - DNA, 505 bp, Homo sapiens
gccgacttctctgtgattggttttttaagtgccgggtgaattttggacctctggatgtgcagcaagtttttatgcaataagccttcctttcaggtctctaaaagctcctgctctgatctgtggtttaacactgtgcagggctgtggagctctgagasacctgaacccctacccatcccctgcacctccctactctccctgccgaggcgtccatagcatttccctaataaatagttttatcagggacactccatggggtggcttgtctctgccccaaacagggtcttcacgttctaactgcagggaagagactggttactagcgtaaagctgacaagttaccagttcacctgatcagaatgtattttttataaccaccatcattccttgtctcttcagtggaagatattctttcctgtttcccagaagagagaaataaaagtcctaaataactaagaatgatcagcgggagcgttgggcatgattactgcagtgtttgttctttat

SEQ ID NO: 524428 - DNA, 545 bp, Homo sapiens
tcattatacaaaatgatttcattttatgatgaacttacactcctctccagagaatcttttacatcctctgctttgttaagaatactcatttcagaaagaattcccataacattctattatagaatttgtagggccttctgttgaaaataatcttgaaccatggtcataatctttcagttaacaaatctgtttaaaacaaaatcttctaaaagttaaaaaaatatcagagctttcttggggtaagacacaagtaaagaaatgaaaactattacaccattttagaagcattgaccatacgactttctcacccaatctcagatatcatttattattctcaccagaactatacagctttatgttttgggtaaattttatctactttttaaaaccatataaacttgtgcctaaagttgttcttttatttagagagattactttttttttyctttttttaaccattcgacatttctggcttctaggcagatgtcttgctttggtgatccctccactttcttctcatacctccctgggaaggagatacacag

SEQ ID NO: 524429 - DNA, 545 bp, Homo sapiens
tcattatacaaaatgatttcattttatgatgaacttacactcctctccagagaatcttttacatcctctgctttgttaagaatactcatttcagaaagaattcccataacattctattatagaatttgtagggccttctgttgaaaataatcttgaaccatggtcataatctttcagttaacaaatctgtttaaaacaaaatcttctaaaagttaaaaaaatatcagagctttcttggggtaagacacaagtaaagaaatgaaaactattacaccattttagaagcattgaccatacgactttctcacccaatctcagatatcatttattattctcaccagaactatacagctttatgttttgggtaaattttatctactttttaaaaccatataaacttgtgcctaaagttgttcttttatttagagagattacttttttttttctttttttaaccattcgacatttctggcttctagscagatgtcttgctttggtgatccctccactttcttctcatacctccctgggaaggagatacacag

SEQ ID NO: 524430 - DNA, 632 bp, Homo sapiens
gtgtttgccatctaggttctaaaggttacaggactgagatgggagttggtgttcttgggcagaaaagacactgtatcagagatgaggacatctttctgggttctaggcttggctttgtatgaccttggacgagatacttcactttccctctctgggtcttccttttccttctctgagcaataaaaacattaatcaggtcatctgaaaatttctcatcatcgatgttaactgaactcggcatatcatctctctgaggctagtagagacracgtgttaattagtgacttcaatgattggaaatataggagtgaggaggaagtctgttttcacaagtccttgacttcattatgcattttagctattactagttatttaatgattactatgtgctggttgccatgccaagcaatttacagatgagatctgaatggcttctccaataccttgatgaggtgagtattattattattcccatttaacagatgaggagttgaggctccccagtgggaagtcaagccaagattcattcccccatttatctgatttcaggtttcaagcatttaacacaacactgccttgcagtcctgcctatgccagaggtagaattttcattagtgggagtgtcaagagct

SEQ ID NO: 524431 - DNA, 622 bp, Homo sapiens
cgaagtctaaaatatttgctatttagacctttacagagaaagcttgctgacccttggtttagagtattaaaatagactcaaggcagggtaaccgaaagagatctgggaaaaagaacagaaatgcatttcctaatacacttccatgcagagaaaaaggaactcaattccctattggtaggaatgtaaaccagtacagccaccatgaaaaatcatacgaagagtcctcataaagctgaaaatagaactaccatttgatccagcaatcccactactgggtctctacccaraggaaaacaatcagtatatcaaagagatacctgcactcatatgtttactgcagcactattcacaatagcaaagatgtggaatcaacttaagtgttcataaacagatgaatggatacagaaaatatggtatatatgcacaatgaaatactatttggccataacaaagactaaaatcatgtcatttgcaacaacatggattaaactagagatcattatcttaagtgaaataagcaggcacaaaaagacaaatatcacatgttctcatttacaagtggcagctaaaaaattgggtcacgtggaggtagagagtagaaagatgaagaatataaactggg

SEQ ID NO: 524432 - DNA, 646 bp, Homo sapiens
acttgggaagattatgtggctttctagaggcagacagctaagtgggttagtaaggtgaccaaccattctgatttgcccagaactgaggggtttcagcaattgtgaactttcagagtcttgggcaagccagaatggtcagtcaactgacctagatttaaactttactctttgccgactttgaccttaggcaaatttcttcacctctctgaatctgttatttcatctgcaaattttggtcctgagaaaattaaacagatcacgtgtatacaatgattagcacaaaggaacaactcaaaaagtagcagctattattatccttaaaaggctttgggctgttagttatttggaaagtttatgcctgggatctgtgctttcagcaaatctaaatatgtgtggcctgaagtagaggtgacagcctcagaggctgttatcacgttcttttcctttgcaactatatagaagttagagagaaaggagaaagcagacatttaacaagcaattatacaattgcttcattaactgacaatattatgaagaaacaccrggttttctgtaaacctatggagggagataggagtgtgactgatctgggtagtccaggaaggcatctcagaggaggtgatttttactagctctgaagggcaaa

SEQ ID NO: 524433 - DNA, 614 bp, Homo sapiens
ctatgatcctaagtgaattaatgcacaacagaaaaccaaatactgcctgttctcattcataagtgggagctaaacattgagtacacatgaacacaaagaagggaacaataggcacatgtacggcagctcttttccttcttcttccactagcactgcctttcacggtccagggagccaccaccaccacagcggcagcggagtcaggaagttcaagatggccgccactgagacccagttgctgcaggaacagccagagatggaagatgctgataattctgaaaagagtatacatgaagaaaatggagaagtatcagaagaccaatttcaaaataagaacaaaataagtttwaaaaaaagtataaacacagaagtaaacataagaaacataaacattcctcagaagacaaggataaaaaacataaacataagcataaacataagaaacacaaaagaaaagaggttacggatgcttctgataaagagggaatgtctccagcaaaaagaattaaacttgatttagctttgctagaagacttggaaaaacagccttgattaaggctgaacttgataacgagctaatggaaggaaaggtccagtctggtatggggttcatt

SEQ ID NO: 524434 - DNA, 594 bp, Homo sapiens
cacttagttttttttttttttttgagatgagtttcactcttgttgccaggttggagtaaaatggcgtgatgtcagctcaccgcaagctctacctccaactcctgggttccagtgattctcccgcctcagcctcccaagtagctggggttacaggtgtgtgccaccacgcccacctaatttttgtatttttagtagcgacggggtttctccrtgttgatcaggctggtcttggactcctgacctcaggtgatcggcccgcctcggcctcccaaagtgctgggattacaggcgtgaaccaccgtgcccagtcggttgtttttgtatcttggctactgtgagtaatgctgcagtgaatgtgggaatgcctgattcagctccctgctggatggtatggtcttgggttcatgaaatattctctaagatcattttctttatccaggtctctggatgagggattatactcccccaccccccagtgctatgctttatgacctgcatttcctgagcaagaacattttgtgcaaacccttggcctgaatcattcaggttcaagaacatttgggttttctctgaggcaagcttcccacagcaggc

SEQ ID NO: 524435 - DNA, 659 bp, Homo sapiens
ctctaggatgaaaggacttttcacagttgtgatttcacatttgtattttgatcattgtattaatctgcctccttccttagacagtatctccaaaaaaggtaagaaccatatctgctttgttcaattttctcttagcatctagaccaagaatgctcagaaaatatatatactgaatgattaaataaatgaatattaatttgcacattcatttttctaatgaactaggaaaactcttcacctggtttgactaagagattttctattctagtctattctagattttgctcattcattcacttgtggctgattctagtctgtgtgtccagctccattactgactcatactagcctgtaattgaatgatactgccttccatcagcatacctattactaattgcagaaaaactatagcttcattctctacctgayagaacttcaccttaagtatgagagtgcttataaaccttccaataccatctaataaatgtcttctacagattttttccatgggagttcattttggttcctcctagcatggctgagcagattctgttctctgtttctttattctttggctgactgcctatgttctgcagaatcagtattctgctctgctgtgtgatggacagggggttatcccacttctttttggcaggaag

SEQ ID NO: 524436 - DNA, 502 bp, Homo sapiens
tatgacaaggctgccagggttggggagagtggcaaaggggacccttgacctctwgcttgtccttgggtttgtactggctcacacctgacatggacttaacttctagtgtttgcagctgttggtataactcttgacctagattctctgaacttggtcagggcctggttaccaatcactgaatggcttagcctatgtcactttcatctacccagccagtctgcaaaccatggcagcatttactgcagtgttcctccactcccctgtcattcaagccccatgccaggcccactgcccctcaacctagcatcagtaccacacaagaacatcggaggccttgcagcccatacctgcaccccaccagtcccccatctaacaccattgtgcccttcaccctatgttactctcagctatctaaaacacttccccgatgcctgagtcttaacctgagaaaaaggaaatcaggagacctctctctcctagtatccatattttaaacacaatg

SEQ ID NO: 524437 - DNA, 445 bp, Homo sapiens
ctttcataatataaatatacagtcggtcctccatatctgtggggtttacaggtgtttattgaaccaacaataaatcaaaaatrttttcagaaaaaaatccccgaagtttcaagaagcaaaaaactatgttgaatcgacacaaattgagtggcgtgtaggctgtgtcaggaattataagtaatcaagagatgatttcatgtatacaggaggatgtgcatgggttctatgcaattactatgctattttttttttttgagacagtctcactctctcacccaggctggagtgcagtggcatgatctcagctcactgcaacctccgcctcccaggttcaagcgattgtcttccctcagcctccccagtagcctcccctaggattacaggcacgtgccaccatgcacagataaatttttttgtgtgtgtatttttagtagagatggggttt

SEQ ID NO: 524438 - DNA, 445 bp, Homo sapiens
ctttcataatataaatatacagtcggtcctccatatctgtggggtttacaggtgtttattgaaccaacaataaatcaaaaatgttttcagaaaaaaatccccgaagtttcaagaagcaaaaaactatgttgaatcgacacaaattgagtggcgtgtaggctgtgtcaggaattataagtaatcaagagatgatttcatgtatacaggaggatgtgcatgggttctatgcaattrctatgctattttttttttttgagacagtctcactctctcacccaggctggagtgcagtggcatgatctcagctcactgcaacctccgcctcccaggttcaagcgattgtcttccctcagcctccccagtagcctcccctaggattacaggcacgtgccaccatgcacagataaatttttttgtgtgtgtatttttagtagagatggggttt

SEQ ID NO: 524439 - DNA, 626 bp, Homo sapiens
tgcagcacataggaggttccaaggatggtgaatcagatgaacaagtgatattcttactctctgcagatctggaaagctggcagagtcattccacgatgaaacatttgtagagtcataggccttgttagtctcatctccacagggacacgtatcaacacatcatctttcatactactataaatagacagtcactcctccatatctctggggtttacacatgtttattgaatcagcaataaatcaaaaatattttgagaaaaaaaatccccgaagtttcaaaaagcaaaaaactatgttgaatcgacacaaattgagtggcgtgtaggctgtgtcaggaattataagtaatcaagagatgatttcatgtatacaggaggatgtgcatgggttctatgcaattgctatgctatttttttttttgagacagtctcactctctcacccaggctggagtgcagtggcgtgatctcaactcactgcaacctccgccttccaggttcaagcgattctcttccctcagcctccycagtagcctcccctaggattacaggcacgtgccaccctgcacagataaatttttttgtgtgtgtatttttagtagagacggggtttcagaatgttggacca

SEQ ID NO: 524440 - DNA, 626 bp, Homo sapiens
tgcagcacataggaggttccaaggatggtgaatcagatgaacaagtgatattcttactctctgcagatctggaaagctggcagagtcattccacgatgaaacatttgtagagtcataggccttgttagtctcatctccacagggacacgtatcaacacatcatctttcatactactataaatagacagtcactcctccatatctctggggtttacacatgtttattgaatcagcaataaatcaaaaatattttgagaaaaaaaatccccgaagtttcaaaaagcaaaaaactatgttgaatcgacacaaattgagtggcgtgtaggctgtgtcaggaattataagtaatcaagagatgatttcatgtatacaggaggatgtgcatgggttctatgcaattgctatgctatttttttttttgagacagtctcactctctcacccaggctggagtgcagtggcgtgatctcaactcactgcaacctccgccttccaggttcaagcgattctcttccctcagcctcctcagtagcctcccctaggattacaggcacgtgccaccctgcacagataaatttttttgtgtgtrtatttttagtagagacggggtttcagaatgttggacca

SEQ ID NO: 524441 - DNA, 626 bp, Homo sapiens
tgcagcacataggaggttccaaggatggtgaatcagatgaacaagtgatattcttactctctgcagatctggaaagctggcagagtcattccacgatgaaacatttgtagagtcataggccttgttagtctcatctccacagggacacgtatcaacacatcatctttcatactactataaatagacagtcactcctccatatctctggggtttacacatgtttattgaatcagcaataaatcaaaaatattttgagaaaaaaaatccccgaagtttcaaaaagcaaaaaactatgttgaatcgacacaaattgagtggcgtgtaggctgtgtcaggaattataagtaatcaagagatgatttcatgtatacaggaggatgtgcatgggttctatgcaattgctatgctatttttttttttgagacagtctcactctctcacccaggctggagtgcagtggcgtgatctcaactcactgcaacctccgccttccaggttcaagcgattctcttccctcagcctcctcagtagcctcccctaggattacaggcacgtgccaccctgcacagataaatttttttgtgtgtgtatttttagtagagayggggtttcagaatgttggacca

SEQ ID NO: 524442 - DNA, 474 bp, Homo sapiens
gattctcatcttcctccaggtatcgccagacacctgcatgctgtgattaggtactcagtggccatcatcctcttyaccatccttcccttctttctccttcatcgctggtgctccaaaaaaaaaagtaagcctcacgaagcagaggccagagaactcagggccctgtgcggaagcaggatgggagcacgcaggtgtgtgttcctcactggcaggaaagtctctggcccaaggcaggagccagaggcagagctttctagagagagcaccagacaacctgcccctgccttcagctcacagaccattgcctgattgtgaactgtatcctcacgtcccctgcagccactcacatccaggagaagattccatgacaggcagaaagtgggagatagaatcaatgggatgggaactgacagctattcatggaatggggtcttgcactcagagagatggaatgtctgagtctggctgttggca

SEQ ID NO: 524443 - DNA, 602 bp, Homo sapiens
acacttttgttgtagagagacgccaagtctatgcggggtgggtccttcccgtacccatgggcacccaagtgtggtaggagccttagaaacgaggaaagtggggagaatcttctgagcactggcagggaggggcggctccacatcctcctttctaaggtggcgcctccttctcccccaggtggwcaggacaagcccttgctgtctgcctggcccagcgctgtggtgcctcgaggaggacatgtgactcttctgtgtcgctctcgtcttgggtttaccatcttcagtctgtacaaagaagatggggtgcctgtccctgagctctacaacaaaatattctggaagagcatcctcatgggccctgtgacccctgcacacgcagggacctacagatgtcggggttcacacccacgctcccccattgagtggtcagcacccagcaaccccctggtgatcgtggtcacaggtcagaggactcatgtctgggcttctccttctcccacttcctgaatcccagagcatctggtgggggtgtccaccagggtccaatcatccaggccctgactgtatttggtgtcaatggggattgaatacaggggaatggg

SEQ ID NO: 524444 - DNA, 602 bp, Homo sapiens
acacttttgttgtagagagacgccaagtctatgcggggtgggtccttcccgtacccatgggcacccaagtgtggtaggagccttagaaacgaggaaagtggggagaatcttctgagcactggcagggaggggcggctccacatcctcctttctaaggtggcgcctccttctcccccaggtggtcaggacaagcccttgctgtctgcctggcccagcgctgtggtgcctcgaggaggacatgtgactcttctgtgtcgctctcgtcttgggtttaccatcttcagtctgtacaaagaagatggggtgcctgtccctgagctctacaacaaaatattctggaagagcatcctcatgggccctgtgacccctgcacacgcagggacctacagatgtcggggttcacacccrcgctcccccattgagtggtcagcacccagcaaccccctggtgatcgtggtcacaggtcagaggactcatgtctgggcttctccttctcccacttcctgaatcccagagcatctggtgggggtgtccaccagggtccaatcatccaggccctgactgtatttggtgtcaatggggattgaatacaggggaatggg

SEQ ID NO: 524445 - DNA, 602 bp, Homo sapiens
acacttttgttgtagagagacgccaagtctatgcggggtgggtccttcccgtacccatgggcacccaagtgtggtaggagccttagaaacgaggaaagtggggagaatcttctgagcactggcagggaggggcggctccacatcctcctttctaaggtggcgcctccttctcccccaggtggtcaggacaagcccttgctgtctgcctggcccagcgctgtggtgcctcgaggaggacatgtgactcttctgtgtcgctctcgtcttgggtttaccatcttcagtctgtacaaagaagatggggtgcctgtccctgagctctacaacaaaatattctggaagagcatcctcatgggccctgtgacccctgcacacgcagggacctacagatgtcggggttcacacccacgctcccccattgagtggtcrgcacccagcaaccccctggtgatcgtggtcacaggtcagaggactcatgtctgggcttctccttctcccacttcctgaatcccagagcatctggtgggggtgtccaccagggtccaatcatccaggccctgactgtatttggtgtcaatggggattgaatacaggggaatggg

SEQ ID NO: 524446 - DNA, 567 bp, Homo sapiens
tgttcaccatgaaacatttcattagcagtttgcaagctgaggcttattgcccatggatcaggaaaatagtagaaggcattctcaaataagtgggagcycagaagtggtaaatgagctctgttggtctttccaattcaaatttgtaaaatttactctcttgaggacatttcttatagtcagtttcttctcatatgactttttctttttccattcaattcataaagaccttcttttttggtataaagccagaatgcaacttattcatgactgaaattggcataagcagggtgtcctcagactgtaagcgagcctgtataggaatccacatcatgttttgctgagaaagagagtggcctggatcacggaaattcaaagatgattgaaaaagcattttcagcacttggaaaactttatttcatttaattagatattaatgatcagtgaaagaacacataagggtagaagataaaaatgtcattagattccaagcccagtgccttcaataattgagtgtgtgctattactcttttactatggtccttagtattgtgatgtgccccttaatta

SEQ ID NO: 524447 - DNA, 597 bp, Homo sapiens
gctgttcaccatgaaacatttcattagcagtttgcaagctgaggcttattgcccatggatcaggaaaatagtagaaggcattctcaaataagtgggagctcagaagtggtaaatgagctctgttggyctttccaattcaaatttgtaaaatttactctcttgaggacatttcttatagtcagtttcttctcatatgactttttctttttccattcaattcataaagaccttcttttttggtataaagccagaatgcaacttattcatgactgaaattggcataagcagggtgtcctcagactgtaagcgagcctgtataggaatccacatcatgttttgctgagaaagagagtggcctggatcacggaaattcaaagatgattgaaaaagcattttcagcacttggaaaactttatttcatttaattagatattaatgatcagtgaaagaacacataagggtagaagataaaaatgtcattagattccaagcccagtgccttcaataattgagtgtgtgctattactcttttactatggtccttagtattgtgatgtgccccttaattatttctgatatgctttatatgtgccttta

SEQ ID NO: 524448 - DNA, 460 bp, Homo sapiens
ggcaggcctagctccggggctgcggcggctgaggcgcggggatggagcccctgcgggtgctggagctatacagcggcgtgggcggcatgcaccacgcgctgagaggtgagagtccatctagcacccctctctctattcgctcacgggggctggttggagcacccgcgccgggaaggggcggagcggcgagacgcwaggggcggacactgtggggcggacactgtggggcggccctcggttgtcctggaaacagctcctgcgcgccgccgtgtccacccctccagacgctgactcccttctcctggcgccgagtctggctcgaggggccgcacatggcgcctcaaagggcccagttgggagtcgggattcgcaaggcagtaaatcaacctcaaagggtatcaaaggggcgagaccctcgcctggtgccaagcccccattctaagtgtgcagccaccgagaa

SEQ ID NO: 524449 - DNA, 460 bp, Homo sapiens
ggcaggcctagctccggggctgcggcggctgaggcgcggggatggagcccctgcgggtgctggagctatacagcggcgtgggcggcatgcaccacgcgctgagaggtgagagtccatctagcacccctctctctattcgctcacgggggctggttggagcacccgcgccgggaaggggcggagcggcgagacgcaaggggcggacactgtggggcggacactgtggggcggccctcggttgtcctggaaacagctcctgcgcgccgccstgtccacccctccagacgctgactcccttctcctggcgccgagtctggctcgaggggccgcacatggcgcctcaaagggcccagttgggagtcgggattcgcaaggcagtaaatcaacctcaaagggtatcaaaggggcgagaccctcgcctggtgccaagcccccattctaagtgtgcagccaccgagaa

SEQ ID NO: 524450 - DNA, 460 bp, Homo sapiens
ggcaggcctagctccggggctgcggcggctgaggcgcggggatggagcccctgcgggtgctggagctatacagcggcgtgggcggcatgcaccacgcgctgagaggtgagagtccatctagcacccctctctctattcgctcacgggggctggttggagcacccgcgccgggaaggggcggagcggcgagacgcaaggggcggacactgtggggcggacactgtggggcggccctcggttgtcctggaaacagctcctgcgcgccgccgtgtccacccctccagacgctgactcccttctcctggcgccgagtctggctcgagrggccgcacatggcgcctcaaagggcccagttgggagtcgggattcgcaaggcagtaaatcaacctcaaagggtatcaaaggggcgagaccctcgcctggtgccaagcccccattctaagtgtgcagccaccgagaa

SEQ ID NO: 524451 - DNA, 610 bp, Homo sapiens
gagcatggaagccaataacagcaagcgaagagaaataggacatgaggagctggagaaaatgaagacgaacttggcgacctcaaaaagtctgaaaactttaaaaataacttgtggagggcggcaggtaagacctgctcaaccatgagcaggaacagcaccttgcacagtgcccagtacaagcacttcagaaatgcctgttgactcattaattgggggcagggaaagaattcttttttaggaaagaaaaatactgagtatatttgtaatcagaaagagatgatcctttggcggaggagtataaaaaatgcaaatgcaagagaaattaataaaataaagagagcctcaaggaagtaagtgggagaatagtttgccttaaaaaggagcagaggagctttcttctggaaaatatataaaaggcagggatcataagcaaaggacgtgcagggaggaagtagacagctactcaggagacgaaattgaaaagccttggggcgaggacaggatatcggcagcgtccactccacatttcacccaacaagtatgtactgagtgtcttcccgtgaasacgttccctgaggcagccaggaccctttttttagagtagcctgca

SEQ ID NO: 524452 - DNA, 537 bp, Homo sapiens
tcttgccctacattggccaggatgagtattcgggtttctcaggtgatgggccgggccatagagctcccaaaagtttatgtcttttgtctttggagttttttcgytgtctcgtggcatctgcagtggcaagctgcttctttctatgttcagaatcttatattttgttcatattatatttcttactacccagcaccaactgagccattcaaatctttcttgaggatagaatatagtctgaaatatctccataaactacttaaacagatatggaaaagtcaagagtgagtggagccaaacaatagtaacagaaggaaaagattagggttggcttgcccattctttgggctaccatcagaactctgattttatggcttgcacacattagaagttacagggagactcaactacatattgatcctcagggaatcatggtatttgcttcacagttttcccttgatttacctttgacaaaaaggccctgggagtccagtctcagctctgtcaacttagcagttttactattttgagtaaatcgtt

SEQ ID NO: 524453 - DNA, 605 bp, Homo sapiens
tgggtgcagcaaaccaccatggcaagtatatagctatgtaacaaacctgcaggttctgcacatgtatcccagaacttaaactataataacaacaamaacaaagtattactccaaccaacagtatcccttgctatataccaaggcaattttaacatgctcaaatagtcacctgctaaaatgtgaacattccacaaccagtaaattccacaaaaatttcaaaaagatttttctctgcagacaaaataaacattgcagcatgaaatgtactttgtgaattgaataattagatgccggataccaaagggccaagataaaaatagcagcatccaccaggcttcctacattctttatgatagactaagctggcagcctgtacgggactgcactaacatgaaaaatttgttgccactaatcctgttcctgcaggcagaaaattctctttgtttagcttcagagtgagaaaactccaccatcacctaaagtccatcttgtacagttaaaaataaaactcgtcaaatagggatttgctgcatgaccctgacctgtgcacagctgcaggcttctccgggcaggagaacaaatgtctacatgggaagagaatgcac

SEQ ID NO: 524454 - DNA, 605 bp, Homo sapiens
tgggtgcagcaaaccaccatggcaagtatatagctatgtaacaaacctgcaggttctgcacatgtatcccagaacttaaactataataacaacaacaacaaagtattactccaaccaacagtatcccttgctatataccaaggcaattttaacatgctcaaatagtcacctgctaaaatgtgaacattccacaaccagtaaattccacaaaaatttcaaaaagatttttctctgcagacaaaataaacattgcagcatgaaatgtactttgtgaattgaataattagatgccggataccaaagggccaagataaaaatagcrgcatccaccaggcttcctacattctttatgatagactaagctggcagcctgtacgggactgcactaacatgaaaaatttgttgccactaatcctgttcctgcaggcagaaaattctctttgtttagcttcagagtgagaaaactccaccatcacctaaagtccatcttgtacagttaaaaataaaactcgtcaaatagggatttgctgcatgaccctgacctgtgcacagctgcaggcttctccgggcaggagaacaaatgtctacatgggaagagaatgcac

SEQ ID NO: 524455 - DNA, 443 bp, Homo sapiens
ctgggtcttctgaatccaagtacagcgcacagtggtcgctacatcgtgccctcaggaaaacccaggtctgaaaagtgaacacttctttgaggattgggagcctgactcagcccactagggaagaatcaggccgcctccgccaatttcatctcctttctttgccatttctgaggagagcaaagctgaggtcagggctttctacaggcaaggaggaagggactgtcatggacacgccccctgcccactgtaaagggagaatttgagttcttgggctctccagacctagaytgtggatggaatagccaggctggcacaaagccagcatactaataggcgctgtcataagagaagctagccccacagtatccttcctggagacaagaagaggtgagaaaagaaagaagtgcggacaagtaaaaactccaaagggtttactgagcaag

SEQ ID NO: 524456 - DNA, 164 bp, Homo sapiens
cactgccttattacaaccttttgcccttcctgagtcttagctgcctaatctgtaaaacaagagtattarcctccgtggcagctaaggccccatacagctttggcaatctataattttctggccctgaggacccatagggagcccaagggcttcagcctcaacca

SEQ ID NO: 524457 - DNA, 581 bp, Homo sapiens
aaccactgaagtgaagctgctattagttggccttacaaaacacacctatatgttgattctcttcagagactagatttgggtggaaagaaagggaacataatttgagtggacaaaaaggaaatggggctgcaggaagggaagggagggacccaggatggggcagtagacttctctatccaaatgggctttgtgtcagccctgaagggagcacaagactgcaggaaagaggaaaagcaccttcttagtcttgtgtgctactcacgtagttcaggaccagcagcaccagtatcacctgggaacttgttaaaaacagagacgckttgttccaccccagatctcttgagtcagactctgtattttaaccaggtgcccaggtgactctcatgcacaatgaagtgtgagatctaccacctaacccaggacctagaatggctggctcttagtacatgtctagatagataggtttctggacgaatggagaaaagcagtgcaaactttgctttcaatcagccatcctgcattcattctgcatccacagggtgtgtagaattgtctaaggctgtggttctttggttcgccct

SEQ ID NO: 524458 - DNA, 581 bp, Homo sapiens
aaccactgaagtgaagctgctattagttggccttacaaaacacacctatatgttgattctcttcagagactagatttgggtggaaagaaagggaacataatttgagtggacaaaaaggaaatggggctgcaggaagggaagggagggacccaggatggggcagtagacttctctatccaaatgggctttgtgtcagccctgaagggagcacaagactgcaggaaagaggaaaagcaccttcttagtcttgtgtgctactcacgtagttcaggaccagcagcaccagtatcacctgggaacttgttaaaaacagagacgctttgttccaccccagatctcttgagtcagactctgtattttaaccaggtgcccaggtgactctcatgcacaatgaagtgtgagatctaccacctaacccaggacctagaatggctggctcttartacatgtctagatagataggtttctggacgaatggagaaaagcagtgcaaactttgctttcaatcagccatcctgcattcattctgcatccacagggtgtgtagaattgtctaaggctgtggttctttggttcgccct

SEQ ID NO: 524459 - DNA, 668 bp, Homo sapiens
tccttcccctccatgtgtccctgcagaggaagtaggcaagagagagcaagacccttggctcaacttcagccttttcccctttttcctttcccaaataccctctcctctcactccattagcattcttgattcttgaattcccatcaagttttcaggggaaggggaaatactatttcttgcactttttgttggcgaagaaactgatgctgtctgcctttcattgttctacccagcatccggtttggacttgactgagggcagtgatgaaggtgaacatccagttgtgtcccatgtcctttgaacaactgtctttacacagacaaaccattttggagactgtttatgcttacttgaagtatcagtagcaaactcactgcattacccccagtgagggccactgatggcattcaaaaagctgcaaaaacaaaaacaaaaatcaaactcataaytaaaaaacccacaatgtcctcaatatattgattaaactttctgtatgactatagacatggaggagaagaaatcaacagagagagagaaataggctctagaaataggctctgctttcccaacagcaacaatggttgtgccttatcatgtgaataacaacatactagagttgaaccatcatactattggtatatagtaggtgatcaataaaatagttgtgaa

SEQ ID NO: 524460 - DNA, 550 bp, Homo sapiens
gactcgttttggccaggaaaaagcgacaaaggaagagaaagcaagaacacagtgaagaatgttacaactcgtccattccctagatacttactgagcacctaggcaggttacagtagtgagagaattaggcaggttacagtagtgagagamggggtgagacagaaagaaacaggccatcacagccatgatgagaaagcctctgataaggtcatccctgagtgccctggagcacagaggagcagcagcagcgggcaccaaacctggagccagaacagggcatttccgtggaggaaccctctccaccctgagacctgaaaggcaagcgagagtcctggtggtacagactcggttcgtaaggaggcagaagagagtgatgtctgcagggctccgtgttttgttgagaagtaggacatttgtgggtggcttggggcagacggaatggggaggatttcagcctctgataaaagcacaccggaactctgcttcctctcccacgcctgctctcagcattgatattggaggacaaggtactgtccaccttgcctcaaga

SEQ ID NO: 524461 - DNA, 652 bp, Homo sapiens
ttgagggattaaagttttttagtcaaaagatcttaagacacaacgtgaaccttcgcaccacatgaagcatgagttccgtcaggtaagtatacattcttccttataatttttctctacttagcttgactacttttttttctgtcctatttgtagcattgtactgcaccttaggaggggatttatccaatagtcagtgagacaaaaactgagcaaacaaaattactcttccaatccctagaaaggcagcaggttagagactgttaggtctcacgtggtcattttttcccctacattattggaatagataattagctctttctttggttgaacctaggggaggtactgtgggagctcacttaatccatctgccagttaacatgttctctctcttccctgtgaatgagcgcaccaacctctatctatggcagtcagttaatgggctgctctccagtgagccatcccacccatcccatcagctcagttgggggcctgttgagagtatgtgctcccaaacctaagtatgccagttgtacttattctaagacatgtagctaagtaacgtttaaacaaatgaaatatgagtgkgagaaggagagctgtctcgaaaattatattgttgccttgaaaagacttgttaatgatgaatttgcta

SEQ ID NO: 524462 - DNA, 485 bp, Homo sapiens
tctctctgaaacactgtggtaatcatccattccttcctttcatctagctagactggccaggtctggctacacatcctccgttaggagtgtgcctcttgggtcaagggtatggaataaatctcatggtccagcattcttgctctttgcgtttttcccatgcatggatcaagcccccttcttgtcttggtgttagcgttccctgccagggactgtcactaagttctctcccaagcagaccagctcctactctcaaaggattaatgacatctgcccacagtgctttggttttccttctttagtaaatgtccatccttatggtttaagtagacttcaaagtacagattaaatgtctcttgaggtaaagatctcacgctaatatctcaagctaaagaaaaaatgagatccacmatttagcttgaaactaacccaagagaagtgggaaacaactgaaataggaactttcttccctttacccttccctgtgg

SEQ ID NO: 524463 - DNA, 594 bp, Homo sapiens
ctcagatcagcctccagaaaattattctgatggaggaagaaagagatgatgttttctcctgatggataaaaaggatacaagagtcatctctgggtcaccatgtttcccactatggttgtttctttttttttttttttatttgagatggaatctcactgtgttgcccaggctggagtacagtggcgcgatctcggctcactgcaagctccaccttccaggttcacgccattcttctgcctcagtctcccgagtagctggtaccacaggcgcccgccaccacgcccagctaatgtttttgtattttttggtggagatggggtttcacagtgttagccaggatggtctcgatctcctgacctcatgatccttccacctcggcctcccagagtgctgggattacaggcatgagccactgcgcctggccctctgtggttgtttctgttctcatctacagtggctcttggttgtttggttccagtttaggcacaaggtttgccawggtggttctattcttggaaaggaacaatagggacgtagtaaatagtttgctaaatgaggatatagttcccaaaacatccgcaaagcatcttcctg

SEQ ID NO: 524464 - DNA, 627 bp, Homo sapiens
gcagaggggctggccattcaagagccctcctgagccccatcaggaagtgaagcaaaagcatttctaagtgcagaggtgattggtggggggtggggagagtgggcactgccatacccagccctctgtctccacagggagctggaactgactgcaagatgccttaagggtgtagaacaagagaaaaaggaactgaggcacctcacggagtccttgcagcagacactggaggtgaggggctgctggtgggttagttgaccaggtggcaggctggttggttggaccacatgacactgttttttccagcagtgtttccccagggggtgatctgtaagagaaatgggcatggaggggtgctgatctaaagggtctcttctctatggatcattgaaaactctggccgaggcatgaggcccaaagcaagaagtgtctgttctcagacctaaaaggacaaattcaggcttgtccttgctattaccatggcctcaggaaatccacctctggtgcttayatttttataccagatagaggattggttaaggtgggcagtggagctacccaccgcttccttcttgtgtcttgttcgcttagctgctcctgagtgacattgaacgtaaagggaaatcaact

SEQ ID NO: 524465 - DNA, 564 bp, Homo sapiens
agggagggactggctgggggtaaggatgcagtcggaaccscacccttcctggccctgccgccacagggttctttgaggagtgcatccggaatgccgagctggaggccaagatgcctgtgatcatgaagaactccgtgtacatccataaggcagccactcgccgcatcaagagctgccgcttccaccgacgccggtccagcacctcctggaatgacagtgagtgtggctgtctgcgtgccctggtgggatggtgacaaggcaggaagagggcaacatggggagccagaagggttggcccagctctgaggctggagagtgtggccttgaacctggccccaccatccttgggcaaacgggtgaattctcagggccctgggtttctcaaaggatatggaagcccgtgtgtgtgggaaggggctggaagaagcttggcacacataaaggagtgagggggtggcatgaggctggggacagggccaggccttcgtggagggagcactgttcacagggctgttgggctcctgtttccccagtgaagccgtcccagtccttcatgacctccca

SEQ ID NO: 524466 - DNA, 596 bp, Homo sapiens
ctgcatttgggggctcatgctctctttgcactccaccacccttcccctggaggatctgacacctgcctctgggctgagagtcccattgtgaacagactcagcctccccttgtaatcctggcaaaagctgtggttggtgggccttggagtgtccacaaagagagccttcccccttgcagagcagtgactccagtggcaagacgagacctaggggaagaagttgttgtgcactgtctgctgctgtgggtgcgggggaaggctctgctttgccacttgctggctcctgtggcttttgaaaagtcactatttaaaatgtttactgtatttatgcatttttagtaagcaggagagaaatcccttcaatcttacaggctgctcagagcctttgtggttctgaagttctatgattgggactttgcatccctgaaatcaacagaaaattggctgccactgctacaagtgatcaagaacatacaggatgtcaggttctggctcaggtagcactcaatgccatgccatccttagaactgtctatgaaaatatatgtttgctttgagatgagaayaggaaagataactaatttatcacctcaaggaa

SEQ ID NO: 524467 - DNA, 627 bp, Homo sapiens
ctgcatgatccaggctgtggcatttcaccccactggccagcagtgtctcatctatagagtgggaatgggatgggtcaaactgtgtgccacaaatgaccccagaggtgccttgagtctaccacaagggaatggggaacaggggtacagctccaagactccccacccacttcaagcaatacctctgcactgttatatatattttttgtttgtttgtttgtttgtttgtttgagagagagtctccttctgtcaccaaggctggagtacagtgtcgtgatcttggctcactgcaacctctgcctcccaggttcaaggaattctcatacctcagcctcccgattagctgggatcacaggcatgtaccaccatgcccggctaatttttgtatttttgagtagagatggggtttcgccatgttggctaggctgttctcaaactcctgacctcaggtgatctgcccgcctcggcctcccaaagtgctgggtttacaggcatgagccmcctgttatatgttttacaccagcagtccccaacgtttttggcaccaggtgccatgactggtttcatggaagacaatttttccaaggacaggggtgggtgtgggggtggtttcatcaggcattagattc

SEQ ID NO: 524468 - DNA, 646 bp, Homo sapiens
ccctttgctaactcaaggctcctctatcctggctgcaaactagcatcacttgacgagctttaacagtccagtgctcaggccccacccagaccaatgaagtcagaaattctggggtggaacccaggcatcggcatgtttttaaaactccccaggtgactctgaagcatggtgacaattgagaacggcttttcccacctctagtgacacaagaccctcatcarttctcctcaaaagcaatttttctgcttccttaattctcgttctccaagccaattctcatctcattcttctccccagtggttcagatttatgtagtcagggagtgggagttatgagtattgttttctttctttcttttttttttttttttttttttgagacagcgtctcactctgttgcccatgctggaatgcagtggcacaatcttggctcactgcagcttggaccaaatgggcttaaacaatcctcccacctcagccacctgagtagctgggactacaggcatgcaccaccatgcccaaattaattttttttttttttttttgtagagaccaagttctccagactggtctcctgagcttaagccatcctcctacctcagtctcccaaaatgctaggattacaggtgtgagccaccgtgcccaat

SEQ ID NO: 524469 - DNA, 563 bp, Homo sapiens
tggaattaatccatttcaaatgaaactttccttctccttctcctcattcatttaacaggttgctaaagaaaactagcattttttgagaagcatttcttgaagaaatgttgaagatagtctgcttaggagtgggaatataatatggggtggatcaggaagttkgacctacaataatatgtaaattaaagtccatttaattttatataaattgtgctaatcctcatatgttcagggagaaataaaggagtaaatttaaaaaaaactgtttataaatcaattaaaaatgattgaatttattggggacatagacatgcttttaatggttagctaatatgatccaaaatttgggactgcaagtaaaagcatcctaacaaaggatagatggagaaggatacagacgagctgagaaggaaaaaaacttgtagacatagaaagtttagttaatttttttattttccttggtgataaataggagctgaaatatggtcaattgcaaaaagtagacaaatttgaattatttatagtcagctcaaaggggtttttgtgtgtgtgtgcatgcatat

SEQ ID NO: 524470 - DNA, 563 bp, Homo sapiens
tggaattaatccatttcaaatgaaactttccttctccttctcctcattcatttaacaggttgctaaagaaaactagcattttttgagaagcatttcttgaagaaatgttgaagatagtctgcttaggagtgggaatataatatggggtggatcaggaagtttgacctacaataatatgtaaattaaagtccatttaattttatataaattktgctaatcctcatatgttcagggagaaataaaggagtaaatttaaaaaaaactgtttataaatcaattaaaaatgattgaatttattggggacatagacatgcttttaatggttagctaatatgatccaaaatttgggactgcaagtaaaagcatcctaacaaaggatagatggagaaggatacagacgagctgagaaggaaaaaaacttgtagacatagaaagtttagttaatttttttattttccttggtgataaataggagctgaaatatggtcaattgcaaaaagtagacaaatttgaattatttatagtcagctcaaaggggtttttgtgtgtgtgtgcatgcatat

SEQ ID NO: 524471 - DNA, 526 bp, Homo sapiens
tcaaagggattactgctaagttagaagaaatatatttaatgtatctgagaaaactgtagaatatttgtgaggtgacatgtaagcactgatcaaatttgtcagttgcaaatgacaaaaactcagcttaattagtttgaggaaaatgggtttatggtctacacagcttagaaatatagaggacaaasctacctctggctagatggatgccattaggctacttactctctctccattcatcttctcttctttttcctgtgttggctttaatttcaggccgtattttcctgaatggtagtagggttggccattgaaggaaagttatatactcattttatcttcatagctagcagtttcaatacaaaaaaatatgacttcttttcccctgttacttgcagctaaagccccaaggaaggttgtgattagtctgtcctaggttatgtgccatccctgaatgtccctgtgaccaattttagggtgctctgattcacccattttggatcataaactaatccttgtgggaatgggg

SEQ ID NO: 524472 - DNA, 581 bp, Homo sapiens
atgtcataatttttcagtcaatacatatttctctaatggagtctttasaactgacttttgagctttttacattaaattagccactctgcactaaagaatgaataggaaggatgtttaaaaggtgtgaaagtgtcaactaaatgagaaaaatcaagccattaaaaagttaaagttagttttattcagaaatcttactgaggactatagactgaggcctacaggctgggagtttttttagactgcttctgcatggtacttcagcccactccttataagcaggtggtggggtctcagtatttgcaaaatcacatcagagttgctcagaagttgcattaaagcagaattgcatcaaggtttggatgtaagggtatgtcctgttatagattacagaagaacaatcactaaccccgttagacatcatgttatatgtagaaaaaggcaaggaccagggtaatttatcttttaagtaaattagtgactcaggcaaaaaatgtggaagaccacatgttctatcctgctttgtcttcaaagcatcttccagaagagctgcaggtcctcacagagtcaggggctttgtgaaa

SEQ ID NO: 524473 - DNA, 581 bp, Homo sapiens
atgtcataatttttcagtcaatacatatttctctaatggagtctttagaactgacttttgagctttttacattaaattagccactctgcactaaagaatgaatrggaaggatgtttaaaaggtgtgaaagtgtcaactaaatgagaaaaatcaagccattaaaaagttaaagttagttttattcagaaatcttactgaggactatagactgaggcctacaggctgggagtttttttagactgcttctgcatggtacttcagcccactccttataagcaggtggtggggtctcagtatttgcaaaatcacatcagagttgctcagaagttgcattaaagcagaattgcatcaaggtttggatgtaagggtatgtcctgttatagattacagaagaacaatcactaaccccgttagacatcatgttatatgtagaaaaaggcaaggaccagggtaatttatcttttaagtaaattagtgactcaggcaaaaaatgtggaagaccacatgttctatcctgctttgtcttcaaagcatcttccagaagagctgcaggtcctcacagagtcaggggctttgtgaaa

SEQ ID NO: 524474 - DNA, 581 bp, Homo sapiens
atgtcataatttttcagtcaatacatatttctctaatggagtctttagaactgacttttgagctttttacattaaattagccactctgcactaaagaatgaataggaaggatgtttaaaaggtgtgaaagtgtcaactaaatgagaaaaatcaagccattaaaaagttaaagttagttttattcagaaatcttactgaggactatagactgaggcctacaggctgggagtttttttagactgcttctgcatggtacttcagcccactccttataagcaggtggtggggtctcagtatttgcaaaatcacatcagagttgctcagaagttgcattaaagcagaattgcatcaasgtttggatgtaagggtatgtcctgttatagattacagaagaacaatcactaaccccgttagacatcatgttatatgtagaaaaaggcaaggaccagggtaatttatcttttaagtaaattagtgactcaggcaaaaaatgtggaagaccacatgttctatcctgctttgtcttcaaagcatcttccagaagagctgcaggtcctcacagagtcaggggctttgtgaaa

SEQ ID NO: 524475 - DNA, 581 bp, Homo sapiens
atgtcataatttttcagtcaatacatatttctctaatggagtctttagaactgacttttgagctttttacattaaattagccactctgcactaaagaatgaataggaaggatgtttaaaaggtgtgaaagtgtcaactaaatgagaaaaatcaagccattaaaaagttaaagttagttttattcagaaatcttactgaggactatagactgaggcctacaggctgggagtttttttagactgcttctgcatggtacttcagcccactccttataagcaggtggtggggtctcagtatttgcaaaatcacatcagagttgctcagaagttgcattaaagcagaattgcatcaaggtttggatgtaagrgtatgtcctgttatagattacagaagaacaatcactaaccccgttagacatcatgttatatgtagaaaaaggcaaggaccagggtaatttatcttttaagtaaattagtgactcaggcaaaaaatgtggaagaccacatgttctatcctgctttgtcttcaaagcatcttccagaagagctgcaggtcctcacagagtcaggggctttgtgaaa

SEQ ID NO: 524476 - DNA, 482 bp, Homo sapiens
taattctatatatcttatataattttgcagtcttacatgctttttccagttaaattttggagggctcatctgaatgtcacagtaatcaaaagtagacattctatgtctactgagattttttttttaatggctacagtaaacaatcagtttaaatctttttttagactgccaagctaaaattatcgctcatagattttatggcacagaacttaaggacagcaatttacatcttgcagtagtgaaccctgggctgttttctcraaaaaagtactgtaccttgaatggaggaatatctacaaccttgcaaaaagttccttaatttttcctaagaggttatcattttaacccacctggctgttaaggcagaggatctgaatttggcaacatagaagagctacattcatggttcttgccagagattagaacctcaaagtatctgcagaccaaatatcattaaatgttcagttgttagaaataataca

SEQ ID NO: 524477 - DNA, 499 bp, Homo sapiens
cctaaagagtgctgagccctccgatggggcccctgacttgggctcatgccaacttttcgtctaccagtggcccttcaccaccaggccaggggcacacctgtgcacagccagggactggcgggtgccccgggggaagggacatggaaagtggagtatgctgccaggtgatgccgactcaccctcgctgtcctcagggtacccacccagcagccctgcccccaagaaccaatgctacagatggagtacccagccccggcctgagcccagagcagtcccgtgtgcaccacacaasagacggtgcacgggcacagcacagagatgacacaaaggcagtagcatggctccgtgtgcaggccccgggctgagctaggcctcttagtgatgcgtttaccttcacaacaacattccacatgccagtaacatgaccactgtcctcttctcactaacagatgagccacagatgtcaactctaagaggaagtgggaaggaggccccgcct

SEQ ID NO: 524478 - DNA, 566 bp, Homo sapiens
aacccatgttctggttataccatgacggggtggtatggaggtgaggagggtaacccatgttctggttataccgtgacagggtggtgtggaggtgaggagggtaacccatgctctkgttataccgtgacagggtggtgtggaggtcaggagggtaacccatgctctggttatactgtgacagggtggtgtggaggtgtggagggtaacccatgttctggttcagacctgttctagtcactggaagactggagtggaggacagcacccgcctaccaattaatcaatatgtggtcaagactattaaaaacaagagactggctttgtggaatgaaaatgagcaaactgctttatttcttataaaacgctgtcaactgaagccagtcacatgggtgcttccactactgcttgaaaatccgccagtaggcaagaaagggattgctctctcggaaaactatttgatgttagaccttatgataagtgtaggtttcaaaaaagaaaagactccaaacatgtaagaacaaaactgcaacagtggccacagacgcagtgaaagcagtttgctgcaag

SEQ ID NO: 524479 - DNA, 329 bp, Homo sapiens
gggttctaatgttgctttattttatcatgcaaaatatgtatgagaacaatttgttgttatacatttgacatgtaattgtgagatatttatgtagtatctcacatattcctatttggtttttgaaaaagagtttcacatattttatgtgratgtaatattccccttattcttaaagatagataccacatatctaattaagtaaaactctattacagagtaaattcagataggctaattttatttaaacggaaaactcccaagttttctgattttcttttttaaactagaatgctgattataggagaataattttcaattacaagttttac

SEQ ID NO: 524480 - DNA, 561 bp, Homo sapiens
attgatgattctaggcacactgcaaggttcaacatcaagtatrtgcctggtgctttgttttgttttgttttgttttgttttgttttgttgtttttccctgaagtctaagatactcaagtccacatagacataacccagaggttccagggtactcaatgtcctggggaacagcagtctatagataaatgtcccagtgtctctttcctttggcggggcagttctgaagcgctttcaacatggttccttagggagtgagaatgagctcctctttcccaaatagtagctggcttattagcacacccttcattgcatttttccctttctctcactcagcccactccttctgttttggttattgggatctcctcttaataaactacttgcactcaaatctttgctttaggctctgcttttgtcataataaaaatggacagatattaccattattatgtcctatttgagtcacatctgtgattttcatccaactcttcctagtctcactgtctttccttttttgttgttatgtatagttttcatacagtgttttcccatctcccagat

SEQ ID NO: 524481 - DNA, 595 bp, Homo sapiens
tgttttcctgatcaatctcagtgtgagtatctgggcatttcagttgaaggtgctgtgtttactcagccctttcatccctctctgtatatgccatgcactgtagctgcttcttcacacaattttctattgtttttgctaatttcttaatagcaatgttagaagcaagtggaatatcatcaatatagtgagagaaaatatttgatgacatakaattatataaccagtgatagtatatttagtaacaaggcaaaataaaaatattttaggtaaataaaaactgagagacttactattaacagactgacaaaatgaacttctaaataatgtacgttaggcagaagaaaatttatccaaagaaggtttgcaagcaagaagacatgatgaaataagaaaatagagaacagattgctggcaagatggtaaaataggaacagctccggtctgcagctcccagcgagattgacgcagaagacggtgatttctgcatttccaactgaggtacctggttcatctcattgggctagacagtgggtacagctcatggagggtgagccgaagcagggtggggtgtcaccttacctgggaagcataaggg

SEQ ID NO: 524482 - DNA, 595 bp, Homo sapiens
tgttttcctgatcaatctcagtgtgagtatctgggcatttcagttgaaggtgctgtgtttactcagccctttcatccctctctgtatatgccatgcactgtagctgcttcttcacacaattttctattgtttttgctaatttcttaatagcaatgttagaagcaagtggaatatcatcaatatagtgagagaaaatatttgatgacatataattatataaccagtgatagtatatttagtaacaaggcaaaataaaaatattttaggtaaataaaaactgagagacttactattaacagactgacaaaatgaacttctaaataatgtacgttaggcagaagaaaatttatccaaagaaggtttgcaagcaagaagacatgatgaaataagaaaatagagaacagattgctggcaagatggtaaaataggaacagctccggtctgcagctcccagcgagattgacgcagaagacggtgatttctgcatttccaactgaggtacctggttcatctcattgggctagacagtgggtrcagctcatggagggtgagccgaagcagggtggggtgtcaccttacctgggaagcataaggg

SEQ ID NO: 524483 - DNA, 523 bp, Homo sapiens
gtgcaacctggaggctgctggtcagcaaagcatccacagcaggttcccttgtaggagctctgagcaggacacttgtggctgtcacacggccctgacatggctcaggagcaacctggtgtcacgtgctccttgaagcaaccctgacttcccctgctagaaatgaccttgcatttttggacacccctggggctttttgcctttgcctcccttaatgcaccccacattccaccacagttggcttccttagatatgcctcatcttacccaccgcagctcactggggcagatgacccacccactcactgggctgttggtgaccagcccacatttcctccacccatagcatgtccctgcacctccaactggcaacccctctgtgcctttgcctgaggtctttctcyggacccgagcccagctgcgcatgaatgcacagggcattcctagctggaaatccaggaccagtcccctgtcagtgatgaatgggagctggtggataaaaactcagatccccatcaataaaaaca

SEQ ID NO: 524484 - DNA, 581 bp, Homo sapiens
taaatgatctaggctattcgtattgtcaaaaatgtgtctatactgtctgaaaaagaaaattacagatggatgcatgttaggtacagaacatttgtgttcccccaaaatttaaatgttgaaatcctaacccccaaagttatgatattcggaggtgcagcttatgggaggttattaggtcatgagggtggaacccacatgaatgagattagcatccttacaaaagggaccccgagagagctctcttgccctctttccaccatgtaagcacaaaatgagaggtcagcagtctataaaccagaagaggactctcagcaaaatctggccatgctagcaccttgatctcagacttccagcctccagaaatgtgagaratacatttctgttgtttataggccactcagtctatggtagtttgttgtatcagcctgaactgactaagacagtatatgaaagtagtatacaattttaataatttaaaactcacaatgcaaggctacattatatctggacaccaacatacataataaaaatactaaactatgcatgggaagactaagcaccaacttcaagacaatagttac

SEQ ID NO: 524485 - DNA, 581 bp, Homo sapiens
taaatgatctaggctattcgtattgtcaaaaatgtgtctatactgtctgaaaaagaaaattacagatggatgcatgttaggtacagaacatttgtgttcccccaaaatttaaatgttgaaatcctaacccccaaagttatgatattcggaggtgcagcttatgggaggttattaggtcatgagggtggaacccacatgaatgagattagcatccttacaaaagggaccccgagagagctctcttgccctctttccaccatgtaagcacaaaatgagaggtcagcagtctataaaccagaagaggactctcagcaaaatctggccatgctagcaccttgatctcagacttccagcctccagaaatgtgagaaatacatttctgttgtttataggccactcagtctatggtagtttgttgtatcagcctgaactgactaagacagtatatraaagtagtatacaattttaataatttaaaactcacaatgcaaggctacattatatctggacaccaacatacataataaaaatactaaactatgcatgggaagactaagcaccaacttcaagacaatagttac

SEQ ID NO: 524486 - DNA, 502 bp, Homo sapiens
aaaactaaaagggaaaatgcaattatgctgtgagtttagatgggatcctacaaagccatgcacatgtgagttcacagccggcatatgtgagttcacagtyggcatgtgtggccagtgtatgtggccgtgatgggttgaatatggaaatgtcgtgggtgagacatccttactcactcactcacaggtaatgaagccactcctaccagccttgctggttcctccaagagatgcagagaggcacatcctgcacaacgccctgcaacttctcccttcctctccctcatgcacagtctgagataaacagagcactagactcggaaccatgttctaaattcagcatttactggacaggaggcctcaaacaagtttcacagccctaatgagtcgcagcctgctgaatcacaccttccactctctcctgctctcctgcctctggggccatgacagtggactgaagggagccaaggagacataataagaaagcaaactatggggcccctgg

SEQ ID NO: 524487 - DNA, 520 bp, Homo sapiens
tcatgttctgagcagagatggtgcatgggtcacatctacgtatatatcaaacttggttggcaataaatgtagtagtcaactctcartaatttttcatgaaatggctgtgtcgcaatttcccagggtgtttattaagtggattggctgagaataaataatggataggtagtttaaaacaaatgtattgtccaaaaggaagtgcaatgcaaatcataatgttgacaactcagatgatggctatcaagtttaaaatcaacaggatcaagtcaactaatgaaatattgtttccaaataaatgcttctataataaaagcagtacttctgcttctggaaagatgaaatgcaggtacttttccctattctctccattaagtgtagctaaaacactgggcattatatataaaacaaatatgagtagagttggaaaggtggagaaaagaaggtggactaactagcgaccctgggacctgaggaacagtacggtggtgagttctgtttttattctgcctcatctatccca

SEQ ID NO: 524488 - DNA, 529 bp, Homo sapiens
ccctagctggagcctgggagctgaatgggaacttgatacccgccttcccctccgcacctccccaccccttcaggctctggaagtgtttcccacgctccagggctaaggaaacagcctgcacctttccaaagtgacatcgctaagcccatgcaagagtccacgtcccgccccctctccactccccgccccccccgcgcccggcccccgggcctcttgactttcaggataggaaatccttctaaaagccccaacacctgcttctgcagagcattttaactcccagaagtcaggcagcctcggtcccaagtgaatcagacaattctattttaagactggcttcaagctgtggaagtgaggaggggaagaaaatgcgcaaaatagaacaaaaatggtctcagactactaaactgagtctccatatgaaatttaaaacaatataagaggttgggttttatcraaaacaaaaatcattcaggaaagaaagtaaatcccccagaacaagttagactttggtatccttggctgggtt

SEQ ID NO: 524489 - DNA, 529 bp, Homo sapiens
cctttgggaacaagaacaagaatataagtgtgctgtgttaaggagttaaggacaccaccagcacaaagagaggtgagattataatttttaaacaaaattctctttcatttggactgggactaattcatgaattccattgcaattaaactgagtgagcacaggctgaaaccagcaagttctccaggaagaatctttcttggtgaaattgctttatagattgaggcagtgagacaycccacatcaaaatatgacttttcccagcatcttgtctttttattatcaacagtaaacatgcatcgagcacctgttttatgtgtctcgctgaattgcatgctggacatgttttaatgtctgcttaaggaggattttacctgtaagtggttttcaaggccattgaaagaaagatagtttagttacctaggaggttcagatctagaggacaaaaggacgcaggcagagcaatatgtgcagcgatacccttgacagcaccatgaggggctttgctttgcacaggagagcctctaatcca

SEQ ID NO: 524490 - DNA, 626 bp, Homo sapiens
agctgacggaaggggaggactccgagcttggctgtaaatggacttgaagatgtgattggaattaatttacacaacatagttagaggttgttttctttaaagggcctaattggttttaaagaacattcatttgtatgagtgttaaaatattaataacctgacatacatctcctagggttctgcagctttatcttttggttatttcctttgtaagaagacattaatttcctctccattctattaaatagacatgagtgaatgggccatgcccatcccgtgttatagccaatatttccaaattatttggttacatttgtgccaaccagttagtcattagccaatgctattaaaaagcacctgggggctgggcatggtggctcatgcctgtaatctcagcactttgggagcctgaggcaggaggatcacttgaagtcaggagttcaaaaccagcctgggcaacacgacaagcccctcacctctaaaagtaaaaatacaaaataattagtcaagtggctaacacctgcaatctcagcactttgggaggttgcagtgggaggattgcttgagcccaagattttgaggttatagtgagtgatgaytgtgccactgcactccagcttgggcaac

SEQ ID NO: 524491 - DNA, 584 bp, Homo sapiens
tcatggctgctcatggataggtgggcccttggaaccaactactgtgtgtttaatctacagtattgatggagggagagactgaggarccaactcaagccttcttcatgaagtgggtggggaggaaagacagacttaaaaatttattagcatctaatcctgttaagattttctccaccatatgccagcacaacaacccatttgaaatgtgtactaattacccctgttgtatcctgtgtgtacgctttctacgcagcccctgaccttttcgttaataactttgcgttgcattcgttgacctgaaacaaattgaattcagtggcactcactcaagaattgaattacatagtcttcttaattggtgtcttatttaaatgtgagaaagtaacggcttgccacctgtaatacgtttccaacaaaataaaattagaattctaatatttttccccattctagggaaaggtttggccatgaaaatatcattcttgtatgatctcaaaaataaaattctctgaatttttttcattgccaatgccgtgaaaactgcctatatagacacatattaattggagagatttatgcaaatc

SEQ ID NO: 524492 - DNA, 465 bp, Homo sapiens
gcttccgcttctgataactgtgcttctatgagaatgtcatttagactcttgtggacggaaaatgggcctgatattagtttttgcccctcagagttgttgatgtaggtaaagagtttgaacttaggtctggctcatattgagggctctacaacactgctattattatgaacgcaaaaggcaaagcacrggacccagggctcaaatcctccactggcctccaggtcgaagtgaaacataaaccacaacagtggcctccagggcttcacctttcacctctgccccctcttcttttctccagtcacctcctgcactcactctgatgtgccaggctctggcctgtggcctctgcacgtactgtttcctctgtctgaaagtctcttcccctatgaggccatctctggtttcctattccacgtggcagtgctgctcccaggccatccactcttcacccagctttcccttcct

SEQ ID NO: 524493 - DNA, 465 bp, Homo sapiens
gcttccgcttctgataactgtgcttctatgagaatgtcatttagactcttgtggacggaaaatgggcctgatattagtttttgcccctcagagttgttgatgtaggtaaagagtttgaacttaggtctggctcatattgagggctctacaacactgctattattatgaacgcaaaaggcaaagcacaggacccagggctcaaatcctccactggcctccargtcgaagtgaaacataaaccacaacagtggcctccagggcttcacctttcacctctgccccctcttcttttctccagtcacctcctgcactcactctgatgtgccaggctctggcctgtggcctctgcacgtactgtttcctctgtctgaaagtctcttcccctatgaggccatctctggtttcctattccacgtggcagtgctgctcccaggccatccactcttcacccagctttcccttcct

SEQ ID NO: 524494 - DNA, 465 bp, Homo sapiens
gcttccgcttctgataactgtgcttctatgagaatgtcatttagactcttgtggacggaaaatgggcctgatattagtttttgcccctcagagttgttgatgtaggtaaagagtttgaacttaggtctggctcatattgagggctctacaacactgctattattatgaacgcaaaaggcaaagcacaggacccagggctcaaatcctccactggcctccaggtcgaagtgaaacataaaccacaacagtggcctccagggcttcacctttcacctctgccccctcttcttttctccagtcacctcctgcactcactctgatgtgccaggctctggcctgtggcctctgcaygtactgtttcctctgtctgaaagtctcttcccctatgaggccatctctggtttcctattccacgtggcagtgctgctcccaggccatccactcttcacccagctttcccttcct

SEQ ID NO: 524495 - DNA, 420 bp, Homo sapiens
ctgctgtgacaagaagcctgtgctgtctcccagggatcctcagcaagactaccattccctgctcaggaaggcccccggtcaccttctcaggtccctgactctctgcccctgccccagcagtgttcctggggtcactacctgcatgcacatcctgtctcagaatatgctcctggaggcccaggaaatgccccaggtcccaacagggctgcatgttcctgtttggaccatttgtgggaacaaagagagcactgtggctttccagtatctgtgtgggtgttcccaygggccagcttcagggctcccgtacaagaggctgggacacaggcaatgaggagaagcagtctggtgggggggcggtgtggattaatttgatgagaaccagaatgaaaaagattcagggggaggacaatgcttcagttc

SEQ ID NO: 524496 - DNA, 643 bp, Homo sapiens
cttgagtgttctcacaacatggcaggtgccttccmccagagcagagagagacacagagacagacagacagagagaacattgcagaagccatcctttttattgcctagacttaaaggtcctaagacattatttcttccacattttgctcagtagaagtgagtcactaagtccagactgcatgcaagaggaggacaataggctacaccttttgaaaggagaaatatcaaataatttgtggacatattttaaaaccaccccactgtctggtaatttaagaatactaatatacattctgcatatttacccacaaacatttattgcacattcactcattcagtgtgttgttttgagcacctagtacatgccagcgactgttttgatcccatggagttaacagattagtgaagcaataaacaatgccatgaaaactagagctagagagatgcatgtgtgcatgtgtgtgtgggtcggggggaggtgaacttagacagggtggtcaggaggctgtccgaggaggtggcatttcaactgagaccgggaggatgagaaggagtgagtcaagggcagagtgggaagcagagcattcctggcagaggaaacgatgcaaagtcaccaaggcagaaatgagggaacagaaacgcag

SEQ ID NO: 524497 - DNA, 618 bp, Homo sapiens
gccctacaaattaagtgatttattctatttttacatgaggaaatgtctgcgcagagaggttaggccatttgcttcaggtcacagagctggtaagaggtgastccacattgtaaacccagtgctaactccaaagctccctgcactgcagcaggaatgggagagagaacaaatatgctggggctgaaaagaagacttcctgtaggagatgatatttgcgccacttcgaagacagggtaggtgtaggatttgttatttgtgatgaagagaagggtgacctgccagcccagagaggtggtccatcagggaaagaaccgtggccagggcccaggccacttgggaagcaccctggtagtcaagaaggctggaagggcaagaatggggtcagcaccagttgggactgaggttcaaagctaacacttcatttccagtttgccaaactaacacatatgcgactgaaagatgtgccgtgctctgaaaagtccttaaaatagacagatgttagcatttctctctttcacatttcctcaaatgaggcaaatccaaggtgtaccgaaacaaaatagtactacctttgacgcttatgggccaaagacattataaatagcccattcagctaaa

SEQ ID NO: 524498 - DNA, 618 bp, Homo sapiens
gccctacaaattaagtgatttattctatttttacatgaggaaatgtctgcgcagagaggttaggccatttgcttcaggtcacagagctggtaagaggtgagtccacattgtaaacccagtgctaactccaaagctccctgcactgcagcaggaatgggagagagaacaaatatgctggggctgaaaagaagacttcctgtaggagatgatatttgcrccacttcgaagacagggtaggtgtaggatttgttatttgtgatgaagagaagggtgacctgccagcccagagaggtggtccatcagggaaagaaccgtggccagggcccaggccacttgggaagcaccctggtagtcaagaaggctggaagggcaagaatggggtcagcaccagttgggactgaggttcaaagctaacacttcatttccagtttgccaaactaacacatatgcgactgaaagatgtgccgtgctctgaaaagtccttaaaatagacagatgttagcatttctctctttcacatttcctcaaatgaggcaaatccaaggtgtaccgaaacaaaatagtactacctttgacgcttatgggccaaagacattataaatagcccattcagctaaa

SEQ ID NO: 524499 - DNA, 618 bp, Homo sapiens
gccctacaaattaagtgatttattctatttttacatgaggaaatgtctgcgcagagaggttaggccatttgcttcaggtcacagagctggtaagaggtgagtccacattgtaaacccagtgctaactccaaagctccctgcactgcagcaggaatgggagagagaacaaatatgctggggctgaaaagaagacttcctgtaggagatgatatttgcgccacttcgaagacagggtaggtgtaggatttgttatttgtgatgaagagaagggtgacctgccagcccagagaggtggtccatcagggaaagaaccgtggccagggcccaggccacttgggaagcaccctggtagtcaagaaggctggaagggcaagaatggggtcagcaccagttgggactgaggttcaaagctaacrcttcatttccagtttgccaaactaacacatatgcgactgaaagatgtgccgtgctctgaaaagtccttaaaatagacagatgttagcatttctctctttcacatttcctcaaatgaggcaaatccaaggtgtaccgaaacaaaatagtactacctttgacgcttatgggccaaagacattataaatagcccattcagctaaa

SEQ ID NO: 524500 - DNA, 618 bp, Homo sapiens
gccctacaaattaagtgatttattctatttttacatgaggaaatgtctgcgcagagaggttaggccatttgcttcaggtcacagagctggtaagaggtgagtccacattgtaaacccagtgctaactccaaagctccctgcactgcagcaggaatgggagagagaacaaatatgctggggctgaaaagaagacttcctgtaggagatgatatttgcgccacttcgaagacagggtaggtgtaggatttgttatttgtgatgaagagaagggtgacctgccagcccagagaggtggtccatcagggaaagaaccgtggccagggcccaggccacttgggaagcaccctggtagtcaagaaggctggaagggcaagaatggggtcagcaccagttgggactgaggttcaaagctaacacttcatttccagtttgccaaactaacacatatgcgactgaaagatgtgccgtgctctgaaaagtccttaaaatagacagatgttagcatttctctctttcacatttcctcaaatgaggcaaatccaagrtgtaccgaaacaaaatagtactacctttgacgcttatgggccaaagacattataaatagcccattcagctaaa

SEQ ID NO: 524501 - DNA, 618 bp, Homo sapiens
ctgtttacatgactcaggtcccatgatcaaattcccttaaggctcgaaatattttaaagttccaacagcttagattttgaattgcttattttcacagaatggacctgtgtaaggaggtatgtgtgggagaagattccagaaggtcttgagacactccagatgaaggttggtgtggggctgtgctgctggagcaccagagagtgaaaagaggcaagcgatttatagtctcatcaaatatcgacaagtttgggttttcctttagagttgggcagsgcctggctggacttctttctccaccagtctccgggaggctcaaacaagttctgattttcaggttctgaaaaagctctcagggaaaaagcagcttccattctgttttttttccctttctgcattctacttcccttttatttttggcctggtaatttctgtcttatcagcttttagatgtccttgagatttttcttttctttcatttttttttttttgagacagggtgtaaaccaaaaactcttttattctttttttttttcttttgagacaggatgtaaaccaaaaataaaattctaagccccgccctccctgcaaccatctgaatggacttcctcctgggccagg

SEQ ID NO: 524502 - DNA, 618 bp, Homo sapiens
ctgtttacatgactcaggtcccatgatcaaattcccttaaggctcgaaatattttaaagttccaacagcttagattttgaattgcttattttcacagaatggacctgtgtaaggaggtatgtgtgggagaagattccagaaggtcttgagacactccagatgaaggttggtgtggggctgtgctgctggagcaccagagagtgaaaagaggcaagcgatttatagtctcatcaaatatcgacaagtttgggttttcctttagagttgggcagggcctggctggacttctttctccaccagtctccgggaggctcaaacaagttctgattttcaggttctgaaaaagctctcagggaaaaagcagcttccattctgttttttttccctttctgcattctacttcccttttatttttggcctggtaatttctgtcttatcagcttttagatgtccttgagatttttcttttctttcatttttttttttttgaracagggtgtaaaccaaaaactcttttattctttttttttttcttttgagacaggatgtaaaccaaaaataaaattctaagccccgccctccctgcaaccatctgaatggacttcctcctgggccagg

SEQ ID NO: 524503 - DNA, 618 bp, Homo sapiens
ctgtttacatgactcaggtcccatgatcaaattcccttaaggctcgaaatattttaaagttccaacagcttagattttgaattgcttattttcacagaatggacctgtgtaaggaggtatgtgtgggagaagattccagaaggtcttgagacactccagatgaaggttggtgtggggctgtgctgctggagcaccagagagtgaaaagaggcaagcgatttatagtctcatcaaatatcgacaagtttgggttttcctttagagttgggcagggcctggctggacttctttctccaccagtctccgggaggctcaaacaagttctgattttcaggttctgaaaaagctctcagggaaaaagcagcttccattctgttttttttccctttctgcattctacttcccttttatttttggcctggtaatttctgtcttatcagcttttagatgtccttgagatttttcttttctttcatttttttttttttgagacagggtgtaaaccaaaaacycttttattctttttttttttcttttgagacaggatgtaaaccaaaaataaaattctaagccccgccctccctgcaaccatctgaatggacttcctcctgggccagg

SEQ ID NO: 524504 - DNA, 595 bp, Homo sapiens
ccctgccttagcctctcaaagttctgggattacaggtgggagccaccatgcccagcctgggagaagacttttaaaacatattttgtttaggccagtcatggtgttgaggtcaggagttcaagaccaggctggccaacatggcgaaactgtgtctctactaaaaaatataaaaaacttagccaggcgtggtggcaggtacctgtagtcccagctacttgggaggatgaggaaggagaattgcttgaacccaggaggtggaggttgcagtgagtcaagatcatgccactgcacttcagcctgggtgacagagtgagactctgtctcaaaaaaacaaaagcaaatcatgttttgttgagtttgtttagctgtgtattcacaagttgattggcatctctcagcccrtcccaaccccaccccggaatgctcttcccaggcttcctaacaggtattctcctttacctggattgcatttgtagaaaacactctgcttcagtgggaggcaaggaacagaatatttctctgtctagggcatactcttccatgttatctgattccaattctatgggacctattttaccattctgaaagctacaga

SEQ ID NO: 524505 - DNA, 680 bp, Homo sapiens
taattttatgtgtcaatttgacagggtcttggggtgtccagttatttggttaaacattatttctgggtgtgcctaagagggtgtttcctgatgagattagcatttgaatggatggactgaataaagcaagctgccctcctcaatgtgggcgggcaccatacccttgaaggcttgaatagaacagaaaggcaggagaatttctctcttggcctgaacacttgagctggaacgttggtcttctcttctctgtggactgggacttacaccatcggctctcctgagtctccagcttaaagayggcagatcatgggacttcttggcctccacaattacatgagccaattctttataacaaatctatatccatcagtctatgtcttctgtctatctacctatcagtctatcaaccagtccagccatccatctgtcatctatctatcttactggttctgtttttctggagaaccctgactagcaaagatgatgagcccaacttcttgttggggatccccagatatcagcgggcagagtgtctccttttggcaccttcagtttctccagaaatgaacctttccatttccatcctaagggattgcaagagctgtggacttgccaggagggaagggagcagaggcccccacagttcacaatgtaatgtttcccttaaacacagcccccac

SEQ ID NO: 524506 - DNA, 537 bp, Homo sapiens
tgtcatttgataatcctgggcaaagactgaaattggtgctgagtccagtcsggggatgctgtggagtcatcaaattagaggcttgggggggcctcaaacatccagccagcttcctccttcagaggtgctgaactgtgaagctgtgtgatgtgagaggctgacaggctaagctgaagacctcaggaaagtagagtggaatttcccgtggtctttttttttttttttgaggcagtgtctctttctgtcacccaggcaggaatgcagtggcaaaatcacagctcactgcagcctggacctctcaggctcaagtgatcctcccacctcagccccggagtagctgggaccacaggcacgtgccaccactcccgggtactttttgtattttttgtagagtggggtctcaccgtgttgcccaggctccctgtggtctcctgagaagacaaaggctcaccagggggtggagttcctgagaacagcttggcaggagctgaaaacgctggagagcaggtgaactgacccctgctgtcaggcatctgc

SEQ ID NO: 524507 - DNA, 537 bp, Homo sapiens
tgtcatttgataatcctgggcaaagactgaaattggtgctgagtccagtcgggggatgctgtggagtcatcaaattagaggcttgggggggcctcaaacatccagccagcttcctccttcagaggtgctgaactgtgaagctgtgtgatgtgagaggctgacaggctaagctgaagacctcaggaaagtagagtggaatttcccgtggtctttttttttttttttgaggcagkgtctctttctgtcacccaggcaggaatgcagtggcaaaatcacagctcactgcagcctggacctctcaggctcaagtgatcctcccacctcagccccggagtagctgggaccacaggcacgtgccaccactcccgggtactttttgtattttttgtagagtggggtctcaccgtgttgcccaggctccctgtggtctcctgagaagacaaaggctcaccagggggtggagttcctgagaacagcttggcaggagctgaaaacgctggagagcaggtgaactgacccctgctgtcaggcatctgc

SEQ ID NO: 524508 - DNA, 584 bp, Homo sapiens
tgggcctgcgaagccttccccagtgggcctctcaagagtatggcttgaaatgaatcaggcagagcaccttgacagggcagcggctccaaaacccaggtctctcccacctctcattccactcagaggggccgggagaagatgaaggccatgccctaaaaggaccctaagtggatgggcagagagtcaggttgtggtcgtcttgtcttctgatcaagaactataccagacccaatttctctcctttccaaagcttgggagatgcttaattcacttaatgacaaatccttcaaagcctatgccagacactgtggtcagtgttgaagatcacagagatgaaccaaacagataagagcatcctgccctgacaaagctcaatgtctctttcttcttctgcaaagtgagtgttgcatttggaggattctcaacactgtggactccctcccctgatccctccactccagtctctctaacatggcatttcttaacatgggaccttctggaatccacccatttatgaatgtcctgtgggaagccctagctaaattcacattccaaaatgtstctgtgagctggggattttaacc

SEQ ID NO: 524509 - DNA, 373 bp, Homo sapiens
tcaaacctgactttgctgccaaataagctatgtggtcttagcccagtatatttaactcctctgactttgccttctcatctgtaatatggggatggtattagcataaacttctcactgcagatctgaagactaggtgagttcatattggtaaagtgcttagaacaatgctggcacacagtaggtgctatataacaaataaataataaatttgcaaatgtgacagttytcccgaggggagaaaaaaaaagatgcaatataacagtccagcaaggaaagtttgtgacatccacccactctacagcataatctggccatttacaacgagaaattaacaccctagaataatgcacggtctgcagagaaaaagagcaga

SEQ ID NO: 524510 - DNA, 512 bp, Homo sapiens
caaacctgactttgctgccaaataagctatgtggtcttagcccagtatatttaactcctctgactttgccttctcatctgtaatatggggatggtattagcataaacttctcactgcagatctgaagactaggtgagttcatattggtaaagtgcttagaacaatgctggcacacagtaggtgctatataacaaataaataataaatttgcaaatgtgacagttttcccgaggggagaaaaaaaaagatgcaatataacagtccagcaaggaaagtttgtgacatccacccactctacagcataatctggccatttacaacgagaaattaacaccctagaataatgcacggtctgcagagaaaaagagcagactgcaaagcgctgcactctagagcgagggttggcagactgtttctggagacggtcagagagcaaggcttttaggctttacaagccatatggtctcygtcacatctcctcaaatctgtcatggtagcatgaaaatagccac

SEQ ID NO: 524511 - DNA, 453 bp, Homo sapiens
gcagcaacccattaaatgataaaaatggaacaatgggatcaggctcaaacaggtcttcagggcacaaataaatttcaaaaataagcagcccagatgcccatgtcacctgtctcatgcaccaatgtctctttcagctcacacctcatgtggaattccctaagaagagctgacagaaaatgaaaacaaaattcatggatgaatcacaatatactggtaaaagctgtaaatgtaatgcttccagacatgagttcctctcacaagtggccctgaaaaatggtgattaggggaaatcttcctggcaggcagagctttaagcagtattcctaggccctcaatttggaggacaatgcggattggtttcatcaagggcctagaaggtrcaagatcagaaggtaagagaaaaagagttctggggaagaagcatgtgattgggcctatgagggtggtgtagca

SEQ ID NO: 524512 - DNA, 624 bp, Homo sapiens
ttctccatctacagactcagatctgtgacaacacggagctagtatttcctacaacataatgcctggcacacggtaagtgcgcaatatgtagctgttgcacggctaaatgtatacataagcttcaaagcagagtggcccatagcaaatacggtcgcagtcccgggagaaagcacacacagccgagaccccaccgcttcgtcggcgccgcctggaccagccagtagctccgcccctgggccccgcccctccctgctgagcgaacggggcggggcccagaggtcgcgtgacgtgacagcagccggtcggtgattgggtctccaggcgcgccgtgtcggaaagggggcgcacccgcgcgcgctgaytggctgtctggcgcagcggggcggacggcggcggcgccgcgggggcgggcgccggtaggggccggacagggtagggcccggagggcggtggcggcggagcgggcggcatgggtcctggccgccggcttcgctgagacgcgctcgcgtgggctgccctcccgggcccgcagtggtcgcggcggcatgaagggcgctctggggagtcccgtggctgccgctggcgccgcgatgcaggagagtttcggctgcgtggtggccaacc

SEQ ID NO: 524513 - DNA, 593 bp, Homo sapiens
acacatgttaatttcctggttttgatacgtggttgtggtaatataagatgccagcattaggggaagttgagtgaggtatgygtgaaaaatttactatttttgcaacttttctgtaagcctcaaataattcagagtaaaaagtaaaagacagaatatcagaaaaacaacaataattgtactgacaacccactctccaaagttgacctctgacacacagaagtgaggaggaatagaatttaaactaaaaatgtctatgtccttacttaccttaattaaatggcaataaacatgatgaaataccacagtggaaagtcttcctggatgtaaaatgtactgactacctttggcacaagcttacaactagggcactcgagatacccgcagatcctaagtgtgataaaacgggaagctgtcccaagagtcagttcaatgacctcttataagacttaagtgcttcttgaaagtattatgaatctgctgtcctaattaaactgcttcatttaaatctactttggattttattctaacaagtcaaattagtataatttacagtgtagagccacatattattttaaagttgattccatatccag

SEQ ID NO: 524514 - DNA, 460 bp, Homo sapiens
ctgaggagatggccaagtaggagtgaaatcaaagatgtgtccaatcccattgctggatcagagagggagcatgtcaactggggtgcaagatagaatgaaggaaagggtgctaagggctctaaatttgggagatgagtgccaaacaaatggatgccgaacagatggtttttaattactaagcctgggtctttctgcagccacaggtctttctatagtcacaacagtactattggtgataattagccctctgggacattgcaagtgggagattgttctggatagagccacttggtggaggtctgcctaacagagaaactattgaaggacactggtcatgtagggaagaataagacatcaaaaaacctaggatggggtcttcaaagtgttagtaacctacagctaattgagtcttttaaaaaataatctcactaaacagraactcttacattaaaggtaagtg

SEQ ID NO: 524515 - DNA, 631 bp, Homo sapiens
gtgtgcataaaggcaaggcaaagttcttattcattttcatatagcccccttgcatttagcaaagtactatgaagagagctgaaaaatttgattgagctggacttgtggagtgagaagtgtataaggaactcaggaaggataatagctcctataagccttgatgtctcaatgtgcaagaggcaaataatctgacttgtcacacctacatgaagatctgattatatgagggtagcttattcttcgtcaataatagcggaaaccaactgttctatgtttatgggacactatgtggatgacactgtgctaagtaaatgctttatatgaattatctaatttattgtttataatgctaaggattagacatgmcttttttaaatttttttctgaaattccagaaaacaaactgaggcttagagaatttaaactggttttgtcaaagtagtagagatatagatattagaataggggtcaaagtagggaaatccaaagcattctaacccaaagtgaatgcttataacttcaccactccaatagtttcctacccttagcagagcccagagagaatacatcaaacatataaatttttaaattaggaattaagcatggaggaagaaagtctagacatataaga

SEQ ID NO: 524516 - DNA, 524 bp, Homo sapiens
tcccattttaaagacaaacatgatactgatttatccccctgccagcattttaagtgctgacatgaccactaatctgggggaaattaaaatttataagtaaattagcctttcaaaaatatctgaaaaggaaggatttgccatcaaagtattgccagtttgtgtacaagccttgctgctcattgattctaatcacaaatatatgattcttgcccttcagccgacagcttgggtttattgaagtcactcaagactgagcatcccgcaggtgctactttatttttttaagatctagcaaaatgaaaggtcagggtcagaagtggttgcaggagtcagaagtggttgyacatggttcttttttttcgaatatgagccttagtgttctggtgaattttcagctcactgaattgcattctgcctcagcccctcaccccgtcttcattggctccctaagctactgcagccacagacagtaaccagtgatcttcctctctgaaccaggcccagaatagtggaaatgtgtctgc

SEQ ID NO: 524517 - DNA, 524 bp, Homo sapiens
tcccattttaaagacaaacatgatactgatttatccccctgccagcattttaagtgctgacatgaccactaatctgggggaaattaaaatttataagtaaattagcctttcaaaaatatctgaaaaggaaggatttgccatcaaagtattgccagtttgtgtacaagccttgctgctcattgattctaatcacaaatatatgattcttgcccttcagccgacagcttgggtttattgaagtcactcaagactgagcatcccgcaggtgctactttatttttttaagatctagcaaaatgaaaggtcagggtcagaagtggttgcaggagtcagaagtggttgtacatggttcttttttttcgaatatgagccttagtgttctggtgaattttcagctcactgaattgcattctgcctcagyccctcaccccgtcttcattggctccctaagctactgcagccacagacagtaaccagtgatcttcctctctgaaccaggcccagaatagtggaaatgtgtctgc

SEQ ID NO: 524518 - DNA, 467 bp, Homo sapiens
aggatgaaaagttggcactgcttttattggctagacaatggatcaygagaaaatgaaatattaccatgaacagaagctgctgtggtgtgctgcctgcttatttggttggttgtgctgagacttgattcaactccttgcttttctcttttgcaaaagtgttggaatatgccagtctaggaacaagaaaagtctactcttattcattaactgtcgtattcatactgtggatacatgcctcaactgcaagagcattacttaaaaattaaatgaatcccataaataatgctatttccttttgaagaactaatgttcatggttctcaatgagaatgtgttaaggtgtattggaataagacatctttatccatcaacatagatcaatctaatttagccaatgagagcaaacaagtaaagaaatggggcttgagaagaataacaactttattgagaacttattttaccttatgc

SEQ ID NO: 524519 - DNA, 629 bp, Homo sapiens
tagattccaacataccctggaccagttttcctccaaggatagattagtcatatgttatagaaacctgtgtaaagcagagacagcaytaaatataatcaacatatattcctttacatacagagtaacctgaggttataaggtaaagccatatagtgcgtaggtaatctgataatcaaagtattgaataattaagagtatttaatcacaccattttatctatgatttccaaaataaaattatactagtattttcaacaaaatgactccgtacacaatgcatacctatctgttcaattaatactcactgatggcctactatgtacaaaatgtgcaaggtggccccacaagcactacatgataaatattggtgcactcgctcttttcattcattagacaatgcacactttgaaagacaaagaagtgacttgcttcttgtgtgttgttaatacaggtatgttagatgtatgaataaattaatgagtgaataatgaaatgaataaacaaactatgaaaaaagaaactgtccttctactgaaggcatttaatctatgtgtatatgtgtgtgtattgggacagggggaagacagatgtggcagggagagagattgataaagtaggtgaggcaatata

SEQ ID NO: 524520 - DNA, 643 bp, Homo sapiens
tgtattgtagttttcaacttttcaatgtctttgcacatgctaggctttcacaacacatttttctccctttgtatatctgggaaaagactccaaataatgctttacatttcagtccattaatgcctcctttgggacatctttcctgaactagcctttgtctcattctccataactctgaaatagcattatttacctttggaatgaggactctttgaggatgggaattattatcatttattattttactgattttttttctaatgsctactaaagtactctccacattagaaattcaattagtcttgagggattaaaattagtcaacggcccatatttgaaaatcacattaattcatcttgaagtataagttaatatctattattgaagtaattgtctaaccacctagttccttttatggtactgtttttatgattgctgcaacataatttttaataagaatagttaggtagaaaagctacatttagagaggaatgttatttctgcagtggcagtgttttatggcaagtgcatgggattagaaggtaagaaagcatgattcttgcccctccacttttacctctactttctacgaatttctatttccttatctgtgagatgaagcagttcagttagatgacttctc

SEQ ID NO: 524521 - DNA, 646 bp, Homo sapiens
ctgtttgtgaactctgatttactaagatttactacatttaatgagagtacaaaagcgggttttcaactaccaggatatatttgaggccaagagaagaaaataaaagccactgagcatgtgaagcaataatttcgatgatactttccaatttcgaatgatgcataaacttccattacaatgagaaatttgctgtttgctttgagaagtcttgtcactactcttgaagaaaagggagaaagaaaattagcatttatatctttcctcctttgtggtaaactgtattctaggcacttcacatatattaattaactcagttaatcctcacataatccttagggaatggctgttatctgcgttttacaaacaccccagggagaattggtaacttgtctaatgttatayggctaatatgtgcaagacaacggttagaacacaggctaatttgactctaagacctgtgctttttaaatgtcagttatcttctgtttatatctgtattgcagattataattaatgtgttaacatacattcactgtagaaccagcggttttttttttccctgttgttgttacttgtggaatctacatatgagggttgtgacctaacttgtttcctgggaagcatcataacattctatcataatatg

SEQ ID NO: 524522 - DNA, 560 bp, Homo sapiens
aaaaaaaaattacagaaaagcacagaactggtgctatgggtccaaaggaaaagaaattagcctttcatatgggtctcctagggtgagcaccacagttcctagacatgctcccacattgtttcaaagttcactctgcacagagagcttcttctttacccttttcagtgagattctacactttgccactttaggaatatcctattccctaacacagaagtgatgtacttstcctagaccctgtgccctgtgccccaccacaccctagggcaattcacctgaagctaaatatttccctaaattttcattgtgtctggaaagatagtacacagaagcttcagcagaattgttcgattttgggagactcaaagtatgcacactttcacaaaatatttgctagtttagagtgaagttatgcctccttattcctgtgtaaatctagtagaaaacacatgtgcatgcatgcacatgcatcacacatgcacgcatagcacacgttcccacattcagacatacccatatatgtgtgcatatacacagcatacatacatgtacacatacat

SEQ ID NO: 524523 - DNA, 624 bp, Homo sapiens
gggtttggtggctcacacatgtaatcccagcactttgggaggccgaggcaggtgaatcacttgaggtcaggagtttgacaccaccctggccaacacggcgaaaccccatctccactaaaaatacaaaaattaccagggagcagtggcacacacctgtagtcccagctactcgggatgctgaggcaggagaatcgcttgaacctgggaggcagaggctgcagtgatgcaagattgtgccactgcactccagcctaggtgaaatagcaagactccatctcaaaaaaaaaaacaaaaaaaaaaaaaacaaaaaaaacttgaggtcaggagtttgagaaagcatttgcgtatcaacaagagcaaggaaaattctgcccacctttttaaaaatgcatttttgtcgaagccctgaaatccttgcctgcctgccaaacagtttagctttactaatatcatcattttattrtattataatgggatttatttggataattacttagataatttgttgcattttgtatatattactttataccacttagtagaaaatagaaaaagtgaaagtactgcttataatgacagtgcaattgggagcaagatggactcattaagtttgccaaaagcaat

SEQ ID NO: 524524 - DNA, 569 bp, Homo sapiens
aaaaagtataaattatttagttgcaatctcatatcatctaatttttaataatgactgtgtttaacaattggcttacaagattccccgaaatttagcaattggctctaatgagtcagtatgagcctgccccagcacaccactgcctcagagccttttgggctttgtccaagatcagaaggagctatgtgcctgctgaagcaactgaaggagggaacctcaccgccggctcctttgccccacaaggcatctcggcttgaatctcagtccggaargagagagaggaaggagcataggagaggactccaaccaggaaagccagtagcaggaagggctggcagcatcaatgttatcatgggagctgtttttctctgtcttatcaatggcagagacaagggaaaacaatacctctgacttgatatcactttgcgagccaacaggaaaaccccagaaccatgggtctgcaatggctttgccaatctgggtgggtcaggattcctttcccatctctgagttcttgccttctgcctgtctctgctttctatgctccagtatgctgattacatagctcc

SEQ ID NO: 524525 - DNA, 638 bp, Homo sapiens
cagcatgagattatcagtgattttttttcctattagtttttcctattttccaactttttttataatgtggcattacttttattttacgtttgtaatggaaatggartcctggaaactctggaaatgcatgtagtgttcccctccagatgttggaaactgacgtgtggttgggtggggctgggtcccttcaggaccagtgggaggccaaaatgtgctgtcattcattacattcccaaaccctgctcagaaacggccacaccatgcttcaggttcttgccgcttagagtacggccctggcagagatgcatcagtgcctccagggagctattacaattgcaggctctcagagcagcatcttagcaaggtccccaggtgatctgtgtgcccccatcccagactctgcatacatagtgggagctgacccactgacgactttcctgcagaccccacatctccagtgggtcctgtcctccccctcaatatacacagtaagcaggaggctattggctcccagcagagagtgagtaccctcagcccccctggggttctctggatagaatgaggggcaaacaggcaactgaggatctagttggtccttaagggcatgctcatggcctgtgcagtccatagcctgttgc

SEQ ID NO: 524526 - DNA, 527 bp, Homo sapiens
caggggttgggaggactgtagagttggaagtgcctccagagtcaccagatccacctgcctgaccagggcaaaggccccctcagcagcctccctgatacttgttctctcagcctctgcttgcatacccccagtaaaaggcagctcaccacctcccagccaacctcaagagatttcacgcagggatgggaagaaaacactgaaccattctgaagaagtgcccagagagtgtgagcctcctccacatctcttccgmagccgctggcttgcccggggggcccctcccacttccccgccctgcagcgctgccttctctgctccttggcttggctcctccttcccacccccatactggccacagcttcccacttcccaggctgccctcgtgtgaggatcccagcctcactctggaagtcagaggatccttccctcccccgagctcagtcagatttactgagtgtgtccttgagtgagtccccttgcctctctggtccccaaagggcctgtctgtgctacaaggagtggtttct

SEQ ID NO: 524527 - DNA, 652 bp, Homo sapiens
ctgctgaatcctctgatcacacacgatgggacttgtacacttgaaatcaaacatatttttaaaacttctgttgttgagaattcccacctcatttttccatggacaaaattattctttatgtcatagtgcacttaaaatttggtattacctagaagttaaagaaatgtgataaccatgccaaactgatatctctatgtaagattattccgtcagaaaaccctctcccagttcccctgcagctcttcaggaatccccatctccccagagctctttgtgcccatggatggcgcttccaaagtagagaagaccgtttgtcaagaagggaagcagaagggggacgagagggtcttgcaggcagagctggaatcgacttccactctgcttcttgcaagctgtgtgatgctaggtgaaatttctccttcctctggagcctctattttcttagatttggagcagggtggtcacactgaccttgtagatttctgagaatcagagacagcacatgaaaagcctggaggccattctcttaagagtagctgtgactcatgtgtggacaatgggcttttcatgcttctstttctctctgtttatctgatgcaaggaacatgctccggtgatgatggtgagggaggaattaggatagacatagaca

SEQ ID NO: 524528 - DNA, 397 bp, Homo sapiens
ctctctttgaaattgactaagctcattgcctgaaggctaactctcatattttctcttttatccattattgacttataatttcattgctaaccctaaaaattcamtggggtttgcaaaaaagggatttttcgggaccattatccttttgtgaacttcaaacataccgtgtcaacgtttctccttgcccgcaaagtttaggatctaattctttccgactggtatgttctctgggccccgcgtgggcctccgatgatttctcctgcctttctctagacctgtggtatttctgctgtgtctcggcctcagacaccaacaagccatcaaatgatgtaggggcttgacaacaatttgtaattacaaccaccacacacacacaagtcatgatttgaaaagaaaa

SEQ ID NO: 524529 - DNA, 397 bp, Homo sapiens
ctctctttgaaattgactaagctcattgcctgaaggctaactctcatattttctcttttatccattattgacttataatttcattgctaaccctaaaaattcaatggggtttgcaaaaaagggatttttcgggaccattatccttttgtgaacttcaaacataccgtgtcaacgtttctccttgcccgcaaagtttaggatctaattctttccgactggtatgttctctgggccccgcgtgggcctccgatgatttctcctgcctttctctagacctgtggtatttctgctgtgtctcggcctcagacaccaacaagccatcaaatgatgtaggggcttgacaacaatttgtrattacaaccaccacacacacacaagtcatgatttgaaaagaaaa

SEQ ID NO: 524530 - DNA, 496 bp, Homo sapiens
tgtgggacactggcttgtctaggacggtcttggctctttgtggttcttacaaccctccagtaggctagccggggtatgttcttatggcattatgggaatcatgatggagatcaagcccgattatgtgagagagttggtagaaataggtatgcactttttcaagcctctacatgcatcacatttgctgtcatcctatgggcaagcagtctcatggctaagttagaatcagggtgagaaggatgatacagctacagggcaaagggcctaggttaaaggagarcatgagttagggctgttgaaacaatcaatctactgcagtattcttggaattttcttgaggtttccaagtacacccattaggaacagtcaatgggacaggtcagtgacatgtcctgaaacccaagtccttcttcaatccatccaaagaaatggtcaagaagctgtcaagtcagtttctggttttctctacctggacttctgtttgctagcttgccat

SEQ ID NO: 524531 - DNA, 556 bp, Homo sapiens
tggagttaatgtccttccgttttctgagagctaattatcacctgtagcttggccccaggcacgtacagaaggggtcaccagtggcactgtaaatgcattggctgagtcaaatgcattccctcttattttggccggcaaggtgagttaaacatgacagggrgtcagcaagcatctgggccagtcactcgcctccagacatcagatcctggtgccctgggtcgtaacacttccatcaccaggctgagcataaccaagtgcccagaatcctgggcctggaaaacaacaatagctgcctctttggcctcccagctgtaagcaccagctctcgcaatagtgctaagggtttttctacctgcacttctgcctgggaagggtttgttggctcagagaggttaagtaacttgcctggagttacactggtagacagctaagctaagatttaaacttccaactggctgatgttgtagttcagatatttttctgcctcatgtcaaaaaaaaatattataccccgtttgcctcatggcgggtaaatgattacctactatgtgccaagc

SEQ ID NO: 524532 - DNA, 556 bp, Homo sapiens
tggagttaatgtccttccgttttctgagagctaattatcacctgtagcttggccccaggcacgtacagaaggggtcaccagtggcactgtaaatgcattggctgagtcaaatgcattccctcttattttggccggcaaggtgagttaaacatgacagggggtcagcaagcatctgggccagtcactcgcctccagacatcagatcctggtgccctgggtcgtaacacttccatcaccaggctgagcataacmaagtgcccagaatcctgggcctggaaaacaacaatagctgcctctttggcctcccagctgtaagcaccagctctcgcaatagtgctaagggtttttctacctgcacttctgcctgggaagggtttgttggctcagagaggttaagtaacttgcctggagttacactggtagacagctaagctaagatttaaacttccaactggctgatgttgtagttcagatatttttctgcctcatgtcaaaaaaaaatattataccccgtttgcctcatggcgggtaaatgattacctactatgtgccaagc

SEQ ID NO: 524533 - DNA, 556 bp, Homo sapiens
tggagttaatgtccttccgttttctgagagctaattatcacctgtagcttggccccaggcacgtacagaaggggtcaccagtggcactgtaaatgcattggctgagtcaaatgcattccctcttattttggccggcaaggtgagttaaacatgacagggggtcagcaagcatctgggccagtcactcgcctccagacatcagatcctggtgccctgggtcgtaacacttccatcaccaggctgagcataaccaagtgcccagaatcctgggyctggaaaacaacaatagctgcctctttggcctcccagctgtaagcaccagctctcgcaatagtgctaagggtttttctacctgcacttctgcctgggaagggtttgttggctcagagaggttaagtaacttgcctggagttacactggtagacagctaagctaagatttaaacttccaactggctgatgttgtagttcagatatttttctgcctcatgtcaaaaaaaaatattataccccgtttgcctcatggcgggtaaatgattacctactatgtgccaagc

SEQ ID NO: 524534 - DNA, 447 bp, Homo sapiens
cttggcctgaaggaggccgggctggtctgtgctgctgtgaaactgggaccgactcttggcaaagtccttcttgtactcattgtcactctggagcctgccaacgttgaggaaatgcttcatccttgggtcatcgtcgacactgcrgtacccgatctgcaggcctcggtcccgcaggaaagcctctttgtaccggaactgcaagtcagaggagcagaggcagatcatgggtgcctacctcccccaggaccagcctcacatatggggccatcccagggcattctcagcaggaggctcaagagtgggttagaggcacaggctttggattcaaatagacctatctgtgtggtcatgggcctgttactgagtttctccatgagcctcagtttccccatctgataaaattggagaatgatctacaccccataggaggttgcgaggattcaacca

SEQ ID NO: 524535 - DNA, 447 bp, Homo sapiens
cttggcctgaaggaggccgggctggtctgtgctgctgtgaaactgggaccgactcttggcaaagtccttcttgtactcattgtcactctggagcctgccaacgttgaggaaatgcttcatccttgggtcatcgtcgacactgcggtacccgatctgcaggcctcggtcccgcaggaaagcctctttgtaccggaactgcaagtcagaggagcagaggcagatcatgggtgcctacctcccccaggaccagcctcacatatggggccatcccagggcattctcagcaggaggctcaagagtgggttagaggcacaggctttggattcaaatagacctatctgtgtggycatgggcctgttactgagtttctccatgagcctcagtttccccatctgataaaattggagaatgatctacaccccataggaggttgcgaggattcaacca

SEQ ID NO: 524536 - DNA, 636 bp, Homo sapiens
gacagatccactgacactctagtaagtgtacacagaagccttaagaacataagcaaatgtggatgaagcaatctggctggaggccatgcctaagtgcataagtagatgggtcastcagtaaggaaacaaagaagcatggacggagcaggagtggtgggccctgtctgagctaggtagagctctgcctgctgatacccatgtggccatgagcaaatgagttaatctgtctacatttcaggttcttcatctgtaaagctcctccttgaggtgtctttggagaaagcaaaagagaacgtaaatttcctgagacaatgcctgcctcacagcagggactcgatatgtattcattcccctacttggtccctctcaggaatagatcagggtctacttcctggaagaagtgagtttcaagatgattctttttgggtgggaagggacacagaccagtcaattcccactgggtggagtcaatccagggataatgaatctttagaaagcctagggaaaaggaccatcttgggtgcctgccacaaaaacatcagatgcatctggccttccatgcagaagggtgcaggtacaagatagggcacagaaagtctagcgtcgaaggggcctccaccacttaccttgggagca

SEQ ID NO: 524537 - DNA, 636 bp, Homo sapiens
gacagatccactgacactctagtaagtgtacacagaagccttaagaacataagcaaatgtggatgaagcaatctggctggaggccatgcctaagtgcataagtagatgggtcagtcagtaaggaaacaaagaagcatggacggagcaggagtggtgggccctgtctgagctaggtagagctctgcctgctgatacccatgtggccatgagcaaatgagttaatctgtctacatttcaggttcttcatctgtaaagctcytccttgaggtgtctttggagaaagcaaaagagaacgtaaatttcctgagacaatgcctgcctcacagcagggactcgatatgtattcattcccctacttggtccctctcaggaatagatcagggtctacttcctggaagaagtgagtttcaagatgattctttttgggtgggaagggacacagaccagtcaattcccactgggtggagtcaatccagggataatgaatctttagaaagcctagggaaaaggaccatcttgggtgcctgccacaaaaacatcagatgcatctggccttccatgcagaagggtgcaggtacaagatagggcacagaaagtctagcgtcgaaggggcctccaccacttaccttgggagca

SEQ ID NO: 524538 - DNA, 556 bp, Homo sapiens
tttcattgcctcctcaacttttttttttgagacagggtctcactcagtcgcccaaactggagtgcagtggtgctatctcagttcaccacaacctccacctcccaggctcaagcaattctcctgcctcagcctcccaagtagttgagattacaggcacatgccaccacgctaggctagtttttgcatttttagtggagacagggtttcatcctgttggccaggctggtcttgarcccagactactggcctcagatgatcatccgcctaggcctgccaaaatgctgggattataggcatgagccactgggcctggcctctttcacattttctttcatgctgctttcattctcttctgcctcctctatctcacttttttttttaaaccatgctcagtctgctagaaaaatggtgtttctccatctactcaagccattttgatagctttcaacagggaaacattttattctatgtggatgctacacattcgataagcatgcactccttttctcacctttttccttctatacttctcttctctgtgaacctcttctctcct

SEQ ID NO: 524539 - DNA, 577 bp, Homo sapiens
ttcattgcctcctcaacttttttttttgagacagggtctcactcagtcgcccaaactggagtgcagtggtgctatctcagttcaccacaacctccacctcccaggctcaagcaattctcctgcctcagcctcccaagtagttgagattacaggcacatgccaccacgctaggctagtttttgcatttttagtggagacagggtttcatcctgttggccaggctggtcttgagcccagactactggcctcagatgatcatccgcctaggcctgccaaaatgctgggattataggcatgagccactgggcctggcctctttcacattttctttcatgctgctttcattctcttctgcctcctctatctcacttttttttttaaaccatgctcagtctgctagaaaaatggtgtttctccatctactcaagccattttgrtagctttcaacagggaaacattttattctatgtggatgctacacattcgataagcatgcactccttttctcacctttttccttctatacttctcttctctgtgaacctcttctctccttctctttctacatcttcttttc

SEQ ID NO: 524540 - DNA, 486 bp, Homo sapiens
acaactctacctcagcctttattccctacttatgccccatctgaaggtcagccagaggtaagaacttaggccctcctcaggtctttcctgagcatatgactagccttggkcatgcatatggttttctagattctgaagaaagtgtcagaactttccaaaccccttatttaccaaagcattttattgcccagcttggttttggttagtctattgtttgccccaactgatagcagtgacaaaatatagaagtataagagaaggtcatttgccctaaggaggtcacaatacttaggatgaatggaaattcttaacaaaatcttctgcttctacataacagtaaaatattacacccttccttctgcctttcagactttctgccctcctctctcttccttcccccatcctccctcccccacttccttctctccttccacaaatgtaagatgtgctaggcactgcctacacaatgaaaatacagcactaaac

SEQ ID NO: 524541 - DNA, 514 bp, Homo sapiens
aaagaacaaacccagaagagactctctttaaaatctacagccttgatatgttaattggcttgatttagttatttcacaatgtatccatatatcaaaacatcatgttgtacactgtaaacgtacataacttttgtaattataccttaataaagctaaggaaatccccagaactacagctatgagcatgatgattgtgatgaagcagtgaacttccaattcaacttaggatcagggcttcccctggggcccctccctgcagacagtgtcccctaggcagccacggctsgcagaggctgccttgtccttcctcattactatgccagtgtactggccaacagccccattgagagtaggcagaggggagaaggtcagaggttgtccggccccaaaatggctgctcacaagacagtccccaacccctcaggcagacaaaaggagtccccccaaacccactctgtgggccgtgcatctcaatgtcatgctggccattgtagccagctcttgagttgtccta

SEQ ID NO: 524542 - DNA, 664 bp, Homo sapiens
gcatgttgatgccatgtagcttggagcttgtgccagcatttccattacaaaaatcctataatccaaagccacggcaaattgaataaatagctaataattaagttgttgcccctctcctattccagaaaaataatttaaaaattagattgtacacatagatatgaaagaattatgccactggcaatgctaatcagtttggaatttacaaaagactycctacatcccaatccatttttctgcctttatctgaatttcaatatttttcactgtgttgttattattataaaaattgctttttaggggaaaaacgctaagattcttagaattataaatatctgagttaaaaagatgctgaaaataatctagtccatatctcctgattctaaaaataaagagactgtacctcagaggagttataaatggcagagcccaagactatagaaataacttaatttcatctcctctcaaatcccatgagagctttgtttttatagaatttatatacaactgccttttattaggaggctataaaaacatgagatatactatgcatttgtccttgggaagaagaactttatagtttcaatgaatgttaagtaaaatcttacataaacacaggctagcattcttcatagatatggataatgtcatttagatattagga

SEQ ID NO: 524543 - DNA, 664 bp, Homo sapiens
gcatgttgatgccatgtagcttggagcttgtgccagcatttccattacaaaaatcctataatccaaagccacggcaaattgaataaatagctaataattaagttgttgcccctctcctattccagaaaaataatttaaaaattagattgtacacatagatatgaaagaattatgccactggcaatgctaatcagtttggaatttacaaaagacttcctacatcccaatccatttttctgcctttatctgaatttcaatatttttcactgtgttgttattattataaaaattgctttttaggggaaaaacgctaagattcttagaattataaatatctgagttaaaaagatgctgaaaataatctagtccrtatctcctgattctaaaaataaagagactgtacctcagaggagttataaatggcagagcccaagactatagaaataacttaatttcatctcctctcaaatcccatgagagctttgtttttatagaatttatatacaactgccttttattaggaggctataaaaacatgagatatactatgcatttgtccttgggaagaagaactttatagtttcaatgaatgttaagtaaaatcttacataaacacaggctagcattcttcatagatatggataatgtcatttagatattagga

SEQ ID NO: 524544 - DNA, 664 bp, Homo sapiens
gcatgttgatgccatgtagcttggagcttgtgccagcatttccattacaaaaatcctataatccaaagccacggcaaattgaataaatagctaataattaagttgttgcccctctcctattccagaaaaataatttaaaaattagattgtacacatagatatgaaagaattatgccactggcaatgctaatcagtttggaatttacaaaagacttcctacatcccaatccatttttctgcctttatctgaatttcaatatttttcactgtgttgttattattataaaaattgctttttaggggaaaaacgctaagattcttagaattataaatatctgagttaaaaagatgctgaaaataatctagtccatatctcctgattctaaaaataaagaractgtacctcagaggagttataaatggcagagcccaagactatagaaataacttaatttcatctcctctcaaatcccatgagagctttgtttttatagaatttatatacaactgccttttattaggaggctataaaaacatgagatatactatgcatttgtccttgggaagaagaactttatagtttcaatgaatgttaagtaaaatcttacataaacacaggctagcattcttcatagatatggataatgtcatttagatattagga

SEQ ID NO: 524545 - DNA, 658 bp, Homo sapiens
gaaaataataggaatgataaatacaaaatttaggacattggttacctctgaggagatagcgaaaggaaaagaatccaaaggaaagaatagcaaggactacagggtaaagtttttgctctttttttggtaagttcttattaaactggctggtaagtagaggtgtttgtggtttttttttttttttttttaccatacccatattatgtaaatattctttttttctactcattgtttaatttaaaatttttcaagcagagcaattaaaatatctttgatgcaaagagcttgttaggtttgtttctcatttgtttgcaatgataagaacatgtttatccaagaagttcttaaaaattaccatttgggcctccaactaaaagatatgctttgccaataaaattagagagtcttagatctggaaatactcttggaagacaatctgatgcayacgccagcctcaagtactgagagagtcccaatgaaaactcaaaagtttggagacagccttcccagcctactcccaagctgttctcaacattttacttgtaggaaagttgaaatttcttccttaaagtccacctaaatatctttcttgctttaatattatatatggggaaaagccacagattaggaagaagggctcaagagtaacgagatccca

SEQ ID NO: 524546 - DNA, 611 bp, Homo sapiens
cagatgaatccagagatgggcggaggggagatggcacagggcatcaacaatgttggctacagatgggcaaaaccaacagatgatgaaaccataggccatagctagtttgaaacctacaaggagaaattaaatagagattataaacatgaagtcttgtatttctctccctacactaagctgtacacccagcaagggggagagcttccctggcaggcttgggaaagagcagccagctagttgcccacattgtgagccagcaggtgaaatagtttcttaaaaaagagagagcaacagtggcctgcaagaggacagaggctaaaccaaagaagtctggcttatcctagactgaagcaaccacactggaataacagaccatttgggccaattctttttttttcctttcttttttttggacatgttataattgtacatatttatggaatacagagtgatattttgatatatgcatacaatgcataatgattaaattggggtaatttacatatctaycacctcaaatatttatcacttggggccacactttgagaaggacacagacatgccagaagatgctagaaagaaaaaacaaaaaatgaccaacagagactagc

SEQ ID NO: 524547 - DNA, 590 bp, Homo sapiens
tttttccctcttagggcttctcctgtctttgaacttgctcttccttcttcctggaatgctctgtcctggctatccccatttccaactcttctcataacctttgtcaccttgagtcgacgagtctcaaccccaaagtcacttctgagagaccttaggaccacccaagctaagaagccaccccctcagtcactccttttctgtcacatgattctgttttattttcttcaatccacttagcgcacagaaaacatcttgtgtgtttgtttctttatttgctcgctgttggcttcctctcaccasctctatgagggcagggaccttgtctgctgtcttggtcattactctactgttagcaccctcagtagtgcctgacacctagtaggtgctcagtacctattcactgaaggaaaagacatctgtagactacagggcagttgatcaagcactttcccattaaattcccagaggcttaaagcttggtcattgctcttaaggaccttataagtgtgggtaaggtgagcaaacacatgctaacaaaaggagaaccaggctaggatacataagttctgaacgcaatcagcatcacagca

SEQ ID NO: 524548 - DNA, 591 bp, Homo sapiens
gtgtaagaccacagttgctggtcagtgccatgaaaatgtcatctatgtaaaccaagatgcttgtacttgggtagttctctgtcagaaatyttggcggggtataaaagtgacccttttgaaagttgaatctgtaagtctatatgtggaaagtgactgtcagaacagaacatcaccacctccaaagcagacagacctcccagaacttgttttccagctcatggcagaaatgtgcacctatgaaagtagattaagaatcaccacctcagcctgttttagagatgtgaataaaaatcttggcttgggactgccgtctctctggttgactgatttttcaattgatttgtatttattagctaatgaaattaaagttgtaaaaatgataacagaaacacaataaatctctcccacaactggctgtttctatgtcactatggtgcattcctcactttgattacttcaaagtctattattttgttttcaattattctgtttttctggcactggagaaaatcaatttgttttattttctcttattcatgcactcaattatgctcttcgggcacatttaatcactttgatgtttccatttta

SEQ ID NO: 524549 - DNA, 626 bp, Homo sapiens
gccaacttgaaccttacaaagccaccacatatttccattaaaattaggaggaaaaaataaatatttaaaatgcagccagtgcttgtgttgtcaagacaatgttggcatattttttctttgtccagctcaatctctctctctcattgtctctcactttttactcttccccagagggagtaaaataaagattaatccataaaccacccagtttttttaagyaccgtttacctgtttaggcaatgactctgaaaacatagtggccctgatgagatgccctcggttttctgcccagaaacccactgagggcatgtttctcattgtccttgcattcctaaatgctataatctcaaagctagtgatccatttcctttctttatttcctttttattgcaaaaaagtcagcactattaaaatgaacaccaaattttagatttgaagtgtgaaatactgttcattcaaagattctctgcctctgacagtcaaatcaatgttaggttatagtctaacaaaaggcaattggtttttgaatatttatttgcctcctcttcctctaattcctttgtttaatgataccagtgttgggtattatttttgttttcctgtcagctttaccacttgggtcattc

SEQ ID NO: 524550 - DNA, 616 bp, Homo sapiens
catatcctatcctagtcctgcctcttattcctgtgtatcctggtgaagttactcaatttttctgaattttgctgtttttataactgcaaaagatagtgctggtggtgatgatgataatgacagtgattttccaggaatgatgtaaaaattgactataaaacctatggaattacttagcccctttgataggcattctgtgaatgttaatttccactacctgttcatttcatcgtttgctatcatttcactgagtctaagctatcccaacttgctttcagagcttttctctaccacggctctcctctcctgtatattcatatactccaacatgctcttcttcttgatattctgtgaacactcttgcatcagtgcctttgcgcttgctgtttcctcagcttcaaaagatctttcacagatgtccaaattgttggttccctagttccctggagagagacctgttctaaccactgtgtgtacattattcacctcatctgycatcattttctatttcctttaccctgatgtgtttgtcttcataaaatgtatcctgggtgtgtagaatacatagtaggagctcaatacatatgtgactgaataaatgaatggcatgatcatt

SEQ ID NO: 524551 - DNA, 423 bp, Homo sapiens
taattgattctcactgctaatgaartcaaacttgctatttatcaagttagccttgaactttttattattaccaatactcctgatgctcagttcactctaacagtatattatacatatttttggtctgttccacctgaaattataactggccatcatagcttacagatttctatacagcaacagaatatgcaagtagccttttattgttagttcaggtaactgaactcatgcctcaaactgccccttcccattgtccatcaggctctggagtaatgaaagttaccatctggctttgggagcttcctgttgtacatgaagatgtttgggaggttttatcgtttagcttttttgagtgctcacaatgcagatggttctggggtgaatgggccttgcaagtggctggaccggcaatggcaagcctca

SEQ ID NO: 524552 - DNA, 426 bp, Homo sapiens
ctgctgctcatttttcaatttccacacctatcgaatccccttgaaaacctcatctcaagtgtgcatgatggggggtttgcttcttgtaggaggatggatatggatgtggtcactggcctcagaatcccactttttgacagctaggcctttcttattagtacctggctggattgcacagacctttgagaatgcacttctcctactagcttcattccaacagcttggcttccttatatgacttagcaatcagtgggaaagccattttgactctttagggaatcccatgggttctagatttgcctcactttaaaatggatggtagcattgyttcaccaaagattttaatttgagcttctaacactgttaaaactctactgtgcctttggtctgaaactgaatttttggtcactgcaataaattgggaaa

SEQ ID NO: 524553 - DNA, 511 bp, Homo sapiens
ctgggcttgtccagctccttaagctgactgcattgaatctccagtccatgtcctcagagcatctgctaatttgatgtttgtgggactctactggcctctgccttggtgtctgctgctgtgcctagagttgttctgcactgagttgacccagatgtgaaatcacccctccttcacacaaaaccctcataataataccatgtgtatatagcacccacataaggtaattgctgtcattatccccactttgcagatgaggaaactgaggcagagaagttacataacgtttttcstagattatccagtaagtgcgtggtggagcggacattaagcccaggcatattgaccccacagcctgtgttgaggtttcatggtcgtatttgctggcctctcagcagcattctactgaagacttaggcagggcatggaggggtgttacacagagggtggtgcagggcaggctgtatagcagaaacccaaaactgcacatcagccattcctttccttagaagtc

SEQ ID NO: 524554 - DNA, 484 bp, Homo sapiens
gaaaaaaaaaagttgaagtatttaaagttatataaaaataatttttatagtgagattatggtggtgggaggaaccyacggaggcaatagtcatgagtgccattgaaggtcataaggtggctctggccccgcgtaaggcccggctacatgcatgcctcagctcctgcaagggatctctttctttctttttttttttttttaaacagagtctcactctgttgccagggttggagtacatggagcaatctcggctcactgcaacctccacgtcccaggttcaagcgattctcctgcctcagcctcccaagtagctgggattagaggcacctgctactacgcccagctaatttttttgtatatttagtagagatagggtttcaccatgttggccaggctggtgtcaaactcctggccttgtgattctcctgccttggcctcccaaagtgctgggattacaggcgtgagccatcgctcccagccgcaag

SEQ ID NO: 524555 - DNA, 484 bp, Homo sapiens
gaaaaaaaaaagttgaagtatttaaagttatataaaaataatttttatagtgagattatggtggtgggaggaacctacggaggcaatagtcatgagtgccattgaaggtcataaggtggctctggccccrcgtaaggcccggctacatgcatgcctcagctcctgcaagggatctctttctttctttttttttttttttaaacagagtctcactctgttgccagggttggagtacatggagcaatctcggctcactgcaacctccacgtcccaggttcaagcgattctcctgcctcagcctcccaagtagctgggattagaggcacctgctactacgcccagctaatttttttgtatatttagtagagatagggtttcaccatgttggccaggctggtgtcaaactcctggccttgtgattctcctgccttggcctcccaaagtgctgggattacaggcgtgagccatcgctcccagccgcaag

SEQ ID NO: 524556 - DNA, 623 bp, Homo sapiens
acaaaaacaatttacctgagctcacctttggtcatttcctgttacctccaacttgactaattcccttagccatttacaaaaaaagaaaggaacacacaaaagagctcatcattagttactccacaagcagcagctcatcattagttactccacaagaacaatgacctaaagcacgtattcataaatactagtacattygactttcatatgatgaaatcagacaaaattctttcatcactgaatcacttgtagggagtagaagacaatggtgccacataacttttatgaagtactttctcttttcatcatgtgatgacagcaagttcttatccatacacacccaatcttaaagtctttcgctttcaacttaagttgaatgcaggtgtgtcaaaatgcttcatgtttgacacatctgacaatactacaggtgaactgaaccaggcagtaaacagttttttactgaaacagtgactcgatgttttggatactctacatagatttttaaatgacaattttttttaatacgtaataaaaagaagaagcaaagataaaagtttttttctaaagaaaagatactgagatgtgttagagatgtggcttcctcctggtatgaaagataccat

SEQ ID NO: 524557 - DNA, 593 bp, Homo sapiens
aatagagatactcgaggttgagaaaagtagtgcattagggacactgaggtcatgaacacctmcaacacattgttcacatccccgggatcccaaagacatcagaaaggctgtgccttaggagtaagaatcatgccctaaagtaagaccctagacccatcctaacaaagcttgaaaccaaacaatcttcagagaagacagaatttggaggttgagttccaacaaattaaaaaagtctggaaaccactttgaactttccacagatctgtactaacgaaacataatacaaacccacacacgttcaaggtgactagccagtacctgaactgcttgctgtaacaggggcaacactctttggtgtaagataacaaaatccagagtctctataccacatatctaaaatgtcctgtagtcaataaaatattaatagacatacaaagaaatgggaaaatatgatagaaccaaatcaaaattttacaactaaaaagcacaataagcaaaatgaaaaattatctggatgaagttagcagtagattggatatggcagaagaatcagtgaacatgaagagagatccaaagaaattatccagtctgaa

SEQ ID NO: 524558 - DNA, 604 bp, Homo sapiens
tgtagcagctgtattgtgaccatgaagtgaccttgaggatgagagccagtgctaagaatggcagaacagagagaaggaagccaggacattgatgacactgcagagccaccacaatgtcccgggattgccttacctctgcacttgttttgcatacagaaaagacatttcttttcctaagctgctgtgatttggggattttgttatgagtagccaagcacagttcctctctggtgaggctggtgtgtgtgtgcccacgcacgtgtgcatgtgttaaaaggtggcatatagaacatgctggattagggactttaaatttctgcattgctctaaagtagaattgaaacttgagaaccacgtctgaggaaagcaatctgggtatctacsatcagaaaaccctcatccttatacagatgggtgtccacaacgtgcatattcactgagtgcaagtcgattcctcccttccccacacatcttgttgaccaagacgatatctaccttataaaggctgaaatttacattttatgccattagcagtttttattgaaggagaaaaattttttaattcatctcaggtttaagataaattctgcaaacattgattaaa

SEQ ID NO: 524559 - DNA, 609 bp, Homo sapiens
tgtattgtgaccatgaagtgaccttgaggatgagagccagtgctaagaatggcagaacagagagaaggaagccaggacattgatgacactgcagagccaccacaatgtcccgggattgccttacctctgcacttgttttgcatacagaaaagacatttcttttcctaagctgctgtgatttggggattttgttatgagtagccaagcacagttcctctctggtgaggctggtgtgtgtgtgcccacgcacgtgtgcatgtgttaaaaggtggcatatagaacatgctggattagggactttaaatttctgcattgctctaaagtagaattgaaacttgagaaccacgtctgaggaaagcaatctgggtatctacgatcagaaaaccctcatccttatacagatgggtgtccacaacgtgcatattcactgagtgcaagtcgattcctcccttccccacacatcttgttgaccaagacgatatctaccttataaaggctgaaatttacattttatgccattagcagtttttattgaaggagaaaawttttttaattcatctcaggtttaagataaattctgcaaacattgattaaaacatgaaaggcact

SEQ ID NO: 524560 - DNA, 683 bp, Homo sapiens
cacaattctttgatgtgaaaccacatttctaattctgacccctytgctgagatcccatcatgcattttcaattgcatgtggatactttcatattcttgtctaaattccaacatgcccaaatccaaatatatactatttctcccccagattcacaatttttacatgtgtgtgtctatagaactgaaattctttggagaagatgtgtttgatggttttcacactgctgataaatacatacccaagactgggtaatttataaagaaaaagaggtttaatggactcagagttccatgtggcttgggaggcctcacaatcatggtagaaggtgaaaggcacatcttaaatggtggcagacatgagagaatgagaaccaagtgaaagggggaaccatttataaaaacatcagctctcatgagacttattcaataccatgagaacagtatggaggaaccgcccctatgattcaattattcctaccaggttccttccacaacacgtgcaagttatgggaactacaattcaagatgacatttgggtggggacacagccaaaccatatcattccacctctggccccttcaaaattttatgtcctcacatttcaaaatcaattatgccttcctaacaatcccccaaactcttaactcatttcagtattaactcaaaagtccatagtccaaagtc

SEQ ID NO: 524561 - DNA, 683 bp, Homo sapiens
cacaattctttgatgtgaaaccacatttctaattctgacccctttgctgagatcccatcatgcattttcaattgcatgtggatactttcatattcttgtctaaattccaacatgcccaaatccaaatatatactatttctcccccarattcacaatttttacatgtgtgtgtctatagaactgaaattctttggagaagatgtgtttgatggttttcacactgctgataaatacatacccaagactgggtaatttataaagaaaaagaggtttaatggactcagagttccatgtggcttgggaggcctcacaatcatggtagaaggtgaaaggcacatcttaaatggtggcagacatgagagaatgagaaccaagtgaaagggggaaccatttataaaaacatcagctctcatgagacttattcaataccatgagaacagtatggaggaaccgcccctatgattcaattattcctaccaggttccttccacaacacgtgcaagttatgggaactacaattcaagatgacatttgggtggggacacagccaaaccatatcattccacctctggccccttcaaaattttatgtcctcacatttcaaaatcaattatgccttcctaacaatcccccaaactcttaactcatttcagtattaactcaaaagtccatagtccaaagtc

SEQ ID NO: 524562 - DNA, 683 bp, Homo sapiens
cacaattctttgatgtgaaaccacatttctaattctgacccctttgctgagatcccatcatgcattttcaattgcatgtggatactttcatattcttgtctaaattccaacatgcccaaatccaaatatatactatttctcccccagattcacaatttttacatgtgtgtgtctatagaactgaaattctttggagaagatgtgtttgatggttttcacactgctgataaatacatacccaagactggrtaatttataaagaaaaagaggtttaatggactcagagttccatgtggcttgggaggcctcacaatcatggtagaaggtgaaaggcacatcttaaatggtggcagacatgagagaatgagaaccaagtgaaagggggaaccatttataaaaacatcagctctcatgagacttattcaataccatgagaacagtatggaggaaccgcccctatgattcaattattcctaccaggttccttccacaacacgtgcaagttatgggaactacaattcaagatgacatttgggtggggacacagccaaaccatatcattccacctctggccccttcaaaattttatgtcctcacatttcaaaatcaattatgccttcctaacaatcccccaaactcttaactcatttcagtattaactcaaaagtccatagtccaaagtc

SEQ ID NO: 524563 - DNA, 502 bp, Homo sapiens
tcacaattctttgatgtgaaaccacatttctaattctgacccctttgctgagatcccatcatgcattttcaattgcatgtggatactttcatattcttgtctaaattccaacatgcccaaatccaaatatatactatttctcccccagattcacaatttttacatgtgtgtgtctatagaactgaaattctttggagaagatgtgtttgatggttttcacactgctgataaatacatacccaagactgggtaatttataaagaaaaagaggtttaatggactcagagttccatgtggcttgggaggcctcacartcatggtagaaggtgaaaggcacatcttaaatggtggcagacatgagagaatgagaaccaagtgaaagggggaaccatttataaaaacatcagctctcatgagacttattcaataccatgagaacagtatggaggaaccgcccctatgattcaattattcctaccaggttccttccacaacacgtgca

SEQ ID NO: 524564 - DNA, 628 bp, Homo sapiens
tcacaattctttgatgtgaaaccacatttctaattctgacccctttgctgagatcccatcatgcattttcaattgcatgtggatactttcatattcttgtctaaattccaacatgcccaaatccaaatatatactatttctcccccagattcacaatttttacatgtgtgtgtctatagaactgaaattctttggagaagatgtgtttgatggttttcacactgctgataaatacatacccaagactgggtaatttataaagaaaaagaggtttaatggactcagagttccatgtggcttgggaggcctcacaatcatggtagaaggtgaaaggcacatcttaaatggtggcagacatgagagaatgagaaccaagtgaaagggggaaccatttataaaaacatcagctctcatgagacttattcaataccatgagaacagtatggaggaaccgcccctatgattcaattattcctaccaggttccttccacaacacgtgcaagttatgggaactacaattcaagatgayatttgggtggggacacagccaaaccatatcattccacctctggccccttcaaaattttatgtcctcacatttcaaaatcaattatgccttcctaacaa

SEQ ID NO: 524565 - DNA, 593 bp, Homo sapiens
tgcttggtgtaagagtgcgatgacattggtgattcaggactgtttttctctccgttcagtgcctcattcagtgatatgaacttaaaaccaagtactgtgagtgcttacctgatttttggttcttattaaggtgttttttctgcgtaaatagttgttaacttggtgtccctgcaagggggacaattgctggaggtttctattttgccatcttgatcycaatctccttaattaattttaatttaattcccccttctggcttcttagcaatttttctatacttttagtgccccaaggtgttcttttttttttttgtacaagaaatatgtcacacctttgtcatcaatttatccatcttttcctcatcaaaataaacatttgtttagtgcccactctgcctcatactgtatgataacttcttgacatacagtgatacgcaagagcaacaggtccattttattttatagagcttatattccaataaaataaacaaaaaataaatgagcaacaaatgaataaataggataaatgctttccaggtctttatcccatggtcttggctattagttttttgctcccttatagttatgaaaatt

SEQ ID NO: 524566 - DNA, 593 bp, Homo sapiens
tgcttggtgtaagagtgcgatgacattggtgattcaggactgtttttctctccgttcagtgcctcattcagtgatatgaacttaaaaccaagtactgtgagtgcttacctgatttttggttcttattaaggtgttttttctgcgtaaatagttgttaacttggtgtccctgcaagggggacaattgctggaggtttctattttgccatcttgatctcaatctccttaattaattttaatttaattcccccttctggcttcttagcaatttttctatacttttagtgccccaaggtgttcttttttttttttgtacaagaaatatgtcacacctttgtcatcaatttatccatcttttcctcatcaaaataaacatttgtttagtgcccactctgcctcatactgtatgataacttcttgacatacagtgatacgcaagagcarcaggtccattttattttatagagcttatattccaataaaataaacaaaaaataaatgagcaacaaatgaataaataggataaatgctttccaggtctttatcccatggtcttggctattagttttttgctcccttatagttatgaaaatt

SEQ ID NO: 524567 - DNA, 590 bp, Homo sapiens
agagactggagttctcaaaatttggaagttcagagagtggaagcaatggatgaggaatacttagtttgaattaggrctggggtgttgatgtgatgcagaattgacaacaataaggggaaagttttgaatactgagtacaagagatcatcaatatacaaaaacatattactttctaacaagtccctaggccagcaataaattaattatgcttttagagtctccaagtgacctgtgtcatgttaaacattgtgtagttaacaccactgaaatagactagattctctcaacatgtgtagacaaagacagtcctctcccttggtaacatcagcttcacacagttttctaagcttgccatgttgaaaattactcttaagtaagaagaacagtgcagtcacaaaccagtattaacatttccatctcttgacttgagcttggttacttagcattaataaggtagtatatcctatcttattaatgatagtagccatattctacttgctgggctcaaatctaaagagcaccccttctacatcagaggcaggccacggcattttcctgcacctcaccctcagaaacagattcacagccac

SEQ ID NO: 524568 - DNA, 590 bp, Homo sapiens
agagactggagttctcaaaatttggaagttcagagagtggaagcaatggatgaggaatacttagtttgaattagggctggggtgttgatgtgatgcagaattgacaacaataaggggaaagttttgaatactgagtacaagagatcatcaatatacaaaaacatattactttctaacaagtccctaggccagcaataaattaattatgcttttagagtctccaagtgacctgtgtcatgttaaacattstgtagttaacaccactgaaatagactagattctctcaacatgtgtagacaaagacagtcctctcccttggtaacatcagcttcacacagttttctaagcttgccatgttgaaaattactcttaagtaagaagaacagtgcagtcacaaaccagtattaacatttccatctcttgacttgagcttggttacttagcattaataaggtagtatatcctatcttattaatgatagtagccatattctacttgctgggctcaaatctaaagagcaccccttctacatcagaggcaggccacggcattttcctgcacctcaccctcagaaacagattcacagccac

SEQ ID NO: 524569 - DNA, 655 bp, Homo sapiens
tgaatcctactcagtataactgaggaaagagccaatctcagagaatttagtgggtaagatctcagaaactayggcttctcaacctcccagttgcctccagacacagctgtttctgttgcttttttggccgtctgtgtcagaaataatggaatgaaatattgcacagcaaggaaggggaattataggcagaacaacaggcatgggcttcagtggtgaatgggaggtagggaaatcattaaacagacccatggcacagaacaaacacagttgtgcagacctgaactggagatgacatttagtgctcatgaggctctatatatcactaaaatgatacatacatttctagatcactaatggcaatgcttgtacaaaggcatattctgtaaagatatcattgtggtattctaaatgattagcacagttttttgtttactttatttctattgtatatatttaaggtaaacaacattggtagacatacctagagtggaattattactacagttaaacaagtttacatattcatcaattctataactaccttcttttttcgtggtataagcacctaaaatctactcttttagcaggttttcagggtagtgtattaactatattactcttgctgtttattagatttttagacttattcatccta

SEQ ID NO: 524570 - DNA, 655 bp, Homo sapiens
tgaatcctactcagtataactgaggaaagagccaatctcagagaatttagtgggtaagatctcagaaactatggcttctcaacctcccagttgcctccagacacagctgtttctgttgcttttttggccgtctgtgtcagaaataatggaatgaaatattgcacagcaaggaaggggaattataggcagaacaacaggcatgggcttcagtggtgaatgggaggtagggaaatcattaaacagacccatggcacagaacaaacacagttgtgcagacctgaactggagatgacatttagtgctcatgaggctctatatatcactaaaatgatacatacatttctagatcactaatggcaatgcttgtacaaaggcatattctgtaaagatatcattgtggtattctaaatgattagcacagttttttgtttactttatttctattgtatatatttaaggtaaacaacattggtagacatacmtagagtggaattattactacagttaaacaagtttacatattcatcaattctataactaccttcttttttcgtggtataagcacctaaaatctactcttttagcaggttttcagggtagtgtattaactatattactcttgctgtttattagatttttagacttattcatccta

SEQ ID NO: 524571 - DNA, 655 bp, Homo sapiens
tgaatcctactcagtataactgaggaaagagccaatctcagagaatttagtgggtaagatctcagaaactatggcttctcaacctcccagttgcctccagacacagctgtttctgttgcttttttggccgtctgtgtcagaaataatggaatgaaatattgcacagcaaggaaggggaattataggcagaacaacaggcatgggcttcagtggtgaatgggaggtagggaaatcattaaacagacccatggcacagaacaaacacagttgtgcagacctgaactggagatgacatttagtgctcatgaggctctatatatcactaaaatgatacatacatttctagatcactaatggcaatgcttgtacaaaggcatattctgtaaagatatcattgtggtattctaaatgattagcacagttttttgtttactttatttctattgtatatatttaaggtaaacaacattggtagacatacctagagtggaattattactacagttaaacaagtttacatattcatcaattctataaytaccttcttttttcgtggtataagcacctaaaatctactcttttagcaggttttcagggtagtgtattaactatattactcttgctgtttattagatttttagacttattcatccta

SEQ ID NO: 524572 - DNA, 610 bp, Homo sapiens
taggctaaataatgtctggacatgaagagattacactggtgggtttcatgtaatcacaagggtctttacataagggagagagaataagagtagtaggagtaggagatgtaacaaaagaagcaagtgtttggagtgaaagaaaaaggagttcatgagccaaggaatgcaggcagcctttaggagctgaaataggcaggaaaacagattatccactacagtctccaggaggaaacagactagacaacttttttatttatctcacccatgggtgtttgtcaacacctctactaacactacattaatacattttcatttcccaatgaagaatgtttaaaatgtatratgtgtaatttccatctgtatctttccattaatgtaatacccatttccactttctcttctattaactctctgaattatttgcctatgtttctatcaccttagaggttttgctggcatattacttggtaggaaaatagcaagttttaatacaagatgtgtgatatgagcccaatattgtaaataaacatttaaccctatatgtatgtgtgcataagttatacatatatatattatgtgtgaatgcacataatgtacacacacatgcata

SEQ ID NO: 524573 - DNA, 673 bp, Homo sapiens
tgatgaccttggaaaataaaaattatatttctctcacataagcactgtgtggtttaattaacatttacagtcagatactagagcttaagatgaaaactttatgagcacatgctatcatgattgcctctgcagaacagattaayacaccatccaacattttacttatccacagagatgctagctctttcaaaacatctttggtgcattacagaggtccagatgacacaccattggttgaaagagtcaatttctattactgtcatcaacagagaaatgaaattaagaggatgtatttcatttgaagtatcacaatgctgtgactctctctaatcattaaagccatgaatcagattttcaaaagaatacagagggaaataaatccataatggacatgaatgaaatcactaataattttttaaaaactgctgaaaaagacactgcttatggaaacaatcagacagaaccttaaggaaaatgcacactaattactagttaagtctgctgggaaaacacattctaaactgtaaggaaagacaatcagtagatataaacgcttgaacactgaaactttttctatgttgtgcttttacttacctcctcttaagataagcaatggtacatcagcacctactggaaactgctttagcacctctaccacttggagatgtgttaa

SEQ ID NO: 524574 - DNA, 649 bp, Homo sapiens
cttggtgacttcctgtttttcacmaggtttctgtgagcattatctgtatgtttttcagtaaattccatcttactttgggcttgagtaaatttctttacttttaaatcaacaaatttaaaaacaaaaacaaaaaccttttaccggaaaatttgacacataataggcactcaataaatggtagttgctgctgctattgttatttggagcctaaaacagaataaagaactgatccttaggattttctagtcataccagtggaatgagccacatgttttagggagctcacttgacataaagcaaagttattactttgaataatggttgccatatagttgtgagtggacacactgatagttaaagtagctgcaaatgcatttgtcttattttatttgtggtattttccttctttgttacttctagacccttgctaaaggagaaaatctagaaaacttagagaaatatatagtgattaaataaataggtaatagttaatgagtattaaagctcttctgctttcagtattaaaatattggatttttggaaatgttcttaaattgacagagtaaaagagtaattacatgattttaaggtaaatgaaaaacttaacttttttttgatcctttgtataggttctccaaggacataaaac

SEQ ID NO: 524575 - DNA, 568 bp, Homo sapiens
ctgcttggtgacttcctgtttttcaccaggtttctgtgagcattatctgtatgtttttcagtaaattccatcttactttgggcttgagtaaatttctttacttttaaatcaacaaatttaaaaacaaaaacaaaaaccttttaccggaaaatttgacacataataggcactcaataaatggtagttgctgctgctattgttatttggagcctaaaacagaataaagaactgatccttaggattttctagtcataccagtggaatgagccacatgttttagggagctcacttgacataaagcaaakttattactttgaataatggttgccatatagttgtgagtggacacactgatagttaaagtagctgcaaatgcatttgtcttattttatttgtggtattttccttctttgttacttctagacccttgctaaaggagaaaatctagaaaacttagagaaatatatagtgattaaataaataggtaatagttaatgagtattaaagctcttctgctttcagtattaaaatattggatttttggaaatgttcttaaattgacagagta

SEQ ID NO: 524576 - DNA, 569 bp, Homo sapiens
agtttgggaccagcctgggcaacatagctctacaaaaagataaaaaaattagctgggtgtggtgggcatgtgcctgtagtcccagatactggggaagctggttgggggggatcgcctgagcccaggagtttgaggctgtggtgtgctatgattgtgccactgcactctagacggggtgacagagcaagaccctgtcctgaaaaaaaaacaaaaacaaaacaaaacccaaaaaatggtagttcaaatacatgcactaatctctcctgaaacctctttaaaagtacaacarataagaaaaaatcatggcagcctgcaaggacttaaagaatggaagaagagactacagtaaatgagagctatcaatacaatttcgaaggttggaaaatgaaagaagtaaaactcttaagtgcctgcaatagggaaagccaataggaaacaagtaaaacccctgtaattaacttctgaaagactcaggaattagatgtatcaggtataatctgtaggagtgagaaagaactaaagacaggattgtttgaacatgtgtataagggataatagatctaccccca

SEQ ID NO: 524577 - DNA, 591 bp, Homo sapiens
tcaacctaataaagggagaagaggagaggcaagcgggggaggcagagaggggcactcaggtggctccgtggtgcgagtgtcagctagagataaactcttatcatttggacagcggccaccagagaaagttgtcatcaataacattttattgagcactagttatatgcaaagccctcatgagctgtatcaagtcaagattttgataatttaatagcccaaaaagtgacttctctgaaaagctgacattttcttacaggttagagcacactggggtctaacagttaattgctcatttgcttttgttttcagagtttattcttgaaataaaagctgmtttcatcattagattctaaagtttctgctcattcataaagcatgtcatgttgtcgttttttaactgaggatgttttgctgtgttgcccagactggtcttgaactcctgggctcaagtaaccctcccacctcagcctcccaagtagctgggattacaagcatgtgccaccactcctggctgagaatgacatgtttagaactagactttgctttaaggcctgtttgcctttggtttactgagattagtggatctgaggg

SEQ ID NO: 524578 - DNA, 367 bp, Homo sapiens
aggccatcggtccctctttgtcataaacactctgcagctttggctctgtggctctgcatgctgcgccttcccattttctttattttatctagtccactaattacatgccttgctcagagctctgcccttggctragtactctctaaatattcttccttagtgatcttatctaccacaaaggtttcaatcatcacttctcagtaatgtcgcaatctgggcttctaccactactagtagtaattgcctgctaaacatttacacctgctctactagctgttcccttcacctcaacatgactccaacttactacaccatcagtctttgccatatcctttctccccttggcttccctgatggttttcgtagt

SEQ ID NO: 524579 - DNA, 495 bp, Homo sapiens
aaattgaagctctatgacaggtacttcatatattatwctgtttttcttacatgtttgaaatgtattattaaaaagttaaagaaaaggctatatgaagatggcttccttgttgataatcagatgtctaaattgcctttcagacttaaggaaaagatataagaaccaccaaaaaggtttggacaagttgagtgtgcaaaagaaaaatggctatcactgatactaacacactaagagaaatccatgaatccatagcgatacttaatctttaggaagaaaaaaagtcttttttgcagaaagtatgagccagtaaacagacacagaccaacagaattgtgggttttaaaaacaaaacaaaaccaccatttgctacttccaatgtaagagctgatttagtcaagatttatcaattgataactaggtataaggtgattttaaagaaaacggttatcaactcacagattattaactgcaaaggggaacatgacccttaacaat

SEQ ID NO: 524580 - DNA, 495 bp, Homo sapiens
aaattgaagctctatgacaggtacttcatatattattctgtttttcttacatgtttgaaatgtattattaaaaagttaaagaaaaggctatatgaagatgrcttccttgttgataatcagatgtctaaattgcctttcagacttaaggaaaagatataagaaccaccaaaaaggtttggacaagttgagtgtgcaaaagaaaaatggctatcactgatactaacacactaagagaaatccatgaatccatagcgatacttaatctttaggaagaaaaaaagtcttttttgcagaaagtatgagccagtaaacagacacagaccaacagaattgtgggttttaaaaacaaaacaaaaccaccatttgctacttccaatgtaagagctgatttagtcaagatttatcaattgataactaggtataaggtgattttaaagaaaacggttatcaactcacagattattaactgcaaaggggaacatgacccttaacaat

SEQ ID NO: 524581 - DNA, 404 bp, Homo sapiens
ggcgtttgctgtgtttagaacacagacgagtgcccaggcagggtaggaagaaaagtgggaacagtcagagagggcttcacttgctggtttctggaataggaaatctaacctaatgaccatggaagaaggaagggatagggggaaggactgtgggtggatggatgggtagatagtgggatagatgcatggtttggtagatgagtggatggatggatgggtagatagttggatagatgtgtggtttagttggatagatgcatggttgagtggatgggtgaatgagtgggtggatggatggattggtagatgagtggagagatgcatgattggtggatgggtgagtggatgatagattggcgtatgggtgcatggggragttggagaaattaatggattgatgggtg

SEQ ID NO: 524582 - DNA, 522 bp, Homo sapiens
acatcttgactgcaaacttatgagagacccaaagcagaaccatacagctaagccactcttgaactcacaacttmtagaaactgtgagaggtaataaatatttattgttgttttaagccactaggttttgagtgttttttgcttttgtttttgttttttttttttgcccagcagaagataatacacccacattttccaattcaacactcttgggaagtgactaaggaagaaagattttttaatgctattatacaccttagagagaatgaacaagacctgcctcatcttcattcatatctctgtttccacaattgagctcccgaactctgccccttaccctctgtgcccctgatgtgaaaaatgttggtgtatgggttgaaggcaagatgagattagtaattcttaggccaaaaagttgaatatgtttgcagaatttgtctaatttatgggctcttgactgggcttatggagtacatggacttctaaaattgtcagtggaatgtatatgcaaggacactcttct

SEQ ID NO: 524583 - DNA, 564 bp, Homo sapiens
gcatgcctgtagtctcagctactggggagctgaggcaggaggatcatttgagcctgggagattgaggctgtagtgagccaagatcctgccactgcactccagcccagggtgacagggcaagaccctgtctacacaataaataaaatarcataaaaataaattaaaatttgtttaaacttagctgggcatagtggtgcatacctgtggtcttagatacttggcagactgaggaaggaggatctcttgagcccagaaattcaaggctgcagtgagctatgattgagccactgcactccagcctaagtgacagaatgaaaatctgtgaaaaaaaaaagcaatgagatactccacaccaatagagaccaaagaaggaacttggaagcaatgacgacaaacacaaagtaagcatttgttgtgctccatgctaagttacttatatgccagaactcaactcatttagcccacccaccacccttatgacatagttgctatcagattccccatattacaaatgaggaaacagagtatgaatgaggtgtaataactagcctgaagttgcactgc

SEQ ID NO: 524584 - DNA, 564 bp, Homo sapiens
gcatgcctgtagtctcagctactggggagctgaggcaggaggatcatttgagcctgggagattgaggctgtagtgagccaagatcctgccactgcactccagcccagggtgacagggcaagaccctgtctacacaataaataaaatagcataaaaataaattaaaatttgtttaaacttagctgggcatagtggtgcatacctgtggtcttagatacttggcagactgaggaaggaggmtctcttgagcccagaaattcaaggctgcagtgagctatgattgagccactgcactccagcctaagtgacagaatgaaaatctgtgaaaaaaaaaagcaatgagatactccacaccaatagagaccaaagaaggaacttggaagcaatgacgacaaacacaaagtaagcatttgttgtgctccatgctaagttacttatatgccagaactcaactcatttagcccacccaccacccttatgacatagttgctatcagattccccatattacaaatgaggaaacagagtatgaatgaggtgtaataactagcctgaagttgcactgc

SEQ ID NO: 524585 - DNA, 581 bp, Homo sapiens
tgaagctgatgacaatgcatggtgatgtttcctgtgtttctcaatgaaattagaaaaaagggcaaacaaggaagtttttacaaaaccattctaaataactgttccttattctgagattatggctttcctacttattaagttttaaaatgccttttgttttattcaagcattggagagaacaggtgatagttgttactcttaaatgtcttcgcttggcattgtccttgatggcttgcaatttttctggttcacaaaatcctgaaatctcacaacaagatcaattgtgaggttgactgcaacatcacaagaaaaggatccaayaatttcggttgacatttttcccatttttcagagcaccatatactatacatagtaggtggtcagcaatcattcattcgttcaatccacaaaagttactaatcacctgcctggaagtttgtttgtcattggccaagaagaaacccataaagcagggcaaacttgattgggctgagaactgtggaccaggcatttacctctgggcgttgtgcatacattcaaccgctcctctcgcccagccgtcagcacctcggacagctcag

SEQ ID NO: 524586 - DNA, 500 bp, Homo sapiens
aggaaacctaactaaacatagacaaaggcatttttacattatcttttctccgcttcattatttaaacaagcgcctcctgttcatacacaagccttcctcttcgtattcttaaacctccctctcagattgtttgcctcgcagtttgcaattccctagcaaaacggcgagctccaatctgagctgcrgaaatgccaattttaattaaaagtgcaattttcaaatccacccaaagctcagataggatatggcacacttgatgccctgtgatctttctggctgctttgttgattaaaatgggtgtcgctctaagtgctttgtcaaatcttcacaaaaaggaggagaaattgacatttacacctttataccgataagaaagtgatatattacattcacccctactgccacaaaggcttgattgtggcttaagggcagaattaggccaaaaggtccccagtgatagctctgttttgatgcttcaaccttgagggctctttcttcag

SEQ ID NO: 524587 - DNA, 500 bp, Homo sapiens
aggaaacctaactaaacatagacaaaggcatttttacattatcttttctccgcttcattatttaaacaagcgcctcctgttcatacacaagccttcctcttcgtattcttaaacctccctctcagattgtttgcctcgcagtttgcaattccctagcaaaacggcgagctccaatctgagctgcggaaatgccaattttaattaaaagtgcaattttcaaatccacccaaagctcagataggatatggcacacttgatgccctgtgatctttctggctgctttgttgattaaaatgggtgtcgctctaagtgctttgtcaaatcttcacaaaaaggaggagaaattgacatttacacctttataccgataagaaagtgatatattacattcacccctactgccacaaaggcttgattgtggcttaagggcagaattaggccaaaaggtccccagtgatagctctgttttgatrcttcaaccttgagggctctttcttcag

SEQ ID NO: 524588 - DNA, 485 bp, Homo sapiens
agtgatgaactgaggagactttgttcactcacttcatcaaggagaattagatttagccagaaaagtagacaactggccacaagtttgggtccgtacatttctctgcaatgaaaggcatgggtcaggagagggaacggtattaaatatctcctgtattccctgaaaaagagcagaacaagtccctcagatatcaaccaaggagggattagagtgccaattctctctaagtcccccttggtcgatcatacacagtgcatagtacatagataccctgattccaaagtgtctgatttcacatcagcacttaactaattttaatcatcatctctcttccaaatgtaattatgcatcctagacttcctttccctttttaaaaaatattccttctcagtagaccccacagcatccctgccctgaccccgcatgccttccacccccacctcctgtcagcacgygctgcaccagcagccataccccacaatgga

SEQ ID NO: 524589 - DNA, 496 bp, Homo sapiens
tttcctaaagaagtaagaggtagtcgccttgctcttcccctccatcccccgacatcacctctgctccacttgctatccattttcttaaatagaagattcagggggaatccctggagtaggttataataggttgtcagaagaaatgcttctattttaaaagaaaaagcagtgagaaaaagaaattttcgttagctctatcatattccttctgagaagctgctgctttgaaggcaaatctactcctcctactgccttcacatgtttctaggagatagttgtgtgagaaaaccctctgtactaagaatttttctattctggagatatttttcatgaggagtggtcaacccaaccccctgtagagtaaatgagacaaggggcctgtaccagaacactcttatgagaygtggcatttaagatccagtaaaataggagataatataggagatacagaagccctcctggtcatacaccataaatgatgatgagattttgaatt

SEQ ID NO: 524590 - DNA, 610 bp, Homo sapiens
ctgatttggtgaatttccacctttcactgtgcccaccccttcccttctccctttctatggggtgctcacaagtaccatttytgagaacagcctttgaatttagaaaggctacaaatctataaaagtggcataattctgtgaatacaggtttgggaacgttttagtcgtgaagggaaaccttttcctcttgaggaaaactcagcctcgagagatagatggttggcaatgagctaaatcagcaaatcaaatttgacatgtattgaagaaaatcaaattgtagagcgtgaaaggcctttgaagatcatcagatgctagtctaagccacttagcaacggacgcattcagtgatctttcgcggccacacgaatcggcagaatcggaaaatattcgctgtccagattccctcctcactacaaaggcccctcctctggggctccccctacctttccactgtctagcaactaaagggtgaacaccaggcacagcttgggagccttcaggctttaaaccccactcctgctccaagctgctttgtgtttgctcagtatccatggtatcgtgatattttgagcatctcccccggaaggctgagtacaattccagcaggagg

SEQ ID NO: 524591 - DNA, 464 bp, Homo sapiens
ttaatgattaaggctgccattttaaagcaactctactttttttggagcttattgrtattacaggtaaagatgaacttttacagaaactttttggtgtggaaatacctaaatgtgcacaaaagtcaagagaaggctaaaccctgagtttcagcagttaccaccattttggtgtttgtcttccccaccaccctgcgccttgtttggctgtagtcagtcttcagggaagtcacttgtgtggcctcacagataagcacttactctttgttaacactgccaccctgccactgtcacaggtaatacagttcacaactgtaccccagcatcagagactgactctggaccacctggggtcagggctgggcccagcctagaatctcctatccaagccagcactggagcctcctcccatccccccgacctttgccctccaccacctgcagccctctggctcgggcctagcccga

SEQ ID NO: 524592 - DNA, 464 bp, Homo sapiens
ttaatgattaaggctgccattttaaagcaactctactttttttggagcttattggtattayaggtaaagatgaacttttacagaaactttttggtgtggaaatacctaaatgtgcacaaaagtcaagagaaggctaaaccctgagtttcagcagttaccaccattttggtgtttgtcttccccaccaccctgcgccttgtttggctgtagtcagtcttcagggaagtcacttgtgtggcctcacagataagcacttactctttgttaacactgccaccctgccactgtcacaggtaatacagttcacaactgtaccccagcatcagagactgactctggaccacctggggtcagggctgggcccagcctagaatctcctatccaagccagcactggagcctcctcccatccccccgacctttgccctccaccacctgcagccctctggctcgggcctagcccga

SEQ ID NO: 524593 - DNA, 464 bp, Homo sapiens
ttaatgattaaggctgccattttaaagcaactctactttttttggagcttattggtattacaggtaaagatgaacttttacagaaactttttggtgtggaaatacctaaatgtgcacaaaagtcaagagaaggctaaaccctgagtttcagcagttaccaccattttggtgtttgtcttccccrccaccctgcgccttgtttggctgtagtcagtcttcagggaagtcacttgtgtggcctcacagataagcacttactctttgttaacactgccaccctgccactgtcacaggtaatacagttcacaactgtaccccagcatcagagactgactctggaccacctggggtcagggctgggcccagcctagaatctcctatccaagccagcactggagcctcctcccatccccccgacctttgccctccaccacctgcagccctctggctcgggcctagcccga

SEQ ID NO: 524594 - DNA, 375 bp, Homo sapiens
aaagcagagtgttaggacaacagtagattgtttatctaaacatgataaaggcgtcacttttcttgtttgttacactccacatgttcctgagaaactaaccataggggtaaaaagttaataagcacaggacttgaacgaaccatagcaatgcctttcaaatcatttgcaacatttaaaaacctaaagctccacagatcaagtatcaaaaargaggatcccctttggctgaaggggagccatccatacggcaggagggggtcagaagagacaagggaacagagtcgggtagaagggagggtttgaaccaaacttaatcatggccttgatgctcaccccacatcgctgaagtaccaaggaggccttaaaatggttttg

SEQ ID NO: 524595 - DNA, 486 bp, Homo sapiens
tcttataagctgggcaccctcattttattttcttcgttggttctaaccctgtggcgtggtatgctgtatagtaaaaaggcagagaaccactttactgaaaaggtactagagccggcagtccagaagttaatgtgctggtcaaagaaccgttctggtaaagaagaggtgagcaytgccttcacgtgttacacggttacacaccccttgtagcctcacctcagtgtaatcagtctacttttggtactagcaaagagtacagcaaatggaggattgaggtgtagaaatggtatgttttggctgaaataagtgtattttcacaccaacaaaactccagcacgaacatacaacagcaatgactgagacaagggcgccccgtggagccctggctgtggcctgggctgtgcgtcctgtggacttctgggaatgaactgaacagaggcgttccccccacttccccgatttctgttctctgtaaaatctaccttt

SEQ ID NO: 524596 - DNA, 525 bp, Homo sapiens
agttgtcatcaaagtaaagaaccgagatggcatttagcttagttggcgcacagcacggtttggggacatactcggggttcataaggtgaacctgttccaaaacagaaggggagaaggtaccttagaaatgacacctggtcttggcttactcccacttacaaaacaaagtctccgagagctcaccaaggtctgcacaatcgcgtggttggttgcattcatgtgtgcgttgagtgggaaggagcattctccatcacagtaattggcagcatagcccttgggtgcaatgatccagtccttaatttcatgcaaaggaagcaacaaaagatgagcatgcacttctcacactatttgtgcttttcaggaatgctgtgaaaaggtatttttcacattgcacaggcaaggatacagacgcaggaaggcttaggaatttgtccaagttcacattcaagtggcaatgctgggaagtgaacctggtccatctgaccccagarccctcgctccttgcagaggcccacagggcctcag

SEQ ID NO: 524597 - DNA, 634 bp, Homo sapiens
ttttttttttttaataagaacagttttttgttttttktttttttacaaaaatctttagggccttccaaataaaatgctattctactatccacccttagacttcccttttataaaggctacaaaggtcaccaaaactttatgatataactgaatgaggggagataatatattctattaatagattaaaatctaagttcacagaaaacaaccggtgttactgacagatctcacaaaattgcatcttaatgtttgtttaaatgacctaacaaagataagtatttttctttccaaaatttactaattcctcttcacctcacaattcagtcattcccaaatttaaaaaatgtagatgtaaaccaggcatgagttacaacatgagcatatttctctgtatatacctattttaaagtaagtttcagtttgatgtttaagctggcaggattctatgttaattttttttatttagagaattacatttttaaaaaacagcacatcttaatttttatttaaataacaaatgcatttgagttagacaaaattcattactgaaatcatttgactgaattgttatttaatgaaagccagacaaggacagttttcttgcttcctttcaattgaaacctgaagcccaacc

SEQ ID NO: 524598 - DNA, 642 bp, Homo sapiens
ctgctgcaagtgacaaatgacaattgtctgaaatcagaagtagcaagatatccaaggagaccgatttgagagatgtgagtgatgaaatcaacaggacttatgatccattagattaaaaaagatgaagggagtggcaataggttggctcttaagagatttagctacgtggtaaagtgaggggaagacagatgcagagtttaagaatgaagaaaatgaacaagtttggggaatggggaaaggagaggtgatgaatttgtttgaaaatgaaggcaacttactcaatatgcctgaatataaagcaaatttcttttcccaaaattattcctcagaggaaaaaaatagttactgtacattaaattctctttcaaaagtttctcatcatggggtactttccaaatttctgtattttgaacaaattattgtttgggaaaaacaagccagaaactacctttaattgttgctgagtatgtacgctactagaggtcaccwgatggatggaagtgtcctaaaaggagcaaagaattttaacagatatataattttcctgagagcatacctcacatttgcaaatttagatgttataaatttcaaaaagcaacacagtgagtaagtagttatgttgtggagatcaaaaatatgcac

SEQ ID NO: 524599 - DNA, 602 bp, Homo sapiens
cccatgtagcatctatttacccctatgctttccccactttctatccctatcattatatctctggctcttttgcccctctctccttgggcagcttacttgtaattagaaagtttatattccctcataacatattgtaaaagtgctcatttaaagggcaatgcrcaccaaattggaggtgtataattgcaaacatggaatccctatatctctgttatgcaatccctgtatctctgtatccatgttaaattgaactgatgcttttttgaagtaaaatggtaagaacagtggcaacatctagtcttcagagcatagtttaagatttttgcccaatcctccaacccatgcaatggtgtgctttgaaaaccacaggtttcttttagacaaatacaacatttatttcccgcatttctttttgatttaacattttagttaacatttttattaacattttagtctacaagatgcttccacattatctctcattggagtctcaggaccactgtgtgaaatgggcaatatcagggcttctatctagcaagaaaagaaccagatttggggtggcgaaacaacttgctcagggttgcaaggatggtacatggtgc

SEQ ID NO: 524600 - DNA, 243 bp, Homo sapiens
gcacaacgagaagggcctggagaagatgcaggacaacaacatgcgagctgaggctatcaaggccccccaaagcctatggaagtccagcccagggttccaaagagcgccagccgcaagctcgatttgcctacactgcccaccccaaggctgggaagcatgctcrggcccacattgccacgggtctcaggctctgctggccaaaggccaaggccaaggatcaaaccaaggcccaggcctcggctt

SEQ ID NO: 524601 - DNA, 586 bp, Homo sapiens
ttttttggatgaggccatggagagctggttgacgccaaatgctcactctggatactcggattctcgcctcgcttctggcttgacaaagggacaggcgtagacagctatccttccgtgggcttccttttctgcatctctaaaattaacttaaaaatttcagaaaaaagacataaaacaaacagtgccttgtgcgtagtaagtgctaaaaattgattaaaaatgtacrtaatttaaatttaacatcatctataatcccatataatcccttatcattgtgagagggtaagcagaaaacaggttgcttttgtgtcccatggctccttgtggtgagctggtccctgccctggccctggattaatactcaggcaggattgtggcttttctggtcatcttcactggtagtgactcaaggatgtagcattggtgtgctccagacttggcagatgtttaaagctgagtatttctcttgagggttcttttgtgggttcttgggagaacccccattaacgtggatccctcaccttcattctcttgacaaagttgtagccccttcacagcccctgggcatctgctactcccctctgga

SEQ ID NO: 524602 - DNA, 584 bp, Homo sapiens
cagtaagatgaaaggaagaagcatccttttttgaccaaggcattggagaccttgaatgccccggagagggatttggataggcagagggaagctggtgcaggttttcactgaagccattgaaagtctcctccattggaggagcagggaagtgagacgatcataactgagcttctggactgtttaggcgttggcttaaggaagccattgcaccagtgaaggagggagggaatgaaagtctgaaccagggtgagggcrgtggatggaaaagtaggtattgccaaggtggagtgacagcttcagctaagaattggatgcgagagacaagggagagtctgagaaaacaggcccagagctcgagtgactcatagcgtagatagtctaaacacttttctgggaaattattgcaaagcaagatttagtttagcttaatatacggcaggtaacatttacatggttattaaatttaacttgtatattttataaaaatatcaggtctgtggttaataatagttaccattacccagcaaatacctgtgatgtgccttgtataggatgtttgttatctcaagcctcataacaaactt

SEQ ID NO: 524603 - DNA, 626 bp, Homo sapiens
gtctttggattagaatccagaacttgttttctttttaaccaccgatgaagggctctctatgcaaatatttggaatccttacttgtttaaacaagttttaggatgaacttaaaaaaaaagtatgtgcaggtaggttctttgtaatatgactcatttatctctcagaagagttaaaaacttttaaggatgagttatttttttcaagggcacctattaattttggtttggaagtcaatattcttttgataaatttgacccaaatgagttgttttctttttctttttttttttttaaaaaagcacatgacatctgccatcttctgtgccactgaaatgggatttaaaaatcgaacttcatggcttgttaatttaattcctaacatgatttgaaaatctttcaacccctaacacccayatgtagcagtattaaaaatttctttgagggtagggatttaaaaaaatgtgtatacgcttgtaagtacatcattttaaaattatttctttatccattatagaattttgcattttcccaaactgcactatatgaattaaatttaattcaattagcatgaataaatttatttaccatgaacttaacatagacatttgtattattttcagtaaggaa

SEQ ID NO: 524604 - DNA, 592 bp, Homo sapiens
attaaaactaagcaatcctacatcttccttgccttgccttttttcttgccttgctccttccttgccttgcccctcccctctccttccctcccttcccttcccttcctcttccctctcttccccttcccttccctctcctcccttgccctcccctccccttctctttcctgtagaaatgatgataaaggctcatgcccatggtttcctcttgcttcttctgcctcctgaccgacactggtgcttccccgtgtggccctgtgtggcttgttgtgccccttccctcttgggaactgtgagtcacaagctgtctcttcattggcagtcatctcatcatctgctggcctcaccatacctaaataataacatctacattttaaaacaaacagttgttactgggcccctccaaaggcccaacaaatatcatttttcccttcgttcctgatgtgtttcttttgaaatcaggaagatggaacagaattacctaaatatctaggtcctgatwagcaataatttgcccagttttcatttgtttttgagattcttactactgatttcttaaagaaaagtaacttatcttaagaatttatcaatc

SEQ ID NO: 524605 - DNA, 574 bp, Homo sapiens
tttttaaaatcagaaggtgttaggtggggtattcaattacaagatgggktatgtgatgtaggcctggccaatcagagtatgccatctccctggccatagtgattggtttggcaagtcatgtgatccagcaggaccaatcatctgggctacaacagaacattgctttttagaaaactatttaaaataaagaatttcaaatttatgcaaaagaagtgagaataaatatgaacctccttgtactcaatatccagctccaacatttatcaactcgttgtcaaatcttgaaaaagatatctttttaccctgggactgatggacctaggaggatgttgttgtcaacagacatcaggtcagtggagagcctgacttcaaaataaaccctaaatagaaagtagaatagaagcagagtcctgaggaccttatttgagttccttaacccattaatgttggaggttgcaaattatttttgtgaaaaacgagaccttggtgatgaccttcagcagtaggatataaataactcctacaagcttagagttccaacaatggaacactaggcataaatgagttaatccag

SEQ ID NO: 524606 - DNA, 497 bp, Homo sapiens
catactaacaaagacttgaaataaatgatttttaaagtaaagcatgaacagaatatttgctcctaattgcatttatcttgctgaagaaagatagcaagtatttaaaattttcaaattttaaaaatttaaagtataagacaaatgcctaacaaacatacaaaaacatgactaattttacttggaattaaagaaatgaaaattaaagtaagataccctatataatctataaagctgtcagaggttaaaagacccaatgttatagctggtttggaaaaactctcctttactgtccctatgaatataaattcataaaacttttgtagagggaaatttggcagtatttgtcaaaatttaaaaggtcaaaacctttgacccagcaatctaattctagaaatttacacaattgaccaaagatagtcacaactgcagcacaatatttctactaatgagaaactaggaaaagaaagtraatatcattaaaaagataatctagtagg

SEQ ID NO: 524607 - DNA, 627 bp, Homo sapiens
attgtttgtaatctttatcaattccaatagttttactcagataggtctcagagttagtaattatgggtgaatattccctgagctctttcaataygtagattctgatctttcatttacagaaataaggttttttaattatcgttttaaatatgaatttgttccattgttttatatatctctttccagagatctaattggattatttttgctacattttatttcaaatactttcttagtcttttgagatttttttattttaaaattttattcattttttagatttctttttgttttttgttatcttggttgttttcctcattttcttcaatgttctccttaaattttcatttgaatcttttattccttagagactttctaaatcagtcttcatttttttgtgtaacttagacttctacgttttcctaaaatcaacttttattttagttctacttattttgcattcatttctgttgttgatgttttcatttctgtttcaaagtggtttgtattatatttcatatccaaaaatgcttatttgaggatatttcatttagttgcatttagtggataaaatttttgtcatctggattaatttgattctcattttcttctgtatttttatggtgg

SEQ ID NO: 524608 - DNA, 574 bp, Homo sapiens
aaggttgttcatcattatcacagtaattggggaatggggatgctgacatatattgccaaggggccaggggtcttaaccactctgcaatgcctttacagtgaagaattttcccagctcaagttattcatgctccattgagaaatactgtcctccagcaacgattttgccctgtctccccagctccactctctctccctggggttctctgatggatatatcagaagacatgagcctgcccagcctagcccccctccamtcttgcttcctggtctgtctgcctgcagagtaggtgttttctggggtaggcctgcaggttggtttgttttgttttgtttttgaggagtggggttaagttcaattcaggagtgaataattaggaaatccattgtgggacacatcaaaaatccatgcatttacctgcttcactcaaaacccaccaatttcaatgttaatctcatccaaaatataccctcacagaaacatccagaatgcttgatcaaatctctaggcactgtggcccagccaagttgacacatcacaccagctccagcacctgcccagaagagtgatgcgt

SEQ ID NO: 524609 - DNA, 653 bp, Homo sapiens
tctgctttccacacttaaccagagacaggtattcaatatgagctgggggcaagaagcgtgaacccctccaatttttatgcaaagttttgtgagcaagtatgagcatttgctggagccaaagtctacaagtgtcctcgaattctcaaaaagatctggaatcctaccaaggttaaaagcattccyctaatatacccacaactcgtggagcccaggtgactgcgcttatgctttcttggtgaaggccacatgtcgaaccaaaaagtcatgccaaatggatgccacactgaccgcaacagccacttagcctggtgtacaccccgctcagtcctttctcaacttcacaacttcgctcaccagaaagcttcgcgtgcaactgtaagatggcctattcctttggaaaggaatgagaaacacgtaggcttggaagtactgagacattggcgcctctcctgttttggtcctgaatggattcccggcgaagaaatcacatgcctctcttctcctgaccccacttttggcatctcttaaggccgaagctggttctcagagctcgtctgcctacagctactaagttctctgagagcaataaagatacgacgggatccatctggacgttttccggacaggagaggcagcccggcatttcccttcag

SEQ ID NO: 524610 - DNA, 653 bp, Homo sapiens
tctgctttccacacttaaccagagacaggtattcaatatgagctgggggcaagaagcgtgaacccctccaatttttatgcaaagttttgtgagcaagtatgagcatttgctggagccaaagtctacaagtgtcctcgaattctcaaaaagatctggaatcctaccaaggttaaaagcattccccyaatatacccacaactcgtggagcccaggtgactgcgcttatgctttcttggtgaaggccacatgtcgaaccaaaaagtcatgccaaatggatgccacactgaccgcaacagccacttagcctggtgtacaccccgctcagtcctttctcaacttcacaacttcgctcaccagaaagcttcgcgtgcaactgtaagatggcctattcctttggaaaggaatgagaaacacgtaggcttggaagtactgagacattggcgcctctcctgttttggtcctgaatggattcccggcgaagaaatcacatgcctctcttctcctgaccccacttttggcatctcttaaggccgaagctggttctcagagctcgtctgcctacagctactaagttctctgagagcaataaagatacgacgggatccatctggacgttttccggacaggagaggcagcccggcatttcccttcag

SEQ ID NO: 524611 - DNA, 569 bp, Homo sapiens
ataaatttaattttgcttttctgagttttcatttatggtaatggttaaatcagctagsctttacagttgttactcacatataattctttgtccatcctttaattctcacattgggaactgactaaaaaaagaaagcttccagtctgggcacagtggctcacacctgtaatcccagcactttgggaggccgaggtgggtggatcacctgaggtcaggagttcaagaccagcctggccaacacagcaataccccgtctctaataaaaaatacaaaaatcagccaggcttgggtggcgggcgcctgtcgtcccagctacgcaggaggctgagacggggagaattgcttgaagccaggaggtggaggttgcagtgagccgaaagcgcttaaggagaaataagtaaggacaaagagtgcaggatagtatcctgacacggaggatggggagggtatgtaaatattgtcgatattttactgaatttctaaatattacaagaatagaatattcataggataacctaagcttttctgtgagtcagtgtactaggcagaaagttcactaaagtggttta

SEQ ID NO: 524612 - DNA, 624 bp, Homo sapiens
ataacatcatatattttgtatttttcattaaagttatggactttttgctgctcctttgtcttcataatcatgattttttttttatttttcctttttggttctgtctctggagacataatcattgtttttaacagctctatagtagactacaaagtagctgcatcaaatttaagaaatcaactgttgcacacttaaactctttttttctttgcatgtaatgttgttatgtgtatctttatgatacaagcttttttccataattcgtgtcattcctttagccctagatctatagttccaagaatgcaaatattaaggcagaggatatgaacatgtttatggctctaaatatgtatttcaaattgcattgctaaagaattatacccatgtttagggccaccaagaatgtataagaaaactggaatcatggaacccttgtctacattgagtattatcrcttacagctttttttccccttttttattttttgctaatttactaggcaaacacactcagttttgtttaatttgcttttctttgattactagttgccactaaattgaatttgctattcaatttctggctttctaactttctaccaaatcagttattaggccctaaaactgc

SEQ ID NO: 524613 - DNA, 607 bp, Homo sapiens
actgtagttatgcctgtgtaacagaattacatcttttgtttttgtatttcccaaattttctatgagaagattatatatatgtacaattagaaaacattgtattttaggctgggcgcagkggctcacaccttaatcccagcactctgggaggcctaggtggatggatcacaaggtcaggagttccaaaccagcctggccaacatggtgaaacctcacctctacttaaaaaaacaaaaattagttgggcaaggtagtgtgtgcctgtaatcccagctacccgggaggctgaggcacgagaatcacttgaatccgggaggcagaggttgcagtgagctggtatcgcaccactgcactccagcctgggtgacagagcgagattctgtctcaaaaaaaaaaagaaaatattcaattttaaaaattaggcgaagtttcgatgcaaaaacatacaaggtgggagattcctggtgccaacaatatgtgtgggaagggaatagttacagagtaaacacttcaaaaccatttgctaaattgtaaatgcaagtattacccatttctctgtagattttatttcaaaataaaaacgttaatttttaaaagaggcaatgcc

SEQ ID NO: 524614 - DNA, 387 bp, Homo sapiens
caactctatttccatctttttttaaagaaggcaaytttctagacttcttgaagaagggaaaagctcaggcaagctgtgtgttttcctgtgaaaacttcaaaatgaaattaactgaacactgaaatgtaattttcttcttcgaagaatatagcttttggtttttgtttccttacaatttttattttagattcaagggggtatatgtgcaaatttgttacattggtaaactgcatgtcattggagtttggtgtacagataattttgtcacccaggtaatcagcatatactgacaggttttcaaccctcacactcccaccctccacccacaactagacccctgtgcctatggttcccttctttgtgcccatgtgtactccatgtttagct

SEQ ID NO: 524615 - DNA, 624 bp, Homo sapiens
aactgaatatttttaaaagtagtctacaatttcatgagggcaaaaagcatgtctaatcacccatctagtctcaacatctagtgccaggttgtagttggtgtccaataaatatttttggatgaataaatgaatgaatgaatgaatgaaaaaatgttgtcatgatctactgattgatggtgggctctctgggtgtatgtctgcattcaacatttcctatggcggccaaagccttttcctcatcattttgtcatttgtctagactacagagaataaacccaaagcatgcacagcatccaccattcaacatattacaaagcagtagcacttgaggcactctaaaaactgagtactttatgtcattatcaagttccagtctytaaggtaggttttcagcaaacgggattattatttttaaaagttgttgagactagcctcatatacaagctcaaatagggttgagagataattgtgatgttgggcatacatcacgtaagtaaaggagaagctttgaatcctcaggatctactattctggccataaaaggttaacagtaagaagaagaaagtcaccaataaagcatgtgttacagccacaccatacagtaaaagatgggttgaagtgatg

SEQ ID NO: 524616 - DNA, 595 bp, Homo sapiens
actcagcatgagaatacagcttcttcttgcactcattgatcagtcaatgatcttttcactttggcccattccaaaaccctgaaaaatcctaaccctaaattctttgtggagatggattagaggtttcctcctgtctcctcattcagtgactgtacaattaaatctcttactctggtgcaagcccctatcttgctgtgtggacttggtgcatgtattggggaataaacctactatgattacatctctctcagagttgttggttcttcatacattttgcatggcacataccacctggaataaagaccatatttgttggcctgctgtgacaagcagaattctaaggtgcctcccaaaattcctctccctgctgtacaagtcctgtatcatctagggctgtgaagaggatcggctatcactcctgtgattagttttgattagaggtaacattttatttttaaaaagggagattaacctgggtggatctgacctaatcaagttgtaaccamccagtgggtttacctcgcctgctgcctagacagagccaatttctcaagacaggggagttgcaatagagaaagagtaatttatgcagagc

SEQ ID NO: 524617 - DNA, 491 bp, Homo sapiens
ccgtcctgggccttctatgtggaattggccattctattgttcatgttcctatggtacaaagcacatctttcatctgatcctacagcattttagtgaacttctttgactccaattactagataataagctcatttgatgctagaggttatgcttaatcatctttttatcccaagtccccagaaaacatagtaaatgcctaataatttgttgaaggaatgtgcaagtgaatggaaatgtatgcaacttgtaactgcgtaatgcaattttcaatcatgacttaatatttgtcatagtttacagtaaaaacacattattttaaatggagagtctaatatcatttaaatattccacagaaataaagacagttttaggtctctggttaaattttttagtaaattagggatgaaataacagatttcaaagactcactttytaagtagtatttttctgtcactcgatgtctattttccttctttctacttttaaaatgg

SEQ ID NO: 524618 - DNA, 459 bp, Homo sapiens
cacacttaattagtccatttggaaaatattgattagaatttcccattttctaaaaagtatttttcaattagtattccaatcactgttattaacatcatctctataaaatcagtcagtctcttttaagctttatgtcatgagagatgtcagtttgattacttaaaaaacaattaaaatgagttgtaattttatatcagactttgagccgtatatggattgatgaatgttcttaagtcatcatagtttaaaattcarccaaacaggtaattatcatataccatcaaatataattataggtgctcatctccataaaaccctacaacttaatatcacatattagcagttaatcatatagtttaaatgggtctatgatgcatttttatgaactctctaatctgcatcagtgaagaatacatacagcacatgagaaaaaaggtaaatgaatgctcaagtgaaaaa

SEQ ID NO: 524619 - DNA, 569 bp, Homo sapiens
catgtgttctcatcatttagctcccatttataagcaaggacatgaagtatttgattttctgtttctgcattaggttgttaagaataatagcctccagctccatctatgttccagcagaggacatgatctcattcttttatttatggctgcataatattccatggtgtatatgtaccacattttctttatccagtctatcactgatgggcatttaggttgattctatgtctttgatactgtgaataatgctacagtgaacatatgtgtgcatgtgtctttatggtagaatgatttatttgcctttgggtatatacctagcaatgggaatactggttcaaatggtaggtcttcgaagcatcgccatactgttttccacaatggttaratgaatttagactcccatcaacagtgcacaagcattcatttttcaccataagatggttcaactaaaaaaaattaactttatacctacccctacttaataatacataatttgaaatttcaatgcattccgttctcagaagagatcatgtttttgttgttgttgttgttcaattgataaggatgca

SEQ ID NO: 524620 - DNA, 419 bp, Homo sapiens
tgacagcacatttgctgacaggggacactctgcgctcggagtggccctgtgtttaaaatgcatgaagtgggcacgtacagtatttcaaaagagattacattttgtcatctgtcatatgtttaaggtcactgcagacacagactgttaaaaatagatttcaagaacaatatctttcaactctttaataagtcgttttggacaaaaacctacttgctgtgtggcagggacattctggcattgctgtttaagacagaagcccaagcccctcaccctttcctagaaaaacctgtacacatacacaagggagytttgactgacccacattaaccttgatgtgagtgtcaagtactggcactcacaaaaaccccttcattcattatctctggattaccatttggaagatatgaataccaaacaaa

SEQ ID NO: 524621 - DNA, 503 bp, Homo sapiens
cctaggccttctgactcccaatcccgtgctaagatcaggtcactggctctcgcaaaaaggaagtccatgggggcagcagtctaggggcagggaggggtgattgcccagaagccaggctggaggagttatgtttaggaaccaacagagggaacagatgtgagttatttggctgaaatctgtaggaaagaaaagttggagataaaaaaggaaaataagagtgaggtagctggtagggcagagaacagtcaagtggaggtttttttgttttytggggttttttttttgagtcagggtctcactctgtcacccaggctggagtgcaatgatgtgatctaggctcactgcagcctccgcctctgggttcaagccatccttcgacctcagccttctgagtatctgggactacaggtgtgctccatcaagctcagctaatttttgtttttttgtagagacagggtttcgccacgttgcccaggctagtcttaaactcctggcctcaagca

SEQ ID NO: 524622 - DNA, 626 bp, Homo sapiens
ggaggcctgcagtgggcagggggataggtgaggacaggttctgccgcggattccgtctgtggccctggctgggtatccactgctctgggtctcagttttcctactgacgggttggcctctggtggggaatttggttctgcactccctgggcctgcctgggaggggtagctatagctcatggccagtgctgccctccatttaaccaccctccaattgcctcacccatccccaggagcccccatgacatcaccaatgtccagttccaccttggcccacagcctagcagccattgaggccctggcagatggccccacatccacatccacatgcctggaggcacagggtgggcccagytccccggtgcagctgcccccagcctccggtgccgaagagccggacctgcagagcctggaggccatgatggaggtggtggtggtgcagcagttcaaatgcaagatgtgccagtaccggagcagcaccaaggccacactgctgcgccacatgcgggaacgccacttccgtccaggtgcgtcagtagcagcctacctgcttggactgcatgggtaggggtggggtgctgggagccagacatggcaagcttgtcttaccctccctccacttccagt

SEQ ID NO: 524623 - DNA, 558 bp, Homo sapiens
ctcttgtggttttggtactgccaaaatccaactctcaatgtgttttcttgcatcaaggcatgagaaaagagaagtcttagaaaagatacatctaattcctaactgccttccactggcaatactggatatatgataccacctaattgcaagggatccagagaaatacagaccctgactaggcagctacttcccagcaacaacttagcactgtgggggaggcagcataaccggtgaaaatctagccttatgctacagattacctacctggctaccaaatatctaggagcaccattagtgcccaacacagaacataccctgtcacatcccatttttgacattcccaaatagcttccagttacttcatcctrttcaaagttgagatatccagctggtgtgtggtcttctccatctgaccttaatggggctactcgtagttctataatctacgatctaaaatgccaaggcatctgtcctgctgtacatctaatatacagtggtggagaaagggtaacatacataacataaacataattacaaactcaaattcagaaaagggaa

SEQ ID NO: 524624 - DNA, 518 bp, Homo sapiens
gtcagactggaggaaaccaagaagacataactggtgccaccttggattagctcctagaacaaacaaaagacatgaatgaaaaccagtgaaattataaatgaagtctgtagttcagttaatagtattgtatctatattaatttcttgattttgataaaygtaccatggtaacataaaatgttaacattaacaaaaactggctgaagggtatatgagaacactctatgctatctttctaagtcttctatacatataaaattattcaaaataaaaagtttaaaaaatgattggacttatttaattggtaataataaatggcaaggtagtaacaatgtgtaaaaaatactgattaataaatatgcatagaatatgaaaattaattcttttcattttcaaatagaaagtgacaggccaaaatccaggtaaataaattgatttatctgacttacttatataaattagaattgaaattctctgcacatttttattaagactaaaagcctgaaaataatcctgtcc

SEQ ID NO: 524625 - DNA, 518 bp, Homo sapiens
gtcagactggaggaaaccaagaagacataactggtgccaccttggattagctcctagaacaaacaaaagacatgaatgaaaaccagtgaaattataaatgaagtctgtagttcagttaatagtattgtatctatattaatttcttgattttgataaatgtaccatggtaacataaaatgttaacattaacaaaaactggctgaagggtatatgagaacactctatgctatctttctaagtcttctatacatataaaattattcaaaataaaaagtttaaaaaatgattggacttatttaattggtaataataaatggcaaggtagtaacaatgtgtaaaaaatactgattaataaatatgcatagaatatgaaaattaattcttttcattttcaaatagaaagtgacrggccaaaatccaggtaaataaattgatttatctgacttacttatataaattagaattgaaattctctgcacatttttattaagactaaaagcctgaaaataatcctgtcc

SEQ ID NO: 524626 - DNA, 597 bp, Homo sapiens
gtatgtgtataaagatttctatagaagatcaaatgggggaataattagataaggcaagtatatacaagtgctaatccattttaaatgactctatgtcatttaaaacaatgatttatgtatgctttaaaaatacaactattgaccaggcgctgtggctcacgcctgtaatcccaacactttgggaggctgaggcgggtggatcacaaggtcagtagttcgagaccagcctgaccaacatggtgaaaccccstctctactaaaaatacagaaattagctgggcatggttgcacacacctgtaatcccagctactcgggaggctgaggcaggagaatcacttgaacttgggaggtaaaggttgcagtgagctgagatcagtccattgcactccagcctgggcaacagagcaagactccgtctcaggaaaaaaaaaaaaaaattacaactattggccaggcacagtggctcatgcctgtaatcccagtacttcgggaggcttaggcaggtggatcacctgaggtcgggagtttgagaacagtctggccaacatggcaaaaccttctttctattaaaaatacaaaaattagctgggtatggt

SEQ ID NO: 524627 - DNA, 597 bp, Homo sapiens
gtatgtgtataaagatttctatagaagatcaaatgggggaataattagataaggcaagtatatacaagtgctaatccattttaaatgactctatgtcatttaaaacaatgatttatgtatgctttaaaaatacaactattgaccaggcgctgtggctcacgcctgtaatcccaacactttgggaggctgaggcgggtggatcacaaggtcagtagttcgagaccagcctgaccaacatggtgaaaccccgtctctactaaaaatacagaaattagctgggcatggttgcacrcacctgtaatcccagctactcgggaggctgaggcaggagaatcacttgaacttgggaggtaaaggttgcagtgagctgagatcagtccattgcactccagcctgggcaacagagcaagactccgtctcaggaaaaaaaaaaaaaaattacaactattggccaggcacagtggctcatgcctgtaatcccagtacttcgggaggcttaggcaggtggatcacctgaggtcgggagtttgagaacagtctggccaacatggcaaaaccttctttctattaaaaatacaaaaattagctgggtatggt

SEQ ID NO: 524628 - DNA, 622 bp, Homo sapiens
cccctcagcatttacgagaaagagtttatttcaacaacacccaagttaggrtaaaactccctacctggtgtctccgtattagcatggcaactcatcacaggggcaaaatcctgctattcctaagcatactaatttaagaaacttttgttgaatattaataggattaataatcaatagggttcaataaggaaaacaaccaggaaaaatgattcttcctaaatggatctttgtaagctctgttttctcatttttaaaattagctaaccaaatgagtttagtaacctattagtaaaattagttacagcaaggattccagcctccttccccacttcccaatgcccaaatgctgagcttacatctttgatttgaactgtaaactccttttcatccatgcctcggcgaagtttggtgaactgggctgccgctgtgctgactgcagatgcttcctcctctgccatggaagctgcactactacttcgtggtgtggggactggagagtcaccatattctccaggagtcaatgagggactgtctagcaagtggttgcctggccccaaaattcctcctgttaccatttcctggctcctacggctagaaggccacttccctgagagtacagcct

SEQ ID NO: 524629 - DNA, 508 bp, Homo sapiens
ccttaaatcattgaagaaatatccaaacagaaattgagcagctgtagaaatatccaatagaaaagaaaatgagatgaatttgcagaagtaatggagtcttttattgcaatgtctttccaaactttattgaaaatttcccaaaggtcttggttaatattaagaacaaatatttgtgaatttggaaactgctcactaacaaataaaagcaattaacaagaccatttatgctggcagtaattatcatataaacacaaaattgttttattggtyaaactgttagaactccagctgtcattccatattaacaaatttgattttttaaaattatattttctacccttgatttgagtttctggcttgataaatattaataaaggaagagaacaaagttttcatggttagttactctcagttgtctacttgcagactacccactgtctggagtactcaaggtagagtgttaatatcaaaacaacattaactcactccttataatgcgtttggattc

SEQ ID NO: 524630 - DNA, 484 bp, Homo sapiens
aaaatgcaagactaaatgtgatggttaatttttctgtcaacttggatgggccacagtgctcagatgtttgatgaagcattatgctggctgtttctgtcaaggtgtttttttgkatgagattaacatttaaattagtagaattagagtaaagcagattgctctccataatgtgggagagcatcatccaatcagtggaaggcctgagtagagtgaaggctgacctctcctgagcaagaagcaatagtgcctgtagactgactttggactcgacgtgcaactcttccctgggtctccagcctgttgaccgactctgcagattgtagacttactaagtctgcaatcatatgaaccaattccttaaataaatctctctctatgcacatcctattggttctgtttctcttgacaaccttgacttgacccacaaggcctttcacacctgctgttcccactctaggaatctcttctagctaactccttctca

SEQ ID NO: 524631 - DNA, 587 bp, Homo sapiens
ccaaatgtggaggttgagggaggcaacaatgtctccaagaaggtaagtgtaagaagggaaaaaatggtagaaacaacttataagaggagaaggtagtaaatgaacaccacagggctaaggacagaggaggatcacttctgcagtcaggaacaaatgactgtcttggattcaagggcgggtgaagaagctgaatctaacacagtcagattaaactaggaccatgggggaagccaacatggcccagggcaaagaatgctatctggttctcggtagaagaaaacaccaaagagattgtaaaacaagctcacttgtcaagaacaaggataaaatataggaatttttagatttaaaaagtaaacctgagaaagcttacagccatataccttcactamagaactttaaaggatatccaataagccggtctttagatggaattggcttgtgcttgaatcacaggttgactccttacttactgtatgatttttgtgtttctccctcttactctcagttttcttatttctaaaatgagtatagcattgacttcatataaagtgactagaatggttcctggcatagactaggagtcc

SEQ ID NO: 524632 - DNA, 601 bp, Homo sapiens
tcaatctaatttgcagggccctagccaatgaaacaaagatgagtgaaaggaaaatatatatatattttttctcccccgcactgtttagagagctgtggggaacattctatacctgaatgaggttttcactagatggtatccatggtttccaacgtggaggtcttcaagagcagtctttatttaatatatctccaaaattcttaggccaacaatgcaaatatgtattgcatggtcataaagggtatgtttaaatatattctatatttttatagacaaaacgtttaaaaattatgagatctatgtggaacattttaatcataaagagttctaggtggttaaaaagaagctactgtttcaagttctcartgctaaaactacatggatgtttctgaaaattaagaatagaagacttctgaatatttttaaagagcttaaaatttaattctgggctacagttttcctaccttaaagaaattaaaaattttcacaggaatgcctaaatgatattaaggattcttaatcagcttgatcttcatagacttgcgtatctcttgagccaaaactttcacccaccccaataacatctgaagctccctaaaca

SEQ ID NO: 524633 - DNA, 593 bp, Homo sapiens
ctggtgatctatcattattttacctgcaacaagatatttattagaagacctacaaaatatgagtcagatgccctagattatagtatcttttataaactataatcttcagccatcaattaaattctgagctttagtttcctcatcaataaaagaaatatcatcagtagacccttatggatagttgtagagattagatctgatgacctatttgtaatttgaaatgatccatatatatcttagttatgctggtgcttgttactaacgaggctcaagccaggttttagaaccataatccccaaggccaattttctggtttctattcaggatatctattcaggacattgttttggaagtctttaatccatcaagaacttcatcctaatttaagacagtcataataaattatttgtcatgcttatgcattacgatatatttgatgaatggataataacaccttgaggaagattatttttaatgaagtactataatattttgtggactactttcatttcttgctcagtatgtgtatatttctgggccatgtgagtttctgataaatcttagtaaacatwtaaatatgtggacataataat

SEQ ID NO: 524634 - DNA, 397 bp, Homo sapiens
atggccactgcccagggctcctgctcaggcctcctcactcccacaactgaggggagacccagttccacacccacccacctagcagtgtctcacacccaccgggagaggtctaaacatcttccctgggaaatggtcccaaaatgtccctgcagtaagcaaccatctggagaggcccaggtctacatctgtttttaaagctcmaataaataaataaatgaaggaagaaaaaaagaagaagaaatgcagaacagggtgactaaaattggcatgtatttttaaatgtttatattaacaaactaacaccttttaacatgaaaagcaatataattgtgctagccacaaaatcatcgtaggactgagaaaggaatcgtgattctgagagccctagagttaatgt

SEQ ID NO: 524635 - DNA, 531 bp, Homo sapiens
tgccagagaccagcttcctaacaaggggaacactctgtctgcaaacagacaggttaaagaacttcagaggccccacccatcccaacacacagagatcattctcagcttcagaagagcacccaaaatattcctgtctagaaattactggtccctaaggccaaataaaaagttcagagatagcatggggtcattgacaatcttcaatcaattatggtgtcacattttcatctgttttaggaactgtgtgtatttgtgattgttttcacacacacaaaaagtgagctctataaaatgaagctttaaccagatgactatgccctaataagatcacccaaagctccagggccccaaagggattactctgtgtccacaaaccctccagttcattccttcatctgttcaactgctctgtactcaataagtgatcaccaacagtgaacccaacacygtaccagcataggaagcaacatgtaaccaacatggtacccaccctcagtgagattaccatttagggtggagacaaggagcatg

SEQ ID NO: 524636 - DNA, 494 bp, Homo sapiens
gaattgggaaagacttcacagagaatgtaacaggtaagtaggatcttgaaggaagatgaaatcatgatttactttggtgaggggcttcatattgaaggatggacaaaaagtgaacagcacattcaaaggcacaagggtaaagcatgacayggcacagtcatggaatggcagcagtaagcatggctaggatagaggtcaagaggaaggctaagggtaagtggatcctacctgtggccccactgtgccctctgctgaggtttagaaggtgtctgcagtagggtcctgggcttaaacttatggccaaaattggggctgataaagcagcatcaggaacacaattcctaccatggaggctaagaacaagatgtcaatggaatttgtgagtgaaacagattagcacaaaaagcaggcagggaaaaatggttggactaaaagcctcattcagttttttgccagccactaaattaaaaatgaaaaaaaaaaaaaccttttag

SEQ ID NO: 524637 - DNA, 494 bp, Homo sapiens
gaattgggaaagacttcacagagaatgtaacaggtaagtaggatcttgaaggaagatgaaatcatgatttactttggtgaggggcttcatattgaaggatggacaaaaagtgaacagcacattcaaaggcacaagggtaaagcatgacacggcacagtcatggaatggcagcagtaagcatggctaggatagaggtcaagaggaaggctaagggtaagtggatcctacctgtggccccactgtgccctctgctgaggtttagaaggtgtctgcagtagggtcctgggcttaaacttatggccaaaattggggctgataaagcagcatcaggaacacaattcctaccrtggaggctaagaacaagatgtcaatggaatttgtgagtgaaacagattagcacaaaaagcaggcagggaaaaatggttggactaaaagcctcattcagttttttgccagccactaaattaaaaatgaaaaaaaaaaaaaccttttag

SEQ ID NO: 524638 - DNA, 598 bp, Homo sapiens
acagccctggactttcctataaatcaggtaactaaaagctagggacaagcagctcccaaagaatagggaaggtagaggggcaggaagatttttgacagaaggcgggtcaaagctatgggtacatggtttcaggaaaaagatcaacttccagcccttgccctcctcaaaccctgccaactctctcaccctccctcagcatttgaaaagtcaggggccccacrtttttctcctgggcctgattcctgctcacaatctcacctcccacctccagtgggcgctgctgagttaatggcctgaaccatgtcagtggtgagagcatccagtaggctggtgataaactccattttcttcccttctggacagcctaaaagataaaatgagatttgaaggtagatgccagataataatcaagtcaacagctttctcaactaccatcctttcctaaacttctcaaagcccttcttgtccagccaaatccactttagtgatttgtttactgatcagatgagtctcataaacttccatagttcctttacccataccccacaaaggaccatcagaccaaataatgctttcaattttcttccattccacacat

SEQ ID NO: 524639 - DNA, 598 bp, Homo sapiens
acagccctggactttcctataaatcaggtaactaaaagctagggacaagcagctcccaaagaatagggaaggtagaggggcaggaagatttttgacagaaggcgggtcaaagctatgggtacatggtttcaggaaaaagatcaacttccagcccttgccctcctcaaaccctgccaactctctcaccctccctcagcatttgaaaagtcaggggccccacatttttctcctgggcctgattcctgctcacawtctcacctcccacctccagtgggcgctgctgagttaatggcctgaaccatgtcagtggtgagagcatccagtaggctggtgataaactccattttcttcccttctggacagcctaaaagataaaatgagatttgaaggtagatgccagataataatcaagtcaacagctttctcaactaccatcctttcctaaacttctcaaagcccttcttgtccagccaaatccactttagtgatttgtttactgatcagatgagtctcataaacttccatagttcctttacccataccccacaaaggaccatcagaccaaataatgctttcaattttcttccattccacacat

SEQ ID NO: 524640 - DNA, 304 bp, Homo sapiens
tttcctaaaattggaattgttgggtcaaagtrtatatgtctttcttattttgctagaaactgccaaattgccctacataagggataaatgaatttacattcccataaacaatatatgaaagtgtgtgttttccccacctttgctaacagtgttttccaaccttttgatcttcacccctctgattattaaaaagtggtaccttgtagttttattttgcattttccctgagagtaagtcttaactgactcagataaagacgttcaagtggaggagaggggtgtttttttcgaggtagggaagaagg

SEQ ID NO: 524641 - DNA, 575 bp, Homo sapiens
tgattgacattatcactttctttatgtttggcagattcccagcctgcagcaacatgctggtcaccatagagacctgagaagcaccctcatctcattggtatcatatttacaaaccaccccttaaagtggattattttgcagatggctgatctcatctattcaatgttgattctattagttccaatttcagaaggtgacattttctgactttgtccccttaagcacaaacaaaaactatggatttttgtttttgttttcagaaaagagaaagtacaaggtgtgcttggggaacagcaaggaaaccagacagatgtgggggcgggtttgtaggggaactgctggatgtacctcattaatttgttcatttgttcagcacccacagggtgccagtgaaygggctaggtgctggggatagagtggtgaacaagatgagccttatgcacctcacagtctcctgggggagacagccaaatagacaattttaatacaatgtggcaaattctatgatgggaagaagagagaaatggtgtgtgtgagtccctcaccttcccagaggtttcccaggggaagcaacg

SEQ ID NO: 524642 - DNA, 460 bp, Homo sapiens
tcagcatcacctcaagggacataccctgtgtcaagagtcactgctctcggccaagcccaaagctatggcttcctcttaggcatttagttctcccagtmcaggtgcaatttaccagtaaggagtcatttttgacatcagttactatacctaataacacagttgacatactacctttgtcaggtttctgggggaaacagagaaagaaattattcgaaggtaaaattctcaggtagaaggggaaagggttttgtgacagcctttaccccccgtggactcagtagccaggactccctactctcaacgcccccacacagggactcccagcctcaccgaaggtgtccacgccccacacatggccgagaagtggagtccttgaacacaaagcataaaggacatcatgctggtgatggaacagaatttcttgccttccattccctcactatttcaccaactgctaaat

SEQ ID NO: 524643 - DNA, 460 bp, Homo sapiens
tcagcatcacctcaagggacataccctgtgtcaagagtcactgctctcggccaagcccaaagctatggcttcctcttaggcatttagttctcccagtacaggtgcaatttaccagtaaggagtcatttttgacatcagttactatacctaataacacagttgacatactacctttgtcaggtttctgggggaaacagagaaagaaattattcgaaggtaaaattctcaggtagaaggggaaagggttttgtgacagcctttaccccccgtggactcagtagccaggactccctactctcaacgcccccacacagggactcccagcctcaccgaaggtgtccacgccccacacatggccgagaagtggagtccttgaacacaaagcataaaggacatcatgctggtgatggaacagaayttcttgccttccattccctcactatttcaccaactgctaaat

SEQ ID NO: 524644 - DNA, 535 bp, Homo sapiens
aaaaaataataataaaaactgtgagtagagttcttacaaggaaaaagtgytttttaagatttttaaaaatattttaagaatgagaagggggccagttgtgcgtggttgctcgtgcctacaattccagcactttggaacgctgggataggaggattgcctgagcccaagagttcaagaccagcttgtacaacatggtgaaaccctgtttctaattaaaaacatacctatatatatatgtatatattgtcatctgattctctctatatatacatatatacacaaatatatatatttgtatgtattgtcatctattctatatagatatatatttatatttattatataaatatatttatatatagtcatctgactatatattatatatactatatatatatatcttctctatacagagtatatatactacatatctctctatataccctatattattatcagatgacaataggtataccaggctctccttctcaacccccatgcacaaagccaggccctgcagtagagcccaatgcag

SEQ ID NO: 524645 - DNA, 536 bp, Homo sapiens
ctgtcaccttgatcttggacttccagcctccagaactgtgagaaaatacacttctgttgttgaagtcatgcagtctgtgctattctgttattgcagcccaagctaatacaccttagcttgtcttctttccatgtcttcacatggtcttcccactgtgcatgcacatttctgtgtcctgatttccctcttgttgtaaggacaccagtcatattaaattatgacccaccctaatgacctctttttaacctaattacctctttaaagaccctatctccaaacagtcacattctgaagttctagggtttagggcttcgacgcatgaatttagtgatggagggagcacaattyagcccatatgaggcagcatctaaagtaaccccacaggagctatcacaaggccaggtacatacctgctctgtggaactctgtccatgagtccaggccatccacaatcacattctcataccctttagaatttttaggcatgaataaaacatcagtccaccatgccccttcggctctgtgaattaaatgtc

SEQ ID NO: 524646 - DNA, 511 bp, Homo sapiens
aggacttctaaggaaaggaatggctgatgcgcagttttgggtttctgctatacagcctgccctgcaccaccctgtgtaacacccctccatgccctgcctaagtcttcagtagaatgctgctgagaggccagcaaatacgaccatgaaacctcaacacaggctgtggggtcaatatgcctgggcttaatgtccgctccaccacgcacttactggataatctaggaaaaacgttatgtaacttctctgcctcagtttcctcatctgcaaagtggggataatgacagcaattaccttatgtgggtgctatatacacatggtattattatgagggttttgtgtgaaggaggggtgatttcacatctgggtcaactcagtgcagaacaactctaggcacagcagcagacaccaaggcagaggccrgtagagtcccacaaacatcaaattagcagatgctctgaggacatggactggagattcaatgcagtcagcttaaggagctggacaagcccag

SEQ ID NO: 524647 - DNA, 487 bp, Homo sapiens
cttaaggatgtacaaagcccrtaagagaaaagcaagaagagccaaggtgtcgatgaaagatgggactttgcacagcacttcctgtgtgttgggagtgatgatttcattccctagcacaggagatgctttaaagtgtagctcagaatgtgttcaccatcttccctgccatgatggttgcagccatgcctacctatgtctaagtttatcgaactgtacactttaagctgttccttatacgtcaatgtgtcaaattaagctgcattaccaaaaaatttaaaaagaatcgtcttgggaattatctagcctggggtttctcaactgtgttccagggaattaagagcctttagcaatgagggtccaacctggaacagagaaccttctgcaagagtttacaacagaggggatttaatgcagggatctggtggcacagaagcgggagggctacacggccaagcaggtcgtggtgaggcagcccatggattggcaa

SEQ ID NO: 524648 - DNA, 494 bp, Homo sapiens
agcagaatgaaaccagcatgacctcagtttaatactaaacgaatgatcaacccacacacatcaccacttagcagtgtagcagtacaaatcatggcttttctgacaaggaaagaaggaaagaaggaaagaaggaaagaaggaaggaaggaaggagggagggagggagggagggagggagggarggaaggaaggaaggaagacgggagaaaaagggaggaagggatagaagaacaatggaaagaaggaaggaagggaaggaagaaagaagggagggagaaaggaaaggagggaggaagaacattttaaatgtttctttagtatgtaatccagcagcgaattcaatgtaattgctatgaaaaacacccatttatttcagaagcaataattgctttcctgtgtccttttgagcttaattacactagttcctttcccccaccattacttaggctggagtctggttgcctgatatgtgttgtcaacacagtaagactcat

SEQ ID NO: 524649 - DNA, 422 bp, Homo sapiens
tatatctacctagccatctatccatccatctatccatctgtctatctacatccaagatttataggaatggagggaaatttgtacttgtataatctatttagaaagagtattgtgaatcttttctgtcagagactaactagtaaatawttccagcaggtgggccatgtgagtctctgccacaactactaaatgctgctgttgtagcataaaagcagccatagacaaaaggacatggctgtgttccaataaaactttattagcagaaacaagctgtgagctagatttggcctgtgggccacagtcacatacccctaatttagaggaaaagttgcaacacttttgtagaatgatttgtccaatatatattaaaagctttaaaaaagacttattatttgaccaagcaattcccttttaggaatgta

SEQ ID NO: 524650 - DNA, 438 bp, Homo sapiens
cacatatcctattgattctatttttctgcaaatccttggctaatctactaaaaaattcattataaatggaatgaaagcaatggaaacagaatatgtgtgttttttaataaaaatttaggcattggaataatggacttttggcaagagacaaattgtcttgtatgaagtagaactaatatatgcttgacaggaagcttgttgatataaataagagaactctaaatgaatcaaagaggtgagggaagtgtgtgtgtgtgtgtgtgtgttatattcctattggttttatgtgtgtgcatgtrtattacatattcctactggttttattaattagtacctgcagactgaattttcaaatggtcctgctgagtttgtcattttagttcacaatctgaaagatatgagaggacagggttttaatcctacttcaactgctcattt

SEQ ID NO: 524651 - DNA, 568 bp, Homo sapiens
actgcttccctctctctgccccagccaggtacggtcatcaactggttcagggggtgtagtcacactgtgattgatctccttggttgccccatcatagttgcttcccaaattctcagaactttacattccccagggtacaaggcaactccatgatggggatgaggtgagagagtaaggatgtgggcctgagtctttttatggccaaycctaaagagtttttaaatctcttctccaagtggaaaaggctcctggtctatttttttttccagtctgttgttctgtggaatagtggaaaccacagagtggaatctgataacctttctttcacaaatatggaccccagtattcttaatcaagggtttgaggtttgtttattaagtggtttgttttggaattcaaaaccacaattttgttttttgaattactgtatctgctttgaattcaaacaatccatgtagggcttcaagtgacttctttgttctgacatctgtgggtgctcacctgcggcaaagtccacaccatggtcaagaaaattaaaaaaaaaaaaactgccatcagtacatttttt

SEQ ID NO: 524652 - DNA, 568 bp, Homo sapiens
actgcttccctctctctgccccagccaggtacggtcatcaactggttcagggggtgtagtcacactgtgattgatctccttggttgccccatcatagttgcttcccaaattctcagaactttacattccccagggtacaaggcaactccatgatggggatgaggtgagagagtaaggatgtgggcctgagtctttttatggccaaccctaaagagtttttaaatctcttctccaagtggaaaaggctcctggtctatttttttttccagtctgttgttctgtggaatagtggaaaccacagagtggaatctgataacctttctttcacaaatatggaccccagtattcttaatcaarggtttgaggtttgtttattaagtggtttgttttggaattcaaaaccacaattttgttttttgaattactgtatctgctttgaattcaaacaatccatgtagggcttcaagtgacttctttgttctgacatctgtgggtgctcacctgcggcaaagtccacaccatggtcaagaaaattaaaaaaaaaaaaactgccatcagtacatttttt

SEQ ID NO: 524653 - DNA, 604 bp, Homo sapiens
ttttcttccctcagtgctcctaatactggactaattttcccaaacccaggaatgaaatttcttaggagtatatccccatcctaggtaactcacctcccgggtctccctgggtgaatcctggctgtctctactgcagtgtaccacagtctgccttaaagagtagttaacactaataatagattaagtattaaggaaaatatatgaaaacattgatgttatctctcatgggattaactatattctctgggtctgagagcagctttaccaacaatcttcaggatacaaaagaaaggaactaagctatattcaacattttcaaattatagcattcatcactaatgtaaaacattcatctagcttaaatattcttcataaataayccttagtaacaatttccaaaacaaaaacaaaaggcaactatagcctctagtctgaatttatggtttgtcagtgtcctaagataagaatgtatcctgacaaattcttgaattttcagtttattatactgctgagcctttcaagtaatttatcttctgggtataaagccaatatttgcattttgatttatttttatagctacattactggattcttatgacctagg

SEQ ID NO: 524654 - DNA, 546 bp, Homo sapiens
aaacagctctgcgttggtttgaatcaggcactatgttcaggttcccaaattagaaggagcagtggtcasattgtctgaagagatggacactggccgtggcactaactggttatctaaccattgtctaataatggtcctcatttcctcttttgtaaatcaagagattggagagacaatttgcagaagtttttttccacttctaagattcaatgagtcaaagtttggagacttatttcagaggcaaccagctatgtacaaaatatagcattacaaaatagaaaatatgttggctttgtagcaaaaatacttgggcctgaatcttggatttaccactaactagtagtgttactttggccgagtcaccctctctaatcctcacctttcctctataaaatggaaataaaaagcccttatatgcttattgcgatgattaaataagaaaacatacataaagcaaatggcatgtgacggattctcaataaatggtagccacacttaactgcttcataggccaactggagcattgtctccagaacatatttgtac

SEQ ID NO: 524655 - DNA, 334 bp, Homo sapiens
accaccccttctcctaccttgtgaggacacagcaagaaggggagaaggcagtcatctggaaacgaggaagacagccctcaccagaaactgacactgttggacctcgatcttggacttgcagcctctagaattgcaagaaaataaatttaagctgtggactctgttatttaagctctctagtgtgtggtatgttgttatggcagcctgagcggataagacttcctttcaacaacagaggagagtgggcctgcagcaggggtcgkggtcggggtcagggtcagggtcagggtaccggggaaaatccccggggcccctcgtcaaggaggcagactcc

SEQ ID NO: 524656 - DNA, 395 bp, Homo sapiens
ggcctcaggagaggggcttaggcaccagtactttttattttaatcttgtttttaatggaccttcaagaatcagaccagaatcagtacttattaatataaggccycagatgattctaatatgtagccagcaccaagcaccacccctatctctctaaatctgtttcctcctctaaaatagaaatcagtgttaggttaccccacgtgggtgtgatgagcctcaagtaaggtaatccctgtaaagtgagtaggacatagtaaaccaccaattcattactgtgactcacgactgactccctgtggatgtgcagtggtccttttccctcttgggtctcagtatccccacctgtacctggatcatctttcagtgcctcctgctatatcccctcttatgaata

SEQ ID NO: 524657 - DNA, 532 bp, Homo sapiens
tgtcagtaatgagatcatgaaaaccagttctgagttgcttccatgtggccccacgaatatctttattccctgggtctgtgcctggggtgggcctcagatcccatagatcagagtgaaggggctgtcacatttacttgtcattyggtaattttcagtgaattaggggtatggagtttccatctgccatctggcctcactctggtaaccatggtaaccaccatctgcctgacttaatactattaagtcctgtgccaaaagagcactggacagggtgttgggaccagggagctggtcatcctttactggtcaccctggacaagggctctgaccttgctgtgtctcagtctctttctctgtataacagcagatttggtctgaatgtctttaaggtgcctttctcttaggaagagaatgccactctggggagaaattatctgagatcatcagcagcatttatagtctgaggacctggtcagcatttcttctgtctcctgcatgtggagttaaaagtgttacctgtctggagacaaag

SEQ ID NO: 524658 - DNA, 626 bp, Homo sapiens
gcttttcctgataccacagagctttagaggctgtatgactgaccatacctagaaacctattttgcattttcctaatgacaaaggcatgtgctatttgttagactagccatacagttgttctgattccactgtcaaagtgggggagaaacaaatccatcatcacttcatccaaggcatttttatttttattccctcttctgccagccccctggggagcctggcaagggargcatattttgattctaactgtgctgtgtacatccgtgcccgcctgcatgtgcacaaggtgaaggagagagtataactttattctcgcttgggggcaactggttatgtctggaaacattcgaacatcccataaagctcatttcttttgcaaatgagtcagataacacagaatacttcaaagtggaattccgctgggctttccatctggctggcctctgggggaatgcgtggtgcactgcctttgttaatcaggttctgggagtttgaattttatgctgaaatacaaataactgtgcgtttgtggggaacaaagccaagatatgatctcaactgcatttggaccgaaattcccatctcctgctaaatgctctctaccttccacatggagagcaacaaac

SEQ ID NO: 524659 - DNA, 615 bp, Homo sapiens
ggctgtatgactgaccatacctagaaacctattttgcattttcctaatgacaaaggcatgtgctatttgttagactagccatacagttgttctgattccactgtcaaagtgggggagaaacaaatccatcatcacttcatccaaggcatttttatttttattccctcttctgccagccccctggggagcctggcaagggaggcatattttgattctaactgtgctgtgtacatccgtgcccgcctgcatgtgcacaaggtgaaggagagagtataactttattctcgcttgggggcaactggttatgtctggaaacattcgaacatcccataaagctcatttcttttgcaaatgagtcagataacacagaayacttcaaagtggaattccgctgggctttccatctggctggcctctgggggaatgcgtggtgcactgcctttgttaatcaggttctgggagtttgaattttatgctgaaatacaaataactgtgcgtttgtggggaacaaagccaagatatgatctcaactgcatttggaccgaaattcccatctcctgctaaatgctctctaccttccacatggagagcaacaaaccctttcttgctccaagc

SEQ ID NO: 524660 - DNA, 615 bp, Homo sapiens
ggctgtatgactgaccatacctagaaacctattttgcattttcctaatgacaaaggcatgtgctatttgttagactagccatacagttgttctgattccactgtcaaagtgggggagaaacaaatccatcatcacttcatccaaggcatttttatttttattccctcttctgccagccccctggggagcctggcaagggaggcatattttgattctaactgtgctgtgtacatccgtgcccgcctgcatgtgcacaaggtgaaggagagagtataactttattctcgcttgggggcaactggttatgtctggaaacattcgaacatcccataaagctcatttcttttgcaaatgagtcagataacacagaatacttcaaagtggaattccgytgggctttccatctggctggcctctgggggaatgcgtggtgcactgcctttgttaatcaggttctgggagtttgaattttatgctgaaatacaaataactgtgcgtttgtggggaacaaagccaagatatgatctcaactgcatttggaccgaaattcccatctcctgctaaatgctctctaccttccacatggagagcaacaaaccctttcttgctccaagc

SEQ ID NO: 524661 - DNA, 534 bp, Homo sapiens
agctgtctggaggtgtccagccaccatgctcccttcagcctcattctctaatgtcctccttttccattctgtggttagtaccaatcctgagaaaagtatagccagggtrtaaaataagaactactttccaacaatgtacttcacgaagcccttgtcccctgaggtgttctggagtaaaaacggatttatggtcaacaatttggggcggggtggggggaggatactgcctactcccccattagagatgcataaagcacattagcatattaaaggctctgaaaagcctttaagttaaacctaattaattttcttgaatacagctattcccccaactttattttactgtagaaacctttctccccatacaacacctactaacatcctatagggaaagatgctttgggaaaggtgggattagataaataatcacaaaagtatagtagctgtgaccttggaaactgcttgggtgagcaggtgttttagcagcatggctcctgtttaaacaattacccaccagccatgaggatacatttg

SEQ ID NO: 524662 - DNA, 514 bp, Homo sapiens
tctggaggtgtccagccaccatgctcccttcagcctcattctctaatgtcctccttttccattctgtggttagtaccaatcctgagaaaagtatagccagggtataaaataagaactactttccaacaatgtacttcacgaagcccttgtcccctgaggtgttctggagtaaaaacggatttatggtcaacaatttggggcggggtggggggaggatactgcctactcccccattagagatgcataaagcacattagcatattaaaggctctgaaaagcctttaagttaaacctaattaattttcttgaatacagctattcccccaactttattttactgtagaaacctttctccmcatacaacacctactaacatcctatagggaaagatgctttgggaaaggtgggattagataaataatcacaaaagtatagtagctgtgaccttggaaactgcttgggtgagcaggtgttttagcagcatggctcctgtttaaacaattacccaccagcc

SEQ ID NO: 524663 - DNA, 462 bp, Homo sapiens
aaggggaggactacaaaacaaaatggtggacttcttattaatggtcacagataaatcaacccatgagaaaatgcgctcatgcacttttcttcacataagatgacagaaggaaataccatttctctggcctctgcctgttcataggttccgcctcatcctacaacactgataaagaagaaaaaggagaagattcaaataaacacaatccaaatgataagggggatactaccactgaacccacagaaatacaaacaaccatcagagaacactacaaacacctctatgcaaataaactggaaaatctagaagaaatgggtacattcctggacacatacaccctctcaagactgaaccaggaagaagytgaatccctgaatagacaatgagttctgaaattgaggcagtaatgaacagcctactaaccaaaaacagcccaggtcctgatggatttacagctgaatt

SEQ ID NO: 524664 - DNA, 462 bp, Homo sapiens
aaggggaggactacaaaacaaaatggtggacttcttattaatggtcacagataaatcaacccatgagaaaatgcgctcatgcacttttcttcacataagatgacagaaggaaataccatttctctggcctctgcctgttcataggttccgcctcatcctacaacactgataaagaagaaaaaggagaagattcaaataaacacaatccaaatgataagggggatactaccactgaacccacagaaatacaaacaaccatcagagaacactacaaacacctctatgcaaataaactggaaaatctagaagaaatgggtacattcctggacacatacaccctctcaagactgaaccaggaagaagctgaayccctgaatagacaatgagttctgaaattgaggcagtaatgaacagcctactaaccaaaaacagcccaggtcctgatggatttacagctgaatt

SEQ ID NO: 524665 - DNA, 634 bp, Homo sapiens
acatcttactccatctttgtacccattcagctcmgttgaacattcattacctgtttttgtgtctctggcactgccagttaaaagatataaatttttaaaaatgtttcttgctgtcaaaaaacttacagtgagctaaactctctcctaaccttaattatcctaattatacaatttaagagttttatttcacaaagaaataaacactgacaatgtttaaattatagtgtaaactcagatcaggtcttgctgctcttcttcttggacaggaaaactatccaataccaaggcattactcttgaaataatgaaaagaaagagaagagaggagtaaatctaagtgcgggaggcagacacctggttaaccactgatgcctgctgatcagaggaaaccacgacccttcacctagacagcggtagttctggggctgatcatttcctgagttttgtggcaaaagaatcagttgttctccttttaccaacaacaaacttcaacagttggagtttgacagagcaataaaaaacaaaacaaaacaaaacaaaacaaaaaacctgtagtattttgtctttgcccctaacactctcgctcatccacattctaaactggaaatgacagatgagaatttatatcatttttg

SEQ ID NO: 524666 - DNA, 634 bp, Homo sapiens
acatcttactccatctttgtacccattcagctccgttgaacattcattacctgtttttgtgtctctggcactgccagttaaaagatataaatttttaaaaatgtttcttgctgtcaaaaaacttacagtgagctaaactctctcctaaccttaattatcctaattatacaatttaagagttttatttcacaaagaaataaacactgacaatgtttaaattatagtgtaaactcagatcaggtcttgctgctcttcttcttggacaggaaaactatccaataccaaggcattactcttgaaataatgaaaagaaagagaagagaggagtaaatctaagtgcgggaggcagacacctggttaaccactgatgcctgctgatcagaggaaaccacgacccttcacctagacagcggtagttctggggctgatcatttcctgagttttgtggcaaaagaatcagttgttctccttttaccaacaacaaacttcaacagttggagtttgacagagsaataaaaaacaaaacaaaacaaaacaaaacaaaaaacctgtagtattttgtctttgcccctaacactctcgctcatccacattctaaactggaaatgacagatgagaatttatatcatttttg

SEQ ID NO: 524667 - DNA, 570 bp, Homo sapiens
aaactaaatatccaccaaagaatctttaagtktatgtggcagatttatgacaaaaatactacacaggaatttcaaattatgttttgggataataacaatgtgagaaactgctcaaagtataatggtgagtgaaaatgcaaaagatatatacatatacctatccaaatgttaacatttctttccacttacttgtttaatataatttcattttctcataaaattcacatatacttttcaaagtccttaatatctacgagtgcttctcatttttcacgctgcattaatgtacatttgtctttaatatgagcattactacttttatagtcagaaaatgtggaataataaagcaaatgcaatgcaatccggtcttctctactttttatcactaaattcctagacgttgtggtatttttgtactaatgttatacaaaagtcatgtaaaaactgccattaaataaatcaaactctaacaatgtagaaaagtaaataactttagaagcatactttaaatctcataaaagagaagtaaatgtatttctgttagagtcatttatatatagtatatgcata

SEQ ID NO: 524668 - DNA, 570 bp, Homo sapiens
aaactaaatatccaccaaagaatctttaagtttatgtggcagatttatgacaaaaatactacacaggaatttcaaattrtgttttgggataataacaatgtgagaaactgctcaaagtataatggtgagtgaaaatgcaaaagatatatacatatacctatccaaatgttaacatttctttccacttacttgtttaatataatttcattttctcataaaattcacatatacttttcaaagtccttaatatctacgagtgcttctcatttttcacgctgcattaatgtacatttgtctttaatatgagcattactacttttatagtcagaaaatgtggaataataaagcaaatgcaatgcaatccggtcttctctactttttatcactaaattcctagacgttgtggtatttttgtactaatgttatacaaaagtcatgtaaaaactgccattaaataaatcaaactctaacaatgtagaaaagtaaataactttagaagcatactttaaatctcataaaagagaagtaaatgtatttctgttagagtcatttatatatagtatatgcata

SEQ ID NO: 524669 - DNA, 616 bp, Homo sapiens
acgtgctaggctgtactccaaattaattgctcattaaaaatgtaaatttccagagttttttgtttgtttttgggtgatttttttgagacagaatttggctcttgtcacccaggctggagtgcaatggtgcaatttcggctcactgcaacctccacctcccagattcaagcgattctcttgcctcagcctcccaagtagctgggattacaggcatgtaccaccacacccggctaatttttgtatttttggtggagactgggtttcaccatgttggataggctggtctcgaactcctgacctcaggtgatccacctgcctcggcctcccaaagtgtccagggatgttttgaaattttatgttgcctacatggttttayagagtccttaaaactgtccagtacagtggccacttttccattttacagaaagaagaaacagattgagagttgttcagggtaattttggccagcacatatgccagatgtgggcttaccctactgctaaggatcacaggcaaatgcaagattcacagtctttacaggcacaactaaaaggcatttcatgtcctttaaacaaaaaggaaacctttttaaggagaaacaacaaatatgtccatg

SEQ ID NO: 524670 - DNA, 415 bp, Homo sapiens
aaagctgtggcaagtggcatttaaccttaacttgcttgacggatatgttaaatgttcaatgtccagtctaggaagaatctcaatgaggaaatcagtagtaatttgaagttctttttgccttaagaaaaaaagtccccctttatcaataacttataaaaataattgaatactaaccaagttgtagtattattcaaaggcttaaaagctgtggtaacagcatcttattatatatcttccaataaagattacaacataattacatccattcttacgcgtacatgtaacatcttattataaacaataaggttgccatatgtaaaaatgagaatttcagtttggcaaaaacctgtgttttatgccaaatgccrtattaagaggtagattccaaaataaatatttagactttttctaaaaa

SEQ ID NO: 524671 - DNA, 448 bp, Homo sapiens
aaaagcaaggcggaagaactttatcacttgtttggagcagactgaataaggcttcagacttgtaaacattaagacaatttgctcatttggcaaacttggatatattgatgcatgttttatataagtaaaaatttgtaaagggaatgctagaatgagctatttctttacccgttcagtctcaaaactrgatttctaaatggatcaaagatacagctttttcttgtcttcgttgaataagcaactaaaccaaaaaatatctaaattgacgttcatggaaattgtaaccttttctctttgtagttcaagtattagaactttcagcagaaagagacttttggaggtcacaaaaagttgatatttaccaagttggatgatcgttttcagaatatccttgactgccgggtggcttggctgtgagcagggtgccatgttgctgtccctttgtttc

SEQ ID NO: 524672 - DNA, 410 bp, Homo sapiens
ctgttgccttctgctgggctttgtaggagtggagatgagtagttttggcatgagaatggtgagcatgttggtaagaactttgaaaacaagtgccatgattagagggtagaaatagtgayggtagagattcctgctgggagggccaccaggagagactgatcagtgcccccatcccggaactgatctgatgaatctatatggttgcctctaaaggtttctacccctaaagtttaccactcattgtcagctaatgaaaagctagataaaataagtgatccactcaagatcaaggaacgtttaggcagttaaagaccagtatgtctggagtaggtaacacttgtactcttgactctgacgggtttgtgatagctacaaatatcttggaacaggggagtggaagtggagttgta

SEQ ID NO: 524673 - DNA, 584 bp, Homo sapiens
tcattcttcttctggaatcttcttctgtcattcctctttggcaacttgaaaatctcctacttggttcatttcccactcctttcgcttcattttgcttcctttaaaactacacttacattttttcctttctttggtgttcactgtctttactttctcatctccctttcattcaagctgtcatagactggcgtgtgcagcagcacatgtgttggaactgttmttgttgaggtgaacagtgacactctactcaccagatctgatcagattgactgctcttcatttcttcctcctcctggaactttgtgtcatgtgatattgctgaccatttcgttctttaaggtgttcttccctgacttccttgacgtgatctttgtctgtttctcctgtcctcgccatttcttttcagtctttatcgtcttttctactatctaccccttaagcattgctattctgttgagttctcctttgtgtactcttttcttttttattttctaagctcttcctgatgaaactcaactgtatccttgacctaagccactgcttttaagctgacagctctaaaacctgcatgttctccaggctca

SEQ ID NO: 524674 - DNA, 472 bp, Homo sapiens
ttacattttttcctttctttggtgttcactgtctttactttctcatctccctttcattcaagctgtcatagactggcgtgtgcagcagcacatgtgttggaactgttcttgttgaggtgaacagtgacactctactcaccagrtctgatcagattgactgctcttcatttcttcctcctcctggaactttgtgtcatgtgatattgctgaccatttcgttctttaaggtgttcttccctgacttccttgacgtgatctttgtctgtttctcctgtcctcgccatttcttttcagtctttatcgtcttttctactatctaccccttaagcattgctattctgttgagttctcctttgtgtactcttttcttttttattttctaagctcttcctgatgaaactcaactgtatccttgacctaagccactgcttttaagctgacagctctaaaacctgcatgttctccaggctca

SEQ ID NO: 524675 - DNA, 583 bp, Homo sapiens
actgccagagcccagggaggagatagttctgttggtttgaaattataacagtctgtgtggcaagtggtaggtactgcctgggggttgcaagaccagcaagtttcaaggagtgagacacctgaccctataaccaggagctaaggtaggatccctttgctctatctgggcatgtgactgacaagatcataggcatgtagttgactggctaagcatcctggtttggacacaaactattaacctatgctgaaatatggccagccccaaatttgagcatcttgagtcacccagtcttatatttgaactctctatgatttatctatcacaccctatcctctcacactgagctactacccctctctgttgaatcactaatggggagagccctgtagattggttacatcacattcacccattccacaatgtctgctatgtgcatttactagcagccaagtattaaatgaaataatagagcacatagataaaaacacacagtgcctgctrtcaggaaataggcaggtcttctaggcaaggcagagaagcaaagagtctattgcaatcagtataataaatgtaatggtagagt

SEQ ID NO: 524676 - DNA, 594 bp, Homo sapiens
ccaccaggggcttactgattggtgtgctctttttgaagaatgaacagaagtaaaagtcatacagttaggaaaagagaataaaactgtctttattcatagaataatgattgtttaggtaggaaattaagaaatctacaaaaagttactagaacyaataagtgaatttagcaaggtctcaggataaaagatcaatataaaaacgtctatttctatacactagcaatggatgattgaaaaatgacatttaaaaacatttcacttacagaattcctggaaagcattaggatctgaatcatttatcattacggtagtcttctatccagaagaaaaagggagtcaacagagaagagttgctaggaaagtcaaatgtctacattttacttccaaagagttgagaatcctcagactctttacaccatgcccagagatactaaataatttgcccaaatccacacaactagtaagcccaaaaactgggatttgaattttggcatctttgattaaaaaaatgtctagttttttccacagcgcccctgcaattaattaaagtgtttccctgtgtactgcaaatggtggaacaccttatctgctctt

SEQ ID NO: 524677 - DNA, 594 bp, Homo sapiens
ccaccaggggcttactgattggtgtgctctttttgaagaatgaacagaagtaaaagtcatacagttaggaaaagagaataaaactgtctttattcatagaataatgattgtttaggtaggaaattaagaaatctacaaaaagttactagaaccaataagtgaatttagcaaggtctcaggataaaagatcaatataaaaacgtctatttctatacactagcaatggatgattgaaaaatgacatttaaaaacatttcacttacagaattcctggaaagcattaggatctgaatcatttatcattacggtagtcttctatccagaagaaaaagggagtcaacagagaagagttgctaggaaagtcaaatgtctacattttacttccaaagagttgagaatcctcagactctttacaccatgcccagagatactaaataatttgcccaaatccacacaactagtaagcccaaaaactgggatttgaattttggcatctttgattaaaaaaatstctagttttttccacagcgcccctgcaattaattaaagtgtttccctgtgtactgcaaatggtggaacaccttatctgctctt

SEQ ID NO: 524678 - DNA, 369 bp, Homo sapiens
tttcaaggagctgattccttttaaggcaggcaaaaagctgcttcccattcacccttccttctttctctattcacccaacctccacaactccccaaatccagtaggatraaaaaagggagggatctttttccctcccttgaagcatgtgtaaagcttaactgcatcctgggaagtgtagttccagcacttaggtggatccaagaagtaagatttatggcagaagtattctacatgctgggattgtagcttttcatgcacagggtgttgagtcagcgtctcaaagaatcagacaatgacggttaggagcaataccccacccgtgcagagctgcattagaatttagagttaggttagaagctgcgcaaacac

SEQ ID NO: 524679 - DNA, 369 bp, Homo sapiens
tttcaaggagctgattccttttaaggcaggcaaaaagctgcttcccattcacccttccttctttctctattcacccaacctccacaactccccaaatccagtaggataaaaaaagggagggatctttttccctcccttgaagcatgtgtaaagcttaactgcatcctgggaagtgtagttccagcacttaggtggatccaagaagtaagatttatggcagaagtattctacatgctgggattgtagctttycatgcacagggtgttgagtcagcgtctcaaagaatcagacaatgacggttaggagcaataccccacccgtgcagagctgcattagaatttagagttaggttagaagctgcgcaaacac

SEQ ID NO: 524680 - DNA, 659 bp, Homo sapiens
tagctgggaatcctctagggagcacactttggctagaatcctgtaattcagccatccagttaaccttttaagtgaataaaagtcaaatacagcaccagggccaaagctatgagttggtgtgatgacaagcaatcctttaggaagacacaggattcttgagaggtaaaaatacagagcctgtctacattctgctctccctcttggagagcaagctctaaagtatttagtggtgtgtgtggtggtatgtgccatagtaaaactccgctagggaagggacgtaacctgtttkgcttactgctctatccctagtggttagaataatgccaggaacacagtaagtgctcagtaaacattcattgaaagaatcaatgcatccactgtgaatgagtgaatgagtgaacaaatccacagcatgtgggttcctttgcctgcatttgtgtatatccttacacaacacaaatcaaatctatatgtggatatccattggtcttatgtttttcacatatgaaatgactttaaatcactgtgtaagtagctgtaaatgaaccctatagattttgctagctccttctctttgccagctccttaaatattagtgttcccctgagctttatccttggcttcttctcattttctctctttcagagaaacctcatcca

SEQ ID NO: 524681 - DNA, 659 bp, Homo sapiens
tagctgggaatcctctagggagcacactttggctagaatcctgtaattcagccatccagttaaccttttaagtgaataaaagtcaaatacagcaccagggccaaagctatgagttggtgtgatgacaagcaatcctttaggaagacacaggattcttgagaggtaaaaatacagagcctgtctacattctgctctccctcttggagagcaagctctaaagtatttagtggtgtgtgtggtggtatgtgccatagtaaaactccgctagggaagggacgtaacctgtttggcttactgctctatccctagtggttagaataatgccaggaacacagtaagtgctcagtaaacattcattgaaagaatcaatgcatccactgtgaatgagtgaatgagtgaacaaatccacagcatgtgggttcctttgcctgcatttgkgtatatccttacacaacacaaatcaaatctatatgtggatatccattggtcttatgtttttcacatatgaaatgactttaaatcactgtgtaagtagctgtaaatgaaccctatagattttgctagctccttctctttgccagctccttaaatattagtgttcccctgagctttatccttggcttcttctcattttctctctttcagagaaacctcatcca

SEQ ID NO: 524682 - DNA, 544 bp, Homo sapiens
acagatgccagatttagcaagtgaaatacagaatgcccatttacgtttgaaattcagataaacagcagtataagtatagcccatgtgatacttgacatttatactgctgtttattggaaattcacttgtaactgggaatcctgtrttttatctggtaacccttctccagcctaatgagtggatccagacaatagacaaccaaaatagactccttggttctggacatagagtttatctatctatttatctggattcagtggccacaggaaccatgcacagttacgccttcatcatgtaattttgaccctcaataatattataaatataggaagagatattaagattttcttgggtataacacgacataaagaggagagagttaccacataaaaccccagttgtcacaattaaactttttatttttccagatttttacacaatgctcactcctagaattgccttctggaacagttttggctcatttaaaatcttacttcttctttggctgagataagaatcactcacataggaaaacattcaggca

SEQ ID NO: 524683 - DNA, 505 bp, Homo sapiens
tgggccatatggaattgcaaaggtccttatgtgtggaagaagaaattagaaaaagaatgatagagatgctgtgtaagaaaaatgaggcccgacattgctggcttttatgatggagtaaggagaccattacccaggaaagagggtggaaaagtggcctctagaaagtggaagaggaaaagaaacagattttaccctagagattccagaaaagagcataggcttgcaaacaccttggttttagtccaatgatgcwcttctgttttacacaaagcataagataataaatttgtcttgtttaagccagtaaagttgtagtaacttgtcacagcagaaaaatgcataaaaatattataccctctcatctagaatgtaatcactaatatggcttgaatttttgtttcttgaattactgaactatgcttaatacctagaacagtgttaggtatttcctataaagatttgccaaacggatgactgaatgaattataccaacattctgctcaag

SEQ ID NO: 524684 - DNA, 655 bp, Homo sapiens
cctattatacgtacaatttacatgtaaactttatgtggtaaaatttagttagcatgtaygatatcttactatattacacacaataaaccagaaaagtagttgttattattatctccattttgttggtaagataactaaaactcaggatcaattaattttcccaagtcagaattcaaagtgaggggtgtttaactcctagatgagtattcctcccactatattgtttgaaaggacattctataacttgtttgcctgttcatcaacaactaaccagaatatagcctacaagattcatttttattcatatgtgcaaaatgcatttcatgtatgtgtcataaactcaaatgaccttattttataccatttcattctctattgattggttttacagaaaatgtaaacacttcgcaaagatgtacggttatctcttttgtgtaatagtgtactttacgaacatagaagacataaaggcaactcacaaaaaaagttatttaaaacgttaaagtcaatgaataagacctttgtccaaaaagttatgtggaatactgtggaatacatatctaggaatgatccagtaacaacatgaagtaagttaggatagtaacatatggacgaggtatacatacaaagccaggtgtccaccacagactcccat

SEQ ID NO: 524685 - DNA, 655 bp, Homo sapiens
cctattatacgtacaatttacatgtaaactttatgtggtaaaatttagttagcatgtacgatatcttactatattacacacaataaaccagaaaagtagttgttattattatctccattttgttggtaagataactaaaactcaggatcaattaattttcccaagtcagaattcaaagtgaggggtgtttaactcctagatgagtattcctcccactatattgtttgaaaggacattctataacttgtttgcctgttcatcaacaactaaccagaatatagcctacaagattcatttttattyatatgtgcaaaatgcatttcatgtatgtgtcataaactcaaatgaccttattttataccatttcattctctattgattggttttacagaaaatgtaaacacttcgcaaagatgtacggttatctcttttgtgtaatagtgtactttacgaacatagaagacataaaggcaactcacaaaaaaagttatttaaaacgttaaagtcaatgaataagacctttgtccaaaaagttatgtggaatactgtggaatacatatctaggaatgatccagtaacaacatgaagtaagttaggatagtaacatatggacgaggtatacatacaaagccaggtgtccaccacagactcccat

SEQ ID NO: 524686 - DNA, 655 bp, Homo sapiens
cctattatacgtacaatttacatgtaaactttatgtggtaaaatttagttagcatgtacgatatcttactatattacacacaataaaccagaaaagtagttgttattattatctccattttgttggtaagataactaaaactcaggatcaattaattttcccaagtcagaattcaaagtgaggggtgtttaactcctagatgagtattcctcccactatattgtttgaaaggacattctataacttgtttgcctgttcatcaacaactaaccagaatatagcctacaagattcatttttattcatatgtgcaaaatgcatttcatgtatgtgtcataaactcaaatgaccttattttataccatttcattctctattgattggttttacagaaaatgtaaacacttcgcaaagatgtacggttatctcttttstgtaatagtgtactttacgaacatagaagacataaaggcaactcacaaaaaaagttatttaaaacgttaaagtcaatgaataagacctttgtccaaaaagttatgtggaatactgtggaatacatatctaggaatgatccagtaacaacatgaagtaagttaggatagtaacatatggacgaggtatacatacaaagccaggtgtccaccacagactcccat

SEQ ID NO: 524687 - DNA, 641 bp, Homo sapiens
attaaataagaagagcatttgttacatccatgactagagccatcctttgtgacattcatttcataaatatctagcaactattgttctcagttggaataaccaacaatatccagtatataaaaatgaataatagtttactagctttaaattcaaagtttactgaagttcatgaaaatatgacattaaagtctattcaaatatgtatcaaatgagaaaattatgcaaactgtaatctattcctaagctatgattcttatcacccttattgtcaagagatgattgggactgtatacaaatgagaatgtgtcataaattatgtggtgagtcagtgagttgtctccttcctttattaagtgtttggacagtacatataaatttggagaaaaaatttaaaacagcatttttcacaataccttctattgagtcattcaggtattcatcaaatatttgtttagttcccaacatgtgctaggcattttgctaagcactacgctgaagtagtgaataraatatatactcacttttcttatagggcttacaaattattaaaactttaaatattgaacaattatcatgccttatgtaaaaatgtgcaatctgctaaaagagatgtgtaaccatgagttatgacttagtgtgag

SEQ ID NO: 524688 - DNA, 590 bp, Homo sapiens
acccaaacttattatttcacactcttctcattcttctgtcttttttttctacatgatcatgtgtaacagtgtcttgacccttttgttaagtttttcagtttttcctcctatctccagccatcttagaatcccataatgcatcacatttatatccctaccactgtggacgctagatcaaccaattgctctttcctctctccaacttccattctgttgtcaaaraataacatatctgaatgcaagaggagcactgcagatttatggcaggagatttctatttcctttcagtcttctagagaaaagagaaagaagtggccattctgctctcccatggaaagaaaaaaaaaactcacattggataagcaacaggatcttcacatggcaacagcacaggttgaggcattcctatcttctctgtatggaaaaaaggaaacctattcttgtcctaaattgggtcccatgactctcccaatagatacaatccagtttctggagattcacgttgcttgatatagtagtcttgatgatggagtttatgatgactatttgtcctagggtagatttatttacagttcaaagtgggacacaag

SEQ ID NO: 524689 - DNA, 590 bp, Homo sapiens
acccaaacttattatttcacactcttctcattcttctgtcttttttttctacatgatcatgtgtaacagtgtcttgacccttttgttaagtttttcagtttttcctcctatctccagccatcttagaatcccataatgcatcacatttatatccctaccactgtggacgctagatcaaccaattgctctttcctctctccaacttccattctgttgtcaaaaaataacatatctgaatgcaagaggagcactgcagatttatggcaggagatttctatttcctttcagtcttctagagaaaagagaaagaagtggccattctgctctcccatggaaagaaaaaaaaaactcacattggataagcaacaggatcttcacatggcaacagcacaggttgaggcattcctatcttctctgtatggaaaaaaggaaacctattcttgtcctaaattgggtccmatgactctcccaatagatacaatccagtttctggagattcacgttgcttgatatagtagtcttgatgatggagtttatgatgactatttgtcctagggtagatttatttacagttcaaagtgggacacaag

SEQ ID NO: 524690 - DNA, 324 bp, Homo sapiens
ggagatttctatttcctttcagtcttctagagaaaagagaaagaagtggccattctgctctcccatggaaagaaaaaaaaaactcacattggataagcaacaggatcttcacatggcaacagcacaggttgaggcattcctatcttctctgtatggaaaaaaggaaacctattcttgtcctaaattgggtcccatgactctcccaatagatacaatccagtttctggagattcaygttgcttgatatagtagtcttgatgatggagtttatgatgactatttgtcctagggtagatttatttacagttcaaagtgggacacaag

SEQ ID NO: 524691 - DNA, 563 bp, Homo sapiens
ctccacctgaaggcagtgagaggtagagcaactgaaacttggattgaaacccctagtttcactagctcgaagatccacgggacagaatttgtccacagaagctaaagaatgagaagaaaaatctgagaaataaaacagccagagaagaggagcctcaagtctataaataagctatgctgactaacttgaattatggtagcatgaggaagactccaagaagtccagctaagccaacaaccacaggggacctagagtttgaagttagagttaatcaagttaaaggtctgctaaagcaaaaaatgtccatgtacttcagaaggttataacaacattcaaagtctttaaaatgtatcgtttaaaatgtccaggacacacacaaaattgctagacatgtgaagaaacaggaaaatggagttcatatccaaaakaaaaggcaatcaagaaaggcctttgcaagatgaacccaatataaaaattatcaaacaaggactttaaagcagcttttgtaactatgcccaaaagcataatggaaaatatcctcatatgaataaacaaaagcaaga

SEQ ID NO: 524692 - DNA, 195 bp, Homo sapiens
gagggacacacgcttcttgggagcagagaagggattggcgggtggtgaagggaagctctcatttctcatgtacctatgtccattgtcaaacctgacccacagcatttgatccataaaagggaatgggggacggcacgaggaagattcagrgaggagtgggatgatggcgttgcaagcagtctgagagcccatctt

SEQ ID NO: 524693 - DNA, 538 bp, Homo sapiens
gactttatgttttcacctgttctgggtattgcatacaagtggaatcacacaatatgtggccttttgtggatggcatctttcacataacataatgttttcaaggttcatccatgtattggtacttcattcttttaaggctgaataatattccactgtgtaaatattccacattttgcttattccttcatcagttgatggacacttgggttttttataccttttggctattgtgaagagtgctgtgaatattcatgggcaagtttttttttgaacacctgtctttttattcttttggttatrtgcccaggagcagaactgctcagtcttagacattttcttgaggctccaggggaaattcagcaatttacataaaaaagaaggacgatacccagcatggatgtaaaccttagactgaaggctcaaagcaacctagcaaggaaaaaagcacgaggagggacccacaggaatggatgtcattgatcccaagccacccagggcaccaatggagaggtgacgagaccatgggccacggactaga

SEQ ID NO: 524694 - DNA, 516 bp, Homo sapiens
gtgggttatttatcaatcaagagaatatcttgttgttgctggggttttttgtttggttttgttttttgttttttttgtaagcaggtgaatagagagatctctgctrttgttctgggaaagtggctcagataaagcaaaacagaagataatcctttgccaaagtgaggaagaccaaaagatagctataagtaggctgatcacataattgatcattcagacgaggagactaaagggatgatattaataattaggcctggacaatggctgtaggccagggctgccctggagctctgtagactgatggtcaccctagcttacagggtcatgaaagaggaagagtgcaaggactttccagttatctctgaacattatcagggctgttgggttacaagcaacagaaacccatttgattatggggttgcggggaggttaagattgattggaaggatggtgatgagaggagggtctcatagactcaaaaggaaactggagaactctccgggaaagaacacgaag

SEQ ID NO: 524695 - DNA, 499 bp, Homo sapiens
ctggcatccagagtggaaatgtttgggatttgtttgttttgttttgctttttttttttctctgagatggagtctcactctatcgcccaggctggagtgcagtggtgtgatcttgrctcactgcaacctccgcctcctaggttcaccgggttcaagcaattcttgtgcctcagcctcctgaatagctgggatcacaggtgcccgccaccacaccggcctaatttttgtatttttagtagagacagggtttcaccatattagccaggctggtctcgaactcctgacctcaggtgatctgcccacctcggcctcccaaagtgctgagattacaggtgtgagccaccgcacctggccctaagtgcaatcttacagtgtcctcagcgacgtggcctgtgaagcccatgacccaaactaggggatggggaggtggaggccatgtgggtcagagtcacatgggtcaccacgggtccatcaaaggcctggaccaccaccccagggat

SEQ ID NO: 524696 - DNA, 499 bp, Homo sapiens
ctggcatccagagtggaaatgtttgggatttgtttgttttgttttgctttttttttttctctgagatggagtctcactctatcgcccaggctggagtgcagtggtgtgatcttgactcactgcaacctccgcctcctaggttcaccgggttcaagcaattcttgtgcctcagcctcctgaatagctgggatcacaggygcccgccaccacaccggcctaatttttgtatttttagtagagacagggtttcaccatattagccaggctggtctcgaactcctgacctcaggtgatctgcccacctcggcctcccaaagtgctgagattacaggtgtgagccaccgcacctggccctaagtgcaatcttacagtgtcctcagcgacgtggcctgtgaagcccatgacccaaactaggggatggggaggtggaggccatgtgggtcagagtcacatgggtcaccacgggtccatcaaaggcctggaccaccaccccagggat

SEQ ID NO: 524697 - DNA, 638 bp, Homo sapiens
  misc_feature (1)...(638): n = A,T,C or G
ggccacatacatcctaaagtaaaacgggaaagtagctgcgctgcctcctgtggctgtgatctagaaactacgaaacactctataaatgggaggtacccctgaatttgtctcccgcctcagccctcaaatcctgtgattctactcctcccaacaccatattctgctttgcacagaagccgatcgctgtggaatgttctgtgagtggcttacccatctctgcatccccagagcccagcaaccaaacttggactttagaaagtgctcaataaacatctctggaattgggtaattggatgtcctagtccataaccaccactctgcctgygtacctgcttgagtgccacatgcataagtgtgcacatgtgattatgtatgcataggtgtgtgtgtctgcttctgtgtttgagtacgaacatggnccctggtgtttgtacccacctatgtcctcatttgcaattgcatccatgtatgcacgtgtgttaagaagcatctttggctgttctagtagcttccagaggtgcacttcagcttagagcgatgtctcttggttgtgctcttggattttgggtttgagagtgagacgacagggtttcatggtagtatacaactgatcccagcaactgccaccgggttggaga

SEQ ID NO: 524698 - DNA, 567 bp, Homo sapiens
agtgcaacaaactcagcttgaatgtgatgtgcagttgcccagggctcactcctggtagcagctccaggtgacttaattctaagcccctaggcttcacatcagatgctgagccccatatggcccctgtggagatgggcttaagagcctgggagaatggagcccctaggtggggcataagtgagcccacctacaagggactggcggctggagtcctggcatggccctgagctccatcgtgggcactgctacatggccctgatctctccattactgccccccttccactggggaatgtggagctgcccagaaagctggtcaaaggggaccattctgggattcattgtgggattccttctctgatttctcttgtcctttctcttgtcaattaaataagcccatcagtatagttctcaatccagtatggcaacccagcagcaccactcagaaagcctaatgtcctggttcaatagttctccatccatttaggcttttygtcctgaagatatgattggcacattgtttaggaaaactgctctaaaaatatgaaaatgattgatcttttgcaaa

SEQ ID NO: 524699 - DNA, 584 bp, Homo sapiens
ccctcatgccccaaagctgagtacggctgtgttgcatttagagagactggtcatttgcaaaggggtgatgggaggatgtctggagtggacagtggagctatcagcaggcttttcacctgcaccccctcaggaccgcctcacccagggagtaacaatcctattcagaccatgtcccagagcacagtcctgcctgtctctccaccagggactcccaaagtgtgagccagggaccagcagcctcgacatcacctgctgctttgctgaatgcaaattctcccatctcacccagacctactgagtcagaattgccggggttgggagccagcagtctgtgtgattacaagccctycaggtaattctgatgcatgctcaagtttgagaactattgctctacgtgacttctgtggctgaattcttgctcttacacagtttcaatgcacagagatggcctttgactccagggagccctgtgctagggaatatttttccaaagcgtcctgaatagcccctttcacgttcctgggaggcggcctgatgcagcagataagggtgccctgaagccagatggtccctgtttagatccc

SEQ ID NO: 524700 - DNA, 584 bp, Homo sapiens
ccctcatgccccaaagctgagtacggctgtgttgcatttagagagactggtcatttgcaaaggggtgatgggaggatgtctggagtggacagtggagctatcagcaggcttttcacctgcaccccctcaggaccgcctcacccagggagtaacaatcctattcagaccatgtcccagagcacagtcctgcctgtctctccaccagggactcccaaagtgtgagccagggaccagcagcctcgacatcacctgctgctttgctgaatgcaaattctcccatctcacccagacctactgagtcagaattgccggggttgggagccagcagtctgtgtgattacaagcccttcaggtaattctgatgcatgctcaagtttgagaactattgctctacgtgacttctgtggctgaattcttgctcttacacagtttcaatgcacagagatggcctttgactccagggagccctgtgctagggaatatttttccaaagcgtcctgaatagcscctttcacgttcctgggaggcggcctgatgcagcagataagggtgccctgaagccagatggtccctgtttagatccc

SEQ ID NO: 524701 - DNA, 608 bp, Homo sapiens
ggcaaaagaggaaaagcatctatttgcaagggcattggaaaaagtaaattaaataccatctatgaatgcccaggaccaggattcttatttataagaaaaaatttycccccaagtatagtaccataaaggaaattaaggcagcattaaagtgaagtgcttttacgtagaatcccaacaactgcaaagttatgatgtagtgacagggcatattacttagtgggacaacaccatctcacggctgtcaaaaacacaatcaagaaccaggagaggggctgggcaccatggctcacatctgtaatcccagcacttggggtggccgaggtgggaggattgcttgagcccaggagttcaagaccagcctgggcaacatagtgagaccttgtctctacaaaaaaataaacaaaattaggtgggtgtggtggtgcataactgtggtcccagctactcaggaggctgatgtgcttgagtccagcaagttgaggctgcagtgagccatgatcgtgccactgcactccagcctgggtgacagagcgagaccctgtctccaaaaaaaagaaccaggagagaaacaaatagaatgtgggcaccattacagtcgatacaactaa

SEQ ID NO: 524702 - DNA, 608 bp, Homo sapiens
ggcaaaagaggaaaagcatctatttgcaagggcattggaaaaagtaaattaaataccatctatgaatgcccaggaccaggattcttatttataagaaaaaatttccccccaagtatagtaccataaaggaaattaaggcagcattaaagtgaagtgcttttacgtagaatcccaacaactgcaaagttatgatgtagtgacagggcatattacttagtgggacaacaccatctcackgctgtcaaaaacacaatcaagaaccaggagaggggctgggcaccatggctcacatctgtaatcccagcacttggggtggccgaggtgggaggattgcttgagcccaggagttcaagaccagcctgggcaacatagtgagaccttgtctctacaaaaaaataaacaaaattaggtgggtgtggtggtgcataactgtggtcccagctactcaggaggctgatgtgcttgagtccagcaagttgaggctgcagtgagccatgatcgtgccactgcactccagcctgggtgacagagcgagaccctgtctccaaaaaaaagaaccaggagagaaacaaatagaatgtgggcaccattacagtcgatacaactaa

SEQ ID NO: 524703 - DNA, 629 bp, Homo sapiens
ctaactgcagtccgggccaatacagactccgtggcttagagaagagttgaggatagagagataggatgtggtatygagaagcctggcattgagagacagccactcttaagagttggtctgcacccacatccctccttgtcataaacaaaaccaacaaaaagcatgattgatgccaatatgagggtaaattaatacaacctttcaggaggaaagttgggtaagaagtatccccagcctccacaaagtatacccccttatccctagcaatgtctaggacggtattgtaaggaaataaacaggaatagtccagacgatttaacttcaaggggctcattcctgccttgtttataagagtgaaaaattggaaacaacctaaacatcccacagtagggattggcaatggtacaaccatcaacagaataccatgtagccattaaaatgatggcgtggaagaatgtttagcatcattgaaagacattcacaatgtaacgttgagtaaaacaagcaggttgcagaacagtatgtatactaaatgcaatgtggtagcctggattggatcctggaataagaaaaggacattagtgagaaaactaccgaaagccaaataaaatctgaagttcagtcaataa

SEQ ID NO: 524704 - DNA, 563 bp, Homo sapiens
gcccagcgacaacaaaagcccggagagaaacccgctctgtccaggaaagtgaaagcggcctcagcccccgccccagccggccttggggcgccgcagacccgagagagtccttgcaagatccatacctctgcccccagcggtgtgccggggtgtggaggcagaattggttaatgttgccagaaattcacaccagctcccagacgcttgggcttacagttccaggtgcccacaytgaaattcagcctggccttgatgcctttagcctttggcccccgactccccaaggatgaggccctcggggctagaatcgaaacttgggaacccaaggctccaccccgcgtctgactgagtgatacctgcagcgctcccggggctcagccctgttttcggggagtgcagggagaatgcccttgggtctggggtgggatgcaggaaatgcagggcaagaccccctcccaccctttgttcaacacaaattaatgttgtactgtggtgtgcccccacatacacaggcattttctcccagcatttcacggctcgttttttaccccgacctggcgaag

SEQ ID NO: 524705 - DNA, 564 bp, Homo sapiens
gtttacaggtgattcagttcccttagctacagcacttggttaataatgtgttgcttggctgggcacggtggctcacgcctgtaatcccagcagttttgggggcccaggtgggtggatcacctgaggtcaggagttcgagaccagcctggccaacatggtgaaacatggtctctaccaaaaatacaaaaattatctgggcayggtggcacaaacctgtagtcccagctactcgggaagctgaggcaggagaatcacttgaacctgggaggcggagattgcagtgagccgagattgtaccactgtactccaggctgggtggcaaagcgagaatccatctgaaaaaaaaaaaaaaaagtgttggcttatggctctggattttgaagggtagcttctttcctcttggagccaggggagagaggctaagtattaaggaagagacccaaacctgccactagccaggcactctacccctagcttcctccctgagtctgcctcagtgatactggctctctaggtcccagagctgggagctctcactgccatactcccgaggcccctcctggc

SEQ ID NO: 524706 - DNA, 604 bp, Homo sapiens
gccccccagggttcaggtctacagctctctcagccactcccatcccagtaagagttcagaaggaacccattggccctctttggtctcaaaaaagctggtcactcttagcttcctttttgataagwtcatcctcaaaccaaggccattctgtccctagctccctctacccgatgcacaggagatgttctctctgctccaggatttaactttgaagcctctaggttgcttccagtttttgagctttgaaaaaattagatatttgttcccttgacctgtgccctcccaccccattccccaccttccatctacctgtgccccccaactcctcaccaccccacttccaaccaggctgagggaccacagaggtgccatgttggcagggaggggaatgttactaggctatgaggcactggtttttcatcgcactcaaggccacacctcagaactcctccacctagctgctgcccctatgctagcctggtccccagcacaggaccatctccctgtgcacttccagggccagacctggtcctcatatccaggaagtaggcctggtgagtgactaaatgggggtagggaaaagaagacattaggagtatgggcc

SEQ ID NO: 524707 - DNA, 604 bp, Homo sapiens
gccccccagggttcaggtctacagctctctcagccactcccatcccagtaagagttcagaaggaacccattggccctctttggtctcaaaaaagctggtcactcttagcttcctttttgataagttcatcctcaaaccaaggccattctgtccctrgctccctctacccgatgcacaggagatgttctctctgctccaggatttaactttgaagcctctaggttgcttccagtttttgagctttgaaaaaattagatatttgttcccttgacctgtgccctcccaccccattccccaccttccatctacctgtgccccccaactcctcaccaccccacttccaaccaggctgagggaccacagaggtgccatgttggcagggaggggaatgttactaggctatgaggcactggtttttcatcgcactcaaggccacacctcagaactcctccacctagctgctgcccctatgctagcctggtccccagcacaggaccatctccctgtgcacttccagggccagacctggtcctcatatccaggaagtaggcctggtgagtgactaaatgggggtagggaaaagaagacattaggagtatgggcc

SEQ ID NO: 524708 - DNA, 602 bp, Homo sapiens
ctcgtgacacaaatggaacgaagctgatctgccctagaagcaaaggaggcaatgaccttctttttccaattatatcctggtcagaggtgagcgacctctctccaccgaggccacttcttgtcatgcaaactgagcagaaggatggagattagaggaatgtgaccgagtcacgtgtgaaaacaatcagctatcaatgggccccgatcaatgccccagattatagatgagcccagggcaagcagtcactttggagtttttcctgaggaggcaaaaatacacagcacacagccatacacgtcacacgtcccgagagacccacagcctggggacaggtaggaagtgggttggggagagctgggcaagtgaatggccacccactttgaagtggtcggcaactattattattagtaggtggttatgttgtttttgttaaagatgcaacctttattccgctggtagcgggaagtgtaaaagcttgtgtttggtgttttctattttaagtccagagagttaggactcttaagtgggtcacaggagrcagtgtggggatttggaggaaacttatatcaggaacgggagcaatagagggcttgtattgagag

SEQ ID NO: 524709 - DNA, 271 bp, Homo sapiens
acgttcctctaacaaccacctgaacgtaaccttcgcagggcgtcaagtcatcttctctcgccttcggytgtggcttctgtggctttccggatttgcacatttcctggggtactatgaacgtgagtggggtattttgttctggcattaaaagaaaatcaagcaagcaaacaaaaatcacagcctccgatgccaaacatgttcccccttcttcacttccttggaactggaagtattattcctaagtctagtgcaaaatgcttctactctctgt

SEQ ID NO: 524710 - DNA, 271 bp, Homo sapiens
acgttcctctaacaaccacctgaacgtaaccttcgcagggcgtcaagtcatcttctctcgccttcggttgtggcttctgtggctttccggatttgcacatttcctggggtactatgaacgtgagtggggtattttgttctggcattaaaagaaaatcaagcaagcaaacaaaaatcacagcctccgatgccaaacatgttcccccttcttcacttccttggaactggaagtrttattcctaagtctagtgcaaaatgcttctactctctgt

SEQ ID NO: 524711 - DNA, 604 bp, Homo sapiens
ctgcttgccaaatcggcattaaatacttaagcactgtgacctgttgcttaaagtattacaaatccagccttatctaaaaatctstatttgtcctaggaaactaatactttttaaaaacaataatttggtaattttaataatatttagatctatctaaacttaaagcctatatatttaccacccttttacatgcttaccagtattacagacacaataaattttatcaggtatttttgataatgtgctaggaattgtttgaaatataaagaagaataagatttcgttttcaccatctcagagattccagatagtggtggacacagagacccgtgaaaataactgcaggatgaaatagacgaaattatagaagccctatgtaccttggaaaaatggacatggacatggaaattttatttcatatgcatactcgttaaagaaaaagaagcctacaaaagttagctacctttggtttttattacttatgtcttacactcaagtgaacttttttctgtctaatctaatatcattcaaatcctgagtccttttaattaagttatcctaaaatgaattttcatgaacacagaatttgtgctattactctctc

SEQ ID NO: 524712 - DNA, 604 bp, Homo sapiens
ctgcttgccaaatcggcattaaatacttaagcactgtgacctgttgcttaaagtattacaaatccagccttatctaaaaatctctatttgtcctaggaaactaatactttttaaaaacaataatttggtaattttaataatatttagatctatctaaacttaaagcctatatatttaccacccttttacatgcttaccagtattacasacacaataaattttatcaggtatttttgataatgtgctaggaattgtttgaaatataaagaagaataagatttcgttttcaccatctcagagattccagatagtggtggacacagagacccgtgaaaataactgcaggatgaaatagacgaaattatagaagccctatgtaccttggaaaaatggacatggacatggaaattttatttcatatgcatactcgttaaagaaaaagaagcctacaaaagttagctacctttggtttttattacttatgtcttacactcaagtgaacttttttctgtctaatctaatatcattcaaatcctgagtccttttaattaagttatcctaaaatgaattttcatgaacacagaatttgtgctattactctctc

SEQ ID NO: 524713 - DNA, 604 bp, Homo sapiens
ctgcttgccaaatcggcattaaatacttaagcactgtgacctgttgcttaaagtattacaaatccagccttatctaaaaatctctatttgtcctaggaaactaatactttttaaaaacaataatttggtaattttaataatatttagatctatctaaacttaaagcctatatatttaccacccttttacatgcttaccagtattacagacacaataaattttatcaggtatttttsataatgtgctaggaattgtttgaaatataaagaagaataagatttcgttttcaccatctcagagattccagatagtggtggacacagagacccgtgaaaataactgcaggatgaaatagacgaaattatagaagccctatgtaccttggaaaaatggacatggacatggaaattttatttcatatgcatactcgttaaagaaaaagaagcctacaaaagttagctacctttggtttttattacttatgtcttacactcaagtgaacttttttctgtctaatctaatatcattcaaatcctgagtccttttaattaagttatcctaaaatgaattttcatgaacacagaatttgtgctattactctctc

SEQ ID NO: 524714 - DNA, 604 bp, Homo sapiens
ctgcttgccaaatcggcattaaatacttaagcactgtgacctgttgcttaaagtattacaaatccagccttatctaaaaatctctatttgtcctaggaaactaatactttttaaaaacaataatttggtaattttaataatatttagatctatctaaacttaaagcctatatatttaccacccttttacatgcttaccagtattacagacacaataaattttatcaggtatttttgataatgtgctaggaattgtttgaaatataaagaagaataagatttcgttttcaccatctcagagattccagatagtggtggacacagagacccgtgaaaataactgcaggatgaaatagacgaaattrtagaagccctatgtaccttggaaaaatggacatggacatggaaattttatttcatatgcatactcgttaaagaaaaagaagcctacaaaagttagctacctttggtttttattacttatgtcttacactcaagtgaacttttttctgtctaatctaatatcattcaaatcctgagtccttttaattaagttatcctaaaatgaattttcatgaacacagaatttgtgctattactctctc

SEQ ID NO: 524715 - DNA, 518 bp, Homo sapiens
tcagaacactcttccatcttagaagaaaaaaaaaagccctacctgtgttcccctggctcttggccttgacacacactgtctggaatacctttcccaccacctctcatcccatgctccctatgaacatacttcgactcatcttttctaacctaagyaccctcccctgcagtcaagcatgctcttcactgagccttcgtaaggcccttgtgctcacctctattgcagcacagatcacactgcattataaaggaccatctcctgtctctctgtccatctttcagagtttgctgtattgatcttagtgacgtcagcacgtggcactcagctagacaaagaaagcaggctcaataaaggctggtagaattaagtaaagaattgtataaaggcattaaatagagatggggtacaaatatgtcccaggctgcctgggatagtcctggtttaggccatggtcctgatataattactaacaacaccctctttcactgtcaaaaatatctcctttggacaatacatta

SEQ ID NO: 524716 - DNA, 391 bp, Homo sapiens
gctttagttatttgatgggaggaaaaataagtgggaggtgaggagtaactcctgggctctgatgagtattctaggcaagtacagatctggaaagcctgtatgcaaaggaggaactcactgaaaagtgctggcctgaggagggcagaagggagggctggggaagccagcagggggagcaaaggagtaggctccagctgggtgaagatgttggtgtggtatgttatgtaaaatatacaaattattattgggaataaccacgtctcagcagtgckagttctcagtttgaagaatgggaaatggaaaggatcagattcagagacggcaacttactcaaggtcacagcattttaaacccaaatgaaatctcctaggcccttcatgccacactcatc

SEQ ID NO: 524717 - DNA, 391 bp, Homo sapiens
gctttagttatttgatgggaggaaaaataagtgggaggtgaggagtaactcctgggctctgatgagtattctaggcaagtacagatctggaaagcctgtatgcaaaggaggaactcactgaaaagtgctggcctgaggagggcagaagggagggctggggaagccagcagggggagcaaaggagtaggctccagctgggtgaagatgttggtgtggtatgttatgtaaaatatacaaattattattgggaataaccacgtctcagcagtgcgagttctcagtttgragaatgggaaatggaaaggatcagattcagagacggcaacttactcaaggtcacagcattttaaacccaaatgaaatctcctaggcccttcatgccacactcatc

SEQ ID NO: 524718 - DNA, 359 bp, Homo sapiens
attagacaagggtaaggtgcgttatacagacttaagtccaygcattctccattgataagactcttcagtgatttagttatccttctcttcttggcgtcgagagaggtagcttttaaatggtgatttcctttatagatgtaaattttccttacacaagtaacttctctattttcacaacttcctttgttagcattttttttcaaaataattagcttggaataattcttaagccaaagggacatattttggggttgcatattctggtttcctaccattatatttcggggtggcatagtttggtcttatacactgtgttccactggcaatgaaaagagttcttggttttcctccagcaattt

SEQ ID NO: 524719 - DNA, 515 bp, Homo sapiens
tcttccatcataaatgtttatggattatgattttacatttcttctatttggtattcaggtcaaaatgaaactgcggcagacgtttaaaggatttattttatttatttatttatttattttttgagacggagtcttactctgtagcccaggctggagtgcagtggcataatcatggttcactgcagtctccacttacccagagccttctgagtagctgggaccacgtgccagctatatgcctatatgccaccacacccagctaawttttttttttttttttttttttttttttttttttttttttttttttagagacggggatttcctctgttgcacaggctggtcttaagctcctgggcataagagatctgccctctttggccttccaaactgctgagattacagatatgagccaccatgcctggccagcagtaatttttttttcttaagtttggaaataaaacttacaagagtttgttcttatagtttcagtcacatttccattacttccaatt

SEQ ID NO: 524720 - DNA, 530 bp, Homo sapiens
gctggcttccacctttgtcaattctccctccttttgtgccagcctatgctcagcaacataatcatctattaggatttgtctatctttcttgggacctttagtgatacttgctagtgatgtacagaagatattaagccagtaaccaagatcctcagccaactatctgccacccaatcacaatcagtttacatggagaaatatacaaagtttagacaaatacatgctttttattgctagctcagtgttttgccccaattaataatacaagtttttcttgaactggcatgccttctgcttatactgtgggtagaaccagggtccttaccaaaatcagactaagggatatttaggctcctttttcctggccctttgcagggaaatgtgcctctcacagtttcactggactataggattcaggagcaattgtgagtctcaggggagaaagcttaaagaaagaacacaccagatagaaacacmaactgttaatctttagttcatcccattaaatgtaccaccgcttagcaccaaga

SEQ ID NO: 524721 - DNA, 488 bp, Homo sapiens
aggaataattaaaaaactaacagaagatctttggttcattctcatagcctaaatgactaggcagcgcaaactgtctgggatttaagtgcccccatcatcccacatacaaattaattgacacgtaaattctgtaaaaaaaaaaaaaaaaaaaaaaaagtcacatgaaaaatacaktctgtatattatgatgggcactccctgatttagtaatttttaaatcttatgttcagagaaaattactaccaagtgtataacccggacaacggctcccttctttgtgcctccatttctttactatcaaatggtgaaaataatgcaattatattacttccatcatgcatgtagttgttggaaggatttctttacttagtgtacatgaaattgctaaataaggttaaaaaaaaaacacttcccactgtttgtaattatctaggctataaattaaatgagtaatgttttaattttatgcctcttattatttcatatag

SEQ ID NO: 524722 - DNA, 590 bp, Homo sapiens
ttttgcagttcaacaagtgcagtgacctgctcaactttgctatttaggacaatcactttagctacaggatggagactagggtgggtacaaaacaaatacaaggaagtcagccagcaggtccttgcagtaatccaggtgagagcagatagatggcaactgcttataaggttataatgaacagcagcactggaggtggaaaaacagcaagtatactcaaaaggtaaaacctaaagacatayttaacatgaattaaagttttccaaagccgttctcccataccagccattgaaaaacaatattcttgttctttgtgaatttaaaaaagaatccagacttagtaagaagagatttattcaagaaggattcttcaaggggaagaggctattgctagaagggatgggggatttttgaataaggagagagctgttatcacagatctgcaagagtctcaagaattagatgagggggttttctttcacagggagttgtacacagactagaaaaaaactgggtgtggggaagtgggataaatgggggcatggtcagacagtggaccagagaatgtttaccttaaggctgacttattctta

SEQ ID NO: 524723 - DNA, 590 bp, Homo sapiens
ttttgcagttcaacaagtgcagtgacctgctcaactttgctatttaggacaatcactttagctacaggatggagactagggtgggtacaaaacaaatacaaggaagtcagccagcaggtccttgcagtaatccaggtgagagcagatagatggcaactgcttataaggttataatgaacagcagcactggaggtggaaaaacagcaagtatactcaaaaggtaaaacctaaagacatatttaacatgaattaaagttttccaaagccgttctcccataccagccattgaaaarcaatattcttgttctttgtgaatttaaaaaagaatccagacttagtaagaagagatttattcaagaaggattcttcaaggggaagaggctattgctagaagggatgggggatttttgaataaggagagagctgttatcacagatctgcaagagtctcaagaattagatgagggggttttctttcacagggagttgtacacagactagaaaaaaactgggtgtggggaagtgggataaatgggggcatggtcagacagtggaccagagaatgtttaccttaaggctgacttattctta

SEQ ID NO: 524724 - DNA, 590 bp, Homo sapiens
ttttgcagttcaacaagtgcagtgacctgctcaactttgctatttaggacaatcactttagctacaggatggagactagggtgggtacaaaacaaatacaaggaagtcagccagcaggtccttgcagtaatccaggtgagagcagatagatggcaactgcttataaggttataatgaacagcagcactggaggtggaaaaacagcaagtatactcaaaaggtaaaacctaaagacatatttaacatgaattaaagttttccaaagccgttctcccataccagccattgaaaaacaatattcttgttctttgtgaatttaaaaaagaatccagacttagtaagaagagatttattcaagaaggattcttcaaggggaagaggctattgctagaagggatgggggatttttgaataaggagagagctgttatcacagatctgcaagagtctcaagaattagatgagggggttttctttcacagggagttgtacacagactagaaaamaactgggtgtggggaagtgggataaatgggggcatggtcagacagtggaccagagaatgtttaccttaaggctgacttattctta

SEQ ID NO: 524725 - DNA, 574 bp, Homo sapiens
tgttttcctgtgactacctgatgacctgaatgattttccctgtgtttctaggagcttggtcctgaactcaccttgggccacccatagataggacatttattcctagaaacggtgttttggagctaacctttctgcctatgtagagaagtgtggctcattcaaaagatgttcacattagcctgtcaccaagtaggcctcagtggtggattccaatgaggccaactggattcagtgtctcaaagctcccacattgtcaccactaagaatttgtttttcaaaaatcaagctaaccacaaaatgaaacaagctataaccgctgrctacaaccctgacattccgaaactacctatttccatcattttctctgcagattcaaggtgtcatccccatgagctgtttcatggggattttgctggggcctgcggtgggacaaaagagggggagcttaccatttctccgactcctctgttttttccttttggtgatatagaaaacgagcagtgccacaaagaccatcaagaggctgcctcctccacatatgccaatgatgagatagatgtccagacctttctct

SEQ ID NO: 524726 - DNA, 621 bp, Homo sapiens
aggagttgtcccttttccaaatgaacaggactggtgtatcaggtggccttgccattgtatgcayctgccggtctgagaaagcaagtgttctgtctgtatctgcaactgtttgtgtctcacgctttgcaaatctcttatccctctgagtctcagaaatctcccatgagtgaaaaagggcaggtagcctggtgcccatttgataggagaggaaattaggccaaagccctttcaaatctcaaacatgcctaaactagagaactggatgacccttgttccttagactcgggcattcttgctcacaggaatgtcttttgaaaatttatttttcaagaggaagagcttcatgaggcaaaagccaacacgcagacaccgtattacctagcggcatttattggatttgtctcttgagtgattcaaacaaaagattacagttataaatagatagacctaattgttgcaaacaatgcctaccttttattgagcacttattatgtgccaggcattttaaatacttgatcttattcaatcctgataaaaaacctcctgagatcagtaatattattccaattttacagaggaggaaagtgagagagaaatttcaataactttcccagggtcata

SEQ ID NO: 524727 - DNA, 491 bp, Homo sapiens
caaatctcttatccctctgagtctcagaaatcycccatgagtgaaaaagggcaggtagcctggtgcccatttgataggagaggaaattaggccaaagccctttcaaatctcaaacatgcctaaactagagaactggatgacccttgttccttagactcgggcattcttgctcacaggaatgtcttttgaaaatttatttttcaagaggaagagcttcatgaggcaaaagccaacacgcagacaccgtattacctagcggcatttattggatttgtctcttgagtgattcaaacaaaagattacagttataaatagatagacctaattgttgcaaacaatgcctaccttttattgagcacttattatgtgccaggcattttaaatacttgatcttattcaatcctgataaaaaacctcctgagatcagtaatattattccaattttacagaggaggaaagtgagagagaaatttcaataactttcccagggt

SEQ ID NO: 524728 - DNA, 621 bp, Homo sapiens
aggagttgtcccttttccaaatgaacaggactggtgtatcaggtggccttgccattgtatgcatctgccggtctgagaaagcaagtgttctgtctgtatctgcaactgtttgtgtctcacgctttgcaaatctcttatccctctgagtctcagaaatctcccatgagtgaaaaagggcaggtagcctggtgcccatttgataggagaggaaattaggccaaagccctttcaaatctcaaacatgcctaaactagagaactggatgacccttgttccttagactcgggcattcttgctcacaggaatgtcttttgaaaatttatttttcaagaggaagagcttcatgaggcaaaagccaacacgcagacaccgtattacctagcggcatttattggatttgtctcttgagtgattcaaacaaaagattacrgttataaatagatagacctaattgttgcaaacaatgcctaccttttattgagcacttattatgtgccaggcattttaaatacttgatcttattcaatcctgataaaaaacctcctgagatcagtaatattattccaattttacagaggaggaaagtgagagagaaatttcaataactttcccagggtcata

SEQ ID NO: 524729 - DNA, 466 bp, Homo sapiens
ccttcttgcttaatgcatgactatattatcccagttaagggggtctgcaggttttatcagaaagttcagaggctcacatgacctggattggaacttggctcagccactgactagccagacaaactcaaataacgtacacagcttctcagcacctcaccccctcattcataaaaaacagggacaatggtacccactttgcagggttgttgagtggattaaattaaacaacacaaggaaagagctttcctaagttccaatgctatgtaacacacacagtattgtcttacccagcaataatttcggtgcacggatctgatcatctcttaattaaatattgaattctcctaacacggttctttttttgaacccctcagggtctgaacagttataagtgcacagaagttgggtctttatgagctgaataaaagragactccggctgtcttctcttttgtccttaccataaa

SEQ ID NO: 524730 - DNA, 510 bp, Homo sapiens
ttttttccctctgcacagagtgatataaactttttctttttttttatttttatttttttgagacggagtctcactctgtagcccaggctggagtgcagtggcrtgatctctgctcactgcaaaccccacctcccaggtcctggttcaagtgattctcctgcctcagcctcccaagtagctgggattacaggaatgtgccaccatgcctagctaatttttgtattttcagtagagatggggtttcaccatgttggccaggctggtcttgaactcctgacctagtgatctgcctgcctcagcctcccaaagtgctaggattacgggcgtgagccaccgcccaacctttcccttcctttctttccttttttaaaataaataatatttttttcctcctccaaaacagataaaaatattccaagagtccggattcctcaggcagtttatcgctctgtattcagctaatgtattttcttctaaaactttaatagtgatagagtttggaaggattga

SEQ ID NO: 524731 - DNA, 631 bp, Homo sapiens
tgaccagataaaaatcctcaccttgaaactacaaatctagaaaagatgatgataaaacgagtaattctctgtactgtccattcaattgacatgacatgtgacatgctatttcacagtgggtccttcctggcacccaactccattttgtctgtgactaggctatgatacaacaaacaaattcaatgaataattgaatgtgttaccagaaaaattccctagtcctcccaaatcatcttgacttactcatggaacttaaataacccatcagctgttttgttactaagcaaggaagaagctttatcttccacctrtctcctaaacctgtttctgctccacaacacagtttaatttctattcctcacctctgctctcatacacctactttttattctgatgtaaggcaattatgaagccaggtatctcttaagatccaaaacaacttgtttatggcaattcccttactaagatcataaaaaccaaaataaaagttgggaaaaaatagcatgatacaggttggaaaaatgagatatcatatctatctctcccataacataagcaagctgtctgtaactcctttcacgcatcaactcttttccataaagcttctaatttctcatccaaacaacagagt

SEQ ID NO: 524732 - DNA, 567 bp, Homo sapiens
aaaattcagaaatctttgtcagagaaaaaacagaatcaaaatattatctgcagatccagcaaacaaatttgagttcaaaactcagatttgcatttattagctgtgtggccttgagcatggcaagcactttacctctaggtctcagattcctaatctgtgaaatgagactcacaggatatacttcagtggattgttttgaatattaaatgagaaaacatattggtaaaatttatacatgttattttcattcttttccctaaacrtgaatatgaagacatccagattaaaatgtggcatatgcaacctcaacctttggaaaatatatctcaaatgattaaggaaaaatattaattttaagaattgctttaaaacaacaaaaccaaaaaagccttggtcataccttaattcagtaattcttcaactttacgtctcagatccaatattctaggcactgcttgacacagagagcagttttcttacaaggaaatttggggaccagagggggttctttgcatgtttggataagtgctagaattcaaattccttctcctgagagtcctctgcctt

SEQ ID NO: 524733 - DNA, 572 bp, Homo sapiens
ttctgttctagagtatgattggggtgcaatgggaaaatcacaggctttggattccaatrcgcgactatgagaaaggaggatgggctcatggggccaccgtaaggactgagtaacatagaggagaacacagcaaaatgcctggtacaccggaggtgggaaacataggctgtcccctcctcttcaccccataagcaattctaactttaacttcaccattaaaagaaaaaccaaaattctacctgtttttaatataattatacataatttatgcatacagtgagaagaactggaaggaaaaaggaggtgaagctatggcattttttcactaaaaatacttctgtgattgccactgctatattgcttgggcaagaattaaaacaaataccataataaagcattagtctccccagtgtagagaactgcacgaggcttgggagtcaggcacgtcacaaacgtggcaagtcagcggtctgcagggtgaaaggccgtccctggaaactcagctttggcccaacagaaagaccctgtgtggccgggggggccccagggaaccaagccggctgggccccacc

SEQ ID NO: 524734 - DNA, 605 bp, Homo sapiens
ggttacagcttggtctttgcagtatttgaacacagtgtgaatagttggccaccttcaactgkccaaaactcagtgattgactcaagagtaggctacggtctgtgtaaaactccatttaggttataattcacgatgtacaggaaacctttaggctgaacttacaatatataagaaggcagttttaggctaaacttgatttaacactagcgtttcacaatcccaacccaaccaccattttcatcttttcccaaaacttacacctatcagaatcataccaaaattcatctgatttgaaaaagtaataaactagcaaacaaataaataaacaagcttatcacggagtgcggtaagcactaagaagaaagcaaatatgatgtgtcgaccctgactgcaggcagtggccgatgcccctttagccacagtagccccagaaaggctgctctgtggagtagtccctgaacactccgtcacctgacattcctcccatatttccattctcagtccccacccctccacctgccttcagcactccctacccctcctccccaccttttctcataactcttgtatctctttgacactgtttatttcttattgtacctatt

SEQ ID NO: 524735 - DNA, 618 bp, Homo sapiens
ggttacagcttggtctttgcagtatttgaacacagtgtgaatagttggccaccttcaactggccaaaactcagtgattgactcaagagtaggctacggtctgtgtaaaactccatttaggttataattcacgatgtacaggaaacctttaggmtgaacttacaatatataagaaggcagttttaggctaaacttgatttaacactagcgtttcacaatcccaacccaaccaccattttcatcttttcccaaaacttacacctatcagaatcataccaaaattcatctgatttgaaaaagtaataaactagcaaacaaataaataaacaagcttatcacggagtgcggtaagcactaagaagaaagcaaatatgatgtgtcgaccctgactgcaggcagtggccgatgcccctttagccacagtagccccagaaaggctgctctgtggagtagtccctgaacactccgtcacctgacattcctcccatatttccattctcagtccccacccctccacctgccttcagcactccctacccctcctccccaccttttctcataactcttgtatctctttgacactgtttatttcttattgtacctattgttagaccactca

SEQ ID NO: 524736 - DNA, 605 bp, Homo sapiens
ggttacagcttggtctttgcagtatttgaacacagtgtgaatagttggccaccttcaactggccaaaactcagtgattgactcaagagtaggctacggtctgtgtaaaactccatttaggttataattcacgatgtacaggaaacctttaggctgaacttacaatatataagaaggcagttttaggctaaacttgatttaacactagcgtttcacaatcccaacccaaccaccattttcatcttttcccaaaacttacacctatcagaatcataccaaaattcatctgatttgaaaaagtaataaactagcaaacaaataaataaacaagcttatcacggagtgcggtaagcactaagaagaaagcaaatatgatgtgtcgaccctgactgcaggcagtggccgatgcccctttagccacagtagccccagaaaggctgctctgtggagtagtccctgaacactccgtcacctgacattcctcccatatttccattctcagtccccacccctccacctgccttcagcactccctacccctcctccccaccttttctcatarctcttgtatctctttgacactgtttatttcttattgtacctatt

SEQ ID NO: 524737 - DNA, 636 bp, Homo sapiens
ttctcttggcctccatcaccagcaaaactggggaaaatagcactgtgttttccaacactttgtgtcccytctttgaggggacatcacagacaaatcctgtgtgtgtgaggactgtggacacctgatctcaggaggaggagagtgagtgacaggagcactttgaggggacacaaagtgtctgtgctccctgagccaccacaggtgccacaggtcccgccaatgcaagtgccacagctccaacttctgtggcaggggcagtggtcagcaaggtgggggctcaggctgccactgacctggatctttatgctgaaataagcaactttagaggaaagaaagtccaaggagcatcctggtctgctttgctctctcatactcaaatctcctttcctttggtcagcactgagaagttcccccgcagagagctctgaggtatccctagtggctcttcctgtccattctccaggatcccacaggatatcaaccctggtatctgccagtgtgtgcaatatctgcacagccagttgtcatcacctgtgtctgaccctatgaaaaaataaagcctttgttttatcagcaccacgtggtactctctgcctttgctacagcccaggctgctctgtgagtgtctcctcccct

SEQ ID NO: 524738 - DNA, 644 bp, Homo sapiens
gaattgcatcttttttatctttgggttggtccccagcactaggttcactacctggcactgagaaggggctagacagatatttgatgggtgggtagatgggaatattgaaaactattttccagaaaatgtttcctgcttattcagaggtgatctagtattttgattcctcaccttaactccaagcccacatggtacctattaaatgaagccaaacccaagacctcagaatgacccaaagcaatgcaactggatgctttctccagaaccaggtgctggaacatctttgctaggttcactactaaaaagtttaggcactgtctcctgcctcactcctragtagaatcagccatgcaagatgccagctttgctctcatttcagcctagagggattgctcttgccagaccaggtagacaagaactgcagctaagcactgtaaccagagaacacagccaccctctctgcagtttgtcccttgcaggacaaggaacctctgagcatgcttgtgtctgcctggagaaatccagaacagaagcacagaatgcagagcccccactaataatttaaatgagatgcaaacacattcttaaggacagagagttctcattcttattaatggtgataacaaggcaactataatatcacc

SEQ ID NO: 524739 - DNA, 644 bp, Homo sapiens
gaattgcatcttttttatctttgggttggtccccagcactaggttcactacctggcactgagaaggggctagacagatatttgatgggtgggtagatgggaatattgaaaactattttccagaaaatgtttcctgcttattcagaggtgatctagtattttgattcctcaccttaactccaagcccacatggtacctattaaatgaagccaaacccaagacctcagaatgacccaaagcaatgcaactggatgctttctccagaaccaggtgctggaacatctttgctaggttcactactaaaaagtttaggcactgtctcctgcctcactcctaagtagaatcagccatgcaagatgccagctttgctctcatttcagcctagagggattgctcttgccagaccaggwagacaagaactgcagctaagcactgtaaccagagaacacagccaccctctctgcagtttgtcccttgcaggacaaggaacctctgagcatgcttgtgtctgcctggagaaatccagaacagaagcacagaatgcagagcccccactaataatttaaatgagatgcaaacacattcttaaggacagagagttctcattcttattaatggtgataacaaggcaactataatatcacc

SEQ ID NO: 524740 - DNA, 667 bp, Homo sapiens
ccctaaggggtctaatttagtgccttgtaggcagcaggtgctcagttttcatttccttgttcagttgaatttactattcagcaagcaagatgaatgcctcaaacaaatccaaacccagattttcattaacaaattctagacatttcatgggatgatagaatagttgtggaaaggaccttggccatcattcagagccggtggttctcaaccccggtgagatctaggctttgacattctccagacgtccatcaagtggctctgctgcaccactgggattgataattgctgatttagatcatgccccttgtttgacagaaaaggaacctgagacttagagatggaaaaaggctttccctggatcacatggagagttgggagcagagatggaattcaaamcctgctatctgccctctctccatcatagcactctgcctcttgaatagtattttatttcttactgtgattttttccagcaagatttattttatataatttgcttgttaaacatggctattgaatttggagtgaaaatagtaataaatatggggaatcacagcctgaattgcacatatgaaaaaattggaagtgatcattacctctactaaataaccagggattgattacctgtgttggacaggcagtgtctggcattgccagggataggcca

SEQ ID NO: 524741 - DNA, 519 bp, Homo sapiens
cttgtctttagtcatgttctcatcacaatcagcrtgtctcactgacgattgattgtcagagtcaatggcaaagtaaactcctcactatatccttgactctatggattttgcatttgtcctccctacctccccagacccaagacaagttggagggaatggagtggaagactaatcatttaattacaatcacaagtcactaaacagtaagccacagcttcctgctgtctagctgctatttctgtagaatttgctgtgaaatagatggaattgtgtactgacttttaaaaagcatctgataaaaataccattcattcaattacataaggagccataagataagcttgaaaatagagtttattaaatttttgaggcgcggtggctcatccctgtaattccgctgcttcgggaggccaaggcaagaggatcacttgaggccaggagtttgagaccagcctgagcaacatagtaagaccctgtctctaccaaaaaatcaaaataaaaaagttagcagggtgtggt

SEQ ID NO: 524742 - DNA, 519 bp, Homo sapiens
cttgtctttagtcatgttctcatcacaatcagcgtgtctcactgacgattgattgtcagagtcaatggcaaagtaaactcctcactatatccttgactctatggattttgcatttgtcctccctacctccccagacccaagacaagttggagggaatggagtggaagactaatcatttaattacaatcacaagtcactaaacagtaagccacagcttcctgctgtctagctgctatttctgtagaatttgctgtgaaatagatggaattgtgtactgacttttaaaaagcatctgataaaaataccattcattcaattacataaggagccataagataagcttgaaaatagagtttattaaatttttgargcgcggtggctcatccctgtaattccgctgcttcgggaggccaaggcaagaggatcacttgaggccaggagtttgagaccagcctgagcaacatagtaagaccctgtctctaccaaaaaatcaaaataaaaaagttagcagggtgtggt

SEQ ID NO: 524743 - DNA, 519 bp, Homo sapiens
cttgtctttagtcatgttctcatcacaatcagcgtgtctcactgacgattgattgtcagagtcaatggcaaagtaaactcctcactatatccttgactctatggattttgcatttgtcctccctacctccccagacccaagacaagttggagggaatggagtggaagactaatcatttaattacaatcacaagtcactaaacagtaagccacagcttcctgctgtctagctgctatttctgtagaatttgctgtgaaatagatggaattgtgtactgacttttaaaaagcatctgataaaaataccattcattcaattacataaggagccataagataagcttgaaaatagagtttattaaatttttgaggcgcggtggctcatccctgtaattccgctgcttcrggaggccaaggcaagaggatcacttgaggccaggagtttgagaccagcctgagcaacatagtaagaccctgtctctaccaaaaaatcaaaataaaaaagttagcagggtgtggt

SEQ ID NO: 524744 - DNA, 606 bp, Homo sapiens
tccgagagtctcattttagccgtggggatcacgtggcatggcatgtctataatgtcacttgtagagataccgttaccggtttgcccctactgtccagtgaccccactccaaaagcaagcatcacgcgctgtgtgtgcggttcagaataagaggatccaagcagagggctttgcctgcagtaaatgtttcagacagatgtgaacaaggcagtttctccgtgttcactgacaaatttggccataatacccatgtcactataacgcacatcacattttcccgagagtaagtgataatagaataaaaatccccgctctgaatatcaagagcttcaatgatcccacaaatccccctgcaattttatccagactgccatcccagcagtggaagcagggattttagaaacccatttttctacctaggaacatcactttaggacaatcatctttatttcactgctattcagttccagacccataaacataaagagggaaatacagaaatagaatcagaagggcaggggaagaaaagagtggaacaaaatactttttaagagctacatggacttaataaaatttcctttcyatataatcctcaagatcattaaaa

SEQ ID NO: 524745 - DNA, 519 bp, Homo sapiens
tgaaaggataagacagtattagtttcttcgacatcttgtcacttaaatctgagcacaaaagagaggaagaggaagaaagcgtcaccttgaagaacaggggcctgaatgtgacctcggaaagtttgacaaccatggctactagacagtcaatgatacaattttccgtttttccaacttcctccagatcgttctgaaaacagaagagcccatttattagagtgctgatacctgactgtaaattattttggcaagtaccactgttacacggctagattgttctcggactcttcaataggtggataacagctttaggatttggaggagtgaacctgagcttacctcagagtgctgggctcggaagtccagggcytccaggaaaaaggcggttagctgagactgatgggaggtgagctcttccttcttcatcaccccaatatgctcttgcaagatgctcataaacggacccatgtgattctaccaataacacaggaaagagatgtgccattttcaaatgattcc

SEQ ID NO: 524746 - DNA, 621 bp, Homo sapiens
agacagtattagtttcttcgacatcttgtcacttaaatctgagcacaaaagagaggaagaggaagaaagcgtcaccttgaagaacaggggcctgaatgtgacctcggaaagtttgacaaccatggctactagacagtcaatgatacaattttccgtttttccaacttcctccagatcgttctgaaaacagaagagcccatttattagagtgctgatacctgactgtaaattattttggcaagtaccactgttacacggctagattgttctcggactcttcaataggtggataacagctttaggatttggaggagtgaacctgagcttacctcagagtgctgggctcggaagtccagggcttccaggaaaaaggcggttagctgagactgatgggaggtgagctcttccttcttcatcrccccaatatgctcttgcaagatgctcataaacggacccatgtgattctaccaataacacaggaaagagatgtgccattttcaaatgattcctagagttcagcggtgtgtatttttaaaaactaaatcttcttctttaagtcaaagtttacacattgcagtaccacctctcccttctccaaagtcttaatacccaataagatct

SEQ ID NO: 524747 - DNA, 621 bp, Homo sapiens
agacagtattagtttcttcgacatcttgtcacttaaatctgagcacaaaagagaggaagaggaagaaagcgtcaccttgaagaacaggggcctgaatgtgacctcggaaagtttgacaaccatggctactagacagtcaatgatacaattttccgtttttccaacttcctccagatcgttctgaaaacagaagagcccatttattagagtgctgatacctgactgtaaattattttggcaagtaccactgttacacggctagattgttctcggactcttcaataggtggataacagctttaggatttggaggagtgaacctgagcttacctcagagtgctgggctcggaagtccagggcttccaggaaaaaggcggttagctgagactgatgggaggtgagctcttccttcttcatcaccccaatatgctcttgcaagatgctcataaacggacccatgtgattctaccaataacacaggaaaragatgtgccattttcaaatgattcctagagttcagcggtgtgtatttttaaaaactaaatcttcttctttaagtcaaagtttacacattgcagtaccacctctcccttctccaaagtcttaatacccaataagatct

SEQ ID NO: 524748 - DNA, 538 bp, Homo sapiens
gtgttccagctgttcggcagcatcagatggttgtgagggattctgttgttctgttttcttctaggcaaaggatgtgccttcttttcatttgcagtagtctgctcacccggaagcatgtcatttctttgccacttgcttgtaattcactggctttgcacttgctctgatacagtacaggtaactaattgactccctctgctgccaacttggttttccttctgagctatagcatcaggctgtgtgttttgtgttttcttgagattttgttaaatatatctggggtcccttctacctggttggaactgggattcccaccattcttgtggggatagaatctcaggttacacctatttccccaatcctctgtagccacagaagcttcatcttggccagctgttatcagagtgcaggacttgggctgaaatttcctccccttcctgattttccttgacagtcctttccactgctcctatcaaaagaatgraaaccctcaacttgctgctttgcagattcaggttttgtgcttcattctggcctc

SEQ ID NO: 524749 - DNA, 379 bp, Homo sapiens
taattaattgcctttcttttcaaaacaagtctttgatttcaagaagcacctgcagaagataagaatgactcctactgaaatgtaacaaccaaaaagcccattttggggttggggattgagggtgggagtgtagagttggggaacaggagaatggagatggaggaaggagaagttacagccagggaccaaaacaaaaaaatatcgacgagtcaagagacagcagtcagctaaatcctatcagggatgcgacaaaattgawactagtgtgcctttccaaagcaattctttctatattattaaattgcttatttcattgtttttagacaacactaactcctcttcctaaacaaaacatggacattgtcagcataacagctac

SEQ ID NO: 524750 - DNA, 604 bp, Homo sapiens
gaaaattgtagatcagacatattatgaaatattttacagtccgtcaaatgtttgctttatttgttatattttatccctatggcaagtagccaaaaagtaataaggccttttctacctcctcctgtgacccagacccttttgtctattttacctgctgtatctatggccaaaagaatgcagtttacagcttacactttctaaaaatttgtttaagaaaattaacttcatgaaactctattcatccttattatatttctgaaaactacattaaagtggcataaagtaaacagccaaatatgaatttgagagaactagttaaacttcatagtgaaggttagataaattcttgtgctgtcaatcatgagataaattcctaaagaaatttcttttctgcagattcctattgcctttgtttagccagagacatttcaggaaatacaagttactctataagcctcttgggaaattcctratagctgtggaattgttccactctattcagccactgttgtccactgaagattttggatcggccattgagttatcggaaagcctaaagaacacttctcttaacagatgaagtagcttgaaatcagaataatag

SEQ ID NO: 524751 - DNA, 604 bp, Homo sapiens
gaaaattgtagatcagacatattatgaaatattttacagtccgtcaaatgtttgctttatttgttatattttatccctatggcaagtagccaaaaagtaataaggccttttctacctcctcctgtgacccagacccttttgtctattttacctgctgtatctatggccaaaagaatgcagtttacagcttacactttctaaaaatttgtttaagaaaattaacttcatgaaactctattcatccttattatatttctgaaaactacattaaagtggcataaagtaaacagccaaatatgaatttgagagaactagttaaacttcatagtgaaggttagataaattcttgtgctgtcaatcatgagataaattcctaaagaaatttcttttctgcagattcctattgcctttgtttagccagagacatttcaggaaatacaagttactctataagcctcttgggaaattcctgatagctgtggaattgttccactctattcagccactgttgtccactgaagattttggatyggccattgagttatcggaaagcctaaagaacacttctcttaacagatgaagtagcttgaaatcagaataatag

SEQ ID NO: 524752 - DNA, 547 bp, Homo sapiens
tttctgagggctctgttctgttccattgatctatrtctctgttttggtaccagtaccatgctgttttggttactgtagccttgtagtatagtttgaagtcaggtagtgtgatgcctccagctttgttcttttggcttaggattgacttggtgatgcaggctgaaagaaacccttttgaagtcctttttaccattgtcagatacattagtctctcagtaaaaatagtaattcagtatcctgagacagtgaagttaagctcacctactttgagtccttgctcaaatatcactctctacagatacatgagcactactctaacaccctatttaaaattgcagtccaaacccccttctccatacttctcttaccctgatctgttttgttttctgtagcagttatcactttctaacctactatagaattgtatttattatatttgttgcaagttcctctcaccactctcaaccttggctctaccactagaatacacacttcagggggacagttaacattgatttgtttactaatgtatccccactgccagaaa

SEQ ID NO: 524753 - DNA, 608 bp, Homo sapiens
aatttttagtctaggatactttaaaccacaccagaaacactaagaatccagatccagggaaataaaaacccaagcacctccatgattttgacaaagataaaatgtcaacagtcaagtagtttgagatagagagtcctatctgccattccgrggagtcatcacttaccttctttgggcttcagttcctcatctgtaaaatgggaaatgattcccacctacataatgaggttttacaaagattgaatgagataaaggttatgaaaggcatctataaaggcaggcgtggggtgagccaagaatttgcatcagaaggaggacagcagaacaccaagcacttgccctggctggtaaccaaagatcgatcgtatcattttaaaaacgatgtgcaggattccttagtgttctttggacatattgctagttgtaatgtatttttttttcctggcatgaaaaagcaaaagaaaatgttataagttacaatcttaataacatgcatagatgtgtcagaattacaaatttctttattatgtattttttctgttagtgtagatgttgacttgatacaatataatacctatatcttggggtgcttgagtagtcattgcact

SEQ ID NO: 524754 - DNA, 676 bp, Homo sapiens
taaatagctataaaaatttccaaagacttagtctcactttatatacttatctcatcattgactgattataaacaattcagaccagcactgattcatagatcactttaagcagcactagtttagggtcaatgaaacaagtatagaagatactgcatttattatttagaggtatggaaataattagaagaaaaattttaaatatttaaaataggtagtctccggaaggcaggtctaataatgagatataagaggctttatttatttctttatttatttttgcttttgtacatgtcttactgatttagatcttttatcaggtgcatgcaataactttcataaaaaagctaataaaaataaaagggcatggcatgaaagataaatggagtaratagagtacaaccttttgtagaactataattcttccatgcatggtctaaaaagtgtctaaaatttgaaataaataatatataatatttatatgtaaatattcactcaggagctgtggattacagttctttttctataattgctgcaatgtgactgagcagttgaagatgcaatcttaagtcactcaactatcatgtccacacaaagaatagtcaagtgtgaaggtcaaatgaattctgtcttcctacattcctttatttgctcagaattataacacatatagtaaatg

SEQ ID NO: 524755 - DNA, 558 bp, Homo sapiens
ccaatgtcaaggaaaaaagtgggccactaagagtcatgccactttccgccaccagcaatattagtgaagatgcaaagactccaattttagtaaatcagcacccayttctgtgctaaataccagcaataagtttgccaagacttcacatccatggtatattataaaaaataatgtgggcaggttagtagtttatatttaatacaagatgcagattagcatttttgatgcagaaaaggtatcttttatcattatgacaaaagtaaaagaagtgacagaaactcatttgaggaaagatgtgtcctctatcattgtcacagaggcaatatttcttcaaacaaccatattattgtcagctcacccaagatgctatgaaaattgctagtctctatgtatccagaaccattagagcaaactaccatggttcttgcttttggcctgagcaaggggacagccttgagagaaatgttttcatcagtgatgctttttatatgtccattatccctaaggaagaaataatctttgagtttagtgaatacacactctgatagagacaatttt

SEQ ID NO: 524756 - DNA, 558 bp, Homo sapiens
ccaatgtcaaggaaaaaagtgggccactaagagtcatgccactttccgccaccagcaatattagtgaagatgcaaagactccaattttagtaaatcagcacccacttctgtgctaaataccagcaataagtttgccaagacttcacatccatggtatattataaaaaataatgtgggcaggttagtagtttatatttaatacaagatgcagattagcatttttgatgcagaaaaggtatcttttatcattatgacaaaagtaaaagaagtgacagaaactcatttgaggaaagatgtgtcctctatcattgtcacagaggcaatatttcttcaaacaaccatattattgtcagctcacccaagatgctatgaaaattgctagtctctatgtatccagraccattagagcaaactaccatggttcttgcttttggcctgagcaaggggacagccttgagagaaatgttttcatcagtgatgctttttatatgtccattatccctaaggaagaaataatctttgagtttagtgaatacacactctgatagagacaatttt

SEQ ID NO: 524757 - DNA, 558 bp, Homo sapiens
ccaatgtcaaggaaaaaagtgggccactaagagtcatgccactttccgccaccagcaatattagtgaagatgcaaagactccaattttagtaaatcagcacccacttctgtgctaaataccagcaataagtttgccaagacttcacatccatggtatattataaaaaataatgtgggcaggttagtagtttatatttaatacaagatgcagattagcatttttgatgcagaaaaggtatcttttatcattatgacaaaagtaaaagaagtgacagaaactcatttgaggaaagatgtgtcctctatcattgtcacagaggcaatatttcttcaaacaaccatattattgtcagctcacccaagatgctatgaaaattgctagtctctatgtatccagaaccattagagcaamctaccatggttcttgcttttggcctgagcaaggggacagccttgagagaaatgttttcatcagtgatgctttttatatgtccattatccctaaggaagaaataatctttgagtttagtgaatacacactctgatagagacaatttt

SEQ ID NO: 524758 - DNA, 535 bp, Homo sapiens
ccaaattttcacctgatggggtragaggaagctgatctgtgttgctggagaggggggatgaaggattgggtagggaggacatgctggggagaaggagaaaaaggagcaggtggcgtaggatgtcactagggaagtaggttcggaccagactagaaaaaaatgtctacatgatgtgaagtttctgaggcttagattttatcttgtaagtcacagggaccagtggtggtttttcaagctggagagtaattcttggctttgattcttcactgtctcatattccaccagtaaataggaagtgtcatgaagagaatgtctctataatttacagggtttaatgaatattttagaagtggatattctcatggttgttggaaggatttaagtagaactggaagtaatcaaggaaagcaaaggaaggatatcttagtaggaaaagtgacttgtgcaaaatctgataaaagtagacacatacgcatttcagcagtaagaatcagaggtgggcttgagcagtcagtggtactctgaaacagtgttt

SEQ ID NO: 524759 - DNA, 587 bp, Homo sapiens
gctgaaggcacggagccaatgtgtcattggaaatcatctagccaacttccatttgaacaatggaaggaactctagagtttaatgtttagttaagacactttacaagcaagaaacagtagcagagcataaattaattttaacactcagagaatttattgatttattggaaagaaactgaaatacattgaaagctcaaaaaatagtagtcaaaaccaggtcaattttggggacttctgggatctatagtggggtctctatgctaggaaccttcactttttgagtttttccaagtggtgcagacatggacatggcagatttgtggtggtgatattatagcttcaataatagggaaggaaaaaggcactcttccctattggctctagtaggaaaattagcasggaaagacactaaatgggtttgcttggatcaatgtccattttgaaaatgtttgggtgtgggaatgagctctttagattatttcaattcattgtgtgcttacccaataagcagagaagttagctctgttaccagaagagggcaaagaagtttgacaacccaaaaacaatagccaccacaatcatgtatgc

SEQ ID NO: 524760 - DNA, 515 bp, Homo sapiens
gctcttccctagctggctgaccatgggcaagttagcccaaatctctgcacctctatttcctcactttcaaaatagggataacattaatacctacatcgcaaacttgctcatcctcagtgcygttatgagcaccaaatgagttaaaacatgcgaagcacttggaacagtgcctggcacatgttaaaggcttggtaatgttagctattattttatcaaacactttaattcttctctggaacaaagtaagacaaaataaatgttttatatgctaaacatctcctatgagccaggcactttgtggagtgctgaggtgaagattaataaacacataaagatattttgcatctggtataggacacagagggagacattaatataaactgagatgtcacagaaagggtgacctcggtactgaagaatgaagggaagatttgggaaaagtaacagcaacatgcgtacagattgggaggggcgtcaatcatgtctgaacagtcggaatatgcctggagaatagg

SEQ ID NO: 524761 - DNA, 638 bp, Homo sapiens
aaacgaactcacttaccttccttagtaagaggtataggaattaacttaaatgtttttgtaatctcctgataaaagatgatrtaaaaatgaagaacattattatattgctaagagcactgaaaatattatccttagcaaactaatgcaggaacagaaaactaaataaataccacacgttcttacttacaagtgggagctacaaaatgagaacacatgaaaagaaagaggggaatgacagacactggggcctatttgagggaggaaggagaagttcagaaaaaaaaaaaaaaacttgtcaggtactatgctttgtaactaggagatgaaataatctgtacaccaaaccccagggtgacaagtttacctatataataaaactgcacatgtgccccagaacctaaaataaaagttgaaatttttttaaaaaaagaaaatcccacatgtattttcaatatacatcttctaaaatagtaaagtatatctagaatatcttgtgtgagtaattgatacttttgaaacctattaaaataataagttaaagctggttactgatactgtcttagtttgaaataaattgatgaaaaaaggcatacactaaaaataataaacaaacacaggaaaaaatcagtgagaaatat

SEQ ID NO: 524762 - DNA, 606 bp, Homo sapiens
cttccaaagattaaaacaatgtttcaatattactatttgaaaattttgcatacttctatgtaggaaaagttcatgaaagtagaatttctgggttaaaatacatgcaagtatttagtctttttttttttttttctttttctttttttgagacagggtcctgctctgtttcccaggctggtgtgcagtggggcaatcatagctcactgcagccttggactcctgggctccaacaatcctcccacctcagccccaaggtagctaggactataggtgcatgccaccatgcccagctaattattaaaattttcttgtaaaggtggagtcttgctatgttgctcagaatgctatatttaagacatttgagacattttgctatatgatatctagcaggatgccctcagaaatctataagtaatcctgtttcctcactcccatgcacatastcttactaactttgtaatttgattgatgaaaattgcataacattgttttaatttgtatttatgagattagttgagttgaatatttttatatctctattggccacaatagttcttctttttggaactgccattcacaccttcattagccaattgaaaatttgga

SEQ ID NO: 524763 - DNA, 445 bp, Homo sapiens
gtccacaccctgggtgggggaagatgcagcccttggcatcacagcagtcacaggtacaataacaaatggcttctctgataagtgactctccggttcttccgggacacttgactgcagaaaacagtcagcattattaacctaagaaataattggtccccacaatgtccttctgcactgtgttcgcaggtggccctgtgaggagtcagctaaaatcatgcctgctcagcaccaggcagcattctcaatcaccgaagcttcagaataaacagtatgcatttggacctaggaccttttaatgttcagaaacccaaaacaatcttagtttctcaaagggtcaaattgtaaataatactgaaagcacagccacttaggttagttttaccctktggcccaaggtacagtaaaacctaaatactaatgtcgcagccccgagttctgagagctg

SEQ ID NO: 524764 - DNA, 404 bp, Homo sapiens
ctgccctctttgtcttttattttctgtctttgatgcttgtgtggacgcagagagctaactggacggtgagtagtttcttatggtaagtttccgtggtgggctctgcagggacagctgcaactctgctctaggggagttttgttttgtgggaattagaatccaatgttgctagatatttttatgcgttttccaagagaaagtggaaatatttttaaaaattaatttaatcttgtgaagtctcttgatttagtttttaaaatactgagccacgtttttaaaaacacagtttgggccawacaaactgtatctgaatttagactgtgagccactgatttgaaatttctatgttaagggaacagaactgtgaaatggctaagtttttagaaatcatgaacaccaatgtt

SEQ ID NO: 524765 - DNA, 404 bp, Homo sapiens
ctgccctctttgtcttttattttctgtctttgatgcttgtgtggacgcagagagctaactggacggtgagtagtttcttatggtaagtttccgtggtgggctctgcagggacagctgcaactctgctctaggggagttttgttttgtgggaattagaatccaatgttgctagatatttttatgcgttttccaagagaaagtggaaatatttttaaaaattaatttaatcttgtgaagtctcttgatttagtttttaaaatactgagccacgtttttaaaaacacagtttgggccaaacaaactgtatctgaatttagactgtgagccactgatktgaaatttctatgttaagggaacagaactgtgaaatggctaagtttttagaaatcatgaacaccaatgtt

SEQ ID NO: 524766 - DNA, 549 bp, Homo sapiens
gttaaatgctaacatttaatgtacacattgaaatgatattacgataatgttttaaaatttggagcaaccttttttggggagggggactttaaaatgattcaagttatcaagaaccagtgctcccttaaaagaagtaaacataacacccagaagagaattagggaggtactctcttgcttttgggatgacatgtttaaatttaaagcaaatcatcagaaggaactttcttatgcttaggccaactacatgatgcgttttgaaaaggaataattagatgatgaattttgaaaaggaagtcactttcctgatayttgagggcttttgaatacattcattgtttaaaaggtaaatgtattgattttgtgaatatcgaaaataaattgattacaatagagtccatgcattaaacttggcagttcttttcccaagaatgtttccccctagtttttctttttaattaattgtttttgaataggtaatacatttgtttacattgttaaaaaagttaagagagacattagaaggtatgctttgagaagttttactgcc

SEQ ID NO: 524767 - DNA, 649 bp, Homo sapiens
tctgcctgctacatgcattgtcattcacttacagtgaccatcttctgtaacttctgtccaggacagtggccagaagccatgtgtggctgttgtgcacttccaatgtggctcatccaagttgaggtgtgctgtaaatgtaagatgcacactggattctggagccttaatctgaaaaaatatatgatgtaaaatacctygttaataattttatattgatagtatgttgaaataacattggggtcaatgaaatgtattattaaaattaatctcacttgtttgatttgaatttttttgttgtggctactagaaaatctaaaatttcatggatggctttcattgtatttctgttgactagcatttttctggagcagcagcaccatctgaaaatgtgttagaaatgcagattcttgggtcccaccccaggcccttggaaccagaaactctggggatggagccagcaatctgtgttttaacatctgctcaagtttgagagccagggctctagagcactctgtctcaatcagtttaacaactactaacactaaactaacaggctgctttatcactgctgccaagcaccttgacctttaatcacagcttaccgcaggaaggactgactgcaggtgcagattagcacaggcactcgcag

SEQ ID NO: 524768 - DNA, 536 bp, Homo sapiens
atttcatgatgtccaagacttgagctcagctattctttaacttttctagttgcaaagtgggaatgatatatgcacctacctggctatgtcatyatgtctttgtgcttctgaaaatctgtttgttcccggggaattcattttgtacagatgtgttgtaaagcaaaagagtcatactcattagtgataatcttctaggaattactttacttttcaatttctatccctactgttctactagagaagttattaattcattttggagaaaacagaaaattagagaaatggatttgtgagcaaacaaatcaggaaaaacaatgaaatctaaatgtatacagccactaacaaagcttttagtaaactgaatgtacaaagtgttcactgagtatagacagttatttcagaaaatgtaattatcccttttaacacgaaaatgttaaaagtccattaattatcaaatattcaaagagttgcctttggagtagacaaagacctgaggcattcttcagaggaagcatttttattaaagaagagattat

SEQ ID NO: 524769 - DNA, 499 bp, Homo sapiens
gggaattcattttgtacagatgtgttgtaaagcaaaagagtcatactcattagtgataatcttctaggaattactttacttttcaatttctatccctactgttctactagagaagttattaattcattttggagaaaacagaaaattagagaaatggatttgtgagcaaacaaatcaggaaaaacaatgaaatctaaatgtatacagccactaacaaagcttttagtaaactgaatgtacaaagtgttcactgagtatagacagttatttcagaaaatgtaattatcccttttaacacgaaaatgttaaaagtccattaattatcaaatattcaaagagttgcctttggagtagacaaagacctgaggcattcttcagaggaagcatttttattaaagragagattatttatgtatactaaaaactagagaaggctttgaataattcaggggggaaataaagttctatttcccccctgaatttaatgtagcttgaagtg

SEQ ID NO: 524770 - DNA, 582 bp, Homo sapiens
tgcttgaaagcaggggatgctttcaaaggtctggtgcttagtaggtgctttgtgatggctgtgcaacctggaactgaattaaagattaggggctggaccattgctttggaatgcatgagcgagtgtttactttagaaaagaataatgcttgagaaagcatttaaattgaattttatacttttcttttgatagacattaacttttttgtattaatacctcaatatgtttgcgaatgacatattcatttacacggggtcttcaaagtgtctaccaaagccacatgagatctttcggcttttgcaaaaaaaaatgcttattgctgttaatggaaacaaattataagcgagctcctcttttagacccaaagcagcttcgtaattataggtattgacttcaccccactcagtatgtaaagaatctaactgtagcacttgtatctccaacacctytcaggtcttacccagtgctagttaattcacatttaaaatgttacacttaaggaaaatataagtcattttttagtctaattttaattttcatgcctttcctcaaagaaaggaaaataagtaattgtgtgtatgc

SEQ ID NO: 524771 - DNA, 618 bp, Homo sapiens
gtcagcaccatttatttgagtcccaaaaacatactgaagggggcgttaaggcttcccttgtcagatgttaaaacatactataagggctactataataaaatcaatgtgatagacaaatgtgtcaatggaacagaatggagactccrgaaatagatctcagtataagtaaaagtttaaaatatgacaatgcggtatttaaattctgttgttaaaagagtagtatatttaaaatatatctactttttaaaaatttcaggggaaaaaagaatttgcagagtgtgttcatttttatcaacaatgcagataaatattcatggcatttgcgaataaattccacagaaaaatgcagaatctttgctgaagaatttctcagtggcggctcattttggtgtatttcagtgactgtgacaatgacagtcaagtcatttgctgacctcacaccataagtgctgacaagtctgagggaatatcccagtgggtcacttcttaatttcaaggcactacagatgacacagatggtacaagattaattacctaaaaacaaaagaaaattgtgaccttccattagtttcttctctcattagtccatgcacacggggcatttcctaaccgaatgca

SEQ ID NO: 524772 - DNA, 618 bp, Homo sapiens
gtcagcaccatttatttgagtcccaaaaacatactgaagggggcgttaaggcttcccttgtcagatgttaaaacatactataagggctactataataaaatcaatgtgatagacaaatgtgtcaatggaacagaatggagactccagaaatagatctcagtataagtaaaaktttaaaatatgacaatgcggtatttaaattctgttgttaaaagagtagtatatttaaaatatatctactttttaaaaatttcaggggaaaaaagaatttgcagagtgtgttcatttttatcaacaatgcagataaatattcatggcatttgcgaataaattccacagaaaaatgcagaatctttgctgaagaatttctcagtggcggctcattttggtgtatttcagtgactgtgacaatgacagtcaagtcatttgctgacctcacaccataagtgctgacaagtctgagggaatatcccagtgggtcacttcttaatttcaaggcactacagatgacacagatggtacaagattaattacctaaaaacaaaagaaaattgtgaccttccattagtttcttctctcattagtccatgcacacggggcatttcctaaccgaatgca

SEQ ID NO: 524773 - DNA, 613 bp, Homo sapiens
ggcagaattaggagggagggtgtgttcctttattcaggaatgtattcatagtggcccatatggggagtgggtgtgggcagtgctaagagattctgaggaggaaggtggtggtgtgggagcatcattgaagtggagccgtgaagcagaggtaggattttaacaggtggaatggaaaaggtggccttccaagaacgtgtgtgacataagcacacacgcatgtgcaatagtttggtgaagtggatatgtgaggagagaggggaatgatcaggttaggagtgatcagccctacatgatcagaggtggggcctccagcatgggagacttacgtatagggctgagtttgttttggaaaggtcacttygaggggtggttggagtagagtccattcagaagtctcttcataaccatgaccttatttggcctgtgctctgttgactgcccccagacagttaccatttactgagcaattccagatgccaaggttcattaggcacttcccatgcaagaacactgtggagtcagcaatcgatcctggtcttacaggtaagaaaactgagtaacgagaccagttttcactgggttatgtttattggcagagctgctattcagagtc

SEQ ID NO: 524774 - DNA, 509 bp, Homo sapiens
ttgatttaaaaaataggaccaytgcagacatgggcaggtctggtgggtcagtgtgcactggcactgtctaaatagcaggtcatccttttccgggaaggggcagtggttctacatgaggacactgcccttgtgttttatgtaaaaaggaagccaaatagaccaacaaacacttgtcttttcttcatgaagtaggtaatacaccagtagcaactccctgattcttccctgaaacaatgctaagagctggtatcccttccctgtatcatcacacttgtccactcccactgcagcccacgtcaatcctgctgcatcccaccccaggaaggtcattcagatcaaagtcagaaaaagcacatggtgaaaaggaggtgagcctgccaatatcagagttccaagtgacatctctgaacattctgtgattctgagactggctggctcttaccctaacagaactcacaaatataaatcagcaaacacaggcccaccactttaggctgcaccatccacag

SEQ ID NO: 524775 - DNA, 621 bp, Homo sapiens
atgggcgatttcttataacccaacttaatatattgtttgagttagtaagttctgtatgttattaaactctatataaagtacttccttttcattcccaaattcctctttccaccttgaaaaactggcttgcaattctatacctaaacttgtggagcaagtttgatgccaattcttttaaatcttatgaaaaggataattacattatttatcagccccctttcaagcttgaaataagtaattaaatctgtttttatccaataataccctcactttaaatcttcatctagtttaggttttagttccttgggttttgttttgttttttaagaaatagtccaaccctggttgcatctaaatgcttttaatgaggyaggaaaatatactcaatgaaaattcccctcaatattaacatttatgaaatgatattactgctgggtgactacatggatattcacccacaagttttataagttatatttatgttttgggcactctgttcagtgtgttatgctttgattaaaacaaattttttaaaataacactactggttcatgaatcatgttaagaactgacaatctaatgcatgtttcttttttccctgcaggatcatttaattcatctt

SEQ ID NO: 524776 - DNA, 251 bp, Homo sapiens
tgcctcagcgtaaggcctgtgccgaacagctagtgtacggcgactgagtgatgcccaatcctatttccttttgttcaatgggtgttgattagagtgccccctcgtaaacttcctatgtgctaatctccatctcrcagttggcttccggggaacatcttatctgtgacagtctgtccagtgtagattacagtttgcagaagacagcaaacaagcaaagtagatttgtgatttgtacactgaaggaaatgaac

SEQ ID NO: 524777 - DNA, 575 bp, Homo sapiens
gctggccgtgcataatcttctgctaatttataaggcgggagcatctgctctttcactgccactctccaattttctaacaaccttatccttgggtctctggtttaaagcagccccatgacgtggcaggaaagaaaggagggttatcaccagggaaaaatgacactgcccagaatcctgactttcagagaaaaaagagaaaaggccttgattcttatcctgactaagccttcttttttggrtagtgtcattttgaaatcattcttttagatagggcatcttgggttgccatcacgggatagtgtctttctctataagaagattctttctgccccttaatctattagaggaggctgggcaccatggctcatgtctgtaatttcagcactttgggaggccgaggtgagtggatcactggagttcaggagttcaagaccagcctggccaacatggtgaaaccccgtctctaataaagatagaaaaattagccaaacgtggtggctcacgcctgtaatcctagttactcaggaggctgagacaggacaatcacttcaacccgggagatggaggctgcagta

SEQ ID NO: 524778 - DNA, 355 bp, Homo sapiens
ctttgttgtgagtggccctgtggaggcccatgtggcaaagtaactgaggcttcccaaagctgctgaagaactgagtgaagcctcctgccaagaggaacgttagtgatcttagaagtggatcctcygaccccagtccagccttcggatgactgcagccccagcttgcctcttgactacactactgtgaaagaccttcagccaaaaccacttggctaagcccttactggaatcctgaccctcaaaaaatatgtgagataatatttgttgtttaaagctattaagtgtaaggtaatttgttacctaatagtagagaatgaatacaacaatgattctaaaactgaaagcatctaagaca

SEQ ID NO: 524779 - DNA, 594 bp, Homo sapiens
atgaacgcgctgaaatcccagagccttctctgtcaaagacatgccragtttgtgcattctcagatcagttctgggctttcctgaaattttactgggggtcccaaaatttaattcggaggcgttgccttccattcttcccctgaaaatagagatatgacacagaaatatttgtttactagctccctctcccatcagatatgtagggtctttataaaatccttgtaaactttgaaactttaataatttttattctacataccatgggcctcaaatagtatttaaaaggcaaacttgaaggttgagacatttgcttatacgattgcacatttgtatttcggattctatacaaacaaaaacggcttccataagtgagcatctgttttctatctaacagtattaaaatattttaaaaattcacacaccacttgcaactaccgagtttcctctggttcttttaaacaattaaaattaaatcataatggttcacaggttgtatgagctcccttttctgtggctgggttgaagagctttccttaccgacactagtcttattgttccttaatttcagctaggtagatatctcatgggattatt

SEQ ID NO: 524780 - DNA, 361 bp, Homo sapiens
taaagacagagcgtttgaaaaatcctaacccttcttccctgcatgctaaaatcagctaacagagataaactagtagctggttcttaaaagagggatttgtttacactacgtaatttttatcagtgggacaacctgtttgcctgcctgagatcttattacttattaatgcatattacctgtgaataagaaaaaggtgcttgcatttcagaagtttgtgtgaatcacgtgtcctcctcatttcctaccagagttcaggtatttgtttattttgaataatgacagttctcagtaaagctaargttttaaggtcatgcccttctgcatagaacctaatctgtcaatggctctttcctgttcagaa

SEQ ID NO: 524781 - DNA, 636 bp, Homo sapiens
gccttcttatatattttaaattcagcctaaagttttctctgtataaaatgaactgtaatctaactggatgtgtaaacaggctataacctactcttgcgccagtcaatgagtttcgaccaatcaaagacggccaactgtttaaaccgtgtycaaataagcacacactaactaaagcacacaccaagctgtaaccagtctggctgtttctgtacctcacttccattttctgtatgtcactttcctttttctgtccataaattttcttcaaccatgtggcagtgctggaatctctctgaatgtattctggtttggggactgcccaattcctgaatgttttttttgctcaattaaaccatgttaaatgtaatttgtctaaggttttccttttagcaggtgactgagtgaaacccagaatgatgttgccaggcctcactagctcctggtgtacagaggtcacaggaacagccagaatctgtgtcttctggttcctacttgcacctactcatgagggaccacagggcctctcttatccctttttagttatttctgggaggccctaatgtgtttctctctatgcttgtgggacccaagtgtctcatatttttcttctccagagactctgttggtgtccactgc

SEQ ID NO: 524782 - DNA, 561 bp, Homo sapiens
aatagggtgaatataattacaataatttattatatatttcaaatttgcaagaagagaggattttgaatgttcctgacacaaaaaacatctgacgtgacagatatgccaatgatcctgatttgatcattacatatcatatacatgtatttaaatatcacatgtaccccacaaatatgtaaaattatgtgtcaattaaaaaktaaaaaaattcaaggacttattataaacctttactgaaaactgcctatgaaattaatttttttgttaagtctatgtcaaaaaataataaaattgcattactatatgatttatttcattaattcaaacccttccttgccccttcaaaatgagatggtctcagggatgtagttgtctaactggaatttttgtaaggctgaatctaggttctcacttataaaacacacattaaaatccttttgaaaattcagcctcgataatataagacacatattatctgaagcaggctatggtttctattctgtgttccatagactttcaggcattaggttttattttttttcccataatgtttgtaattgc

SEQ ID NO: 524783 - DNA, 587 bp, Homo sapiens
tcacgaacaattcactggagagattgcaatggtgaaaagaaatctttcatagagcaaagtggatataatccattacactcatgttttcaagaaaaaatccctaagtttattgtatcattataactagaggtaggggtttgccatttcaagtcggggagagttgaaattaggcccattttctcccaggaaactgagagatgaggccttatcttttttgacgattacatttcgagaagatgaggaacatgargaagcgtgtcaaccaatgttgccacaagtccatgaggaaatattcttgagttgtgtcaaccaaagaattatgaggtttccacatttggacaggagaactttatttcttataaaaggttgcagcctccagggtaacaatccacagcctgggaagcataacctccagtagaagcagagaggaaatggtgacacaggaatttaggccaaatgggttggctaagcatacatattcatcagattacaggaggagcaataaatattcatgaaagagggcatgcatgtatgcatgcatagtaaactaacatgcatgtcacatacatccgaggttcactttttgg

SEQ ID NO: 524784 - DNA, 587 bp, Homo sapiens
tcacgaacaattcactggagagattgcaatggtgaaaagaaatctttcatagagcaaagtggatataatccattacactcatgttttcaagaaaaaatccctaagtttattgtatcattataactagaggtaggggtttgccatttcaagtcggggagagttgaaattaggcccattttctcccaggaaactgagagatgaggccttatcttttttgacgattacatttcgagaagatgaggaacatgaagaagcgtgtcaaccaatgttgccacaagtccatgaggaaatattcttgagttgtgtcaaccaaagaatyatgaggtttccacatttggacaggagaactttatttcttataaaaggttgcagcctccagggtaacaatccacagcctgggaagcataacctccagtagaagcagagaggaaatggtgacacaggaatttaggccaaatgggttggctaagcatacatattcatcagattacaggaggagcaataaatattcatgaaagagggcatgcatgtatgcatgcatagtaaactaacatgcatgtcacatacatccgaggttcactttttgg

SEQ ID NO: 524785 - DNA, 542 bp, Homo sapiens
aatcatgctgggaactgcagaccagagctcttcctaytcggttatcttggaacagacacctctggaatccttatttttaaatagcttcccagagtttggtttgcatataggtttaggaataaatgcactaatcccttacagcatgattcagttaacattttcgttcatacacaactaaatatgtcgtgtgtatctttatttacgtacaactttaaatttgtctgtgtgtggagtgaggtaaaaatgctcagaaaatggggtggtctttttctgaggtggacacttgtggttgccttctgttctgactaatattactacataacaaaccacccaaaaattaggggtgtaaagcaacatttgtttctgctcacagattctagcagcagttcacacaagggacagcagggatgcttatcttttctccatgtctgtggcctcagttagggcaactcacaagctagggataacctgacagcagggggaggaatcatctggaagcccccttattcacatgcctggcagttgtgctgggatgcagcact

SEQ ID NO: 524786 - DNA, 319 bp, Homo sapiens
gatacctttctcagatggttattattttggggattaaatatgatagtgtgtgtaaactgtgttcccaatcattgtgcccactttagtcctatataacctgtatractaatagcctcacttcagcaaacattgtttcccttccctctacctccccctccagataaaggctctatttgtcagccccagaccacagatccaatgctatcttcccaactctgtagaaaaataatttaattccaactcattcttcggatcctcactttatcctacttcttcctgtcaacctaaaaggaagaagctaaggcaaaattaatataga

SEQ ID NO: 524787 - DNA, 319 bp, Homo sapiens
gatacctttctcagatggttattattttggggattaaatatgatagtgtgtgtaaactgtgttcccaatcattgtgcccactttagtcctatataacctgtatgactmatagcctcacttcagcaaacattgtttcccttccctctacctccccctccagataaaggctctatttgtcagccccagaccacagatccaatgctatcttcccaactctgtagaaaaataatttaattccaactcattcttcggatcctcactttatcctacttcttcctgtcaacctaaaaggaagaagctaaggcaaaattaatataga

SEQ ID NO: 524788 - DNA, 526 bp, Homo sapiens
attgaatcatgggggtgggtctttcccatgctgttgttgtgatagtgaataagtctcatgagatctgatggttttacaaaggggagctyccctgcacatgccctctctcttgtctgccatgtaagatgtgcctttgcttttcctttgccttctatcatgattgtgagttctccccagccatgtggaactgtgagttcactaaacctctttcttttataaattacccagtcttgggtatgtctttattagcagcatgagaacagactaatacacctgccaagaatttttttctatattttggccagattgtatagttttttatggtgggagggtgaatctgacacaagctatttggtgtcaagtagccaagtcacatactaatttatttttaatgtaaagctatacaaccttctttctatacctaaatttttaattaaaatataataattaaaatattactaaaaatttcttaatgattttatttcatggtgaaagagactcagtctggaatgtaaagtatgtctta

SEQ ID NO: 524789 - DNA, 593 bp, Homo sapiens
tttgcaacctggttatctcatctacttccatttgtaacacacacacacacacacacacacacacacacacacacacacacacaytcctttccaaatagaaaaaaaaatgtattaggccttttatgaatatgtttccttttattataacattgtcatggtgagttacatctttttgtaaatatttgaaaacgatctctggagaaagagctttactattaattggggtactatgtaatagttaaattaattattgcaagaaaaatctatgcttccaattctttgatcattgtcttaatatatgtatgtatatatacacccacacctgttaccaaaacataattgcttatctgtgtttgatatttttcttctaattgtttaagtctaaaataatttgatctgttataaataatataatcaagttaacattaattaattcaatgtaaaccaaaatattgaggtctttttatcccaaaagtaaaagagagaagtgtaagtggaacaggaagttagacttcatctaaaaaaaaaagttaacattttgtgtcatgttaacatattcgattaacatatttgattaatgatatgaaacaata

SEQ ID NO: 524790 - DNA, 593 bp, Homo sapiens
tttgcaacctggttatctcatctacttccatttgtaacacacacacacacacacacacacacacacacacacacacacacacattcctttccaaatagaaaaaaaaatgtattaggccttttatgaatatgtttccttttattataacattgtcatggtgagttacatctttttgtaaatatttgaaaacgatctctggagaaagagctttactattaattggggtactatgtaatagttaaattaattattgcaagaaaaatctatgcttccaattctttgatcattgtcttaatatatrtatgtatatatacacccacacctgttaccaaaacataattgcttatctgtgtttgatatttttcttctaattgtttaagtctaaaataatttgatctgttataaataatataatcaagttaacattaattaattcaatgtaaaccaaaatattgaggtctttttatcccaaaagtaaaagagagaagtgtaagtggaacaggaagttagacttcatctaaaaaaaaaagttaacattttgtgtcatgttaacatattcgattaacatatttgattaatgatatgaaacaata

SEQ ID NO: 524791 - DNA, 593 bp, Homo sapiens
tttgcaacctggttatctcatctacttccatttgtaacacacacacacacacacacacacacacacacacacacacacacacattcctttccaaatagaaaaaaaaatgtattaggccttttatgaatatgtttccttttattataacattgtcatggtgagttacatctttttgtaaatatttgaaaacgatctctggagaaagagctttactattaattggggtactatgtaatagttaaattaattattgcaagaaaaatctatgcttccaattctttgatcattgtcttaatatatgtatgtatatatacacccacacctgttaccaaaacataattgcttatctgtgtttgatatttttcttctaattgtttaagtctaaaataatttgatctgttataaataatataatcaagttaacattaattaattcaatgtaaaccaaaatattgaggtctttttatcccaaaagtaaaagagagaagtgtaagtggaacaggaagttaracttcatctaaaaaaaaaagttaacattttgtgtcatgttaacatattcgattaacatatttgattaatgatatgaaacaata

SEQ ID NO: 524792 - DNA, 509 bp, Homo sapiens
ccaccatgcccagctaattttttgtatttttagtagagatgggatttcaccatgttggcccggctgctctgaaactcctgacctcaggtgatccacctgtttcagcctcccaaagtgctgggattacaggtgtgagccaccacacccggctgaacattgtttgtagaagttgatcaggatctcctaatcaaaatagtaactttggtgatggatggatgagagggaaatgctccttaagatagcaggaaggcaattattgacaaaactaataaatttgtacytaagacatttatgagttttaaagtactcatatacacattaacctaaatatcattaatacttttactaatatctctcacatgactatggactctcctacaaagttgaaagcatagataagaatgggaatttgcctttcaggtaaggaactcgtgatcaacatgtttttggaggtgaacatcctacctgtcaagcagccaaagagatcctgaacagcagtcacacgacag

SEQ ID NO: 524793 - DNA, 514 bp, Homo sapiens
caagcaggaacatttaatggattggtcagcaagaccacacttatatcttgtttaaaatgtgtcctttcctttgggagactgaggcaggcagatctcttgaggtcaggagttcaaaactagcctagtcaacatggagttttctaaaagtacaaacaaattagccaggtgtggtggcaggtggctgtaatcccagctacttgggaggctgaggcaggagaattgctggaacccaggaggctgaggttgcagtgagcaaagattgcaccactgtgctccaacctgggcaaaagagcaagactccatctcaaataaatacataaaataaaatgcatcrtttctctcaacagcaaaagccttattttttcatcctttaaatatgttactttcatagtaggataagatggtaccttgtctgagaggctaagacccccaggccacttgagaatttgagagcttttagaacttgatgagcatagctgactggatacttcgtgtcagcactgcttgtggtaat

SEQ ID NO: 524794 - DNA, 577 bp, Homo sapiens
ataaattcacatatgtggccgggcgcggtggctcacgcctgtaatcccagcactctgggaggccgaggcgggcggatctcctgaggtcagaagttcaagaccagcctggccatggtgaaaccccgtctctactaaaaatacaaaaaattagccgggcgtagtggtgtgtgcctgtaatcccatctactcgggaggctgaggcaggagaatcgcttgaacccgggaggcggaagttgcagtgagccaagatgacgccattgcactccagcctgggcaacaagagtgaaactccrtctcaaaaaaaaaaaaaaaaaattaacgtatgttttactgtcattctggttctacttcaaattatacgagcatcattttcacaactttttccttcttcttcattctactttatgttctttctcctaaccaaatatgttcaaacttcctaaaacatctattttgtaaatgcaggcatgtgcataacttccttaaatcaggacacacctatctatgcactgagtagaaaggctaataagttcaaagtggtctcaataaatgtgttgccagccatcctgtcctttct

SEQ ID NO: 524795 - DNA, 466 bp, Homo sapiens
ggctctttgtaaacagtcaacaccaacaacctgcgaatgtggccaccagcaggtggatytgcaggctagctgccctgctctggcgttttagtcttcatctttccttaaccttagtatcaccttggcatttttatctaaagatgatttgagggggaaaataaagtgtagcaccttaaagatgtatcccagtacttggaaaataaccagccatcagcaaagatttttgacatggtaatcctcagtaccaccaaggaggtggggaagcagacatctgcactctgccaggggtgcaagcttttcagagggttacttggcactttacatagagttccaaaattgttcatctcttttcacctagtaatctcacttctcggactttattctaaggaaatgaccagggattcagacaaagatttaatgcatgaggttgatcatttacagcattgttgatgggagggaaaaaaaa

SEQ ID NO: 524796 - DNA, 466 bp, Homo sapiens
ggctctttgtaaacagtcaacaccaacaacctgcgaatgtggccaccagcaggtggatttgcaggctagctgccctgctctggcgttttagtcttcatctttccttaaccttagtatcaccttggcatttttatctaaagatgatttgagggggaaaataaagtgtagcaccttaaagatgtatcccagtacttggaaaataaccagccatcagcaaagatttttgacatggtaatcctcagtaccaccaaggaggtggggaagcagacatctgcactctgccaggggtgcaagcttttcaragggttacttggcactttacatagagttccaaaattgttcatctcttttcacctagtaatctcacttctcggactttattctaaggaaatgaccagggattcagacaaagatttaatgcatgaggttgatcatttacagcattgttgatgggagggaaaaaaaa

SEQ ID NO: 524797 - DNA, 466 bp, Homo sapiens
ggctctttgtaaacagtcaacaccaacaacctgcgaatgtggccaccagcaggtggatttgcaggctagctgccctgctctggcgttttagtcttcatctttccttaaccttagtatcaccttggcatttttatctaaagatgatttgagggggaaaataaagtgtagcaccttaaagatgtatcccagtacttggaaaataaccagccatcagcaaagatttttgacatggtaatcctcagtaccaccaaggaggtggggaagcagacatctgcactctgccaggggtgcaagcttttcagagggttacttggcactttacatagagttccaaaattgttcatctcttttcacctagtaatctcacttctyggactttattctaaggaaatgaccagggattcagacaaagatttaatgcatgaggttgatcatttacagcattgttgatgggagggaaaaaaaa

SEQ ID NO: 524798 - DNA, 646 bp, Homo sapiens
taaccagattcccattatctagatttatgattttgatctattttacttgtatctctagtttatgttactacttggtgtagtccatatcataaattttccactcacaaaggtgatttatttatcctaaaaatatcttctttgaatttcatggttttggtcctgcatgtaaaatttagggatttggtgaaaaaatctaattgatcttattcatggcttttatataaattacaaamcttaatacttctcacatttaaatctaaaaatcctctaacttactagttactttagttataatctgtttaatttcctccaaactctttcctcagggagtagtccttgttttgaaccagagtgaagtactattttcacttttgtttcaatctatttttctggaagatcttcaagattattctgaacctgcaggacttggcccttactatcttctgagatgtacaggctctatagggaaagctgaccttctaaaagggcagcagttaagtcatatttcaccaatgatactttacttttccttaaaaagtttatcaaaaaattatacgaagttacatttgaggttctctctctgataaggatgctgaggttgcaacaaggttttgctggcttcacaatgcaaatactgagagagcag

SEQ ID NO: 524799 - DNA, 764 bp, Homo sapiens
tgtctgggccatgccacgctggtgtgggccagaggggaaaccaagggcgtgcgtgtgtctatgtgtgtctgcagatgcactcaggcttaaaaattagaagcctgcaaagccccctgcatttaagagaaaaaaaaataatcatggaatttttctggccatctagaaaaaattttgctcttgccaaaaatattcaaaagctatcaggatttttttttaacttatctaaatgatattagtgagtgcaggggaatcccaaacaaagggacagttgtgttctttaaattcactcttggttttaaacgagacctgcttgaacataataaagaacttcaagaagccctctcaccttggttgaatgataaagtgtttagaaataataccttcatgattatcatgtacaagacattcatcttataaggactctgatgactagagagttcagtgccttgcctctggttgtaatgcagaagcgtgattcccacttaggggtgttcaacatgccatggcctccctttctctgtgatcaaagttagcatcacagttgagtgacctacccagggccctgaactcacaagcatctcatatccggtttaacattctgctgttgccatggtaaaatctttaataaggattaataaattattaatccttaatgaatccttaatacctttgaactcggatcttgcaggtgtactccaacatgaaaacggagcatgcaygtgagctgagtagtgacatgcaacatgcatgtccattgatccttg

SEQ ID NO: 524800 - DNA, 628 bp, Homo sapiens
caacaaagaaaaggcaaatgaactgaaggaaatctgctattcacaatgtacaggcatgcatgatgcttttgaaatgtttttgctagcaattgttttgtgtttagatgatataaaggttgacacaaatgttagatggaatacctttatagctggttgagcttttgttctctgtagtgcattaatgttttgatttaattataaatygttgttcataaaagtatcctattttcagaaagaccatctggaaaaaatctccagggccacacctccgatgtcttctttgcaataggcagcttgactgcagcgttgcattgcagaaagagattgaagatatttacatttattgtaaattttgatttgaggaagccgcagggttgacaaccatacttgatgctgaaatgctgggaaattcctcaaggctcagcaagataatctagaatctaaattaactacagagaattactataaagaaatagtgctccaccatgaggcacattatccatgaccttaaagacattttcttagaacagtacctcacagttcctaaatgttcttaaacagtcaaaagcagttcactggtggcctcggtcatagaacagcttacactgaacaccatgccaatgtgtac

SEQ ID NO: 524801 - DNA, 545 bp, Homo sapiens
agcaattgttttgtgtttagatgatataaaggttgacacaaatgttagatggaatacctttatagctggttgagcttttgttctctgtagtgcattaatgttttgatttaattataaatcgttgttcataaaagtatcctattttcagaaagaccatctggaaaaaatctccagggccacacctccgatgtcttctttgcaataggcagcttgactgcagcgttgcattgcagaaagagattgaagatatttacatttattgtaaattttgatttgaggaagccgcagggttgacaaccatacttgatgctgaaatgctgggaaattcctcaaggctcagcaagataatctagaatctaaattaacyacagagaattactataaagaaatagtgctccaccatgaggcacattatccatgaccttaaagacattttcttagaacagtacctcacagttcctaaatgttcttaaacagtcaaaagcagttcactggtggcctcggtcatagaacagcttacactgaacaccatgccaatgtgtact

SEQ ID NO: 524802 - DNA, 597 bp, Homo sapiens
ttccattgccaaaagatattctgatatattttcttctattaattttacagtttttccttttgtattaaggtctttaattcacctgtagcaggaagtggcaaacatttttgtaaagggccaagtaataaatattttagatttcrcaggctagtggtctctgtcacattattcagttctgccaaggtagtgcaaaagcagccatagacatatgtaaatgaatgctcatggcctgtttcagtaaaacgttatttctatttacaacagaggcatcgggcattcaggccataatttatcctccatatagagtctacctttgttttaggtattagataggattctatgtgtttttttcccccactgccatatagtaaatcagtttttatcatgccaaacactaaaaaattcatcatttccttgttgatttgtagtgccacctttattgtatattacattctcaaagtacagggatctgtctctgaactctattctgattcattggtctttttatctattcttgtagaaaggtcactttttttttttaatcccagtggttttgtggtatatcttaatatctgtcaggaataggtccctcttgtt

SEQ ID NO: 524803 - DNA, 614 bp, Homo sapiens
ttgaacagatgtgcatgtgaagagcagaacagaggtggccatagcagcctaattgcctggactcaggtaatccctaraggcccaaagggatccccttggaaactggtcacttcctgggtaacccatgactagctcattttcctgccacaaggctttggcttatgacttttaagagacaggacgtacaaaggcccaaatgttcacttgagatcttattgaggggttaagtcccgtttgcttccatcaggaataccttgtgagggagctcttcagtcataagagttacacacccaggtcactcgaatgctgataggatacaactgccacaatgcttcattaatatttttcaacttttactttaactaagcagactatttctgtcacaaataaagcagcatgcttctcagactcttgttccaccttaactagttcaatgcacaccaccaattatctggacaggaaaagttgccaaatcaaagcaaaatatgaaggcccgctggacattttgagttcaaaaaggatgaaagaaaacagtacttttgggattattgatatgggaagctgtgttttcgagactgctgtagactggagtctgaagtatatccggagtagtt

SEQ ID NO: 524804 - DNA, 631 bp, Homo sapiens
aaattacccaaattattggtgctttatgctgtccccaaattattccctgycctatcattataatttgatctgccaccaggaattattacagccttaagtcgtctctttctttagtctccttctcctctcttttttcctcctccccccactcccctttgggaaggaagcctgaggccctggctttagagataccaggaaaaagcaatcactcagcagaaagtgtctgtctttagcagaagtgtcgttccttgacgaagagtgtagttgagaagaagttaataacagataatagagttttagaatttattctaattactttagaatttatttttgatacagctggctattgctgtcatgaaaaaatgtctgttctgtctctttaggtattagcaaagtcaaatccagttctttaccacatttctgtctttacttaggtttggttaattcttttataccttttctaaaggctaatgatttttccaacattgaagaagaaagagttcttaacaagagcattggatggttaagtagttttaacatttttacacacttattgatattacctgaatttccaaagaaagtatatatgaaatgttttactgtacatcatttgtcatctgaagatagtgtt

SEQ ID NO: 524805 - DNA, 603 bp, Homo sapiens
attttcttcattcatccatcagtggccacctaggttgcttccatatttttagccatacaatttcttaatgttacttgagcacacctaagactgtatttccatcatttgacattttgaaattaagacattttgagaatattcagggcataaaagttgaatactgttataaatttcctattgattataaactagatcaatgtaaaattgccctctactcaatttcatatttgtcttaacaaaacaatgattaattagctgatttattcactcaacaagtatttctttaagtttgattacattccaaatgcttttaggagcctatgaacaaaattcactgtccccattttgtagagcttacagagaatgtagtcattattacaaataatactgacatcaatatttgtactctgggtttttctttgagggggggaactgcattctagagccttgtgtatgatattttcttgtgatacattatttttgcgatattttgtgtaagaaataacagattattattttcaattgtttctgagagtctttgcctgtattataaaggggaaatttagacccttwacttttattcttctgttattcttttgtcat

SEQ ID NO: 524806 - DNA, 550 bp, Homo sapiens
cttttctcctgtttgtctactgtcagttgattccagagacttaaattattgaacctttagagaatggaaggaaaggtccctccaccactatgaaagcaaatcatcagttgctgggatctggagttgggagaggcagaaggaagggattgccaggggcatgaagaaactttcaggggtgatgatgcggttgtgawtgtggggatggtttcatgggtatataaatcaaaacttatgaaactgtaaactaaatatgtgcaatgtattgtataattaacaattatacaatatgtgcaatgtgtaactgacaaattatacctcaatgaaacttgtttgaaaaaacagcttggtgtctgtgcaagtgttgattaaaaaaagatcagtgaatcagaacagtgagcccataaattgatctgtatatgtataaatataaatatataatgtatatgttatatataaatatacatatatgtatatttagaaacttggtataggagaaagatggtattaccgacagtggagaactgatgaatcattcaagtagtggtattaa

SEQ ID NO: 524807 - DNA, 618 bp, Homo sapiens
ctgaatttaatatggacctgttaatgtgacattttcatgtttctgttgagtctgccttgatgaataactcagagcacttattctgtggtacacagagtcagtatttctcatttctggaattggatgctttattttctggtatgcctgtgataagagaggtgatagagtggcttctgcatctaattggtttgaatcctggtattacacttaactgatttgggcaaatgtatcctcgaggctcgatattttgttttgtttttctcccctgtaagagcactcactgctgtcttagcttgggctgctgtgaaaaaaaaaaaaaaccacagactgggtggctttacacgcgcattcctcactgtttttggaggctgggaagtctaaagatcacagtgccccctgattggtgccccagtttggttcctggtagtcctcatacagagagcgcaatagatgtcagtttccttggctcctcaggtgtattggatacaactgactactccagtttttgagacacttttgcaaaacaatgtaaagccattccttctgacaacttwctttctcagatgttccctctttcatgagtagttatgccctgtactcaaatcattgcctgctgct

SEQ ID NO: 524808 - DNA, 633 bp, Homo sapiens
ggcgtatgtggaggaagccggtcaggccaagccgcgaggagccgcgggatccctggaaccctgcggctcccgcgttccctgacctggtgctacagccccaccctctcctctcccgatgtgcgyactccgtccctcgtgcttggattggctcccggggtagagccatcgcgtggcctgcctctcccattggttggcgtagggaggtgttctcctccggggcccctgattggccggctccgggaggcgccatcggtaatgcctgcggcaggggcggaactgctaggtggtctgagcccggctttgggctggggtcgggctgtcacacaatggctagaagtcgtgacttcgtctccttcgtgccgcatggttttcaacgcccttgacccgccggttccttttgtttgggaagcatggggtcgcatccagtccttcggatttggggaaatagaagggctacagcggcgtccctaggccgttctggaggtcgcctgtccagccctcggctgctgcgagttgtggcacccaccttgacctttgctcagaccagcaggtgtaggaacgtgtgggaggagagggcactgcctcctcgcgtggccttgccaaacagggtcatgaggctcccctgctcgtagg

SEQ ID NO: 524809 - DNA, 506 bp, Homo sapiens
tgtggtgtatatatataaaatcagacaaagtagatttgaaagcagagaaacttttcaggaataatgaggcctcctaaataattatgattgtcaatttttcaggagaatattgtcccaaatgtatatgaggacacagagcttcaaaactcataaacaaaattggatacgccaagttaaaatagaaaaatccagttatagttgcagtcattaacactcctctctcagtaattggaagatttagtagaacacaaatcaacagacatactggagaattgaaccatgccatccagtaatggacctatcaatttcataatgcaaaataaaaattcaggtagaaagcaaagacaaaaattaaaagaaaagcaagatcatgttataatcagaaaattaagagtagtccagcatatagaagggtgctattattgaaagagtttgaaatagtgacttagttattttgaaacatttttgaaggcgtyatttagctggaaatgacagaaagactgaaa

SEQ ID NO: 524810 - DNA, 605 bp, Homo sapiens
ttttacctactgagcctgcatctgttcttattatattagtctctaacaaatatgacacaacttcatgacgccaaggggatcataaatgtgaaaaagaattttgctcttcttttaatttaaacatattttctgaggaatgttttgtgctgcccacatgagttgactggtgacaccagtcggtccttagctctctgggaagctttcctggagaaggtgaccgttttatcaaagcaggaaaatagtatgtacttatgtagaattacagaaatgaaaagcaccttttcctggattttcttcacaaagtaagagcaaatactaggcgaataaagctgcctatggaagaagggtacatttgatgtggcaataccatttcattctcgggcagatggccaccagtttgaggtctgtggtaatttgaastatactgaaaagcaatgtgacctaattttgtaaaacaaaatagttgactttgttaaaataatcaatattttaaaattgtctgcatgactccaatagattgtcccaatattttcctcttttactgcaatggactgcttgggatttcccctaggctcatatagctagaaatgcccagtaatcactgg

SEQ ID NO: 524811 - DNA, 438 bp, Homo sapiens
gttttccttttggttcttatattaggatgcagttccctgtatgggaataatatttatgtgaatcatgtctatatacactatacacacatatacatatatctttatatatgaatctatatatacactactcatatcataattttctcctttgtcaaaggctttstatcctgcagtgacactaactccattttccttaattttcaccgttctgtggtgacagcagggcaattctgactttgggttaccagtagacccagggccacattcctattattctctccagatgttctacagcgatctgatctttgggatgagcagacaaaaccccactgggcatccttgttgcaggcccattaccttagaggcctgtctccaccgtgcctcacctagattctctggatataaaggaagatcacactgtgctttatggaaatatag

SEQ ID NO: 524812 - DNA, 438 bp, Homo sapiens
gttttccttttggttcttatattaggatgcagttccctgtatgggaataatatttatgtgaatcatgtctatatacactatacacacatatacatatatctttatatatgaatctatatatacactactcatatcataattttctcctttgtcaaaggctttgtatcctgcagtgacactaactccattttccttaattttcacmgttctgtggtgacagcagggcaattctgactttgggttaccagtagacccagggccacattcctattattctctccagatgttctacagcgatctgatctttgggatgagcagacaaaaccccactgggcatccttgttgcaggcccattaccttagaggcctgtctccaccgtgcctcacctagattctctggatataaaggaagatcacactgtgctttatggaaatatag

SEQ ID NO: 524813 - DNA, 438 bp, Homo sapiens
gttttccttttggttcttatattaggatgcagttccctgtatgggaataatatttatgtgaatcatgtctatatacactatacacacatatacatatatctttatatatgaatctatatatacactactcatatcataattttctcctttgtcaaaggctttgtatcctgcagtgacactaactccattttccttaattttcaccgttctgtggtgacagcagggcaattctgactttgggttaccagtagacccagggccacattcctattattctctccagatgttctacagcgatctgatctttgggatgagcagacaaaaccccactgrgcatccttgttgcaggcccattaccttagaggcctgtctccaccgtgcctcacctagattctctggatataaaggaagatcacactgtgctttatggaaatatag

SEQ ID NO: 524814 - DNA, 508 bp, Homo sapiens
aacattaaggtcccaatgcgatacatttcctaagcataaacagtgattgcctttatccttacaaagtcaattcaaggtacttatgtggggcattttttgttcatctacctgaggaaaaaaaaaaattagaaagctctttctacctcatactagaataggaaataatttttagcaatcttccttttctttttccccccttttttcaaggaaagaggattcaaatttgtggctatgattgtattttaagctacctaagaaaattgctcgtgagaaaacagttgccttctaaaaataaaccaaagcaacctaatacaaacatctstagccctggctttgaaagttctgtctgaattccaagcctctagttttcagtttgtttctgagtttgttgatgaactagccaagcctaaggattgacattgcaggactccataaaaatccttacaaatatacaggtatggttggttgcttttgaaaaataaaatttcccagctcattccacaatctc

SEQ ID NO: 524815 - DNA, 575 bp, Homo sapiens
taatttactgtcataatcgtcttttagaaatgctttgctcgtaaagagactcacagctgcctttctagtttaggtttcaatctgtacatcaaatgagcaattcagcaggacatcttggtacagggttcaagaagctgttaagaatggttgcttggggagggtcatttgagcccaggagttccaggttacaatgagccatgatcgcaccattgcactccagcctgggcgacaaagcaagacactgtctcattaaattaaaaaaaaaaaatagaaaaagaaagaaaagaaaaagaatggctgcctgtatacccccagggaactgaagcagtgcccttgagcatgcctacaggccaagacctgcactctgacaatatctcattaaattggcatgaaataaaaacagaaaaaggaggaccttttyccatcccaatgaaaacagatggaaggactgtggaaagggcaaggttttagcgatatatcagcctgggttcaaatttcagaccttcacttactaactacactgtgagcaagttacttaacccctctcataagaaagcaatgagtagtagaagcca

SEQ ID NO: 524816 - DNA, 575 bp, Homo sapiens
taatttactgtcataatcgtcttttagaaatgctttgctcgtaaagagactcacagctgcctttctagtttaggtttcaatctgtacatcaaatgagcaattcagcaggacatcttggtacagggttcaagaagctgttaagaatggttgcttggggagggtcatttgagcccaggagttccaggttacaatgagccatgatcgcaccattgcactccagcctgggcgacaaagcaagacactgtctcattaaattaaaaaaaaaaaatagaaaaagaaagaaaagaaaaagaatggctgcctgtatacccccagggaactgaagcagtgcccttgagcatgcctacaggccaagacctgcactctgacaatatctcattaaattggcatgaaataaaaacagaaaaaggaggacctttttccatcccaatgaaaacagatggarggactgtggaaagggcaaggttttagcgatatatcagcctgggttcaaatttcagaccttcacttactaactacactgtgagcaagttacttaacccctctcataagaaagcaatgagtagtagaagcca

SEQ ID NO: 524817 - DNA, 434 bp, Homo sapiens
tacaggtgcactaacatgctcagctattttttttctttttcttttttttgtagagatgggggtctcagtatgttgcccaggctgatcttgaactcctggycttaagtgatgttcccgtgttggtcttccaaagtgttgggattattggcatgagccaaggatcatggaccaatgagtactttttatagtgatgaataataatattacttcctttgaacatttatagtaaattagctgatacattaatcaggtgataattgcattttggtacagtcagaaactcaataaacattattgaaaactgataattactaattataacaataatactagatcctagatgttgagattcatcatgaatattatggagcctatttggtaacaagcaagaaaaaaattgaaagtgtaagttcagttgtagcggaagataaact

SEQ ID NO: 524818 - DNA, 434 bp, Homo sapiens
tacaggtgcactaacatgctcagctattttttttctttttcttttttttgtagagatgggggtctcagtatgttgcccaggctgatcttgaactcctggccttaagtgatgttcccgtgttggtcttccaaagtgttgggattattggcatgagccaaggatcatggaccaatgagtactttttatagtgatgaataataatattacttcctttgaacatttatagtaaattagctgatacattaatcaggtgataattgcattttggtacagtcagaaactcaataaacattattgaaaactgataattactaattataacaataatactagatyctagatgttgagattcatcatgaatattatggagcctatttggtaacaagcaagaaaaaaattgaaagtgtaagttcagttgtagcggaagataaact

SEQ ID NO: 524819 - DNA, 434 bp, Homo sapiens
tacaggtgcactaacatgctcagctattttttttctttttcttttttttgtagagatgggggtctcagtatgttgcccaggctgatcttgaactcctggccttaagtgatgttcccgtgttggtcttccaaagtgttgggattattggcatgagccaaggatcatggaccaatgagtactttttatagtgatgaataataatattacttcctttgaacatttatagtaaattagctgatacattaatcaggtgataattgcattttggtacagtcagaaactcaataaacattattgaaaactgataattactaattataacaataatactagatcctagatgttgagattcatcrtgaatattatggagcctatttggtaacaagcaagaaaaaaattgaaagtgtaagttcagttgtagcggaagataaact

SEQ ID NO: 524820 - DNA, 591 bp, Homo sapiens
tcccaaagtgctgagattacaggcataagccaccatgcccagwcaagatcttttacatctctattctatttaaacttctaggtacagtcccctatgtaatttattttgttccactttagacatgaacaaatatgtatttcaatataaaattcattacaactaatgcctaaacctaggtaatgccaattggtgtagccttagagggttggcctaagaccaatttcaattcaatttaattagtatttttttctcccagttcttcaccaatatgccaaccagtgaaagttatggagaaacaaagtccatttcaatataagggcaaacttccagagcaatcagcaatgtttaaaatggtacagtctttctcagtgagcttctcatcaccagaggcacaccatcaatggatatttgatcatctacagtaaaattgtaaaagaaactcttacactagatataggcatggtttaagtaatttctttactcctttatatttctaagcccatgaaaatattttttctatatagctggtggcctattttttattgcttgtgtgaatggtggctaatgcaaaaccctaccattttagagact

SEQ ID NO: 524821 - DNA, 653 bp, Homo sapiens
agactttgattaatccttaaagaaataatttcatttaactatgtttaaatcaagattatttgtctctagagtatttcttattttactccatctgccccctttttatgaattatatatatctaacattccattgaataaattttgggaaatgctgatttgacaatggaagaataaacagaaataatccatactttggcttactgctgttatgtaactatggacatagtagaattccattataagctagtactttgtgggaaacaaaactactttatcaacttttgatgttgcagaagtggagatactctatacaaaaatattctttgggtacatacgacattcggtctctttaatgaatatgtaaagagccacaataaatagaaaaatggtgaaaaactgatgaattaacaattaaggagtgcaaacacgaatatcatttaaacatgtctcataataaatasaaagtaagagtagcaggtacgcttttcacttatcagattgttaaaaaatactataataatctattggaaatagtgtggagaaaatgatacttccatccattgttgagggaaatataaattagcatgatgtctatagagggtgcaatggactgaatgtttgtgtaccctcaaaatttatatgttaaaatccta

SEQ ID NO: 524822 - DNA, 653 bp, Homo sapiens
agactttgattaatccttaaagaaataatttcatttaactatgtttaaatcaagattatttgtctctagagtatttcttattttactccatctgccccctttttatgaattatatatatctaacattccattgaataaattttgggaaatgctgatttgacaatggaagaataaacagaaataatccatactttggcttactgctgttatgtaactatggacatagtagaattccattataagctagtactttgtgggaaacaaaactactttatcaacttttgatgttgcagaagtggagatactctatacaaaaatattctttgggtacatacgacattcggtctctttaatgaatatgtaaagagccacaataaatagaaaaatggtgaaaaactgatgaattaacaattaaggagtgcaaacacgaatatcatttaaacatgtctcataataaatacaaagtaagagtagcaggtacgcttttcacttatcagattgttaaaaaatactataataatctattggaaatagtgtggagaaaatgatacttmcatccattgttgagggaaatataaattagcatgatgtctatagagggtgcaatggactgaatgtttgtgtaccctcaaaatttatatgttaaaatccta

SEQ ID NO: 524823 - DNA, 599 bp, Homo sapiens
ttgtgagagccagaggtaggatttgaactcaactctctgattctgaaacctgaatgttcaatgttgtctgtagaagtgagaccttaggtctgaaaaacacgatgtcctcattcctgattcccatcctaacactaccacatctcactataataccgttattgtgattaaagcctcataatgtgactcacaaagatgtgttaagcataacagaatacattcttggaggaaagattataaagaaaagatattgtttttgttctttgaaattaaaagctaaaataaaaaagagaaatcccaacttgtagcactttgacatttttgtgctgtaaatacccccatcatggctgatttcaagctgccagcattttattgactagcttgcaaaattcctgaaaatttagcagttggcttgtatgaaccagtaagagcccattgattagctccaatacatcaytggaacaaggcttcttaaaaaaaaatctttgggaagatgctctggctggatttgagcaatttactatcattttagaccaatcaccatagctaggtgtgtgggtaactacaattacccatcttgggtcttgtgaccctcccttacc

SEQ ID NO: 524824 - DNA, 552 bp, Homo sapiens
tacagcttgtgcctttactcctttccctctctggagggatgacccaaasaaactagtggaagtgttagttggaaatattatacaagataaatttcttttctactcttaacccttaactttttctttttaattgtaatcctgcccttcggaatctgccaaatgcaatccgcagcacagggaatgaactagtaagggtctcaaagatatacacagacatactcaggagggcattttcaagcaagggctatttccctttggccagtctcagaggtgaagaatgtttgagagtggcagcctgatcagagctaaggcaggaggtggtaaaacacaagcaaatccttctgtgatcacatccttcagtgtttgattctaatgtgtagtcagaacttcacaaactagatgccgtcctttggtgggctggaagcaagcacgtggattaaaactataaaatgtcctttgctccaccagagtggctgtgagtcatccctaccttgaggatttcacctgagagtctttcttatgagttaaggaaaaattcaggatgattgaagc

SEQ ID NO: 524825 - DNA, 617 bp, Homo sapiens
ggactatcatgttaccccaaaagtacaacaggacaaaggagatattttgtagctctagtaatcagacaaaaagtttttctcctgccaaggatgttggatttattcatacaccactgcttcaccagctggggaaaaggaaactaggttaaaatgccacctaggtgaggatttgagcagtttgggagacataaagtaataaaatctgtccacacagccagacctcaaacataggaatcaaaccaaagaaatatgcagaatgctcttctggttccaaagagtcctggtgaaagctaggggtgtgggttagggagggagattcagacccatcaggaaacccaccagggtgtgagggacacaggtgaatttttatrgcctccagcctctctcagaggatcaattcttagcatgacaagcaggtgccaggggtggaggaagtagagctaagtccttgggcttcaactgggtccagagctacgaaagtgaaaggggtgatgatcagacaacagctttcaaactgaaagagctatcaagctttcagataacctgctgcccttcaaaaacttaaatgttgcattaggattttctactcagatgttacgcccagattaggctttgaa

SEQ ID NO: 524826 - DNA, 617 bp, Homo sapiens
ggactatcatgttaccccaaaagtacaacaggacaaaggagatattttgtagctctagtaatcagacaaaaagtttttctcctgccaaggatgttggatttattcatacaccactgcttcaccagctggggaaaaggaaactaggttaaaatgccacctaggtgaggatttgagcagtttgggagacataaagtaataaaatctgtccacacagccagacctcaaacataggaatcaaaccaaagaaatatgcagaatgctcttctggttccaaagagtcctggtgaaagctaggggtgtgggttagggagggagattcagacccatcaggaaacccaccagggtgtgagggacacaggtgaatttttatagcctccagcctctctcagaggatcaattcttagcatgacaagcaggtgccaggggtggaggaagtagagctaagtccttgggcttcaactgggtccagagctacgaaagtgaaaggggtgatgatcagacaacagctttcaaactgaaagagctatcaagctttcagataacctgctgcccttcaaaaacttaaatgttgcattaggattttctactcasatgttacgcccagattaggctttgaa

SEQ ID NO: 524827 - DNA, 560 bp, Homo sapiens
attgcagccttgtgacaggctgaagcgccctcccatgtgatctgagcttctgagaaatattaaagcaagctgtgcacatgtgatggcatttaaaagctggctttctaggggaaaaaaatctaaaagatgggaacccatgtagaagactcatgtcctggtacctcttgtgtgtctcgcagttgaaagttatttataatgaaatgaaggtagacatgttctctgaagcaaagttggaatacttygttatctctgagtgtgtgaaatctttagatggagtatcctccattttatctaaaacaaatattttaagaatcagattaactaaaattacttaggtaggttgatcgcttggccttaaactttaaagccaatgtcacatgagactgggcctcagtgtagaaaatgtaagctagcatacttaaactggttttaaggagtgacccaactttcatgcatagggcaaacattcacacatattttgtgcgtggtgggcatgcaaatacatacatatttatcatttgaaagcattttttgctcctattatgctcatttaaaaaccc

SEQ ID NO: 524828 - DNA, 474 bp, Homo sapiens
ggcatttaaaagctggctttctaggggaaaaaaatctaaaagatgggaacccatgtagaagactcatgtcctggtacctcttgtgtgtctcgcagttgaaagttatttataatgaaatgaaggtagacatgttctctgaagcaaagttggaatactttgttatctctgagtgtgtgaaatctttagatggagtatcctccattttatctaaaacaaakattttaagaatcagattaactaaaattacttaggtaggttgatcgcttggccttaaactttaaagccaatgtcacatgagactgggcctcagtgtagaaaatgtaagctagcatacttaaactggttttaaggagtgacccaactttcatgcatagggcaaacattcacacatattttgtgcgtggtgggcatgcaaatacatacatatttatcatttgaaagcattttttgctcctattatgctcatttaaaaac

SEQ ID NO: 524829 - DNA, 576 bp, Homo sapiens
accccaagggtgcacattggtctcataaggaaggagcagatgaagatgatgcttggcttagtatttcagacagaacaaatgcatgtgcactgatttgtaccttctaatcaattaccaatgctttatttccctataagaagaaatatacataaatgctttgattctcatttaacagattggaaaactaagaaacagaaagagtaaatgatttggctcaaactttattgtcctagagtttaaaattcaatycaaaattttcaccttccggactgcactcaaatccaaggccaatttttcagaaaatgggttgcagctctaatattttctttatcaagataatcaggtcatccctttaaataactcctttcttctttagaagtgacattaatatacaactatcctgaaagcttatatgcaaaacaagctaataaaaagatctggcttttttttttttttctgaagtctttacttaataaggatattcacagataattggcaatactgtctggacaaagagttacagcttcgtcgtcaaaacacatagcctgcttgtgcaaattagcttaagaaatttcc

SEQ ID NO: 524830 - DNA, 643 bp, Homo sapiens
ctgctggtcatgttacaataggtagtgggacaaggagcccatccctggcccttctcctttgagctcccaataactgaacatagtgaccaaccaaaaaccaggggttcttgggccatgggccgggtgaggcaaagttgtctggaactcatccctgttcaataggacctcatgcagtctctagtcaaggggaataagggatacagcacatgcacctcatcattcaggacacgtatcctaacttgaataataataataagagaaccatcttcctattcgtgcgctactctccttcctctactgaaaaggaaaccagcctttccagacccttccactgagaaccagcaagaatccacacctgccccccgttcatgaggtagtataaatggaataggagcaaattcttcatctccacagtaacacaaagtgcagaggacaggccatgagctagcagacaagaggaagtgggtctgaagacctgagcttccacaaaagggcaaacaattcagaacaactcaggaaacccaggccctgtgttgcctgaacttcctcatctgcccccacccctgttaaatcaaagccaacagctacctgaactgayggagaagccatctctagggagagagctgaggggctctgggctgtg

SEQ ID NO: 524831 - DNA, 214 bp, Homo sapiens
ttaggggtgggggacgttctgtgaagggcttcggccattaggcaagaacctgagtttcccttccaactggaaggcagcagcagagatggcgtgtgcctctttaggcaacttttaaattgtccttctgactcacagcaaaagcttctacctgatggcccctttacttccattctttatcarcagacctacttttgtgccaatcaacccatgctcc

SEQ ID NO: 524832 - DNA, 586 bp, Homo sapiens
gcctgaaactcggtcccacgaatggcaggcagcgtccaaaattcaaccccgtaaagccagcaccagccaataaagcgcacggatggaggccacgtgacagcagtgggccggccctccggctgagccctgatctctatggtttccgcggctcgctagaaggagtgtggtccacyggaggactccctacattcttcctccattacctcactgcctccggtggctgctgggataccggaggactcgggtcccggctcgactcagtcctccagccgcccggggaatacctctagttcttcccggccgccgccgccgccgccgccccgccgcttcctcctccgcctgccggcctccttcgccccgtcccgtccgcgcagcgcgtccggcccgcccgcaggccagcttctctcgggagcccccacccaggcgcatggctccatgaagcaagaggaggaggcagagcgcgagaggtcccgtccgccccagccgcgtctgggccaggataaaaggtgggaaactcgggctgcgccgcacccttctccccgctgccgggccaggcctccctcggtccgccgccgccttgcccgcc

SEQ ID NO: 524833 - DNA, 586 bp, Homo sapiens
gcctgaaactcggtcccacgaatggcaggcagcgtccaaaattcaaccccgtaaagccagcaccagccaataaagcgcacggatggaggccacgtgacagcagtgggccggccctccggctgagccctgatctctatggtttccgcggctcgctagaaggagtgtggtccaccggaggactccctacattcttcctccattacctcactgcctccggtggctgctgggataccggaggactcgggtcccggctcgactcagtcctccagccgcccggggaatacctctagttcttcccggccgccgccgccgccgccgccccgccgcttcctcctccgccygccggcctccttcgccccgtcccgtccgcgcagcgcgtccggcccgcccgcaggccagcttctctcgggagcccccacccaggcgcatggctccatgaagcaagaggaggaggcagagcgcgagaggtcccgtccgccccagccgcgtctgggccaggataaaaggtgggaaactcgggctgcgccgcacccttctccccgctgccgggccaggcctccctcggtccgccgccgccttgcccgcc

SEQ ID NO: 524834 - DNA, 586 bp, Homo sapiens
gcctgaaactcggtcccacgaatggcaggcagcgtccaaaattcaaccccgtaaagccagcaccagccaataaagcgcacggatggaggccacgtgacagcagtgggccggccctccggctgagccctgatctctatggtttccgcggctcgctagaaggagtgtggtccaccggaggactccctacattcttcctccattacctcactgcctccggtggctgctgggataccggaggactcgggtcccggctcgactcagtcctccagccgcccggggaatacctctagttcttcccggccgccgccgccgccgccgccccgccgcttcctcctccgcctgccggcctccttcgccccgycccgtccgcgcagcgcgtccggcccgcccgcaggccagcttctctcgggagcccccacccaggcgcatggctccatgaagcaagaggaggaggcagagcgcgagaggtcccgtccgccccagccgcgtctgggccaggataaaaggtgggaaactcgggctgcgccgcacccttctccccgctgccgggccaggcctccctcggtccgccgccgccttgcccgcc

SEQ ID NO: 524835 - DNA, 432 bp, Homo sapiens
gcctgaaactcggtcccacgaatggcaggcagcgtccaaaattcaaccccgtaaagccagcaccagccaataaagcgcacggatggaggccacgtgacagcagtgggccggccctccggctgagccctgatctctatggtttccgcggctcgctagaaggagtgtggtccaccggaggactccctacattcttcctccattacctcactgcctccggtggctgctgggataccggaggactcgggtcccggctcgactcagtcctccagccgcccggggaatacctctagttcttcccggccgccgccgccgccgccgccccgccgcttcctcctccgcctgccggcctccttcgccccgtcccgtccgcgcagcgcgtccggcccgcccgcaggccagcttytctcgggagcccccacccaggcgcatggc

SEQ ID NO: 524836 - DNA, 573 bp, Homo sapiens
cagagcattgggtggccagctcatgcaggcacactcgctctcccycaaaacctgagttgaagtggcaggtgtcatactggttatgcacccattgtgggtctctattcttcccaaggaatcccagcccttgtgtttctgcatcactagatcctccatgaacattccccagaacccacttagactgcagcaaccacaggggacgggtgggaccctggggagctatggaattcctagaagtctagctcttaggagaagggagagtgtctgtgccaacgtactcctttggataaaagaaaccagttcatttgctctcctctgcctaagagctccccacgtgtgagaagaggctggctgtgcccctcccagcagagacacaggcatggttctggggtctgaaggggaggagtgtggttctgcaccagtaggcaggtgacactggtgcctgggaataaacatggaaagggagtcttctcctaccccctcactcaatgctccagatagaccgttggctgtccctactgggagctggcacaagtgcacctggggatggcttttgagggctcctgggggcag

SEQ ID NO: 524837 - DNA, 573 bp, Homo sapiens
cagagcattgggtggccagctcatgcaggcacactcgctctcccccaaaacctgagttgaagtggcaggtgtcatactggttatgcacccattgtgggtctctattcttcccaaggaatcccagcccttgtgtttctgcatcactagatcctccatraacattccccagaacccacttagactgcagcaaccacaggggacgggtgggaccctggggagctatggaattcctagaagtctagctcttaggagaagggagagtgtctgtgccaacgtactcctttggataaaagaaaccagttcatttgctctcctctgcctaagagctccccacgtgtgagaagaggctggctgtgcccctcccagcagagacacaggcatggttctggggtctgaaggggaggagtgtggttctgcaccagtaggcaggtgacactggtgcctgggaataaacatggaaagggagtcttctcctaccccctcactcaatgctccagatagaccgttggctgtccctactgggagctggcacaagtgcacctggggatggcttttgagggctcctgggggcag

SEQ ID NO: 524838 - DNA, 573 bp, Homo sapiens
cagagcattgggtggccagctcatgcaggcacactcgctctcccccaaaacctgagttgaagtggcaggtgtcatactggttatgcacccattgtgggtctctattcttcccaaggaatcccagcccttgtgtttctgcatcactagatcctccatgaacattccccagaacccacttagactgcagcaaccacaggggacgggtgggaccctggggagctatggaattcctagaagtctagcycttaggagaagggagagtgtctgtgccaacgtactcctttggataaaagaaaccagttcatttgctctcctctgcctaagagctccccacgtgtgagaagaggctggctgtgcccctcccagcagagacacaggcatggttctggggtctgaaggggaggagtgtggttctgcaccagtaggcaggtgacactggtgcctgggaataaacatggaaagggagtcttctcctaccccctcactcaatgctccagatagaccgttggctgtccctactgggagctggcacaagtgcacctggggatggcttttgagggctcctgggggcag

SEQ ID NO: 524839 - DNA, 573 bp, Homo sapiens
cagagcattgggtggccagctcatgcaggcacactcgctctcccccaaaacctgagttgaagtggcaggtgtcatactggttatgcacccattgtgggtctctattcttcccaaggaatcccagcccttgtgtttctgcatcactagatcctccatgaacattccccagaacccacttagactgcagcaaccacaggggacgggtgggaccctggggagctatggaattcctagaagtctagctcttaggagaagggagagtgtctgtgccaacgtactcctttggataaaagaaaccagttcatttgctctcctctgcctaagagctccccacgtgtgagaagaggctggctgtgcccctcccagcagagacacaggcatggttctggggtctgaaggggaggagtgtggttctgcaccagtaggcaggtgacactggtgcctgggaataaacatggaaagggagtcttctcctaccccctcactcaatgctccagatagaccsttggctgtccctactgggagctggcacaagtgcacctggggatggcttttgagggctcctgggggcag

SEQ ID NO: 524840 - DNA, 446 bp, Homo sapiens
actcccattgatggggtgcctgctggccaagccttgcacgaagggcagagtttatcctcctccccatatggagcagcagcattcccatagcagaatgcagatgaatatcagagctgctgagggaagaggttctatcccaaggccattttggtggtagccacaggacgggtgttttctgcagacctccatcacactgcagcctggagatgaaggacaatgtctatctgaactgaaggtcacaagctccgggacaagggtgttttaggaaagtggattgccttcctgccttcccaggatgtggagctggtrtactccttcccactctggtggagacatcagtgcctttcaccatgagctcccatttccactcccatcaaggcagttgcttctgctcataattggggtttcccagggtgagcttggtcgtttagtgcccctcagttttg

SEQ ID NO: 524841 - DNA, 567 bp, Homo sapiens
tcctcatctataaaatggggatgttgatacccatttcctggatcaccactgggcctgggtgtgtgacggtggaagtctcatgctctgcagaatcctraaggaatgctaggggctgatcctgcaggaggctggccctttctgggtctagggccaggtctttgtccatttcttctgctgctacaggtttgccaggagctgcagggcaagcagggatgcctggacaagctggcccagttgggcccaaaggggacaatggctctgttggagaacctggaccaaagggagacactgggccaagtggtgagcaactgggtgtcgacttcaggtgtttccaggtggtggtgcagctgcaaggatatgccagtgggcacgcacagagcccatcccaggaagaaggttgtctgaaggtggcactgggtcatttcaggacagatgggacctgctgttgggaggacaacaatgctgcctcccttacctctgttattaccctcaccttactacacactcctcctgccaagaggattcattgttactgaccgggctggtgcttttgctcaggacctccag

SEQ ID NO: 524842 - DNA, 567 bp, Homo sapiens
tcctcatctataaaatggggatgttgatacccatttcctggatcaccactgggcctgggtgtgtgacggtggaagtctcatgctctgcagaatcctaaaggaatgctaggggctgatcctgcaggaggctggccctttctgggtctagggccaggtctttgtccatttcttctgctgctacaggtttgccaggagctgcagggcaagcagggatgcctggacaagctggcccagttgggcccaaaggggacaatggctctgttggagaacctggaccaaagggagacactgggccaagtggtgagcaactgggtgtcgacttcaggtgtttccaggtggtggtgcagctgcaaggatatgccagtgggcacgcacagagcccatcccaggaagaagsttgtctgaaggtggcactgggtcatttcaggacagatgggacctgctgttgggaggacaacaatgctgcctcccttacctctgttattaccctcaccttactacacactcctcctgccaagaggattcattgttactgaccgggctggtgcttttgctcaggacctccag

SEQ ID NO: 524843 - DNA, 417 bp, Homo sapiens
gtctaaatcttttcatctctgcttccagcccccaaaagagtgyagttgactcaaatcatctggaagttctctttagttgtaaaattctgttatttcaatggaaaaagacggtatcatccacccagagctcacctgagctccttctctgtaccctgaggaggatcctgggggctggagtcacagcatagggtgctttggaggccatcctcacccagcgccagccccaagagtgttgccaccagggatagcccagcatctccacagacctctgctgtgggcattcctgtgacttcttccctgcccctcctccccatgcctacgcacttcttccctcctttctgatcaagaatatgccttgggagcaagtaggcaggaaccagcaatcttctgaggcccagcgcttccagaaagaggtcg

SEQ ID NO: 524844 - DNA, 417 bp, Homo sapiens
gtctaaatcttttcatctctgcttccagcccccaaaagagtgcrgttgactcaaatcatctggaagttctctttagttgtaaaattctgttatttcaatggaaaaagacggtatcatccacccagagctcacctgagctccttctctgtaccctgaggaggatcctgggggctggagtcacagcatagggtgctttggaggccatcctcacccagcgccagccccaagagtgttgccaccagggatagcccagcatctccacagacctctgctgtgggcattcctgtgacttcttccctgcccctcctccccatgcctacgcacttcttccctcctttctgatcaagaatatgccttgggagcaagtaggcaggaaccagcaatcttctgaggcccagcgcttccagaaagaggtcg

SEQ ID NO: 524845 - DNA, 538 bp, Homo sapiens
tggagctcagcccgtggcctggtaggtgagccaggatgtggccctcactgggcatttcatacctgtggccagcacagggctggcaccatagtggtacccaacagccccttgttggaagaatgaatttgagcaccccactcctcatgaacagcttggcctgattaagttctcaagaatccaaaggcctgcaaacactatgacatcctcccacatatgaattcaaactgaacaaaaacactgaaaacttaaaaaaaaaaaaaaaaaaggaaaaaaaagaaaatgagccaaggaacaatcacttcttcccattaggaagaccactttgtactttgtaggtggttattttggaaataacaatctttcacttttcttatcccccatttctctaggggcctctgctttgctgggctgctctaaatacaatgggtagtcctgtacttcactctgccagatttattgttacctggacatttttaggtgccagctttatctytttatttttattttcaaagtgtggtaaaacataaataacataaaa

SEQ ID NO: 524846 - DNA, 593 bp, Homo sapiens
gggcacatctgagacagcatcgcttgggaggaagtttggagccaccaatatgccgtgtactctccccgctcatccctgcttcctgggcagagcatatgtggagttttggacaggcgaggggagagagtagctaggaaacttgaccaggtcaataccgaacatatgctcctggaaactgtcctgttggagggagcaaatccccctctcgaagggaagcatggggtgtggggacagtggcctcccttggcccytttggcctttgccatggctcctgtgggaatgtgggaagccatacctggctgcttgaccacctcaggggccgggggtcctcgaggttcaagcctcggtgtggctggaggaggcaggcactggggccccttcatccattgcgatttctgaatctgcatctcctcctcagcctcaaactccaggaacctggcggtgaaggaggcccaggctgtgctgagagggtccaggccccctccccgcaggaccaggcagcggccgagggcagggataggagggagtgcctcgggtgggctgtccaggccctcactgtgtcccatcccccagtcccaggagaaagctgctcc

SEQ ID NO: 524847 - DNA, 599 bp, Homo sapiens
tgttttcatagggcacttcacaattattcatcagtttttgtcaagatattctcaggaggtgagtgataaagatcattccctgccattcttttgttctaaatttagaaaagcatagtacagtgattttatgaaatatattgagaagattcaggataaaaattgacataaaraagtaaaattctttcttagccccctgtgccagtgaaaatccttctctagcatttgttcctacagaaaagcaaataatgtcttatttgattttgttgaactgcctgtagtccttgaagattgggtgagtctctagtcttctattcaaactgaaatgttttactttaataactcaagaaaagataattttagtgtatcttggctgtcatatgtgattttgtttattgactgtattctgattatgataatgcaaacaaaacccaaagtaagtagaagcaatgaaataataaagattagaaaacaataaaatagaaaaaaatgtttttaaaaaataaaatcaataaaactgataaacttccagccaagctgatcaggcaaaagagaaaagacagaacttgacaatatcaacgatgaaagagaaaacatcacta

SEQ ID NO: 524848 - DNA, 570 bp, Homo sapiens
tgttttcatagggcacttcacaattattcatcagtttttgtcaagatattctcaggaggtgagtgataaagatcattccctgccattcttttgttctaaatttagaaaagcatagtacagtgattttatgaaatatattgagaagattcaggataaaaattgacataaaaaagtaaaattctttcttagccccctgtgccagtgaaaatccttctctagcatttgttcctacagaaaagcaaataatgtcttatttgattttgttgaactgcytgtagtccttgaagattgggtgagtctctagtcttctattcaaactgaaatgttttactttaataactcaagaaaagataattttagtgtatcttggctgtcatatgtgattttgtttattgactgtattctgattatgataatgcaaacaaaacccaaagtaagtagaagcaatgaaataataaagattagaaaacaataaaatagaaaaaaatgtttttaaaaaataaaatcaataaaactgataaacttccagccaagctgatcaggcaaaagagaaaagacagaacttgacaa

SEQ ID NO: 524849 - DNA, 531 bp, Homo sapiens
cattgccagcatacctctcccacttggaaggacaaagtcgtgtgtagagattcacactgtgaacttttttcaggaagtgatgcagaaactgaacagggtaaccaaaggaatctgtagaccctttgaagaaagcaacaggctgcagcctacacagtgagtcaggtaaagggctatgagtccctagggtgagaggagagactgcccctgggacacacagcccctccagggaccctggaagtctaggtcccaggggaaggccttaaccctacccagtacaggaaccaacctggggaggcacatggaatataaaagtaggagcagcacaggaagacccttgcatgcactcccagtttccagtgcagacggagggaaagcatttttcactgttcctcacagaggaccctgcagagcacagccaaatagttcaggcaggggtctcaggttgaaakaagcccccaactgggtttcacgatataatcttgggtaaggatgaactcccttagccagggctggggcaggggagtgaaaatt

SEQ ID NO: 524850 - DNA, 450 bp, Homo sapiens
gctgcattccacactgaccaaaactattatatcaggttgtgcttctcttagtcttaggtgtcttctcgtaggactgttttaaaattcaacacgaggggagagggaacaagctagacacagagaaaatagttatatatttagaggactgtgagatcttaataaaatttaaccgtatgggggctctattgcatttaccattcattcaacaaaagttactgattgcccattatgtactaggccctggtctaggcacatggaatacacagatgaataaatatgttcactgtccattastttctcaaaagttgaggggccagaaaactaaaatgaaatgagacagacactactggggctcaggctgggttgaggggagggccttcaaccctgccttgctatattagcaaaggcttctaggagaggagttgaggccttttcacgctttttgaagga

SEQ ID NO: 524851 - DNA, 599 bp, Homo sapiens
tttttcatgaatgaatctgcaggaatagtaccatctgattcagtgttttctttgtgagacattctctgagaatagacttttttccaacaagacacataatttccatatcaataaatgcatttcagttccttaaggagaaaggcttttttcctaaaaaaagaccaagatgtccaaagggatgacaaaagttgagtagttctgtcttatgtggccagcgagggcaaagagcaaaatagaaaaagtgccatcagtaagattcagagcaagcccacttaatacaatgccatctgtccagtggttgatcaataacacagacctaaaagaggagagctgggtctatactggccttcagcattatctccttgcactgttttcaaggaattaaggagcttctttgtcccttaactcttcaaccatctaagatatgaataatcataatatactttactttctgaagcattttgtggatcaggaagtccttttatatgaattatcctactcaagcctcatgagaacccagtgaactaagatttcttatcccttttgtayaatgggaaatctttggttcagaataagtaactcaccatgagcctctcatt

SEQ ID NO: 524852 - DNA, 608 bp, Homo sapiens
aaatggctgcattgaacacctgtgggccttccatcgaactgcattcaacagaggaaaataagaggaaggggagatgttaggcaagagggaggaatggaagtcagcatcttcccaggtttctgccatgtatcctgcagagctaagaatatggtggttgagactagagtgcgagattaagaagaccctcagcataaatggagtctccccttgttcaaacatgttactgaccttcccttaaacgaaccaaccaaagaacacagcactgagattcacatacacaataagttcagaactgatgttcagaagtataagttaagcattcctaattcgaaaatttgaaatccaaaatgctccaaaatctgaaactttctgagtgctgacatgacactcaaaggaaatgcacattagagcatttcagatttccaatttcctgattagttatactcaaccagtaggtacaatgcaaattattccaaaatcttgaaaaaaaaaataaacaaaatccaaaacacttctsgtcccaagcattttatataaggaatatacaacctataataacaattataataaaagctaacgttaactacccactatgtgacagcatgcca

SEQ ID NO: 524853 - DNA, 195 bp, Homo sapiens
agactcatgttctcactcacagttttgtgaagtatcatctccttcaggtaccttcaaggatccatctgcccycttcaacaaatatacacacaaacacataccctacacacactcatatgtcctatacactgggctaggtggctcttctgcccccaagattcccgatgtgtatttctgttattgcacttacacctt

SEQ ID NO: 524854 - DNA, 495 bp, Homo sapiens
ttctattgctccttcaagtgaccctcttgacaaattcttttaaggtcccgtgtccagcagatgaaaagcagtttcatttgactcctcaatktggatgcagtttccccactggtagtcctgactctgcggccataggctcagatgtgagtcaagcacctgtccagtgcatccccaagctgcaggggacacacatcaagttctctgaatggtcttattgatgccactctcaccaggcttgaggtgaagggtaggtacccatggggtgtggaggggacccatagcagagctctttccaaagaactttttttcccatgatcaccaaatcctaagtttttatgccttcaatataaatgagagcttaagagtctcaaacccagttttcagaactagctttgcaaattcttcagtggaaggcattttcccaagaggttttattgtaccctccaagttctctgaggattgtaaaggatctgatgaggcatttgaagggcaatg

SEQ ID NO: 524855 - DNA, 495 bp, Homo sapiens
ttctattgctccttcaagtgaccctcttgacaaattcttttaaggtcccgtgtccagcagatgaaaagcagtttcatttgactcctcaattkggatgcagtttccccactggtagtcctgactctgcggccataggctcagatgtgagtcaagcacctgtccagtgcatccccaagctgcaggggacacacatcaagttctctgaatggtcttattgatgccactctcaccaggcttgaggtgaagggtaggtacccatggggtgtggaggggacccatagcagagctctttccaaagaactttttttcccatgatcaccaaatcctaagtttttatgccttcaatataaatgagagcttaagagtctcaaacccagttttcagaactagctttgcaaattcttcagtggaaggcattttcccaagaggttttattgtaccctccaagttctctgaggattgtaaaggatctgatgaggcatttgaagggcaatg

SEQ ID NO: 524856 - DNA, 495 bp, Homo sapiens
ttctattgctccttcaagtgaccctcttgacaaattcttttaaggtcccgtgtccagcagatgaaaagcagtttcatttgactcctcaatttggatgcagtttccmcactggtagtcctgactctgcggccataggctcagatgtgagtcaagcacctgtccagtgcatccccaagctgcaggggacacacatcaagttctctgaatggtcttattgatgccactctcaccaggcttgaggtgaagggtaggtacccatggggtgtggaggggacccatagcagagctctttccaaagaactttttttcccatgatcaccaaatcctaagtttttatgccttcaatataaatgagagcttaagagtctcaaacccagttttcagaactagctttgcaaattcttcagtggaaggcattttcccaagaggttttattgtaccctccaagttctctgaggattgtaaaggatctgatgaggcatttgaagggcaatg

SEQ ID NO: 524857 - DNA, 495 bp, Homo sapiens
ttctattgctccttcaagtgaccctcttgacaaattcttttaaggtcccgtgtccagcagatgaaaagcagtttcatttgactcctcaatttggatgcagtttccccactggtagtcctgactctgcggccataggctcagatgtgagtcaagcacctgtccagtgcatccccaagctgcaggggacacacatcaagttctctgaatggtcttattgatgccactctcaccaggcttgaggtgaagggtaggtacccatggggtgtggaggggacccatagcakagctctttccaaagaactttttttcccatgatcaccaaatcctaagtttttatgccttcaatataaatgagagcttaagagtctcaaacccagttttcagaactagctttgcaaattcttcagtggaaggcattttcccaagaggttttattgtaccctccaagttctctgaggattgtaaaggatctgatgaggcatttgaagggcaatg

SEQ ID NO: 524858 - DNA, 669 bp, Homo sapiens
tatcattgtgtgtgttatctgtcaaaaaactggtattcatctcatgggaaagcttagaatagtttcaggtgatttaaactggtcctacaaaaaggtattaaaaattatcctcttctctcacctgtccccaccaccacctctattcctcatgcaaacaagacaacctgctatatgctcaatttttaatgcaaacaaacaaamaaaaaaacttgtctcttttgtctcttctcttcaatctccccagcttagcctgcagttcccactgcaatagtcagattcccagagatcagaggggaaccaggcaaatttattatccctcatccccagcctctttaaaggacacacatacatgcaccacagacacatgaatgtgtaaatacacacaaatacacaacccacacacaccagcttccagtcatgccactatgtgtgaattatgactgagatcatcccaaactatgaagattacatgttaaataaggattctaagtacctgaggacatagtcacctactagatgagttagggagcagcattttctccctaaatttttcaagtacatgttctgaacgtggctcctttcccttcagggttccagaagttcagccttgctggtgggcaagaagcaggtatttttctttccaggggacactgagatgcactataatag

SEQ ID NO: 524859 - DNA, 669 bp, Homo sapiens
tatcattgtgtgtgttatctgtcaaaaaactggtattcatctcatgggaaagcttagaatagtttcaggtgatttaaactggtcctacaaaaaggtattaaaaattatcctcttctctcacctgtccccaccaccacctctattcctcatgcaaacaagacaacctgctatatgctcaatttttaatgcaaacaaacaaacaaaaaaacttgtctcttttgtctcttctcttcaatctccccascttagcctgcagttcccactgcaatagtcagattcccagagatcagaggggaaccaggcaaatttattatccctcatccccagcctctttaaaggacacacatacatgcaccacagacacatgaatgtgtaaatacacacaaatacacaacccacacacaccagcttccagtcatgccactatgtgtgaattatgactgagatcatcccaaactatgaagattacatgttaaataaggattctaagtacctgaggacatagtcacctactagatgagttagggagcagcattttctccctaaatttttcaagtacatgttctgaacgtggctcctttcccttcagggttccagaagttcagccttgctggtgggcaagaagcaggtatttttctttccaggggacactgagatgcactataatag

SEQ ID NO: 524860 - DNA, 563 bp, Homo sapiens
acagcacggtcacacggcaaggagacaaaggacccatgtgccgccttgacagctctatgtctttatggttccttgtgtctatgtctactctggcccttaccacattgacttttttaaagtctttaagagagatgcactttattcacctttttattcttctaaggccatggacattgtctaaaatatagttgatgttcaatacaaaccctagttagaaaataaattattacagatatatagaaaaacattatattagaaaaatacagaccactcttaatccatcctatgtctattatctattcacagatatcttgatgtgatggtgatggtcacgataactgccttccatcttagtgcatgctyatctctcagtcctagaatgatattctttcagcttggatgttacttcctcagggaagcctcttatgcatccccagaactgggtcagatttccctcttagtggactctcagaaattacatacaattcacttctatgtaatttcctgttgacttgctgtcttctccaccagaatgaaagctttccaagtcttgattaacactg

SEQ ID NO: 524861 - DNA, 613 bp, Homo sapiens
atgggctctcagggtgaatagttcgggactcttcgcctacgctgatggctggctctttactctctttcagctccagtctgtggacaatctggtaagtccttattttctttgctcctttatgtctctagataccctaataactatattttatctcaaatacttacaagagtccctgttgtccatttcatccttttcctgagtgctgcagggatgtagagacatcagctcgtgtggtgacyctgaccctaagaaccaggctatttgggggtgactctcttaaaccaaaactgccattgtgctggctaaacatggcagggcctgggatatgtgtcacagcgtccacaggaagaggagctgtcaccccgcctgatgtgggattctagccaagcctgatggaatgcatagcatcccaagaggaaaagggtagaaataagccaatacttcagagggggaggctggggctccagcagcttttccactaaccatgtgtaacaaatttatccccaacttctgcatcccatggagacacacttctctgttaatagctcaaattatgatgactctgagtctccatctatcctactggtcagcaaaaagtcccatcctctatagg

SEQ ID NO: 524862 - DNA, 511 bp, Homo sapiens
tgttgtggctgggaagctgggctggctgtccactgaatactgtttattagtggaaccactcataggtcaaagggcaggtttgttgatattgttgaggagggaaggataatatcagaaatgtcaccagccactcctagccaatggctcctctgtgcccaaaatcatagatgaaaataaacggaaatcatgatcagtgttgctgttgttctactacctgcatgttctctgtcaattctgtggtacctgtgtctgaggtctgaatttggtttacctggggaccaagaatacatatgggaaagtaccacgccccactctccactctctgtccctctstcatgctttttgctctttagcgcatcactacagggcacggtataaatttatttatttgtttatggcttgtctcccctccctgggttataaactcaagagccgggactttaacgtcttgttcactcttgggtcttcaagggttaggtcaatgcccagcacagggcagcctcagtaaata

SEQ ID NO: 524863 - DNA, 553 bp, Homo sapiens
tttttttaaaaagaacagtctcactctatatagacctattgaaactctgattaaaccattcaggctttccagttccctactggctgctgactttctccaaatcctctttctcctctgccgctctccctgggtatctcactctcccgcatgttacagtgttccagggwttattatgtgtttctgtgtctcacaggctccctcccgctccaggcccaggagagtcctcccattccatctgccctgcccaggtggagcttcagtcgttgtatgttgatggtgaggattcccttctaggaagctgttcctggcctcagccatggaaagataatgcgctttcagccctgggaaatgcccctggactccctaaagtgtcccaaatccagatattcccagataattgttccattatgtgtccaagaagagtggagatgatgcttaggaagaggcatctgtagcactttaatactaacaggaacagccttgaaaatgtcttttctttccagtacaccccaaaaagggagatttggtatactctgagatccagactactcag

SEQ ID NO: 524864 - DNA, 586 bp, Homo sapiens
ggaaagatcagctctaaggatgaagaaagttaagagaatgaaaagttacgagaacgtcctactcatgtgatttctcccttgtccaaagtcccaggcccagtgcagtccttgcggcmcctggaatgatcaactcattccagctttctaattcttctcatgcatatgcattcactcccaggaatactcattcgtctactctgatgttgggatggaatggcctctgaaagacttcactaaaatgaccaggatccacagttaagagaagaccctgtagtatttgctgtgggcctgacctaatgtattccctagggtctgctttagagaagggggataaagagagagaaggactgttatgaaaaacagaagcacaaattttggtgaattgggatttgcagagatgaaaaagactgggtgacctggatctctgcttaatacatctacaaccattgtctcactggagactcacttgcatcagtttgtttaactgtgagtggctgcacaggcactgtgcaaacaatgaaaagccccttcacttctgcctgcacagcttacactgtcaggattcagttgcagattaaagaaccca

SEQ ID NO: 524865 - DNA, 586 bp, Homo sapiens
ggaaagatcagctctaaggatgaagaaagttaagagaatgaaaagttacgagaacgtcctactcatgtgatttctcccttgtccaaagtcccaggcccagtgcagtccttgcggcccctggaatgatcaactcattccagctttctaattcttctcatgcatatgcattcactcccaggaatactcattcgtctactctgatgttgggatggaatggcctctgaaagacttcactaaaatgaccaggatccacagttaagagaagaccctgtagtatttgctgtgggcctgacctaatgyattccctagggtctgctttagagaagggggataaagagagagaaggactgttatgaaaaacagaagcacaaattttggtgaattgggatttgcagagatgaaaaagactgggtgacctggatctctgcttaatacatctacaaccattgtctcactggagactcacttgcatcagtttgtttaactgtgagtggctgcacaggcactgtgcaaacaatgaaaagccccttcacttctgcctgcacagcttacactgtcaggattcagttgcagattaaagaaccca

SEQ ID NO: 524866 - DNA, 550 bp, Homo sapiens
ctgggagtgattctaattagtttctctcttggtagatcaaaatctgtaggcaacaatggccttggaaaaataaagttgagataataacaagtccttggtataacgtaggggaagaattcaaagatttatagagatgggattgtggcagtggatatatcgatatatcacacatgttccattcacatgtaccctatatctcttaaaagggtatttccacagarcgttgaaaaatacattagtgataaaagtatcagcacctttggaaagtataacagaaataggtcaaggacaaaggtgaagacattgcctcacaagtaggctccctgataatgatggagtctcagagtagcagagacaaaagaaggcatggctacaataatgagaaaatggtaatgacaatactatgactgaaaacaactttgcggccaggagcggtggctcatgcctgtaatcccagcgctttgggaggccgaggtgggcggatcacaaggtcagcagatcgagacaatcctggctaacacggtgaaaccccgtctctactaaaaaatac

SEQ ID NO: 524867 - DNA, 529 bp, Homo sapiens
ataaccaacacctgctttataaacgaaaaaactggggtcagaattttgcaaaaattttcccagtcacacagacagtgacagagctaagattcagtttcacgtctgtccaattccaaaacctatrctcgtatttattatttatgtatttatttttgagacggggtctcactctgtcacccaggctggagtgcagtggcacaatatcggctcactgcaacttccacttcctgagctcaagagatcctcccagctcagcctcccaagtagctggaactacaggcacatgccaccacacctggctaattttttatttttttactttttgtagggatgggtttttgccatattgcccaggctgatcttgaactcctgggctcaggcaatccacccacctcaacctcccaaagtgctaggattacaggcatgggccaacatgcccagcccaaaacctatgttctttccatataacaagctttctccattgccaaggatcagcgtctgaataaacaaggccaatgctgtattgaga

SEQ ID NO: 524868 - DNA, 440 bp, Homo sapiens
agaagtaaaaaatgatttgtgttataatgacaaaaagttctgagttatcaaatttttatttctcagtgttggcatttatctttaacaattttcccaacttttcattttgccagttcacctcagacagtctgtaccattgtttgttgaaactcttttccatcttgactaaatcatgtctggcctggcagttgctgttcacataaaattggggaccgagcgaaaaaaaactgaagtgataataactccttcttgaagaaagtacctggagttttccataattggttttcttgcaaaaaaaaaaaaataaatctcttcaattttccccctcacttctactgtacaccgcagcctgtattttcaatcaagcaaccrtatacgacttgctttcatacataccctttcaagagttttctgtccagtaccatgatcattcatactgt

SEQ ID NO: 524869 - DNA, 440 bp, Homo sapiens
agaagtaaaaaatgatttgtgttataatgacaaaaagttctgagttatcaaatttttatttctcagtgttggcatttatctttaacaattttcccaacttttcattttgccagttcacctcagacagtctgtaccattgtttgttgaaactcttttccatcttgactaaatcatgtctggcctggcagttgctgttcacataaaattggggaccgagcgaaaaaaaactgaagtgataataactccttcttgaagaaagtacctggagttttccataattggttttcttgcaaaaaaaaaaaaataaatctcttcaattttccccctcacttctactgtacaccgcagcctgtattttcaatcaagcaaccayatacgacttgctttcatacataccctttcaagagttttctgtccagtaccatgatcattcatactgt

SEQ ID NO: 524870 - DNA, 628 bp, Homo sapiens
ttctctttcctttctctctcccgcccgtgtggggaaacaggtgaaactttcctcttacatcatgtaaaacagggctactcccattcaggatccattcaggatctcagcttctasttcaggtcaaggtttttctagggatcaaattggggggtccctgaagggatttctggtagacacaatttaacattttcagcatactttctacacgtcaggcagtgtgctgagagttttccaagcacttaatctttaagatcctcccacaacaccgcaagatcttattttcccatttcattcatgggaaaaaggagcatcattagagtaagcctcagaccagaagacttctgctattgggtaaaagaggaaccccaactcttgtctgccaaaagaccaaggttatgttaactacaatgccacttggcttcctggggctgagaaacactggtgaattagcaaaggggactcttacaggggaattgcctctctccttagtacctgcacgtcgtctttctcaaggctgtttgatataggtactacctgcatcctcatctctgctgaatgattaagcccaagcccatttactgggaggtacgttgcagtacagaaagctccacaggattaataccttatt

SEQ ID NO: 524871 - DNA, 628 bp, Homo sapiens
ttctctttcctttctctctcccgcccgtgtggggaaacaggtgaaactttcctcttacatcatgtaaaacagggctactcccattcaggatccattcaggatctcagcttctagttcaggtcaaggtttttctagggatcaaattggggrgtccctgaagggatttctggtagacacaatttaacattttcagcatactttctacacgtcaggcagtgtgctgagagttttccaagcacttaatctttaagatcctcccacaacaccgcaagatcttattttcccatttcattcatgggaaaaaggagcatcattagagtaagcctcagaccagaagacttctgctattgggtaaaagaggaaccccaactcttgtctgccaaaagaccaaggttatgttaactacaatgccacttggcttcctggggctgagaaacactggtgaattagcaaaggggactcttacaggggaattgcctctctccttagtacctgcacgtcgtctttctcaaggctgtttgatataggtactacctgcatcctcatctctgctgaatgattaagcccaagcccatttactgggaggtacgttgcagtacagaaagctccacaggattaataccttatt

SEQ ID NO: 524872 - DNA, 593 bp, Homo sapiens
cagctgtgtaggtatgtttcagtacagaaagttacataggtttagaagtaggcaattcaagaattaatttgaaatatttcttcatttctttgtttcattattaaacactttattatttgtttcagtatgtgaacattcacctggcagtttgattcagcattaaccaagttggctccttagctaaataagtttgggaaaaaatgaattacataaggtccctttgtgggacatttcaaggtctttattatgctaatattagtttagttcctaragaaggatagtaaacagatcccagaatccttgtttctgaaagtttactgcaaaactcacagcaaacactgctttgatggatggtttcagtcaccctatgttcttctatgaaatataagtcttagaagtcatagaagagactgaaggaaatccagatccccagactctaataccccatttctgctctgacatcttcatggttatctcagccctcaacctgttctcagggacagcccagctttgtccctaacttagtgggttgccctgccttaagcatatgcctagtctaaaagctccaacatgcaggcatctcccaattcagg

SEQ ID NO: 524873 - DNA, 593 bp, Homo sapiens
cagctgtgtaggtatgtttcagtacagaaagttacataggtttagaagtaggcaattcaagaattaatttgaaatatttcttcatttctttgtttcattattaaacactttattatttgtttcagtatgtgaacattcacctggcagtttgattcagcattaaccaagttggctccttagctaaataagtttgggaaaaaatgaattacataaggtccctttgtgggacatttcaaggtctttattatgctaatattagtttagttcctagagaaggatagtaaacagatcccagaatccttgtttctgaaagtttactgcaaaactcacagcaaacactgctttgatggatggtttcagtcaccctatgttcttctatgaaatataagtcttagaagtcatagaagagactgaaggaaatccagatccccagactctaataccccatttctgctctgacatcttcatggttatctcagccctcaacctgttctcagggacagcccagctttgtccctaacttagtgggttgccctgccttaagcrtatgcctagtctaaaagctccaacatgcaggcatctcccaattcagg

SEQ ID NO: 524874 - DNA, 621 bp, Homo sapiens
tttaagtactttagaaatacctacctgtgttcatataatttaggtttaatgactggtccttcacttacgggagaaaggtgactgtttcagaaatcacattacagaggggatggcaccaaccacaccatcccctttctgagatgtcattgctcagatatacatttattatagcctcagaatcaagaacaaaagattctccagtcttttagctatgctgattttagggaaaatgaaacatagattacatatttgggatccataggaaaatmtaaaaatcttgggatgggttcatcatataatctaaaaataaagttgttttctaaaaaaaaatcattatgtgtcaaagttgttataaatgacatagtttcctttccttggattcatctactacagtgtctcctaataggacccattggacagtcactatgttccactgggtgcttcccactccaggagaaactgtatcaaagcctgttgggtgaatacaatgattatccttgtacctggtccccatttctattgcacagatgctcattatccagttgctttgtgacctgggcctgtttttttgacctggatcataattcaaacacacttgccttctcaacaggtgtagaaaca

SEQ ID NO: 524875 - DNA, 585 bp, Homo sapiens
aaaagctaaatctcacttgagggcagtgttaatggaaaaaaagggttttgctttctctgaacaaagtggaagaatttatggtaagtgggaccaagagttccagctgaaaaagccacgcttgtcttacgctggtgacactcagctgagctcagggcaaggcacagcccctcttgatggctggaatgtgctccagctgaatgccttgctgcggggatgagcttagctacctgtgaggacagccagagccmaagatgcagccagcagacgcccatcaagggagcgctttctgcagttagggtgggcagggtcagcctggatcctccaacccctgttcttggagcctggaggagctggagggtagcctcccatgccgaagttcaggcagaagcacagatatgtggatgtgaatataaggaactcctccttggatttcaaagtacatccacaggggatgggtgtttctgcatgaagaaagtcctggaagagtctcacctccattttctgtgtggtttttgataataagcatatgatttttaaggagatgtcctgcctttgaaagacagcctcatggcatccccaacgaca

SEQ ID NO: 524876 - DNA, 459 bp, Homo sapiens
aaattgtgtggagagagctggctaaatgtctaaagagaacaaattttgaaaagcaatttcaaagacttgagaagcgtccttttaatagcagagtttaacagatcaattacaaatcattctttatatttattaaaccctcactacttgttatgtagcaatagcttactgatacagagaaggagtcactaaytggggagatgctgatgcctggttgcaacacagaactgccacgtgctagaagacagcaagtacagggttctattcagaccacttgcttctcatgctctaggaatgagcgtgtgtaggacaggaaagactctttcagagactgtagagcaagaatgggcaaggaaaaatccatggctgaaatgagtaaagccatctcttctcccatctcattttcaagagcttcttgtgaccctaaggctggtgtcctaacattacagaacctcctgccca

SEQ ID NO: 524877 - DNA, 521 bp, Homo sapiens
ggaacagatggaagggagttaatcacactcataattgaaaactgtgcttgtttgacaaaagacttggtttgcagataaaagtgctcagagctccaaacgtgattaaygagaaaagacacactttagcacatcctggtaaaattatgagttaaggataaacagtaaaatgttacttttctaagcagaatagaaaaagataacgttagcatcaaaccgtggcttcattcctgatacaggccaagtccatattccccatgtttctggaactttcaggatccaaaagagagattttgttcctctcctatttggcttcactctgtgtggtagattaaagatgactgcagattctttttcactccctacagagaggtagaatttatttcccctgcctagaatctggggtggcccgaggattgcttaaccaatagaatgtgacggagctgttgctgtgccagttccaagcctagtctgtggagggctagcggcttctgcctcctgcttcttagaatgcttgcacattg

SEQ ID NO: 524878 - DNA, 607 bp, Homo sapiens
ctgggagttgaagcactatgcaagagctaaacagagatgtctgggtaaagtatccacagtggcttataacatctgcccaaaggcctcaaactggccctaatgcaagaagtagaatgaagtgcactaatgaggggtgtgggaactcagtggttgcatactcggaggattctgtgaatgagaaggctgtcttccggctcctgggcttagaattgattgaaaacattaccatcttaaagtggtactagggtggaayacctggtaatctgaatgagccatcttcctgttgatatcaccccggacacattctgttgcaacagggctttggggagttatacttcatgggtttggtggcccatatcaacctattatgaggcaagggctgttatgagccacagcaactgtttatctgcctgtgtaggctcttcaccagaaatctcactcaggagtggttgtcctgagaagctgaaagagagccacgttaagtttctaacagcatccaatgaatgacctccatttagttttgctccaagttatggattgggtggcaaattctttccataatcctgccaattccagagaaataaagatccagattaaagtgaataat

SEQ ID NO: 524879 - DNA, 607 bp, Homo sapiens
ctgggagttgaagcactatgcaagagctaaacagagatgtctgggtaaagtatccacagtggcttataacatctgcccaaaggcctcaaactggccctaatgcaagaagtagaatgaagtgcactaatgaggggtgtgggaactcagtggttgcatactcggaggattctgtgaatgagaaggctgtcttccggctcctgggcttagaattgattgaaaacattaccatcttaaagtggtactagggtggaacacctggtaatctgaatgagccatcttcctgttgatatcaccccggacacattctgttgcaacagggctttggggagttatacttcatgggtttggtggcccatatcaacctattatgaggcaagggctgttatgagccacagcaackgtttatctgcctgtgtaggctcttcaccagaaatctcactcaggagtggttgtcctgagaagctgaaagagagccacgttaagtttctaacagcatccaatgaatgacctccatttagttttgctccaagttatggattgggtggcaaattctttccataatcctgccaattccagagaaataaagatccagattaaagtgaataat

SEQ ID NO: 524880 - DNA, 603 bp, Homo sapiens
gtgtgctcttgccagaaaagacaatatctcacagtcactggtaccatggagttcaccgtgattcaggattaaactctaaatgtgaggaagtctttataaccccttaaataatttttcctgtatattttgcttttctaatrtatgagagtgacagatgacgtaaaaatgttgatatgaatctagttcatttaatagggacaaaatttaatcaatagggataaaaaaatatttttcattgggataaaaattccaactgatatgtttgcatcatgtctgaatgcaaattttttttttccttgagttgtacataaacagcagaatgtcttattattgataactttttagttttgatgaaatacaaaacttcttctagtggccatgttagcctcagtgatttactcaaatgcaggataagggaaaaaaactggatttactggatggattaacaaatggtcctgtgttattcttagtaatttaatagtttctgagggattctttttccagttgcagattggagtgtgtataatggtctgacttaaagtttggtcaagatgaagagggaggcgtgggaaagctgctgcggctggcagcatgggggcagtt

SEQ ID NO: 524881 - DNA, 603 bp, Homo sapiens
gtgtgctcttgccagaaaagacaatatctcacagtcactggtaccatggagttcaccgtgattcaggattaaactctaaatgtgaggaagtctttataaccccttaaataatttttcctgtatattttgcttttctaatgtatgagagtgacagatgacrtaaaaatgttgatatgaatctagttcatttaatagggacaaaatttaatcaatagggataaaaaaatatttttcattgggataaaaattccaactgatatgtttgcatcatgtctgaatgcaaattttttttttccttgagttgtacataaacagcagaatgtcttattattgataactttttagttttgatgaaatacaaaacttcttctagtggccatgttagcctcagtgatttactcaaatgcaggataagggaaaaaaactggatttactggatggattaacaaatggtcctgtgttattcttagtaatttaatagtttctgagggattctttttccagttgcagattggagtgtgtataatggtctgacttaaagtttggtcaagatgaagagggaggcgtgggaaagctgctgcggctggcagcatgggggcagtt

SEQ ID NO: 524882 - DNA, 603 bp, Homo sapiens
gtgtgctcttgccagaaaagacaatatctcacagtcactggtaccatggagttcaccgtgattcaggattaaactctaaatgtgaggaagtctttataaccccttaaataatttttcctgtatattttgcttttctaatgtatgagagtgacagatgacgtaaaaatgttkatatgaatctagttcatttaatagggacaaaatttaatcaatagggataaaaaaatatttttcattgggataaaaattccaactgatatgtttgcatcatgtctgaatgcaaattttttttttccttgagttgtacataaacagcagaatgtcttattattgataactttttagttttgatgaaatacaaaacttcttctagtggccatgttagcctcagtgatttactcaaatgcaggataagggaaaaaaactggatttactggatggattaacaaatggtcctgtgttattcttagtaatttaatagtttctgagggattctttttccagttgcagattggagtgtgtataatggtctgacttaaagtttggtcaagatgaagagggaggcgtgggaaagctgctgcggctggcagcatgggggcagtt

SEQ ID NO: 524883 - DNA, 603 bp, Homo sapiens
gtgtgctcttgccagaaaagacaatatctcacagtcactggtaccatggagttcaccgtgattcaggattaaactctaaatgtgaggaagtctttataaccccttaaataatttttcctgtatattttgcttttctaatgtatgagagtgacagatgacgtaaaaatgttgatatgaatctagttcatttaatagggacaaaatttaatcaatagggataaaaaaatatttttcattgggataaaaattccaactgatatgtttgcatcatgtctgaatgcaaattttttttttccttgagttgtacataaacagcrgaatgtcttattattgataactttttagttttgatgaaatacaaaacttcttctagtggccatgttagcctcagtgatttactcaaatgcaggataagggaaaaaaactggatttactggatggattaacaaatggtcctgtgttattcttagtaatttaatagtttctgagggattctttttccagttgcagattggagtgtgtataatggtctgacttaaagtttggtcaagatgaagagggaggcgtgggaaagctgctgcggctggcagcatgggggcagtt

SEQ ID NO: 524884 - DNA, 475 bp, Homo sapiens
ctaagccagaagaaaatgaggccaaagaatgaataagacacacagctaaaacaaatcaaactgtagcaagccttctctcacactctcctttctacctggttgaatcaatggatgaacatgtcacatcctcttttctcagttgccaagagttggtttatatgttcttacttataatgtattttgttagttttgcttttggctttcctgtccaaaatcactgtcccttcwctttacccacaaacgtgtaggctttctccatctgccccacatcccttctaaactcagtgatgacctaataaagatttacacacaaaggtgtcaatgacacatgatgttagaaaaggttactgcctcagggtcacccccatcatgttggtccctgccaactgatattaataatagggccttgaccctccaaccctacctgctaatgactaagacactctatacggagcccactaaatatgtacagcca

SEQ ID NO: 524885 - DNA, 475 bp, Homo sapiens
ctaagccagaagaaaatgaggccaaagaatgaataagacacacagctaaaacaaatcaaactgtagcaagccttctctcacactctcctttctacctggttgaatcaatggatgaacatgtcacatcctcttttctcagttgccaagagttggtttatatgttcttacttataatgtattttgttagttttgcttttggctttcctgtccaaaatcactgtcccttcactttacccacaaacgtgtaggctttctccatctgccccacatcccttctaaactcagtgatgacctaataaagatttacacacaaaggtgtcaatgacacwtgatgttagaaaaggttactgcctcagggtcacccccatcatgttggtccctgccaactgatattaataatagggccttgaccctccaaccctacctgctaatgactaagacactctatacggagcccactaaatatgtacagcca

SEQ ID NO: 524886 - DNA, 488 bp, Homo sapiens
gtggcagtttgacagaattgcaagcaaagtggaagaaaatcaagaacttgcacctycacggattttgttttgacagaatgttacatatagagatacaaatatttttaaaagttatcatctgtccaacagtttttttggggggtttttcacttctttcttcaaattccatgttactaattttctcagaatctttgtaaagagatatcaaggtaaatgtaaattatacagttgtagactggggagaggcgctaacctaagaaaacttccctggtggtaaataagaactattttttgaataaatgctttttattatttcttattatatattttgaataaatgcactcgtaatattccagggaaatgcgtaggttgaacaacataaaatcgacatctctaggatcaaagctacttcttttggaattgtatgaaacacaaaggatgtttcatgaactttctcagccccaccactcacatccttgcccaattct

SEQ ID NO: 524887 - DNA, 463 bp, Homo sapiens
aaagtggaagaaaatcaagaacttgcacctccacggattttgttttgacagaatgttacatatagagatacaaatatttttaaaagttatcatctgtccaacagtttttttggggggtttttcacttctttcttcaaattccatgttactaattttctcagaatctttgtaaagagatatcaaggtaaatgtaaattatacagttgtagactggggagaggcrctaacctaagaaaacttccctggtggtaaataagaactattttttgaataaatgctttttattatttcttattatatattttgaataaatgcactcgtaatattccagggaaatgcgtaggttgaacaacataaaatcgacatctctaggatcaaagctacttcttttggaattgtatgaaacacaaaggatgtttcatgaactttctcagccccaccactcacatccttgcccaattct

SEQ ID NO: 524888 - DNA, 463 bp, Homo sapiens
aaagtggaagaaaatcaagaacttgcacctccacggattttgttttgacagaatgttacatatagagatacaaatatttttaaaagttatcatctgtccaacagtttttttggggggtttttcacttctttcttcaaattccatgttactaattttctcagaatctttgtaaagagatatcaaggtaaatgtaaattatacagttgtagactggggagaggcgctaacctaagaaaacttccctggtggtaaataagaactattttttgaawaaatgctttttattatttcttattatatattttgaataaatgcactcgtaatattccagggaaatgcgtaggttgaacaacataaaatcgacatctctaggatcaaagctacttcttttggaattgtatgaaacacaaaggatgtttcatgaactttctcagccccaccactcacatccttgcccaattct

SEQ ID NO: 524889 - DNA, 463 bp, Homo sapiens
aaagtggaagaaaatcaagaacttgcacctccacggattttgttttgacagaatgttacatatagagatacaaatatttttaaaagttatcatctgtccaacagtttttttggggggtttttcacttctttcttcaaattccatgttactaattttctcagaatctttgtaaagagatatcaaggtaaatgtaaattatacagttgtagactggggagaggcgctaacctaagaaaacttccctggtggtaaataagaactattttttgaataaatgctttttattatttcttattatatattttgaataaatgcactcgtartattccagggaaatgcgtaggttgaacaacataaaatcgacatctctaggatcaaagctacttcttttggaattgtatgaaacacaaaggatgtttcatgaactttctcagccccaccactcacatccttgcccaattct

SEQ ID NO: 524890 - DNA, 463 bp, Homo sapiens
aaagtggaagaaaatcaagaacttgcacctccacggattttgttttgacagaatgttacatatagagatacaaatatttttaaaagttatcatctgtccaacagtttttttggggggtttttcacttctttcttcaaattccatgttactaattttctcagaatctttgtaaagagatatcaaggtaaatgtaaattatacagttgtagactggggagaggcgctaacctaagaaaacttccctggtggtaaataagaactattttttgaataaatgctttttattatttcttattatatattttgaataaatgcactcgtaatattccagggaaatgcgtaggttgaacaacataaaatcgacatctctaggatcaaagctacttcttttggaattgtatgaaacacraaggatgtttcatgaactttctcagccccaccactcacatccttgcccaattct

SEQ ID NO: 524891 - DNA, 571 bp, Homo sapiens
tggctctgtccacgggtgaactgggcagagagtatygcatcctcccacccccacgagcagggatggacaagcctgggtcaaagatggctcaaggatggacacctgacccaggccaagttcatcagagtcaataccactcagtcccagaattccttttggaagtcttttgagaggcaactctctctgctggggttattaggagctttggacatacctggagctccagaccaccatctttctgggaaagtgcctgcctgaaaaggagacaacacagagaaaggcactatttgaacacctggacacagccttgcctgaatgaagccatctactctgcacatttcagttacatgagctaatgtttatttttctgttgggctggtttgattaggttttctgtcacttgcaacctagagtctcactcatacccaaaggcaaaacacacatagttgcttttgaagttgctccagtagccacacctcccagatttgcccttggtgttctgcagatggctgtgagctggccctcctgcccaacaagtcaggctcctttggggggcctggggcaaatcatc

SEQ ID NO: 524892 - DNA, 440 bp, Homo sapiens
ccatagtcagctctagagcaatggaatacctgtgtgtatgataacctgaatgataargccatttctttttaagactttaagcctattgctttctctttcagcccctagatcagtgtcctttctaattgaacacatatcccttctgtcttccctcaaattgttgtctctcttagaaatggaataatgtgagaatgctggccactataggtgatatgtctgacttcatcttctgttatttttattatctttctttgaaggcttcaaaaagaaatgctatcttgtacatggtaagcctcaggctggtgaatgccatttcaggctcatgggaaggaatttgtttcttgtcttgaaccctttttgctcctgccggaggctggatttatttacgatgttatgcactaaccacaggtctgtaatacatttgaaaataggaacgccct

SEQ ID NO: 524893 - DNA, 440 bp, Homo sapiens
ccatagtcagctctagagcaatggaatacctgtgtgtatgataacctgaatgataaggccatttctttttaagactttaagcctattgctytctctttcagcccctagatcagtgtcctttctaattgaacacatatcccttctgtcttccctcaaattgttgtctctcttagaaatggaataatgtgagaatgctggccactataggtgatatgtctgacttcatcttctgttatttttattatctttctttgaaggcttcaaaaagaaatgctatcttgtacatggtaagcctcaggctggtgaatgccatttcaggctcatgggaaggaatttgtttcttgtcttgaaccctttttgctcctgccggaggctggatttatttacgatgttatgcactaaccacaggtctgtaatacatttgaaaataggaacgccct

SEQ ID NO: 524894 - DNA, 647 bp, Homo sapiens
acagggcagggccattggatccatttgttctgaaccatctactcataaataccatttatgaaattaagttcttacactatgactggagtttggaaagaaatggagggaggaagttggaaaggaatattctcataagggatgagggtgagctgtctgggaaatcatgttcttcatgtgagaaaacgaaataattgtccacacatgttcacacacataagagcaatttacccctttaggactgtgttctattttcatccatcccctcaatgacatacctgatgctctttatctaattgatgacatgtcagtcttaggatgtttcacaccttctttcatgagtagggtagtgttagaacagttagaatggaaattctttaccttcccattatttgcaaaacaggctttacttgggatcttacctatacatctggttggcccaaaatggtgttggcttrtgtctgttgtcatggaatacttgttaatagcatcccctttccctgtgaaaaggccatggtttgaatgttaaatgatagaggcaccgcagctttgccatgctggtaccaagatgtcctaattacatggaccaagatgttgactttaaagtattttttggcctgtgtctataaagagctcatgacatcacaaac

SEQ ID NO: 524895 - DNA, 597 bp, Homo sapiens
ctggctttgttgtctcacaggccaaagcaatatatggccttgacctaagcatgctttcaaagaagggactgtggaagccgtagaacagaaggtctcccttcccctcctcctgtctctcattatctttgactacacaaatggattcaataaatatctgtcaagtaaacaactcccaagtccccggagccagaagtgggacagcatgagggaacatgcccgmggggcacagatcctcatgcctggtttctttctcccagtttctgttccttccccaccttcttactgcatatccacactctcaagaggacagtacgttacaatgataaatgattcccaacttgtttgatagcagagctctgttctcaaggaatcccaattagaatctcatggattttttccaacacactttgagaaatgctggcataacatagaatcgtaaagtgtgaggcagtactggttggtcttttgtaggattccctccatttacaagtgagggaactgaggtctagagaggtttagtgaaaagccagaatcacccatccagttaccacagagcacactccatgtgttggcctttctactaacccaggccaccta

SEQ ID NO: 524896 - DNA, 615 bp, Homo sapiens
agttcgacagcaaatgaaatactgaggctaatgcctgcaggtttcgagctcaaagctcttctccaatgcccaagattttrcaagtaggcttgaggaatacattgttcagagatctattccattctcaactcctttatgtaaacactgccctactgaagtagagaaactagaataatgcttaaaattattttcaccagtgaatttcttctgactcatagagcctcgctacttaaagttgtggtctttggaccatgggcatcagcatcacctggagtctgttagacatgcaacatcgcaggccccactccagatctgctgcctcaggatctgcattggaacaggattggcatccccaggtgactattatgcactttgaagtatagaggaaagcacttcaactttttcaagagaaacagtatattttgtgactgcagatcacatgggcatagaagtttagatgaaataatccaaagacacgggattctgatttttcaggtgatctgttaatccctgaagtgcatctggaggttagcccatcggttctgcaaatcttcataatttccatagttactgtagtaaccatggttagtatctttcctttgtccagcaggtggg

SEQ ID NO: 524897 - DNA, 615 bp, Homo sapiens
agttcgacagcaaatgaaatactgaggctaatgcctgcaggtttcgagctcaaagctcttctccaatgcccaagattttgcaagtaggcttgaggaatacattgttcagagatctattccattctcaactcctttatgtaaacactgccctactgaagtagagaaactagaataatgcttaaaattattttcaccagtgaatttcttctgactcatagagcctcgctacttaaagttgtggtctttggaccatgggcatcrgcatcacctggagtctgttagacatgcaacatcgcaggccccactccagatctgctgcctcaggatctgcattggaacaggattggcatccccaggtgactattatgcactttgaagtatagaggaaagcacttcaactttttcaagagaaacagtatattttgtgactgcagatcacatgggcatagaagtttagatgaaataatccaaagacacgggattctgatttttcaggtgatctgttaatccctgaagtgcatctggaggttagcccatcggttctgcaaatcttcataatttccatagttactgtagtaaccatggttagtatctttcctttgtccagcaggtggg

SEQ ID NO: 524898 - DNA, 615 bp, Homo sapiens
agttcgacagcaaatgaaatactgaggctaatgcctgcaggtttcgagctcaaagctcttctccaatgcccaagattttgcaagtaggcttgaggaatacattgttcagagatctattccattctcaactcctttatgtaaacactgccctactgaagtagagaaactagaataatgcttaaaattattttcaccagtgaatttcttctgactcatagagcctcgctacttaaagttgtggtctttggaccatgggcatcagcatcacctggagtctgttagacatgcaacatcgcaggccccactccagatctgctgcctcaggatctgcattggaacaggattggcatccccaggtgactattatgcactttgaagtatagaggaaagcacttcaactttttcaagagaaacagtatattttgtgactgcagatcacatgggcatagaagtttagatgaaataatccaaagacaygggattctgatttttcaggtgatctgttaatccctgaagtgcatctggaggttagcccatcggttctgcaaatcttcataatttccatagttactgtagtaaccatggttagtatctttcctttgtccagcaggtggg

SEQ ID NO: 524899 - DNA, 524 bp, Homo sapiens
aaagtcccaaagttaaaaaggtggaggttttttgggaactcagagtgggtgtatgacctctagtcagcacatggctgtttggctctctattttaaatttaggccattagcatttscggattcatcttgaaggattggctctttgaggttcacatttgttcacaagggtttctatgattgtatatgattgatatcacaccatttattatcaaaaacgttttctaagtctatctttcaaaattcaccagtttcaccacagaaacgatccataatttcagggttacaatgtttcatctaaaatgtccatcttttgttggcctactcttctaaaagcccaggccaaatgtcactcactgtaaaaacctcactaatcttctttctcccaagccaaattcatcctttccttaaatgtccactgatctttgacaaaggagcaagggcaatataatggaggaaagatagtcttttcaataagtaatgtaggaacgtctggacatccacgtacaaaaagaatggatctaattc

SEQ ID NO: 524900 - DNA, 616 bp, Homo sapiens
cttaatgttactcttttccacttatgaaggtaaacaaaactgagcatctttactatatatataaatctaaaatacatatcataatgtgtatataggyatatacatattatgtgctgtatataaatatatgttaaagtatttttcatttgaaagcaaaaaactctttaattttctggtgtgtctttgtagtaggttagcattttatatcagcattgctttgggagctcaattgaatttcctttgaaattcctatgtgtcatataacctgaagaggatcacaaatgtgagaaacatttgtggtcatagaggactttcatggcacattaaatatgtgcatgtgggtgggagagagagaaaagagaaagagtgtgtgattttgcttatgtggatatctttgcattgacttactatatgttatttttattttttaatcctatagagtctgatcttttgccagtcatgttttctttgtgtggctttttaaaattttaattttttaacatttactttcatgggtacatgtgcaggtttgttgtattcataaatagcataccacagggatttgatgtgcagattatttcatcatccaggtaataagcataatactcaataggta

SEQ ID NO: 524901 - DNA, 643 bp, Homo sapiens
caaacaaacatgtattttctaataaacctgcttctgttcaaggttctaacattctggaagctgaatccaatgcctgcrttgacattccttgggtcacttaccttatccaaccacaccagtttgtattttgtgtgatctgcattaaagtaatgttattaacttggtacgtcactgcagttcgaagtcatcatttcagcagtaaacatgaatgcattaggctgtttaggaccagttttcaccagcaactctctgtggcgcccacagatacaatggcagtgactagcaggtcatgcaacagtatagattaggtttttgtcctcttcacatttagcaatggattttctaatttgatagtaagcctgcaagtacatggaaaatttgaaggtggggagaagcaaaagaccttataaaacagtagattcgctcttattttatagaaatgtaactttaagcaaatattttttttaaatttcattatttttatttttattatactttaagttttagggtacatgtgcacaacgtgcaggttagttgcatatgtatacgtgtgccatgttggtgtgctgtacccattaactcgtcatttaacattaggtatatttcctaatgctatccctgccccctccccacaccccacaac

SEQ ID NO: 524902 - DNA, 643 bp, Homo sapiens
caaacaaacatgtattttctaataaacctgcttctgttcaaggttctaacattctggaagctgaatccaatgcctgcattgacattccttgggtcacttaccttatccaaccacaccagtttgtattttgtgtgatctgcattaaagtaatgttattaacttggtacgtcactgcagttcgaagtcatcatttcagcagtaaacatgaatgcattaggctgtttaggaccagttttcaccagcaactctctgtggcgcccacagatacaatggcagtgactagcaggtcatgcaacagtatagattaggtttttgtcctcttcacatttagcaatggattttctaatttgatagtaagcctgcaagtacatggaaaatttgaaggtggggagaagcaaaagaccttataaaacagtagattcgctcttattttatagaaatgtaactttaagcaaatawtttttttaaatttcattatttttatttttattatactttaagttttagggtacatgtgcacaacgtgcaggttagttgcatatgtatacgtgtgccatgttggtgtgctgtacccattaactcgtcatttaacattaggtatatttcctaatgctatccctgccccctccccacaccccacaac

SEQ ID NO: 524903 - DNA, 571 bp, Homo sapiens
actacaattttaaagatataagtattatcctgtgataaatctatcaacagaacagcttatggcttgtgataaaaatttagagtaagcataagacaaaattatgtctggactgggagctaaaaactccacttgtgttayacaaagttgagaatttaaagcaagcttgactcataagatctttaaactataagtagtgatgatgaggctgtcagtggaaaagactagcacatataaaaatatccctgcttcaatattatttctattgtcaaaatgggatttataaaaatgttcatttatgaccaattacttacaaatcacatcttcttggtaaaatagcaacttaaattttcattaacaaatgactaaatcagaattagaactaaaatccatttgcatttttcaaaccatattggggtagttcatgtggtggccacaaaccaaccccaaatctttgtagcctggaacaagggtatacttcttgctcacactgaatattcattttgactttgttggtgttctgttttatgttaagctcactcatggaagccaactgagtcatcataaagagcag

SEQ ID NO: 524904 - DNA, 571 bp, Homo sapiens
actacaattttaaagatataagtattatcctgtgataaatctatcaacagaacagcttatggcttgtgataaaaatttagagtaagcataagacaaaattatgtctggactgggagctaaaaactccacttgtgttatacaaagttgagaatttaaagcaagcttgactcataagatctttaaactataagtagtgatgatgaggctgtcagtggaaaagactagcacatataaaaatatccctgcttcaatattatttctattgtcaaaatgggatttataaaaatgttcatttatgaccaattacttacaaatcacatcttcttggtaaaatagcaacttaaatttycattaacaaatgactaaatcagaattagaactaaaatccatttgcatttttcaaaccatattggggtagttcatgtggtggccacaaaccaaccccaaatctttgtagcctggaacaagggtatacttcttgctcacactgaatattcattttgactttgttggtgttctgttttatgttaagctcactcatggaagccaactgagtcatcataaagagcag

SEQ ID NO: 524905 - DNA, 640 bp, Homo sapiens
ttttccaaaacaacatgtgcgcattcatcacatattcaattccatattcaattccaagaaaccattcagtatattcccttgcatgcattattctcaattcctcttcttttgtgtatgtatatgtgttagccattttttatttccacccttaagttaccaattatataaatggaaaacgtgcttttccttayaaaattaatattttaatataggaggctttcaaggttcctgaccttgaaagaggttttcttttccgacttctactttaaatcaaatatgtcttttcctataggatacaagtggcttcacttagaagattctgaattacgttgaggttccacttttttattttatttttaaatctactttttttcagtgtaaagccagagattcttaaaaatcaataagcaaattctacataggtggggataatctgtagaacttagtgcatttcgtaagtgtactaacaaaaagattaatactgacttccatacacataagaagcattaaaggaagcctggttatcttttgagacgaagtctcgctctgtcacccaggctggagtgcagtggcgcaatcttggctcaccgcaacctccgccttccaggttcaagggattcgcatgcctcagcctcccgag

SEQ ID NO: 524906 - DNA, 526 bp, Homo sapiens
gaagataattctggattaaaaatgtaccaaggtatacaaatacactgagtcagctcaataataatttccgtattagagatttctccctattcccacttttaagtcagttcctaaacatctctgagatcttaccttctaaagaaatttagtactcccgtgtttacccactgccctactaacctatatgttgcttattctagtgtcaacacatatcatcagctacttctacaacggtgttaaggaattaaaaggctattcttttattctactgctcctttccattggcctataaaaatrctctaatcccttatctttaaaaataccttttcctgaccttgtactgttctttagctataccacttttccttgttttccttcagaggcaagacccttttgtattttaaaactaattatttttttaattataaaaatgatgtatgttaaatgtgaaaaatcagaaaattgataaccaaaaggaaggaagtaaaagaatggacttttattatacttagggataatcactttg

SEQ ID NO: 524907 - DNA, 344 bp, Homo sapiens
aaaaacttggatagtcattgtcaagaaaaaggctgctgaggcagagtccgtatccttaagaaacttaaaatctaaaaaaaaaaaaaaaaaaagaaagrcacttaaaatctagtatagatatcagataagtaaacaaataaaaaaccaatacagtgctatttggtaaatgccacactagaactgtagaaaatgtcacaggagttacttgtagaagaagagcatcctaagaaaacttgtaaggggggggggatgaatataaggcccaaaaaagacatgaaagacatccattactcaaaatggaaaaaaaaaaacaaaacaaaatattaacacaaacacactgatat

SEQ ID NO: 524908 - DNA, 631 bp, Homo sapiens
cggtggctcacacctgtaatcctagcattttgggagactgaggtaggaggatggcttaagctcaggagaccagtctggagaacttggtctctacaaaaaaaaaaaaaaaaaattaattgggcatggtggtgcatgcctgtagtcccagctactcaggtggctgaggtgggaggattgtttaagcccatttggtccaagctgcagtgagccaagattgtgccactgcattccagcatgggcaacagagtgagaygctgtctcaaaaaaaaaaaaaaaaaaaaaagaaagaaagaaaacaatactcatcactcccactccctgactacataaatctgaaccactggggagaagaatgagatgagaattggcttggagaacgagaattaaggaagcagaaaaattgcttttgaggagaattgatgagggtcttgtgtcactagaggtgggaaaagccgttctcaattgtcaccatgcttcagagtcacctggggagttttaaaaacatgccgatgcctgggttccaccccagaatttctgacttcattggtctgggtggggcctgagcactggactgttaaagctcgtcaagtgatgctagtttgcagccaggatagaggagccttgagttagc

SEQ ID NO: 524909 - DNA, 662 bp, Homo sapiens
tttaataagatagaagaaaagagcacattggaccttaagtaagtgtaagaaaagraatagaaagttaagagaataggccaggcatggtggctcacacctgtaatcccagcactttgggaggctgaggtgggcggatcaccggaggtcgggagttcaagaccagcctgaccaacatggagaaaccccgtctctaccaaaaatacaaaattagctgggcatggtggcacatgcatgtaatcccagctactcgggaggctgaggcaggagaatcgcttgaacccgggagatggaggttacagtgagcactccagcctgggcaacaggagtgatacttaatctcaaaagaaaaaaagaaaaaaagttcaggagttcaagactagcctgagcaacatagtgagatctcatctctaaaaaaaatttagggccggtggctcacacctgtaatccagcactttgagaggctgaggcaggaggatcacaaggtcaggagtttgagagcagcctggctaacatggtgaaaccccatctctactaaaaatacaaaaattagctaggcacaatggctggcgcctgtaatcccagctacttgggaggctgaggcaggagaatttcttgaacccaggaggcagaggttgcagtgagctgagatcgtgccttgcact

SEQ ID NO: 524910 - DNA, 616 bp, Homo sapiens
ggtagatgtctggatacatggcaaaaccagagcacagcaaatccatctagtcctggatagagggcggggcagggaggaggaagcagcatccccctgaaagatgacccaagtgcctttcacaggagttagcccacctctcccaggatggtggaggcaagagcttgccgaaaagttgaagcggaagaaagccctgacccctgtgatggcrcgtcctggctaatctaatcagtagattttgtggtgtgaggccagaggcctgctacaccatccctgacccccgtgtttgctgactcctactggagcctgcctgacacgggtggatctggggacctctgtgttcagcccatagctggtttcctgcagagctgggccaggaggcttgcccatctccttccttcctcctgggctctctcatccatctgctgacctgggcttcctggctccctgtccagtgctcttactcccactattccatggttgcattattcagagaaacagcttgtgccttcactgtagtcttcatccaggaggaccaggaaggaacagagcagcactgacatctgccagtccctggggtcaagtggcttaaaaaaggcacagatgtgacctaaatcct

SEQ ID NO: 524911 - DNA, 503 bp, Homo sapiens
tgtcagtataaactatgcttcatggactcgtgctccacagagttgtattccatgggagagaatccctctgtggtcttaagtgtggcactttgtatagcgcccccatgacataagtaactgtatctcagaaacagactccatcttacatttcaaaaggccccttgccaaaagagaacagatattttgcctaatcaataaagrctacatccaaccagataaggacataaccaagcacacttttccactatcagttctcaccagaggactctggggtggccattaaaagagcaggacctcagcagcttgaaaagtccaccttaacagacaccatcttgctatcactcgtgatatgcatctggcatctgcaacccaaagctctgcccatatcaaagactcttccttgcaagaccgacagccaccacaggccagaccagaagattatttttgtctatgttggtcgccctggactggttcattaatgtttttactatcccttctctctt

SEQ ID NO: 524912 - DNA, 503 bp, Homo sapiens
tgtcagtataaactatgcttcatggactcgtgctccacagagttgtattccatgggagagaatccctctgtggtcttaagtgtggcactttgtatagcgcccccatgacataagtaactgtatctcagaaacagactccatcttacatttcaaaaggccccttgccaaaagagaacagatattttgcctaatcaataaagactacatccaaccagataaggacataaccaagcacacttttccactatcagttctcaccagaggactctggggtggccattaaaagagcaggacctcagcagcttgaaaagtccaccttaacagacaccatcttgctrtcactcgtgatatgcatctggcatctgcaacccaaagctctgcccatatcaaagactcttccttgcaagaccgacagccaccacaggccagaccagaagattatttttgtctatgttggtcgccctggactggttcattaatgtttttactatcccttctctctt

SEQ ID NO: 524913 - DNA, 450 bp, Homo sapiens
tttataaggaaacaacagtgacaatgcaagaaaatattgtccttatgattgaggaaatgggagtatccaaaattgaaactaaaccacattggcaaaaawgtttttaaacccaaagaaagaggggtactctgaaaggaggactagcattctccccttaaaccaagtatggacttggccagccttaggagccaaacttcaagtgtgaccttgactgaagggatgatagaaaaatatgaataccaaagtactgaatgaagggagtcaagtgaatgacgtaaatgaaattgacatatcacgtagatatcatcctactttaaaaaaaaaaaaactagctacagggatgcatccctgtagtcccagctgttcaagaggcttagatggaaggatccaggagttcaagtccagcctgggtaacttggcaagtccctgtctcaaaaatacatatattca

SEQ ID NO: 524914 - DNA, 547 bp, Homo sapiens
tggaggggagagctgggggcaaaggagcagctaaagatgttggttcctgtccyggctgtggactggctgtgtggcgctggaccagcctctttcccattccgtggtcacttgccctcctggggaacagggtgcctctctggatccccaagtctgcagaaccccaattctaattcacacagatgctgactgctggctccatgccaacccccgcaaggggcagggtggggaaactgtgttgtgtgcatggtaggtgtgcggggaccaagcgggagctgcaagaggaagtgtggcctgaggaggcagggggcaggagcctggccctggacccaccctggagcaggtccctggcccagggtagcacagggctacttcacaggcgaggaacccgaggcttagataagctcaaggaacccgcccagggtcccctgccggcaagtggcagagtgtagctcccatggccacacgtgtggcccacagcccctcgcctagccaggatggctccgcaagaggacaacatctcaccccaggatggctttcagggaaatgc

SEQ ID NO: 524915 - DNA, 547 bp, Homo sapiens
tggaggggagagctgggggcaaaggagcagctaaagatgttggttcctgtcccggctgtggactggctgtgtggcgctggaccagcctctttcccattccgtggtcrcttgccctcctggggaacagggtgcctctctggatccccaagtctgcagaaccccaattctaattcacacagatgctgactgctggctccatgccaacccccgcaaggggcagggtggggaaactgtgttgtgtgcatggtaggtgtgcggggaccaagcgggagctgcaagaggaagtgtggcctgaggaggcagggggcaggagcctggccctggacccaccctggagcaggtccctggcccagggtagcacagggctacttcacaggcgaggaacccgaggcttagataagctcaaggaacccgcccagggtcccctgccggcaagtggcagagtgtagctcccatggccacacgtgtggcccacagcccctcgcctagccaggatggctccgcaagaggacaacatctcaccccaggatggctttcagggaaatgc

SEQ ID NO: 524916 - DNA, 452 bp, Homo sapiens
gactttgctgatggccatgctggcaggtctagaggggctgtcagggtcagagtgggcctgcacatgacttgcttcacgcccatagatgtgcaaagccgtctgaccttacggaggccccagcagttgaaaagctgctgcccagatgagtgatttacatgttcctccaaatcagagggtgctgaggtgtagtggcctgagagtcatggagcaaacactgggctggkagtcagggtgggacctggttttagcaagaaggagagggagggggctctgcaggtgtctgcattccctaccacagatgtctggggtgagcacagcagtcagccctcagcccctccactcccttccacaaggccaggctgggcacacagtaggcatgctgcagtcaggcaggggctcaaggtgagttctgcatggcccgcttggcttaaagctgcttctccctcatgggg

SEQ ID NO: 524917 - DNA, 624 bp, Homo sapiens
ggagggtcccacccagaactctcctgcgctgtgtggaaggagggccactggggagggtgtagatgggaagtgagagagaagaggggacgaggagacccctgggtggccaaggaaacacttttctgaacaatcaaaaataaaggaggggcaggcagaacgtggggacttggctggggctgcctaggttccctggactcacctcctggcactacactgcctggggagccagggggccaggagccagggagcgactggcacaccccacaccttcctaacccagcccctggtggggagcccttccttcagcagcaggcagcacagcgatggccaagtgtccctccagggggacagacgtttgcccctccacgccactcacccggggtgaggccgcagcaccctccaccttgctccaccgtggccagcttctggcctcccctcaccaagccccgggacttcacgtgaagatcacttactggccttctcccctcgcggtcctgggttctctcctcctcctggcctctgaggccrgaatgctgaggctcagactagggcctttgtctctgctgacacctcgctgctgtcacgactttgtggtccctgtgccactgactgcaggacgcgcag

SEQ ID NO: 524918 - DNA, 471 bp, Homo sapiens
agaacgtggggacttggctggggctgcctaggttccctggactcacctcctggcactacactgcctggggagccagggggccaggagccagggagcgactggcacaccccacaccttcctaacccagcccctggtggggagcccttccttcagcagcaggcagcacagcgatggccaagtgtccctccagggggacagacgtttgcccctccacgccactcacccggggtgaggccgcagcaccctccaccttgctccaccgtggccagcttctggcctcccctcaccaagccccgggacttcacgtgaagatcacttactggccttctcccctcgcggtcctgggttctctcctcctcctggcctctgaggccagaatgctgaggctcagactagggcctttgtctctgctgacacctcgctgctgtcacgactttgtggtccctgtgccrctgactgcaggacgcgcag

SEQ ID NO: 524919 - DNA, 653 bp, Homo sapiens
ggggccatgcttactcctgcttcgggcctcagcacctgtcccttcctggcagcctgtcccgcctggcatgctggctttgctccaatgccaaccgttcggagaggccttccctggccaccctgttgtaaacagcactgcctgtctccgtgttccctgagtgttcctccaggcactgtcactgccagacgctggtatttttgtctactatggcccccaccctggctggtacactcagaaggacgggctgcgtccccygtgcctagagaggcttctggcacagagccagccttctacatatattgcatgaaagattccgtccaaggacgctgtagatgtaggtggacgcagacaaaagcaaagcaggacagtggattcgtccaaagaccggcagtgtcttcaggtgaagctgcagcgtcgagtcctggtgcttgcaaggtttcagcagcagaaacctgatggggctccttgcacctgggagaaaagccactccagtgaggattattgccagtgaaggctgccctggccccagacaagttttcctagaatttatggtagcaggcgggttgttaaaggatgattcccgaaagggccagacatggtgctcacagggatgcagggtgagcatgcgtcgaagagcttccctagcccaggca

SEQ ID NO: 524920 - DNA, 653 bp, Homo sapiens
ggggccatgcttactcctgcttcgggcctcagcacctgtcccttcctggcagcctgtcccgcctggcatgctggctttgctccaatgccaaccgttcggagaggccttccctggccaccctgttgtaaacagcactgcctgtctccgtgttccctgagtgttcctccaggcactgtcactgccagacgctggtatttttgtctactatggcccccaccctggctggtacactcagaaggacgggctgcgtcccctgtgcctagagaggcwtctggcacagagccagccttctacatatattgcatgaaagattccgtccaaggacgctgtagatgtaggtggacgcagacaaaagcaaagcaggacagtggattcgtccaaagaccggcagtgtcttcaggtgaagctgcagcgtcgagtcctggtgcttgcaaggtttcagcagcagaaacctgatggggctccttgcacctgggagaaaagccactccagtgaggattattgccagtgaaggctgccctggccccagacaagttttcctagaatttatggtagcaggcgggttgttaaaggatgattcccgaaagggccagacatggtgctcacagggatgcagggtgagcatgcgtcgaagagcttccctagcccaggca

SEQ ID NO: 524921 - DNA, 653 bp, Homo sapiens
ggggccatgcttactcctgcttcgggcctcagcacctgtcccttcctggcagcctgtcccgcctggcatgctggctttgctccaatgccaaccgttcggagaggccttccctggccaccctgttgtaaacagcactgcctgtctccgtgttccctgagtgttcctccaggcactgtcactgccagacgctggtatttttgtctactatggcccccaccctggctggtacactcagaaggacgggctgcgtcccctgtgcctagagaggcttctggcacagagccagccttcwacatatattgcatgaaagattccgtccaaggacgctgtagatgtaggtggacgcagacaaaagcaaagcaggacagtggattcgtccaaagaccggcagtgtcttcaggtgaagctgcagcgtcgagtcctggtgcttgcaaggtttcagcagcagaaacctgatggggctccttgcacctgggagaaaagccactccagtgaggattattgccagtgaaggctgccctggccccagacaagttttcctagaatttatggtagcaggcgggttgttaaaggatgattcccgaaagggccagacatggtgctcacagggatgcagggtgagcatgcgtcgaagagcttccctagcccaggca

SEQ ID NO: 524922 - DNA, 635 bp, Homo sapiens
acatttctgctgtttggtttcctgtctgccctttggcagtgtacgcggaggcaggacttgatttgtgctgggtctgcttcagccagtgacctaaaaaygtcagcttgtgttttgcgttacatggagaaggggctatggtatagacagtaccgttaggacttctggcattttttcttgtaaaatttctgtctttaagtagcagtcttcaaaatgcatgtaatcaagtaatgtaagccaatattgtctaagtaacagggcttgtttagcggcatgtgagccagggcttgaagtcttttagcaaaacgaacgtggctgcagcctttttcgtctttctaaaagaatctttgtcaccttctttcccctttgagtagctcttcctcagcttcttactcccaccctgttcctcactagaatacttgcctctccctttgtctgcatgctgtgtctgggctcagggccttctttctctcagtccagttcacaagggccatggggattctcttccccttctttcattatgttcaagaaggcctaggtatattaactgggaaaacaagaaggcatcagtaattaccatagcactgagaagaggaatggaaggaaagtgagacgtgataatggaaagaaaatccctg

SEQ ID NO: 524923 - DNA, 566 bp, Homo sapiens
gtgggccacattgttacacagcagggggcctccggaatccccctgtaggtagagaggagaagggagactgagacaggcctccctgctcctgctkccctgagctccgggctctcagggaaggcaggggtgggtgggccccttcaattgctgggtgtgtgtgagatggaagatcggtggggtacaggagccaagcctctggatcttttcggtcgctggacttcagctctgccttaattactgtctccagcccaatctgagtcaaggtacctctcccttctccaggagaatgttgcctatgtatgtgttgtgggtcttcctcctattcccccagagaccaggttgatggggaaaacaatccccagcccaccctggtctggctgccaggctgaggctgtggggatggaatctgttcgcactgcctggctctgcacgggcccctctctcccggggtgtgttggccaatgcccatgccttaccttgaaggcagccttccgttcccgccggtcccccacacaaatctgccttcgggggtcgtaggaaccgaagatgcggaggcactgcctatc

SEQ ID NO: 524924 - DNA, 501 bp, Homo sapiens
tggaatatttaaatgtagttaccacaccccaattactagtatgatcatgaggcaaatcatgatgaaatttccctattgtaaaaacctttgtgatatattccatctaaacttccttactttaggatttagttataagtgaaaatacccattgatttatactatgtttcaaaataatgaaaaagttttgagattcttccatgacayatggaatttatttataaagtttctagacttaaatgttctgttcccttgattgagaacacagctacaatgagaagaggtgggtcatggctatcacatttaagacaattaaaaactctgcagataaatttcaacaaactctaattgcctctattcagcatggaaggaaacagacaactgtgagagtcttagcaaaaaaccgcacagcatcaagaatacattcctcattattgcatacaatacacaaaaagtaagagctcagtgagagctaatttcaatgaagaattaacatactgatga

SEQ ID NO: 524925 - DNA, 615 bp, Homo sapiens
acatagatggctgcccttactaagatacagaattctaaaggaggagtaggttactgggtaggtactgctacattcaaggtggctattaaaaaaacaaacaaacaaaaaacaaagaaaaaacccacacaaaaaaaacagcaaaaacaaaaaataagtgaaaatgtcttaaacatgtttcagttayagctaaaaaaaaaaaaaaaaattctccagtacacagataacacttgaattcaagggtatgcctaagaatgctgcatgagaggtatatgagaagaccagaggtccaggactaagcctaaaactgtacacagtaggtatgagcccatgtcaacttccactggttgcttttacatggagaatttaattgggtagcagagctcggtcatgaagggtatagattccggggtcagaacatttgatgcaaatcctaccacttattagctgtgcactttgagcaaattatttaatctcttaagattacttagagataacatccttatctccaaataggaataacagtccttattgtttgcaaagactgactgagataatacatgtaaaggactcattatggtgcctatcactttaggtaataagagttcaagagatgac

SEQ ID NO: 524926 - DNA, 482 bp, Homo sapiens
gtcattttttactagaaaatttgctactatagttgtcatttatactttacttcatatggctatatcctaaatatcatttgtaatttgcaactctaaaatataacaaaaaacctgtgttagagtttgttatcaaagtactgagttaagactaagaagtataaccaactcaattatgcacaaaatacaagacactacctcacaatatttctttcraatatttgaggaaactagtccattagtgaggttttgccatatatgaaagtgctgtcaagtcaaagaaaatttaaattacagctactattcatattcacctacttttagattaccttcaaagtatgttttacttctggcaggtggagagaagggtatgccacatattagtcccacagcgcccataacattaggcaatgatgtcagttaattaacaattgtccttcatgctaacttcttcacaagtattacccaaagcccaatttctaaca

SEQ ID NO: 524927 - DNA, 303 bp, Homo sapiens
gacatctgggcagtaggggctcctgaggctgccctcaagtccttcaacaagtttgtcctcatgcatagaccttgtgggactctcccattcccctgccacccacagggaagactttggaggagtgatgagccctgctggaatgtgcttccagccaccaccacccacatgctggggtcctggcttcctgatgtggcccgttgtyttggagaacacagagggttttgtgctattttctttccttagtgattcaggaagagaatttacacacagctcagtgacactgggggaaagtgaggattcacc

SEQ ID NO: 524928 - DNA, 595 bp, Homo sapiens
attttgaggatgaaatgaggtgtgatgcatgtaaagctcttaggctggtgcctggtacacagtcagcactcagatgtcacaattatatgcttaatttcatacttatttgcatagtttaaaattattcttgaaccggaaaaaattaatggtcaaaaatagcaaaaacaaattgagaaccagtgaaagagttcattataaccaaacaatcctgggagggtaagttggtgaaacaatgcatctggctacagcagaaagtgtcagagggaagaaaattgagtgctgggtatgggagagggataatcaaacagtgggagggcctttaagctccctctctccccccgccaaaaaaatcctaaattatatgtctaaataagttgaattttctcaaagctaaaactatgatagaactatcattttaaaaatggacttttccaaatatgaatggagtctgtccagttcatttaaggagcaaaacagagttgtcaaacattgaagatacrgatacatcactctgattctcacaatgtctcctccactttgaaaaagagtacattgacttctctgtgttgacaggacctccatgctaatgatgcat

SEQ ID NO: 524929 - DNA, 540 bp, Homo sapiens
tgcccaacaactggacttatctaggtcacaggggagaacatagatgtatgtaaataaaacacgtaactggtcaatattcatgttaatagcttcaatcctagtgtgaagacatgtgtatttgactcatgggagagaamcttttatgcttactttacacaaagtaaaaactaaaatgatctgttgatttactaataaaatcaggcccagattcaggttggccaagaagctagacactccataaagagaaaggtgcctaaactttaaaacttgaacttctagtcttctcctagtcttctctattgccagcctttgaaggcaagggattgacattgataagggcgctgatactatacattatggttagtgggttaggctgttggattaatgggattaacctggctactggctgatggtggcccagatgcagaagtaagagtagaaatttcaagagagaaatcacaaaacttgtcaaacttccataagatattgggtatcaccaagacagatgttaagtctcccagtacaacattggaggttgga

SEQ ID NO: 524930 - DNA, 542 bp, Homo sapiens
tgatatggtgcatgcttacaaatgctgttctaaatggttttccacagacaggcacagtccagagtggctactactcccattagtcctgatgtttttgtgtcctcgcctccagccttctaataaaccactctgattgggacagccaactgccctcagtgcacagtgtcatgttatgcattggggcttgagtcatattcaagtgaggagggaggtcaaagctagcaaatcaccatgggcttaagatctaggcttaagctgtttagcctcagaaacttaatattattgtattgagaagcaagcatttctggagattgacamatctacaataggagatgtatattgggcaatatgactaataacagttatttgttcaaaaactaaaagctactaaaaatggagtttcctctgcatgggctcagttctttacatgtattttttccagttctcacaacaacccttcaagtttttgagtaattattcacatttcacaaatgtgaatactgagctggcatcccaaccagatgtatttacttccaaatctt

SEQ ID NO: 524931 - DNA, 507 bp, Homo sapiens
aaagttagaaagttttatactatacgaagcaaaacaaacctcaaacctcaaaatgaatgaataagtgctccttgtcattttttaccagtaataatgaaaataatttaaatcrtatagcatgccatattttacagtagcattcacatgtcttatttggtcctcacaaccatattgtggggcataggaaatatcattatcctccttaaaagtgaggaaacagactcagaaattgagaaatttgctcaagattggacagttctaacaatgtagagctacagtccaaatgctgcagtataccagagtggttaagactaagggttgccaactcagacctcttgggttcagatcctagctcttcctcttactagctttgtaactttggccatgtcacctaacctctgtgccttagtgtccccccttactaaaatagaggtaatggagacttacctcatacagatgtctcctagatcaaatgagatcattttggtatagctctagacagaccag

SEQ ID NO: 524932 - DNA, 507 bp, Homo sapiens
aaagttagaaagttttatactatacgaagcaaaacaaacctcaaacctcaaaatgaatgaataagtgctccttgtcattttttaccagtaataatgaaaataatttaaatcatatagcatgccatattttacagtagcattcacatgtcttatttggtcctcacaaccwtattgtggggcataggaaatatcattatcctccttaaaagtgaggaaacagactcagaaattgagaaatttgctcaagattggacagttctaacaatgtagagctacagtccaaatgctgcagtataccagagtggttaagactaagggttgccaactcagacctcttgggttcagatcctagctcttcctcttactagctttgtaactttggccatgtcacctaacctctgtgccttagtgtccccccttactaaaatagaggtaatggagacttacctcatacagatgtctcctagatcaaatgagatcattttggtatagctctagacagaccag

SEQ ID NO: 524933 - DNA, 572 bp, Homo sapiens
tacagataatttttcctgaataaactttcataatcaaacctttcatattccacatcagcacaagaactaaggttattcatggggtggaatataaatatccttaaaaaagttttttaactcaagttattaatctcattgccaaatcaccagcatcctcatcatccttcagcagtgaactaaggtcaccatgcttttctaygccatctcagagccccccaatacatttcatggtcattacctttgttcatacccactcttaagaaccacatgggtctgacctgtgtcaggaataaggcgcaagtaggtatttcttttcccccttccagctcttccatttacaaagaagggataaagaaacaaaactcagcaactagaagaggagaggatgttaattccagaccttggctgcttttaatttgaggcatttcagtatggctatttctcagagtcattgagggctaatggtgcaatcggattttgcctagatgaatttcccatgacagatgatattggctcatcatttgtggtcatgatggagtgccagtatttttcttcctccaaagcttgggtag

SEQ ID NO: 524934 - DNA, 572 bp, Homo sapiens
tacagataatttttcctgaataaactttcataatcaaacctttcatattccacatcagcacaagaactaaggttattcatggggtggaatataaatatccttaaaaaagttttttaactcaagttattaatctcattgccaaatcaccagcatcctcatcatccttcagcagtgaactaaggtcaccatgcttttctacgccayctcagagccccccaatacatttcatggtcattacctttgttcatacccactcttaagaaccacatgggtctgacctgtgtcaggaataaggcgcaagtaggtatttcttttcccccttccagctcttccatttacaaagaagggataaagaaacaaaactcagcaactagaagaggagaggatgttaattccagaccttggctgcttttaatttgaggcatttcagtatggctatttctcagagtcattgagggctaatggtgcaatcggattttgcctagatgaatttcccatgacagatgatattggctcatcatttgtggtcatgatggagtgccagtatttttcttcctccaaagcttgggtag

SEQ ID NO: 524935 - DNA, 629 bp, Homo sapiens
ttgctgtttgcagactgggtacctagcagttgtagcagacaggtcagccttagtgatgggaagtccatgtttttgagttcatgcctaggctgcatctatgtcacatggtcactttgcacataggccctatcagcagcamagggcatgggaaaaagactgactcacatccattgagaagtaatcttgtctaccttattactgagaattttctccacctcggtgtgcccttggtaagcattaggtggaaaacaaatactttcatatttcatactttcttctttttacaaagcctccaactaactaaatatatatatatatatatagttagttatatatatacacacacacatacatatatatacacacatatatagttcccctccaaaccactatatagttctcctccaaattttcttataatcaattttctaattttcttcttttcaagtccctcttcaggtgacaaacctgctagtttgtccaagagtcatggtagatcaatagctcaggtcctctcttcttctacacaaagtgaactatcatctgtaacacttgaaagcctgccagccgggaggactttccatcactactatttttccagaggcatctctgtgtgagctttagtacat

SEQ ID NO: 524936 - DNA, 533 bp, Homo sapiens
cccccactcgtgtttatctgcctggactggtttgtgatgcttcagtgtgagtggtacatgtttcctatttcttgttgaccaatcccacatgtcatgccagaaagagccttgttagataaaatatccttgctgaatatayagatgggtctagaccttttccatgggctgaaaatttctctgcttgggtctgaccagcaccaaggatctcagatttaagttgtacatcttcacctgggtagatgcaatgctgaatttgagttccattccactgtctatgtttgtcttggctgtttgtctgagggtaaattgttgaaccattttgtgcctcaatgacatcatctatgaaatgatggaaaggaagtcggtgagtcccttacaaaagtgtggggaagataataaggtagtaaagcagattttcctttgaatatattagatgtgaacattctctggatgacatacatcttgaccataagtgaaagttgcaaacagcaaatttgaataaactcaatcagaatcagactgtgttcctacaa

SEQ ID NO: 524937 - DNA, 533 bp, Homo sapiens
cccccactcgtgtttatctgcctggactggtttgtgatgcttcagtgtgagtggtacatgtttcctatttcttgttgaccaatcccacatgtcatgccagaaagagccttgttagataaaatatccttgctgaatatatagatgggtctagaccttttccatgggctgaaaatttctctgcttgggtctgaccagcaccaaggatctcagatttaagttgtacatcttcacctgggtagatgcaatgctgaatttgagttccattccactgtctatgtttgtctyggctgtttgtctgagggtaaattgttgaaccattttgtgcctcaatgacatcatctatgaaatgatggaaaggaagtcggtgagtcccttacaaaagtgtggggaagataataaggtagtaaagcagattttcctttgaatatattagatgtgaacattctctggatgacatacatcttgaccataagtgaaagttgcaaacagcaaatttgaataaactcaatcagaatcagactgtgttcctacaa

SEQ ID NO: 524938 - DNA, 585 bp, Homo sapiens
ataggatttgtcatcaagaaatttgagtataatgtactcttggaaactgagtgattggaagaaaaacctaacactgtctaaatacatgggagtgttgtaaactgcatagtaggactcaaaaaccaagactgtgctatgtgctagtatttctgctgtaaatgcctagtaattccttattcccaatctgtagttggaccttgaacactggctcacgcaaagcaagttctattgattttatttatatcctatagatacagaatgtgaatgcataccaataactgcaaaagcaagcagctaacgcagattagagttaacattagcaaagaaagatgggttggtacttatttttttgaaaaamcacagcaggaacaatttaatagctgactgaattgctaccagaaagacatgcacaggcacgtttgctgattagccgaggtccactttgttcttatttggcagattatgcaatagccgtttcccagaacattactaataatgctgcaagaattataagagaaagtttgtttacactgaatattttaaaagagattacagtcacctcaagttgctaagatagaaagtaat

SEQ ID NO: 524939 - DNA, 553 bp, Homo sapiens
taccttctctgagtttcttatgacacagaatttgtatattttatgccatgtatcagttttctaccttgtatcatagtaatttacatatcttcatcctttctctactttgaatttattgaggacagattctgtgttttacaaatctgcattgggtactcaataaatatttgtcaaataactaaataaatgagctgtgttaaaattaaattggttcccggagtcttagtaaaatatagctgcaaacaaatatttttatttctgtttgtgctttcaaaactgcactaaaattatactaaataaataagaaccctaatattagcactatacccacmagaaaaaaagaataaataaaaaaatacagccagaggagtgagataaacatagaccaagggaagagtttagataagttataacagattgtcagagggagaaatcttcaaattaagttcctgaattgctggtaaatatttgacaactcactctctaaaaaatgtatgcatgtatttaagtttgttatcaacatagtttataaataataaaaatataaaatgtg

SEQ ID NO: 524940 - DNA, 538 bp, Homo sapiens
ataatggtctctatgcatcctacctgggctgtgggcaaagaaaccccttccttyccaactaggaataggtaatagtactgggattggccaggtgctgtgtgctgcacatactttaagcagaacaaagaacaaagaagtacacatcaagcccggaacatggaaagatactaccaaataaggtgacatgtccaactcaggatgtaaggactccttatctcaacgaaaaaaagtcttctaggcccatgtcacaaggcacactcatgtggccatgcatgggtggacaggctgcacatgatagcctttcccaatacctgccttctctttcaacaaatgaaacagatgaagtgtccctattccaatcaaagatctccatttgtattctggaaaggatctcctcttggcttctcaagggcttggctcctataacttttgcctctttgtcctgcatcataaatactgtccctctattaaataactcccatgaacatatatactctagtatttcctatttacaaaggagtgccttgtccttacatcc

SEQ ID NO: 524941 - DNA, 649 bp, Homo sapiens
attcaccaatctgccaagatctgcacgaaatgtttcaacagagcaattataagttaactctctcttttgtttcatgcttcatttttagatgtttcataaccaactcctttggaaagaaaaaaaagtagcacatcagcaatttttaagcacgttaggatttgaacagctgaatgacagtatctcctggaggaaagattttctactcacagaacctgagatgagaatcatctgtcccagttttacaaattaaaaaggaaaaaagaaactccagtgccttttctgccagtattttctgatgttgaaattctgatacaaatattcaagttcaatgcaatcccatcatgagcgtatgtgtatgaatgaatacgtatacatatatatgatagactcctgacaatcaaaataatgttttacaggcaagaattctttaaattagaaagctactaaaatgcatttaacttgctttgtgagaaagctaaccctttgtctgtaactcccaaccctggttgcaaaatgcaatgacctaggctgactytttttttttaatcctatatctagaagtttctcattctgatttaattggtctgggatgactacattgggatacagactacattgggatatttataaagtttctcaggtgattttt

SEQ ID NO: 524942 - DNA, 508 bp, Homo sapiens
aaagctgtgtgttttgttaaaaaaattaaatakttgaatttttttcttgtaaaagtaatatttgggaaatataaaaagtagaagcctagggtggccagactcagagagaccactgttaaaattaaaatgtgttttcttcccatcattttttacacataacacacagagattatgtgttgtaaatagttgtcataatgtctgtatgttttatattccattatttccattcccttcatctacttttcttatgttattagataccccttgagaatatcattcctagtggccacttgatatttcattttgtacctgtattactgtttcgttaactggttccctgcctccctgtctttgcaattataaataaccctgcctctaacaccttgggtcagacagaaggaaggataaagtaacagatctgcatttcagatgatttccttagaattaattgttaagtggaatgacaggtttaatgcatagggccaccttgcaaggtggtgtttaggga

SEQ ID NO: 524943 - DNA, 264 bp, Homo sapiens
gggtcatggaccagcagccctggcattcccttggagcgtgttagaaatgcagactctcaggccccactcagacctactgaagcagaatctgcattttaacaagctcctgggtgattctcaggctcattaaggtctgagaagttctgatgaaggctcattaaggctccctccagggcatgccttgggcctcaggactgggcaggacagcattgcggggtggataaaggcacagagctggagaagtkcagggtgtccacatttgct

SEQ ID NO: 524944 - DNA, 599 bp, Homo sapiens
gctgttttttctacatgcccattcatgtttagagaaaagtgaatctcttttggcatcataagctgcattaagtctatcttttattttgtatttctgattctttgatatctggttcttcctgaccctgaaggaatttcccctctcaggactaaccagttcctagagatagaaaataaattgcccgagcacacacttttcaaataaaaaccaacccaatccagagcccagacccccatttacctccttttttgggattccatactcaagaccattatcttttcaatggcaatcatttcatgatcagttggccttaccacatctcaaawtttctgttaatacactctattttagaacatgggatattgaaataagtatttcaaaacgatcatatgccatgctaaaaatgtattaatatttaaaaattttgaaaatatatctcctttccaacacaaaagaggtgcttagatcaatctttcaatgcaactcacaggactaagtcataaagatttcaccactaatagaattaaaatgtaagattagcataacgttaccatctacatttattgggttccctgatgcatctgacattagaaactgtt

SEQ ID NO: 524945 - DNA, 611 bp, Homo sapiens
ggctgaggcaggagaactgcttgaacctgggaggtggaagttgcagtgagctgagatcacaccattgcactccagccggggcgacaagagygagacgccatctcaaaataaataaataaataaataaataaataaataaataaataaacaagataactagcttggtagagaactgaagggatgggggtaacatatcacatagaaattgatagaaatgatgcggggaggtaatcaaataaatggatttaaagtcattcttgggaccaagctgagtttagaaaccttggacgtggagtggttatcaatctgaatctctggtgggaggacagtagagagggagaaaataggttggaaaatgtatccagggtttgggtttcctctgataattaagacagaagggctggaccacagaagagttgatgttaagaatatgggttacccatattatttgggcacacatgagtggctacagaaggaagaaaaactaggagccttttgataaattaaggggaaatgaaaagagcaataacaatgtgagaattacacagatagcatcgattgggtgtctttgtgtgccaggtgctgtgttgcataagcaacgacctcagaga

SEQ ID NO: 524946 - DNA, 593 bp, Homo sapiens
gaaatcatactggttcttccattttagtttgatccatttccatccatctgctcatgagagaagaaattcggtttggtgaaggatgtctggaaaatgcgaagaccaccaacttgggaaacttttatcatcacgatacactgtgtatgtctctgaacaacaacatggtttgaatgaagcaaaatagagacttaaaatgtaactaaatgtacaattgtatgaatgtgtaagtgctatggaagaagaagcctttagaagttctcaatatttactgcagaatttcaaaatagtcttggattaaacaccttttgagaaaaaaatagacgttcctaaaccataatctaatgcttgagagaacagaataattttcagtacaagtaagtttaaatgctraatgagatgagatggttaaatgtccagatgaaaggtaaaatacattgttccatcactgaattcacagtaacatgcaaaagatccatcttgaatataacctgcccagtccctgaaacaaacccaaggcttctttttttttctgatcttgatttcttgaatgcatagtgcttttaaagaactaacatgtcttttttgttttgttt

SEQ ID NO: 524947 - DNA, 537 bp, Homo sapiens
ccatctagcctcacctaccttaaatatgctcagaacacttacattagcctatggttgggcaaaatcgtgcaacacaaatcctgttctataataaagtgttgaatgtctcatgtaatttattacatactgcatggaaagtgaaaaacataatggccatatgggtactaaaagtatgatttcttctgagtgcatactgctttcgcaccattataaaktcgtgaaatcctaaactgaaccattgtatatcggggactgtatatgaatatgttaagtatatattatatgattaataatatatgttttatatatacattatatataaaatataattataacacaatataatatataattaatatatatacacacacttaaatatacacatacgtacataggagttaacaaattatactctttctctccaaattttgacttaggcccaaaggttgggaaaaatagagtcggtattttgtgcctccacttcctagagcaagctttaagtttcctcagagaggcatgctgaatgttgttaaaact

SEQ ID NO: 524948 - DNA, 434 bp, Homo sapiens
gcaattcaaagggtcctctctgtcactgaaaaccctggaattatttcaatgcaaaaaacctacatacatgctttttataagtggcatggtggggcacagtggctcacacctgtaatcccagcactttcggaggctgaggcgggcggatcacctgaggtcaggacttcaagaccagcctggccaacatggtgaaaccccgtctctactaaaaatataaaaattagcccggcatggtagcaygtgcctgtagtcccagctactcagacggctgaggcaagagaatcccttgaactcaggagctggaggttgcagtgagccaagatcacaccactgcactccagcctgggtgacagagcgagactctatctccaaaaaaataaaataataaaaaaagataagtgacttatattgccaaaatataatgcaataaatat

SEQ ID NO: 524949 - DNA, 609 bp, Homo sapiens
gagaatgctttatgtgtattctgtcactgaaaaaataagtaaatgaataatagacagtgggaaggaggtttttcactgttggagtggaaatttataaataagcaacgggaggagggtagaattattgatgtagttatggattagatttgggggtagacatcaatgtagacacatgtttagcagaatayagatacagatgcttacatagaaaaatttagatatgtgttagtctatatgcaaccttcaatatataaatatatcttttaatatatgtattatttaaatatgtcttaagtagacatatttaatatatctattatttaaaaatatacatatatatatatataaaatctttgatctgtctgttgagaaggccaagaaaagacatccctgtagcaacaataacatacacacctagcttccaaatctcagtctccaatgaaattctgcaaagaaagaaactagctatttccatggagaaatggctgattctagaaccaaggcagaaaatgtacaacataagcaaggagtgtcttgtagtgctcaacaacaaaaaaaaaccctgaaaacttacagtgaattgatacataatgttaaaatgacataagc

SEQ ID NO: 524950 - DNA, 604 bp, Homo sapiens
aggctaccttctccttttcttcccgctaaacattctctctttctctccgtctgcctgtctctctctctcactcatctttctctgggctgcagaaagkcatcaatgtggctactggaagatattaaatggcatgtgtctttcattatatttctgttggacagcgcttgtctagggtctctttgacctcctcatttccccttctactcccctaaataacagtccatttcatggttatttccattggacttaccacatggaatatctaattaattaacctaataaaatagtgaaaatattcaaataaaaaaattcaaatttgccatttcatggtcaatgaaaagattatagcaaaactatgaaatattacatcattaacttatatctttctttttatttgaaaaagtaggttcttcctaaaccccttaatttaccatttaccaaaagcattgtgatatacaaaatcatccagttatccagaaaagctaccttactatttcgggtgtttatttgaatataaactgtaaggtcattaagtgattctatctcaaccagaaatttttctttcataaaatgcttcagaacaaaataaatcataccctttgta

SEQ ID NO: 524951 - DNA, 604 bp, Homo sapiens
aggctaccttctccttttcttcccgctaaacattctctctttctctccgtctgcctgtctctctctctcactcatctttctctgggctgcagaaaggcatcaatgtggctactggaagatattaaatggcatgtgtctttcattatatttctgttggacagcgcttgtctagggtctctttgacctcctcatttccccttctactcccctaaataacagtccatttcatggttatttccattggacttaccacatggaatatctaattaattaacctaataaaatagtgaaaatattcaaataaaaaaattcaaatttgccatttcatggtcaatgaaaagattatagcaaaactatgaaatattacatcattaacttatatctttctttttatttgraaaagtaggttcttcctaaaccccttaatttaccatttaccaaaagcattgtgatatacaaaatcatccagttatccagaaaagctaccttactatttcgggtgtttatttgaatataaactgtaaggtcattaagtgattctatctcaaccagaaatttttctttcataaaatgcttcagaacaaaataaatcataccctttgta

SEQ ID NO: 524952 - DNA, 587 bp, Homo sapiens
cactagctccaactctctcaggcaagaaagtttgctcatgtgtcatgattatttggttgggtcacttatttagtggccattttccatttacttcaagtatcagaagcaaaaccaagtcacatggctcttcgagggagtacattttgtgtttgttccctctcttaaatccccatttcaccatcagcatagttcccacttattggtacagtgtggccacaggatttaggtgagcaccattcaacaacagttgcacaggtaccattcaggccaagaacaatggctctgagacagctctgctgattattggctgggcttccttaagcaaatgactaaatctctgtgcttttgtttcctcatttgtaaaatgagaataagaataatacctacctcacagcatttttagaaagattawatggtttaattgttatgccttccttttagggatgttgtgaagataatgagatggtgtgtgtaaaatatttagtacagtttgaaggaactcaataaatagtaggtatccatatcatgattatgaggtaaagagaaaacatcgccattgttgagagtaggattcaagggtgagtgca

SEQ ID NO: 524953 - DNA, 517 bp, Homo sapiens
gcactggaccagccagggggcagtgttctcaggatgcatatgatcttttggggagagcagtttttcttgcacctataagagccagcacaggcattcttcctatgaaaacctctaatgaagatggttagtagggttccattgattctcttgactggctaattagagaaatttcaggagttttaaaaattgagttgtggatccttcatcaagctgtctccctcttcttttggaaaacatacctgctactagccaatttgtaaattaatcctttcatttggcaataatttatcatatattggagtcaaaagtgagttctgagacagaccacacagtagaactggcacattttcaaagtgaaatggcgagagctggctagacaacccaaacactcacatcagcatttgaaaagggccaaaataaatgtttgacragaattcctttaaaaagagctagcagtttgcctaagcctacctcctctccctccttgggggtggtgtgtgtggagatgcttcttcct

SEQ ID NO: 524954 - DNA, 593 bp, Homo sapiens
ctgcgtggagaatggatgggagggggctcttgtgagwtggagaaaatggtagtgtgaaactgcgtggtggcagtgaagctggggagaagcggccagaacttagaggtcaaacaataggattttgcactgaattggcagtgaggggttgggagaaagaggtcaagcattcattcatttaccagtcacaaaacagctcctgggtgcccaccacacgccagagacagtcaggagctagcaaagtcccatcctcctgaagtttatcttctagtgggttttgtttttttaaaaatgggcttattgagatataatatacataccacacagtttacccatttaaattgtacaagtcaatggttcttagtataattcatagatatgcgccaacttcaacacagtctattttagaacactttcttttttcttgagacaggttctccctctgtttcccaggccagagggtagtggtaagatcacggctcactgcagcctcaacctcctgggctcaagagatcctcctgccttagccttctgagtacctagaaacacaggtgtgtgccaccatgctccattaatatttttctatttttgtagag

SEQ ID NO: 524955 - DNA, 593 bp, Homo sapiens
ctgcgtggagaatggatgggagggggctcttgtgagatggagaaaatggtagtgtgaaactgcgtggtggcagtgaagctggggagaagcrgccagaacttagaggtcaaacaataggattttgcactgaattggcagtgaggggttgggagaaagaggtcaagcattcattcatttaccagtcacaaaacagctcctgggtgcccaccacacgccagagacagtcaggagctagcaaagtcccatcctcctgaagtttatcttctagtgggttttgtttttttaaaaatgggcttattgagatataatatacataccacacagtttacccatttaaattgtacaagtcaatggttcttagtataattcatagatatgcgccaacttcaacacagtctattttagaacactttcttttttcttgagacaggttctccctctgtttcccaggccagagggtagtggtaagatcacggctcactgcagcctcaacctcctgggctcaagagatcctcctgccttagccttctgagtacctagaaacacaggtgtgtgccaccatgctccattaatatttttctatttttgtagag

SEQ ID NO: 524956 - DNA, 597 bp, Homo sapiens
cagccctgaagggctaagtcctgagtttcagcaccagggagaactagagctatatarcccaaatatgtccacaaatctcaaggccacaggtcactattataaattggtactgcacgttcctctccctgaatatctcaaaggatttatgcaaattgatccgcctcttcccctaagcgctgaacaatggatgcttcgttgcccaacatttgagtatctaaatgctctccagaagtgactctttgccggacaaagagggacagttgtcctccatttcaggaaggaaggaaaaaaccaagacgggaaagaaggagacagaaaggaagacagcaaagaaaaaacgaaataaggaaagagggaaaaaatacagacagattatcgtgctatacctgaaaaggtgtggccaggtaggcaggaggaaacccaggagacccgcagccacacagatgccaagctgctgagaggggcaagtaaggtgaggttggaaagtgtctcccggactttgtaacatggaggtctgccctcgcagagatgttttggggtcagactcggcgctggagtgggtgaggagtgtggccagacgaggaagcagggttaaag

SEQ ID NO: 524957 - DNA, 597 bp, Homo sapiens
cagccctgaagggctaagtcctgagtttcagcaccagggagaactagagctatataacccaaatatgtccacaaatctcaaggccacaggtcactattataaattggtactgcacgttcctctccctgaatatctcaaaggatttatgcaaattgatccgcctcttcccctaagckctgaacaatggatgcttcgttgcccaacatttgagtatctaaatgctctccagaagtgactctttgccggacaaagagggacagttgtcctccatttcaggaaggaaggaaaaaaccaagacgggaaagaaggagacagaaaggaagacagcaaagaaaaaacgaaataaggaaagagggaaaaaatacagacagattatcgtgctatacctgaaaaggtgtggccaggtaggcaggaggaaacccaggagacccgcagccacacagatgccaagctgctgagaggggcaagtaaggtgaggttggaaagtgtctcccggactttgtaacatggaggtctgccctcgcagagatgttttggggtcagactcggcgctggagtgggtgaggagtgtggccagacgaggaagcagggttaaag

SEQ ID NO: 524958 - DNA, 597 bp, Homo sapiens
cagccctgaagggctaagtcctgagtttcagcaccagggagaactagagctatataacccaaatatgtccacaaatctcaaggccacaggtcactattataaattggtactgcacgttcctctccctgaatatctcaaaggatttatgcaaattgatccgcctcttcccctaagcgcwgaacaatggatgcttcgttgcccaacatttgagtatctaaatgctctccagaagtgactctttgccggacaaagagggacagttgtcctccatttcaggaaggaaggaaaaaaccaagacgggaaagaaggagacagaaaggaagacagcaaagaaaaaacgaaataaggaaagagggaaaaaatacagacagattatcgtgctatacctgaaaaggtgtggccaggtaggcaggaggaaacccaggagacccgcagccacacagatgccaagctgctgagaggggcaagtaaggtgaggttggaaagtgtctcccggactttgtaacatggaggtctgccctcgcagagatgttttggggtcagactcggcgctggagtgggtgaggagtgtggccagacgaggaagcagggttaaag

SEQ ID NO: 524959 - DNA, 597 bp, Homo sapiens
cagccctgaagggctaagtcctgagtttcagcaccagggagaactagagctatataacccaaatatgtccacaaatctcaaggccacaggtcactattataaattggtactgcacgttcctctccctgaatatctcaaaggatttatgcaaattgatccgcctcttcccctaagcgctgaacaayggatgcttcgttgcccaacatttgagtatctaaatgctctccagaagtgactctttgccggacaaagagggacagttgtcctccatttcaggaaggaaggaaaaaaccaagacgggaaagaaggagacagaaaggaagacagcaaagaaaaaacgaaataaggaaagagggaaaaaatacagacagattatcgtgctatacctgaaaaggtgtggccaggtaggcaggaggaaacccaggagacccgcagccacacagatgccaagctgctgagaggggcaagtaaggtgaggttggaaagtgtctcccggactttgtaacatggaggtctgccctcgcagagatgttttggggtcagactcggcgctggagtgggtgaggagtgtggccagacgaggaagcagggttaaag

SEQ ID NO: 524960 - DNA, 440 bp, Homo sapiens
cagctgttctcagtcttcagggtcctcaacatcacctggagrgcctgttgacacacagcctgcaggacccatccctagagttcctgagtcggcaggtgcggagtggggcttgacatctccagttctaacaggctcccaggtgatgctgattctggtcccgggactacactttgagaactgctgcttcaggttgcatcctgcccccagcacttatgctaatttgtgtggtgaagacccggggctccagagccagaggcctgggagtgaatgctgtctctaccagtagctgtgcagccttggtcaacatattctacctcagttcccatctacaaagtggagatagggattgtaataggtaattatgagaaaacacctgtaacacgctcagtgtcaggtgatgagtggatcatgattggattaagctggtcatgaccaccctg

SEQ ID NO: 524961 - DNA, 662 bp, Homo sapiens
gttggtcagaagaacagatgacaactgggggcttgtggatggcgtctggagcggcccagtcatggaactgaactcaacccatgggacctaatgctatttccgggtatgtggtgtcataactgacttgaattaaagggtgcccagctagaatctgctaaataattgattggtgtgtggggaaacagccccyacacatctggtatcagaaacactttggttttttcctgtctctgataaacacaaataagcaatgatgttagtaaaaataactagaaatagaaagtttttaacaaataaaaaatacatatattttaggcagggatggttgtacactacaatttctggcttcctttacagttatgtataaccctatgactaaattctccccagtggaatgagaatagtatttttgtatgctactttggggcctgggtcttcagatcttcatgcttcctccaagtctttcttctctgctcccccaatgagaacagtggtctaaggaaaggcaaagcagttatttgggctcctcaatgaactcaaggagcagcaggttcaaacaaccagtttaaagcattcacatcatgcgaaagaaagacataactttgtcctattcatttataattttttaaaaatgtattttcagcaaactggaaatataaggg

SEQ ID NO: 524962 - DNA, 662 bp, Homo sapiens
gttggtcagaagaacagatgacaactgggggcttgtggatggcgtctggagcggcccagtcatggaactgaactcaacccatgggacctaatgctatttccgggtatgtggtgtcataactgacttgaattaaagggtgcccagctagaatctgctaaataattgattggtgtgtggggaaacagcccccacacatctggtatcagaaacactttggttttttcctgtctctgataaacacaaataagcaatgatgttagtaaaaataactagaaatagaaagtttttaamaaataaaaaatacatatattttaggcagggatggttgtacactacaatttctggcttcctttacagttatgtataaccctatgactaaattctccccagtggaatgagaatagtatttttgtatgctactttggggcctgggtcttcagatcttcatgcttcctccaagtctttcttctctgctcccccaatgagaacagtggtctaaggaaaggcaaagcagttatttgggctcctcaatgaactcaaggagcagcaggttcaaacaaccagtttaaagcattcacatcatgcgaaagaaagacataactttgtcctattcatttataattttttaaaaatgtattttcagcaaactggaaatataaggg

SEQ ID NO: 524963 - DNA, 662 bp, Homo sapiens
gttggtcagaagaacagatgacaactgggggcttgtggatggcgtctggagcggcccagtcatggaactgaactcaacccatgggacctaatgctatttccgggtatgtggtgtcataactgacttgaattaaagggtgcccagctagaatctgctaaataattgattggtgtgtggggaaacagcccccacacatctggtatcagaaacactttggttttttcctgtctctgataaacacaaataagcaatgatgttagtaaaaataactagaaatagaaagtttttaacaaataaaaaatacatatattttaggcagggatggttgtacactacaatttctggcttcctttacagttatgtataaccctatgactaaattctccccagtggaatgagaatagtatttttgtatgctactttggggcctgggtcttcagatcttcatgcttcctccaagtctttcttctctgctcccccaatgagaacagtggtctaaggaaaggcaaagcagttatttgggctcctcaatgamctcaaggagcagcaggttcaaacaaccagtttaaagcattcacatcatgcgaaagaaagacataactttgtcctattcatttataattttttaaaaatgtattttcagcaaactggaaatataaggg

SEQ ID NO: 524964 - DNA, 610 bp, Homo sapiens
tagttgaggactcctagtgtatgtgttaatccactgttgcaggataaaggaagtcctcaggctgagaagcaggtgctggtgaatgggagtcaggccagcatgccctgaagtgggaggggctgaagaagcctgggcagggtaccagcagtgtctgctacacacaaccacagacctttggccctctctaccattatttagagggcctggatggaatgagcgccctggatgacacagaagggcactgggtgattatattggaccagaacagcaggaggacataactcgttgagtatcctgatatgagtcaaggacactgcactagagactttacagcaagatgttactgagcaccttacttatgttcaaatgtaagaactcaggattatgaagaagcaggaagctagagtcctaracgctctggtctgagcctggtctcctgtggtcatgtttaaacagttcatacctgagtgtctcttttacaggggatttcatgtgtttggaaggattctttctcctaagcctgttatcttaaaagtgtcttgatttctcaagcaaacctcaatccataatatttggaaggaagggcctcttggctccttatgcacttcac

SEQ ID NO: 524965 - DNA, 629 bp, Homo sapiens
cactgctggtgtgggtgacacggtgatggccacagtcaagaaaggcaaaccagagctcagaaaaaaggtacatccagcagtggttattcgacaacgaaagtcataccgcagaaaagatggygtgtttctttattttgaagataatgcaggggtcacagtgaacaataaaggcgagatgaaaggttctgccattacaggaccagtagcaaaggagtgtgcagacttgtggccctggattgcgtccagtgctggcagcattgcatgattctccagtatatttgtaaaaaataaaaaaaaaaaaactttaagcccattaaaaagtcttaaggtggggcacttcaaaggcaggggcctatggatttgccagtgacctttaaaatgtgactgtgttgctgagagttcaatgattattgatgtatattccctttctcctcagtctacttaactacacattaatattgtttcttcccttgtaggctctctttatctttacctctgtgacacagacatctaactgcctatccagtatccaatattccttcataactacaattcccagtcccccaaaaagccaacaacaataatataccacctacctatccccacctctcttattcaggatggccatc

SEQ ID NO: 524966 - DNA, 629 bp, Homo sapiens
cactgctggtgtgggtgacacggtgatggccacagtcaagaaaggcaaaccagagctcagaaaaaaggtacatccagcagtggttattcgacaacgaaagtcataccgcagaaaagatggcgtgtttctttattttgaagataatgcaggggtcacagtgaacaataaaggcragatgaaaggttctgccattacaggaccagtagcaaaggagtgtgcagacttgtggccctggattgcgtccagtgctggcagcattgcatgattctccagtatatttgtaaaaaataaaaaaaaaaaaactttaagcccattaaaaagtcttaaggtggggcacttcaaaggcaggggcctatggatttgccagtgacctttaaaatgtgactgtgttgctgagagttcaatgattattgatgtatattccctttctcctcagtctacttaactacacattaatattgtttcttcccttgtaggctctctttatctttacctctgtgacacagacatctaactgcctatccagtatccaatattccttcataactacaattcccagtcccccaaaaagccaacaacaataatataccacctacctatccccacctctcttattcaggatggccatc

SEQ ID NO: 524967 - DNA, 629 bp, Homo sapiens
cactgctggtgtgggtgacacggtgatggccacagtcaagaaaggcaaaccagagctcagaaaaaaggtacatccagcagtggttattcgacaacgaaagtcataccgcagaaaagatggcgtgtttctttattttgaagataatgcaggggtcacagtgaacaataaaggcgagatgaaaggttctgccattacaggaccagtagcaaaggagtgtgcagacttgtggccctggattgcrtccagtgctggcagcattgcatgattctccagtatatttgtaaaaaataaaaaaaaaaaaactttaagcccattaaaaagtcttaaggtggggcacttcaaaggcaggggcctatggatttgccagtgacctttaaaatgtgactgtgttgctgagagttcaatgattattgatgtatattccctttctcctcagtctacttaactacacattaatattgtttcttcccttgtaggctctctttatctttacctctgtgacacagacatctaactgcctatccagtatccaatattccttcataactacaattcccagtcccccaaaaagccaacaacaataatataccacctacctatccccacctctcttattcaggatggccatc

SEQ ID NO: 524968 - DNA, 581 bp, Homo sapiens
ttaaatacatatttgtgtgtattaatcacttggatatgcaaagtttaccttatacctgttttctttactgcaatagagaggatctaatacaggcctctatggggtatggaacagcatgggcccagaggaagatcaacaaatgatgtagaccagaatggagaaaaagtccagtaagggatgcagcaattgacgacacagttcatgccatgcatgtgtagcttgaaataatgtttgtaaacttagcttaatataatagcctaccagccactttaagtttatccatgcctacttgttccaaaaatgattgagtatgcatatcataaattatttttaatttgtaacaaacattctcttyataaagtctaaaggtcaagaaccctttgagtattattgacaattaaagatgtttagttcagatatctcagcaccagaaccttctctgtaatgaaagatgtgtatttctatccaagagcatcacatttaaatattcagaagtagctgatctataaacactggggattcgttacaagaagctagcaatcccaatgtctttgtcttagcatctttttgtgaaggaactc

SEQ ID NO: 524969 - DNA, 627 bp, Homo sapiens
caaggaagctgagacacatggctggccagagaaggacagagcttctcctttccctgccccagctatagctctccatgagggtttagatacatttgtcttatattttccagtttaaaaattcaagaaagttacytgaaggttattccaaaaaattatctacagataacctagcccaaatttgtggggaaattttgggttatctgccaaggcagcccttacttacaccatgttctggaaacttccttgttccctttctcctctctccaccctgatctgcatgttttattatcttgttcttgtcctgtcttccagtacaggacgcatgaccaaaaggtcaattttgggccaagagaacttcagtttctttccatgtcactagagatatcacctgcatactcagcattctgagtagaagtgacctttgcaaaaactgtgaaataaatcacacataccaaaggatgtatgtgatgagtgtgtacattttaaagaacaatacttattttataaaagccaaatatctgcgctggaacctttggaatctgtcatgtacctccctcaggtgtacctccccacctcctgccattgctttgcttttatagttttgccatatgcatgtgtttttctaaa

SEQ ID NO: 524970 - DNA, 627 bp, Homo sapiens
caaggaagctgagacacatggctggccagagaaggacagagcttctcctttccctgccccagctatagctctccatgagggtttagatacatttgtcttatattttccagtttaaaaattcaagaaagttacctgaaggttattccaaaaaattatctacagataacctagcccaaatttgtggggaaattttgggttatctgccaaggcagcccttacttacaccatgttctggaaacttccttgttccctttctcctctctccaccctgatctgcatgttttattatcttgttcttgtcctgtcttccagtacaggacgcatgaccaaaaggtcaattttgggccaagagaacttcagtttctttccatgtcactagagatatcacctgcatactcagcattctgartagaagtgacctttgcaaaaactgtgaaataaatcacacataccaaaggatgtatgtgatgagtgtgtacattttaaagaacaatacttattttataaaagccaaatatctgcgctggaacctttggaatctgtcatgtacctccctcaggtgtacctccccacctcctgccattgctttgcttttatagttttgccatatgcatgtgtttttctaaa

SEQ ID NO: 524971 - DNA, 562 bp, Homo sapiens
tgggaggacaaaaatattcagtccatagcaacttttatttattgatgatcattttattttggaataatgtattttctccagctttatcaaggtgaataaaattatatatatatttatggtatacaacatgatgctttaatatacatattagtgatataattaccacaatcaagttaattaacgtatctattgactaacatagttaccatttttgttttgggttagggacatttaaaacctactctcttagcaaattttaagtgcacagtacagtatcattaactctagtcatcatgctgtacattaaatctccagaaattatgcatcctgcaaaactgaaactttgtgccctttgaacaacatctcctcatttccctattccccagctcctggcagccaccattccactctgtgcttccaggagctagagagtttttagattccacatgtaagtgagatcatgctgtattcagctttctatgcctggcttatttcagttagcataatggcctccaagttgatccgtgttgtyacaaatgagaagatttccttcttttgaaag

SEQ ID NO: 524972 - DNA, 515 bp, Homo sapiens
aaaatactgagttataataatctgattatttgttttttactttagcctgcatgtttctmtaagatggagagtggcatattattgtgctatcctttttttttttttattcctggcataatacagagactagtacagtatttagtatacataaggtaattggtaattttttactcatcatgctttagtttacaaaggaaatttaatggctctagatgccaatctaaagattcatatttaactgaaaactattgtattcctcaaatttggaattcagatgatcacccttctatcaaaacactgattaattcaatggtgttggtatcaccccaaactctattgcacatggtaactctgtcatacatctataaagcctagtagctgtattgggtgagatgaaaaaaactgcttatattccacagcaacataattacaaataagttttaacctattaaagtacagagtctctctcatcactttcaaagcaggaccctacttaccaataattcatagcatac

SEQ ID NO: 524973 - DNA, 614 bp, Homo sapiens
gcacagcaaaccagagagagcagcctggtgtgcagacctccygcctgccaccacggatcgaaaggcagcaggggatggtggacatattttttatttacttacccgggagagatggggaagaatctgtatttttaaaactggtcatatatttaaaaaggactctgactcaaatgatgtagtcagacaattcaacctttacacagtcacagtttctgaagacttctcataaaattttattaaaaatattttaataatagaacactacaaccctcctgatcctccttttaagagatttttaagtacaaaaccctacacactgtaacaataaacagaccgaattaagcaagacgttttgaacagaatgagtacggttggtcctccctacccatgggttctgtgtcagcagactccaccaatagcagataaaaaattgggggaggaaaagcagtaaaaataatacaaattaaaaaacaaagtacaacaactattcataaagcatttacattgtattagttattataagtaatctagagatgatacaaaaagtatgtaggaggatggtaggttacttacaactactaactttatctaaggaacttgagcatctacgattt

SEQ ID NO: 524974 - DNA, 515 bp, Homo sapiens
aaaatactgagttataataatctgattatttgttttttactttagcctgcatgtttctataagatggagagtggcatattattgtgctatcctttttttttttttattcctggcataatacagagactagtacagtatttagtatacataaggtaattggtaattttttactcatcatgctttagtttacaaaggaaatttaatggctctagatgccaatctaaagattcatatttaactgaaaactattgtattcctcaaatttggaattcagatgatcacccttctatcaaaacactgattaattcaatggtgttggtatcaccccaaactctattgcacatggtaactctgtcatacatctataaagcctagtagctgtattgggtgagatgaaaaaaactgcttatattccacagcaacataattacaaataagttttaacctattaaagtacagagtctctctcatcactttcawagcaggaccctacttaccaataattcatagcatac

SEQ ID NO: 524975 - DNA, 598 bp, Homo sapiens
gaactagcttaaaaggtagattttctcctctcatgtagaaaacttgataaagataaaattatgtcaatagcaaattatgtataactttcaattattacagagcctttatatgtgttacatcattggaagtcatatataatccacaataagtcattctggaagacagcactataacatatacagaaaggactatagcgttgttctggatccccacctagcctcagataaagtctctaggacaggattgtggttaatatgtaatgtatggcctggaacatacagtagctctaggtttatcatacctggttgaatggcaataaccagaatgtcagaaagctctggatttagcctatttaactttctgtattaagagctatcatgagatacaaattcagaggggacacaaaggtaggaattacactaaatacaacagatgccagattcaggatcctaacacacgttagcaagcttgaacaacagccccgacccagtccaacagcagccaggaagggtcgatgagcacttgagctcaggtgcaggatggatgagacgtatccttcagagcagctcccatcrcagtggcaagagtgggctgcag

SEQ ID NO: 524976 - DNA, 585 bp, Homo sapiens
ctgctttgcccttccccttcgctgcctgccatctcttggtccactcagactcagacaaccaacacagagctgagaccctagcataacacatgcagggggtgagtagagatactaaagaaactgttagctcgagttccagagagcttgcatttctgcagggggtggggagaccactggggactaactgaagggcagtgtgcaaactaggaaggacaccaaaatgggcaaactgatgcctctttatgagaccttgagccagccactccctctttgttaagccagccgggtctctctgcaggtttgtctgaggatgctctgaaagagaatgggggagttgggttctctacttaggtgtcaagctatgcagtttatgtggctaaaaatagtcttcaaacttttggcttagaatgacttctcatggtttctttctgytctgacaccctaaggttctatgagctcagagccttgccaggatattcaccctctttctaacttatatcccaggtatcttctggatctacttacccataatctccagagaggctaggagaactaatctttgcatcctacccaatgacatggaag

SEQ ID NO: 524977 - DNA, 348 bp, Homo sapiens
ccatggagctagggacgggcgaggctcctgggctgggcaaagccttcaagccccaggcaaggcctgcccactggaccacgagcagcctccaccctgaggataagatcctgtggactctaggagagtgaaaggcaggcctgcaaagtgaggtaaggaggaggaagcacagaacatggaaaaacctgcacaaggctacccccatttcactcccctacactcacacacacccaccagccaggcaaagctttgttgtctttgttaccacactccaggtccatggtgytcagggcagcagttgcataatcccgatggggccccactccagcagtacggcaagacaatggggct

SEQ ID NO: 524978 - DNA, 469 bp, Homo sapiens
gaactggaggttaaagatgtcagtatgacttctggcaaatcctggagactaaagattaaccacacagcagtgtgtgattgagccgcaataaaatctctggacaacaaaatcttgggtgagctttcctggttggcaatactccatgcatgttgtctcacattggtgytgggaaaggaatgtgtccatgatgccaggggggaggacagcagaagctctcttcgtgccaccttccctggactctgtcttacgtacttctttccttggatgattttaatttgcatcctttccttgtagtaatccataatcacgagtataacagcttttagagagtttggtgagcctttccagtgaattatcaaatacaaaggtggttttggaaatccgctcccatccctaaacattcaactggtgtcagaagtgagagtgaccttgtgtgggggctataccccctacttagtccagttgtgca

SEQ ID NO: 524979 - DNA, 456 bp, Homo sapiens
agatgtcagtatgacttctggcaaatcctggagactaaagattaaccacacagcagtgtgtgattgagccgcaataaaatctctggacaacaaaatcttgggtgagctttcctggttggcaatactccatgcatgttgtctcacattggtgctgggaaaggaatgtgtccatgatgccaggggggaggacagcagragctctcttcgtgccaccttccctggactctgtcttacgtacttctttccttggatgattttaatttgcatcctttccttgtagtaatccataatcacgagtataacagcttttagagagtttggtgagcctttccagtgaattatcaaatacaaaggtggttttggaaatccgctcccatccctaaacattcaactggtgtcagaagtgagagtgaccttgtgtgggggctataccccctacttagtccagttgtgcag

SEQ ID NO: 524980 - DNA, 648 bp, Homo sapiens
aagctgaaaggatcctatgaggtaaytgatggcctctgggctcctggtgagtcaaaatcacagggaagagaaaattatgggccaagtggaagtcaagaggggaaaaagaatgtcactagaagacatttgatacaaggcagacattagcagatatacagaggtaattgagctactccaatggtggatatgggcatgaaaatatgactacctgttcctcctcaggttgcagcaaaatataacacccagactacttgtggcctctgtgcatattgtacttctggtttactttgaagaatttctctcccctagcactagagaaacaaggagaagatctcaaggctgccctggattcttcatgaaatatgctcttgttttcatgatgtttggatgttgtaccaaacctaagtccctattcctgtgtacccttaaaataactttgttatgtcatcaccactgtatattgatatattgataaagttctggctttttaaaaaattatatgtctttgatgctcaaacatacccagctgaattattcataacattcatcaaatgtggcttatcggttcaattcttctcagaaaaaaaagaagaataaaatattctccaccaatatgcatctaacatatttttcagctttgttgtgaaa

SEQ ID NO: 524981 - DNA, 602 bp, Homo sapiens
agccagacacctcacaaagaagcttgggaacaggctactatatgacaacagaccatttggagaaccacggagctcctagacattcccaaacatgagtgacaccatcttgggcattccaagtttctagctgaatacagccatgtgaacaaccccattcaatgccatgtggcaaagaactgtccagctaataagtgataattgttgtttcaagggatcaggctgtgggatgggttatttcccagtaatatataactgaaatatttaacagaatatattatagttacacgttcacaggtctaattccttatggtagattggattttccaaagattactgcaccaacacctcccatgccacatgcccttttgctgtgtgtccttgccatcccaccttcaagaaatggagtccaattcctttctcctagaacttgaagtggccacagtgaagaagtagcactgcatgacttccaagtttagttcttttggcttctaccttgttctcttggaygttccatctcaggtactcctgtttggaacctcgtcaccatgctagaagaaactgaagctgcatggagtggtcacatgtatatgctcgagtcaaca

SEQ ID NO: 524982 - DNA, 495 bp, Homo sapiens
tcccaatccaggcaccagacatgggagttaaaaaatctccagatgattctgcccccaaccactcaaatgtctccaagcccactggggtcttcttagtggagcctctagacttgtgaaacagagagaagacaactccactgagctctgtccaaacccctgaaacacagaatctaagagcaagataaagtgattgttattttatgtcacaaagtctggagtagttctttactgaacaataggtggctggaacagttcccaaccaaactgtgggcttctgaaaggwaggaaagctttagtcatcattgtatcactcattgtattagtttatagcaagatacctggggaaggaggaaggcacgcaccaaatatctgttgtaactgaaagaccgaatgtctgctgtctttttttgtagatgtgttcaactatatgaagtgttggaaacctacatattaggactggaaacagtatgggaaaaatatttgtgggccaggttt

SEQ ID NO: 524983 - DNA, 606 bp, Homo sapiens
cccaatccaggcaccagacatgggagttaaaaaatctccagatgattctgcccccaaccactcaaatgtctccaagcccactggggtcttcttagtggagcctctagacttgtgaaacagagagaagacaactccactgagctctgtccaaacccctgaaacacagaatctaagagcaagataaagtgattgttattttatgtcacaaagtctggagtagttctttactgaacaataggtggctggaacagttcccaaccaaactgtgggcttctgaaaggaaggaaagctttagtcatcattgtatcactcattgtattagtttatagcaagatacctggggaaggaggaaggcacgcacmaaatatctgttgtaactgaaagaccgaatgtctgctgtctttttttgtagatgtgttcaactatatgaagtgttggaaacctacatattaggactggaaacagtatgggaaaaatatttgtgggccaggtttatcaaactatgtttttaggattctgacaaaatggctctttattttccttttttcattgtataaaattctatggaagaaattggcacaagcaaacagaagtggaacaaaatag

SEQ ID NO: 524984 - DNA, 631 bp, Homo sapiens
ctttaaaggtgaaagccagattagggtacccaaaggtgttgatgttaatgtgactaaagccacatgtttcrttaaacctcttccagcctcaccctctctgatggttacagcaagaccttgtcatgaaaaccctcccaggtgtgaagaactcaaacaaaaagaaagttgacccagatctggtagattatatgaggtttagaagctagatttgaaaggtgcccaaaggaggaaaattgatttactcttttttgaagaagagaggatgtaggacagcacacatctataaagaccacgttatagctatccaacttaggcacacaaacacatgcacatgcacaaacacacgtgtaattacacgcacatatgcaaattcactggaaccctttttccctttaaatcccagactgctaggatattatctagttgttaaatattgattctctttgcacctttgttaattctctaggatcaaatttccttatgtattcttggccttttaattttatagagtgggacgttccataaaaagagaatgtgtaaaaattatgatctgtctttcatttttcaagtgggaattatggaatttatgctcatccatccatagtatcttaccctggagctcatgtctgtt

SEQ ID NO: 524985 - DNA, 642 bp, Homo sapiens
tttcactggaatttgggatgtgaaaaatatattaagcaattcttaaacaaaagccttatgattgtaatgtcagaagtcccatctataggaacaatgttgatgtaaatggtcaacatctagtgaattttagttacaaggaaataggtcaaagtgaagcctgattaatacttacttataactctatttctgtcctgaattcttgttcaccatgtgaggatggcttcaccactcccatctctaaatcacctgcctcaggagggtccttatgaaaggatcccctcttatcctcagaaacacataacttttcttataaatactttctatgtttcctcagaaatgcactacattctgatgtagagtatctaatgccarggggtaagaaatactatgctgtccacagagatgcatgtgttctgtcaatcaaacacaaataatcactttaataactaattctcactgactgtatagttcacacctaacatgtaatcatcacagacactggtttcataagtagcctcctgactaacctgggcaggaagtataacaatgaaaagaggcatgttgtgtagacaagttgccaatgctgtaggcaagttggtccacccttctttggtctagagaaaaagattattaactcctttc

SEQ ID NO: 524986 - DNA, 642 bp, Homo sapiens
tttcactggaatttgggatgtgaaaaatatattaagcaattcttaaacaaaagccttatgattgtaatgtcagaagtcccatctataggaacaatgttgatgtaaatggtcaacatctagtgaattttagttacaaggaaataggtcaaagtgaagcctgattaatacttacttataactctatttctgtcctgaattcttgttcaccatgtgaggatggcttcaccactcccatctctaaatcacctgcctcaggagggtccttatgaaaggatcccctcttatcctcagaaacacataacttttcttataaatactttctatgtttcctcagaaatgcactacattctgatgtagagtatctaatgccagggggtaagaaatactatgctgtccacagagatgcatrtgttctgtcaatcaaacacaaataatcactttaataactaattctcactgactgtatagttcacacctaacatgtaatcatcacagacactggtttcataagtagcctcctgactaacctgggcaggaagtataacaatgaaaagaggcatgttgtgtagacaagttgccaatgctgtaggcaagttggtccacccttctttggtctagagaaaaagattattaactcctttc

SEQ ID NO: 524987 - DNA, 374 bp, Homo sapiens
tcccaagtcacattactatagaaaattagctaacaatagtgttgacacctgtttctctcagctctatcttccgatttccctgactatacaaatattcacttttcctactgaaactttcacagtaatattttctctcctgttacacctgccaaaatgtaaaccttattaaaggcacttattaatttaaaatctctttagtgatagccttaatcacatggaatttgctaaatcyttctggagtactttactatagaatgtcatgtatatttctacttgaatttcccaaagctgcactattagtagtacaaacattgatgatttatgattttgcagaaaataaattgctgttaaaaataaataattgttttcaaaat

SEQ ID NO: 524988 - DNA, 563 bp, Homo sapiens
tagcaaaaatatggcatctaatggattttaagctatttcactgagtaaaggggcctgaaataaactctggctctcatgggaggacgacataatatgcaacgggtgtttaaagttactttattgatgtgtaatctttatataataaacgttgctaattttaagtatactatttgatgagttttgacaaacaaatgcagtcatatgcccaccataaaaattgtgacagaggatgtttttataattcccccaattctctctgctccttttgatacagacgatacagacaggagacagggaaatattgggtagaagagggcagttccctggcaaaggttccccccaagcctggaaatccacagccctaaatgaaaatgggccctaagtgaaaatgkctctaaatgaaaaaaggcaaaagttgccttttggcccaccacgccccctgtcctgtacccatataaaccccaaaccccaggctccacgaggagacaaaaacagaagagcagaacagcagaatggcgtggcagagagacaagaaggagagtccgtatgccgagaggagttca

SEQ ID NO: 524989 - DNA, 563 bp, Homo sapiens
tagcaaaaatatggcatctaatggattttaagctatttcactgagtaaaggggcctgaaataaactctggctctcatgggaggacgacataatatgcaacgggtgtttaaagttactttattgatgtgtaatctttatataataaacgttgctaattttaagtatactatttgatgagttttgacaaacaaatgcagtcatatgcccaccataaaaattgtgacagaggatgtttttataattcccccaattctctctgctccttttgatacagacgatacagacaggagacagggaaatattgggtagaagagggcagttccctggcaaaggttccccccaagcctggaaatccacagccctaaatgaaaatgggccctaagtgaaaatgtctctaaatgaaaaaaggcaaaagttgccttttggcccaccacgcyccctgtcctgtacccatataaaccccaaaccccaggctccacgaggagacaaaaacagaagagcagaacagcagaatggcgtggcagagagacaagaaggagagtccgtatgccgagaggagttca

SEQ ID NO: 524990 - DNA, 621 bp, Homo sapiens
ccctagaatctctctccgctcctagcaaccactgatacagtttccatagaatggacctatgaagccccctgagccagaagttttctttgtaggaaggcgttaaattaagtttggcctaaagctgcctctgaacatatttttagtttcgcctaaaggtttctctatacatgttgcactataaactaataatgagtaaacaaattgtaacctactatctttttttttttttttgagayggagttttgctcttgttgcccaggctggagtgcaatgacatgatctctgctcactgcaacctctgcctcccgggttcaagtgattctcctgcctcagcctcctgagtagctgggattacaggcacacaccaccacacccagctaattttttgcatttttagtagaaacggggtttcaccacgttggccaggctggtctcaaactcctgacctgaggtaatccacccacctcggcctcccaaagtgctgggattgcaggtgtgagccactgcactcagctataacctactcttgtaacaagagtaatggaatcataactaaccatatgcagccaactgtccaaagcaggttcaaataaggcagacatccagatgtaaccaacccag

SEQ ID NO: 524991 - DNA, 621 bp, Homo sapiens
ccctagaatctctctccgctcctagcaaccactgatacagtttccatagaatggacctatgaagccccctgagccagaagttttctttgtaggaaggcgttaaattaagtttggcctaaagctgcctctgaacatatttttagtttcgcctaaaggtttctctatacatgttgcactataaactaataatgagtaaacaaattgtaacctactatctttttttttttttttgagatggagttttgctcttgttgcccaggctggagtgcaatgacatgatctctgctcactgcaacctctgcctcccgggttcaagtgattctcctgcctcagcctcctgagtagctgggattacaggcacrcaccaccacacccagctaattttttgcatttttagtagaaacggggtttcaccacgttggccaggctggtctcaaactcctgacctgaggtaatccacccacctcggcctcccaaagtgctgggattgcaggtgtgagccactgcactcagctataacctactcttgtaacaagagtaatggaatcataactaaccatatgcagccaactgtccaaagcaggttcaaataaggcagacatccagatgtaaccaacccag

SEQ ID NO: 524992 - DNA, 621 bp, Homo sapiens
ccctagaatctctctccgctcctagcaaccactgatacagtttccatagaatggacctatgaagccccctgagccagaagttttctttgtaggaaggcgttaaattaagtttggcctaaagctgcctctgaacatatttttagtttcgcctaaaggtttctctatacatgttgcactataaactaataatgagtaaacaaattgtaacctactatctttttttttttttttgagatggagttttgctcttgttgcccaggctggagtgcaatgacatgatctctgctcactgcaacctctgcctcccgggttcaagtgattctcctgcctcagcctcctgagtagctgggattacaggcacacwccaccacacccagctaattttttgcatttttagtagaaacggggtttcaccacgttggccaggctggtctcaaactcctgacctgaggtaatccacccacctcggcctcccaaagtgctgggattgcaggtgtgagccactgcactcagctataacctactcttgtaacaagagtaatggaatcataactaaccatatgcagccaactgtccaaagcaggttcaaataaggcagacatccagatgtaaccaacccag

SEQ ID NO: 524993 - DNA, 621 bp, Homo sapiens
ccctagaatctctctccgctcctagcaaccactgatacagtttccatagaatggacctatgaagccccctgagccagaagttttctttgtaggaaggcgttaaattaagtttggcctaaagctgcctctgaacatatttttagtttcgcctaaaggtttctctatacatgttgcactataaactaataatgagtaaacaaattgtaacctactatctttttttttttttttgagatggagttttgctcttgttgcccaggctggagtgcaatgacatgatctctgctcactgcaacctctgcctcccgggttcaagtgattctcctgcctcagcctcctgagtagctgggattacaggcacacaccaccacacccagctaattttttgcatttttagtagaaacggggtttcaccacgttggccaggctggtctcaaactcctgacctgaggtaatccacccacctcggcctcccaaagtgctgggattgcaggtrtgagccactgcactcagctataacctactcttgtaacaagagtaatggaatcataactaaccatatgcagccaactgtccaaagcaggttcaaataaggcagacatccagatgtaaccaacccag

SEQ ID NO: 524994 - DNA, 591 bp, Homo sapiens
gcctgggctctgcagctctccrcgtcctccacttactgagtgggctcctgagattccctttggcggggccgtctaaaacttttcttagtaaaaaatggaatctaaattgggcagaaggtgtgtggtgtaaactcccttcctgctgtggtgaggacggtccgagcagatgttctaatgcccgaggtgctctccaggctcagaagtctccgtgggtgtccctagccccagcagagccccagggagaggcagcctccccagcagggagtctgagagtgcagcgtggctcagtggggacgctgtccctccagggctggtgcctggcttctgtcttctattttcccctcggtatctttctctttctactgaactctggaagggctttctttataaaaatttaacaaaatgtaaatggtaacaagctccgtttgtcacctctcccctggatatttacacacaaatagacccagttggaatcggcaaattttgctccctgcttgtgaagctcttaaacccgccgatctcatcggggaaacgagggtggggctcctacctcttgcatttgcttattgatccagcaagcatgtattgggc

SEQ ID NO: 524995 - DNA, 616 bp, Homo sapiens
cattaattaccattatcaagacacgtcccaggcaagataataacaaaaacaacaacagaagatcatggaagcctcagcaaggaaacttttcaaagtcgctaacctcgtggtccagcagggagaggtggtgggcgacttaccgctgtcaacctcagctcttaactcacggaagattatgttctcactgtcacagattccccactctgacctcagaaacagtgtccatgattgtcagccacttggattattccttcacccagagtttgagcaacagcacctttgtttcataccccaaatcaaccattcctagaactcgctgtttttgtttgctcccttgagtcttagttgtttgcagtgtgttggtggagctgagctgtaatgcacgattgatccatagggactgctgagagtttctttgcttgaaggtttgatgtgaataaacacatcactgtcttamcagctttttcttcttttgagaatacacatgccaatatttagaaaggtatattttctagataccatagggtatatttttgacaaatattaattccttgcattaaatgaagtcataatggacaccatttcaaaaatcttggattcaacaaaggatgtccag

SEQ ID NO: 524996 - DNA, 498 bp, Homo sapiens
tggttacctttcgggtgctgaaaaaccctggagattcatatagtctggcagtgagcccacagtgttcctttttgattataagtcagatgtatttccaatcaattacagcrggctcctttttggaatttttctcttagaagtcagatgcacatgtgctcacagcgaggtggacccggccataatacttctctggtcactcttgtagttcctcccaaggactggctgccagcgttcctgcatgtgcaaaggacatgggagacactcctggcctttctttccctttgcacccaatcaatcttcttctctgagacattttctctatttctagtacgtgaccagcaaacacaagggccccggcccggtgcactgagtgctaatacatgaatacaggaagacataatgccagttttaaaaagataggagaagttgtgcaggtttaaattgattttgggtggggggttgtttaacctcatggcatgctctactagtctgtgatct

SEQ ID NO: 524997 - DNA, 463 bp, Homo sapiens
agctcctgcaggccccagagccagtcttggagccagaaccggctccccgagggtcatgatcacctggagggcagcaggcatttttcctgggtccttccagcaacgctttccggagctggtggctttctgcctccctgggctccacatgagacacagaaaggaaccccaaggaactccctgctcttgggcaccccctttatttactgttcttgaggaagctccaatcagacctgactggggtcggtgagtttatttttaccatctgtgtggacgrtccagatgggcccagctccaggcctgaggaagagcctcccttacaatctatccatacgtctcatggtttccagttccaaaacatggatcttccgtcatgtaactccttccagcatgactgaccgacccgctccagcaccgcaagccatcagcatggactcagccatgacggtgtccctcccatgcccag

SEQ ID NO: 524998 - DNA, 463 bp, Homo sapiens
agctcctgcaggccccagagccagtcttggagccagaaccggctccccgagggtcatgatcacctggagggcagcaggcatttttcctgggtccttccagcaacgctttccggagctggtggctttctgcctccctgggctccacatgagacacagaaaggaaccccaaggaactccctgctcttgggcaccccctttatttactgttcttgaggaagctccaatcagacctgactggggtcggtgagtttatttttaccatctgtgtggacggtccagatgggcccagctccaggcctgaggaagagcctcccttacaatctatccatacgtctcatggtttccagttccaaaacatggatcttccgtcatgtaactccttccagcatgactgacygacccgctccagcaccgcaagccatcagcatggactcagccatgacggtgtccctcccatgcccag

SEQ ID NO: 524999 - DNA, 606 bp, Homo sapiens
ttttttgagacagagtctcactctgtcacccaggctggagtgcaatggtggcatctcggctcattgcaagcctcgtcttctgggttcacaccattctcctgcctcagcctcccgagtagctgggactacaggcgcctgccaccaggcccggctaattttttgtattattagtagagacggggtttcaccgtgttagccaggatggtctcgatctcctgacctcgtaatctgcccgcctcagcctcccaaagtgctgggattacaggcgtgagccaccatgcctggccccaactttcctctctttaaagccattagaatatctgaacatatgccctgtgaagcccctgaccagaataagtgttggggacaactttatagttgtcrtcagtagggaacctaggagtgtgttgatatttcagagaacctcatcagcctacagatggcaattttcacaaagaaagtgctcaccagcttgtaactagagtttcctcatttcttggtgagtttataggttcaaaagaccctcaaatacgggccagtgacttcccattttatcagcttgctggggagtcaagctttagagaaggcggggtccatctcagtatg

SEQ ID NO: 525000 - DNA, 606 bp, Homo sapiens
ttttttgagacagagtctcactctgtcacccaggctggagtgcaatggtggcatctcggctcattgcaagcctcgtcttctgggttcacaccattctcctgcctcagcctcccgagtagctgggactacaggcgcctgccaccaggcccggctaattttttgtattattagtagagacggggtttcaccgtgttagccaggatggtctcgatctcctgacctcgtaatctgcccgcctcagcctcccaaagtgctgggattacaggcgtgagccaccatgcctggccccaactttcctctctttaaagccattagaatatctgaacatatgccctgtgaagcccctgaccagaataagtgttggggacaactttatagttgtcgtcagtagggaacctaggagtgtgttgatatttcagagaacctcatcagcctacagatggcarttttcacaaagaaagtgctcaccagcttgtaactagagtttcctcatttcttggtgagtttataggttcaaaagaccctcaaatacgggccagtgacttcccattttatcagcttgctggggagtcaagctttagagaaggcggggtccatctcagtatg

SEQ ID NO: 525001 - DNA, 596 bp, Homo sapiens
tatttattggtaaaatacagaagtatatttcatttttgtagactgtctttcttgagatactgctaaactcaataaggcaggaaaaagaaatacatccatatagattttgaagaaatgaaaacagccctttatttgcaggtaatatgattatgtacatgaaaaatactcaggggcttgtattaattttttaattaaaaatgacaagccagatgcctatagcagtggttcccagacawggtcctagaccaattgcatcaaaacttcaggagaccattaagaaatgctctctgctgtactcatcttaggagagtcttatttaaaacacagaggaggagagcttgtcatttttatttttgaaaacttacctaggttgtgttgacacagctgtttacttatgcttatttacagcattcaggggtggggaatcatgaaaattctgggacaatgacccaagtttctctgcagggtgcatggcaggtgtatttcacgatcactaaaaagggaattttgtgggaagagattaaggtggaagcagccagttcagcggagggcatgttgcgttgtgctgcctgtgaacaccaggcacaagttcctta

SEQ ID NO: 525002 - DNA, 596 bp, Homo sapiens
tatttattggtaaaatacagaagtatatttcatttttgtagactgtctttcttgagatactgctaaactcaataaggcaggaaaaagaaatacatccatatagattttgaagaaatgaaaacagccctttatttgcaggtaatatgattatgtacatgaaaaatactcaggggcttgtattaattttttaattaaaaatgacaagccagatgcctatagcagtggttcccagacatggtcctagaccaattgcatcaaaacttcaggagaccattaagaaatgctctctgctgtactcatcttaggagagtcttatttaaaacacagaggaggagagcttgtcatttttatttttgaaaacttacctaggttgtgttgacacagctstttacttatgcttatttacagcattcaggggtggggaatcatgaaaattctgggacaatgacccaagtttctctgcagggtgcatggcaggtgtatttcacgatcactaaaaagggaattttgtgggaagagattaaggtggaagcagccagttcagcggagggcatgttgcgttgtgctgcctgtgaacaccaggcacaagttcctta

SEQ ID NO: 525003 - DNA, 607 bp, Homo sapiens
tcaacaaccatgtgagctggaaaacaacttctattatgttagccatggagacttagcagcgtaactgtcagttccagtttgcctgtaattgtcctggttttagcactgaaagtcctgcttcctggggaacccctcagtcttaggcaaacctaaatctaatcaccctagatttggaggtcatttggtatagcaattgagctgccctgactggtgtgtgacttataagatcacacaccaatcttataagatgggtattactattatcctcattgtgtagatgaataaactgaggctgggaagaagttatttctcaaggtcatcttccagaaggctacttagctagtaggggagccaggaattaacraggaagtctgtccctgagtttgcacttcaaaccataaggttgcactttcttttcggggtcctagtgaaaaatgagaaaggaaaaatctggtggaaatgcatctcaaaggcaacctgaaaactcctacttcagaatccacctatcacatctgtgtctattcatggttccctgattatccaaggcagacagaagcatgtccctctctggggaattctcaaaacatcctctccctataatatctgc

SEQ ID NO: 525004 - DNA, 540 bp, Homo sapiens
tagccactaatatactgcactctgcaatatccataatggaaagaaggaaggtagaactttggcaacccgcttggaaaagattcaatgcacatacagtgtattctacaacagacgtgcaaagcgagaatttcactcggtgattaccgaaactgataaatgcataaaattcaagcccctttccaataggtgcattcaatgaaaaactacagtccrgtggatatctctgaatgtcctggatgcactgaaagaacttgatacagaccacaggaggagagatttggcagacttcgaaacaagaagggggcagctacaaagttgtttaatagccataaatctcccactgtttttcacaaaataccatctaagaccacagctccacaactcattccccatcactcagctcaagtggagcgctttggcatgctcgctcacccttaaatcatacaccacagaaagtgatcccgggtctgggaaatatgtcagcctctttcaagcaaaagcaatcttcacttttcatcacaattcatcccctgaaaccat

SEQ ID NO: 525005 - DNA, 631 bp, Homo sapiens
ctggccccatcagaccactattgattaagggtggtcacatggtggttccacagagttaggtctatcccagaatacagtgtagtggacaccaaagaggccaaaagggcaaattccccttcgaaagcagacgacctcctgtgtaagtcttcaggagcccctcactgcatcccagacattcaaaacatctcatcattatctttaggccaaactgaactcattatgcagtggctcaatcctgacatcaacatcaacaaaaggcctccacctccagaaaaccctccccacgaggtcttgcagatatcataaagtttatacctttcaggatcttagttgacatcaggcaggtttatcatacaattttattcttctaagctttggtatcccacagaagattaaaaacagccacaggcatctaaatagagcaacatgaggggtrggcaagggtagctgctggggtcacagtatgacatggaaaaagaaacaaccacaaaaagctagactaagagctgaaccacaagatgctgcaacagacctctgaaatgatgacaccccaggcttcctccactcctccacacatatatatgtcaacaggataaagttaaactcagtgtggtatgttctgtttaagtga

SEQ ID NO: 525006 - DNA, 581 bp, Homo sapiens
aaggaaaatcaagaatactgaagagatacagtcccatcccagaagggtttatatagctgagtaacatgatgccagaaacaattagacccacatgatggagagaagagaggatccattggaccttccatcatacagtcacaaaacaatttgttaaaacctataagaaactgagtagaatggtatgcttcatggaagaaagaattctagaaagtaactttttaaggcacagcccatgttgttcctttaactacatgcttccttgatgaaattctattcactcttcaaggttcagcttaagcatcatctctttggctaccccaggcctcttagggttgcacggcacgtcatgggtgcctatgtgaaagtacttggtggtgactgagttcttgacagactttgagagtctcyaagtcagagttcatttcctctcctacctttgtaatttaggcactagtaccaggcctgacacagaaggccctttgcacaggctcagttaatgagtaagtaaaggacaaggagagaggatggcagccactccagattatttctgtcttcctgccttcctctccaatgctgcttgg

SEQ ID NO: 525007 - DNA, 638 bp, Homo sapiens
cgcctgtagtcccagctactcaggaggctgaggctggaaaattgcttgagcccaggagatcgaggatgcaatgagccatgactatgcactacatgcaagcctgggaggcagtgtgagaccctgtctcaaaaaagaaaagaaaatctttgcattgacatctgtttccagaacaacatggcggcagcttatttgtgaattgtccctctttcttgttgttaataatatataacaacaagaagaaaacaaaacaaaatccacaaacaacatttcagcaaaactaagaaacagaaaacctgcaaactcaaaattgtggttaagtactgctgaaaacagagttgtacagcagaactggatgggaagttgcaaaggtactatggaagagaaacatgttaagggaaaggtggtctgacaggtgctgagaagtctctagcatcttccagaagagcaagagcctgttactgagaggaagtgcctgtgagtgtgatgtagcttgaacagggcaggactgattactggggaggcagagagagaaagctaatcaaggctcaggctgygggtacagagggggaagatctcacaaaataccagctatagtggcgtcacctgggatggcaagaggagggatttatgaaacagag

SEQ ID NO: 525008 - DNA, 467 bp, Homo sapiens
  misc_feature (1)...(467): n = A,T,C or G
tttgcatgatgttcttcctaatgtgtctgtctgtgtgttctctctttttctgataagaataccagtcactagatttagggcctacctaatgcagtatgatctcctcacagtccttaactgagtacatctacaaaggccctatttccagataaagccacatactgatgttctgggtggacatgaatgagagaaggggaaaatactattctacccactgcaataattagtaaataatcttggnaaattaaaaagttagtccctaaaattcagaaaaaatatttaaaagaacctaattgttgggataaatgctaaaacacaaagtgagagaataattggaagacatttgtttttaacatrccactattaaaaactctttagaccaagttcatacaaaaatgttagtaagaattagaatatccttagagagtcctagaaaatttgaaccaaaatttaataagtttctctaa

SEQ ID NO: 525009 - DNA, 463 bp, Homo sapiens
aatttctatagcccctctgaggcaccattgccatccttggtgaccaggtcgtctgacttttgttaaacaccactaagcgtgatgcactcctccttggcctatacycccctggagccatcgcccctggtgttagagccagaacatctggctgagaggatacaggctttcttcagctttatgtaggactagcattggcagagaaatagagaaagcaaaaagggacttgtatatctccatcaattcttaaactgaggacctgaaagatgattctcacctgttgtttcccaataatccagggaaagtgttgatggggagcaaaaaatagccttgagcagcaatccagttggctttaaaaggccatctaaacgtcattttaaaatctcttggcacagacacgtccagaatattgaccagaagacagaagaagggtgactactgagcaattctctgtcgtatgttcgag

SEQ ID NO: 525010 - DNA, 607 bp, Homo sapiens
  misc_feature (1)...(607): n = A,T,C or G
atgtatggtatgagcactgtagacaaacagaatatcttgggcagtaatgtgatctggttcatataatttcaaatttcgtgacctataagagtctttagtctgagtgtttcatttaacagaggaggaaactgaagtacaaagggaaatgacctcccacaatcacacacttaaccagtagagagctgtggatcctcaaaacccacattaccaccttgtcaaacaactaggatgaaatacaataaacygagcataaaactttttgcacagtttatcttcttgatgctacagagctgtgccatggtgctaaaaaacagtagagtcagagtcagagagtctggctttgaattccagcactgttcataatcatgggcctcaggcacaccgtccagcttccctgagcctcagtgttcacatctgtggaatgagcgtgatggccacctcccaaagcggatttcagtgttcactgaaaccatatgtattaaaatattttgtaaattgtaaagcttcatgtaaatgtgaggtttcattattttttttttgttggaatcttcaattgcctcaaaggcctaagaatatcagttacatgnnnnnnnnnnnnnnnnnnnnn

SEQ ID NO: 525011 - DNA, 533 bp, Homo sapiens
tctggcatgtgtcttttccaaaggaagaaataccatctgcagatgaagatttgtaatacagaaaaatacctggttcctattttctgtaccaatttgaaggttagagatacatgaacagagttcaaagaaatattgactacagaatagattaggaaaagtccagtgatttgcaaggaagatgaacatatgagatctacctatggggctttcccttcttaccttgcccagaaaataatgataggtttctctgtctacctcagcacccatctgtgaactggtggaaggagccatgtttatcaaacagagagtggaagaaagcaccagaactgcaaatccagaatttcagtctacagagtaaggaagggacaaggctggccctgcatctattcctgtagaccctgcaatgccaggggatatagcacaaggccattgtaagttccatgaggaactaggaaagagaaaaaaaaaasagaagcatctaaaaatatgttaaaagttcacatttctggtgctgttttggacattttttatgg

SEQ ID NO: 525012 - DNA, 270 bp, Homo sapiens
cacaagaagcaatgacatccacaggtggggagatcactgtcgttaacctggttggagaacaatacactatrctcaataaagcaaataatacaactggttccctcacaaacatttttccacttctctctccccagtctctcccctcagcagacatataaaaacaggaaaaccctcacagatataaaaacaggaaaaccaaggaatatgcgcgaactttaacccagtgggtatgtgtccaggttcctgcaaactgagggcacaagtgctgag

SEQ ID NO: 525013 - DNA, 484 bp, Homo sapiens
agctgctcctgcagacatagtgagacttaccaccattgatacaatcattaaagctgcaagcagcatattctctggagtttgtgttacccttgtgtactttaggcttttttcagctaactgtgtcagcttctttagctgggcccaggtcggcggcttcgcttttttggtggatggcaactttttctgtaagttgtaggtacccaaactggaagctgattttctcctggtgaaacacaagcaaaacctctcccccacgttatcaccttctctattttttatgttttatttttgttgtctttttaccaaatcagtttttcctcatgtgggctgttctttttaccagtaaaatgttgttctgcagaagtagcggtctgatttctataaatgytaaaaaaatttaaagtatagagtgctagattaagttgcatctggggagtgttatattccttactgtccttttcctttttttgtttaaccaattgag

SEQ ID NO: 525014 - DNA, 571 bp, Homo sapiens
ggactttttttttcattgtatgcaaaggagctcaaccaatatttgtttggctttttttaagatggtgtcttactctgccgcccaagccggagcacaagggcaccatttcggctcactgcaacctmcagctcccaggttcaagcaattcttgtgcctcagcctcccgagtagctggaattataggcgagtgccatcgtgcctggctaattttttttattttcagtagagatggggtttcgccaggctggtctcacacacctgacctcaagtgatctgccctccttggcctcccaaagtgttgggattacaggcatgagccaccacgcccggcctcaatcaatgtttttgaaaaaatgtttatgaattgagggccatagcttttctagacctaaaagataatatattatagcactggaaatgaaggtttggagacccggtattctgtaaaaataagccagtcatttccagatcatccctccctattccacagacaagaatttctgagaggcctcatccagcatctcatgccctagcagcccaggcatcaccttctgagagtcaaatactcact

SEQ ID NO: 525015 - DNA, 672 bp, Homo sapiens
gtggcagtgaccattagaataaggtctgcctgattgtaggaacttctggtcactatgctttcctctgtagtttgagctctttctccgtctctttctactattctacatactctccaattcctccatgtttcactgaagtggagaagaatttagtgagttttataagtctgtctattgtgatttcaccacattagcargtttttttaaaataacactatattatacagatttgccaactttgtttttccagtcaaaaaaattaaaccaagtttttatcttcacctatgatataaaatattgtatgcaaaagttatatatatacacacacatataagcatctttacttttgaaatgcaccagtgttgatcacacgccaataaggaaagcattaggaataatgcaaatctttaataataaatattattattataaataataataataaataatagaaaactgatgttctgatgttaggaaataataccattgcaataagtattctatatgactagcactgctatggatatgaataagtaacattttcttttttctttttttgagacagtcttgctttgtccctcaaactagagtgcggtggggtgatctcagctcatgcaacctctgcctcccaggttcaagcaattctcctgcctcagcctcccaagtagctgg

SEQ ID NO: 525016 - DNA, 672 bp, Homo sapiens
gtggcagtgaccattagaataaggtctgcctgattgtaggaacttctggtcactatgctttcctctgtagtttgagctctttctccgtctctttctactattctacatactctccaattcctccatgtttcactgaagtggagaagaatttagtgagttttataagtctgtctattgtgatttcaccacattagcaggtttttttaaaataacactatattatacagatttgccaactttgtttttccagtcaaaaaaattaaaccaagtttttatcttcacctatgatataaaatattgtatgcaaaagttatatatatacacacacatataagcatctttacttttgaaatgcaccagtgttgatcacacgccaataaggaaagcattaggaataatgcaaatctttaataataaatattattattataaataataataataaataatagaaaactgatgttctgatgttaggaaataataccattgcaataagtattcyatatgactagcactgctatggatatgaataagtaacattttcttttttctttttttgagacagtcttgctttgtccctcaaactagagtgcggtggggtgatctcagctcatgcaacctctgcctcccaggttcaagcaattctcctgcctcagcctcccaagtagctgg

SEQ ID NO: 525017 - DNA, 616 bp, Homo sapiens
tgtaaaaaatatataaatccactgaaacaaataaaaaaagcaaagcaataattaattccaggcaaaataaaataaagtscacaaaagaaaaagtatccagactatgttataagttgccagtaatattcataaagtaaggaggtaaaatcttaatgatgatctaaataaaaccataataaaattatattcataggggactgtgaaatgtgcacatgtatattgcaaaatggggatgaaaaatacagctaaatatttatattccacagtgacaattcaatggctaatgcccaaaattataaaatcaataaatatcaattgatatagtttgaatatttgtccctacccaaatctcatgttgaaatgtaatcccctgtcttagaggtggggtctggttggcgatatttggatcgtggggtggatccatcatgaatggcttgggccatttccatggtaatatgtgagctctcactctgcatgctaatgagatcaggttgttgaaaagtatgttacaccctcacctcagaatctctcactctcttgctcttgtcctggtcacctgatatgcctgctctgtctttgccttccaccatgattggaagctttctgaggcctcgcc

SEQ ID NO: 525018 - DNA, 616 bp, Homo sapiens
tgtaaaaaatatataaatccactgaaacaaataaaaaaagcaaagcaataattaattccaggcaaaataaaataaagtgcacaaaagaaaaagtatccagactatgttataagttgccagtaatattcataaagtaaggaggyaaaatcttaatgatgatctaaataaaaccataataaaattatattcataggggactgtgaaatgtgcacatgtatattgcaaaatggggatgaaaaatacagctaaatatttatattccacagtgacaattcaatggctaatgcccaaaattataaaatcaataaatatcaattgatatagtttgaatatttgtccctacccaaatctcatgttgaaatgtaatcccctgtcttagaggtggggtctggttggcgatatttggatcgtggggtggatccatcatgaatggcttgggccatttccatggtaatatgtgagctctcactctgcatgctaatgagatcaggttgttgaaaagtatgttacaccctcacctcagaatctctcactctcttgctcttgtcctggtcacctgatatgcctgctctgtctttgccttccaccatgattggaagctttctgaggcctcgcc

SEQ ID NO: 525019 - DNA, 616 bp, Homo sapiens
tgtaaaaaatatataaatccactgaaacaaataaaaaaagcaaagcaataattaattccaggcaaaataaaataaagtgcacaaaagaaaaagtatccagactatgttataagttgccagtaatattcataaagtaaggaggtaaaatcttaatgatgatctaaataaaaccataataaaattatattcataggkgactgtgaaatgtgcacatgtatattgcaaaatggggatgaaaaatacagctaaatatttatattccacagtgacaattcaatggctaatgcccaaaattataaaatcaataaatatcaattgatatagtttgaatatttgtccctacccaaatctcatgttgaaatgtaatcccctgtcttagaggtggggtctggttggcgatatttggatcgtggggtggatccatcatgaatggcttgggccatttccatggtaatatgtgagctctcactctgcatgctaatgagatcaggttgttgaaaagtatgttacaccctcacctcagaatctctcactctcttgctcttgtcctggtcacctgatatgcctgctctgtctttgccttccaccatgattggaagctttctgaggcctcgcc

SEQ ID NO: 525020 - DNA, 616 bp, Homo sapiens
tgtaaaaaatatataaatccactgaaacaaataaaaaaagcaaagcaataattaattccaggcaaaataaaataaagtgcacaaaagaaaaagtatccagactatgttataagttgccagtaatattcataaagtaaggaggtaaaatcttaatgatgatctaaataaaaccataataaaattatattcataggggactgtgaaatgtgcacatgtatattgcaaaatggggatgaaaaatacagctaaatatttatattccacagtgacaattcaatggctaatgyccaaaattataaaatcaataaatatcaattgatatagtttgaatatttgtccctacccaaatctcatgttgaaatgtaatcccctgtcttagaggtggggtctggttggcgatatttggatcgtggggtggatccatcatgaatggcttgggccatttccatggtaatatgtgagctctcactctgcatgctaatgagatcaggttgttgaaaagtatgttacaccctcacctcagaatctctcactctcttgctcttgtcctggtcacctgatatgcctgctctgtctttgccttccaccatgattggaagctttctgaggcctcgcc

SEQ ID NO: 525021 - DNA, 676 bp, Homo sapiens
tagttgtcttttagtgcaacgaagctaccatactaagctttgctttcttttaaaagtgaatatattatcatttattgaataaagtataaaggaaatctaagtctagcacaacctatatwgtaaacagatttaaaggatggactctacacggtttttgcactcactttttttttcctgagatgccaaatattacagtctacattaaaatgcattgccactacgtttggcaacgtattcaggcgaagtgtttttcctaccccacatggaatggaacaagagtcacagaaaatttatccttcaggttccataaatgtgtaataaatacttttaatgaacccagtcttctgaactcaggtttttgcaaaggaataaagaaggaattgattttcaagggttttgttttcaaatacatactagttctcaattcaagaacccaataagtgcccctaaaaataccatattcctttacttatttggatattataccttctaaaagagcatcctgtccaccttttatagagatactcagaccttctctactgaaaatgcgaggtaacaagtgtttcatgcatttaattttcttccaaaaccagcatgtgctgaccccgtgcataatttagattcatgccaatatggcagaattatggatgtctcatcccagcaatgcatctaaagc

SEQ ID NO: 525022 - DNA, 441 bp, Homo sapiens
cttggactgttcagtctaaaaatcaagggccagagatgtcaggtatcaccacacacatggtcttagttgaagaacaagaatataactcatgatcctcaattaaaatccaaggaagctcttaaaaatccaatggtttacatcacctatgtggtttctattgctacagttaactcaggagctgtggagtttcaaaagtaggtaaataaagtctgtatttctgtttttccatgcttcagtatactcctatcagagagaacaatagccagtggttagtggtagatctgctgattaaatatgtcctgattaaagaagatattctgtgcagagtgtcccaggataatgcrgtgaaactggaaatgatccttgtttaactttccgaagtacttactggaagctacatctgaagaaggagcaagagaaagataccaacaatgccttaaa

SEQ ID NO: 525023 - DNA, 582 bp, Homo sapiens
ttcttatatttttgtatatatttgaatatgtttatggccaaaaattataaagtttcaaaatctgtaattttagtccctgggctcatcacacggtctggcacaagcttccaccctccccagttctcatgcatggctcatcaatattccgtacattgacccactatcttactcctaagcaagcagacatttccaggctcatgtcaggcaaaagaaaattccctagccagaactgtgactctcacaratttatttttacctgcagccaaagcaaggttagaactcagctctctgtaagaaaaggccaccacattagccctgagtgacaatagagtttccattatgcttctgatgagcagaagatgaatgtatagctttattccacctaatgaacatttcaatcttctaataaacaccctaataaagaaaaatggagacttaactcacttttattatcacaactgacatgtcgaaaggtcttaattggtctgaaaacaacttccaataataataccctccttaattgattcattaacagggcccctactgagacagaagtgctagttcgggaaaaggaatgaaata

SEQ ID NO: 525024 - DNA, 582 bp, Homo sapiens
ttcttatatttttgtatatatttgaatatgtttatggccaaaaattataaagtttcaaaatctgtaattttagtccctgggctcatcacacggtctggcacaagcttccaccctccccagttctcatgcatggctcatcaatattccgtacattgacccactatcttactcctaagcaagcagacatttccaggctcatgtcaggcaaaagaaaattccctagccagaactgtgactctcacaaatttatttttacctgcagccaaagcaaggttagaactcagctctctgtaagaaaaggccaccacrttagccctgagtgacaatagagtttccattatgcttctgatgagcagaagatgaatgtatagctttattccacctaatgaacatttcaatcttctaataaacaccctaataaagaaaaatggagacttaactcacttttattatcacaactgacatgtcgaaaggtcttaattggtctgaaaacaacttccaataataataccctccttaattgattcattaacagggcccctactgagacagaagtgctagttcgggaaaaggaatgaaata

SEQ ID NO: 525025 - DNA, 603 bp, Homo sapiens
  misc_feature (1)...(603): n = A,T,C or G
ataatattgcagagtaaaacaatacttgcattcaaaagattcttctagtaccctgtagggagaagcccaggctttcccctgaaatccctccactcactggtcctcactctttccatccattcttccttgctaccatcagattcagggtctgttgagaggtttatttttcttgccaacagcctgcgggcttcaaaacacaagctcactctttcctttggctgagttaaaagaacatctccatctgatttccttagggacttggtatagtttcctctaactttttctcctcttttccctctctctgcctctgtcttttttctgggtctgccttcccttcctgtttcagtttctcttccccccacactgctcccccttntgcactttgcacaaaatgaccagcactccatccaagcagaaaggcagtgctggcggtggcagcagcagagggatggcaaggctatggccgacactgagatgaacaggtctgcgggaggggtgtgtgccacactcaggaagctgagccctgtgatgatgggygcagaatcttgcgattacacactccataaaacctgccctgctgcagctggattccatgccaggaag

SEQ ID NO: 525026 - DNA, 632 bp, Homo sapiens
caaccatgttatggtagataacatgggatcataagggatacttaactaatcccaatgtaaggttgatggatataaactttatcgtgattgtgctaatggcttcatgagtatatacatataacaaagcttaccaaactgtaaactttatgtacatattattgtatgccagttttcccttataaagccattaaaaagttaaggtgggtctaactactcactgtatctgaaataaaattttttttaagcaataaaatgttccatagttcacattaatgtgccagaaattcaactccataattttggagaataaattagaattgtagaagaatggtatttaaaagagctagaagatatcttagaagccatctagtcctccttcctcatttcatttatatggaaatgaaggtccagataaataatgtgagtyaccccaatttattaccaatcatccaagatgagaataaacaataataaaaaagtaaatgcttacttaatttgtctttttttgtgaaacttctcattgtgatggatatggttttgcctacaacacgtgggttaaagatcgtgttttgactaagactgggaaatcaagctatgagtggtacagtaactggagctactgggaatagcaa

SEQ ID NO: 525027 - DNA, 518 bp, Homo sapiens
gcaaatcaccttctgtgattccttgacctctctgagactgaatgctctttyttttgtgctcccagtgaccttaaatagtgttcacatatccatttaagcattgtacacctcctgttgtagttgtttgttttattggcgcatctgatacccactgtgagctctttgtgggcgaaggccctccttgccttcgtctctatgtctctagctctgagcacagcacttggcacatggtagggcctaaagcaatgaagtaactggttggaaaccaaggacccttccttaagtactgattttgggtccttttcaacattgtctagccaagccaggaaagactgcatgcccagttaatgtccaagaagtcataatgaacagtcacccaccctagggcatccatcttccttcaaatgtccccaaatcatgagtcatcagcttcaagttctaccactgtcatagatgttttaaaaaccaagataaagaagcaagagtgcaagtatgaataaatacctccagtagtaaaa

SEQ ID NO: 525028 - DNA, 518 bp, Homo sapiens
gcaaatcaccttctgtgattccttgacctctctgagactgaatgctcttttttttgtgctcccagtgaccttaaatagtgttcacatatccatttaagcattgtacacctcctgttgtagttgtttgttttattggcgcatctgatacccactgtgagctctttgtgggcgaaggccctccttgccttcgtctctatgtctctagctctgagcacagcacttggcacatggtagggcctaaagcaatgaagtaactggttggaaacmaaggacccttccttaagtactgattttgggtccttttcaacattgtctagccaagccaggaaagactgcatgcccagttaatgtccaagaagtcataatgaacagtcacccaccctagggcatccatcttccttcaaatgtccccaaatcatgagtcatcagcttcaagttctaccactgtcatagatgttttaaaaaccaagataaagaagcaagagtgcaagtatgaataaatacctccagtagtaaaa

SEQ ID NO: 525029 - DNA, 586 bp, Homo sapiens
aaggttttaatggaagaaaaatcactggagatttatcctctttcctgtaggcatttagtagaagagaattattgttattattattggtattctccttaatacatgaatgccataggtttgtttaggcttaatttctttaacataaagtggaagaatctctatcacctcctgtcaacctcccaacactttttttgaagcgagtaaagtatacattattcccattttgcagrtgtgaatgagtcaggttgtggtgcttacaatctcaataggggcgaaataagcatcagagtggttcttctagcttccatctgcagcagtttgcacagaactgctctgctacctctgagggtggggaacacaatctaaacaagagattgtagttggcttccacttcattgtagtttttaacaacatactggggttggaagttagacctattttctgtggttctcaggtatctgcagcccttttcatagagagaagttgctctggcaattggctactatggtggcatgtggcctatttgtaacttcaaggttacaatttggccaacagcttcacaatttcatccttgagttctttcaga

SEQ ID NO: 525030 - DNA, 586 bp, Homo sapiens
aaggttttaatggaagaaaaatcactggagatttatcctctttcctgtaggcatttagtagaagagaattattgttattattattggtattctccttaatacatgaatgccataggtttgtttaggcttaatttctttaacataaagtggaagaatctctatcacctcctgtcaacctcccaacactttttttgaagcgagtaaagtatacattattcccattttgcagatgtgaatgagtcaggttgtggtgcttacaatctcaataggggcgaaataagcatcagagtggttcttctagcttccatctgcagcagtttgcacagaactgctctgctacctctgagggtggggaacacamtctaaacaagagattgtagttggcttccacttcattgtagtttttaacaacatactggggttggaagttagacctattttctgtggttctcaggtatctgcagcccttttcatagagagaagttgctctggcaattggctactatggtggcatgtggcctatttgtaacttcaaggttacaatttggccaacagcttcacaatttcatccttgagttctttcaga

SEQ ID NO: 525031 - DNA, 590 bp, Homo sapiens
acagtaactgagaggaaaccagtccccaggcatttgtatctcccacagcacccaacagaggcacacattaaaatctggttaaaagtaaacaattcagatgaagagttatctgtgccagagatgagcttataccccaagagtcaacagaaatttatagcctaaaagaccatttgcttgttatgggatggaaatggcaagagaaacttgatctaaaatagccatataaaacrttgactttgtacatgtaagtagacccatttccctaataattttcaaagtaagagaagcaactggcttattgttattgtaatattttaattctccaatattctgaaagatctgggtacatcttgactggtgacaaagttcattaactctctcaaacaagcacttattgagtgcctaccaggtgtcaggcattatgccaggtgcaggaggtagactatggaagaagcttcagctctgtcctcaaggagcttacagtctattgaaggatacagggaactaaaaagcaatagtcatccagttgataactgctatttgcaagaggaaaatagagtctacggaaggttctctaacccagacttaga

SEQ ID NO: 525032 - DNA, 535 bp, Homo sapiens
tgaattgtgtccccccccgcgctccaccccgccaaactgctacatcgaagtgcttaactctcagtacctcagaytgggagagaatgccaagggtgtggctggacagccatgtgctaacgaaattaggtacgtgactcacggatccaatcaacctccacagtagatgccagaaatagagaggtggttatctgaaaaagatccgcggagtgccctcttgtctgactgcttggacccccatgacttgcatgggaggccaataaggtttttgagaattttataccagcagaaacattgacagcatggactgaaagggacagagacaggatgaaatgaaggaccaatggcttcaaagatggttcagcgactggctcctccttggttgtagagggtagaactattgcccagggctgtgggggtggggctcctgtgaccctgtgcctggaaggcagggctatgcatcccctcccctgtgagccctgaggacagaacatctagccaaagaggattattttcaagccttaaaatggaatggaat

SEQ ID NO: 525033 - DNA, 493 bp, Homo sapiens
aaagcccttgttctcttggaatgcacagtcatggacgataaggagagaggacagacactaaaaaacatagaatggtaaaaccaagtattatggaagtttagaaatttgaactaagccattttgtaaggtctctctgagctttgtgattctacagaaaccttgtcctgactaggaagaygattttactttttctgatgaggagatgtcttcagaaataatctgctaatgaatagatgatcctgttaggaatggggcatgacactttacaaactatatgatagaactggtaggagtttaataggagaagagctagccttgggtctccaagggaaggcagagaggagggctggaaattgtggaaattgtggctcaccatcaaggggagtgattggggcagggagtccaggatggcaaagcatcctaatgagtgacgagcgcagtgtgaagaattcagagcaagagatgcagacaaacagggcagagcagacaagca

SEQ ID NO: 525034 - DNA, 629 bp, Homo sapiens
ctggcctcccaggattcagtctcaacagatcccaaaccatacatcttctcagatgctcaaaggccttcttcctttgggtccaaaggaacttttccccaccatgacattgctacctctgtggctgccgtttgtatttctctgccagtgagaacagatcacatagcccaggaaattcacagtgctgaaycacgagaccacagccagactgcagggaggactctgacatcaagctccccagacagcaaagtcacagaagagggcagagcacagaccctcttgccagggagaccttcatctggacaaagaatttcagattcggttccactggagtcaactgaaaaaactcatcttgaaataccagcttcaggaccaagttcagctagttcacaccacaaggaagggagacacaagacgttttttccttccagaggccagtatgggtgtgggaaaatgactgtcccctgcccctctttaggaagtgacggtaggaaacgtcaggtatctggattaatcactcggaaagattctgtggttccttctaagccagagcagcccatagaaattcctgaagccccttctaaatccctcaagaagaggagtctggaaggaatgagaaagcaaactcgagt

SEQ ID NO: 525035 - DNA, 501 bp, Homo sapiens
gcctcccactcttagctccacactttttccctgtacctgcaaagccctagaatccctgctctcctcctccctgactctttgggctgggaactagctgcagaggcagtgcccccatcgagacagagagagagasagacagacagacagacagagagactaaacaaagattagcctctctcaaagtcagtagtgaggagttcagaaaagactgtgaaatgcaagttttaataaattttgtcccagctacacatataggactttgaactttttaaaacacacttgtgttgtattctcagatgatcttcaaaccaccacctctttgagattgatggagctgatatcagtgtctccatttctagacaagaaatctggcattgtaagtgcccttcatgcataaacaagggaacttaaatccatggaataagagtatggggagaaatgaactccacattcttaaatttttattaccgctgtagcctaggcgtctcctgtagattcagc

SEQ ID NO: 525036 - DNA, 655 bp, Homo sapiens
ccaaccaggggaccactgccgagtcactatgccatcctgagtctcttctattatctataaaatgggataatatttgtcttttagcctttatagggttgttaaactccatattaggattatttgtccttaagccataatgcattatatcaatcttagttattcctgttttctctatttcactctcttaccttttcayttagggtacctaacacacactgagggcatagctgagactaatggaatgggaaagggaacgtcccgcgaagataggggaggaactagatcattgcttacttggtcaaaaaatggtatattatttcatttaagaaaatgcaccttaatctactatctatggttggaattggtattaatttgctaccctgaatatgaataaacatttgctatattaaataaatgagtgttaactttacagatcttgtggaaagctgcatctaggaccctttgggaactattaagtagcttcttccctatgtatccataatcccgctcctgagaatttgtcctggagaagtattttaaaaaaagaaaaataaaaaaatgattcatagttgaagttgcttactgcagtatatataatacaaaaccactgaaaaccacctaaatgttcaaacataggagaatgaactagtaaatt

SEQ ID NO: 525037 - DNA, 466 bp, Homo sapiens
actgatgagaatcaacagctcttcagataccttaagtatttctccatatacaggtgtttctgacataattaaatgctaagctctggccaggttaagaagcatagctcgacttgaaattaggcaagcttaataagacagtatgaccactttgtatccacatactcagttaattctgtcatttattcagaaaatatctgagtatttcctatgtgtcaacacaagacaaagtccctgccctcaaagagcttatgttcttttgaaagtaacaaagaggaaaytgacacttggtatattaaatgccacaagaaaagaatttctggattggctgggagaaaacacagggcaggcatacatctaagtacttaggggtgaacaatgatttccaagaggagatattagggtgagtctatatttcaaagtatcaaaagatgagagtgaaagtggctcaaatagaggccttattcag

SEQ ID NO: 525038 - DNA, 514 bp, Homo sapiens
gctgggtgccctgagtgagctccaaggactccaggcccacaaggcaatgtgggggccgtccccatgcagaatgtatcagcatgtgttaatgatccttctctgatacacagccctgccacatcctccccactttgctatgcaggagtccagcagacatgcaaacaaaagcatgggctacactgacatggartgaaattagccaaagggactcaacttccctgaaaagacaactttaccaagcagttcgccgttgtaaatcatgacagtttcaaagggtgctaagttccctttcccccaaatggcacacggtcttgcacagggtaggtactcagtcattacctgctaagtgaagagatacaggaagtggctggcctgggaggagtaaaggtttagaagctagataacctctcagagaatgtgggaaggggtggtacagtggattctgcaggcagataggaggaccagcccccctacacacagatgggagcttatatccagacaaatgtaccaggca

SEQ ID NO: 525039 - DNA, 680 bp, Homo sapiens
ggtataaacatgtttggggggtaaaaacatgcacaagttggagagtagaatgtgaaattatcatttttaggacaatgacttcaaagaaatttcaaggtaactgggggatctagagttgtgttcatagatctctagagagataatcttactctcccttcactattaaaagatttggtggtacaatttaatagcattgatttaaagaataggaaaaggatcattagggatgagaaattaaacatccaagaaaggaatgcaatttgtttaatcctttcaaaaattgccttttccttggtgtttcttccaaagcaatttagaaagagtaaaagaaaaaatatatacagaaaaaaagtcacttgctttaaatgatccaaaaactagggttcaatgttcctgggcaacttcacagcaaatattaaaaatgggttcctggccccaggaacaacttaaatgagtccagcaaatgaaaattaagagtataggatcttatctcctgctctgtgatgcttagatttaggaaatatgaagctagtctagatgagaagcactcaagacagcaggttcttatctaggtaagacactcctaagatagaargtacaaaggaagaacccagactagggacagaagacccagtttacatccgagctctgaggccaacaggatgtgggcgattgtttaa

SEQ ID NO: 525040 - DNA, 629 bp, Homo sapiens
caattctgacactatggaagcagcaggggctgagatatctgtgatttctttgaggtttcacttattaaggaagaaagacaaacagcagggaaactaagtatagcagggctgggtcactctgmatcttaactcaccaacctggagcatccaggatctggtgtagaaatgttactcactcctagtgcaaaagatagagaccaaattaactggtatattcctattgtacctacatttatcttcaaaatctcagagcagaaagaacttgatagatctgatctttgcaaaacagtcaggttggcagattttgtctttccttcctctggcttcccctttccacatcatcttctccatgggagttcccccaggtctctctcccaggtgcctcagtgttctctccttcttgttctcctgcatcctctgtccataggccatcctctcaagcaacatcccttgccagtcatttttatcttagcgtgaatttgcacaaccacttccttccttgaatagggacaagagacaatctaggctttggggaaacaagttcgtaggtagagacttctagttgtcaccccaaattcattatttactaagaaataatgaacccatatcaatagaaccccaattatcag

SEQ ID NO: 525041 - DNA, 584 bp, Homo sapiens
ctggtgggcgtccagaaggatccttgtttgggcaaggctctttgagaaaggagaatctgggttgccagggattcccacatgtggtcaccagctccccacgcagaccagctcacgatttcccagttacaccgggcaggtgggaaaccgttctgctttctgtggaaaagattctaacttggttccctgccatccctgaatacaaacgggttggtttttcttttttsagcttccaacccttgcagctttccaaaaataaatcaaaccagccatcagggcaccgaaataatactactgctaataagcagcttcgcctagacttagataaacaacacttctgaggtaaactttgccccggaggtctggagacacttttttaatgtaacctgcttactaataattactagacttcagtgcattaaccctggaaatagattttaatagccaccccttaaaacaaaagacatgaaaagataataagaaaaaagtgccgcaactattatagaaaaacacttggcagcctgcttcagcccaagctgaggccacctctagcctctgctaaagccccccactcccaatggtccccg

SEQ ID NO: 525042 - DNA, 565 bp, Homo sapiens
gccatagtttgggtatttttggtttatatgccctcaagtaaaagaaaagccgaaagggttaatcatatttgaaaaccatattttattgtattttgatgagatattaaattctcaaagttttattataaattctactaagttattttatgacatgaaaagttatttatgctataaattttttgaaacacaatacctacaataaactggtatgaataattgcatcatttcttattgtgtgctcttgtttcttttaacttgtactttattaaacacattttactgacgctttgctstataccaggtctataatcagaaagcaggtgatttaaaggagttggagttgtcaggaaaaagggatggttagagattcagcttgcaaaatttgaataattaaagataaatgatattagcgccgtaataagattatacacaaaatgttgaggaggcagagaggacagagtgactaaagttacctaccagtttttactgaagagagatcattttatgttggtcttagtgagttttatttccctagttacagagggcaaagggatattgctagcag

SEQ ID NO: 525043 - DNA, 654 bp, Homo sapiens
ctactgtgtgctagaaggagcaaaaagaaacaaaattgtgtgtagagcaatttcattttcttcaatatctgataaatcaaattctgaaatttctgttgctcagtctaagatttaactgaggctaagaataatatgaatacttgcaagggcctgattaaatttacagacagaacacaacagaggtatagcagtataggaagcagaaaatggtttctttcttccagtttcacaatctcatttcctctctaagcaagatttctggatttttgaacaaggatgtccacagaaagatctcaaaagtcaattattgcaatttcttactctatgattgcacataaaaaagacaratggggctaaatgatactatgttttactaaattaattgactattgatttttcctaaaaagcattatgatggaatctatttctccctacctaattgtagatttttggagactaggctattgggtctaagcatatttgagaactcagaccactttgaaattctgataagtacatcaacaaaaagaatatactaatatgagcacatattcatatagataaatgaacatatctatagataaatacatctattggaaagttacacagaatacatacacacacatatgggaatgggggttgatgcaaataaca

SEQ ID NO: 525044 - DNA, 617 bp, Homo sapiens
gccccttggtctcagacttgccagcctttagaactatgagaaatacatttctgttgtttataagctgaccagtttatgkcattttgtaatagcagcccaagcaaatgaagacaggacatgaatagacaacataaatgtggggcatgaaaagcaatcatgtatgaaaagacctattcataaaagataattgtcttttcaaccagtgtttttcacacttggctcatattatgcagtaaagatacctgaagagattttttaaaattctctgaatatggaccttacctcagatgtagaagataaaaatctctgaagttgagataaagatatttgtattttaaaatactgtgccagctattttggtgcacagccaaatttgggaacccactaaccaaatatatattctggaatataatcttatttttgtcaaaaccatgagagtaaaaaacaattctcatcacaattatagaaacatttcctagaagtcagttgcagtcagcctgtaccaaaaacattttgcatgaaagtacttgtgtatgctgggtttctagtatactgatggactcaggtttgaataattaccaaaaataattgcatttccatatgtaaaatgaattttt

SEQ ID NO: 525045 - DNA, 555 bp, Homo sapiens
aaattgtgtattttcaaggtgtgcaacgtgatgatttgatatacatatacattataagtgattaccacatcagttcacttccagaagccttcatataaccgcttattggcaacttcctcatatctctgtatttccattcattaatttggccctaataatttcaacagctataaaaaataacagcaagtccagaccttctctgacaatgaagctgcctccatttttccaagatcaagagttgcggctggttgtggtgacccaggcctgtaatcccagcactttgggaggccgaggtgaaatatttaaattaaaaaaaaaaaaaaaaggtgcaacgtctttgtcattcctctgtgctctgttttcagtcatattattttcttcatcatcgttactgwcctgcttcctccctcaagactgttcaaactcctctggcttctggaaatggtctctgttactgtaagtggtcagagacagaagggccatgaacgtggcctaacccactccaggaaacccatcaccttttcaacttcccctttcctcacgcctcctccctcc

SEQ ID NO: 525046 - DNA, 492 bp, Homo sapiens
aggcaacttcatttctgtgtggaaggttgaaggtcagtcccaacctgagatataggaccagttcttttctagtcagggagaattcaggaagccacgttccaaaacagtaagtcagacttctgttgagcctgctctgatttcagaccttcgttctgctaacagggatccagcctttggccccatctgtagagtcacagcagctctgctgctgctcatccgctggggctactgccaattgctgctcagtcccttgctgtcytcatagagccttggtcacaagcttcttctcgaggacaactacagggtctgccccaggtacatccccacccatgagcatctagtttccacctcctttctgcctaccagtcaggagctaagataattctgataatatagtaataatagcatctgtcatttattgcatatagtaataatagcatctaccatttattgcatatagtctcaaattcttatgtatcccagaagtgcagc

SEQ ID NO: 525047 - DNA, 634 bp, Homo sapiens
attactcccacaaaaaaagcgagactcagcaaagaccagacccaccaaagtgacaaattcagccagtagtgaggacagaagcagtataytgaaggctcatataacccagtgtaatgaaagggaagctatattgtaactaaaagtatgtttcctcaaatttaaaagtaaacattatacagttattgcagattaaacatataatcatggaaacatcattttagaaaaactgtatctgcagaatgacaatccctgaatctcatctgattaggcacagtaaagtggtattgcacatcacaggctggaggaaaacacagccgtctggactaccatcactgtgaattcacgatcgcaacctcaagggcgtgctcagcaagcccagcaatcctacagcactgcctcagagcactcacaaagcctctttcccagacagatgcttataccctgtcctcacactgccaacacttccatccccaccctcactctatctcctctttccttaaaaaaaaaacagaataaattagaaaagaacttctacgacctcctatatccacccacctacctgcacctacctctctctatcagtgctccttctagaaccttctagaaccacttgtgccctggattccatacactc

SEQ ID NO: 525048 - DNA, 634 bp, Homo sapiens
attactcccacaaaaaaagcgagactcagcaaagaccagacccaccaaagtgacaaattcagccagtagtgaggacagaagcagtatactgaaggctcatataacccagtgtaatgaaagggaagctatattgtaactaaaagtatgtttcctcaaatttaaaagtaaacattatacagttattgcagattaaacatataatcatggaaacatcattttagaaaaactgtatctgcagaatgacaatccctgaatctcatctgattaggcacagtaaagtggtattgcacatcacaggctggaggaaaacacagccgtctggactaccrtcactgtgaattcacgatcgcaacctcaagggcgtgctcagcaagcccagcaatcctacagcactgcctcagagcactcacaaagcctctttcccagacagatgcttataccctgtcctcacactgccaacacttccatccccaccctcactctatctcctctttccttaaaaaaaaaacagaataaattagaaaagaacttctacgacctcctatatccacccacctacctgcacctacctctctctatcagtgctccttctagaaccttctagaaccacttgtgccctggattccatacactc

SEQ ID NO: 525049 - DNA, 608 bp, Homo sapiens
ttcccttcttcctgtggccttttcccagtgcctctggctgccctccccaagtacccctgtgaagcaaggcagaaatggcttggtaggggaccccagggagaccataggacttttcccgctgcttcctctacccccgtatttcactcgcctctctgaattgacccagctccagstaaggtcagaatcttctcctgtaatctagaccttcaggttcctcagtgggggtgtgtgttcggggacagatgatctccctttcccacttccatagtttgggcactcacagtatttggggtgtctcccgggtcctacaagagcaatttgcttccttcagagggtctgtggattctctctgcttacctaatttattcctgcagtcatcctggagcaaaaaagctcacagtgcaagccttcacacgctgctctgcccgtctgagtgggagctgcaatctagtcctaccttccatctgccatgattccagggaaactttccaaagagcttttctacattaactcttctatcccattcattctttgtgggaggagcacagaactcttaattctgttcttaataaatagataagtgccttttaaaaattaacaattaagta

SEQ ID NO: 525050 - DNA, 488 bp, Homo sapiens
ttttacaacagttttaatctaaggttctccacaaatacttttttcttagaaaagagatccccttggggcggggggcgggaggcagaggggggrattaaggaacaaatttttccataagtacaaaaaaaaaaagacatgcccaaacatcacaaatatttcaacacatctctgccttaacataaattttaaataagtaaatttcaaaaaagaaaaatctcaaacaggttaagcattatagttcagaaataaaagtcctctacactttatgaatgcagccataaatacaccaagaaatatttcattgacttaaaactaaataactgtatctggctggtaaaattgcaattactgataagtggcacgaaagcataagataatcaataaaactatgaaaactttttttacaaaaggtcagtcatattttgtttacttaaaatactaagtttaatcatgacctatctaaaccttatcattgctcattgtataaa

SEQ ID NO: 525051 - DNA, 459 bp, Homo sapiens
taatgtaaggaactgttcccagggcgccagagtggatgaacgttgaagatagctgtgcctttaaaactttcagaacaggccgggcaccgtggttcaggcctctactcccagaactttgggaggccagagtgagcraaacacttgatgtcaagagttcaagaccagcctggccaacatggtgaaaccctgtctctaataaaaatacgaaaattagccaggtgtggtggcgggtgcctataatcccagctacttgggaggctgaggcaggagaatcacttgaacctgggagggagaggcttcagtgagccgagattgggacaccgcactccagtctgggcaacagagcaagactctgtttcaaaaatcaatcaatcaatcaataaaatcataacagacaatagaagtaggtctaagaaaatttgtgaggcttggactagtactctttcttccttgcttttc

SEQ ID NO: 525052 - DNA, 146 bp, Homo sapiens
ttccttggggaggaatattgagtgccgtcccatgtgcyatctgtttctgaccattctgattctgctgctgacctcagactgcccatgttgtggctacctctcccatctgagtccctgcactgcccagtcacagacatctgctgccg

SEQ ID NO: 525053 - DNA, 262 bp, Homo sapiens
cttgggctcagccgactaggctgtttgcagggctgactgcacactgtrtgcaccaggtgtttccactggtccctatcctgactggctggggcccagggctcaatggttggtgaatattttgaatctcattcatagttattcacctttgatgcttgactttgggaaacgaatggtctaaacgtttcagagctcacagcttcagggactgtctgggctctggaagggtgccagtgtttcagacgtgctttgtggaagttttgtg

SEQ ID NO: 525054 - DNA, 620 bp, Homo sapiens
ttcaaaagccaatactcagccctgctcctctaacgagcctcccaaatccctccacactctgtagttctttgtgttacttctgtcataacactggtgctaagatccatttctgtctcctcccaagtcccttcttgacttgggtcctggggtaatgctttgcacacacaatgcatcagtctctgtttattgcactagtttcctggcacatggccccctctgcattccccatcacttccacacctgaacaaagcccgcattttccaggcagcccctgggagtgcccatcagggatgtgatggctctctcacccagcacctgtgcatttgccttggttgtttagaatggctttttgttaagcagtgttgttttcacacacacaaagttatgttgttccttgagagtaatgactatattgtcttaactcaagttcacttattgcaaggaaagctgggaattcagcccagtgggcttacacggaagaggaagagactggaattgataggaaccacctggctgaccaagcccagttrggtggtgtgttattggggcttatgtccgaagggaatgataagttcagatggtgagatcccaggagtccatgccagaccctgcgtgctgca

SEQ ID NO: 525055 - DNA, 619 bp, Homo sapiens
attacagagtgaacatacctatggaattgtgcccagttacccacaggtcaagaaataggacattatccctattttacagatgaagaaactgaggcacagagaggttaagtaacctgcccaaggtcacacagctaataagggacagaggctggtttccgcctcaggagttctgtctggtaagcccagctctgttttctactgcccatagaaaaggtggacctggagagcatgacccatctcagggtcaggggaagcttctgagaagctggggttggatctgagctcaggggagaactggagcttcatcagaaagagggaaggagagcattccaggcagggtgatctkctgagaggcctgcagatctgctgtggggattcaggagggaggcgatgtggacagcctgtcacggccacaacacacagactcaccagtcactggagggcagccatggggctcacaaagggattcttccttccacaaaagggctcacaacaggcatccctaaatagctcgctgcaaggaaaacccactttgagttgggaaagtcacatttccatagagtggattagagaaatagggctttcattggaagaggtggctcagtctgagaataacagc

SEQ ID NO: 525056 - DNA, 619 bp, Homo sapiens
attacagagtgaacatacctatggaattgtgcccagttacccacaggtcaagaaataggacattatccctattttacagatgaagaaactgaggcacagagaggttaagtaacctgcccaaggtcacacagctaataagggacagaggctggtttccgcctcaggagttctgtctggtaagcccagctctgttttctactgcccatagaaaaggtggacctggagagcatgacccatctcagggtcaggggaagcttctgagaagctggggttggatctgagctcaggggagaactggagcttcatcagaaagagggaaggagagcattccaggcagggtgatcttctgagaggcctgcagatctgctgtggggattcaggagggaggygatgtggacagcctgtcacggccacaacacacagactcaccagtcactggagggcagccatggggctcacaaagggattcttccttccacaaaagggctcacaacaggcatccctaaatagctcgctgcaaggaaaacccactttgagttgggaaagtcacatttccatagagtggattagagaaatagggctttcattggaagaggtggctcagtctgagaataacagc

SEQ ID NO: 525057 - DNA, 647 bp, Homo sapiens
taaaatgctatcaaccagcattgcatgctacagaaaaatctttcataaaaggaagagtcaattgatgcagcaaacttcattgttgtcccattttaagaaattgacacagctattgcagccttcagcaatcactaccaggatcaatcagcagccatcaacatccaagcaatgccttccaccaccaaaaagattcccattaggtgaagatgatctttagcattttttagaaataaaatatctttttaagttaaggtaggtacattgctctttctagacatcgtgctattgcatacttaacagactacagcatagtgcaaacgtaacttttatatgcattaggaaactgaaaaattcgtgtgactcgttttgttgcaatactcgctttattgcgggggtctggaacctaacctgcaatatctctgcgktatgcccttatagcgccgggagtgggtgccttccgccggctgtacagagcgccggcaggtggcgcccagcggcgagcttgttccagcttggtttgggccaggtggactggaaggggcggaggtaaccagaagcggctagtggcggctgcctgcgtccccaaccccctccgcgcagcgctcgcgacacgcgtgccaggagtgggagcgagcggcggggccagc

SEQ ID NO: 525058 - DNA, 568 bp, Homo sapiens
cttccaaaaagcacaaagagcaaagaggactgatcatgctagtgttctaaggtccttcatcatttggaagtgggagcrgtaataacatcagcgagaaataaatcaggaatgggtgtgttaatctttaaaatgccattaagagaagagtgaaaacataattagaatagaaacacttgattaatgcaaaaataattaaagaaataagaaaaatgaattaagaccagatttcacacattaaaaatgaaatataaaagagtagactcacatccaaatatattgtaatggtatgaaaatatggatgaacttagtgtgccagttaaccaataatattgctgaattggattaaaataacaaaatgtaactacacgctctttacaggagacatactttatgtaaaaggacacagaaaaagcagggaaatgtatcatcaaaggcagaaaatttctagcattagtaagtaaggaagtttttgtaatgaaaacaaagagccatacacagaagatataccaattcttaatctaaataaaatttagattttaatctaataaaatattagtgcacctaaaaa

SEQ ID NO: 525059 - DNA, 520 bp, Homo sapiens
ttgtctgtgtgcagcaactctctaaggcagggatttttactcctatttttgatgaggggagctgtggctcagagaggttgaataacctaaggccacacagtgagtggcagagccaggaatgtgacttgggtccatttgaatccaaagtccctgtactttccactgccctacctagatgtccctgtacctcctataaaatcagcatggagcctggtgcctggtagtccctacaaatattcacaaattggagcttagctcagctctcaggcaaggcccaggtcaaaagggcagatacagctttgggaccttagttgccaccacatgccayaccttcttcccagcagaaggactccctccaagacagggtaggggtggaggatgtgaacaggggcagaaatgggcatgttttggggtcagacttggaggaatagcagagattggagtgtcagaaggtgagcatgcctgggggtgttggggagatgcaattcatcagggacagcttagtgtcaggggattagac

SEQ ID NO: 525060 - DNA, 504 bp, Homo sapiens
ctgcgccgcgccaaccccgcccgtccccgctcgcgtcccgctcggtgcccgccctcccccgcccggccgggtgcgcgcggcgcggagccgattacatcagcccgggcctggccggccgcgtgttcccggagcctcggctgcccgaatggggagcccagagtggcgagcggcacccctccccccgccagccctccgcgggaaggtgacctctcgaggtagccccagcccggggatccagagaaccatccctaccccttcctactgtctccagaccctacctctgcccagtgctaggaggaatttcctgacgccccttctcttcacccatttcctttttagcctggagagaagcccctgtcaccccgyttattttcatttctctctgcggagaagatccatctaacccctttctggccccagagtccagggaaaggatgatcactgtcagaagtcgtggcgcgggagcccactgggcgctttgtcacattccaccgaaagtcccga

SEQ ID NO: 525061 - DNA, 504 bp, Homo sapiens
ctgcgccgcgccaaccccgcccgtccccgctcgcgtcccgctcggtgcccgccctcccccgcccggccgggtgcgcgcggcgcggagccgattacatcagcccgggcctggccggccgcgtgttcccggagcctcggctgcccgaatggggagcccagagtggcgagcggcacccctccccccgccagccctccgcgggaaggtgacctctcgaggtagccccagcccggggatccagagaaccatccctaccccttcctactgtctccagaccctacctctgcccagtgctaggaggaatttcctgacgccccttctcttcacccatttcctttttagcctggagagaagcccctgtcaccccgcttattttcatttctctctgcggagaagatccatctaacccctttctggccccagagtccagggaaaggatgatcactgtcagaagtcgtggcgcgggagcccacygggcgctttgtcacattccaccgaaagtcccga

SEQ ID NO: 525062 - DNA, 558 bp, Homo sapiens
cctccggcctggttctgcctcacggtaataatactggattgggaaactgaagcttgggccaagtggaggaacatggctccctcctagctttcccaatgccccgtaccctgggagggatactccttaaccccttcctggggcgggggaggtgttctggggtccaggtgggtgaaaaacgacaaatagagtgtgagtggctgatgaccctcagctttgtggctcctgccaaatctctgatttctggatcacactgccctgtctttcctctaaggaaccatatctaggtgtgamccacattaaccaggagaatttgaggataaaacaggtggaatatgggagacacctggtggtgatggctatttagatggtttcatcagtacatgggcccctctctgtgggtgctgtcatcctgggtccaattcacagagaagaaaccaggctgagaagaactggcctagagttgggtcatactcagtcaagagaggaagatttgggaaaaaaggtgggactgaaagctcttgacctgtgggagagtcaggaagagaacagccccatcct

SEQ ID NO: 525063 - DNA, 558 bp, Homo sapiens
cctccggcctggttctgcctcacggtaataatactggattgggaaactgaagcttgggccaagtggaggaacatggctccctcctagctttcccaatgccccgtaccctgggagggatactccttaaccccttcctggggcgggggaggtgttctggggtccaggtgggtgaaaaacgacaaatagagtgtgagtggctgatgaccctcagctttgtggctcctgccaaatctctgatttctggatcacactgccctgtctttcctctaaggaaccatatctaggtgtgaaccacattaaccaggagaatttgaggataaaacaggtggaatatgggagacacctggtggtgatggctatttagatggtttcatcagtacatgggcccctctctgtgggtgctgtcatcctgggtccaattcacagagaagaaaccaggctgagaagaactggcctagagttgggtcatrctcagtcaagagaggaagatttgggaaaaaaggtgggactgaaagctcttgacctgtgggagagtcaggaagagaacagccccatcct

SEQ ID NO: 525064 - DNA, 554 bp, Homo sapiens
atgcaaaacaatgtatttaaatgtttttgctataatttgtcacctgtaacactgaaggtgacctcttaggacatcaacaccttatgaaaggagaaaacgagtcccaactttctccaaaagaaaacgcagttatgactatgatttaggtcaaatccctgaggcaatgtcatgttggttaaataatttgaaaaaagcattgagcaaatgtgtaatttataaatagcaaattccattaggtcttccttaacaacttagctattcctggtgatgtgattccaggcattgtcagagcagaatggctcgtggttagaaatccctcayttatactgtcgaggaacttctctctgggttcaagtttcatcagaaatggccccttctaacagcatttgtcctgggaccattttttttcttgcccccatctccccatataggcttaaaaaattataacagtcagtagtcagcaggaatttaatgactgccaacagggtgcatagcatcgtaccaggctcccctgttactttgatgctccttttttactgctaaccatgaaactg

SEQ ID NO: 525065 - DNA, 636 bp, Homo sapiens
taaagatgatagaaaattgtaaagaaggtgaagagtcaaggagaggagtaaagacattacaggcagttctcaattctaaagctcttccaatatcttmgcatgaaaacaactatgcattgtccaagcaatgtgaggtaaaaaagcctatctcaaatatttcaggagactttatttttaatgttagcatgaagaaattgcaatgagaaaagtaaaccagtaatatcaacttttgtgaagatttttattaaaaaatcaaatgacactaaatctctgatgcccattaaatcgttctaaaatctaaagaatccttcttgaatgctatattcctaataaataacacctttattaggaatcctggtcctcatttacctgctcatttttggctttaaaaattacataaataagaactttatatagtagctaatgataatatattattaaacaaagttagcctacagtgtcttcttgcattagttatagatgcactagaagattgtatgatgagtaacctaaaaatgcacctatagatgcattttttgtagctttaagatgatgcttgtaatgatttctataacagaacaggcgtctgtcccttagtcaatcatttaatttcttattataacaggaaaaaattag

SEQ ID NO: 525066 - DNA, 636 bp, Homo sapiens
taaagatgatagaaaattgtaaagaaggtgaagagtcaaggagaggagtaaagacattacaggcagttctcaattctaaagctcttccaatatcttagcatgaaaacaactatgcattgtccaagcaatgtgrggtaaaaaagcctatctcaaatatttcaggagactttatttttaatgttagcatgaagaaattgcaatgagaaaagtaaaccagtaatatcaacttttgtgaagatttttattaaaaaatcaaatgacactaaatctctgatgcccattaaatcgttctaaaatctaaagaatccttcttgaatgctatattcctaataaataacacctttattaggaatcctggtcctcatttacctgctcatttttggctttaaaaattacataaataagaactttatatagtagctaatgataatatattattaaacaaagttagcctacagtgtcttcttgcattagttatagatgcactagaagattgtatgatgagtaacctaaaaatgcacctatagatgcattttttgtagctttaagatgatgcttgtaatgatttctataacagaacaggcgtctgtcccttagtcaatcatttaatttcttattataacaggaaaaaattag

SEQ ID NO: 525067 - DNA, 636 bp, Homo sapiens
taaagatgatagaaaattgtaaagaaggtgaagagtcaaggagaggagtaaagacattacaggcagttctcaattctaaagctcttccaatatcttagcatgaaaacaactatgcattgtccaagcaatgtgaggwaaaaaagcctatctcaaatatttcaggagactttatttttaatgttagcatgaagaaattgcaatgagaaaagtaaaccagtaatatcaacttttgtgaagatttttattaaaaaatcaaatgacactaaatctctgatgcccattaaatcgttctaaaatctaaagaatccttcttgaatgctatattcctaataaataacacctttattaggaatcctggtcctcatttacctgctcatttttggctttaaaaattacataaataagaactttatatagtagctaatgataatatattattaaacaaagttagcctacagtgtcttcttgcattagttatagatgcactagaagattgtatgatgagtaacctaaaaatgcacctatagatgcattttttgtagctttaagatgatgcttgtaatgatttctataacagaacaggcgtctgtcccttagtcaatcatttaatttcttattataacaggaaaaaattag

SEQ ID NO: 525068 - DNA, 613 bp, Homo sapiens
tctgatgcccattaaatcgttctaaaatctaaagaatccttcttgaatgctatattcctaataaataacacctttattaggaatcctggtcctcatttacctgctcatttttggctttaaaaattacataaataagaactttatatagtagctaatgataatatattattaaacaaagttagcctacagtgtcttcttgcattagttayagatgcactagaagattgtatgatgagtaacctaaaaatgcacctatagatgcattttttgtagctttaagatgatgcttgtaatgatttctataacagaacaggcgtctgtcccttagtcaatcatttaatttcttattataacaggaaaaaattagatctaacctctagtatttagagttagtaccaattatctaaaaaccaaactctgctgtaaccaaaaaagtgtctatcaataattaaagacacacatatatcaagttttttttttttttttgagacagagtttcactcttgttgcccaggctggagtgcaatggtccaatcttggctcactgcaacctttgactcctagactcaagcaattctcctgcctcagcctcccaagtaattgagattacagg

SEQ ID NO: 525069 - DNA, 348 bp, Homo sapiens
ctacgtgtaatatggtgagcaaaaatggacactgcccataatttcattaagctcatagtaaagaaactaaaaactcttttttatacaacctgaaaggccatyacctactgtgtcacattttgctacaaaattctgtgaaatttgggtttttttttcttgttttttcctcttatgagccataatacctgccatccatattgtttttatgaatggcattccatttagttttgtctcttgcctttcatttcctattttctacccatagtcaaggcttctaagtacattattagtattttctcattaggatttttattttctacctaaatgtcattctgagagagttatccc

SEQ ID NO: 525070 - DNA, 531 bp, Homo sapiens
gttgtattttacatgaaggtccttccctgctggcttggtgcaggttggaggaatgtcataaaccccctccggtctgaggtccggccttccagcttgtctcatgggaggggggaagtcatagtctttttccctaagccctgcttcatcccggcaagcagagggcggaatggcatatacctgcaaagcaagtagaaagcgaaatgctatttattgagttggctcatgggaacctgtggtcccatgtgctcagtcctatttgctggcactttttcggtcgccctcccccgccccaatgttaggcacttccaaggttccccgttattctgctgtcacttcccttgtcctttgccaagtgtgtccaaccccacgttcttggtgcagactcgtatgtrcaaccctcctggctaaattgctcaccctgtgtttccagtcctgtgtttctgaccacctcctgggtatcctttctctgctgatctgtgccgagaggcagagtaagaccagagttctcccccggtctttttggttatcaca

SEQ ID NO: 525071 - DNA, 617 bp, Homo sapiens
ttcttaagggtgaccttgaggatggataggatttgaataagaggcaggtgagcacaggtgggttagagcaatgctgtcttaccccatttgtgccgctgtaacagaataccacagactgggtaacttataaagaacagagtttatttctcacagttctagaggctgggaagtccaagatcaaggttttggtatctggtgagggctgctctgtcctttcaagatggcactatgaatgcatattctagcttggaggaacattgtttccttatgtggtggaaggcagaaggaaagaggaccaagctccttctgtcaagctcttttacaaaggaattaatctattgggacctaaacatctctcaacactgttgcaatagggattaagtttccaacacatgaattttgggggacacattcaggccayagcaaatgttataagcagaggcttggatggggacccatcaaagtttatgaggggaagtctgatggatgacgccattacaggcaatgctggtggcctgttctcccttgacatcttgagacaagagcccaaagtttaatttgaggaagtatctaggacaataatacccgtcagtactgacctacagtcgtagggtctg

SEQ ID NO: 525072 - DNA, 584 bp, Homo sapiens
ggcttaaacatttccattcatgttttcttacttccatgtataaacacaggcatactttggagagaggagaaaaataaaccaaactgctgagtaatacccttttgaaaagaaatacatactttcaaaaaggaccaaaacaacttgtggaagctttggaagggagttttctcatttttaaaagctcaagggttttgrtgaaattagtgttgttttctcagactccaaaacagattaacatatgggcagcttcagcttgtggctcagagagacaaaagaaaccacaaaaatagctttctaataattgtccccaaatatgtctgtcgagcgctggttagtgccaactcccctttgctaatcaaaactcgaggcggaggcgccgactcccccggccgccatttgatgtccctctggttactgtatttactctccttctcactcccaatttcttcccgaagctttcatctgttccaacgccctgctctgcccgtctcggccaccaccgctggggtttaaggcaaaccttgcatctggtttctctttgcttcttttcgcctttgtctttgtttactttcatgaggaggcag

SEQ ID NO: 525073 - DNA, 584 bp, Homo sapiens
ggcttaaacatttccattcatgttttcttacttccatgtataaacacaggcatactttggagagaggagaaaaataaaccaaactgctgagtaatacccttttgaaaagaaatacatactttcaaaaaggaccaaaacaacttgtggaagctttggaagggagttttctcatttttaaaagctcaagggttttgatgaaattagtgttgttttctcagactccaaaacagattaacatatgggcagcttcagcttgtggctcagagagacaaaagaaaccacaaaaatagctttctaataattgtccccaaatatgtctgtcgagcgctggttagtgccaactcccctttgctaatcaaaactcgaggmggaggcgccgactcccccggccgccatttgatgtccctctggttactgtatttactctccttctcactcccaatttcttcccgaagctttcatctgttccaacgccctgctctgcccgtctcggccaccaccgctggggtttaaggcaaaccttgcatctggtttctctttgcttcttttcgcctttgtctttgtttactttcatgaggaggcag

SEQ ID NO: 525074 - DNA, 584 bp, Homo sapiens
ggcttaaacatttccattcatgttttcttacttccatgtataaacacaggcatactttggagagaggagaaaaataaaccaaactgctgagtaatacccttttgaaaagaaatacatactttcaaaaaggaccaaaacaacttgtggaagctttggaagggagttttctcatttttaaaagctcaagggttttgatgaaattagtgttgttttctcagactccaaaacagattaacatatgggcagcttcagcttgtggctcagagagacaaaagaaaccacaaaaatagctttctaataattgtccccaaatatgtctgtcgagcgctggttagtgccaactcccctttgctaatcaaaactcgaggcggaggcgccgactcccccsgccgccatttgatgtccctctggttactgtatttactctccttctcactcccaatttcttcccgaagctttcatctgttccaacgccctgctctgcccgtctcggccaccaccgctggggtttaaggcaaaccttgcatctggtttctctttgcttcttttcgcctttgtctttgtttactttcatgaggaggcag

SEQ ID NO: 525075 - DNA, 633 bp, Homo sapiens
tgtggtgttatgatttagaaccaggtcttggcttcccctgtctcctgctcattttctgaacactccctgtcattctctgagatgcccaatatcctcttagtaaattgcttttgtgctgaaaccacccagagttggtttctgtcactaccaagaagctgactggtagctccacccaccttaccagcttgccctgaggaataaggaggcaaagcatgccaagccctggcacagtggatggcacctggaaatgccccattagtagcagcaaaagtgaacaatgcatccacttttgttttaacttgataaagcctcattctttcatcattgaattacaaattgtgacttccactaactcctgagcagctggtcatctttacattytcaaggcgaggagctcagccacctggatgttcttcctctgctcttggtcagaggccagttgttgtcctggccctctaaggacagcactaagatccatcccactcttctttctgtccgcaaaaccaaggcagactggcccccagacttctcccaacacttcatccaatttgtccatgagccaacgactccaaagctgttcaggactatctctccatttctttcttaacctgtcaagagatgggttaccagatt

SEQ ID NO: 525076 - DNA, 633 bp, Homo sapiens
tgtggtgttatgatttagaaccaggtcttggcttcccctgtctcctgctcattttctgaacactccctgtcattctctgagatgcccaatatcctcttagtaaattgcttttgtgctgaaaccacccagagttggtttctgtcactaccaagaagctgactggtagctccacccaccttaccagcttgccctgaggaataaggaggcaaagcatgccaagccctggcacagtggatggcacctggaaatgccccattagtagcagcaaaagtgaacaatgcatccacttttgttttaacttgataaagcctcattctttcatcattgaattacaaattgtgacttccactaactcctgagcagctggtcatctttacattttcaaggcgaggagctcagccacctggatgttcttcctctgctcttggtcagaggccarttgttgtcctggccctctaaggacagcactaagatccatcccactcttctttctgtccgcaaaaccaaggcagactggcccccagacttctcccaacacttcatccaatttgtccatgagccaacgactccaaagctgttcaggactatctctccatttctttcttaacctgtcaagagatgggttaccagatt

SEQ ID NO: 525077 - DNA, 259 bp, Homo sapiens
agaagatcttacagcccataaggggtggctgggcctgacctggtgcaggcatttaagaccctgaccttggcagtccttgcagcaaccctgggcagcacgtatcattgtggccattttacagacgaagagactgaggcatcgagggattacgaggcccactgtgctctgtgggtgggtgtgaaatgactcacagctragtgctgtgtaaatacagaagatcatagttacaaactgtcccaatacatgcgtgtgtgtgagc

SEQ ID NO: 525078 - DNA, 636 bp, Homo sapiens
tgggggacttaggccctatggcagagcaaaatgggctggtgttgctgaagtcaacgtgtgaggtaaggggcacatccagacccctgtggtggggagcccaggttggagactgtaaaagctcacaggttgtggtgtaaatcaagcctgtggtcctgggtggctgaacatgtggttctgtgacaagagacctagcctggacgttgggaagcctgggttccatgcttgcttctgtcagaatgtgactcagggcaaactatttctcttctctgggatacagtatccccatcctttaacataaggacaggtcacattaggcagtctctaaggtgttttgtgagctttagactgatttattctgttacttaagaaagcagatgaattatcctttcacctccataagaatctgtgaattttagatraaatgaccacaaaagaatcaagatgggttatacaattttgtgatgctcacttcacatcacaacactggaaagtatgggagtgaaaaggagtgaggacggacccagagaggccacccttaggatacccagaccaggtcactggaagcagacacgaatgctttgctggtctaggacaccatcccgttgaagtctccttgagaaatgctatgcagttttc

SEQ ID NO: 525079 - DNA, 581 bp, Homo sapiens
tgtgtgttagtgccctctcatggccacaacatttcatcagctcccaaacccctggaactcactccagaattccacattttctgattttacctcagatctatcgaatcagaaactcttgggtcgggcccagtaatctgtattttaakaagcctggcagatgattctgttgcctgtgggagtctgagaacaactgcctcaagttttatagggggagggccccagtggggaggcctacagctctccactatatgtgctgtgacctggcaggtaagtttctatattacttatctgttgctgtgtaacaaattgcccccaaaacttagtggcttaaaaccacacacatttactatctcacagtttttgtgggttgagaatttagaagcagtttagaggggtggttctgctcaggctttctcatgtgggtatagtcaagggggttggggcttcagtcatctgggggcttgagggctggatgatctgtttccaaggtggctcagtcacgtggctgttggcaggaggcctcagttcctcaccataagagtgcctccacagggctgcttgggtaacctcatgacctggca

SEQ ID NO: 525080 - DNA, 581 bp, Homo sapiens
tgtgtgttagtgccctctcatggccacaacatttcatcagctcccaaacccctggaactcactccagaattccacattttctgattttacctcagatctatcgaatcagaaactcttgggtcgggcccagtaatctgtattttaataagcctggcagatgattctgttgcctgtgggagtctgagaacaactgcctcaagttttatagggggagggccccagtggggaggcctacagctctccactatatgtgctgtgacctggcaggtaagtttctatattacttatctgttgctgtgtaacaaattgcccccaaaacttagtggcttaaaaccacacacatttactatctcacagtttttgtgggttgagaatttagaagcagtttagaggggtggttctgctcaggctttctcatgtgggtatagtcaagggggttggrgcttcagtcatctgggggcttgagggctggatgatctgtttccaaggtggctcagtcacgtggctgttggcaggaggcctcagttcctcaccataagagtgcctccacagggctgcttgggtaacctcatgacctggca

SEQ ID NO: 525081 - DNA, 581 bp, Homo sapiens
tgtgtgttagtgccctctcatggccacaacatttcatcagctcccaaacccctggaactcactccagaattccacattttctgattttacctcagatctatcgaatcagaaactcttgggtcgggcccagtaatctgtattttaataagcctggcagatgattctgttgcctgtgggagtctgagaacaactgcctcaagttttatagggggagggccccagtggggaggcctacagctctccactatatgtgctgtgacctggcaggtaagtttctatattacttatctgttgctgtgtaacaaattgcccccaaaacttagtggcttaaaaccacacacatttactatctcacagtttttgtgggttgagaatttagaagcagtttagaggggtggttctgctcaggctttctcatgtgggtatagtcaagggggttggggcttcagtcatctgggggcttgagggctggawgatctgtttccaaggtggctcagtcacgtggctgttggcaggaggcctcagttcctcaccataagagtgcctccacagggctgcttgggtaacctcatgacctggca

SEQ ID NO: 525082 - DNA, 597 bp, Homo sapiens
ggtggggctgggactggagttcaggtctgtcggactctggcctcctgtcttttcgctgtcatctgataattggctgaagatgtcgggtttctagaagaggctgtggcgagggcactgggcctttgctgccttttcagattggacggtcttctctagaagggagttgactcagccaggtggcagccagggacagggtcagggcgttcactggaggagggtgcttgcaccacctgttaacatgggactcccccaggtgttgtctttcatttcctttttctctaaccctgggattactgaggctgaggaggtgtttaccacctcctttttaaagggggarctctgagctgatttttggtagtgcaaatttcctagtcatatgctttcaatatgtgtttgttttttgttcttgttgtctgtcagagattatcatctgttgtggcagagaaaggcatttttcctcctccctcttctctgatgcttgcaaacgctcctagtggccaatgaacattggatgcacccatgaagtagaatccacacatttaattctagattgattctctgaggccttccctgccaggctcctttcagccaagcata

SEQ ID NO: 525083 - DNA, 597 bp, Homo sapiens
ggtggggctgggactggagttcaggtctgtcggactctggcctcctgtcttttcgctgtcatctgataattggctgaagatgtcgggtttctagaagaggctgtggcgagggcactgggcctttgctgccttttcagattggacggtcttctctagaagggagttgactcagccaggtggcagccagggacagggtcagggcgttcactggaggagggtgcttgcaccacctgttaacatgggactcccccaggtgttgtctttcatttcctttttctctaaccctgggattactgaggctgaggaggtgtttaccacctcctttttaaagggggaactctgagctgatttttggtagtgcaaatttcctagtcatatgctttcaatatgtgtttgttttttgttcttgktgtctgtcagagattatcatctgttgtggcagagaaaggcatttttcctcctccctcttctctgatgcttgcaaacgctcctagtggccaatgaacattggatgcacccatgaagtagaatccacacatttaattctagattgattctctgaggccttccctgccaggctcctttcagccaagcata

SEQ ID NO: 525084 - DNA, 597 bp, Homo sapiens
ggtggggctgggactggagttcaggtctgtcggactctggcctcctgtcttttcgctgtcatctgataattggctgaagatgtcgggtttctagaagaggctgtggcgagggcactgggcctttgctgccttttcagattggacggtcttctctagaagggagttgactcagccaggtggcagccagggacagggtcagggcgttcactggaggagggtgcttgcaccacctgttaacatgggactcccccaggtgttgtctttcatttcctttttctctaaccctgggattactgaggctgaggaggtgtttaccacctcctttttaaagggggaactctgagctgatttttggtagtgcaaatttcctagtcatatgctttcaatatgtgtttgttttttgttcttgttgtctgtcagagattatcatctgttgtggcagagaaaggcatttttcctcctccctcttctctgatgcttgcaaacgctcctagtggcyaatgaacattggatgcacccatgaagtagaatccacacatttaattctagattgattctctgaggccttccctgccaggctcctttcagccaagcata

SEQ ID NO: 525085 - DNA, 604 bp, Homo sapiens
atatgtaaaatgaaaaactttaaaacttctaaagaatacaagaatctacatgaatttggaattcagggacgagttgtaaatacaacacaaaagcacaatccatgatagaaaagattgataagttggaccttgttcatttcattttttatattttcrctccagtttttataattctattttcaacaggtataacataaactttatatagtatgtgttctgtgttttccaccattagtatatatttttctgtaccattataaaaagaaaacactgttaataatataaagaatttctttttaaagaatggtattttctgtgagatgcattgttcagtgggatactactatggtgggtatattcctttttgggtttgccctacccaaagccactccctataatttgagtaatgctgacccacctctcattagagggaagacaagaaacttgaggttagtaggtaactctgaccatggtggttggttcagggagggcacatgtactatgttaggtcccaggtcattttctggagctattgggactgttagcttccagcttccagtggccagtgggcaagctatgcctgagaaagaagccaaccaggaga

SEQ ID NO: 525086 - DNA, 604 bp, Homo sapiens
atatgtaaaatgaaaaactttaaaacttctaaagaatacaagaatctacatgaatttggaattcagggacgagttgtaaatacaacacaaaagcacaatccatgatagaaaagattgataagttggaccttgttcatttcattttttatattttcgctccagtttttataattctrttttcaacaggtataacataaactttatatagtatgtgttctgtgttttccaccattagtatatatttttctgtaccattataaaaagaaaacactgttaataatataaagaatttctttttaaagaatggtattttctgtgagatgcattgttcagtgggatactactatggtgggtatattcctttttgggtttgccctacccaaagccactccctataatttgagtaatgctgacccacctctcattagagggaagacaagaaacttgaggttagtaggtaactctgaccatggtggttggttcagggagggcacatgtactatgttaggtcccaggtcattttctggagctattgggactgttagcttccagcttccagtggccagtgggcaagctatgcctgagaaagaagccaaccaggaga

SEQ ID NO: 525087 - DNA, 604 bp, Homo sapiens
atatgtaaaatgaaaaactttaaaacttctaaagaatacaagaatctacatgaatttggaattcagggacgagttgtaaatacaacacaaaagcacaatccatgatagaaaagattgataagttggaccttgttcatttcattttttatattttcgctccagtttttataattctattttcaacaggtataacataaactttatatagtatgtgttctrtgttttccaccattagtatatatttttctgtaccattataaaaagaaaacactgttaataatataaagaatttctttttaaagaatggtattttctgtgagatgcattgttcagtgggatactactatggtgggtatattcctttttgggtttgccctacccaaagccactccctataatttgagtaatgctgacccacctctcattagagggaagacaagaaacttgaggttagtaggtaactctgaccatggtggttggttcagggagggcacatgtactatgttaggtcccaggtcattttctggagctattgggactgttagcttccagcttccagtggccagtgggcaagctatgcctgagaaagaagccaaccaggaga

SEQ ID NO: 525088 - DNA, 577 bp, Homo sapiens
tggcattgtgctgcagaggccaagtggtatgatacctcagctcagataaggataaggaaccagttacacgttcgccgggagggtcagttaactcagcaagtgcccaaactctcacaaccctgcctggctggggacagtgtttgtcaaatcctttagactgccccccagctaggttacacggttacctagcatgcacccacgtgcacacacacacacacrcacaccacacacacaccacaccacacacacacaccacacaactaaagcaaaacttcatgaaaaatttactattatcatacatgatgtaatctgatgttttgtatatatttttgttcccttccagttttaaaaacaacctgcctcattacatttatttcactactttcctcaatttccaataggtcaaaatccatagtgtgaatgaataacactggcagtggaattttaagatcctcaaaaggagttcagtgtactatgggtgttaaagccattgacgcagttcacaagcgagaagacattcttgcatccgcagggttatagttcttaaaatcttgcctcagaatgagttcaagtttct

SEQ ID NO: 525089 - DNA, 512 bp, Homo sapiens
taagtagagatgaagctttgctcgctcacctactgctgtgtggcccagttcctgctgtgtggcccagttcctggtccatggcccaggggtttggggcccttgatatcraggaatctcaaaatcatataaatttcaggccctacaaaacctagatctgccactgcccaacagcaagaagggttcctttccaaggaaaatctgtttcaaagaatcttttcaattgagaagttctgagtttcattagcttcacaaaagcccctcggtgtaatttgtgtatttgtgggcaaacgatctgcataaatcgtcatttggatattaggggttaatgaagcgaacactaagctttagaggcaaatgagggccggaatttagacgcagcatcatggaccctcataacgacaggtggatcattgcaacaaaaatggccaaacagatgtgaattccagtttcattacttggcagtctcctcctaccaagtcggcatgaggttttgaagcatcaagtaaaagtca

SEQ ID NO: 525090 - DNA, 441 bp, Homo sapiens
ccacataagagagattcacacccacccacaattgccctagagaaggaaggggagagacagagagcctttacttatgtaccacggagcttcagagttaagccaggtgcccctgcctatctctacgtggagaacaattgaacatgggtggaagtagcaggctcctaggagccgggccctggtgggtggcagtatacgtgcatgtgttggtggtcactgagacttgggtggcctgattctgtattgtgcatgatttgcttttctggccactaataggtctcacggtgaagacagcagaaccagatggagtaggggctcaaggaacaggtagccacaccaacacttcccaggagttcagccctttacaggccacagagcaacaatattgttgaatgtcagagtgaaacagaccgcagmcaccaagtgatcgaagtctctcatttt

SEQ ID NO: 525091 - DNA, 594 bp, Homo sapiens
aggaaataggaaagccaaggttgaacacctcaagcttcttaagcccaccaggaagaaaagaagagggcaaagcttaaatggaagagggagcagatmttggaagaggaaggaagaggaggagaggggtccaagatcattctaatgtgacgagaggattggacacaagtttcacaatttgcttcatttcctttgaattaatgttctctgggacccttctcagtactaactttcaataccaaagaactaaataaaatcctaaatgtcaaaaaaaacctaattgttttctacagacaatgtctatcatatgattgagcctaaaggagatgcacagcttaaacaccaagctgaaaataacatcccatatgaattaggtgtttttctttttcccaactacatacttcttgactaacagatatagtacattccacatcttactgaaaagactagatgatttttactttactggaaaaaaattaaacgaaagtttcaatttttattcaaaggcatgtgaggggggaaggaaaccaattgtaaaacacagataatatttaaaccttaaagaaaattggaatattttatttgtttttcaataaa

SEQ ID NO: 525092 - DNA, 594 bp, Homo sapiens
aggaaataggaaagccaaggttgaacacctcaagcttcttaagcccaccaggaagaaaagaagagggcaaagcttaaatggaagagggagcagatattggaagaggaaggaagaggaggagaggggtccaagatcattctaatgtgacgagaggattggacacaagtttcacaatttgcttcatttcctttgaattaatgttctctgggacccttctcagtactaactttcaataccaaagaactaaataaaatcctaaatgtcaaaaaaaacctaattgttttctacagacaatgtctatcatatgattgagcctaaaggagatgcacagcttaaacaccaagctgaaaataacatcccatatgaattaggtgtttttctttttcccaactacatacttcttgactaacagatatagtacattccacatcttactgaaaagactagatgatttttactttactggaaaaaaattaaaygaaagtttcaatttttattcaaaggcatgtgaggggggaaggaaaccaattgtaaaacacagataatatttaaaccttaaagaaaattggaatattttatttgtttttcaataaa

SEQ ID NO: 525093 - DNA, 610 bp, Homo sapiens
cacagctgtacaaccaactgcatagttacgtaattggtcagacatacatgggatatttcgttccgctctagaactcatccagaaagaactatcaggagcgtaaaatgtctgcaaaaagtattttatgaagaataattgaagaatgtttagttaggaaaagatagtatttcaagatagttttcaaaattcagggtaggactacctgtctgtaaacattaaagactatggtgtgggaagccaacttattccacacttccttcctctttcttcactccttcccctttttccctccttccttccttccttccttccttcttcccccccgcttccctaccttccttccttcyttccctctttccttccttctctccttccttccttcctttcttccttccctgcctctttacttccttctctccttccttcctttcttccttccctccctccatctctccttccctccttccatccctccctccctcccttccttccttccttactgcaacaaacatgcagagactggttgagctatgctacttcctgtaagtcatacactttgctattcccccagggctccaaacatggataatttcatgaggttacattctag

SEQ ID NO: 525094 - DNA, 652 bp, Homo sapiens
ctgtatacgccaattccctgtaacacrtaactgttcattttatctgtaaggcttctagacagtagtaggctattagtagttaacttttggaggagtcaaaagttatgtgcaaatttttgactgtatgggggtgaagggtcagttatcataacctccacatttttcaagggtcaactgtacatgatagcaaggatcaaaattcattttctgttctaaatccaatgctcctatactactaacctatagcaatcaatggctgcagtctcttggcaatttactacctcagatttaacaaaatatatgtaaatataaatacatttggtgtttttgtcatgaaatctttgcccatgcctatgtcctgactggtattgctagattttcttctagggtttttatagtctggggttttacatttaagtctttaatccatcttggttagtttttgtataaggtgtaaggaaggagttcagtttcaattttctgcatatggctagccagttttcccagcaccatttataaaatagggaatcctttctccattgctcatttttgtcaggtttgttgaagaccagataatcgtagatgtgtggtcttatttctgagttccctattctgttccattgatctatgtgtctgcttttgtaccagtacc

SEQ ID NO: 525095 - DNA, 477 bp, Homo sapiens
atatacaaatgtgtgtgtgtgtatatatatatatatatatatatatatatatatatatatatgactacgtatgagaggaagcagtataaaagcaaaattgagaaagaagcagaaaaaagggagtcaaagctggacmatgttctctgagactgcaggaacccaggccctgacttccctcactcaagcaagtccctcacccaggcttctccccctcataagtacctggctttagcttggctctgagaagagaccagagcagtggagtggaggctgaagccaggggaaagaaggcagcaggcatgccccacacagcaggggatctgagtaagcccatgcagtagggtgagaagaagagtgagcctagctggatcagagttgtagaacagcgtcagtgcagaaacaggggtcgagagcaatgtggacaccagaatcactgctttatcgtagctagcacccctcttttggtggggcctgagt

SEQ ID NO: 525096 - DNA, 518 bp, Homo sapiens
gggcatgaaatccaggtccygatacagtagaaggccctctctgttactgcctttggaaatacttttcttttcagggggattttcagttattcatggtaactgcagtaattgattcattttcatggaaaaataaaatccacgtgtaatccccatacctaattaagccaatagcattttactgttgtgcagatggccttttttgcttaataagaagtgattcaaatcagacaagtactcaaaagatagaaatcattgaaatcacatactggacattcctctacttgcacatacagttttatatatatgggccatactctttaagtgctgtatttttgttacctcctgtttgcatttataacttgtcatggtaatcaaagacagtgatttttaatggcttcaaggccgttggttgatagttaccactattttcttgactcatctcttcgggatgggtttttcacagatttggggctgttgtacaaaatgatgcatgcagcctgctttgcacgtgtctgttt

SEQ ID NO: 525097 - DNA, 511 bp, Homo sapiens
catcaaaaatggaactcaaaaaggaattcaagacatttatttaccagatgattatgcaagtgattctatgataaaacttattttasaatattttacataatactaagaatgtgttaagttactaaatcaattctacaaagaaaattgtcattaaatttgcaacatttagctgtacttggaagtcaagtaatatttatgaaaagaaaggattttaaaacaaactagctttctaaactccatcctttataataccatgacaagtacacaaaggcatgaataatcatctgttcactgaatgataatacaatgtgatataaacatttaaaatatatacacacaaagcaataaaatgctcttaaatggaatggtgtccaattgaaacaacttatacatggtagtttactcatactgttcaaactcttaagtaaaattcctatcaccatgaactgatttttaaagtataagatgtgggttaaaataatcgatttgcattccctatatgtactattat

SEQ ID NO: 525098 - DNA, 416 bp, Homo sapiens
ggggtcggctacatatttcctcctttttaaagttcctgattattttcagtccatcagaggttaaggggcttatctcttgactaacctctcctccaagctgtattagtcaaacagttcaaacacagttggatcaacaagtcttctggtgaaataagattcgtgaagaatgccctgaatcctaggttgaaaggcctgmgttgggcagaacagtgacgtatgaacttcagatgagggcctacacttctgacggcttagaccccactgtaggggagagcgctggctgcttgcacttgtagccccaccttattctgagtaattttttttttttttttttttttttttttttttaccaataacacacactagaggggttgtcaaaatcctctatttttagacaggttcctcccaccccacct

SEQ ID NO: 525099 - DNA, 631 bp, Homo sapiens
agctgccctcagagcatggggaaaaatacatcagaaacaaatggcactctaataaattggccctctaacatcttccagatgtgaacataacatttttactaccaataggatttgagtgaagattatagtttaaattatcagccacaatagtgtgtcccaatccctggggcaacctacctgaaggagagttacctagtcacccagaattgctgccatccaaggcctttggcctttacatttacatggaggcaggtctgagctctgwtccagacaggctcaacttagtgaagcagggtccaagcagtcaccaagcagacaggctatgcttctttccttgtagaagagttagggcgaggaaaagcaactgaaagttattcttcccagggttcagataaggcgttaactgcctaatttacaggcccaagaaggacctgcacgtcatggcaaattttgagttctgtagtttttttaagtgtgagctcccaactttctagcatgcacctcttgcttctgcttcacactgctaagccatttttcccttttttgtatgaacttttatggctccttctacagattaattctggcataacagaagaggctcaaatgactgtattataagactgaggctcac

SEQ ID NO: 525100 - DNA, 639 bp, Homo sapiens
cctcagagcatggggaaaaatacatcagaaacaaatggcactctaataaattggccctctaacatcttccagatgtgaacataacatttttactaccaataggatttgagtgaagattatagtttaaattatcagccacaatagtgtgtcccaatccctggggcaacctacctgaaggagagttacctagtcacccagaattgctgccatccaaggcctttggcctttacatttacatggaggcaggtctgagctctgttccagacaggctcaacttagtgaagcagggtccaagcagtcaccaagcagacaggctatgcttctttccttgtagaagagttagggcraggaaaagcaactgaaagttattcttcccagggttcagataaggcgttaactgcctaatttacaggcccaagaaggacctgcacgtcatggcaaattttgagttctgtagtttttttaagtgtgagctcccaactttctagcatgcacctcttgcttctgcttcacactgctaagccatttttcccttttttgtatgaacttttatggctccttctacagattaattctggcataacagaagaggctcaaatgactgtattataagactgaggctcacccaacatcaatctt

SEQ ID NO: 525101 - DNA, 647 bp, Homo sapiens
tggggccacaatgatctagcaactagagaccttggtcttgatcccataccatttgacttcttgaatattgatacaattctggagagtcagggatcccaaaagtaattgaaatttggtttcctggcagcctggtgagggggagtaagggtctgtttaatttgatttaaaggcaataagaactgggatgtttcttgtacacttgagttgatttgctacagctatcatacccgaattacagttccttttaaaaaaaaaaaccatttttggtttagtaaaactataaaatgtaatatgcaaatgacaacaaaattacttctgtttaggtctacatacataattttttatttagtccatgtaaacattagaatacaatcttaacttcgaatgtaatcctgtacaattttattgacatggttcctaacaagaggttatagtgttcatcatataaaacacraggaattcaagattataatgggcaagggtctgacatttccaagtattcacttgggtactaaaacaggttacttttcaatattttctccttgtggcaccgctttttagattgttttatttttttttaacctgaaaagcagaaatatctgaaatgttactgctctcatatttacagttgctctgaactatttgca

SEQ ID NO: 525102 - DNA, 589 bp, Homo sapiens
ttcagtgttatttaatcaggaaaaaactctaaacaaaagtcaaagagcaatctaaaatattaaatagagatctggctctgtgtcctttctttcctttcttttttccctccttactcttctytttttgattttgggccttaaaagaacactcagaaaccacaaatattcaagaaatattaacaacaataatagtcatgtattatccagtctgtgtcaggaataaacattccgattttataaccttcaggcctctgccaggtattattacttccactttacaaagaaaccgaagttcatagagtgtcacttacctttcccaaagtcacatggccaaatctcaaagataaaattcaaattacagggccaaatctctctccatcatacagatgcctcccacattgcctgtgactttacagaagcttggagtctaaattatgtggctgctattagtaacaactttgagaccgaaggctattgggctattggctccaccatgggcaccactagctttaaactcaaacagacagatgagaccacttgaaccttggcagttaccagttcagaggagcagcctaacccagccactcca

SEQ ID NO: 525103 - DNA, 593 bp, Homo sapiens
tatcagccagagcattttttgaatgcctacttataagatatttgaaataaaataaatagaatatatatgagccatgcttttaagttacttatagtaacttaaagttttagataactttaagttttagataacattgacatgaagaatatgaattcagtgatattaatataatgtatttaatattaatgtgttactaacaatattcagtctctgctcaatataagtacatagcttacatttcatacaaataaagggtrtgaattccacaagatgatgatgttgtaaatttggataagtaaaaaagttttttccctgaggttcccttggtcaaggaggtgggtctgcccagtaatttggggtggccttaggatgttactttttagtatgtattccccctttcctttttgggcaagatatgccagaggcagtatcaatggtcaaggttttattttggctcatattaatgtcaggctggtgtggctacctgtgccaggccatcatgttctttggtggcacccctatagccaagggacttagagtcaaaagacttacagccaattaaccgttttaagcaagataggaatagaggtaga

SEQ ID NO: 525104 - DNA, 630 bp, Homo sapiens
tgcctgcagttccttggacatgctgcatgtccattccaagtcatacctctctccttacatatatgcatgctgttcttttttccctgggatacttctgccactttaagacttacatttcctttggccaggtgcagtggctcatgcctgtaatcccagctactcgggaggctgaggcaggagaatggccagaacctgggaggcagagcttgcagtgagccgagatcacgccactgcactccagcctaggcaaaagagcgagactccttctcaaaaaaaaaaaaaaaagaaaaaaaagacttacattttcttcaagacacaaatgttacttaatacatacaactttctatgataccatacagatgagttagttactagttacttgttcctttgcccttccataagtattttgaacatgtttgtacatatccatcacattgtactatacgtgttgaaatgtgtttcaccataatatctatcgcagtgactgggcacattgggaatctctagtaactgatgtttcaatagcttcttgctctcaagaagctgtgttgattaacagtgactctttgtttccataacacatctatgaaacgctgccrcatatcaagttctaaagatatagattgtgca

SEQ ID NO: 525105 - DNA, 509 bp, Homo sapiens
ctcccactggaacttaagttccatgaaggcagcgactgtctgttgtgtccactcctgcatccccagtgcttaaagaattcctggagcttgttagtaagccctcagtcaatacctgtagaatgaatgaatcaatgcaattaagagtcagatcttattctgaaggttgttacctagtagagaagaaacacaggcatgcaattcgctataatataaagcaagaggaaaaaattactataaggggaatagaaaatcaatactaggagaaaactgctacataaaagctgtcaccaggcagaatattgtctgccttgagcaatggagaaaataacttgtgcagcaatttagaactaggagattggtgggaaagcttaccagaagaggtgaaaagtgaactgggcctcaaagggaaaaaaaaaaagagaatgaaattctagcaagaagataaatctaactggacyaaatggttctcacaggtgagttgtgaaagataaacagggaaatgactattt

SEQ ID NO: 525106 - DNA, 477 bp, Homo sapiens
tgttgtgttaagcaatggagatgcaaagattaatcaacacagcaactggccccaagctgctcaggagaagagcagataagaagacaatgctaagtgctatgatagtacatgagcacgaaggggacacagaaccagcctggggagttataaagaggaggagaaatcggcagtgagggaatggctttggatctttcctcctctgcaactgaagggccgctcaccttcaagttgagatgtttggataggcacytcagaacttgagccatgctggccgtggcccgttcccgctcatggtctttgactgactgtaaccaggggaccaagtgctgtgagaaataaagggaggctaaatggtttatcaggaagatttgggataccatccttattgtgtttagaaagaaatgtggagtgacaagttccatgttgctaccagatctcaaaatactttgctaaatgctattatagctcaggttggaa

SEQ ID NO: 525107 - DNA, 593 bp, Homo sapiens
taaagccttatccctttctgggatatctgcatcttaaaaaaaggataagaaaaataaaaataaaataacaacaataaaaaaagggtaggagagcaagatacctgaatgcagtgaatgaattccaatgaatcaatctctagtgatggaagagcatatacaggaacaggtgcaggtcagagcagttcgtcattataacctttgagtatcatctggtaggaagctgcttatttactaactctttttttgttttgttttgtttttgagaagaagtctcgctctatcgcctaggctggagtacagtggcgcaatcttggctcactgcaacctctgccccctgggttcaagcaattctcctgcctcagcctcccgagtagctgggactacaggcatgcgccaccatgcctggctaattttgcatttttagtagggacaggttttcaccatgttagccaggctggtcttgaactcctgacctcaaatgattgattcgcctgccttggcctcccaaaatgctgggattacargcatgagccaccgtgcctggccttactaactcttgaggctgacccttccctcatcactgaataaaaccc

SEQ ID NO: 525108 - DNA, 605 bp, Homo sapiens
aactcacaaaggagaggccctcattcttgccttaaaactgcccctaaagccaagccttttcactgggaagccctagctgcttaccttttggatactagtgagtgctgcttttttgtatactcatggggctgattgcaccatagctgagaacgtggaatgcagaatgagcccacctggctttgaatctgggccctacttaacttatcagctatgtggttttgggcataagccactttctctgttaagttttctcatttgtaaaatgtgggtcataattctgccttcctctaggggaagcttttagaatrgtgcctggcatgaaatgcctatgaatgtctcagttagtgtgtgtgtgtctttaacttgcgtcccattctcagggcccccacatcagtgtctcgtttacatctcacacagtgaccctgcgaggcaagggtttgcccagtttgcagatgagaaacccaaagctgagagaggtgtggggaaccgcccaaggtcacccagctgtgaatgaacgtggtcagaacacagaatctgagttggtcacacttcccactgatccatggggcctttaagccctctggaagcttccattaaagatgatt

SEQ ID NO: 525109 - DNA, 512 bp, Homo sapiens
aacagcctgcagtgtctgtgtgggtccacccagcacttcctcctaactcacgcctacatgcttgcttccacattctctcacataattcaattacttcaaggtctataatttctgagatttgaccctgacctgatctgaggattggtctgactaatgagggaggggttttgttccatttagaaggaaatcttctagartactttctggcctgtctaccatttggaggtatgtgtggccagtggcttagtcaccagcgtgctggtcacaggtggccccacccattagaggatgctatgaccaagggaaattgggaccaatatgttacttgggtcgaacgttcaagtagaagcatgatattaattcacatatttttcgtgatgtatctctgtcttgttctaaagaacaaggagtgctttcttacagaatcacaacagaaaggcattaattatagtatttggactccaggaagaaaaacagcaaaaccatatgataaaaaaagatcgtagctccaa

SEQ ID NO: 525110 - DNA, 577 bp, Homo sapiens
aattatctccacaagggagcagggacacatatttaagtgtaaagtctgagggttttatggcttgcctagtgagttgttaataaagctgagtcagcaacttagccctattaactagtcctgtgaactccccgcttctctacatgtgattacctccacaaaatgcctctcacttttatattgattcagtcccctatgtggtttctaactcctttctgttgctttctcatgggggaaaagaaaatcaattcagagtggctggaagacatttggctttatctaaaagtgatcgatggcaataattttcatcttttttattctcttgttccatgaagctgagcttcaaaaagctttgcagagaaaaaaaaaaaaaggccgatggtgaggaaaaacataaggtaatagtacctcaggggcaagggctaagaagagcttygtgactcattcaagcgtaacattctggatgcaaccgggaaaataatttatatgtgagcaaagagatagatttacaaagaagttgaggcaaaaataggctttggctatttttcatgtaatatgcatattcaaaaactaaggttta

SEQ ID NO: 525111 - DNA, 407 bp, Homo sapiens
ctgctctgagccttgccattgtttgcttctgaaaatgcaatcacttgaattcttatcagatcttagttacaaggtagcaaacaaaccgactgctctgctcatgctgaaagaattcaggaggtctttgtgtagaatctgatttataatccttataaaataaagtaccattccagagttactagtgccattgctcaagtcttgctgctcaccagtgtgaaattaggacttcaggaaggtggctaacaagagatacctggagtttgttgccccaataagaaaggaccaagacaatgaataaagagctaagatttgactggagtattgaagggagagcactggagtgcattggaggggtggagacacaccaatgatgaytgggagtccagaaaagcagcaaggaggcacca

SEQ ID NO: 525112 - DNA, 451 bp, Homo sapiens
ccacggtcttgtcttaggcgaaagagtcctggttgggtatatcaaccctgtgcctagatttccaccagttcccttctattttcctggtgttttacagtttctagggcatcttcacatttgtgccaggcaacaactctgttcaagtattcttagcagccaacccttctgtctttgactcttcacccacaactcttacccagggagacagccaggacccaatgtccggaagagtcagtaaggaccagatcagcagcacaacctggcttgacatttgggtgaaggaccacaaacagccacagtggagggcgcctttgctctgtgtcagacacagtgctgaggcattgcctgcattawctgattgacttctcagctaagtatcaatgttatctctctttcatagattaggtaactaaggttcaaaggttttaaccaacttgctcaagatcacaca

SEQ ID NO: 525113 - DNA, 520 bp, Homo sapiens
gaaacatctttcaaaatcagaagctctcctctttcctcaaggtttctgagcattccatctgatggagaaagacacatgctagacctaaccataggtgtggagaatttaggcctccatgcaagggaattctctctacattaattagtatggcaacagtggtccgggttacatgtcagatgcacgaacaataaagacaacattagcaggactgaggcgttgatggaaaaccaaggtccagaaaagatggaaggtaaaactgctcttaaagtagcacctagcattccacatgaggttttggcatgctgctccatttttactagtggaggactttaataatccaatggccttcaaacttgtttgacagtgacccacagttagaaatacgttttatattatgatccaaagtagacatagaaataggtacagatgtagctatgcttacatggwttaagcaactgtcttaatccatttaggctgctataacaaaataccttagactgagtaatttataaacaacaga

SEQ ID NO: 525114 - DNA, 633 bp, Homo sapiens
attgaggagggagaaagaagggaaggaatcaggagacaattataataagatatgacttggggccactggagagaatgagaacagagcctgagtgagatgatagacgttgtgctgtggatcagtggttggggccatggctcctgggtatccgggggtaaaatcctccagtcctgccaatatcccataacttccaaatctttatctctagcccatttctctctcttcagcaccaggcccgtttacattccactgaaaaatattattcaaaatgcctgaaacagaactactcatcatcactccccaaactgttccttcacttctgtcaccagatccttttaattctttttcttgactgataacgtctctaaggtaagcagttaaacacatctttctctcctgcagcttatgaactgactgcaaaacaagcatgggtcagttggcagtggggygcatgtgaatgtttagcagtcggctcgcagagttccagaacatttagccatgggttcttgtgagctggcagcagctgactccagcacaccactgtgaccagagtcacaagatcagctttattactggtaaactggagaatgtggcttgatgctttagcttcaaccttccagacatctattactg

SEQ ID NO: 525115 - DNA, 598 bp, Homo sapiens
ttgcccccgttttccagttgaggaagctgaattcctaacatggctgggctggaactagaacctggatctgtaggattccacaatccgctctgtttccactaaggagacctgaaagccacagggaaggaaygtgaagggggtggaatttttccttagtgtttgtgatttgattctgacactggtcacctttctaccttcccgataccacagaggtataggcaaaagggctctggacgtggcaagtggagtttgaggtgctggtcccatgttccctactagctattcgctctcttgcagatcagctttccttcctacgaccggcccatacctgctttgctcctcactgtggtcccagtgcttggcacacagtaggctcagtaaatacctagtgagcaatgaaagaatggatagatcaatgaatgaatggggctcagtttccctgctggtggagtgggcatcctgctgcctgctctgcctcccttgcaagactctctggaagaagagtgggtgagcgaccacagcctcgtgcaacactgtccaacagaaatgggatgtgaggcacaaccagaagccacataggtgaccttgaatttgctgg

SEQ ID NO: 525116 - DNA, 598 bp, Homo sapiens
ttgcccccgttttccagttgaggaagctgaattcctaacatggctgggctggaactagaacctggatctgtaggattccacaatccgctctgtttccactaaggagacctgaaagccacagggaaggaacgtgaagggggtggaatttttccttagtgtttgtgatttgattctgacactggtcacctttctaccttcccrataccacagaggtataggcaaaagggctctggacgtggcaagtggagtttgaggtgctggtcccatgttccctactagctattcgctctcttgcagatcagctttccttcctacgaccggcccatacctgctttgctcctcactgtggtcccagtgcttggcacacagtaggctcagtaaatacctagtgagcaatgaaagaatggatagatcaatgaatgaatggggctcagtttccctgctggtggagtgggcatcctgctgcctgctctgcctcccttgcaagactctctggaagaagagtgggtgagcgaccacagcctcgtgcaacactgtccaacagaaatgggatgtgaggcacaaccagaagccacataggtgaccttgaatttgctgg

SEQ ID NO: 525117 - DNA, 593 bp, Homo sapiens
actaaattacacaagaagtgatatatggatgtaaaaacaaaattaggtaaaaaaggagtcaaagagaatgaatttattagtctctcaaactgtcatgtattatacctgaacacaaagcattactgcacaacacatttacctcattcattctataggaaaaaatagtaattagttgatattgtagatttatccacgttatcttagccttttaaaaattttatttcttataaatgtgacatctaatgaatctttccttaacattccatctagcatatatagttactgaacaaccaaactatatattaacagttcatttcctaaattcaaaaatagacaattttctttttctttttctttttttttttgagaccaagtctcgctctgatgccaaggctggagtgctgtgaygtgatctcagctcactgcaacctccgcctcccgggttcaagcaattctctgcctcagcctcccgagtagatgggattacaggcacccgccaccacatctggctaatttttgtatttttattagagacaaggtttcaccattttggccaggttggtcttgaactcctgacctcgtgatccacccgc

SEQ ID NO: 525118 - DNA, 620 bp, Homo sapiens
ctgctcagaggactgaggtgggcggactgcttgagcccgggaggtcaaggctgcagtgagtcaagatcataccactgcactgcagcctgggcaayagagagaaaagaaaccctgtctcaaaaaataggaagaagaagaaatgaaattcaaaatgtaaaatttccagtgcttgaatcacagttttcaaattcagcttcagtactgtcaattggcaaaacaacaacaacaaaaaccccaaactttattattttaatctatttggttcatattttgcaagagatggtggatctagaaaactttaaccgggattttatgaccttcccctccccaccccgccaaatctgaacaaagagctcaaactactttttttccttcttttattccatatcatatagaagaatgccacagttgcaaaagagcaagctatctctaaaatccagggccaagatcagcaatcccagtacttaagtcaaaagaatcaataaacagtaaataggattaattaaattcattctatgtttcaatttgtccaggttttaaacacattattcaatcacagccatcataaaataagaaatattatattaaacgcattaactttagattagaggatgacaagt

SEQ ID NO: 525119 - DNA, 620 bp, Homo sapiens
ctgctcagaggactgaggtgggcggactgcttgagcccgggaggtcaaggctgcagtgagtcaagatcataccactgcactgcagcctgggcaacagagagaaaagaaaccctgtctcaaaaaataggaagaagaagaaatgaaattcaaaatgtaaaatytccagtgcttgaatcacagttttcaaattcagcttcagtactgtcaattggcaaaacaacaacaacaaaaaccccaaactttattattttaatctatttggttcatattttgcaagagatggtggatctagaaaactttaaccgggattttatgaccttcccctccccaccccgccaaatctgaacaaagagctcaaactactttttttccttcttttattccatatcatatagaagaatgccacagttgcaaaagagcaagctatctctaaaatccagggccaagatcagcaatcccagtacttaagtcaaaagaatcaataaacagtaaataggattaattaaattcattctatgtttcaatttgtccaggttttaaacacattattcaatcacagccatcataaaataagaaatattatattaaacgcattaactttagattagaggatgacaagt

SEQ ID NO: 525120 - DNA, 613 bp, Homo sapiens
ctgggggttcactcttcctctcatgctcttgatggagctggtggtctgggggtcttactccttggaggccgtgtggaccataaggtccaccaccctgttgctgctgccaaattcatcccaggaaaggagcctgacaaagtggccattgaaggtaatgccagtcgtggcattgaaggtagaagagtgcaggtgccactcttaaagtcagaggagacaacttggtcctcagtgtagatcagaatgcccttgagggggccctccratacctgcttcagcatcttctcatgccatcatatttggcagctttctgcagatggcagatgagagccacaaccaacatattatgggtgggaacacagaaggccatacctgtgagcctcttatctggctcagggatgaccttgcccatagcctcggccacactagtagatacagggatgatgttctgcagcagtcacgccaaagtttctccaacagtcttctgggtggcagtagtggcatggactgtagtcatagatgaccttggccaagggtgccaaacgttgatagtgcaggaggcactgctgacaatctcgagaagataattcatacttctcatggttcacacccacca

SEQ ID NO: 525121 - DNA, 655 bp, Homo sapiens
aagtgctgttttaatacttttataggatattctttttatttatatatgtattttttgagccagagtttcactcttgttgcccaggctggagtgcaatgatgcgatcttggctcactgcaacctctgcctcctgggttcaagtgactctcctgcctcagcctcccaagtagctgggattacaggtgcccgccaccatgcccagctaattttttttgtatttttagtagagacgggggtttcaccttgttggtcaggctggtctcaaactcctgacctcaggcaatccacccaccttggcctcccraagtgctgggattacaggcatgaggcattgtgcccggcctataggatattcttagattctggtattctttatcaaactaggaggagaagatcataattatatctttacatgtatgtattaattcatttaatcttaataatgatccccataaggttaagtaatttgtccacggttatagagccagtaagtagcatggtaagaattggaattcaaggggtttggctccaaagcccatgctgttaaccactatacaattaatgactaatctatttggtgtccagatctggacactcagggcagatttcagtcctgtatatgatatatttatataaagtacttttctcctaaaag

SEQ ID NO: 525122 - DNA, 552 bp, Homo sapiens
catataaagtattctgttttgcaggcagttttctcttccctaatataaatttaattaccttgactttggaaggccaacgccagtaatcctaagagaaccacagaccctctgaaggaagtgaactgctcctgcaggacccgggagacacaccaaatactgtgagtgccccaactgcggaagtgggaaagggagacctgtcctctcccaaacacacacccccactggagaagctgaaggtcagtttctgggagaagtttccaactttacctggaactgagtcaaattagagagccaagagaaatacaggggagaggaagcagcagaaacaccctgggagctcgctgggtccccaagcaccccattcctgcctagcactgcagggatccttcaggagggtggccagaggagcaggggataaaactycacagggagaaaaaattctctcctgaacttcatgacaatttataacaaagtgagaagtctcctggtcaaaactaagaggagggtgcaaaccaggcctgcagacttcacaggcagagggagaactaaagc

SEQ ID NO: 525123 - DNA, 669 bp, Homo sapiens
gtcttcagggaggtcctatgtcagcaccaaagggccgttctcctgcacaggacatgtgaaaactcagggtactgcccaagaagccactctacgacgggttggactgggcttgttagggatgccaaagaaatgctttcgaaacatgaaagtgaaagtttaagtaataaatcctaaatttggaccgttaagaaataaagtttataaagcaaactgatatgccaaatatataatagttctcmctgaggaaagggcatgaggagatcatgtctgacaagcagatttacaaaaatgattactttaggaaaaatcatgatttagaattaaaccaatatttatgctgatgaagaagagcaaaacagttgttctttaagttatactttctaccttgatggtgctaatcactgctggtgttatcctaaaaagcaaattcacactggtgattgggaagcagatggaagcctactgtccaccctatcatctgtgatgaaaatgcagacgggccctccagcagcccagttccctttgccagggcacactaggcgttctcaggaggggctctgctccctgcagggaatgcccacgcccgcggcctcaaaaccccgccagtaccttgatgtactcgctccagtgctgcagcagcgcctgctgcccgcccctcacccggctgaa

SEQ ID NO: 525124 - DNA, 599 bp, Homo sapiens
ggcttctttactgcaacctgtctttatgacctgtatcttgtgctgacctcctatgtcatcctgtgacttggaatgtctaacctcctgggaatgcagtccagaaggtctcagccttttacccaactcccattcaggatggtgttgctctggttcaaacgcctctaacccagtcctattttaatgtttctctgggcctgatcattggaaaggatttgccttcctcagatgcaagttcttttctttccttagcacggtcctcagaggagtgaaatccactgagacataaatgagaaggtgggtgctaggtgctggggaagggagtggggagtgtgtgatcagtgggtccagagttcacttcgggaggatggaaagttctggagaggacagtggtgttggctgcacttcatgccgctgaactgcaagcttcaaatggttaagatggtcaattttatgttatatagatattgccaaacgttaaaarggggaaggggacagcatgcgggcctatctctgacggacagggaggagacgcctgctgagtgaaggggaaccaccgcagaaggcagggaggggtcagccagcatccactccctccacag

SEQ ID NO: 525125 - DNA, 596 bp, Homo sapiens
gtttcaaatgctgctgagacatgaaatcagtgagaactcagtgtcctttggacttggagacagaagtgaaggtgatcttggcaagagcaactgcaatgaaatggtggtaagaaaaatcagattgctggtggtgktgcagagacctattcttggcccccaattgcaaatctctcctctcttcttagaaatagacctcacattttttgttcacggcatcctagaataaaaactacatttcacagtctcctttgtgtggtcttggggctaagtgctggccaatggaatgtacgcagaagtgtcacaagtgacttccaggaagcattcttcaagcttcaagggaggggtgggccctttttgttgccttcctccttcctattggccagaaagcgtaagcatcatattggaccatgaggtagtgaggaacatttggaagccacaagttgagaatggcaaaacctgagagaaattaagtgaggtgaatcacgaaagtgagtataggcagctcttttaagaagtctgactgggaagagaaagaccagcagcaggggaaggaatatgttgtcaaggcagtgggggcggggggagctattttacag

SEQ ID NO: 525126 - DNA, 543 bp, Homo sapiens
gcgccagtttgactgaaataagccagtttatttattcatttttttctcaaaaaagaaaaaaaattgcagcagttcaggatagaatagttctgtgcaagtcatagtgtaaagcagtgttctccaacttttttttttttttttttttttttttttttttatgagatggagtctcactctgtcgcccaggctggagtgcaatggcacgatcttggctcactgcaacccccacctcctgggttcaagcaattctcctgcctcagcctcccaagtagctgggattacaggcacmcgccaccacacctggctaatttttgtatttttggcagagatggggtttcgccatgttggccaggctggtctcgaactcctgacctcaggtgatctgccgcctcagcctcccaaagtgctggaattacaggcgtgagccactgcatccggctgttctccaactttaatactttacacatgtacatatcttctgggaatcttgttaaaatgtaggttctgattcaggagatctgagggggaggcctgaggttctgc

SEQ ID NO: 525127 - DNA, 543 bp, Homo sapiens
gcgccagtttgactgaaataagccagtttatttattcatttttttctcaaaaaagaaaaaaaattgcagcagttcaggatagaatagttctgtgcaagtcatagtgtaaagcagtgttctccaacttttttttttttttttttttttttttttttttatgagatggagtctcactctgtcgcccaggctggagtgcaatggcacgatcttggctcactgcaacccccacctcctgggttcaagcaattctcctgcctcagcctcccaagtagctgggattacaggcacccrccaccacacctggctaatttttgtatttttggcagagatggggtttcgccatgttggccaggctggtctcgaactcctgacctcaggtgatctgccgcctcagcctcccaaagtgctggaattacaggcgtgagccactgcatccggctgttctccaactttaatactttacacatgtacatatcttctgggaatcttgttaaaatgtaggttctgattcaggagatctgagggggaggcctgaggttctgc

SEQ ID NO: 525128 - DNA, 543 bp, Homo sapiens
gcgccagtttgactgaaataagccagtttatttattcatttttttctcaaaaaagaaaaaaaattgcagcagttcaggatagaatagttctgtgcaagtcatagtgtaaagcagtgttctccaacttttttttttttttttttttttttttttttttatgagatggagtctcactctgtcgcccaggctggagtgcaatggcacgatcttggctcactgcaacccccacctcctgggttcaagcaattctcctgcctcagcctcccaagtagctgggattacaggcacccgccaccacacctggctaatttttgtatttttggcagagatggggtttcgccatgttggccaggctggtctcgaactcctgacctcaggtgatctgccgcctcagcctcccaaagtgctggaattacaggcgtgagccactgcatccggctgttctccaactttaatactttacacatgtacatatcttctgggaatcttgttaaaatgtaggttctgattcargagatctgagggggaggcctgaggttctgc

SEQ ID NO: 525129 - DNA, 551 bp, Homo sapiens
ctgcgtcgtgtctggtaatctgagggcaagaagaacgatttgcagaagctcccagttttcttggctgtggcacagtcgctttgagggccaggttccttcggcttcctcccgactcccctgcttccccccgtaggattcccgttggtatcgtccgagccccacctccctcctcttcgcccccgcacgccgaaaacaggggcctctcacgtgacccctgcgcgctcccgcgggggagcgtagtctcggaggcggcgccgcaggggattgaggggttgactgagcgttgcgagccttagctttctcccgaacgccagcgctgaggacacgatgtcgcggctctcccgctcactgctttgggccgccacctgcctgggcgtgctctgcgtgctgtccgcggacaagaacacgacccagcacccgaacgtgacgactttagcgcccatctccaacgtaacctcggcgccggtgacgtccctcccgctggtcaccactccggcaccaggtgggcgcgggccctrtgggcttcccgccctcccctgcccagccgagcc

SEQ ID NO: 525130 - DNA, 663 bp, Homo sapiens
agaatgagttttctttttaaaaaatattttagaaaactcatcaaatcagcatgtttctctctgaattatatgtaactattggcaataagatagtgatagtaagaaccacttctttatataatagagtcatcaaggtctttgtttttttgggacttatttttagagttccgagtactaattaaaaaccaatgtctcctattttcctgtttrgctttagcaaagattttgatttgtccaaactcaaatcacatagtgatttgagcattttcatgggtactggaaaaatagagattatactaacacatcatgatcttttatccaccaggacccatgaaaatgctctttttatggagtgagccagtgccatgggtgcttgtcattggtacttggatctggctgtgtctaggtaaacggcctatgggtttggttaaatccccttggtattgcttatagcttcacctcttcctccacattgagttcttactatatgtggctaaatgttacaggtttatcaatagttttcctcttcttttcagtgttaaatgcttattaaattatttgtaaagcaatttgtcctaattacaaactgttttaaaaaaattcttactcatcaattcatttctttgaaatgaaaatctaggtaacaagcatcgatacattctg

SEQ ID NO: 525131 - DNA, 619 bp, Homo sapiens
actcacacatctctactgctgctattgctagcagttttaattagggactgtctagccaagcacaacttgcctgccttgcaccccctgttctcctcctctggggttgactggagctcagtactgccaaactgttgattgaaaacttcttgaatgaatgaacttatcaaatayttccatgacttcctggtagtcctggaaatgtagtcctagaaatgtagtcctatgatgcctggtacagtgctcctggcccttgtaagcctggactagactgaccagtctgagtgtaattaacattgcccctgcagaaacagggcaactgagaggtggtggctgtgtggatgagtctcctgaggactgaacattgtgcatccacctgggtttagaagcaccaattgtagtggtcagggttttccaaagaaacagggtcaatagtatatgtatagacatatagaaagatatttattttgaagaatgggctcacacaactatggaggctgaggagtctcaggacctgccatcagtaagctggaggcccaggaaagctggtggtgtaattccagttcaagcccaaaggccccagaaacaggagcatcaatgtaccccagatgggagaagatgg

SEQ ID NO: 525132 - DNA, 619 bp, Homo sapiens
actcacacatctctactgctgctattgctagcagttttaattagggactgtctagccaagcacaacttgcctgccttgcaccccctgttctcctcctctggggttgactggagctcagtactgccaaactgttgattgaaaacttcttgaatgaatgaacttatcaaatacttccatgacttcctggtagtcctggaaatgtagtcctagaaatgtagtcctatratgcctggtacagtgctcctggcccttgtaagcctggactagactgaccagtctgagtgtaattaacattgcccctgcagaaacagggcaactgagaggtggtggctgtgtggatgagtctcctgaggactgaacattgtgcatccacctgggtttagaagcaccaattgtagtggtcagggttttccaaagaaacagggtcaatagtatatgtatagacatatagaaagatatttattttgaagaatgggctcacacaactatggaggctgaggagtctcaggacctgccatcagtaagctggaggcccaggaaagctggtggtgtaattccagttcaagcccaaaggccccagaaacaggagcatcaatgtaccccagatgggagaagatgg

SEQ ID NO: 525133 - DNA, 429 bp, Homo sapiens
aaaatgaatttggggccagtaggcagggcacacaggaccttgcatattgtattcaggattctagtcattatcttagaactggggagtcattgaaaggttttgtgtgggtgaatgtgtgtatgtgtgtgtgtgcttgtgtgtacactctracaacacaggctctggaggaaggatcatgcatgatcgtatttatacttcaactcagtcactctagctgggatatggagaagacattaaaaattgaaatggaaatcaagctacctatggagactggatagaaagctaatgccttgatctagggaagaggtgatgaaaaaatggcccaagataattaccaggaagcaagtcaggaatgaaactctgtccactgtccctatgggccatccattcagttctcagccaaagatccagtttgagggggaaaagata

SEQ ID NO: 525134 - DNA, 475 bp, Homo sapiens
acccagagttacagataaaaagcaaagatgagcagaactttcactgtgttccttcttgcctgagtcaacctacacgygataggccttatcaatcaagctcccatttggtagaatgacttccctctgctcccacgacttactcttcccaccagagctcatctgacacatttgcttctgagtgtttaggaagccccttgtttctgaggatgaaggatagcaagtctcgtgggacaggtaggagtcatgctccagaacccaggatgaacgccgtgcctattttaaaagacaattacaatacatatagtgttcacgtcagtcatcccggtgttttatttattgtatctggaagcagatggtcttcaaagtgtttaaacacatttgaacatgcaagatccattatttattgcatgagatagtgaatagaggcagaggcgtggggccattagcaggtacagaaggctgggaacgccaaaag

SEQ ID NO: 525135 - DNA, 572 bp, Homo sapiens
atgtttaggagaaatttggatccccgtcaatgacttctgaagtcaatgacagaaatggatagaggagaggagggagtagaggccttggaagaacaagcaagatgacttacttagcaaccccctcatggtatcctgccatcgcattgagcatccttgaaactcactggagctcccttcctggaatgcatttgtaccgaaaggtaacaaccaagttaaaktaataaccaaaagatgactcagagagaaacaagaatgctttttctccctactctactatatttagagccatttttcaaaatcaacatcctccaagtccatggactttcggaatagagagttgggcttatgagaaaattacgtttttgaagtaactaccattcatttagtgtttgctatgtgccagcccaggtagattgcttcacttgggatattttatttaatcctcacagcaactctgtgacatagaccattttattctcaccatcaaaaacaatgagaaaactaaagcacagagaagtttagtaacttacccaagggcacatagctagcaggaggagtagtctggaatccag

SEQ ID NO: 525136 - DNA, 602 bp, Homo sapiens
tgcaagtttaaggtattgctactcaaactgaagacaataacgattcattaattcatatctccattaattcaaaagtatttatactatctggtaagacaaaatttaaaaagcagatttttgttttctgcatgatgccatttttccatttttttcactaaagtttgtaaaattaagaaaaaaatgaggccgggcrtggtggctcacgcctgtaatcccagcactttgggaggccaaggtgggtggatcacctgaggtcaggagttcgagaccatcctggccaacatggtgaaaccccgtctctactaaaaatacaaaagttagccaggtgtggtggctcttgcctgtagtcccatctacttgggaggctgaggcacgagaatcgcttgaacccgggaggtagaggttgcagtgagtcgagatcatgccactgcactccagcctgggcaatagagtgtgattcagtctcaaagaaaaaaaaaaaaaagaaatagtataaggctattaagagaaccacgtaagtctatatgtattgacatgcaaatattatttatttcacataataggtatatatgatacatttgatgaatatttactataattgc

SEQ ID NO: 525137 - DNA, 575 bp, Homo sapiens
ttgttttatttttgtaccacttttatatccagcctggtgctttagtgaacactcttaaatggtggttgacagaatgtgtgaagtgttcattgaaattgtttttaaaagtattataatatgattatgagattgagagaccctttgccaaatatttgactctctaaatggactttatcaataacaaagtgctgaaagttaaaatacataaaggttgatccgtttttttccgaagcgtggaattgtggcaaggttattgtattggatattaacagctctagattctgktgtggaatataccttttacccatttggcaggtcacctaaacatttgagggagccaggtgtagtggtgcacgcctgtaatccaagctacccaagaggctgaggcacaagaattacttgaacccgggaggcagaggttgcagtgagccgagatcacaccactgcacttcagcctaggcaacagagtgagactctgtctcaaaaaagaaaagaaattacttgtccccattttcacagcctccctggccccagagaacagaaaagtcagagaggtggaagactcgacgctccca

SEQ ID NO: 525138 - DNA, 575 bp, Homo sapiens
ttgttttatttttgtaccacttttatatccagcctggtgctttagtgaacactcttaaatggtggttgacagaatgtgtgaagtgttcattgaaattgtttttaaaagtattataatatgattatgagattgagagaccctttgccaaatatttgactctctaaatggactttatcaataacaaagtgctgaaagttaaaatacataaaggttgatccgtttttttccgaagcgtggaattgtggcaaggttattgtattggatattaacagctctagattctgttgtggaatataccttttacccatttggcaggtcacctaaacatttgagggagccaggtgtagtggtgcrcgcctgtaatccaagctacccaagaggctgaggcacaagaattacttgaacccgggaggcagaggttgcagtgagccgagatcacaccactgcacttcagcctaggcaacagagtgagactctgtctcaaaaaagaaaagaaattacttgtccccattttcacagcctccctggccccagagaacagaaaagtcagagaggtggaagactcgacgctccca

SEQ ID NO: 525139 - DNA, 575 bp, Homo sapiens
ttgttttatttttgtaccacttttatatccagcctggtgctttagtgaacactcttaaatggtggttgacagaatgtgtgaagtgttcattgaaattgtttttaaaagtattataatatgattatgagattgagagaccctttgccaaatatttgactctctaaatggactttatcaataacaaagtgctgaaagttaaaatacataaaggttgatccgtttttttccgaagcgtggaattgtggcaaggttattgtattggatattaacagctctagattctgttgtggaatataccttttacccatttggcaggtcacctaaacatttgagggagccaggtgtagtggtgcaygcctgtaatccaagctacccaagaggctgaggcacaagaattacttgaacccgggaggcagaggttgcagtgagccgagatcacaccactgcacttcagcctaggcaacagagtgagactctgtctcaaaaaagaaaagaaattacttgtccccattttcacagcctccctggccccagagaacagaaaagtcagagaggtggaagactcgacgctccca

SEQ ID NO: 525140 - DNA, 575 bp, Homo sapiens
ttgttttatttttgtaccacttttatatccagcctggtgctttagtgaacactcttaaatggtggttgacagaatgtgtgaagtgttcattgaaattgtttttaaaagtattataatatgattatgagattgagagaccctttgccaaatatttgactctctaaatggactttatcaataacaaagtgctgaaagttaaaatacataaaggttgatccgtttttttccgaagcgtggaattgtggcaaggttattgtattggatattaacagctctagattctgttgtggaatataccttttacccatttggcaggtcacctaaacatttgagggagccaggtgtagtggtgcacgcctgtaatccaagctacycaagaggctgaggcacaagaattacttgaacccgggaggcagaggttgcagtgagccgagatcacaccactgcacttcagcctaggcaacagagtgagactctgtctcaaaaaagaaaagaaattacttgtccccattttcacagcctccctggccccagagaacagaaaagtcagagaggtggaagactcgacgctccca

SEQ ID NO: 525141 - DNA, 295 bp, Homo sapiens
taaaaccagcttagaggtatatgtaaagctttagatgtatatgttagaaaagaaggaatacaataagcaaaatattcatttcaaaaaattggaaaaagaacagcagattaaacgaaggaagggaaaaagaacagcagattaaacgaaggaagtagaaggaaggaaataaatgaakagtagaaatcaattaaagacaaacacaaaatgaagtaattcaatatatcagctagctatctctacattataataaattactccaaaatcttaagtaaaccacttgttgagctccttagtc

SEQ ID NO: 525142 - DNA, 678 bp, Homo sapiens
cttccacacatttgctaatttattgtcgctaaattagacctaatattagcaattttgcagctgttcytttagaacatacatggccatatatttgtatgctagttggtaattatatttctcagcaaaagaatggaccacattttcaggagggaaagaatgggaaaatgggaaaaaggagattacatcaaaacaaactcacctgagagtggaaaagagagcaaggaaatggagagaaaaatgcattacagaaaagagttaagggcagattccagagtaaattaacagcagcaaatgcttatgcagggttgcacaattcaaagagcttgtgtagtaggtctgacactggcaaagaagaaagcatctctgggcagagactttctctactatattctgttactgtgaatgtactaccacaaaaagttgatggtaggctcttaagtgaactgcaaaggaaaggagaggagtacaggctgtatggatacttccacgaaaatgtggtatacagtctattgacgtacaaagcttaagtgctttggtttgaatatgtgcccgaatgggagaatgtgaggataagaaaatgagaattttttagatttttattttgtttagaatgatgcagtttcctgctttgtttacatctggagatgacatttgaaggaatatgaaaaagctgttttc

SEQ ID NO: 525143 - DNA, 678 bp, Homo sapiens
cttccacacatttgctaatttattgtcgctaaattagacctaatattagcaattttgcagctgttcctttagaacatacatggccatatatttgtatgmtagttggtaattatatttctcagcaaaagaatggaccacattttcaggagggaaagaatgggaaaatgggaaaaaggagattacatcaaaacaaactcacctgagagtggaaaagagagcaaggaaatggagagaaaaatgcattacagaaaagagttaagggcagattccagagtaaattaacagcagcaaatgcttatgcagggttgcacaattcaaagagcttgtgtagtaggtctgacactggcaaagaagaaagcatctctgggcagagactttctctactatattctgttactgtgaatgtactaccacaaaaagttgatggtaggctcttaagtgaactgcaaaggaaaggagaggagtacaggctgtatggatacttccacgaaaatgtggtatacagtctattgacgtacaaagcttaagtgctttggtttgaatatgtgcccgaatgggagaatgtgaggataagaaaatgagaattttttagatttttattttgtttagaatgatgcagtttcctgctttgtttacatctggagatgacatttgaaggaatatgaaaaagctgttttc

SEQ ID NO: 525144 - DNA, 678 bp, Homo sapiens
cttccacacatttgctaatttattgtcgctaaattagacctaatattagcaattttgcagctgttcctttagaacatacatggccatatatttgtatgctagttggtaattatatttctcagcaaaagaatggaccacattttcaggagggaaagaatgggaaaatgggaaaaaggagattacatcaaaacaaactcacctgagagtggaaaagagagcaaggaaatggagagaaaaatgcattacagaaaagagttaagggcagattccagagtaaattaacagcagcaaatgcttatgcagggttgcacaattcaaagagcttgtgtagtaggtctgacactggcaaagaagaaagcatctctgggcagagactttctctactatattctgttactgtgaatgtactaccacaaaaagttgatggtaggctcttaagtgaactgcaaaggaaaggagaggagtacaggctgtatggrtacttccacgaaaatgtggtatacagtctattgacgtacaaagcttaagtgctttggtttgaatatgtgcccgaatgggagaatgtgaggataagaaaatgagaattttttagatttttattttgtttagaatgatgcagtttcctgctttgtttacatctggagatgacatttgaaggaatatgaaaaagctgttttc

SEQ ID NO: 525145 - DNA, 528 bp, Homo sapiens
caagaaggtgacctatgctgtcaggaaacctccccctgctctttcttttcatttttggaagcaattatacctttcactcaaggctaacaaagttaatgtaatttattttaaatggttcatttggcttggaaaccacttggatatttctaytgaatacatttcagaataaacatatttggagaaaaaaatctacattcaacaagtatttgagtttctactttttttttttttggtaagaccctgagttgagaactatggagcatgcaacattcagtacaaagttctgtgaccagaggtgtgatgataaattttgtgtgtccacttgcctggcccacaggatacccagacgtttggtcaagcatattttgggtgtgtctgtgaggctatttctggatgagattaacatttgaatcagtagactgaataaagaagattgccctccctaagtcagttgaagatctgaatagaatgaaaaggctgaggaagaatctcaaattgggcatcaaagtaactgatgcccaattactt

SEQ ID NO: 525146 - DNA, 538 bp, Homo sapiens
tatcaccaccacatccagtgctcaaagaacaggtggtttctaaacttctgtattatttttaatcaggaatccactttgggcaactgttgtccaagtcaggtccccctaacttgtactcgtgcagttgatttgctggaactaaatgcatcctgttagattttaatgacaattttgtaatgcaataaaatcaaggaaacaagtctgtgttttccagaaccaaacttaaaatttactttagaaaacaacatttgtccttctccagtcttctttcttatactatttcttgagatcacaactacatagatttgtcckttcctctttttaaaaaaatctgggcacattaattaattagctaattaattaattaaattattattatttttgagacaaggtctctctctgtgtcccaggctggtgtgcattggtgtgaccatggctcatggcagcctcagcttccagagtagctgggactacaggcacacaccaccatgttaatttttaaattttatttttgtagagacaggatctcactattttg

SEQ ID NO: 525147 - DNA, 538 bp, Homo sapiens
tatcaccaccacatccagtgctcaaagaacaggtggtttctaaacttctgtattatttttaatcaggaatccactttgggcaactgttgtccaagtcaggtccccctaacttgtactcgtgcagttgatttgctggaactaaatgcatcctgttagattttaatgacaattttgtaatgcaataaaatcaaggaaacaagtctgtgttttccagaaccaaacttaaaatttactttagaaaacaacatttgtccttctccagtcttctttcttatactatttcttgagatcacaactacatagatttgtcctttcctctttttaaaaaaatctgggcacattaattaattagctaattaattaattaaattattattatttttgagacaaggtctctctctgtgtcccaggctggtgtgcattggtgtgaccatggctcayggcagcctcagcttccagagtagctgggactacaggcacacaccaccatgttaatttttaaattttatttttgtagagacaggatctcactattttg

SEQ ID NO: 525148 - DNA, 540 bp, Homo sapiens
gaggctggatagagttatttttggaatagaaatatatatgtgaagataaagggacaagagtgaaggtaaagaggggaggggttgatgaagtcagtgttgggaaagtgagatgarcatatttttatagattgtaaacccatcagggaaagcacatgtttagtatactgctgagcaccttgtcaggtaccttataattaataataattgcagccattattttaaaaaatcacggagaaaaatttgtgtaccttgaggaacagtgttgtgacactgcattacctacaatcagtaatttttcaaacacttgattcttatgtttattgcttttatttttcatggaggcaggaattaaataaaatatatgaccacttgttgcctctgacaccaggcaaatattatttgaccattttgtttgaaaggaaatgagatttttatggctagttttgtttactatgaaccaggttggttgtgcaaagtaatttccatctgaatagttcttagtggcccaagtggaattaatatatctctttgaagaccaac

SEQ ID NO: 525149 - DNA, 653 bp, Homo sapiens
cattttatataaagctaaaatattgaaaacatgggattctgtgatgttataataaaataaacatcaaatttactaaaaattaaaataatgttcaatcctttttcctggacttcagaaggaaaaaatgctttttcaggagttactgcagccatccatatcaagtgtgaaaagttaccttctagaatgattctgtccatggtacacaacagsaaacaccagggtaccaaccattaggagtatctcctacattttacataccaaaatatgcaggtcacatgacaaaaagagaaatgtatttgcaacatgacaaatggataatatcattgacttatttgtgtttatgtatataactaatacacaaagattactcacaaatcaataagaagaacttccttttaaaaaagagaatggtcatttcatcctcacaataataacaagtggttaaaaagttcatttttactagtaatgtaaaataaagtatgtttacaatttcttttcactatttgaaacatgaatgttcagtattagcagttatgggggaaatagacacctgcttttgtacactgctgataggagcacatgttttatatataatacgtatatataatccttaaaatattcatattttttaaattaataaattctctctaaga

SEQ ID NO: 525150 - DNA, 653 bp, Homo sapiens
cattttatataaagctaaaatattgaaaacatgggattctgtgatgttataataaaataaacatcaaatttactaaaaattaaaataatgttcaatcctttttcctggacttcagaaggaaaaaatgctttttcaggagttactgcagccatccatatcaagtgtgaaaagttaccttctagaatgattctgtccatggtacacaacaggaaacaccagggtaccaaccattaggagtatctcctacattttacatrccaaaatatgcaggtcacatgacaaaaagagaaatgtatttgcaacatgacaaatggataatatcattgacttatttgtgtttatgtatataactaatacacaaagattactcacaaatcaataagaagaacttccttttaaaaaagagaatggtcatttcatcctcacaataataacaagtggttaaaaagttcatttttactagtaatgtaaaataaagtatgtttacaatttcttttcactatttgaaacatgaatgttcagtattagcagttatgggggaaatagacacctgcttttgtacactgctgataggagcacatgttttatatataatacgtatatataatccttaaaatattcatattttttaaattaataaattctctctaaga

SEQ ID NO: 525151 - DNA, 524 bp, Homo sapiens
cttgaccccagagacttaatttaaactgttaactagtttctcgggactctataatcctccttcaaaacatttatttaaattgtaattatacatttattattttaaggtcttttgacaatggcatctacctttatattgctgcccattctaattattctttttttcccttctgtaatcttaataaaagtaaggaccttgtctctcttgtttatcacttacatccccagcgctttgcatggtgcatgacattgagtaggagatcaattaattgaataaatgaatgaagtacaaagacataaagagaagagacattccgtttaatccatgagggaaacagtgygccagttaaaaagcattggtataattagaaaataaaaggagcatataatcggcccttaaatgtgtgctggagaggaatttagaaatcagcccattattttcaaaggaggaaactgagccaagattgcttgtgacttattctgctgtcacacaacgaataggtaacagaataataggcagcccga

SEQ ID NO: 525152 - DNA, 518 bp, Homo sapiens
tacctgtagtcccagctactgcagaggctgaggtgggaggatctcttgagcccaggaggttgaggctgcaatgagttgtgattgcaccagtgtactctagcctagacaacagaggaataacctgtctctcaagataaagaaataaattaattaataataataataattctataagtgtaatgaaagaggaaagggaaatcagtaataaggaaggacgtgtatttcaggaccattttaggaatcaggtggcatattgaaggttgatgatggattgagatttagacgttcactagggaaatatataggttaaagcatatgattaaaatatctaaacttgtcaaagtgaggttttccaagcattcagagaaattgtttggctagtttaaatgactgtattatccttaaccaaaggattagctaaataaacattttgaatgggtgcttatcatttatcgagtatttactatgtctcaggcmctgttctaagtgctttatatgaattaatagcatttaattgt

SEQ ID NO: 525153 - DNA, 581 bp, Homo sapiens
ctaaagcaggtacacaactgaacaaatggcgtgcgtgcatacacgtgtgcatacatgcccaccctgagaacgtgagtgttcctcgaggaagaataagccatcggagccctaactgacagtcaccacaagtgcagtcagtggctgtgccgggcaggctcagaccacagggcggccacttctgtctctcaccctcaagaacagtagccctccctgctgagaggctttacgggcaagctgccatgccagcaggtcctagagatcttaacaaaggcacgggctccagggaaggagaggacagccagagcgccatgcgtgtgaacacgtccacagtgacgggtctcactctcacaccaacgcctctccggtggttgtgacaaaagcaagccagtttcaagggtggggcagtgaaggcagtgactctaccaaaacagaagggcagcccggcatagcccagatgtcaccttctcaagcctgatgactcccatctgcagaagctgcccggtggcccaacaggcagatgggtgctcaggctggcttgcaggygtcccgctctgccacagcagccagaatggttgccatcc

SEQ ID NO: 525154 - DNA, 527 bp, Homo sapiens
agcccttgccagaggagacacggtgggcaccagccccagcgctgccacctgcctgcctcctctgccaccgagggaagccatgtcgccttcctgagcctgcttctctgtccacaaaacaaagactagataattagagtgcacacttggagggacaggatggcttcgtatccatctggctgtgccctgtaactcaagggatgggactgtgtcattggtaaacactgcaacaggcctcctttccaggaaacaggatccctgtctcagacagaagcagtctcgcccatcctggggcctgagagcatcattcctttgtgagactcaaatgtgaggaattcctgtttcctcaagtctgtgtggggagtgcagagcagccctctgagggggtagcgtgtgcaggaaataagccggggggaagggggcaccgcgggtgggtgttaactgctgcttcggggtccagtcctgttaatgaaagcaggggtgaggcaagsggggaagactctctgtacctgatcagtggcatgtgtgtg

SEQ ID NO: 525155 - DNA, 471 bp, Homo sapiens
tgggtggcgtctctatgtgctctgcacagcgcgccatggggtgcgcaccatgatctgcttctctgagatgaggagagagacccccagagatgaacagccatgctcaaagtcacagccagaagtggcagagctggggtttaaacctggttcgtctccctcgcacaagaatcgaaatctgggctcacgtcagcagatcctccctgggcacgtggggcatagcctgcatctgggtgtctctggtgggctggttgactctggctagacccggaggcctgtaggcaggggtctccactcccacccacccccggatggagctggggcactacgaagaggcagtgcagcggaggacggggcacagcacacatggaggtcaacgggacctggagaaggagtggtgcatgctgcgagtgcacgcrgggcctggtagcccacggcctccccatggctggtgctccacgtggggccacccag

SEQ ID NO: 525156 - DNA, 432 bp, Homo sapiens
gacaggctgaaccagagcagcctcctcaggctccgcacaccttcccagatctgggaggcctgcctggggctgatgaagccatctatacaactgggygcagccccactgagcaatgtatttttaaatagtttctaaccaaacgaggtcaagaaatgtctccaatgatgccagtggtgttattccaactgtggctagtaaaatataataacatgcatgttgtttttgttacctatctagctgattaggtaataaaatatgctcagtattaaaaatttagctgaagccattatcatacccagaactcggggctcttggttttcctcagaagtcacccaaatctgtcacctttccagacttttaacctatttaaatttttctggagaagggaaattcctcttggtgtccaataaatgtgttcaatccctgtccagc

SEQ ID NO: 525157 - DNA, 611 bp, Homo sapiens
gaccctgggtgagttgctgtatatggctgtaaaatggggataattcaatctggcttgtggctaatgtgtgtaaagcgcctggtacctagtaggtgctcagtagatagaagtgattcttgatataggttaagagaaaacccactagaccatggcagggtgtgtgccccagaggtggcctgtgggagggctttgcgaggcttccacctcgcgccctgtgggatcacccagttattgtctttttcttggccatgcccccggcttctctttgagaagaccctgaccctgtttgcagactgggctcgaagtctccggcctggtcctggcattccccagtgaagttggccgggccagggcccacgggtcataggaatcccaggaaattccagatcgtgctgggctctgctggtctggattcgcctcacaaattctgagaacgtgcccagatcatttcacatgttgctgtaatttagctggattctggaaatgtgtattgagctgctagggtatgtgagggatygtggtaggtgttgcaaagggttcagaaaaaattgctctcccaacagatcaaagcagccagctccagcttctaacctcctttgggagcccccaca

SEQ ID NO: 525158 - DNA, 528 bp, Homo sapiens
aaaaccagagggcagacatataagctgcagaggattattcttaatggaatttgtgtggctcaggcaatttctaaattgtttgatatgtttctgcagtttcacaggcccacaygtggaaagaaattgtgcctaatgatagattatactgcaactcacccatacttaacttagatgatgagatttcaggattttaggtgacaaaatttcattgagattgttggagttttcatcgatgctataatgggttgacatgtggggaaacttggaatggggtaattatatttgggatggacatgaatctttgggggccagaggttgaacttgggtagacagaataatggcccccaaagatgtccatgtcctatttattggaacctatggatatgttactatgtagcaccaaagggattttgcagtggtgatgaaggttatagactttaaaatggggatattatgcaggctcattttggtggtcacaatctaatcatatgagtccttacatttagaggatgttactggctgcagtct

SEQ ID NO: 525159 - DNA, 528 bp, Homo sapiens
aaaaccagagggcagacatataagctgcagaggattattcttaatggaatttgtgtggctcaggcaatttctaaattgtttgatatgtttctgcagtttcacaggcccacacgtggaaagaaattgtgcctaatgatagattatactgcaactcacccatacttaacttagatgatgagatttcaggattttaggtgacaaaatttcattgagattgttggagttttcatcgatgctataatgggttgacatgtggggaawcttggaatggggtaattatatttgggatggacatgaatctttgggggccagaggttgaacttgggtagacagaataatggcccccaaagatgtccatgtcctatttattggaacctatggatatgttactatgtagcaccaaagggattttgcagtggtgatgaaggttatagactttaaaatggggatattatgcaggctcattttggtggtcacaatctaatcatatgagtccttacatttagaggatgttactggctgcagtct

SEQ ID NO: 525160 - DNA, 630 bp, Homo sapiens
tgattgttgttccatatcctctcagtatatatatcagaactgaggggtaaattagtcctttgggaagttttatcaactctttaaaatatatgcttcataattattgstttaagaaactgattgataataatgtggcttggacatttttataatgttttccaaaggcttaactacatcagctaataatatattcactgtattttatggctcattgcaggttctaaatgcatagtttatatcagatagctgatagaagataataattttttcaaaatacctgtaacatgataaatcaaacctcagtagaatgagcatataatttatcaaaaccggccactgtttggagtgaaaagaatgctattaatacctatcaaaagaaataaagaattttttgaggcaaaatgagacttatgattaccaaagatattagaaatttttgataataagattaccagatcaaactgggtgtgcaaatgtgtgtatttctcagggcagatatttggagagcgatactaagatcatgtggataaattttcttatcttaatgaagtttattgataatgataagaatatgagtgtagaatggaaaaatggtatattcagtgttgtagaataagtagctagttggcc

SEQ ID NO: 525161 - DNA, 353 bp, Homo sapiens
ttactgaaagatcctggaggaggggagggctagttgttgctcttatgcaaaggccctgaggcaggtgcagggtgtgaaggggaggggagacatgaggccaggagtcgaagtggagctggaggcagggccatgcctcatgtgcctggggccagctgtggagtgtttggaatttcatccttggcccacaggaaatcccsgtagggaccgggggtgggggtggggggtggtgggggttgtaagccaggaaggaagtgatccagcccttgtttcaaagatgatctctggctgtcatgtcattaggggatggcagttggaagggtgtcgtggtatctaagctggtagaggaaagagta

SEQ ID NO: 525162 - DNA, 464 bp, Homo sapiens
ctggcaggcctctcccctcccttccctggagcccctgcatcccctggaatgggggcttagcctagaacagcgcttccccaaatctgcacctctgaaccccaggtccatggaatggaaatggatgtgatgtatggaaagggggttccatagccaaacaagttaagctaagttcagagggaaggtggtgaatagaaatcccaaacatctgatcccagcacagctagcggtggggacttgccttgagtgcgctccaggtggtccctggggactcggtcctggcacccctgccctcctggattgcatcccacagccctgctggccgccccgccccagcctccctgctgtgacaggggcaggggctgcggtgaccctgcagcacaggcgcggctccctcggatcccttggatctcaccggtgcatctgrggttctgcgtggaaagtggctcgggcttccaatgccgctc

SEQ ID NO: 525163 - DNA, 551 bp, Homo sapiens
ggtctgtgtgtgcccaggcagggagccacaggcagtagggggaggctggggctgcaagcacagaggccccggaaagtgtgtgaggacgctggggagtgggaagggccctcggaggggtggtatggccggcttaggttttctcgacaactctagttgagtatgcactgcagggagacggagaggccgcagccactgaagccaactgtgctggagcaggcggagggcaccagsggtccctggagagaagtgccgcctcctgccaggcccctgacctataggtgagggtgtgagcagaagaggagaatctaggaggcctcccgggtattaggggaaagctgagcacctggaagatggcagagccaagaggtgtccatggccctggagatggggtcatgagtataaagagggcgcttggagtgtgaggcaccagggatgggaggtgagaggcccgaggccccagccggggcttccaggaaaggaggtgggagagggtcttggggccaagaaggcacagggcttcccgaagccaaggtgtcccaaaaataagggag

SEQ ID NO: 525164 - DNA, 551 bp, Homo sapiens
ggtctgtgtgtgcccaggcagggagccacaggcagtagggggaggctggggctgcaagcacagaggccccggaaagtgtgtgaggacgctggggagtgggaagggccctcggaggggtggtatggccggcttaggttttctcgacaactctagttgagtatgcactgcagggagacggagaggccgcagccactgaagccaactgtgctggagcaggcggagggcaccaggggtccctggagagaagtgcygcctcctgccaggcccctgacctataggtgagggtgtgagcagaagaggagaatctaggaggcctcccgggtattaggggaaagctgagcacctggaagatggcagagccaagaggtgtccatggccctggagatggggtcatgagtataaagagggcgcttggagtgtgaggcaccagggatgggaggtgagaggcccgaggccccagccggggcttccaggaaaggaggtgggagagggtcttggggccaagaaggcacagggcttcccgaagccaaggtgtcccaaaaataagggag

SEQ ID NO: 525165 - DNA, 562 bp, Homo sapiens
ttctattttcaaggccatctgctgagaataggaaggggtggatggtggggagggggctggaggagagggcttcatttgctgactacactgagatcctctctgacctgagcccctgccacccagccaggcctgcggagcctgccatctgcgcaactgggatgggacaggtggccgcggccaggaaggcaccacaggtgcaggcaggagggcaggcagcttcctcagggaggggctggcaccagacatgctggatcccscctaatcagccacccaccagtggtgggactgggctgagcaccagtcacttatctgtgacatgggtcaggtggattttgggtgtcagagggaaggtgtttcatgtggcaagactggcaaggccagcatgcggagtggctaggaccgggtgagagcctgggggtgtcccaacacttgccccacctcatgcaggttctgtccttccactgcctggccagaccagaccaaagctcacctggcctttaagactggcacctgcaccaggagccactactactccctcctacggtggcaggctgggctctgc

SEQ ID NO: 525166 - DNA, 562 bp, Homo sapiens
ttctattttcaaggccatctgctgagaataggaaggggtggatggtggggagggggctggaggagagggcttcatttgctgactacactgagatcctctctgacctgagcccctgccacccagccaggcctgcggagcctgccatctgcgcaactgggatgggacaggtggccgcggccaggaaggcaccacaggtgcaggcaggagggcaggcagcttcctcagggaggggctggcaccagacatgctggatcccgcctaatcagccacccaccagtggtgggactgggctgagcaccagtcacttatctgtgacatgggtcaggtggattttgggtgtcagagggaaggtgtttcatgtggcaagactggcaaggccagcatgcggagtggctaggacygggtgagagcctgggggtgtcccaacacttgccccacctcatgcaggttctgtccttccactgcctggccagaccagaccaaagctcacctggcctttaagactggcacctgcaccaggagccactactactccctcctacggtggcaggctgggctctgc

SEQ ID NO: 525167 - DNA, 190 bp, Homo sapiens
acccccaggacactgtcagcagagcccactgagggtccagtgctgtccaggtggcggcatcaggattcccaggagccasccctcactatgccaccctatgtccgtatgtccagcagggatctgagggcctggaggggtgcggaggccctgccaggagatgctttcctcagtgcccattgtgaagggagca

SEQ ID NO: 525168 - DNA, 639 bp, Homo sapiens
tccattgtggcctgacagtgctcctctctttccttcagttcctccttggctgtctgctcattttgcagagttatctggaacctcgtcactattccatctgtccattcccatccattccttaaggtttagctcaagtaccacctctgggccaggcctgtaggccatgttaagtgaacctggtgggggccacaggatgttttcccaacagggttttcacattacattgctacttacrtgtgatatggttagtcactaattgacccagactcccaaacggctccttccaccatcaggatcaaggccccaatcttgggctctgtccaccagcctaggccaggcaaggtgactttctaggactcacatttggctctttccaatgcacatttgagcatttgccagacagttccttaaaaacggaattaccctatactgtctaccatgctactgtctactattgcttaagatcctcctcttctaagattatgcaaattatttctgccaaccttccaatctgttagcacaaccctgtactttccatttttgggtagattctcccttccactctggaaaataaagtgtgtatcctgagcctcaagggaagaggagcttgctttgctggatggttcatatttccttcgg

SEQ ID NO: 525169 - DNA, 650 bp, Homo sapiens
tgtggacaagagggtagtaggcacrgggtttgaggcgtgaggagcaccaggaatgaggaattggttttgaggatacttcgtgcccaacccccaccattcttacagagagttggggttctgaacaactccgcagggcctctgatggtcctctcgggcggctgcaccataggctgtgtagtgggggaaggtcagaagccccattataaagcagccactcctcagggcccctttgcctctttgcaatgcactgttctggggcttctggacttccccagcttttgcgctcatgaccctgcctgccctgctcattgctaaaagaaggactttttaacctggtgcccatgggtatgacaggtgggtcactaaaggagcatgaagagttgtatatgtgcaaacccacatcgcctgcattttctggagaatggaggagatttttcatcaagttcccaatcctccccccacccacctgaggagtttggaaggctcagcctgcatgtgcccctggtcatccctgcctccctcccttccccggcaaagcctgggctgcactcacacattcccagcagtgggctctggtttgcagttgttcctggaatttctccggggagatctgagtctccttgtcccagaacagtaaccggcgacgacgg

SEQ ID NO: 525170 - DNA, 650 bp, Homo sapiens
tgtggacaagagggtagtaggcacggggtttgaggcgtgaggagcaccaggaatgaggaattggttttgaggatacttcgtgcccaacccccaccattcttacagagagttggggttctgaacaactccgcagggcctctgatggtcctctcgggcggctgcaccatrggctgtgtagtgggggaaggtcagaagccccattataaagcagccactcctcagggcccctttgcctctttgcaatgcactgttctggggcttctggacttccccagcttttgcgctcatgaccctgcctgccctgctcattgctaaaagaaggactttttaacctggtgcccatgggtatgacaggtgggtcactaaaggagcatgaagagttgtatatgtgcaaacccacatcgcctgcattttctggagaatggaggagatttttcatcaagttcccaatcctccccccacccacctgaggagtttggaaggctcagcctgcatgtgcccctggtcatccctgcctccctcccttccccggcaaagcctgggctgcactcacacattcccagcagtgggctctggtttgcagttgttcctggaatttctccggggagatctgagtctccttgtcccagaacagtaaccggcgacgacgg

SEQ ID NO: 525171 - DNA, 527 bp, Homo sapiens
agacaaggttgtatgtaaccccacaagagtcaaggcaaagggtaaaacaaggccctagcaaagtactgagttcccaaactgcatttggttccggctaagactgggataaatatttcatagagaagggcagcatttgagccaggtctgtaagaatatgtagaacccgacttgtagaggatgaggggtgaccattatgggctagggaaacagtacaagcaaagatgtgaatgtggcatcattgaggcataagggccaaactagtgtttaggagccacagatgcccagaggactgagagagaagtctggggatgactagttctaaactggggtatgtgccrggcacggtggttcacacctgtaatcccagcactttgggaggccgaggcgggtggagtgcctgagatcaggagttcaagaccagtctgaccaacatgatgaaactccatctctactaaagatacaaaaattagccgggcatggtggcaggcatctgtaatcccagctattcgggaggccgaggcaggaga

SEQ ID NO: 525172 - DNA, 592 bp, Homo sapiens
tgcttacttgtagtaaaaattcaaacaataaagatgaatatgacataaagagcattccccctccttaatgctgtccttctccagttctcttctccctgaagttggccattgttaaatgcatttcgtatatccattcagacattttcattgtcatttatgtcatgcaggtgtgtgcaaattcatacttttacatttgtggagttgtaatttatattattctacatcttggtttttttcacttaaaatacttgaatatatatatctttgcacacatatgtgtatttttctgtttggaattcctagtcaaagtgtatgtatatttcaaatcttagaagattatmatatatatttgcattttttaataatgcagtctaaccttttcatttacttaagaaaatacttacatattgtttttgaaaaatatgtcatgagctagaaagagaaagttaatgatataaagtgtattaaaagattgccttcatgcagaagattggtgaatattaatttgcataagtcaatatggcatccgtgaaaatatgatgctcacatctgcttcaagaaaatctgctgagggggcatacttgactggtgg

SEQ ID NO: 525173 - DNA, 604 bp, Homo sapiens
ggtgtttaaatctgccactgtggtgtagatttgtctatattttcctgtaatagtgtcaatttttactttatatattttggggccatgttattagatgcatacaaatgaaggattgttaaacattgtttatgagtcaaaactttcagtaacgaactgagctactttattttagtaaacacttttaccttagagtctatctttattattaatgcattgacaacaattttccttcattaaatatttgttcccttacacataacctttctgtattcttatattttagatgtgtcttttataaacaacatgtgwttagatgaaaacaaatacagttggattttttttgttttttaattggacctatttaaaatttacatctactttttattgttatttttattttcttacccattgtatgcttaattttttgccaattatttgggtgtattgtgttttatcatttctgttgtaaaagttatatataattgatccttgaacaatgtgagggttgggggtgccaatccctgcacagttgaaaattcatgtgtagctttcaactttccaaaaacttaactacaaatagcttattgttgactggaagcattac

SEQ ID NO: 525174 - DNA, 641 bp, Homo sapiens
taggtgtgtatttctttttatttatcacatattgaaatcctttgagtttgtagttgacatctttcattagctatggaaaatttttagtaatctctatccattctctatttcattttctgggactttaatcacatgtattaattacctttttttctcttgtgcttggtattggattctggacaatttcttctaacctrtattataggtgaggtccacgaattctctctttagttgtgtataatatattgttaaacttgttttttatatggttcttcttagtatttctatttttccctaaatctgttatgttatggtgttttgtttctttgtatacctgtctgtctttgaatgtttgcttaccattgtatttaaaacatgattttaaggaaacatttgagacttagaatggcattatggcattttcttcctccaaaggacatttttgttagaaactggggtctttactattcagagacagctttaatctaaagttgaggcgtgagtttctctgactaccctcgtgatagaacccagactaaaagtctgcatgaaagttgattccttccacccacttttaatctgagggtgtacccctgtggtattccagtttatatataattgggatgtattatcaggctcca

SEQ ID NO: 525175 - DNA, 641 bp, Homo sapiens
taggtgtgtatttctttttatttatcacatattgaaatcctttgagtttgtagttgacatctttcattagctatggaaaatttttagtaatctctatccattctctatttcattttctgggactttaatcacatgtattaattacctttttttctcttgtgcttggtattggattctggacaatttcttctaacctgtattataggtgaggtccacgaattctctctttagttgtgtataatataytgttaaacttgttttttatatggttcttcttagtatttctatttttccctaaatctgttatgttatggtgttttgtttctttgtatacctgtctgtctttgaatgtttgcttaccattgtatttaaaacatgattttaaggaaacatttgagacttagaatggcattatggcattttcttcctccaaaggacatttttgttagaaactggggtctttactattcagagacagctttaatctaaagttgaggcgtgagtttctctgactaccctcgtgatagaacccagactaaaagtctgcatgaaagttgattccttccacccacttttaatctgagggtgtacccctgtggtattccagtttatatataattgggatgtattatcaggctcca

SEQ ID NO: 525176 - DNA, 641 bp, Homo sapiens
taggtgtgtatttctttttatttatcacatattgaaatcctttgagtttgtagttgacatctttcattagctatggaaaatttttagtaatctctatccattctctatttcattttctgggactttaatcacatgtattaattacctttttttctcttgtgcttggtattggattctggacaatttcttctaacctgtattataggtgaggtccacgaattctctctttagttgtgtataatatattgttaaacttgttttttatatggttcttcttagtatttctatttttccytaaatctgttatgttatggtgttttgtttctttgtatacctgtctgtctttgaatgtttgcttaccattgtatttaaaacatgattttaaggaaacatttgagacttagaatggcattatggcattttcttcctccaaaggacatttttgttagaaactggggtctttactattcagagacagctttaatctaaagttgaggcgtgagtttctctgactaccctcgtgatagaacccagactaaaagtctgcatgaaagttgattccttccacccacttttaatctgagggtgtacccctgtggtattccagtttatatataattgggatgtattatcaggctcca

SEQ ID NO: 525177 - DNA, 641 bp, Homo sapiens
taggtgtgtatttctttttatttatcacatattgaaatcctttgagtttgtagttgacatctttcattagctatggaaaatttttagtaatctctatccattctctatttcattttctgggactttaatcacatgtattaattacctttttttctcttgtgcttggtattggattctggacaatttcttctaacctgtattataggtgaggtccacgaattctctctttagttgtgtataatatattgttaaacttgttttttatatggttcttcttagtatttctatttttccctaaatctgttatgttatggtgttttgtttctttgtatacctgtctgtctttgaatgtttgcttaccattgtatttaaaacatgattttaaggaaacatttgagacttagaatggcattatggcattttcttcctccaaaggacatttttgttagaaactggggtctttactattcagagacagctttaatctaaagttgaggcgtgagtttctctgactaccctcgtgatagaacccagactaaaagtctgcatgaaagttgwttccttccacccacttttaatctgagggtgtacccctgtggtattccagtttatatataattgggatgtattatcaggctcca

SEQ ID NO: 525178 - DNA, 565 bp, Homo sapiens
taccaggctggagtacagtggtaaaatcatggcttactgcagcctggacctcccgggctcaagtgattctcccacctcagcctcttgagtatctgggactacaagtgtgcactactatacacagctagtttattttttatttttttagaaatggggtctcactatgttgcccagactggtctcaaaactcctaggcttaagtgatcctcctgcctcagcctcccaaactgttgggattgcaggtgtaagccactggatctggyctagatgtttctttattgctgtttgcatcattattgtgcttaaggacatggaacatagcattttctttgtactttgcactctagtttagtagagctttccaactcttaatataataacaccagtctgggtgttattatagtaagtggtaacacttgcgtggtttcctgaactaaaaggttgagattgctcatgattagaggtgactgtccaggggctcccactaatgcagccccagggttaaggggattcatggctcagcatatctgtcacacattcacacacaccagtgccacctacacca

SEQ ID NO: 525179 - DNA, 565 bp, Homo sapiens
taccaggctggagtacagtggtaaaatcatggcttactgcagcctggacctcccgggctcaagtgattctcccacctcagcctcttgagtatctgggactacaagtgtgcactactatacacagctagtttattttttatttttttagaaatggggtctcactatgttgcccagactggtctcaaaactcctaggcttaagtgatcctcctgcctcagcctcccaaactgttgggattgcaggtgtaagccactggatctggtctagatrtttctttattgctgtttgcatcattattgtgcttaaggacatggaacatagcattttctttgtactttgcactctagtttagtagagctttccaactcttaatataataacaccagtctgggtgttattatagtaagtggtaacacttgcgtggtttcctgaactaaaaggttgagattgctcatgattagaggtgactgtccaggggctcccactaatgcagccccagggttaaggggattcatggctcagcatatctgtcacacattcacacacaccagtgccacctacacca

SEQ ID NO: 525180 - DNA, 540 bp, Homo sapiens
ggtacaggctgaaaaatgctaatgctctgtacrtcctctgaagataggcctctgactaggatctcaggggagagggagatctctgctcttggttgtatcagtctggagtggagtttctgttttctgaggttgtaggggagtgggaaggagcagtcttgcttcaaatactatagactctcttagttcttaacaaattttaatagatttttttttgagtagatgtgtcttcatttgctatatgctcttagggccatttctagagactttaactttttaaaaattagttttcaccagtttttctgggatgcaggactgtgttgctctgtgtgatgtcatgccagaagttgatctccttttgtttattcttaaagctaattttatacaaataaaaaaagcctgttacaaatttaattagaattaaattgtatataaatttggggagaagttgcttttttgatgtttttgtacctaaaaacaacatttgtctttccaactgtacagatccttatttatgtccttcagtgacacttgataacatta

SEQ ID NO: 525181 - DNA, 666 bp, Homo sapiens
gagactgggagatacatcttaacctgtgattttgggaggggtggattcatgtgtcctttgctttgctttgttagtttttatttcctttgagtccattagcttcagcaaatttctggcattaaaagtatctacaccattttaactctaagccctcatttaaacaagatcaaatgtttaacaccctcagtagagatcctggtacacagtaagtccttgttatatgtatgtgtgtatctctatgtagctatttatccgtccattcatctatattttgaagcagagtcacattctcctctgtcccatgggactgctcattctcagtaaagaactgcatccaagctccataaagtacacagtggtaagcggactgacttatgggatattatatatatgagttgattcccagtcaacccccttgtactaatcttctattgctgcataacaaattaccacaaacttyaacagtttcaaatataaccaatttattatcccatagttcctgcagatcagaagtctaggcatgatttaactgggttctctgctcagggtctcacaaggctgaaatcaagatgtcagccaggctgtgttcttatctggagacatgatttgggaataaagtgcttccaagctcattcagtttgtttgcactatttgtttcctcacagc

SEQ ID NO: 525182 - DNA, 663 bp, Homo sapiens
tgcctcttgaatccaatcaattccccttgctctaattctgtgctgaatgaggaagtggattatgatttagcttcttatatatatctgcctataaaaataagtggaaacaaacaaaaatggactaatttgaaaaactgggaatttaatctgttgagaagttgtaaatctcattttaaaggaagtaaatgacatttgacttctttgggcttggttaggacgagttgacttccctaggtcttatcatctcttatcatcakctaggcatcatatcatgtcagatatcctgacagaactggtctggtctacacagctaactcagacctggagcaagatctctcctcgacctgtctgtgtggctcacttgtgtggccccaccttgtattcttcatgggactttctacctgaaaaatttacattgtgtttttatcaaagagcttaccaggaaaacctaaggcttatttgaattctgcctaatattatatagtagaatttttgatgatctcttctatagcagttgtcgagaatgaactcttgtaagttagaatgaaatatgaaaagaagttaaagggatgatgaagcatgagaataattagacatgtgaagggcagaaggtacagctacaacattagctatgaagcagcgagcgaaaggtagctaaagaaa

SEQ ID NO: 525183 - DNA, 663 bp, Homo sapiens
tgcctcttgaatccaatcaattccccttgctctaattctgtgctgaatgaggaagtggattatgatttagcttcttatatatatctgcctataaaaataagtggaaacaaacaaaaatggactaatttgaaaaactgggaatttaatctgttgagaagttgtaaatctcattttaaaggaagtaaatgacatttgacttctttgggcttggttaggacgagttgacttccctaggtcttatcatctcttatcatcatctaggcatcatatcatgtcagwtatcctgacagaactggtctggtctacacagctaactcagacctggagcaagatctctcctcgacctgtctgtgtggctcacttgtgtggccccaccttgtattcttcatgggactttctacctgaaaaatttacattgtgtttttatcaaagagcttaccaggaaaacctaaggcttatttgaattctgcctaatattatatagtagaatttttgatgatctcttctatagcagttgtcgagaatgaactcttgtaagttagaatgaaatatgaaaagaagttaaagggatgatgaagcatgagaataattagacatgtgaagggcagaaggtacagctacaacattagctatgaagcagcgagcgaaaggtagctaaagaaa

SEQ ID NO: 525184 - DNA, 655 bp, Homo sapiens
aatcaattccccttgctctaattctgtgctgaatgaggaagtggattatgatttagcttcttatatatatctgcctataaaaataagtggaaacaaacaaaaatggactaatttgaaaaactgggaatttaatctgttgagaagttgtaaatctcattttaaaggaagtaaatgacatttgacttctttgggcttggttaggacgagttgacttccctaggtcttatcatctcttatcatcatctaggcatcatatcatgtcagatatcctgacagaactggtctggtctacacagctaactcagacctggagcaagatctctcctcgacctgtctgtgtggctcacttgtgtggccccaccttgtattcttcatgggactttctacctgaaaaatttacattgtgtttttatcaaagagcttaccaggaaaacctaaggcttatttgaattctgcctaatattatatagtagaatttttgatgatctcttctatagcagttgtcgagaatgaactcttgtaagttagaatgaaatatgaaaagaagttaaagggatgatgaagcatgagaataattagacatgtgaagggcagaaggtacagctacaacattagctatgaagcagcgagcraaaggtagctaaagaaaataaca

SEQ ID NO: 525185 - DNA, 642 bp, Homo sapiens
ttaaaatagagtagcctggtttatccaggtgggcccactgtaatcacaaggatccttaaaaatgaaagaggaaggcagacaaaattggtgccctggcacagggagatgtgactatgaaagaagggcacagaaaaatgcaacattgatggtcttraaaatggaggaaatgggccacaagcgaagggatgtggacagcctctaggagctagaaaagcaatgaaatggattcttagagcctccaaaaaataatgcagacatggggaccttgattttggccaaatgagacccatgtcaaacatatgacctacagaaatagcataaacttgtactgttttaagacactaaatttgtgctaatttgtttcaacagcaatagaaaagtaatagagtactctttgactacaatgctgatccagtcgaactcaagaaatcattggcaggagtaaaataaggtagaagagatctgacttatccttggggtcctagttgacccaaattcagtacgttcaaaataattactaaagtaaacatagaccacattactagcccagtgtaacactcctactaaattctgcacttacggattgctgtgtccagttctgagcaccatactgaagaggaacacttacaaactgaagtgctc

SEQ ID NO: 525186 - DNA, 654 bp, Homo sapiens
tggctctgtgtgaattactctttttctattacagttcccctgtcctgatgaatcggctctgtctaggcagcaggcaaggtgaatcccttaggcagttacacttataccccacccccccaaaaaagccataaattttgaaatgaaatttatattataaagagctagaaccgtcagactctgaaacatcaaaaattctctcaaaatttctaccaaggattgtgtctgacatcatcttttcctaaaacaagcaacaattagcaatagyacttcaaccactcacttaatttcccccaatcattctcagtattctcaaaagaaagtttccaaaactacccaaatcccataatgctcgctcgctctctttctttttctctctcctctctctctcagacacacaagcacatgtgaatacacacacacacacacacacacacacacacacacagagcaacaaaaagatgtagaggtaaaactgaatataccattcattcttccaaggtaatgttattttgcttgtggggttcctaattcctcctactagtgttttcagaaaaattcttgccaattaataatttaatgcttgattccaaaaatctgaatcttgccagttcctctactttgtctctagcttccaaaaattaaaaaaaaaaaagt

SEQ ID NO: 525187 - DNA, 542 bp, Homo sapiens
gtctatgaaggaaaataggctggattaagtagaacaaaagggaagacttagtaagcaggatactaatggtgatgtagtcactgaagagaaaatatgaatcataaaaatgcagttgatggccatccattcctgtttaaaatataataaaaatgtacaaatagatattgaaatcagtagtcaacttttgataataacaaagaaaaagaaaaatctattcactttaattctaggtgaaaagaaagatctgatcttttacaaaataaataatatttgataatgctwatgttcacaaacttagctcctgaacaattaataatttttaaaaagcaaggagatggagttgacatccacttaattctatgagcacacacacttctaaccacttcatattcttaaatcatgctttcagtcactgatgtagaagtgcgtgaattattgagccctgcgttaagactccaggaggcaaactgacgacactgatctatgttttggaggctttttgttgttttgttgacttagtggagcaagaaagaaattcccag

SEQ ID NO: 525188 - DNA, 562 bp, Homo sapiens
gggaattcatccctgtccccattccacatgtctatgaaggaaaataggctggattaagtagaacaaaagggaagacttagtaagcaggatactaatggtgatgtagtcactgaagagaaaatatgaatcataaaaatgcagttgatggccatccattcctgtttaaaatataataaaaatgtacaaatagatattgaaatcagtagtcaacttttgataataacaaagaaaaagaaaaatctattcactttaattctaggtgaaaagaaagatctgatcttttacaaaataaataatatttgataatgctaatgttcacaaacttagctcctgaacaattaataatttttaaaaagcaaggagatggagttgacatccacttaattctatgagcacacacacttctaaccacttcatattcttaamtcatgctttcagtcactgatgtagaagtgcgtgaattattgagccctgcgttaagactccaggaggcaaactgacgacactgatctatgttttggaggctttttgttgttttgttgacttagtggagcaagaaaga

SEQ ID NO: 525189 - DNA, 616 bp, Homo sapiens
caactttttggaaaaggctcctctcagaaggataaattgctcttcatcctgtacttccccaaaattttttttgtactaaaactctactgtaacactcagtttatcctactttattttagagttgttatgcgtctctctttttggcaactctacagaggcaagggcccttttaatcccacgcagcacttagaatccaataagtgttagctgagtttttgtcatggaaggaaacctaataaaggccagtccctgagccagccctggctttgggaccagcctgccagatgctcatttctccagacctcctctgcacctgggacctcagcaggtgtctgctctgctctgatgcagcgttttaccagagctctaaggccaatcagtccaacaatgattgaaatctctaccatatctgcttaatattgaaaatacatcctgtatgatgattgacccttagcagtaggcttctcatgctgatgcaggcatcttttaatctgacttacatctcatcgtttttcctcccttctcactaycccctgaggaaacccacccaccacccgagctccaaagtaagcaagcccatctacaacctgcacgtatcctcagaatgtttcatcca

SEQ ID NO: 525190 - DNA, 633 bp, Homo sapiens
aggacatggaagggattcctatcacttagcttcactgttctctataggtaagtgccagccactggtggagaaatgggaggttggcaccccaactagaatggctattatcaaaaagacaaaaaaaaaatgctggtatgaatgtggagaaaggaaaccctgatacactcttggtagaaaagtaaattagtacagctgttatggaaaacagtatggaagttcctcaaaaacttaaaaatagaactaccattccagcaattccactactgggtattcatccaaaggaaatgaaatcactatgtcaaagagacatctgcactcccacgtttattgtgtcactattcacaatagccaagatacggaatcaacctaagtgtccatcaatggatgaataatgaatgtggtacacayacgcaatggaatattattcagccactaaaaaatgaaatcttgtcatttgcagcaacatagataaacctggagggcattgttaagtgaagtaagccaaactcataaagacaaatacaacatgatcgcactcatttgtggaatctaagaaagctggtctcatagaagtacagcatagaatggtgattaccaaaggctgaggacagagagagggagggagagatggag

SEQ ID NO: 525191 - DNA, 398 bp, Homo sapiens
tgccatcataggctctcttttgaccgttatcctgggagttcttttatctttctcttgggctggaaccccacattttctcttttctgggttcgctattattttgrtagagtgtatcttacacgagctttgtgaataagttttacagaaggtaattgtttgaggcctaaaaatgtctagattctgtccttctgcttgattgatagttgagctaggtacgagattctaaaatcttgtttaggaacctgaaatcactccattctttgcctacagttgtgaaataaataccatcggaggaaagtgatcatttcacaacccttcccattctttcatcttccttcccctcacctaatttttcactgttgttgcactgaagatgtgaacaacgatgtttggcactg

SEQ ID NO: 525192 - DNA, 585 bp, Homo sapiens
aagcccagatttaccagtgtcaagaaagattttcagtatttccttgtgcctggcatagcacaaaagcattgcacatagtaagtatatacattactttttttctttttttttttgagatggagttttgccctgttgcccaggctggagtgcaatggcgcaatctcggctcactgcaacctccgcctcccaggttcaagtgattcttctgcctcagcctctggagtagctgggattacaggcacgtgccaccacgcccaattaatcttgcatttttagtagagatggggtttcaccatgttggccaggttggtctcaaactcctgacctcaggtgatccacccacctcggcctcccaaagtgctgggattacaggcgtaagccaccgggcccagcctacacattacttttatgtctgtaatgtgayccagtggaaaatctgaaacgtgaccaacggtccttctaattcatagaactatggttgtaacaaatcacagatgagtcaatcctgcctcaagtgtttggtatgaaaaattcatgaagtggcttatggactccctagagaatgttaaaagttgctcatgaagc

SEQ ID NO: 525193 - DNA, 550 bp, Homo sapiens
gctctgggactgaagctacactctagctgggcagctctcagccaatccctgagtatagtgggagcccggccagctcagctcaccatgagactctgcaaatgggtgatctyggagcagtggatggttggacgagcctttgtgacacctacagcccaggccgaggcccttcctgcccagtgccacttcctttccccatcctttcccagggctcacatgagcatggtggtctgaagccatttccttttcattcccctttatctttcacaggcatccctgtcccctgataaatcactgcactcctaactccctctcagcttctgctttctgaagaacttggatgacacatcagagaaaagtgatcaaaactgaaaagagagactgaggcccagtggcgaatggcgatgtttatcctggcagtgggagaagtgaggaagctgccaacttcctcaaggtagcagaaggggctctagactagaacccagaatcgtggggttgatctgagcttagccacaatacacacactgtatgaccccacctaacctttccaggc

SEQ ID NO: 525194 - DNA, 550 bp, Homo sapiens
gctctgggactgaagctacactctagctgggcagctctcagccaatccctgagtatagtgggagcccggccagctcagctcaccatgagactctgcaaatgggtgatcttggagcagtggatggttggacgagcctttgtgacacctacagcccaggccgaggcccttcctgcccagtgccacttcctttccccatcctttcccagggctcacatgagcatggtggtctgaagccatttccttttcattcccctttatctttcrcaggcatccctgtcccctgataaatcactgcactcctaactccctctcagcttctgctttctgaagaacttggatgacacatcagagaaaagtgatcaaaactgaaaagagagactgaggcccagtggcgaatggcgatgtttatcctggcagtgggagaagtgaggaagctgccaacttcctcaaggtagcagaaggggctctagactagaacccagaatcgtggggttgatctgagcttagccacaatacacacactgtatgaccccacctaacctttccaggc

SEQ ID NO: 525195 - DNA, 522 bp, Homo sapiens
cctgaatgttatccaatcccttaaagtatgcagcaaaaaattttagtgttcaaaattgtacttttatgtcaaatagaatgacttagaactatattcttcatatattgtggtgtctggttaaaaaaatgtagaaagtatgaatagtatggcacgtgtgtgtgtgtgtgtgtgtgtgtgtgtgtgtgtgtgtatttttaaggtatatctgtgatcatgtttgtttatgcaggggttatctctagaaagatccccaagtcgttggcagcagtggttgcctgtgagaaggtgggctgagttgtgagttgactcagcttccagtctaccctcattttaaggtgccatcctggccgtagaggttagaaagatgaagactactttccctgactcctttgcagctagaatcttgaaagtgaatgtagttcccttggttgaatatgctcatgygcaatttgggaaacagaagagaggcacagggcctcttcctgctgcagcatttgctgctaggcaaggccacggggcatg

SEQ ID NO: 525196 - DNA, 468 bp, Homo sapiens
actgtgccagcgcctacatggtggttgctgagaggcagtggtggtgatggtggctggattggtttcttgacctctgggtcatagccatggtggttgctcttgaactgcccaactccaggggtagccttttgacagtccctcttccagccctcgcctagattttgtaaacatcacattccttataaacatcaaatccctttctgctggaagtacctacaatgaaactgtcactcatgmagcattagaactgggtgggatgaaatggaagagaaacttaatttttactcaatacctttaaaaatgattttttattgtgataaaataacaaaattggtacatttatgtaccaatgttacataaaataacaaaattggtacatgtattcaatagtatacatgacagtaaaaaagaatgaattactactacatgcaacaacatggatgggtttcacaaacataatgtgtagtg

SEQ ID NO: 525197 - DNA, 468 bp, Homo sapiens
actgtgccagcgcctacatggtggttgctgagaggcagtggtggtgatggtggctggattggtttcttgacctctgggtcatagccatggtggttgctcttgaactgcccaactccaggggtagccttttgacagtccctcttccagccctcgcctagattttgtaaacatcacattccttataaacatcaaatccctttctgctggaagtacctacaatgaaactgtcactcatgaagcattagaactgggtgggatgaaatggaagagaaacttaatttttactcaatacctttaaaaatgattttttattgtgataaaataacaaaattggtacatttatgtaccawtgttacataaaataacaaaattggtacatgtattcaatagtatacatgacagtaaaaaagaatgaattactactacatgcaacaacatggatgggtttcacaaacataatgtgtagtg

SEQ ID NO: 525198 - DNA, 636 bp, Homo sapiens
actgtgccagcgcctacatggtggttgctgagaggcagtggtggtgatggtggctggattggtttcttgacctctgggtcatagccatggtggttgctcttgaactgcccaactccaggggtagccttttgacagtccctcttccagccctcgcctagattttgtaaacatcacattccttataaacatcaaatccctttctgctggaagtacctacaatgaaactgtcactcatgaagcattagaactgggtgggatgaaatggaagagaaacttaatttttactcaatacctttaaaaatgattttttattgtgataaaataacaaaattggtacatttatgtaccaatgttacataaaataacaaaattggtacatgtattcaatagtatacatgacagtaaaaaagaatgaattactactacatgcaacaacatggatgggtttcacaaacataatgtgtagtgaaagcaggaaatccagaggcaaagtatccatatggcacgactccatttatataaagacaaaacaggcaaactrgatggggatttgcaccaatctgaccaactgtgggacatgacaagattgtgcttttcaataaaatgcaaagtttgtgcacttatataaaatggagg

SEQ ID NO: 525199 - DNA, 578 bp, Homo sapiens
taaaattttagagcaataccatgaaataatttaatacaagaataatatcaattaggcctgtgcagtggctcacgcctgtaatcccagcattttgggaggccgaggtgggcggatcacttgaggtcaggagttcgagaccagcctggccaacatggtgaaaccccgtctctactaaaaacacaaaaaytagccaggcgtggtggcaggcgcctgtagtcccagctactcaggaggctgaggcaggagaatcgcttgaacccaggaggtggaggttgcagtgagccgagatcacgccactgcactccagcctgggtgacagagccaagactctgtctcaaaaaaaaaaaaaaaaagaagaaaaaaagaataatatcaattaaattagaataaaaagaactattacaaattatattttcattatcttgattgtggtgatggtttcatcagtgtatgtacgtgtgtgaaagagtatcaaattgtgtacagtttaaagctgctttaaaaaatgtgactcaaattgcaaaaaaatctattcctatgtaccttcttaggtattaaagccacaagagctacacaat

SEQ ID NO: 525200 - DNA, 578 bp, Homo sapiens
taaaattttagagcaataccatgaaataatttaatacaagaataatatcaattaggcctgtgcagtggctcacgcctgtaatcccagcattttgggaggccgaggtgggcggatcacttgaggtcaggagttcgagaccagcctggccaacatggtgaaaccccgtctctactaaaaacacaaaaattagccaggcgtggtggcaggcgcctgtagtcscagctactcaggaggctgaggcaggagaatcgcttgaacccaggaggtggaggttgcagtgagccgagatcacgccactgcactccagcctgggtgacagagccaagactctgtctcaaaaaaaaaaaaaaaaagaagaaaaaaagaataatatcaattaaattagaataaaaagaactattacaaattatattttcattatcttgattgtggtgatggtttcatcagtgtatgtacgtgtgtgaaagagtatcaaattgtgtacagtttaaagctgctttaaaaaatgtgactcaaattgcaaaaaaatctattcctatgtaccttcttaggtattaaagccacaagagctacacaat

SEQ ID NO: 525201 - DNA, 578 bp, Homo sapiens
taaaattttagagcaataccatgaaataatttaatacaagaataatatcaattaggcctgtgcagtggctcacgcctgtaatcccagcattttgggaggccgaggtgggcggatcacttgaggtcaggagttcgagaccagcctggccaacatggtgaaaccccgtctctactaaaaacacaaaaattagccaggcgtggtggcaggcgcctgtagtcccagctactcaggaggctgaggcaggagaatcgcttgaacccaggaggtggaggttgcagtgagccgagatcacgccactgcactccagcctgggtgacagagccaagactctgtctcaawaaaaaaaaaaaaaagaagaaaaaaagaataatatcaattaaattagaataaaaagaactattacaaattatattttcattatcttgattgtggtgatggtttcatcagtgtatgtacgtgtgtgaaagagtatcaaattgtgtacagtttaaagctgctttaaaaaatgtgactcaaattgcaaaaaaatctattcctatgtaccttcttaggtattaaagccacaagagctacacaat

SEQ ID NO: 525202 - DNA, 501 bp, Homo sapiens
atcccattcatagtcatctttttgagacagctcttgctctgtcacccagtctggaatgcagtagtgtgatcatggctcgctgcagcctcaacytcccaggctcaggtgatcctcccacctcaacctcccaagtagctgggaccacaggtgtgtgccactaaacccaggctaatttttttttttttaagggatggggttctgccatattgcccaggctagtctcaaactcctgcgctcaagtgatccccctgcctcagcctcccaaagtgctaggattacaggtgtgacccaccacaccaggtcttagttctttttcttgatacaagtcagcagagactccaatttctccacttcaataaattaatggattctttaaaaagagaaaaagattaattaaagccacatgagccacagccccaacaatctacagttataccccgaattcaacacctggcagcagtcataactaggggtctcctataacacctaggcctggatgtc

SEQ ID NO: 525203 - DNA, 501 bp, Homo sapiens
atcccattcatagtcatctttttgagacagctcttgctctgtcacccagtctggaatgcagtagtgtgatcatggctcgctgcagcctcaacctcccaggctcaggtgatcctcccacctcaacctcccaagtagctgggaccacaggtrtgtgccactaaacccaggctaatttttttttttttaagggatggggttctgccatattgcccaggctagtctcaaactcctgcgctcaagtgatccccctgcctcagcctcccaaagtgctaggattacaggtgtgacccaccacaccaggtcttagttctttttcttgatacaagtcagcagagactccaatttctccacttcaataaattaatggattctttaaaaagagaaaaagattaattaaagccacatgagccacagccccaacaatctacagttataccccgaattcaacacctggcagcagtcataactaggggtctcctataacacctaggcctggatgtc

SEQ ID NO: 525204 - DNA, 501 bp, Homo sapiens
atcccattcatagtcatctttttgagacagctcttgctctgtcacccagtctggaatgcagtagtgtgatcatggctcgctgcagcctcaacctcccaggctcaggtgatcctcccacctcaacctcccaagtagctgggaccacaggtgtgtgccactaaacccaggctaatttttttttttttaagggatggggttytgccatattgcccaggctagtctcaaactcctgcgctcaagtgatccccctgcctcagcctcccaaagtgctaggattacaggtgtgacccaccacaccaggtcttagttctttttcttgatacaagtcagcagagactccaatttctccacttcaataaattaatggattctttaaaaagagaaaaagattaattaaagccacatgagccacagccccaacaatctacagttataccccgaattcaacacctggcagcagtcataactaggggtctcctataacacctaggcctggatgtc

SEQ ID NO: 525205 - DNA, 610 bp, Homo sapiens
tctatgtcccttataatcaacattgccaatacattaataatccttagtgaatggccaatagaaattttctaaaagaaatttttcttacctaacttgtatgagtcttttaacttttaggtctatttccctttaaatcctgcagtttaaataactttgctttggccaggtgcggtggctcaggcctgtaatcccagcacgttaagaggccaaggcgggtggatcatgaggtcaggagttcaagaccagcctggcgaagatggtgaaaccttatctatactaaaaatacaaaaattagctgggcatggtggcaggtgcctgtaatcccagctactcgggaggctgaggcagagaattgcttaaacccgggaggcggaggtttcagtgcaccaagatcgtgycactgcactccagcctgggcgacagagcgagactctgtctcaaaaaacagaaaagaaaagtaactttgctttggataaaatgtgttttttcctccaactacactttcacattttctctctttgatacgcagatgttctatccatgagatcatagtagcttaagcatttatagacaaggcagtgtgatgtcctatagttatgctctccagtac

SEQ ID NO: 525206 - DNA, 611 bp, Homo sapiens
aaccaggcatcgctaacacaggaagtgtttgggacatgcctgtgtggcctcaacactcctgggaagcgggtaaggaccatgccagaccatgggaggcaggcaggagaagtggaagcacctgcatagagcagcgtctcagactcaggatggaagggcaygctcggagcagagagcgatgggagagtcaggtgccagggcgagaagagcactgagcagaggacatggatttagcacaaagatcattcgtttttaaattaaatcacccaacccctttggagacgcctggactacttgcctaccccatctgccctcatgggagacagtggaagtgagctgaggagctgctgcaggctctggcagtgggtcccagggtccctgggaacaggtggaatctggagttagtgaagggccccggagggtctgaaaggcatccacatcacctaccattgagaagcactggtcttgaggatggtgtcgtgcccacagttaaaattctggatgcactaactgttccatgaagtactccttccttgaaattcctgagaatgggacctggattccaattcatcaaaaatattcattctataccacccatgcagagagtggtatag

SEQ ID NO: 525207 - DNA, 592 bp, Homo sapiens
cattgtaatgggctttgtaaaaatataaagtgctatataaacataagggtgttaatctcctgtctttggtgacaggctaaaaagacatacttgtttcaaattttggatactctaatttgcataatcttacacattctctttctctatttttaactctatgttttccccatcagatttttttctgttaggagttacaatatctctcttcaactgggctttgyctcaaggtgtataaacttaaagcattatctccggtgcagtttgtcagtgtctcggcatatttgaaatttttagtactgcatttggtatatgaaagctgcatcctatgtaagaccataggatatttaaacagatgttcaaatttctattgtgaaaatcctagctcattccttgctagagatgaagcactgaggacagtacaatcaccaccttaaaacaaaccacctaagcacagctttggctgcacagattggaagggaatctggtaattacactctttagttcttctgtgaatataaccaatctgggcaatttgggcaccagagtggatttttaggcatgaattatctggttaagttagccagataattgc

SEQ ID NO: 525208 - DNA, 467 bp, Homo sapiens
caccctgctctcaggtggcttattgtccaaagcaatattatctctggggtacaaagcccaaaagagtgcttctcaatcttcatgaaatatttctctcttttttcaaaattattctaaaaggctgtgagcctgaagttgatttccatgattaatttaagaggcaaggggagaagagaagacagttatacatgaatgtgaaacttgtgagtttggttctggcctttatagtcagataaagattttgaacaaagtggacaataatttacwgtaagtaataaaataatattgatcttgccatggagtaggaaccaaaacttcaggcccatccatatgtactaatttggagatgacaaccttgtggaacctatttataacttttacagtattttatggttctttctttccaaagaagcacacattatattgcacaaggcctgtgaatatacaagtattctctgccaaaagca

SEQ ID NO: 525209 - DNA, 458 bp, Homo sapiens
catctggtaaccactattctactttctacttctataagtagttagaggtgcaggactcttttctcacatcccattgcactttccaagtgagtggacagtgagtggaaagagaggggaaagatccaaatataggtaagatcacgtgatatctttctgtacctgacttattttactgagcataatatcctctatattcatccatgttgctgcaaaagacataatttcccctttttaaaggctgaatagtattcttgtgtgtgtgtgtgtgtgtgtggatacacacactatttttttaatccactcgtccactgatgggcacttagkttgtttccatgtcctggctattgtgaataatgcaatgaacatgaagtcacaagataccttttcgacatttcaattcttttggctatatatccagaagtgggattgctggatcatatggtagttctatttttagt

SEQ ID NO: 525210 - DNA, 458 bp, Homo sapiens
catctggtaaccactattctactttctacttctataagtagttagaggtgcaggactcttttctcacatcccattgcactttccaagtgagtggacagtgagtggaaagagaggggaaagatccaaatataggtaagatcacgtgatatctttctgtacctgacttattttactgagcataatatcctctatattcatccatgttgctgcaaaagacataatttcccctttttaaaggctgaatagtattcttgtgtgtgtgtgtgtgtgtgtggatacacacactatttttttaatccactcgtccactgatgggcacttagtttgtttccatgtcctggctattgtgaataatgcaatgaacaygaagtcacaagataccttttcgacatttcaattcttttggctatatatccagaagtgggattgctggatcatatggtagttctatttttagt

SEQ ID NO: 525211 - DNA, 506 bp, Homo sapiens
cctccactttaactttttcatttctctcttgcgatctcaaaggcattcctaagcataacttcatatctgggcctctgattacgaggggtgtggtaagttattaaagaagtaggcgtggccgggcgtggtggctcacgtgtgtaatctcagaactttgggaggccaaggcaggcagatcacgaggtcaggagatcgagaccatcctggctaacgcggtgaaaccccrtctctactaaaagtagaaaaaaaatagcaggccatggtggtacgtgcctgtggtcccagctactcgggaggcttgagacaggagaataacttgaacctgggaggcggaggttgcagtgggctgagatggcaccactgcacttcagcctgggcgacaacagagtgagactccatctcagaaaaaaaaaaaaaaaaaaaaaagaagtaggcctgtgggaagagtcgttaagtacaaggaatatgcaagatgcttccaaaggattgctggatctgcaaatgtg

SEQ ID NO: 525212 - DNA, 671 bp, Homo sapiens
tcttggccctggcccccccaacccatggcatgcatctttttatttktattttaatcatgggtttatttagttttttttttaggtgttaaactttatcaaaagttttttgagggctattgaaataattttcttcccttataaagacagtgcaaatgcattttatcagtacaatttccaattttgaactacagtatacattcttggaatgaaacccattaggtcataatgagctgttctttcatgtagttcatttgataatagcatgcatcatatttcattttaatcaaccatgatgtttgtttttagtcagaattataaattcacatatttcagagcaaattaggtaacaaatttgtgaaaaggctgagtattatgtaaacaagagcagtcaaggctgtaaagaactgaagagtatttttcttgcctaaagacattatttctttttatttgtttatctgcttgtgtcctcttaaagttacaccaaattagctgagacacgaattcaccaggtattccaggctttttattcctggtatataatttttcaacacttattcagtgaaaagccaggccacagagaatctaagggggaaaaaagatcttgcttttttaaaaaattattttttaagttttgtgatgaggacaagcaataaaagccctctgttgaggat

SEQ ID NO: 525213 - DNA, 543 bp, Homo sapiens
aaatctgcccctgccatatacaggtgtggtatttagtcagcttccataaaaaggtctctaaacacctctagaaagaacttacgttaaattttggataaagtgaggcaatattccagaactttcaatatgttttacccagatcaaacctgagaaataagagagagcttatagaatcaccatgtctggaaaatcttcactggtgattaaaatcttaagaattttgagggagaaggaatattattttgattaaaaatttcacagataggaggagcaccaatggcatcctcctgataatcaacatcctaactccattcattatcatttactacatagttagggaattaccagcttgatcttatttttaattactaaatatsctttctaagtatatactcctaaatttgggatatgatgaccgcataaaatatgaaccacttgtcccatctattgtgagataagctaagtctcaattctttattgcttaacagtgttagcttccagtgggccagtgtggtaaatgtctgaaaacttctaaaacattct

SEQ ID NO: 525214 - DNA, 583 bp, Homo sapiens
ctggctcacaattacatttcttgttgtaaatgatgtttttactttaaaacatctctaattaggggccgggtgcggtggctcatgcctgtaattccagcgctttgggaggccgaggcccccggatcacgaggtcaggagatcaagactatcgtggctaacatggtgaaatcccgtctctactaaaaatacaaaaaagtaggcgggcgtggtggtgcgcacctgtagtccctgctacttggtaggttgaggcaggagaatcgcttgaacccaggaggcaggggttgcagtgagccgagatcacgccactgcactccagcctgggcaacagagcaagactccgtctcaaaacaatgacaacaacaaaaacaacaacaacaacaacaacaacaaactctactcatatgtagaaatccaggtttcaaatatttcatttaatctgagcctacttggtagagaacrctggatcaaagttgtattccttttctattgctgccataacaaattactatcaacttagtggcttcagcaacaccagtgtatgctctcacagttctgtgagtcagaagaccaacatgggtttctt

SEQ ID NO: 525215 - DNA, 649 bp, Homo sapiens
caggatgatagtaatgcttgacactaataaatcactctggaaaagaagtttataaaatctggcagctcttaaaaatcaacatgctatttatagaaaagaataggaaagagaactgtgcaacaaagacttttttttgcctcctttgagccatttgaatcatcacactcgccatattactaacttacactacttgtagcattcatcctttgatggcagagggccaaaacattcttagaaartagttaggaagggagaggagtcatcacttccttagcttaggttcagagttctgctgaaaaccactgtctctagcactcaatctgtactcttcacctgactcccggggagaaagttctacagagaggaagctggagcgtagaacaaggcccttaaactcaccatgcattctgaaatatcctctgtagtagcatgcatgcttactaattttttcacagtggacataggaatattagtactgtttgcctgttcatttatatattaattaactcatttattcattcacacgccttgattcatggtttcagagatcagttgttgagttttctgtatatataaaaatctgcgctagctgctatagatatagacacatacacgagagatggcttctgcctataagaagaaacaggca

SEQ ID NO: 525216 - DNA, 649 bp, Homo sapiens
caggatgatagtaatgcttgacactaataaatcactctggaaaagaagtttataaaatctggcagctcttaaaaatcaacatgctatttatagaaaagaataggaaagagaactgtgcaacaaagacttttttttgcctcctttgagccatttgaatcatcacactcgccatattactaacttacactacttgtagcattcatcctttgatggcagagggccaaaacattcttagaaaatagttaggaagggagaggagtcatcacttccttagcttaggttcagagttctgctgaaaaccactgtctctagcactcaatctgtactcttcacctgactcccggggagaaagttctacagagaggaagctggagygtagaacaaggcccttaaactcaccatgcattctgaaatatcctctgtagtagcatgcatgcttactaattttttcacagtggacataggaatattagtactgtttgcctgttcatttatatattaattaactcatttattcattcacacgccttgattcatggtttcagagatcagttgttgagttttctgtatatataaaaatctgcgctagctgctatagatatagacacatacacgagagatggcttctgcctataagaagaaacaggca

SEQ ID NO: 525217 - DNA, 548 bp, Homo sapiens
tgatttccgtgttcttttggtgtatcytgattcttcattgagaattcttactttttgatgcaaaaagatattctaggctcattttatcctgacctagccctgagtcatttctccaaaagtttcataaacaaggtttaggtcctggtagtgctcattgctaccagtgtgtcattgctctgggccctctcagaagatagaggtaggaatacaaacatgtatatatacacacatgttcctaccccctccacacacttctctatttctatacttggaaaatgtattataaaactgaatttatgtggatacttttgtctattggtcaaagccactacccaatgaccacacgttataacacccccatcacctcaaggattctcatagttttctctctagtttcgtcagggttgaccttggggttgggaccagcagctcacttgtccaggactgtaatattctgattatcgttttgatattaatttatagctaaactgaaatgtagttagaaactatatgttgcatggtttcaaccattttttgggaaaattttt

SEQ ID NO: 525218 - DNA, 423 bp, Homo sapiens
gttccactacgtgcaaagggctgtgctaactcccacccaactgtgacttttccatcaatagtgacagatttagttactgttgtctcctacccatgcggcagccctgaaactgcctctgctggttttgaggaagcaccccaggacgttaagtagaatataacaaaggtaacagggttttgcagatataatttatgtcccaaatccattggttttgagttaatcaaaagggcgagaatgagataaccaggtgaacatccctgaaagagggactggccctccctgaggtgagagactatccttgatgaaataagtggctgtgtcagagaagtccrcgtggcaaggaactttgggtgacatctaggaacaatgtgtcctccagacctgaaggtgtcctccaggcaacagccagcaaaaagtccatca

SEQ ID NO: 525219 - DNA, 555 bp, Homo sapiens
gtaattcagaaagaggaaatcaaaatggttataatttggtatgggcattttccttttatgttagaaaaattatatataattatatacataaaatatatacaaattataaaaatattttaatatgtatatgtgatataaatttatatttgttaattatattgatgttatacaagtttatatttacattatacaagttatatagtaaattatataattgttatgattatatatgtatatgagaggtgacagcgtgctggcagcccttgctcgctctcggcacctcctcagccttggcgcccactctggcctgtttgaggagcccttcagcccacccctgcactgtgggagcccctttctgggctggccaaggccagagctggctccctcagcttgcggggaggtgtggagggagaggtgcgggtgggaaccagggctgcgcgcagtgcttgcgggccagcrcgagttctgggtaggcgtgggctccgctggccctgcactgggagtgaccggccggcccgcaagccccgggcagtgaggggcttagcacctgggcca

SEQ ID NO: 525220 - DNA, 501 bp, Homo sapiens
cttgcaagccactttacacttcctgggtgataaggtttggatttgtgtccccgcccaaatctcaygtggaatgtcattcctaatgttggaagaggggcctggtgggaggtgattggatcatgggggcagaattccctcttgcagttctcttggtagtgagttctcacaagatctggttgtttaaaagtatgtagcacctcctgctttcgctgtcttcctcctgctcccgccatgtaagacgtggcctcctttcccttcgccttccgccatgattgaaagtcttcagaggcctccccagccatgcttcatgtacagcctgtggaactgtgagccaattaaacctcttttcttcataaatcacccaggctcgggtatgtctttacagcaatgtgagaacggactcatactgtgggtctgtagcctctttccatggtattatctcatatttttcaatgtttctttgatgcatgttttaagaaatgttaattgaaagcatgtcat

SEQ ID NO: 525221 - DNA, 610 bp, Homo sapiens
tatcaatggagacattgacaaaaaaaggggcatgaactaataaattaagcatccaaaacctatctgtagacccacactcatacctccaatgaaaataaagatggatctgtcatccatgtgttcatgaaggagcaatacaacaatcccaaataatcctaaaatcaggaacacatccacagcaatgtattagcatcccactggctgtttattgacaacttagcatgttctggaggtgagaggagtagaaccacttaaatcyttaattggtagacacacattttccacaccactagaacttcaaacatcagcttctatcccctttccaaataaaaccctaaccactaacatgcctcacaaaggcccactaaaatatgaatgtacttgaatacatagtgaacttaattgctaatattccttggcaaatcagatacactgttaacagcataataatgagtatgcatagagactccccagtgtgaccagatgcacatgtaaaataaataaattaattaaaattgccatgctaaataaagttgtcctgccatctcaggttagcatctgtttctagttttcctcaatagttttccctgagcatattttctcagctcca

SEQ ID NO: 525222 - DNA, 501 bp, Homo sapiens
tgcgtacaaagataggcccttgaattgtggcatcacagcacggtgctccagcccatgtgttggcctctgttccccagggagtgttggaggggagcgtgctgatccagcgtccagctcttccgggagtgggctggctgctctgagggtggctgtgggtgaaagcctcccggggtctgcttytgggggaaaatgaggctggcagtggcctgaccactcggttttccagccacccaaattcagttgctctctgagctcttactgtacacggagctgaaatattgtgcaggaagcaatgaatcagaccctttgcctgcaggagcctaccctctggtggaggacacccaccagcatgaggataaacgcagaactgggacagcgtgagcgtgagaggcacaggcagagcaatgcatgctgggtgtggaccaggagaggaaaagccacttttttgcttttttattcaggaggacaaatagcaggagaggcttgttcggtatttttcag

SEQ ID NO: 525223 - DNA, 411 bp, Homo sapiens
gtgagggacccttggtcactttgttattaggcaatcactgtttttgctgccctcacccaaaccttctgcatttatcgagtgcagaaggtttgggtgccttcttggtagacttgagccttttttggagttaaggtctttgctgggacagaaagatacggcaacagttgagaatttggtgcttcaggatagcttgacgtcrgaagcactttcaggcaccattccttcagtttttgatctctttagtgaaagattgaattaactctaattatattttatccattgtaaatttgcatttgtcattcattgttctcacctcctagtctctgccttgtctctccctcagggcaaaactgataaatgaagaaggaaaccaaggctcctgccactgagtgtgtgtctccaaaaagcaca

SEQ ID NO: 525224 - DNA, 388 bp, Homo sapiens
tcctcattttacatatagtacccactttggcattatctcttaacttacatttgttttttgtaaaggcatattactaatgtaaagtactgttaaaaagaaaaaaaagtggtcaataagcccactattcacgtacacctcgttttatttttaaataaaagtttattattcatggtttagaaattaaartggtagaaaatgtagtaaaatataaagtaaaaatgttttatctattccattcatccttaatagttaacatcatatttccattattccttgcaaaaagtgtgcataccctagtacgggtccccaacccacgtggcctgttaggaacagggccacccagcaggaggtgagtggcatgctagtgagcaaagcttcatctgtattt

SEQ ID NO: 525225 - DNA, 639 bp, Homo sapiens
tctgcacattgtaggcttgttcttctacctactcaaggccccagatccagcaaatgtcctcagagatgggctctgctgctaatctgtgatcaccaaggaagggcttgtttttctctgaaatttagttcattgacactttagacccacaattttttgatggctttaaacaaaaaaaaaataattttttaaagttcatccgatattttctcattatggcaggagcaattgtctttggtaactttattttaattggaagaagaatttctaacattggcattgtaatgaggtttttggtctttgaccctagtggagcaattaaatccacrtctatttcttctgttatgcatgtattgaaggatcaaatgagaaaatatatgtagagtgcacaaagtgtctaatgtacactagtgatatacagttgtattatgactacacaccgaaaacacataatcaaccagattgcttcctgagaactagagccaggcttttccaatgatacttaactgtcaaataattctattcaatttttcatgggacttagggtttggtccatgaagtgctgccacagtatgcaaatcaattatatcaataaatgtgctaatttattcagcaaacgtattcttgtagcaatagttactc

SEQ ID NO: 525226 - DNA, 639 bp, Homo sapiens
tctgcacattgtaggcttgttcttctacctactcaaggccccagatccagcaaatgtcctcagagatgggctctgctgctaatctgtgatcaccaaggaagggcttgtttttctctgaaatttagttcattgacactttagacccacaattttttgatggctttaaacaaaaaaaaaataattttttaaagttcatccgatattttctcattatggcaggagcaattgtctttggtaactttattttaattggaagaagaatttctaacattggcattgtaatgaggtttttggtctttgaccctagtggagcaattaaatccacgtctatttcttctgttatgcatgtattgaagsatcaaatgagaaaatatatgtagagtgcacaaagtgtctaatgtacactagtgatatacagttgtattatgactacacaccgaaaacacataatcaaccagattgcttcctgagaactagagccaggcttttccaatgatacttaactgtcaaataattctattcaatttttcatgggacttagggtttggtccatgaagtgctgccacagtatgcaaatcaattatatcaataaatgtgctaatttattcagcaaacgtattcttgtagcaatagttactc

SEQ ID NO: 525227 - DNA, 618 bp, Homo sapiens
caacctgcatttttcagcatcctgcaatttccctataacctggaaattttgaacctccatgtcttcgtgtgtaatattttctgcatgaaaaatgtgtcatttcaacttatctaactyttgcttactatctaaggtaaggtagaagtgccaactttttcaaggttttagataaaaggtgaaaataatagtctcttggtccacactcacatagccctttgtttatattaaacactatattatattatgctatattaatagtcagctgtttattcatctccttcagcagactctaaaggccattagggacttgctaattcatttactaattaattaaagaaatttgaggagaatatcaagaataaccctctacttgttcccggccaccattcatcactcactttcttaattgttcattcacagtgtacatatacggtgatgtcagaaacgttacaccatacttccatgagaaacaactttattaactggagcactgtgcttgtatacacttcctttcacctttaattttacagtctcctctcatttctgaaattacttatttcaacgcattttttcccacccatctcagtgaggttgtttcatatattttcaatacagtta

SEQ ID NO: 525228 - DNA, 639 bp, Homo sapiens
tctgcacattgtaggcttgttcttctacctactcaaggccccagatccagcaaatgtcctcagagatgggctctgctgctaatctgtgatcaccaaggaagggcttgtttttctctgaaatttagttcattgacactttagacccacaattttttgatggctttaaacaaaaaaaaaataattttttaaagttcatccgatattttctcattatggcaggagcaattgtctttggtaactttattttaattggaagaagaatttctaacattggcattgtaatgaggtttttggtctttgaccctagtggagcaattaaatccacgtctatttcttctgttatgcatgtattgaaggatcaaatgagaaaatatatgtagagtgcacaaagtgtctaatgtacactagtgatatacagttgtattatgactacacaccgaaaacacataatcaaccagattgcttcctgagaactagagccagrcttttccaatgatacttaactgtcaaataattctattcaatttttcatgggacttagggtttggtccatgaagtgctgccacagtatgcaaatcaattatatcaataaatgtgctaatttattcagcaaacgtattcttgtagcaatagttactc

SEQ ID NO: 525229 - DNA, 639 bp, Homo sapiens
tctgcacattgtaggcttgttcttctacctactcaaggccccagatccagcaaatgtcctcagagatgggctctgctgctaatctgtgatcaccaaggaagggcttgtttttctctgaaatttagttcattgacactttagacccacaattttttgatggctttaaacaaaaaaaaaataattttttaaagttcatccgatattttctcattatggcaggagcaattgtctttggtaactttattttaattggaagaagaatttctaacattggcattgtaatgaggtttttggtctttgaccctagtggagcaattaaatccacgtctatttcttctgttatgcatgtattgaaggatcaaatgagaaaatatatgtagagtgcacaaagtgtctaatgtacactagtgatatacagttgtattatgactacacaccgaaaacacataatcaaccagattgcttcctgagaactagagccaggcttttccaatgatacttaactgtcaaataattctattcaatttttcatgggayttagggtttggtccatgaagtgctgccacagtatgcaaatcaattatatcaataaatgtgctaatttattcagcaaacgtattcttgtagcaatagttactc

SEQ ID NO: 525230 - DNA, 641 bp, Homo sapiens
cagagcagttagaaaacaaaagcatgagaaacagtaactcttacagttgtattatgcctgtatgcctycccagttctgcaaagattatgaggatttttttaggtctgtacatagttttaaaatatcctaaaacaatccacataaataaactcattaccataataatctgcaagatagacattgtcatcctcaagtaatatcaaataaatcttatttgcctgcaagatctgaatctgaaaatcccaaagctcaagtttacctagctaataggtagtaagactggggcctcaatctggtttatctaattctgaaaagtgttttgctataaaagcactataggaaataaaacattagactttatacctttagataataagaatatttatgtcattgaacctgaaaagatactgtttaactttcatgttctacttgtcatttttcttttctgcttttatatgtaatttaggtaatagatacccaggaatcaacttaaattcccatcagtggtagactggaaaaagaaagtacggtacatatacaccatgaattactatgcagccataaaaaagaatgagatctgtcctttgcggcaacatggatggagcttggaggccattatccttagcaaagtaacacaggat

SEQ ID NO: 525231 - DNA, 641 bp, Homo sapiens
cagagcagttagaaaacaaaagcatgagaaacagtaactcttacagttgtattatgcctgtatgccttcccagttctgcaaagattatgaggattyttttaggtctgtacatagttttaaaatatcctaaaacaatccacataaataaactcattaccataataatctgcaagatagacattgtcatcctcaagtaatatcaaataaatcttatttgcctgcaagatctgaatctgaaaatcccaaagctcaagtttacctagctaataggtagtaagactggggcctcaatctggtttatctaattctgaaaagtgttttgctataaaagcactataggaaataaaacattagactttatacctttagataataagaatatttatgtcattgaacctgaaaagatactgtttaactttcatgttctacttgtcatttttcttttctgcttttatatgtaatttaggtaatagatacccaggaatcaacttaaattcccatcagtggtagactggaaaaagaaagtacggtacatatacaccatgaattactatgcagccataaaaaagaatgagatctgtcctttgcggcaacatggatggagcttggaggccattatccttagcaaagtaacacaggat

SEQ ID NO: 525232 - DNA, 641 bp, Homo sapiens
cagagcagttagaaaacaaaagcatgagaaacagtaactcttacagttgtattatgcctgtatgccttcccagttctgcaaagattatgaggatttttttaggtctgtacatagttttaaaatatcctaaaacaatccacataaataaactcattaccataataatctgcaagatagacattgtcatcctcaagtaatatcaaataaatcttatttgcctgcaagatctgaatctgaaaatcccaaagctcaagtttacctagctaataggtagtaagactggggcctcaatctggtttatctaattctgaaaagtgttttgctataaaagcactataggaaataaaacattagactttatacctttagataataagaatatttatgtcattgaacctgaaaagatactgtttaactttcatgttctacttgtcatttttcttttctgcttttatatgtaatttaggtaatagatacccargaatcaacttaaattcccatcagtggtagactggaaaaagaaagtacggtacatatacaccatgaattactatgcagccataaaaaagaatgagatctgtcctttgcggcaacatggatggagcttggaggccattatccttagcaaagtaacacaggat

SEQ ID NO: 525233 - DNA, 641 bp, Homo sapiens
cagagcagttagaaaacaaaagcatgagaaacagtaactcttacagttgtattatgcctgtatgccttcccagttctgcaaagattatgaggatttttttaggtctgtacatagttttaaaatatcctaaaacaatccacataaataaactcattaccataataatctgcaagatagacattgtcatcctcaagtaatatcaaataaatcttatttgcctgcaagatctgaatctgaaaatcccaaagctcaagtttacctagctaataggtagtaagactggggcctcaatctggtttatctaattctgaaaagtgttttgctataaaagcactataggaaataaaacattagactttatacctttagataataagaatatttatgtcattgaacctgaaaagatactgtttaactttcatgttctacttgtcatttttcttttctgcttttatatgtaatttaggtaatagatacccaggaatcaacttaaattcccatcagtggtagactggaaaaagaaagtacggtacatatacaccatgaattactatgcagccataaaaaagaatgagatctgtcctttgcrgcaacatggatggagcttggaggccattatccttagcaaagtaacacaggat

SEQ ID NO: 525234 - DNA, 461 bp, Homo sapiens
gctaaacgattatcttccttttctccctggtattttaatgcccaagtagaaaatggaaaatcatgaaggaaaaatatcacttgtgaaaatcgtggcagttagctttatgaagacayagtggcctctgtggggacatgggatatgcagaaagagatggctagtacagttgttctgtcttctgcagttcagtcagggacatattgagagaggaaagtttaagcaggtacattagaaattgataaccagcccagcattcttagaacagatgggtttagagaacacgagttgtagttccttggcagaatgccatggtggatatgagaaactgtgaactgtgttgaaattgagcttgagcagaaaatgagaatactaaaaatttgaagttcagagggtatgcattagattatttctaatggtccccatatatgatcattgcctgcctgactatataagactcctgt

SEQ ID NO: 525235 - DNA, 461 bp, Homo sapiens
gctaaacgattatcttccttttctccctggtattttaatgcccaagtagaaaatggaaaatcatgaaggaaaaatatcacttgtgaaaatcgtggcagttagctttatgaagacacagtggcctctgtggggacatgggatatgcagaaagagatggctagtacagttgttctgtcttctgcagttcagtcagggacayattgagagaggaaagtttaagcaggtacattagaaattgataaccagcccagcattcttagaacagatgggtttagagaacacgagttgtagttccttggcagaatgccatggtggatatgagaaactgtgaactgtgttgaaattgagcttgagcagaaaatgagaatactaaaaatttgaagttcagagggtatgcattagattatttctaatggtccccatatatgatcattgcctgcctgactatataagactcctgt

SEQ ID NO: 525236 - DNA, 587 bp, Homo sapiens
tggcagcagctctacagccttgcacagattggcactctgcagccagccaaagtccccaccgccctgagttgccgctctcttggcccccgtagcatgtgatctacaacccttgccccgtgtctcatgtgtatggctggttttccagggcccggatggctccagcccctcctctccctgatcagtgaatgtggcccagcccatccaactctcccccacagccaggaggccagctccaagggcaacacacctggaagctgcaacacggatcagtccacttcccttgtcctggctgcaataaatggggccaaggtcacactagcttttttggcaaaacttcaccctggtgactcactgagattcctatatatatatttacaaaaaaaaaaaaaagccctcacttcttggcacagcctggcaactaaaaataacaacaccacaatatccgatwtaggcttacgcctcacaaagttcttttacaagtgctactgtcttcaatcctcacaacaaatctgcacagcaagaatttttctcccactctataaatggggaaactgaggccgagagaggcatcttgaactacctgaaag

SEQ ID NO: 525237 - DNA, 527 bp, Homo sapiens
ctcccaaagtgctggaattacaggcatgagccactgcacctgggcctcttcaatctctttactctgggtttcccttctccccatttccagccttgccccggataccccagtgcatggtttcatttgacccccacatattatgagccctttctgtccaaaaagacttgatgagaaagcccccccccccttactttcctcgctgcttccccaggctcccagctcagaggcaaggaatggacaatgtgacccatggggtcagaatggggagggggtcatggaaggccctggcagagcccacccacttcgtgctgcccgcccactcaccatcatgacatatgtgctcatgaactyggccaggaactctcgcgccatcttcctctcatcttcctcgcatcatatttcctggatctttgctatcacggaccaggagaccattttggagccacgggtggacctgatacagtggcccgagctcatggacagaaaggagactcaagtctgcctgctgcccatcggctcttcaactc

SEQ ID NO: 525238 - DNA, 527 bp, Homo sapiens
ctcccaaagtgctggaattacaggcatgagccactgcacctgggcctcttcaatctctttactctgggtttcccttctccccatttccagccttgccccggataccccagtgcatggtttcatttgacccccacatattatgagccctttctgtccaaaaagacttgatgagaaagcccccccccccttactttcctcgctgcttccccaggctcccagctcagaggcaaggaatggacaatgtgacccatggggtcagaatggggagggggtcatggaaggccctggcagagcccacccacttcgtgctgcccgcccactcaccatcatgacatatgtgctcatgaactcggccasgaactctcgcgccatcttcctctcatcttcctcgcatcatatttcctggatctttgctatcacggaccaggagaccattttggagccacgggtggacctgatacagtggcccgagctcatggacagaaaggagactcaagtctgcctgctgcccatcggctcttcaactc

SEQ ID NO: 525239 - DNA, 577 bp, Homo sapiens
ggaattggagacacttgagagccatggggacatggagaggaactggggtagatggccaagccatgccccttgtagttgggactggaccagtaaaaatggcacaccaatgaggccactttgcagacggacaggtggggagctgaaagtgcaatccacggtgccaacaagcctctgggaaaaagtagggtgggagagagcaggctggaaagtagagctcagtagtctatgtctgtccatctgtctgtctgcctatctgctagagccagaactttggggtcacaggccagggcctggcaacagtgaggcactctacaaacagcatgaagtgtgacaaagtctgctgccgagctctgtaaacagcactgagcactgaaacatgcgccaggttctgtcaaaaatgaaggggtcagcaaaatgcaccaggctgtgcaaccaggtcagtgcaaacagaggtttgtgagagagtgagtgaatgaatgaatgaatgaccaagagagcgggagggagaaaaggaaggactggatctacttcctggtgtatcttyagtgcccagcaccatgccaggcacatagtagat

SEQ ID NO: 525240 - DNA, 404 bp, Homo sapiens
gaggaggcagctggtcatgtggtctcacttacagacacatttggaggacagcaaatcacagatggtcatctgagccatgggcatagatgagagagctcaaggagagggtacagactaagaagaggggcccaagaaagccagcctacaaagcaagaaactgacagccaaccagatcccctaagtaatctgttaaccaaggaactaaatagctaacaactcactaaygcctgtttcttttctttttctttttctttttttttttgagacagggtctcactctgtcgcccaggctgaagtgcagtggcacagtcacagctcactgaagcctagacttcccagggttcaagtgatcctcccacctcagcctcccaagtagttgggactacaggagcatgccaccatga

SEQ ID NO: 525241 - DNA, 567 bp, Homo sapiens
agatacatcaatcaatatattcaacatttctcccctgcttatcctaatgataaagatgatataaaatgtaatttaaaaatataagaagaaatggtgtaatggtctctatattaaaaactagagttaaattgtttaaaaaattataagtagatgctaaatacacagattgaaatacattaaatacattaagaatgtttgttctgtttcttatatattgctggttttctgtcattgaaagtttaatttagacctccttatttcatgtaatcaccccaataatttgtcttacaaacaattaacagaagttaacactatataacatagttgtatattgtcttactcttacaatgggatactttacttttcatgagggaaacagtaagctataaagtttacacaatctgagatgtagataaagattgwtgtgcaagattgcttctagatatatcactttataatggtaacataaaaaaaggaaagtaatgtgtaaaatatcttctaatgcaaccctttccactcttcctgactcattggcctttttttttttttgacttctcacgaatacat

SEQ ID NO: 525242 - DNA, 596 bp, Homo sapiens
accaatcattacccgttatcccaattcattaaatcagattgtttcagcaataagttacattttgaagttaacgaaatacttaaaaggctgtgatgttgtagctgcagatgtagtatgcaaaacacatttgattcatgtcgttcagcacaatttcatcttaaaatcttatctacaaaacatttttacacatctattattctcttgctttatgtaaagtttatgtcatttatctctatcaarttaagttacatttctagtttttctcaaccataaaagacagcattaatttttacaaacattaatgatgaactatattcactcataactatttatgtctaagtcatcttagatttactgaacaatttctgagtaactaatggctagccttttattattctatgatgataaacatttttacagtatccaggcttcagacatatttttgaaaacatttctatatgggtcaaaatttaaatcagttgtaatatgtgatccactcaaatatattctccaggatgcgctattaaaatgaaataccgaggtggttccccaagacaccaatttaaagtgtatatgtgcagtgcagggttactgga

SEQ ID NO: 525243 - DNA, 596 bp, Homo sapiens
accaatcattacccgttatcccaattcattaaatcagattgtttcagcaataagttacattttgaagttaacgaaatacttaaaaggctgtgatgttgtagctgcagatgtagtatgcaaaacacatttgattcatgtcgttcagcacaatttcatcttaaaatcttatctacaaaacatttttacacatctattattctcttgctttatgtaaagtttatgtcatttatctctatcaaattaagttacatttctagtttttctcaaccataaaagacagcattaatttttacaaacattaatgatgaactatattcactcataactatttrtgtctaagtcatcttagatttactgaacaatttctgagtaactaatggctagccttttattattctatgatgataaacatttttacagtatccaggcttcagacatatttttgaaaacatttctatatgggtcaaaatttaaatcagttgtaatatgtgatccactcaaatatattctccaggatgcgctattaaaatgaaataccgaggtggttccccaagacaccaatttaaagtgtatatgtgcagtgcagggttactgga

SEQ ID NO: 525244 - DNA, 597 bp, Homo sapiens
catttgccattaattctaaaattgttgccatttagggcctcactgaaatatagggccaaatagctgttgctctaccagtagcagttctcatattaaatgatgaatttgcaaggcatgccccctaggatttcatctgttctccttgagaaaatgtcaataacttctataaagaaagagtggccctagttagagttttttagttccaagtctatgtytaacccattaagaaataattcatacttagtatatatttttaaaaaacactaaaatatagtctaaattttcctgattttttaaactatgtaggaattatataataaaatgtgattacctaagagaatgttctggtttttaggacatatacaataaagtacttaggattaaaataataagatggctccaatttgcaaatagtatagaaaggagagagagagagagagcacactaccaatatattcaaatgtaatttagaaaaaaatctggataaaagggtatataggactttcttctactattcttgcaacttctttctaagtttaaaattatgtcaaaatggctgggcgtggtgactcacacctgtaatcccaccacttcggg

SEQ ID NO: 525245 - DNA, 597 bp, Homo sapiens
catttgccattaattctaaaattgttgccatttagggcctcactgaaatatagggccaaatagctgttgctctaccagtagcagttctcatattaaatgatgaatttgcaaggcatgccccctaggatttcatctgttctccttgagaaaatgtcaataacttctataaagaaagagtggccctagttagagttttttagttccaagtctatgtttaacccattaagaaataattcatacttagtatatatttttaaaaaacactaaaatatagtctaaattttsctgattttttaaactatgtaggaattatataataaaatgtgattacctaagagaatgttctggtttttaggacatatacaataaagtacttaggattaaaataataagatggctccaatttgcaaatagtatagaaaggagagagagagagagagcacactaccaatatattcaaatgtaatttagaaaaaaatctggataaaagggtatataggactttcttctactattcttgcaacttctttctaagtttaaaattatgtcaaaatggctgggcgtggtgactcacacctgtaatcccaccacttcggg

SEQ ID NO: 525246 - DNA, 597 bp, Homo sapiens
catttgccattaattctaaaattgttgccatttagggcctcactgaaatatagggccaaatagctgttgctctaccagtagcagttctcatattaaatgatgaatttgcaaggcatgccccctaggatttcatctgttctccttgagaaaatgtcaataacttctataaagaaagagtggccctagttagagttttttagttccaagtctatgtttaacccattaagaaataattcatacttagtatatatttttaaaaaacactaaaatatagtctaaattttcctgattttttaaactatgtaggaattatataataaaatgtgattacctaagagaatgttctggtttttasgacatatacaataaagtacttaggattaaaataataagatggctccaatttgcaaatagtatagaaaggagagagagagagagagcacactaccaatatattcaaatgtaatttagaaaaaaatctggataaaagggtatataggactttcttctactattcttgcaacttctttctaagtttaaaattatgtcaaaatggctgggcgtggtgactcacacctgtaatcccaccacttcggg

SEQ ID NO: 525247 - DNA, 446 bp, Homo sapiens
gaacttcatgtttcagaattctttaggagtagtgttctaatttcgattctaccaataaaagccacatgttyaaggtttggaagtagagaaaaaaattacctttgcaggtacatgtgttttgcatatcacagacatgaaatttagcaggtagtttcctggtattctattacaatcctccacttttgtgctgaagtcagttgattcccgattttctctcattcctgcaattttccgatttcctaaaaggtagtaatgactttctctgatcttcacttcctatacttttaaacattttgtgactcccaattatctctatttaatctttccctgcttcaaaaatagaaatgtgcccgggggtgcgaagtcatttctctgttattcacccgccttttcatgtcatacactctgcttcattaaaaaaaaaaaatctaatttcatcaaatact

SEQ ID NO: 525248 - DNA, 544 bp, Homo sapiens
gccagtttgataaggaacaggaactgtgcgccatccaagcagaaatctcaawgtctcaaggactgctaaggcagagaaaggcagaagacacatatggctgggttctgagcatatgtactcaagccaggggagaaaatttacgagaaggacagttttcctgtgccaattaggcatctttatatcattcatttgacaggcaagcctatatcacttgagatttctaaaggacaacacgtctctcacagatggtatagaatatttttatctcgaaattcacatgatctcagaagactgattataaagatggaactatagcaatatttctgggataaatatcagtcacactgagggcaaagctctcttgtgcccctccctaccccactccgattggctccatggagacctgagacctctactcaccctggatctgctcctaatatttataaatctttatttaattaaaatcatcaaattcattgcagatgcatcaaatggccatttcagtagaacaaaaaaagggaggtattgttgcagttaatttgca

SEQ ID NO: 525249 - DNA, 544 bp, Homo sapiens
gccagtttgataaggaacaggaactgtgcgccatccaagcagaaatctcaaagtctcaaggactgctaaggcagagaaaggcagaagacacatatggctgggttctgagcatatgtactcaagccaggggagaaaatttaygagaaggacagttttcctgtgccaattaggcatctttatatcattcatttgacaggcaagcctatatcacttgagatttctaaaggacaacacgtctctcacagatggtatagaatatttttatctcgaaattcacatgatctcagaagactgattataaagatggaactatagcaatatttctgggataaatatcagtcacactgagggcaaagctctcttgtgcccctccctaccccactccgattggctccatggagacctgagacctctactcaccctggatctgctcctaatatttataaatctttatttaattaaaatcatcaaattcattgcagatgcatcaaatggccatttcagtagaacaaaaaaagggaggtattgttgcagttaatttgca

SEQ ID NO: 525250 - DNA, 544 bp, Homo sapiens
gccagtttgataaggaacaggaactgtgcgccatccaagcagaaatctcaaagtctcaaggactgctaaggcagagaaaggcagaagacacatatggctgggttctgagcatatgtactcaagccaggggagaaaatttacgagaaggacagttttcctgtgccaattaggcatctttatatcattcatttgacaggcaagcctatatcacttgagatttctaaaggacaacacgtctctcacagatggtatagaatatttttatctcgaaattcacatgatctcagaagactgattataaagatggaaytatagcaatatttctgggataaatatcagtcacactgagggcaaagctctcttgtgcccctccctaccccactccgattggctccatggagacctgagacctctactcaccctggatctgctcctaatatttataaatctttatttaattaaaatcatcaaattcattgcagatgcatcaaatggccatttcagtagaacaaaaaaagggaggtattgttgcagttaatttgca

SEQ ID NO: 525251 - DNA, 544 bp, Homo sapiens
gccagtttgataaggaacaggaactgtgcgccatccaagcagaaatctcaaagtctcaaggactgctaaggcagagaaaggcagaagacacatatggctgggttctgagcatatgtactcaagccaggggagaaaatttacgagaaggacagttttcctgtgccaattaggcatctttatatcattcatttgacaggcaagcctatatcacttgagatttctaaaggacaacacgtctctcacagatggtatagaatatttttatctcgaaattcacatgatctcagaagactgattataaagatggaactatagcaatatttctgggataaatatcagtcacactgagggcaaagctctcttgtgcccctccctaccccactccgattggctccatggagacctgagacctctactcaccctggatctgctcctaatatttataaatctttatttaattaaaatcatcaaattcattgcagatgcatcaaatggccatttcagtagaacaaaaaaagggargtattgttgcagttaatttgca

SEQ ID NO: 525252 - DNA, 646 bp, Homo sapiens
tgtacaaatgaattagatttagtctgaatgcctcatgaacttctcctgcgaaaagtgcttaaatctgcagtcaactccaaattagacttggtaattgaaggagmagcggtaccgatattcccaaataacagacaatctaaaagtcattttgacttgattctggtatgcagtgtttgattttggaggggagcggcagatttgcttccttaattagttttagcttaagctggtattaaacttatattctatttcattccatgagccctgccttgcttgaaacaaaaagaggaggaacaggaaggagaggcccaaaatgtaaatgttaccactaaaaatggggagaagggggaaacagccacaaaacaaatgatttccaaaatctcaatcaatctagatttaactttagagagaggaaggtatgcttcacttctttcttttggctagggatttccttttcacttgactggcccctttatgtctctgacctatgagctttgaaatttaaccttgctaaggaactcctcccagcctgccagtccaaataaatcactgtagttgtgtcaacgtttgagccatcttaaccaagcttattacatctctacaataattcctcccacaaataaacaagcattttaagaattcactg

SEQ ID NO: 525253 - DNA, 549 bp, Homo sapiens
atacatttcaactctagtaacttgagtttctaccttggatacagccttcaagccacatgtggaaatggaacaagcagaggctgagagccagacggacttgttttctaatcccatttcttcctcatgggagcttgtcaacttgggccaataataccagctctgtgagcagcattttctaggtgtagtaaatacaggctatgatgatgactctcttggcgacgtgttataatcactaaatgcagaacgatattcgggttgcctggtataccattcagtgctccagttcgcttccttccttccyttatttatttattatttattatttattttgccataccgatagctggttttagtttttttagagaaaattctacaattaaaaaaaaaaagagttccaaaacatttaacagaatttccagcaatgattatttctgaaatgtaaagatttgaaacataatttatgcaaaactaaaagccagaaggactcattcttgctttttccttttttaaaacaatctagaccatttgtcacaagaaagttcagcatgt

SEQ ID NO: 525254 - DNA, 469 bp, Homo sapiens
tactcttactttggactcactctcctttttttttttttttttttttgagacaaagtctcactctgttgcccaggctggagtgcagtggtacattcttggctcactgcaacctctgtctcccgggttcaagcgcttctcctgcctcagcctcccaagtagctgggattacaggcacccaccaccacgcctggctagtttttgtatttttagtagrcacagggtttcaccatgctggccaggctggtcttgaactcctgacctcaagtgacccgcctgccttggccttccaaagtgctgggattacaggcgtgagccaccacgcccagcctccaattcttttttgtggaaaagtcaagaatctgaacctgttcaccaacacacaaggagccaggtttcagcaggcaggctgggattggagagcccaccctgaaactccccaggaagaaaaagaggatgagcctcactacta

SEQ ID NO: 525255 - DNA, 654 bp, Homo sapiens
ggagcaagcgcgcagtgctgcaaatgagctgccgagaggcattcagccttgtcacttggcagagtagctgggttcagggtatatttggagcgggggtagggggcacaaaaagggtacatggttttgctttactgtttattcctgctcaaaggagggtgggggcaagtgaaaaagacatgtcttcatcatcgtattacttgatggtgactagaagtgcrggctgtacacagcattctcttccaaatggggattttggaaacagcgttgaggaggactgatatgcaaaagcttatggttgtgctctctgtcagccccaaatatttactgaagctgggagaagaaaaggcagactttctttttttctctcccaaacgtgtgattgtttagaactcaagtgcaacatctggaagtcagatatacagagaacaatttatggagtgtgagagatttgaaatattcagtgtcttttagtgggaactcaactttctggggctgcttttttttttttttttaacccagcacaaagcaggcaattctgagatctcctttgcctctctgaattaaaccctttgtgcctgggtcccataaacaatgtgctttttaaaggggagccccctcccagctccggcctttttctccagcgtgggcagccaa

SEQ ID NO: 525256 - DNA, 657 bp, Homo sapiens
catttttagataatcatgtagagatacgtcctaagaccttggagatccaccagccctacatctctaaattactgataaggaaaatgaggtccaaagagagccacccagctgttgaataacatgtcttctgactccttacccagtgcttttcttatttgctatttcatcttgagaaacagacatgggtattctgaaagacagttaattaattgaccaaaattgtggagaagaaaacaaaaaagaccgaaataatagacactgactatgtaattatctggaggaaagagtattggtagtttttaaatctaataaacatacaaatgtccaagaaaaagaaaaaaataataaatatttagttaacatatttcaagttcttttggccaaattataagaagacagcctttaaaaaacagctttccatattcttgaatttattttatagcaaaaatgtgatgtctttgaataaatgacttggcatacamaactcacagaataaagaattttaaatatattattgtatagtaataatatgctcttttgataaatggtatggctgcaatcattgtatcagcattttttacatagatctagtgtaaaaagtcaggagtcacatttattgagggctataatatactctctctgaacctgagaaaaaat

SEQ ID NO: 525257 - DNA, 657 bp, Homo sapiens
catttttagataatcatgtagagatacgtcctaagaccttggagatccaccagccctacatctctaaattactgataaggaaaatgaggtccaaagagagccacccagctgttgaataacatgtcttctgactccttacccagtgcttttcttatttgctatttcatcttgagaaacagacatgggtattctgaaagacagttaattaattgaccaaaattgtggagaagaaaacaaaaaagaccgaaataatagacactgactatgtaattatctggaggaaagagtattggtagtttttaaatctaataaacatacaaatgtccaagaaaaagaaaaaaataataaatatttagttaacatatttcaagttcttttggccaaattataagaagacagcctttaaaaaacagctttccatattcttgaatttattttatagcaaaaatgtgatgtctttgaataaatgacttggcatacaaaactcacagaataaagaattttaaatatattattgtatagtaataatatgctcttttgataaatggtatggctgcaatcattgtatcagcattttttacatagatctagtgtaaaaagtcaggagtcacatttattgaggkctataatatactctctctgaacctgagaaaaaat

SEQ ID NO: 525258 - DNA, 638 bp, Homo sapiens
tttttttactggtccaagttcaaataaaatttacataaaaatattttctttataaaatgactatacagataatgaaccaagaatattatatagtgaatattttcatggtaaatttaaaaagcatatgtatcttccaaaaataatgtttttttaaataacaagaaaaattaatttagtacaaccattctttcatcttaattcaaccaatattttattttttaaccaataaagtgcttactagacagttgaaactgtgtaagcgaataataacttaaaaraattacttgtgataaaatgatagaaaaagccaactcaaataattttcattgaagacaaatcttgcagctatattaatattaataaaaattaaatgcttttgattagtctagattggcttgtaatggtaaaacacaaagacaaaactgaggcagtgagcctcacaatgcctctactgatttctctactggcccttcctctgcacatggtcaattagaattgaaaatcctgtgctgatttcattcgctggaatttttaagcaggtcaggaagaaagatgttattgaaaggaaaagtctcatctaaataagaaaggagcacgtggccatctggtcttagctatacatataaaaagttatttca

SEQ ID NO: 525259 - DNA, 569 bp, Homo sapiens
cttgaaaattgcagatttcaccatcacctgtatgcgtatggtgctcagctagtggctgctcatgtctacgacacagaccttttacatgttctgtagattacggcagacctttagctctattacatttatttcagattaaagtttactgggttgtaaagggaattgagctgatataaaacaaaaacaaaagcaaattaggttttatgatattactttaattttcaggtctacggtgagattatttttagtgtaataaaatttcgaacaagtgaaatactagtaattgtggttatatattgcttattttatatatatatatgtrtaatttcttagttttcatcaatgagtctttttttccatcacttctcaaagggcttgttttaccttgtgtctttgtagagatagtgactacgtgtaggcagatggcctcactaagtcactgcttgagctcatgtatggtcactttttcctgtggatagtatttcacttaataattgggtatggccttatataacagaaatctcaaatgataatgactttaataaaattgaaattcattctgtcattct

SEQ ID NO: 525260 - DNA, 629 bp, Homo sapiens
tcattaatgctgtcacctggctttcctggacttatagcttggatctatttacataatgctgaattttatcaaaagacattgcacatccacgaaaatatacataaacatatacacaaatgctaggcaatgggctttgttagatatcgatgaatcgatgtaaaaatatgactaaataatgttttctatcataaattaatttacaattagtaaaggatacagcagctaaacaaattaattaatttaattgcaagtagcttcatgaacaggttcatgcgatgtctacatsatcaatcataagccctgtaccaaggcatatggttagaaaagggatagaaaaggaggtgggatgtcagaatccatcaacagatgtcacgagaagagccgagaagaaggaggagtcagagataaccctgaggtttctatcctaagtgactgggaaggcagaagggtctaaataaagcaatcaggtgtggcgggggagtaaatgattttaccttcagttatgtcgagttaaacgtgatcttggaccatgaagaaatgccaatgagccaacttcaaatttcagtattgcttcaaattatttgtttttcatctagtcttttaaatatgtaaccactttaaatctcatt

SEQ ID NO: 525261 - DNA, 619 bp, Homo sapiens
tttgcataggaatgtatgtccaaatacatggataaatgaatgcatgcaggcatgaataaatgagtgattctttccatgtggacactccaagcacgcacacatttacaggctgccccagcaagccaaatctctttatctttgaagaagctaamtattcaatatcttatgtcaagaatgcttccaaattagccccatgaagtatttgtactgaactatttttaacaatgtagacctcatcttagtggaaaagtgaagcatctgcatgatcaatgacggtgcagctttttaatagaatgtattttcaaaatttgtattaggattggtttcgaagaccgcaacaaaacaccacagcaattcctcccatgctcatttgcaatgtgacattgccacccctcccatcaagaggagtctgtttgtcttctccttgaattagggctggccttgtgatttgctgtggctgacagaatgccatggaaatgatgctctgccatacacaagaggcttgcagcttctgttttccctctcttggaaggcgaccctgagattgccatactgtgaagaagcttggaatgaaaataacatgtcaagagagagtcccagccatgccagacatccctgc

SEQ ID NO: 525262 - DNA, 590 bp, Homo sapiens
acttaaaactgtcaggcatctatttgccctaggtcagactctgggaggaaagccagtgataaagggtcagcctcagctttcaaattttggtgttaaagcccaagacagccaagtacctcacaggtcacctttatacctgtgcaacctcaggacatttctcttaactgggaattgtaacctgagcattgtgaaggccctgctgggaatgtttctaactgtmctgccctaaatagcttctcttcactgtctacttggctctcctgacggggaggcactgcagaacagccctttaagataattccatcctccttcacttgctattatgcttgaggttctttagtgaataaaagtcttattcatgtgtcataaaagtgaatcatttccaaagctgaaaaaagaaatgtatgacatactcaagttcttaagaaaattactcagtattaaacatgatcaacacttcccactcactcagcattttatgtagatcagaatattggagttggaaggccagctagcgagcatccaagcccacccactcacaaggctcagttaggctgctaccctgtgcatgcagatcacactgcagatca

SEQ ID NO: 525263 - DNA, 601 bp, Homo sapiens
aggtttgactgagtactgttctcgcaagtgaacctagcgggaaagctgaagaaggtgagatgaaaaggccatttaggtccagacctaatgagacacaggtaccattctattgaacccaaaaaggtatttgtgaaagggagtgacttaatccagtcagcgtcaaatcttaaatttaaaaagttagaatttgccactttggtagcagcatgaacaactcgttaaaaaggagaaatacacatagggaggagatcaggatagatcaattgtccagatgataaacaggaaaggtggcttgaactaagatgtgcctgagtgtgaagagaagaggggatagaagcaaaagtactactattacttttaagtgctttcgagcaggtkctctgctaactagcttatgggcatagactctagggctccttaggtatcccttagaaggacttggtagcagattagatgttaaggagagtcaggactcaaggacaagtgacttatcctagctttggccacagggtcaatgatgaagggggctaatgagtgtgttatttaaaacactgagtttgcagtacctgtgggccatccaggtagtgaggtctagtaggca

SEQ ID NO: 525264 - DNA, 630 bp, Homo sapiens
agtttctttacgtcctaaatgataaataatgtcacaggccagagtggcttctcagaagtgccatccaaaggtcaaagaacctaagaacactaaattttgagatgacaccgaatactgttagaacagctcagatctttcacaagtggcaaggcctcactgactacacttacttgataatggaaaagcatgggggttttgtgtcatgacttaaaaatggaatataagtttgtagtaaactttagcagatagtaagcacagagaggttcatgtgaacagaaatcatttgtattccttccccaggcttactcaggcaggacttcagtttcctctygtcctccaaatacttctagttgtctgcagagcatgcctcattcatgcactcaggaaaactctgctcagctgtactgtcaacagttctttttctcttctcctgctttgctcactttcatccctagcaggtgccatctcctgccagacaccagatctgccacccagcattgctgctcctaccaacaggttagggtttcgatgagccaaagctgcacaagtgtctatttcaaggtggggaggaatttcctggtggatgtttttctccaatgagattctactcagtgttacttcttgtcagaa

SEQ ID NO: 525265 - DNA, 630 bp, Homo sapiens
agtttctttacgtcctaaatgataaataatgtcacaggccagagtggcttctcagaagtgccatccaaaggtcaaagaacctaagaacactaaattttgagatgacaccgaatactgttagaacagctcagatctttcacaagtggcaaggcctcactgactacacttacttgataatggaaaagcatgggggttttgtgtcatgacttaaaaatggaatataagtttgtagtaaactttagcagatagtaagcacagagaggttcatgtgaacagaaatcatttgtattccttccccaggcttactcaggcaggacttcagtttcctcttgtcctccaaatacttctagttgtctgcagagcatgcctcattcatgcactcaggaaaactctgctcagctgtactgtcaacasttctttttctcttctcctgctttgctcactttcatccctagcaggtgccatctcctgccagacaccagatctgccacccagcattgctgctcctaccaacaggttagggtttcgatgagccaaagctgcacaagtgtctatttcaaggtggggaggaatttcctggtggatgtttttctccaatgagattctactcagtgttacttcttgtcagaa

SEQ ID NO: 525266 - DNA, 670 bp, Homo sapiens
aagatgtgttcttttgtctgtagaaaaacgattgccgacatgaatagcagctttgttaccttattacccaatgcaaataaaagaataatgaacagtcattttatgtgactagtaagaaagaaattatttactatgcttaaaatatgaactgagctattattctgtcattccacagaactctgagccagttgttgaagagctccactcagattgatcataagttagaaaagctcgtcaagttctatctgatgacaaaacaagttcggtcaaagaacaacccaggtagtcaatatagtaagaaagaaaagcaggcatcttttgtttgtctgaaataactatttgtttgtaacaccaggatatcatcttatatctagcctcagccttgggccaaattatgatccaaaggtttagtaaaaagaaatttgttctctccagaatttcagatttactgctgtatgttttctctctctattttctgctcaagaaaaggtaagakgcttctggactatgaagcaatcacgggaatccatgaagggcagaatgttgtaatgaaaaaaaatcccagcctgagaatcaggaacttgttttctaaccctatataacttctctggagctcatatctctggatgcaaaataagcataggaatcttttgggttccattaagctcta

SEQ ID NO: 525267 - DNA, 537 bp, Homo sapiens
ttctctgttcaagacaccaagaacccggacaccctccaccggtgacattatcagcctcatttttcctgcccatctggactcaggagggtcctggtaggtggggagggggtgctctaggttgagcatggttttcttcagaggcagcaggggttgtgggcctggagcccactgctggaccccaacacataccaccccattttaaaccagcccttgtcaaggtcccgtagcttaagtcattgacttatggcaccaaagtgtatttttaaattcttactgacccaaaaccagttctgaataaacaggcagttctcagggtggttagcagacacccgctccacccagcagctgcttagtaatcacaagctacctcccatgaagggggatcagcccctgttgctgccyctacaggaagtttcttctagaacccctgcaatgggaggcctggtccacgcaggactccaggctgtccttgaagctgatgatacaggaagctgagagacaggccgtgagccagaggggcaggtgtggaagggaggg

SEQ ID NO: 525268 - DNA, 573 bp, Homo sapiens
aaagttgtaggtaactggcaggtggcagccgagtctctgaaagcctggttgctcttagtaagagacaggtctgtaccctcctggtctctattatctactaatagataggtgatggtcctctctatctcccaggagaccataagcacagccgggggctgtgtgaccccaggagcacccgctaagaaggcctggccctggccaaatgagaagagactctggttcttggagaacagtggatgccccaaacagccctacctcttcygctgtcatcagagggtgctgcatacttggtctgggaaaaccataacactctcttccttctttgagaacctcacactttcttccccgctggacttcacaagacggagaggtcaatcaagttttctatataaatgatttgccccaaccctacactcgctatccttactacccatggatcaggcttctagcagttcaaaacccagatgctgttctttttccagggcacatggctagacccagtttcccttgcagttaggtgtgatcttgtgaccaagttctagccaatggaatgcggcacaggtgacacaccca

SEQ ID NO: 525269 - DNA, 548 bp, Homo sapiens
  misc_feature (1)...(548): n = A,T,C or G
ccttttgagttcccacagcctggggaccacccatggtgtcggtatatatatatataaatatatatataacctgcaatatnggtataaatatatataaatatatataaatwtggcatatatatggcagatatatatatatttatggcatatatatggcagatatatatatatttttttttttttttttttttttttagacagagtttcgctcttgttgcccaggctggagtgcagtggtgcgatctcggctcactgcaacctctgccttcccaggttcaagtgattctcctgcctcagcctcctgagtagctgggataacaggcgcccaccaccaagcctggctaattttttgtatttttagtagagacgtggtttcatcatgttgaccaggctggtcttgaactcctgacctcaggtgatccacccgccttggcctcccaaagggctgggattatagacatgagccaccgcatccggcccggtgtctgtatctttagaaacaatgacatcatcgcctggatgccagctctgtgggaccgctgttgtga

SEQ ID NO: 525270 - DNA, 548 bp, Homo sapiens
  misc_feature (1)...(548): n = A,T,C or G
ccttttgagttcccacagcctggggaccacccatggtgtcggtatatatatatataaatatatatataacctgcaatatnggtataaatatatataaatatatataaatttggcatatatatggcagatatatatatatttatggcatatatatggcagatatatatatatttttttttttttttttttttttttagacagagtttcgctcttgttgcccaggctggagtgcagtggtgcgatctcggctcactgcaacctctgccttcccaggttcaagtgattctcctgcctcagcctcctgagtagctgggatwacaggcgcccaccaccaagcctggctaattttttgtatttttagtagagacgtggtttcatcatgttgaccaggctggtcttgaactcctgacctcaggtgatccacccgccttggcctcccaaagggctgggattatagacatgagccaccgcatccggcccggtgtctgtatctttagaaacaatgacatcatcgcctggatgccagctctgtgggaccgctgttgtga

SEQ ID NO: 525271 - DNA, 635 bp, Homo sapiens
ggcgctgagaaactaagtaacttgctcagctcacacagcttgtaagtggtagagttgggatttgaatccaggtaccttgattgcagagctcaacatatgcacccracccctactccaggcctctctcatctcagcctcctccctgctgctggcctaagcctcttttggggctagcctgcaccatcaccgtggcaacctccagtaacccctcccattagcccacaacttgcagccaccctgtcttgttcacactttgagctctcagcccacactgttgctgagggggaccaagagggttatctcttgtcctgtgtttgcttaaacatgccaggcatcaggctactgtttttatttagagacatggtctcaccgttgcccaggctggagtgcagtagtacgatcatagctcactgtagcctctagctcccaggctcaagtaatgttcctgcctcagcctcctaattagttgggactacaggcgtgcaccatcacatgcggctgattttttaaatttttgatagagacaaggtctcactatattgcccaggctggtcttgaattcctggcctcaagcaatcctcctgtcttagcctcccaaagtgatgggattacgggaattagccactgcacccagc

SEQ ID NO: 525272 - DNA, 674 bp, Homo sapiens
tttttagttggtgtcaaacgcagtatagcacagtagtgctcagacattttagtcttgggcctctttatttattaatttttttgtagagctggggtgtcactatgttgcccaggctggtctcaaactcctgagctcaagtgatcttcccacctgggccckgaaagtgctgggattacaggagtgggccactgcacccggccaaacctctttatactctttaaattattgatcccaaagagcttttgttcatggtgggttatgtctattgatatttattgcattaaattaagatgagatgaaaggacatttttgatagttcacagaaagtgaaccagaggttttttggtgattttttttttttttttgagatggagttctgctcttgctgcccaggctggagtacaatggcatgatctcagctcactgcaacctctgcctcccgggttcaagcgattctcctgcctcagcctcccgagtagctgggattacaggcacccgtcaccacgcctggctaattttgtatttttagtagagacggggtttcaccacgttggccagactggtctcaaactcctggcctcaagtgatccacctgcatcagcctcccaaagttctgggattacaggcgtgaggcaccgcacctggctcagagttttcttgtgtttgcttaaaca

SEQ ID NO: 525273 - DNA, 674 bp, Homo sapiens
tttttagttggtgtcaaacgcagtatagcacagtagtgctcagacattttagtcttgggcctctttatttattaatttttttgtagagctggggtgtcactatgttgcccaggctggtctcaaactcctgagctcaagtgatcttcccacctgggccctgaaagtgctgggattacaggagtgggccactgcacccggccaaacctctttatactctttaaattattgatcccaaagagcttttgttcatggtgggttatgtctattgatatttattgcattaaattaagatgagatgaaaggacatttttgatagttcacagaaagtgaaccagaggttttttggtgattttttttttttttttgagatggagttctgctcttgctgcccaggctggagtacaatggcaygatctcagctcactgcaacctctgcctcccgggttcaagcgattctcctgcctcagcctcccgagtagctgggattacaggcacccgtcaccacgcctggctaattttgtatttttagtagagacggggtttcaccacgttggccagactggtctcaaactcctggcctcaagtgatccacctgcatcagcctcccaaagttctgggattacaggcgtgaggcaccgcacctggctcagagttttcttgtgtttgcttaaaca

SEQ ID NO: 525274 - DNA, 674 bp, Homo sapiens
tttttagttggtgtcaaacgcagtatagcacagtagtgctcagacattttagtcttgggcctctttatttattaatttttttgtagagctggggtgtcactatgttgcccaggctggtctcaaactcctgagctcaagtgatcttcccacctgggccctgaaagtgctgggattacaggagtgggccactgcacccggccaaacctctttatactctttaaattattgatcccaaagagcttttgttcatggtgggttatgtctattgatatttattgcattaaattaagatgagatgaaaggacatttttgatagttcacagaaagtgaaccagaggttttttggtgattttttttttttttttgagatggagttctgctcttgctgcccaggctggagtacaatggcatgatctcagctcactgcaacctctgcctcccgggttcaagcgattctcctgcctcagcctcccgagtagctgggattacaggcacccgtcaccacgcctggctaattttgtatttttagtagagacggggtttcaccacgttggccagactggtctcaaactcctggcctcargtgatccacctgcatcagcctcccaaagttctgggattacaggcgtgaggcaccgcacctggctcagagttttcttgtgtttgcttaaaca

SEQ ID NO: 525275 - DNA, 650 bp, Homo sapiens
ctgcacttttgtcgcgtctctaatagcacatgtcaggtctgccctacaccaggcactggggcaggaaagggcgtctcactgcagaccatgggccgctccagaggggctgcctgacttctctgtgttccccttggtccagcgccgcacacagggaggtgttcatgatggatttgtcaaaaacgtgtaaaagtaaccctggctacagtagtctccccttaccccacaggggataccttagacccccagygaatgcccaaaaccgtggaaccctatacataacgtgcacacatttctttttccttcacgatttcacagatgggagatttgttcttagcatagatcttagcaacctcagcatacgattttttttctaagtcaagaatgttcaccttttcactttaagaaagcacttcatggcttctctttggcatatcccaatggcatattaatcatcactactcttaagctttggggccatcactaagtaaaacaagggtgccttgaacacaagcactgagataccttgaccactgagactgcctaagtgactaacgggcgagtagcgtgggcagcctgcagcccccggacaaagggaggattcatgtcccaggcagcacagagtgggatgggtgcgcgattccgtcatgcta

SEQ ID NO: 525276 - DNA, 537 bp, Homo sapiens
gattctgaagcttggggtccattcccaggccggccactggcaccgtgatagaagcacaggctttagagtgagctgatactaggtttaatcctggccctatctttctggagaagatagcatggccagttaacccagatcttgtgtctccatgtttacccctttcctcgctgttccaacaggtcttgctagcggcccgccctattttattcccctttcaagcgggccatgaaggtaccacatcaagctactgttgcctgcatcatagcaatgaggcaggtgggtgaggcatcttccctggaggtgagggggctgggaagactagaggcagggctaggcaggatggaagtcaggagtggtggacagggagggctgttttctgtttaaagcagtcagtggtggaggaagtaggtcagtggtggaggtaggcgggactcgggctggagtctgcctctctgtggggtmactcacagctcccagggctcaacaaagagctgctgggctgcataccacacctcgggtagcaaggccatagactac

SEQ ID NO: 525277 - DNA, 640 bp, Homo sapiens
atcagtttagaaaactctgtttagtgccctggctttgaactctgtaatcttctttaagtcttctaagtattctccctccctttgccacaccttgtggggaagggaagcctgtggacttycctgtcgtctgtctgtttcagtgtgaagctactgactgttagtttgctgttaaagcaaactaaatacggcctgagaagaactccatacttctatatttgagtccctgtggatgtaacctagctgtagaaaacaacatatatggtggtccattttcaagacaaaataccttgaatacacttcgacctgtaagctatagaagaacaggataccctagggccctgctttaatagccagtgcctgcttattgggaccctttagttaccctcacccaaaccagaggatttagcttagaatggaagtttactagcttgcaaaaatagctcaccttgtctattcctaacagctcgcttaaccccctgggtcataggtcaaatacttgaagagtcccagagctgactacaattacaatgcattaagggctgcaacaaaatgcagcaagaagaccctgaagaaagtaccaaaagccccaacccaacgaccaataaaaaacaagaaaagaaacttaggtgactacgtccag

SEQ ID NO: 525278 - DNA, 640 bp, Homo sapiens
atcagtttagaaaactctgtttagtgccctggctttgaactctgtaatcttctttaagtcttctaagtattctccctccctttgccacaccttgtggggaagggaagcctgtggacttccctgtcgtctgtctgtttcagtgtgaagctactgactgttagtttgctgttaaagcaaactaaatacggcctgagaagaactccatacttctatatttgagtccctgtggatgtaacctagctgtagaaaacaacatatatggtggtccaytttcaagacaaaataccttgaatacacttcgacctgtaagctatagaagaacaggataccctagggccctgctttaatagccagtgcctgcttattgggaccctttagttaccctcacccaaaccagaggatttagcttagaatggaagtttactagcttgcaaaaatagctcaccttgtctattcctaacagctcgcttaaccccctgggtcataggtcaaatacttgaagagtcccagagctgactacaattacaatgcattaagggctgcaacaaaatgcagcaagaagaccctgaagaaagtaccaaaagccccaacccaacgaccaataaaaaacaagaaaagaaacttaggtgactacgtccag

SEQ ID NO: 525279 - DNA, 640 bp, Homo sapiens
atcagtttagaaaactctgtttagtgccctggctttgaactctgtaatcttctttaagtcttctaagtattctccctccctttgccacaccttgtggggaagggaagcctgtggacttccctgtcgtctgtctgtttcagtgtgaagctactgactgttagtttgctgttaaagcaaactaaatacggcctgagaagaactccatacttctatatttgagtccctgtggatgtaacctagctgtagaaaacaacatatatggtggtccattttcaagacaaaataccttgaatacacttsgacctgtaagctatagaagaacaggataccctagggccctgctttaatagccagtgcctgcttattgggaccctttagttaccctcacccaaaccagaggatttagcttagaatggaagtttactagcttgcaaaaatagctcaccttgtctattcctaacagctcgcttaaccccctgggtcataggtcaaatacttgaagagtcccagagctgactacaattacaatgcattaagggctgcaacaaaatgcagcaagaagaccctgaagaaagtaccaaaagccccaacccaacgaccaataaaaaacaagaaaagaaacttaggtgactacgtccag

SEQ ID NO: 525280 - DNA, 640 bp, Homo sapiens
atcagtttagaaaactctgtttagtgccctggctttgaactctgtaatcttctttaagtcttctaagtattctccctccctttgccacaccttgtggggaagggaagcctgtggacttccctgtcgtctgtctgtttcagtgtgaagctactgactgttagtttgctgttaaagcaaactaaatacggcctgagaagaactccatacttctatatttgagtccctgtggatgtaacctagctgtagaaaacaacatatatggtggtccattttcaagacaaaataccttgaatacacttcgacctgtaagctatagaagaacaggataccctagggccctgctttaatagccagtgcctgcttattgggaccctttagttaccctcacccaaaccagaggatttagcttagaatggaagtttactagcttgcaaaaatagctcaccttrtctattcctaacagctcgcttaaccccctgggtcataggtcaaatacttgaagagtcccagagctgactacaattacaatgcattaagggctgcaacaaaatgcagcaagaagaccctgaagaaagtaccaaaagccccaacccaacgaccaataaaaaacaagaaaagaaacttaggtgactacgtccag

SEQ ID NO: 525281 - DNA, 487 bp, Homo sapiens
tgttttcagagttatcagcattgagtaccatgctgagcacacgttttgcttctacctgggcttactactcaaataaactaatatatttaccaatgtttaarattatagaatatacagatttgattttaattaaacagaatcattattctgacaaagtttatagcaacagtaattgtgttttataatgtttctgcttagatgtagttttcagaatctttttggtaacttgaaaccttaacggtatactaagttaaattaaatggcaggtattcactgaaaatctagatcacttctaagtaggataaaatattaacacattaattgctgatcataagtttatctgcttttagcttcttattttttacaaatgctaaagacatttgggtttgttaaaaaggatgttctttttgccacattggggaatcatactaagaagaatttgcatctagaaattgtgagattgtatattcacaaaatttgctaaaat

SEQ ID NO: 525282 - DNA, 598 bp, Homo sapiens
gcaggtcatcttccctgatgtcaggctgtcacctccctgaagtcaggtcgtctcctcctctactgactgagtctggggtctttataggcaaaaggttraggcaaagacaccactcaaagttggatatgacggtgtagaagaccaattaggaaagggtagggatatgtaaaataggtgaagggtggggatcaataagaggaaagcgcatcgaacaggaagacaagttctcaatctggtcggaggatttaacttgtagcttggctttcaggctttaaactgtctttggcttggaggtggggtttcaccagggacctgccctatctgtctaggcatttggctgcctcctatcattatcaatatgtggtcacaaacatttattgaaataaagcctgatttgtggtttgaggcatctttcagcatttcctaaaaagaataagcttgcctaaaatctgaactacatgaagtggttagtttattgttgtttttcacactttcaatctagtagtggttagattaatggaaattaaggattctcgcttactgaatctgactggatggggagataaagaatgttatccatgggtaaaagaaattacag

SEQ ID NO: 525283 - DNA, 598 bp, Homo sapiens
gcaggtcatcttccctgatgtcaggctgtcacctccctgaagtcaggtcgtctcctcctctactgactgagtctggggtctttataggcaaaaggttgaggcaaagacaccactcaaagttggatatgacggtgtagaagaccaattaggaaagggtagggatatgtaaaataggtgaagggtggggatcaataagaggaaagcgcatcraacaggaagacaagttctcaatctggtcggaggatttaacttgtagcttggctttcaggctttaaactgtctttggcttggaggtggggtttcaccagggacctgccctatctgtctaggcatttggctgcctcctatcattatcaatatgtggtcacaaacatttattgaaataaagcctgatttgtggtttgaggcatctttcagcatttcctaaaaagaataagcttgcctaaaatctgaactacatgaagtggttagtttattgttgtttttcacactttcaatctagtagtggttagattaatggaaattaaggattctcgcttactgaatctgactggatggggagataaagaatgttatccatgggtaaaagaaattacag

SEQ ID NO: 525284 - DNA, 556 bp, Homo sapiens
gctgatcaacttattatacaaagcctcttaaatcagctcatgtagcattctattaatttaatgcacgccacatgatggtgattaaatcttccacgttggaagcagaatgtgctatatagtttcagaagaagaggttaaacaaaaattctgatctccccacatgacccaaaaataataccttttctagaagttgctttaaagaaacccaccatggtactaaagggaaagggttgccaaatctctaaaggtttgaaagaaaaatactgtggaccgtaggggggtaatgagaacttctgaattatataattagttcctgagtacccaagactatttaaaatgcaatttgctgattggaaagaaaagaaataatgaagtacaaagaggataaatgaagacaccacacgttaagccagtgaactttcatagtatgggagaaaagaaagaaggamaaaccctgtctgttcacgttctaagcattcatgattttcaagaggatcagatgaacaatacttttttgctctggttttacaaataggtacaggatccttggctctct

SEQ ID NO: 525285 - DNA, 618 bp, Homo sapiens
gacaatctcatggcctgcacagccttccacatcccttttaaggttcagcttgcacrctgccattaagatacagacttcctatttccccaaacaagatctatttcttcccagttcaaatttctcttggtctgtatatattggagagaaaattcatcatggtttatacataatgatctgtatatttgtttgttccctcctcccagacaggcaaccacaagaagaaaccacaccaaaaaaagtgttttgttcttcttgtcatctgcacaggatctaatatagtgtctcgctcttgatttcagttgcattaaattcgtatggacagtgtagaaatatgagcagaatgagcacatgattagatggattcatagctggtaaatcaaccttaaagaatgggttgaaactaacatggttggaataccatatgagtaggtatctgaaatcagcaatattcaaatgtaagatgagggaaatactactcaaaagtctttgtaggaaaaaaagaaccatttgcctcaactctccctaattgtatgaccttagacaatttacataaccactttgggcctttatttcatcctttatataatattatgctttacgactgatacatgtaatgtg

SEQ ID NO: 525286 - DNA, 618 bp, Homo sapiens
gacaatctcatggcctgcacagccttccacatcccttttaaggttcagcttgcacactgccattaagatacagacttcctatttccccaaacaagatctatttcttcccagttcaaatttctcttggtctgtatatattggagagaaaattcatcatggtttatacataatgatctgtatatttgtttgttccctcctcccagacaggcaaccayaagaagaaaccacaccaaaaaaagtgttttgttcttcttgtcatctgcacaggatctaatatagtgtctcgctcttgatttcagttgcattaaattcgtatggacagtgtagaaatatgagcagaatgagcacatgattagatggattcatagctggtaaatcaaccttaaagaatgggttgaaactaacatggttggaataccatatgagtaggtatctgaaatcagcaatattcaaatgtaagatgagggaaatactactcaaaagtctttgtaggaaaaaaagaaccatttgcctcaactctccctaattgtatgaccttagacaatttacataaccactttgggcctttatttcatcctttatataatattatgctttacgactgatacatgtaatgtg

SEQ ID NO: 525287 - DNA, 618 bp, Homo sapiens
gacaatctcatggcctgcacagccttccacatcccttttaaggttcagcttgcacactgccattaagatacagacttcctatttccccaaacaagatctatttcttcccagttcaaatttctcttggtctgtatatattggagagaaaattcatcatggtttatacataatgatctgtatatttgtttgttccctcctcccagacaggcaaccacaaraagaaaccacaccaaaaaaagtgttttgttcttcttgtcatctgcacaggatctaatatagtgtctcgctcttgatttcagttgcattaaattcgtatggacagtgtagaaatatgagcagaatgagcacatgattagatggattcatagctggtaaatcaaccttaaagaatgggttgaaactaacatggttggaataccatatgagtaggtatctgaaatcagcaatattcaaatgtaagatgagggaaatactactcaaaagtctttgtaggaaaaaaagaaccatttgcctcaactctccctaattgtatgaccttagacaatttacataaccactttgggcctttatttcatcctttatataatattatgctttacgactgatacatgtaatgtg

SEQ ID NO: 525288 - DNA, 528 bp, Homo sapiens
aatcaaacagtagactctgagaaaactttgacttgacttacttttgttcagaaaaatcaaccttcgaattacatatttattccagtttcaaaatgacataattaacaaggtcaaaaatctgttaaatggtactacaggttttgcacatcctctacttttagagagcagcctttatgactccgtctctgtaagtgctggtacttaccttgctcagtgacttctgatacactaaaaaagtaaaaatcactagaaatttgcattctaggttaaagggcgtttatgttttcctttgtccagtcataaagwtttcttactgaatgatgactgtaagatgcttgcattctccttcatgtctttttttccttagctggtccccaacccaccacactttcacatacatccctgagaaagaggcctttggccctcatgtgtcacctaaggtgatgtgcttcaactaacatcaagaaaatatcatgtgataagcaaggtgacctctgtggaccactagcacagtcctcaggagaacag

SEQ ID NO: 525289 - DNA, 528 bp, Homo sapiens
aatcaaacagtagactctgagaaaactttgacttgacttacttttgttcagaaaaatcaaccttcgaattacatatttattccagtttcaaaatgacataattaacaaggtcaaaaatctgttaaatggtactacaggttttgcacatcctctacttttagagagcagcctttatgactccgtctctgtaagtgctggtacttaccttgctcagtgacttctgatacactaaaaaagtaaaaatcactagaaatttgcattctaggttaaagggcgtttatgttttcctttgtccagtcataaagatttcttactgaatgatgactgtaagatgcttgcattctccttcatgtctttttttccttagctggtccccaacccaccacactttcacatacatccctgagaaagaggcctttggccctcatgtgtcacctaaggtgatgtgcttcaactaacrtcaagaaaatatcatgtgataagcaaggtgacctctgtggaccactagcacagtcctcaggagaacag

SEQ ID NO: 525290 - DNA, 655 bp, Homo sapiens
ctgtcttctcttgtggtgtcctcacatggcagaaggagcgagggagctctctgggatctcttttataagggcactaatcccattatgagggctctgtcctcatgacctgaccacctcccaaaggccctgcctctgaataccgtcacattgggagttaggtctcaatgtttgaatgttgtgagggttataaacattcagcctatagcaatgatttacataaagtttgtggaatgagactgataaagtaattaccaatagccagtcaggttggtatcagaaaatttcttgctgtagtatgttagctacgtgagataaactttttgaagattaaacaaaccacagcagggatataggtgaatgaatgcaccattgtgccactgattaactyttctcccatttcttattcatatactacttagataaaataatactctttaatttttttaaagccataataataattccattacactaatcagtactaatcagtgctggagaacgatgaacaatctgatgtcaggcatccaaatgtactaaattcatccaaaccatcagttttaaatcatttatttccctacccaggttcttcataatttctattctgccatcttagaagttatttagttaaaaacagttcaatacattcaaatctaca

SEQ ID NO: 525291 - DNA, 620 bp, Homo sapiens
gaataagatcagatttggaaaagtgacaatatacattctgcatctattatgtgtgtgtgttacatgtacatattacatatatatatgtatgtataaagattaaaagacatatacaaatctatctttacagagtatcacaccccaatcatgcctgctatatttttagtagttgtggcatctgcaaagctacaacaaaaattcaaaaattaaaagaaacaaaaagacaacaaataggtctttgaaatccatgccaaagaagagcctttttagcttgaactaagccaaagtgttcaatttgtctctgccccagaygaaacagtttccatttggaatgctatatgaagatgttttgcttttgtggagataattggctctaagcagtcatagtaattaacagcatcaggtagctcaggcagcatttggttgcccattgcctatttatttgtgagcaaatgggagggggtacgggtgatgggaacagatggggaagagacacaagtgcttcattggcaccttgcacggatgcctcatgctgactttctccctctggcaccatcattagtgcctctggcttcagagccaggtctgaagagcccgtgggcaagtgcagatgccaccag

SEQ ID NO: 525292 - DNA, 620 bp, Homo sapiens
gaataagatcagatttggaaaagtgacaatatacattctgcatctattatgtgtgtgtgttacatgtacatattacatatatatatgtatgtataaagattaaaagacatatacaaatctatctttacagagtatcacaccccaatcatgcctgctatatttttagtagttgtggcatctgcaaagctacaacaaaaattcaaaaattaaaagaaacaaaaagacaacaaataggtctttgaaatccatgccaaagaagagcctttttagcttgaactaagccaaagtgttcaatttgtctctgccccagatgaaacagtttccatttggaatgctayatgaagatgttttgcttttgtggagataattggctctaagcagtcatagtaattaacagcatcaggtagctcaggcagcatttggttgcccattgcctatttatttgtgagcaaatgggagggggtacgggtgatgggaacagatggggaagagacacaagtgcttcattggcaccttgcacggatgcctcatgctgactttctccctctggcaccatcattagtgcctctggcttcagagccaggtctgaagagcccgtgggcaagtgcagatgccaccag

SEQ ID NO: 525293 - DNA, 576 bp, Homo sapiens
atgcaagtagggtatgatagacccccacccttgctgttaggatggccacatgacccaggcttagccaaactagagcattccatccaactagctgcagtgacttatccagacaggtacatgtgtcccaacccaggtccttcttagccattggggatcacctccaggattattgctgcaacgactatgaaagagatataattctcccctggagttgctgagtttagaagataaaggctgggatgtgaaactaccaggttggsaatgcttgcctgagaataaaatcagtgttttgcaaagaagagctgagatggcttttatatccaaccatacctgatctccaaatgaatttttcatttaagtgaaataagttcccccaatatgtttaagccaattagtggttggatttctgtcactgactccctaaacaatcaaaacaaattccaaattgggaaagaaattgtaagtaaaagaccctaacaagagtgattagctgagaggatctaggaggaggttcatggagacctaccaatactaagttgagaggctgatctgcattcttcttaggtgattgcacag

SEQ ID NO: 525294 - DNA, 552 bp, Homo sapiens
gcctctggaatgaagccaaaggaaagtgatagtcacagggtcttggccagcctgagggcatgctggctctccttgtcttgagaaagctgtggcagtcgccccacacgtgccaggctgtgtgaggcacctgagaggtgctgtgcagaacagccacacggcactctgccctctggacacagcctcccggggcagggcccacggcgttttcaccgtgtccccagcacctactacacagcccagcacacaggagcaattcacaaatagtggctgaatgagtaagacgaaaaataaataattttcacaataacctagcaaagaaggtgctgcttttatcatttcatggatgagaaaagtgaggtttccataagttaagtaacttgctagagtaacacatctattgactgagctgagatttgaactcagttctgccctaagccaaggttctgttgcctccagrgtccgccagacaatgccagcggtctcttgaaataatttttcttgattaaaagaaaatccaagtgaaaaccacaacaaaaacacagaaaagggcag

SEQ ID NO: 525295 - DNA, 604 bp, Homo sapiens
aaagacaatctttttgttttttaaactcaccaagtacatgtatcagcacagcagctagtctggcagctataaaaatacaattatgcaaattaggtatgtgttccctgaagagtcctaataggatgattgacctatatatggcttaatttgctttcawgagccctctttattgtctttcatttgcacaagaaattaaaacctgttaaattctattgctccccaattacttatcaaaggtgctttgtcattccatgtaaaaaataatcaatagctttttcatgctattttctctgaaaatgcaactatggtgctagaagatagcacaatttccaaccatacatttgaataatctcttttttaatcaacatatcacttatgaaatgacagtgagttttaaaggtatgtggttgagagatcacagaatcactaggttacatagacaatttgcttgctagtgtttttgatcatatgtatataatatctactatttggaaatctgttcatctctaagcaggaaaaactatttggttatagccacatgggcattctactggtttagcttttggcatcactaaaaatctttatagtgataaggtttgatttc

SEQ ID NO: 525296 - DNA, 580 bp, Homo sapiens
gcgctgcaggcctgccatcagggaggatggagtcactctcagtgggagcagcataaacaggaagttttgaggcacatggtttgctcatgctttggtcccatagaagccctcagcagaatctgttggtggtatttgtctttggggtgcatgayagtgtccggccttctgcttttctcctttgcccaatggcaagaagggtggtgtcagccctagggaaggacttactcatttgagggctggcctttcagaatccctttagcatattcttatagggacagcttaataataaaatcccttagcttttgtatatctgggaatgtattcatttctcccttgcatgcgaatcactgtttaagtagatatagaattcttagttgacattttattttcctttcagtactttaaatatatcattccattactttcttgcctgaaagattttagctgaaaaatctactaataaacttaccgtatatttctattatgtgatcaatcacttttttcttgctgctttcaaaataatctctttgtcttctgacagtttgattatagtgtatgttggtgtgggtttctgtgttta

SEQ ID NO: 525297 - DNA, 580 bp, Homo sapiens
gcgctgcaggcctgccatcagggaggatggagtcactctcagtgggagcagcataaacaggaagttttgaggcacatggtttgctcatgctttggtcccatagaagccctcagcagaatctgttggtggtatttgtctttggggtgcatgacagtgtccggccttctgcttttctcctttgcccaatggcaagaagggtggtgtcagccctagggaaggacttactcatttgagggctggcctttcagaatccctttagcatattcttatagggacagcttaataataaaatcccttagcttttgtatatctgggaatgtattcatttctcccttgcatgcgaatcacwgtttaagtagatatagaattcttagttgacattttattttcctttcagtactttaaatatatcattccattactttcttgcctgaaagattttagctgaaaaatctactaataaacttaccgtatatttctattatgtgatcaatcacttttttcttgctgctttcaaaataatctctttgtcttctgacagtttgattatagtgtatgttggtgtgggtttctgtgttta

SEQ ID NO: 525298 - DNA, 469 bp, Homo sapiens
cttctgacacggcatggtagacaagtgtgaggtctcagaagaggctgcctcagccatggtcccacttccagttacatgtgtgtcctcagacttgctcagaagaggctgcctcagccatggtcccacttccagttacrtgtgtgtcctcagacttgccacttgaacctctctgggtgtagaaacaagggatgaaattacctccaaggacttctctgtggtcacattctgtgaaaggctattggatttaattctctgtggttcaccttccctgactttggtaaaaatgatggttgaaagaatggatgaatttttatttgtagaatcaccttcttttaatgtcaaagaagctttattccaaaggaataaaaaaattgagtggtctcgttcccaggatatacatacactctgctgaacaggttttgaaccgtgtaataccttagaggtatgtctcacccccctggagggtgca

SEQ ID NO: 525299 - DNA, 469 bp, Homo sapiens
cttctgacacggcatggtagacaagtgtgaggtctcagaagaggctgcctcagccatggtcccacttccagttacatgtgtgtcctcagacttgctcagaagaggctgcctcagccatggtcccacttccagttacatgtgtgtcctcagayttgccacttgaacctctctgggtgtagaaacaagggatgaaattacctccaaggacttctctgtggtcacattctgtgaaaggctattggatttaattctctgtggttcaccttccctgactttggtaaaaatgatggttgaaagaatggatgaatttttatttgtagaatcaccttcttttaatgtcaaagaagctttattccaaaggaataaaaaaattgagtggtctcgttcccaggatatacatacactctgctgaacaggttttgaaccgtgtaataccttagaggtatgtctcacccccctggagggtgca

SEQ ID NO: 525300 - DNA, 469 bp, Homo sapiens
cttctgacacggcatggtagacaagtgtgaggtctcagaagaggctgcctcagccatggtcccacttccagttacatgtgtgtcctcagacttgctcagaagaggctgcctcagccatggtcccacttccagttacatgtgtgtcctcagacttgccacttgaacctctctgggtgtagaaacaagggatraaattacctccaaggacttctctgtggtcacattctgtgaaaggctattggatttaattctctgtggttcaccttccctgactttggtaaaaatgatggttgaaagaatggatgaatttttatttgtagaatcaccttcttttaatgtcaaagaagctttattccaaaggaataaaaaaattgagtggtctcgttcccaggatatacatacactctgctgaacaggttttgaaccgtgtaataccttagaggtatgtctcacccccctggagggtgca

SEQ ID NO: 525301 - DNA, 469 bp, Homo sapiens
cttctgacacggcatggtagacaagtgtgaggtctcagaagaggctgcctcagccatggtcccacttccagttacatgtgtgtcctcagacttgctcagaagaggctgcctcagccatggtcccacttccagttacatgtgtgtcctcagacttgccacttgaacctctctgggtgtagaaacaagggatgaaattacctccaaggacttcyctgtggtcacattctgtgaaaggctattggatttaattctctgtggttcaccttccctgactttggtaaaaatgatggttgaaagaatggatgaatttttatttgtagaatcaccttcttttaatgtcaaagaagctttattccaaaggaataaaaaaattgagtggtctcgttcccaggatatacatacactctgctgaacaggttttgaaccgtgtaataccttagaggtatgtctcacccccctggagggtgca

SEQ ID NO: 525302 - DNA, 425 bp, Homo sapiens
aacaaaacaaattattgctttgacctgacgtagcattttagttgaggtttactatgcagtttattgaagccattctcttgttaccttcagagttattactgccattattttgttgcttgataaactgaggcctgataaaaggttcagattaaggtcatgctgcagaaattcaagaacttgtgctgtgccctgattctggaatgctggaatccttgggtttctatttattcgtctgctactgtattttgttttcttttttaagaagcttgcttttgaaaggcaggccttaagtgggaggtattcagtgtttttamtgcagggacaggcctaagtgtctaaaatgccttcctaaatgtctgtgagattgtataggaatgaaccattaatgtttatgactgcatggtaggataggtcatttattcttt

SEQ ID NO: 525303 - DNA, 466 bp, Homo sapiens
atttgtgctgtaggaaggcgcagtgagggtggagccatgggaagacaaggcggaaacctggctctcaggagacagttatgatgaacaaatatgattttaaaatactcttaaattgaaaaaaaaacaacaaagacataatagggagaagacagcagaatgcaaaatctacttaatttttttttttttttggagacagcgtcttgctctgttacccagactggagtgcagtagtgcratcgtagctcactgcagcctccaactcctgggttcgagtgatcctcccatctcagtctcacgagtagctgggactacaggtgtgtgccaccatgccacacctggctaattaaaaaactttttttgtagagatgggggtctcagtgtggtgccgaggctggtcttaaacttttggctcaagtgagcctcctgcctcagcctctagaagcgctgggattacaggcttgagctg

SEQ ID NO: 525304 - DNA, 617 bp, Homo sapiens
cctgtgggcatcaccattgagatgcacagcctcctggaaggggtgttcatacatagactgaggaacagggaaaaaggtattatccccacattttatttatcacattccttctcacaacattctttctggcaagtcccagttctaggggaaggaaggcagacataattctatgtctggagtatttgtataaaaccaaaaaatgggaaggcctggaaatttcgctgtctcctcactcccttgcccstgtgtgtgtgtgtctgtgtgtgtgtgtgtgtgtgtgtgtggcactgcaggacatgtcaaactaaagtttatgtacttaaaatcacctttaaagtgtataatggaaaggttttttgtttgagtcatttgtttgcaaaccccgaagaggagtctttcattgcggtgccccgttctcccgttgacagaagcaggtggacccgtgaggggaagaggagggtgcaagcagaacagccctggaacagtgtcacgctgctgggcacttcctgtctcctattccatttcatccataaacacagcctttccgggctgtgagcctccttttgtggatgaggaaactggggctcagggagatgaagtagctagctagtactgca

SEQ ID NO: 525305 - DNA, 617 bp, Homo sapiens
cctgtgggcatcaccattgagatgcacagcctcctggaaggggtgttcatacatagactgaggaacagggaaaaaggtattatccccacattttatttatcacattccttctcacaacattctttctggcaagtcccagttctaggggaaggaaggcagacataattctatgtctggagtatttgtataaaaccaaaaaatgggaaggcctggaaatttcgctgtctcctcactcccttgcccctgtgtgtgtgtgtctgtgtgtgtgtgtgtgtgtgtgtgtggcactgcaggacatgtcaaactaaagtttatgtacttaaaatcayctttaaagtgtataatggaaaggttttttgtttgagtcatttgtttgcaaaccccgaagaggagtctttcattgcggtgccccgttctcccgttgacagaagcaggtggacccgtgaggggaagaggagggtgcaagcagaacagccctggaacagtgtcacgctgctgggcacttcctgtctcctattccatttcatccataaacacagcctttccgggctgtgagcctccttttgtggatgaggaaactggggctcagggagatgaagtagctagctagtactgca

SEQ ID NO: 525306 - DNA, 617 bp, Homo sapiens
cctgtgggcatcaccattgagatgcacagcctcctggaaggggtgttcatacatagactgaggaacagggaaaaaggtattatccccacattttatttatcacattccttctcacaacattctttctggcaagtcccagttctaggggaaggaaggcagacataattctatgtctggagtatttgtataaaaccaaaaaatgggaaggcctggaaatttcgctgtctcctcactcccttgcccctgtgtgtgtgtgtctgtgtgtgtgtgtgtgtgtgtgtgtggcactgcaggacatgtcaaactaaagtttatgtacttaaaatcacctttaaagtgtataatggaaaggtkttttgtttgagtcatttgtttgcaaaccccgaagaggagtctttcattgcggtgccccgttctcccgttgacagaagcaggtggacccgtgaggggaagaggagggtgcaagcagaacagccctggaacagtgtcacgctgctgggcacttcctgtctcctattccatttcatccataaacacagcctttccgggctgtgagcctccttttgtggatgaggaaactggggctcagggagatgaagtagctagctagtactgca

SEQ ID NO: 525307 - DNA, 617 bp, Homo sapiens
cctgtgggcatcaccattgagatgcacagcctcctggaaggggtgttcatacatagactgaggaacagggaaaaaggtattatccccacattttatttatcacattccttctcacaacattctttctggcaagtcccagttctaggggaaggaaggcagacataattctatgtctggagtatttgtataaaaccaaaaaatgggaaggcctggaaatttcgctgtctcctcactcccttgcccctgtgtgtgtgtgtctgtgtgtgtgtgtgtgtgtgtgtgtggcactgcaggacatgtcaaactaaagtttatgtacttaaaatcacctttaaagtgtataatggaaaggttttttgtttgagtcatttgtttgcaarccccgaagaggagtctttcattgcggtgccccgttctcccgttgacagaagcaggtggacccgtgaggggaagaggagggtgcaagcagaacagccctggaacagtgtcacgctgctgggcacttcctgtctcctattccatttcatccataaacacagcctttccgggctgtgagcctccttttgtggatgaggaaactggggctcagggagatgaagtagctagctagtactgca

SEQ ID NO: 525308 - DNA, 558 bp, Homo sapiens
gctggaaacggggaagctggatttggagtttgcctgactgcagagaggcacctctgttcccgtggtgtctctgctttccttgcagggcagtgcacatttcttggttttccttttaaagccgtgaaattctggaaaatcactaggcatgctgtctctcaagatgcttctgtgacacacacacmcacacacacacacacacacactcacacactcttccaaatccatgtactttagggaacagtggtaacgtgatgcttttggtcattcttgtgtcatttcaattagttggaggtggactcccttcatggtcttagagtgggcagggctttttcctgccacccacaagttgagtgtgtccatcagaggtcaccagcctgcgtcggatcttgaataccagtttggtaaaggatgtgagtgtgtgcgtgtgcttagttagaatgtggccccagacagcctcacgttgccctcccggcaggctctcatgttctgtgctcataagacacccttcacactgctgatttatgctaaaagtatcctaatgtttctgacagctcatgt

SEQ ID NO: 525309 - DNA, 671 bp, Homo sapiens
ggaagctggatttggagtttgcctgactgcagagaggcacctctgttcccgtggtgtctctgctttccttgcagggcagtgcacatttcttggttttccttttaaagccgtgaaattctggaaaatcactaggcatgctgtctctcaagatgcttctgtgacacacacacccacacacacacacacacacactcacacactcttccaaatccatgtactttagggaacagtggtaacgtgatgcttttggtcattcttgtgtcatttcaattagttggaggtggactcccttcatggtcttagagtgggcagggctttttcctgccacccacaagttgagtgtgtccatcagaggtcaccagcctgcgtcggatcttgaataccagtttggtaaaggatgtgagtgtgtgcgtgtgcttagttagaatgtggccccagacagcctcacsttgccctcccggcaggctctcatgttctgtgctcataagacacccttcacactgctgatttatgctaaaagtatcctaatgtttctgacagctcatgtgtgacatgaatataatccatatttcttacagcagctaatccaagtggcttattttcctatactgctgatagggctatatctcttgatgtcgcagccctggagattgtgatggtgacatattgtt

SEQ ID NO: 525310 - DNA, 623 bp, Homo sapiens
tgctgaaaaatgaataaggtgtgtatttcagaaggtgaacggggctttttgggtgaagccctttgcgtaggtgaagtctgtaggctcagacagttcacggtgtgtgcttaggtgagcttgggaacaggcatcccatttagatggttcgaaaagaagcatctattaaaactaaagccatcatttaatgagggtaaaagtcaaccccagccttcacacccagcaccaccagaagacmcagaattctacagcctgtgaagagtcctacctttataaaaaggtttctgttcagaaaaccaaaggtttaccccaaatacagcttttgccatttaaaagactgtaagccacatatgaataccaagggagtttttttgtttctgtttttttttgaaacagggtcttaatctgtcacccaggttggagtcagcagggcaaacatagcttactgcagccttgacctgctgggcttaagcgatcctcccacatcagcctcctgagtagctgggaacacaggtgtgcaccaccatgcctgcctaattttttaaattttttgtagagatggagtctcaccatgttgcccagactgttctccaacccccgggctcaaataatccttcctcctcagc

SEQ ID NO: 525311 - DNA, 623 bp, Homo sapiens
tgctgaaaaatgaataaggtgtgtatttcagaaggtgaacggggctttttgggtgaagccctttgcgtaggtgaagtctgtaggctcagacagttcacggtgtgtgcttaggtgagcttgggaacaggcatcccatttagatggttcgaaaagaagcatctattaaaactaaagccatcatttaatgagggtaaaagtcaaccccagccttcacacccagcaccaccagaagacccagaattctacagcctgtgaagagtcctacctttataaaaaggtttctgttcagaaaaccaaaggtttaccccaaatacagcttttgccatttaaaagactgtaagccacatatsaataccaagggagtttttttgtttctgtttttttttgaaacagggtcttaatctgtcacccaggttggagtcagcagggcaaacatagcttactgcagccttgacctgctgggcttaagcgatcctcccacatcagcctcctgagtagctgggaacacaggtgtgcaccaccatgcctgcctaattttttaaattttttgtagagatggagtctcaccatgttgcccagactgttctccaacccccgggctcaaataatccttcctcctcagc

SEQ ID NO: 525312 - DNA, 342 bp, Homo sapiens
tttggacaactcacttgacctctttgggcctcagtctggtcatctgtaaraagaagtggctggactgaaaactctatatactccagccttacggtgcattcctaaattcttagaaacccataagcttagccaggcaattaccaaatactttgggaggctggctcacttactcctgcatgccactgacgactgtctttctgatgttttaccaaatccctttccaaaaccccaagtatcagggtgttaatttttaaataatcctgggctcccttaattctctcccctagtctcttacaaattagcagatgaagagaatggagtagtggtaatgtctatgagcag

SEQ ID NO: 525313 - DNA, 342 bp, Homo sapiens
tttggacaactcacttgacctctttgggcctcagtctggtcatctgtaagaagaagtggctggactgaaaactctatatactccagccttacggtgcattcctaaattcttagaaacccataagcttagccaggcaattaccaaatactttgggaggctggctcacttactcctgcatgccactgacgactgtctttctgatgttttaccaaatccctttccaaaaccccaagtatcagggtgttaatttttaaataatcctgggctcccttaattctctcccctagtctcttacaaattagcagatgargagaatggagtagtggtaatgtctatgagcag

SEQ ID NO: 525314 - DNA, 511 bp, Homo sapiens
tgcaaatgcagcccaccaaaggcctttagcatgttcgatgggtggctcaaatatggagaggggtgctgctgttggtgacataattttccagtaaggtgaaaactcacaggaaagttctgacccaaataaartacaatcttcccataacttatagacacaaaggttgcattcctgaaaaatccaatatatattaaaatcatgccaacccagcccatttgtttttatatgtaaatgtgtagcaggacacagaacgattctctcatgtgggcaagtgtccctgcattttcaggacatccagcaccccattttctacccattcactgatagccatgccccaaagcattgcctcaaccaacaaaccctcccgcaagtttagaaaatgtatcttggcaattggtagtgtttctattgggaatcactgcaaaacctcaatttacttaggtaaagttttacttaaataagcaatgcacaattgtcgcctccttttaaaagatgaagatttttacaggtg

SEQ ID NO: 525315 - DNA, 573 bp, Homo sapiens
cagcccaccaaaggcctttagcatgttcgatgggtggctcaaatatggagaggggtgctgctgttggtgacataattttccagtaaggtgaaaactcacaggaaagttctgacccaaataaagtacaatcttcccataayttatagacacaaaggttgcattcctgaaaaatccaatatatattaaaatcatgccaacccagcccatttgtttttatatgtaaatgtgtagcaggacacagaacgattctctcatgtgggcaagtgtccctgcattttcaggacatccagcaccccattttctacccattcactgatagccatgccccaaagcattgcctcaaccaacaaaccctcccgcaagtttagaaaatgtatcttggcaattggtagtgtttctattgggaatcactgcaaaacctcaatttacttaggtaaagttttacttaaataagcaatgcacaattgtcgcctccttttaaaagatgaagatttttacaggtgcagttaaattccgtctgcttccacccctaccctagtctactgcacactcattctaagaggcaagcaatgt

SEQ ID NO: 525316 - DNA, 584 bp, Homo sapiens
cactattgacaaaaaaccttgtggacgcttycaatcttacatgaaacttccggtcttcaagccacttataggactttacttctctctttaatgacacatatcacactgggatttgtattatccacatgttgtagatatgtgttactctctcttctgagctaactttttcctggagatctgggatcacagatggctcacctgtgtatgagttataactttcatatctgtgtcttgtgcaaggaagatgctcagtacttatgtatcaaatcagtgtctgttaggataataaataattacgcatgtatgaattaaacctgtctattctttattaccatggtgtgttttctgcattcttttagaagtttggagcaacgaattattttgttattctattgtgactattccctctgtcccatattcaagcatacaaatatgagaaaggcatttttgaactgcatgttatgaagagaaaaaagaaaaagacaaaccaaacaattctttgtacgtttcattttggttagaagccaatgtaaatgcttgtgctataagaacaagcatatttcctgccgtgaaggcttggctgt

SEQ ID NO: 525317 - DNA, 646 bp, Homo sapiens
tgtccctgacaacttctccagcagcttacataatgttggtgaattcaggtgggaattcggatctgggggaaaaaaaccaagagagcgaaaactgggaacatgggattgaaaatcttgtccatgaaaagcaggctcattttttctcctacctatgaaacacatttcctctggatattgtctacactcagaagctaaaatctggaatcattacttgtttgatttmcatgtactttttagctttaatttatgatatggcttgcctgggtttacacagcatttccttcagccttcagcaatgcttcaactaaataaaattaataacttgtttggcttgtagattcattgcctgaggtgggttggaaggtcaagagaaacagaaggaatgcagtgatataaaactagttcaagaataggatgtgatttttaaaaaacaacagctttactgaactacacataccataagattcatccctttaaagtgtacaattcagtggttctttagtccattagtaaagatgggcaaccatcaccactatctaattccagaacattcatcaccaaagaaaaccagtgttcttcagtcaccctccattcctctctctccccggtacaaatctatttttgtccttatggatttgcctataat

SEQ ID NO: 525318 - DNA, 582 bp, Homo sapiens
gcaggtggtcaagcattttagtttcctgtggctactgtaataactaaagtggctgaaaacaacaggaattcattatcttacagttctggagacaagaagtccaaaatcactttcactgaactagaattgaggtggtggcaggaccttggtccttctgaaggctctgggggtgaatctgctctgtgcctctcccaggttccagaggctgccagcattcctgggcctgtggcaacatcactccactctgtgcctccatggcctcattatctcctccttttctgtctgtatcaaatttctccctgcctccctcttataaggcacatgtgattgcatttagggcccatgcaggtaatccaagatgatcttcccatgtataattatttgcttaatccacatccgcaaagagccattttccttagaaggtgacatttacagcttccagggattagaacctgacatctcagtaagccattattgagcctatcatactgagcctagatccctcctgttggcctcatatattcatggaggacaaaggaaaagrctaaaggccagagaccagcagaagagtgcattcttgct

SEQ ID NO: 525319 - DNA, 609 bp, Homo sapiens
atttagatcttagcatgaatggggatgaatttatatccatctgtcatctgagatactctatgtgaacaaggaccactgttgatctggctgaccatataaaatatcagataacaaaaccttgaaaactcatattgggagtgtatgcttttgtctagtgcttctggtccttttaagcagccaacaaatttgcattgagaccttgctgactgtgggtatcggtgatttttgtccattgacgattttatctttagttgctacttctttggtttcaaagaactacatgtgacaaaaagtggcaatgtcttaggaagtggttaagctgagtttataaaaaaggaattgaaaatatgtaaacatttaagcaatttgaattgattaggaacttggatggggktagtgcttcagtttaatataactcaagagttctagataaatcataattctttagatgaaggctagtttgttctggattcctgctgagataaaatgatcataaatttacaagtaaagaataatgtaaataccttaatgtcaaagtattgctttacagttcatacaatacttctcagtaagttgtatcctgagagatcttgtttctgctacatacca

SEQ ID NO: 525320 - DNA, 561 bp, Homo sapiens
ccaacataatttgtattttatttgtatctgtgtctgtattcttggttgcaaacaacagaagtgtactgtgtttaatttaaagagaaggaatattaatgtaaaggttatcagggaatcatgcacttgagaggaaggctgaagaaggggcctctgtggggtgcaaggacacagagccacagtcccactggagggacggcctccgtaagcttgccctctggcattgccagcagtggcccttctccacagcactgcttgtatctctgaggccactgtgagtaactttaattgaactttagcctggatgttactccttcaagattcaaagtgctgggtgggtactgtttgtcgaccacctttaaagcatgtggccatgtcctagctgctgggagggttggggagatgaatagcaagactttttcatcttggtaggaggaaggggccctgctttccckagagacttatgagtggaggaatctcatcaacataagaggccacgctaagaagcctgggaagcctaggaagccctgtcgttgttcacgcgaatggtcaattgcttgcagt

SEQ ID NO: 525321 - DNA, 608 bp, Homo sapiens
tcctcccacctcagcttccccagtagcagggactacaggtttgcaccaccatgcctgggtaatttttttytttttttttgaggcagggtttcgttcgccatgttgcccagcccatgtttctccaactcctgggctcaacagatccgcctgcttggcctcccaaagtgctgggattacacgtgtgagccaccatgaccagccacatattggttttacaccatacatttatatacattttcatttgtcagttaaaaaacccagctgggatataagctcatgtaactgggatccatattgagcccctgttttattctcctttctgtttctgtagaggagcttgaccggagaaagaggctgagaactgcttctcttaccaaggaccttccccaagccaggcatctccggagatggtatggagcctggggtagctcggccaggcctttgatcaccagcgatgccattgctcttccccgtttcgcgtctgctgtggcttgctgctgaggctgctttcagacctctggaatcagaaaaggaggtgactatatcaggtagcccgcatttgccttttgtaagaatacttttcatgctcgattctttaaaatggttcc

SEQ ID NO: 525322 - DNA, 608 bp, Homo sapiens
tcctcccacctcagcttccccagtagcagggactacaggtttgcaccaccatgcctgggtaatttttttttttttttttgaggcagggtttcgttcgccatgttgcccagcccatgtttctccaactcctgggctcaacagatccgcctgcttggcctcccaaagtgctgggattacacgtgtgagccaccatgaccagccacatattggttttacaccatacatttatatacattttcatttgtcagttaaaaaacccagctgggatataagctcatgtaactgggatccatattgagcccctgttttattctcctttctgtttctgtagaggagcttgaccggagaaagaggctgagaactgcttctcttaccaaggaccttccccaagccaggcatctccggagatggtatggagcctggggtagctcggccaggcctttgatcaccagcgatgccattgctcttccccrtttcgcgtctgctgtggcttgctgctgaggctgctttcagacctctggaatcagaaaaggaggtgactatatcaggtagcccgcatttgccttttgtaagaatacttttcatgctcgattctttaaaatggttcc

SEQ ID NO: 525323 - DNA, 641 bp, Homo sapiens
aaataacaaaacaaaactgaggtctgggaagctccgattttaaaaagtgaacatgagttatgagactaattcagatactggccacaccaggaggcccccgcccaggagatgaggatgaccaccaactgctgagaatctttgtaaactcaaatcaaggtgtwtttattgcacaggcacaataaatgaacaaggcatcttaagtactacaatgacaggtgagtgggtcaggcacagtggctcacgcctgtaatcccagcactttgggaggccgaggcaggcagatcccttgagctcaggagttcaagagaagcctgggcaacatggcaaaaccccatctctactaaaaatacaaaaaactagctgggtgtggtggcacaggcctgtagtctcagctacttggaaagctgaggtgggaggatggcttgaccccaacaggttgaggctgcagtgagccaagattgcaccactgctctccagcctgggcaacagggcaagaccctgtctcaaaacaacaacaacaacaaaatcacagatgagtaagacacaggtctttccctaaacaaggttacagtctaatgggcagaagggctaggacagggactcagatgaaataatgccaggtagaatgtgatcagtgcccc

SEQ ID NO: 525324 - DNA, 641 bp, Homo sapiens
aaataacaaaacaaaactgaggtctgggaagctccgattttaaaaagtgaacatgagttatgagactaattcagatactggccacaccaggaggcccccgcccaggagatgaggatgaccaccaactgctgagaatctttgtaaactcaaatcaaggtgtatttattgcacaggcacaataaatgaacaaggcatcttaagtactacaatgacaggtgagtgggtcaggcacagtggctcacgcctgtaatcccagcactttgggaggccgaggcaggcagatcccttgagctcaggagttcaagagaagcctgggcaacatggcaaaaccccatctctactaaaaatacaaaaaactagctgggtgtggtggcacaggcctgtagtctcagctacttggaaagctgaggtgggaggatggcttgaccccaacaggttgaggctgcagtgagccaagattgcaccactgctctccagcctgggcaacagggcaagaccctgtctcaaaacaacaacaacaacaaaatcacagatgagtaagacacagrtctttccctaaacaaggttacagtctaatgggcagaagggctaggacagggactcagatgaaataatgccaggtagaatgtgatcagtgcccc

SEQ ID NO: 525325 - DNA, 502 bp, Homo sapiens
tttttgtaggttagtatgaaggaaatagcgtttggattttttgctttatattttcttgtttgggccaattaagggttgttaaataaattggaaaaaatcctamtactttaaagagcgtaaaaacgtggaacatgtcttatctaaactcttaaaacgtgtttgttgctgtcaaatatgacttgagttcctgatcgggttatcattgcctaaagacacaggactattttttttattaagataactttgtttttatcttaataaaagagatgatagtcatttcctgacagttttgtctgacggaatgccttctgtataatagtttaaaataattatttttagtgtttggaaaacagcatttaaaagtttgaacagcagaagtctgttttaagaagcttctgttaacccttgaaaagaatcttcctgtgggatattaaaattttggattgaacttgtgcaaacagtactggatttggaaggtctggattctcatcctggctgttcc

SEQ ID NO: 525326 - DNA, 598 bp, Homo sapiens
ccactaagactataattactactgatggttatgatgatgtcccaaacacaccatcctaacaccggcttcttaccagtttgaaaacttttaaggcattgtttgacttctctttaatcctagatacattctgcttaaaagtccttcattattttctttaaaagygtaacattattatttatcccacagttactacccttgctctttaccagttagcttgtgactgaattactgaagcattttcttagcggtttcctactttatactttctctttttgtaatatactcagtattcttctgccaaatgaatccctcccatctcttccctatgatatctaacttaagctctgacaatttgagtgtgggagtagttagcagtgattctggtgaggtaagcaggggcaagatcataaaggaccttaagttacaaggtaaagagtttacattttggctgggtgcggtggctcacgcctgtaatcccagcactttgggaggccgacgtaggtggatcacgaggtcaggagatcaagaccatcctggctaacacggtgaccccatctgtactaaaaacacaaaaaaattagccaggcgtagtggcagg

SEQ ID NO: 525327 - DNA, 606 bp, Homo sapiens
ataatcagctgccctgggagtccagagtaggaaggagtacagtcatgtgtttcttaatgatgggatatgttctgagaaatgcatcattaggtggttctgtcatggtgcaaacatcctaagagtgtactaacacaaacctagatggtatagcctcttacacaaacctagatggtatagcctaatataaacctaggctatatggtagagtgtactgggcctaggctataaacttgtacatgttactgtactgaatacagtagacaactgtaacacaatggtatttgtgtatcttaacatagacaaagtaaagtgttctgccacaatatcatgagcattacaacggggtatgacatcattargcaataggaatttttcagcttcattataatcttatagaaccactgttgtatatgcagcctactgctgatcacgttggtatacagacagtatttccttctcccacacggcctgctaatagccagacatgggtgatttgcttagagtaatgcactgtaagcagttgtggctacttttaagagaactttcttgtcaggtgagatgtatttaaaccagggacagatgggccaagggagaaacataacagct

SEQ ID NO: 525328 - DNA, 621 bp, Homo sapiens
gaggaatgtgcattgaggtatgaggagggaagagatgccagctaggcggatcagccacatcaaacctcgtgagcaatgggatgacaaacatcctagccagatcactttcacagccatcctcagtggctcctctaaatctcagcttctctcttaggtgggcatacttgtgttctctgtataggaaaagactagaagcgttctgagggcacggatgccacaatacccagcatggtgctttccacagaggagaagtccattaagtgttttctgaatctgtaaatgatttacaggcttttcctcatgttgattatagcatcagaggtttccatccaaatctgggatatgaggactgaacagtcaagaattcattcttaacactcaaggtttaaagttttaaaatcgtgatccaacaccaactggctaaatcgtgatgttgaggggagcccaaagaygggactcacaaacctggcccaaatttatccactgaagtatcctgagccatggccacagtcaggaatccgctgtcattgtcacagatgcacgttggagcgttaaagatcagggcatgcatgagagaagaggctgctgactaacgctgtctccacagcctgaatcaaagcc

SEQ ID NO: 525329 - DNA, 621 bp, Homo sapiens
gaggaatgtgcattgaggtatgaggagggaagagatgccagctaggcggatcagccacatcaaacctcgtgagcaatgggatgacaaacatcctagccagatcactttcacagccatcctcagtggctcctctaaatctcagcttctctcttaggtgggcatacttgtgttctctgtataggaaaagactagaagcgttctgagggcacggatgccacaatacccagcatggtgctttccacagaggagaagtccattaagtgttttctgaatctgtaaatgatttacaggcttttcctcatgttgattatagcatcagaggtttccatccaaatctgggatatgaggactgaacagtcaagaattcattcttaacactcaaggtttaaagttttaaaatcgtgatccaacaccaactggctaaatcgtgatgttgaggggagcccaaagatgggactcacaaacctggcccaaatttatccactgaagtatcctgagccatggccacagtcaggaatccgctgtcattgtcacagatgcacgttggagcgttaaagatcagggcatgcatgagagaagaggctgctgactaaygctgtctccacagcctgaatcaaagcc

SEQ ID NO: 525330 - DNA, 485 bp, Homo sapiens
ctcaggaaagtgtcacctgggaaagtgtcacaaggaagcataaaaagcacgggtcatctgatgcctgatgaccacgtgtctgatcatgcagggaggggctggtcagtgtggaggctcgtcctttccatccaacttgctctttttttcccttctcctttaaaaaaatctcttactatttctttcctccaggtgtaccatttttatagtcagatctggagagcaaacttccttttttttttaagggataaatttgctgcacagcatctcccaagacaaaaacataagaaagaaggaaaaagaaatactaacyttagaataaactgagatgaccctgggtattttagctctagaaaacagttgcaaaggccaccctgcaggagaagagagggctccttcatgcattcagtcagtcagcaaatacttactggataacatggtactgtgctagacactctggggtaaccaagaaatataacgcaagtctc

SEQ ID NO: 525331 - DNA, 626 bp, Homo sapiens
gggtggccaaagtggggctcccttcctccctctctctgtagactcatcctcccagcttttcccttgtttttcctaaggtcctggggaagcatgatcttctccccgtaggctgccttcctgctgccccttcctccttccagctccacatttccccagttatgaggcttcttcatctgggggaggccactcatcagcatgttgtccagccttttgtggctagtttttacttcaggtgtggggataggwgtgtgacttcggcccctctgatgccttggtctcgagccagctaggctaatgcaacccttctgctttgggatgagacaaatcccccaagctctctgcagcccagatttcccacctgagacagcccagccagcccaggaaagccatatgaaccctatgctgcccatcctgcttcttccactgaattgcagggtgacttgattgggtcacttccttttccccctacctcccctcctcacccccaggccttttcctctctggaaatgagaccatcatcctggcccagcctccttccctcctggtgtgacgtagcagagaaagacatcaacctattatttaaacacgtgtgtgcaagtgcctgtgtctgtccacatgtgcatgtg

SEQ ID NO: 525332 - DNA, 623 bp, Homo sapiens
ggaagattgaggccagaaagagagagagcgagagagagaatgagaatactttactctctagtatcctcaagtgcaggggctgacaaactacagcctgaagccaaatccagcccactgtctgtttttgtgctgccctcaagctaagaatcaataaaaaaattaaaagaatattttatgacatatgcgaattatatgaaaatcaaatatgaaatacataaaatctctttacacatcagcattagcagatgaacatttgcaattgattttaatgatagaacactttgagccccaactaaggaaaatgctatttatgaaaaaagaattttaatcttcttattaggagatatgttttatctaaaaactgtattcattattatactttgaacttcactaatacraatatcataggaatttgttttctcttctgctttttaagtacctatatcataacctcgattttgccacttgcctgggaatcccagatttgttttgagacagagtctcactctgttgccaaggttggagtgctgtggtgccatcaggcttattaccctgccaggctcaagcaatcctcccacctcagcctcccaaatagctggactataggtacttgccaccatgcc

SEQ ID NO: 525333 - DNA, 524 bp, Homo sapiens
tttgaagtgtgtcagctggtcagtgagtcacattgcccagggcacggctacctagaagtgctctgtgtgaaacctaccgggaggaaggatcaggtgagtgccatgagaccagcaggggaaaagccaagtccagkaatgtcaaccaggatagggctgctctgtcatattgattcaggcagttggtcagagagttaggcaaaagcagcaccagcacatgaaaaacaaggtggagagcggcatcccagggcaaagctgcctgctaaggccttcttcacattttctgcctagggtagctaatgagacgccttagcctctaagagctcaagactcctgagcacagcaagggtgcagggatggtcctctcaggaggctaagtacttctttgtaactttgtttcatttataactttgtttcatttctttgtttcatttgtagcttcgtttcatttcttcagattagaaatttttttttccttatggctgcagcctttagaggagtccacagtaatcgccttttgtcctctc

SEQ ID NO: 525334 - DNA, 570 bp, Homo sapiens
ggaatttgaagtgtgtcagctggtcagtgagtcacattgcccagggcacggctacctagaagtgctctgtgtgaaacctaccgggaggaaggatcaggtgagtgccatgagaccagcaggggaaaagccaagtccaggaatgtcaaccaggatagggctgctctgtcatattgattcaggcagttggtcagagagttaggcaaaagcagcaccagcacatgaaaaacaaggtggagagcggcatcccagggcaaagctgcctgctaaggccttcttcacattttctgcctagggtagctaatgagaygccttagcctctaagagctcaagactcctgagcacagcaagggtgcagggatggtcctctcaggaggctaagtacttctttgtaactttgtttcatttataactttgtttcatttctttgtttcatttgtagcttcgtttcatttcttcagattagaaatttttttttccttatggctgcagcctttagaggagtccacagtaatcgccttttgtcctctcagaaaatctgtggataagacaacaggcacatcatctttctca

SEQ ID NO: 525335 - DNA, 570 bp, Homo sapiens
ggaatttgaagtgtgtcagctggtcagtgagtcacattgcccagggcacggctacctagaagtgctctgtgtgaaacctaccgggaggaaggatcaggtgagtgccatgagaccagcaggggaaaagccaagtccaggaatgtcaaccaggatagggctgctctgtcatattgattcaggcagttggtcagagagttaggcaaaagcagcaccagcacatgaaaaacaaggtggagagcggcatcccagggcaaagctgcctgctaaggccttcttcacattttctgcctagggtagctaatgagacgccttagcctctaagagctcaagactcctgagcacagcaagggtgcagggatggtcctctcaggaggctaagtacttctttgtaactttgtttcatttataactttgtttcatttctttgtttcatttgtagcttcgtttcatttcttcagattagaaatttttytttccttatggctgcagcctttagaggagtccacagtaatcgccttttgtcctctcagaaaatctgtggataagacaacaggcacatcatctttctca

SEQ ID NO: 525336 - DNA, 549 bp, Homo sapiens
aaatacatctgagaaccatttgtctgctattttaaatgtgtgatcaagtagtctagattacctaaggatagacaatctacatttcagagactggtatcagtagcctctaaaacrttgttaactagttctcttcaggcctcgacatgatctttggccttagaaggaatactaaaaagattaaccttttttttctagttagttgcaactaggtaaatataaaatcaaaattctttcataaacaacatgtcattatctcataaataaaatgtcttttcaaaaaaagtaataaaagagaaataaggatatattttagttgatatatatagagtaccttcccttccagtcatttattttccttgaatacagaactaaatcagttagcattcatgaaacttttactatgctcatagaattttccttgccttggtgttatgttgtataatgaatacattggtttgagatttcagtttttacatttatacattatttttcactagaatttaggtaaaaactatgaaaaaggcacatactaaatttaaattcctgaga

SEQ ID NO: 525337 - DNA, 450 bp, Homo sapiens
cgtttctggcataaagccctagctttcatttggtgcaatggggcatgggctatttactttccaaaaagtataattattgatcaatttatttataataaaaccgagtcaaccaaaaacaacaactaaacacytatttaacttcccaaatgttaataaattccaaagatagcatcttgagcaaataatttggttcaaaatctcccatttattggctacattttcactaaacatcacatttgttcatctaaaataacttttcgaactcttttagatagagacatagtataatatctcacttacacgtaaacatttacagtctattgagtattattacagaatcctacataaatatgctgcttttttatgatccaatataaatatgttttataagataggtgacagtttgcaaatgataaaatattgatttaatttaaaaaatgcatattactt

SEQ ID NO: 525338 - DNA, 637 bp, Homo sapiens
atttatttataagcatatatatgtatttttattttttattgtatatatgtaaggtgcacaacatgatctggtatacatatacatgaagaaatatttattatagtcaagaaattcaaatattagtcatttcatatagttgtattttgtccatgtgcatggtaagagcatctaaaatctattctttyggcaagtttttggaggataatatattattaactatagtcctcctgctgtacattggatctttagactcctttattctacacatctgcaagtttgtaccttttgacctacatctttccactctctccccttccttgcctctgataaccacatttctactgtttctatatatttgactttttaaggattccacatataagcaagatcaaatagtatttgtctatgtctggcttatttgacttagcataacagcctccagcttcaaccatgttgttgcaaatggcaggatttccttatttttaaaggctggataatattatgttgtgtatatgtatatatgcacttgatttttaaatccgtttatccatatagtcatatgacctaatcagagttaattaagttctaatcctggggcttttgctagaaattgtgaatagatacattctcatttcag

SEQ ID NO: 525339 - DNA, 485 bp, Homo sapiens
ctcaggcaggctccaatatatgtccttccccagtcaaccaaagagacacaaaataatttcccacggtttcagtgttgtatggtttttgtttattctgactcaatttatgtagcctggaagattttgtttgagtgtagtctgtgtgtgtgtttgtgtgtgtgtgtttgtgtgtgtgtgcatgcgaatacattaattctcatctttattttatttttctacgttccccacataaaacaataactctctcttgccttttgctgatgtgataagttagctaaaccaggccaagaagattcttaataatggtgccgcagatttagcttaaattgctttctcctagattccctaacaaatcaacaagtcaagcaatgtaaaaawtttttaataaagatacaaatgaaaaggaacagaataccccccacccctgccctgctgtgcctccctagctagctcctcaccaaggctctgcctatattcatcattag

SEQ ID NO: 525340 - DNA, 651 bp, Homo sapiens
agttttccttaaatcaagttttagcaaaaatgcaaaacatttacataatcaccagatgcactgaagaaggtaggttttatctgtctttgtataaaaacagctatggggaacaagagataaattatatatataaaactatatattatataaaaatatagataatatattatatatattataaaatattatatttataaaattatatatattatattatatagcataaattttatattatatataaaattacatatatataaaatatatatatatatacacacacacacacacttaacttgtatgtgcctcatattgttcatgtaaaaatgaaaataactttatggccactgtgaaatttaaagataatatgcataagacatctcactctgtgaccatgataaactcttaatamatggtagaaattaataaaagtagtaaatatttttacagtgctgtaactaagtatctcattatttacccctacttttaagtcattttggagcttctgtaaagtgttcattttgaatatattttttaagacatatgttatctttttgattctgtttactgaatgatatgatcaatctttccctctccagtggatcatttttggttgattataaatatcctctagtatctcccaacccaaaa

SEQ ID NO: 525341 - DNA, 595 bp, Homo sapiens
cattttccttatagcttattgtctctaaaaacaacaacaacaaaaaatcaaatttaaaatagcattgcttgggtttagggggtgtgtatagtagagaaatagtaaaaataacaaaaaaacaagaatgaagtgattctttaatgatgtggacaattgagatttttacttcttaatcttctgtatgggaaagatatctacaccccatctttaaaaaatgacataagcttttttgagtcattcttcttttccaaaaatattcttttaacccatttaaaaagcatgttctgataattgatcaaatatatatttatattacaaaagccaaattttccatttttagaattgttgattaacagagaaaataatttagatttaacatactaatcttcgtaggtgctaaggaatcactttaatatacttccatgccaaatacatatttttaattttctcatgaaaagttaagtgttagaagttcagactgggctaggtgttaaataacatggagatatcagagttattttgaaagataaagctttaatcctctgaaccgtgcaagaatctrtaaaagaatattacttacagtgtgtagagtgac

SEQ ID NO: 525342 - DNA, 635 bp, Homo sapiens
agtagatacttaacagccaacaagttttccgaagtgattgtaccgttttgcgtcccccaaaacattgtaagatagttctacttctctcacatcctcatcagcaccaagtgttctcattctttttaagtttagccattctaataggcattccatggtaactcattgtaattttagtttctatttcccagttgctacttgtgtcacatattttttcctgtgcttatctgcaaattgataccttctttagtgcctgtgcaaatcattttaaaatttgctttatttctttctttgtgatattgagtaacaagagtaccttattatgcatacaggctcctttgaagaaatatgttcttcaaatatgtctttcagcttgtagcattttttcactttatttagtgtttttgaaaagtagaattttaaaaattttgatgaattctaatttattcacmgacagcatgatcatttatgtaaaaatcttagaagaatttataaaaagctactaaaactaataaatgttttccagaaataagataaaaataatttccattcatatatattagtaacaaaattttaaaatgatattaaacattttcaattgtatcaaaacattaaataattacaatgttaatacattt

SEQ ID NO: 525343 - DNA, 635 bp, Homo sapiens
agtagatacttaacagccaacaagttttccgaagtgattgtaccgttttgcgtcccccaaaacattgtaagatagttctacttctctcacatcctcatcagcaccaagtgttctcattctttttaagtttagccattctaataggcattccatggtaactcattgtaattttagtttctatttcccagttgctacttgtgtcacatattttttcctgtgcttatctgcaaattgataccttctttagtgcctgtgcaaatcattttaaaatttgctttatttctttctttgtgatattgagtaacaagagtaccttattatgcatacaggctcctttgaagaaatatgttcttcaaatatgtctttcagcttgtagcattttttcactttatttagtgtttttgaaaagtagaattttaaaaattttgatgaattctaatttattcacagacagcaygatcatttatgtaaaaatcttagaagaatttataaaaagctactaaaactaataaatgttttccagaaataagataaaaataatttccattcatatatattagtaacaaaattttaaaatgatattaaacattttcaattgtatcaaaacattaaataattacaatgttaatacattt

SEQ ID NO: 525344 - DNA, 553 bp, Homo sapiens
acttaagagttacatgaccgtaggcaagttactttcctctttgagctttggatttcctgtcaaaactgagaaagctatgagtgtttgggattgttttatgggcttccaagtcattcctccagtctccactcagccatccaacaagaaatctcacaatatgccacagtctgttttatgagctagctcctatcacataactcattaggcctctgcattccttttcaccccttcaacataagaataaattcaggaaaatctaaagggaagacgctggacagagagaagatgagaccattcattctcctgcgattatctgtcactgcttctactttggcagtgtctcactgtgttgcccaggctggtctcaaattcctggcctcaagcaatcctcctgcctcagcctcccagagtgttgggattataggcrtaagccactgcacccagccttttttttttttttttttaatatattcttaagggatcaaaaattagtcttcctgatttagtgaaatcctaaactttaccatttggaaacaaaatttgcggagtagct

SEQ ID NO: 525345 - DNA, 553 bp, Homo sapiens
acttaagagttacatgaccgtaggcaagttactttcctctttgagctttggatttcctgtcaaaactgagaaagctatgagtgtttgggattgttttatgggcttccaagtcattcctccagtctccactcagccatccaacaagaaatctcacaatatgccacagtctgttttatgagctagctcctatcacataactcattaggcctctgcattccttttcaccccttcaacataagaataaattcaggaaaatctaaagggaagacgctggacagagagaagatgagaccattcattctcctgcgattatctgtcactgcttctactttggcagtgtctcactgtgttgcccaggctggtctcaaattcctggcctcaagcaatcctcctgcctcagcctcccagagtgttgggattataggcgtaagccactgcacccagccttttttttttttttttttaatatattyttaagggatcaaaaattagtcttcctgatttagtgaaatcctaaactttaccatttggaaacaaaatttgcggagtagct

SEQ ID NO: 525346 - DNA, 592 bp, Homo sapiens
tcttaacttttgggagggggacatggattcctgtaggaaaggtaaaaactatggatatatgtctacgtataattttaggcagttcactgaccagcccttcctccaagccagttcatggaccaacttaatgacaccctacatacaatccgaagcattcaccaagtgttttctaacacgacatatcattagggaaggggcactatggcgtatggtgggaagatcagtacctttgatgccaagcaactgatgatcaataactttcataccagtaactttgatgcaaggcagatgtagatttgagaactggctctgcaactaagaaaggtatggcatatgcccttggaacctgtctcttcatccataagaggaggatcatgatatccatttggcagtgttcttgtgaattattagaaataatgtaaagaggcaaccacgtaagagctrcatacatcatagataataacaaagaatgcatttcagcccatagtgcagtgtggctcacagggctcgtgatgactcattttgcctgtgacatagccactgtaaatcaacatagctcacgtaccctcagcagctatcactctggtggcag

SEQ ID NO: 525347 - DNA, 477 bp, Homo sapiens
aacaaatggagaaaaaaatgtatagcaattcatgcctctggaaattttggtatggaatcttaatatttctttatttgttatacatttgtaaaaatacattactttttattcatgaatacataaacatacagtactgaaaattagaattgtgaaagccttgtgcacttttaagtgtacttttgagccataaaayatataaagttttccagaaaattttaaacttcagtatgtttggcttgccttgatatgttatcatcctattatagatatattacacttttatgtcacacccagcaataatttgattaggaaatttatgggattttgtgaattcagtccaacagtgagatactgtatttgaaagccttgatctgaactgacacaagggttttattacgggtgatttcaaacaaagtaaaaatcagctgtgtttgttttttttccctgtaatcacctaaatccagaaaacatggtttg

SEQ ID NO: 525348 - DNA, 317 bp, Homo sapiens
gctggaatagggaaaaataaaaagtacaatacaataaaaagttaacattagatggataatttgtaaaccatgttataaagatttgtttctatcctaacaatgattaagatttttaaatatatttgaagttatttgagaagcttatatcatcagacagattttagaggtggggggagggagaaagataactggacctgcagtgtcaagagcagatgacagrgtgaatgcagatgaaaactttgagaaggatgttgtaaatgtcccaatgggaactgttagtttgaactaggtgatagagagagtctgataaatgtcaa

SEQ ID NO: 525349 - DNA, 631 bp, Homo sapiens
gccctggtgataactgacatccagctcctgcagagggagtctgagtttcccctgtaatctgtgtatcaggaaggcagagctcacggggtgggggcccccaggtccgggagctgtgggggcagagtgaaaaaactcagcaatcaaaataattgatattttaataaataaaaattaatgcaattaatcatgatgcactaaaaaagttaaataaagacaaaatgtgatcctgtaacttgtatgacttggtctcactcatctcaccctagtctgagccctgttggcttttacctcagcaactgagcagcattttgatgaaaacttttctattcaactcatatttctcagagaccctrcccatggtgtcttagtccattttgtgttgctagaacagaagagcacagagtgggtaatttatttaaaaaaaaaaaagaaatttatttctcacaattctggaggctggaaagtccactctcaaggtgctggcatcttgtgagggccttcttgctgtatcacccccatggcagacagtggaagagcaagagggtgtgagagagggagaggaagggggcggaactcatcctttaatgaggaacccattcctgcaataactcatccacttccccaataacag

SEQ ID NO: 525350 - DNA, 319 bp, Homo sapiens
aaaacccatcagcctcattcacttcctgtgggktatgtgcagacatcgtctgtggtgcaagatgagactggcatccagagtcagtctcattgtcccaacctgtctttatagctttctcttgtaccccttacccatccaagctcatgttaggtgaattcggctttcttcctctgcctttgtgtttggtaagatccttcctccccacatccctccttctgttccctcttaccctgccaatcctgatagtcccttcagggccggtttccttggagcttgtccctccagggcctgtgcacttgcacctcttctctggcattac

SEQ ID NO: 525351 - DNA, 552 bp, Homo sapiens
ctgtgtggctcagcctccaggccccttggaagccttygggctcagcttttttcagtccccaggaccaggcctcagaacacagagctgatatcccaaatgctgttgtcagagatcaaatttggggaatgcataaactggttttgacccacactggcaggtctttatcttcaaaatgctgggatattaggcagatggtcttaaaaagcttcttaaacactttagaaatgaaagaaagaaaatgttcagttgctctgggatggttaacagaaaagtactctgctcatcctataaaccaagtcttatgaaatccaaactgaagatgagtagggattccattacaaagtctgcagactgatttcctctgcgtctctaggccctgggcacatggagtagcaatctgttttaagacatttttatttgttctgttaatgactcagtagttaactgtgactgtacttggcttctcctttcaggctgattatttcattgtcactggtgatgtgcaatttctctttctttatttgaactgtgttcgtgtgcatataaattggt

SEQ ID NO: 525352 - DNA, 552 bp, Homo sapiens
ctgtgtggctcagcctccaggccccttggaagccttcgggctcagcttttttcagtccccaggaccaggcctcagaacacagagctgatatcccaaatgctgttgtcagagatcaaatttggggaatgcataaactggttttgacccacactggcaggtctttatcttcaaaatgctgggatattaggcagatggtcttaaaaagcttcttaaacactttagaaatgaaagaaagaaaatgttcagttgctctgggatggttaacagaaaagtactctgctcatcctataaaccaagtcttatgaaatccaaactgaagatgagtagggattccattacaragtctgcagactgatttcctctgcgtctctaggccctgggcacatggagtagcaatctgttttaagacatttttatttgttctgttaatgactcagtagttaactgtgactgtacttggcttctcctttcaggctgattatttcattgtcactggtgatgtgcaatttctctttctttatttgaactgtgttcgtgtgcatataaattggt

SEQ ID NO: 525353 - DNA, 621 bp, Homo sapiens
tgacggcagggccagtcacacaagacgtctcttgtgaggtcaggctggcactggtggtatccgtactgcgactccctgtatgtctactttcggcatccctggagaagaccaacgcacatacgctgctgcgatgaaggtcatgggcatttcctgatgcaaaagatttgaaacactctgagactttagcttttgacaaggggaccccagagaacgttaagccagtgtttctctgacagctctaagaagccctggtcttctgggaaaccctggagggagcaaggcaaaaggaaggctctgaacttcacacctgattttccaccagaacatttctgcycttttctgtgtgacaatcctttgaatagaaagttctacagccaaacatttgatttaggaagagcaggtaagtgagctgctcttcatgggtaaagctggcaccaaagtcaggcctgctgtgggttagagctttcccaactttctaaaagcaggagtgcttgggctctcatttctacctctacgctcaaactctcctgctggccctgtcactaggagctaaaatcactccagagccatcacaagcagcttctcacaatggccctcagcactgtcgattccctacagatc

SEQ ID NO: 525354 - DNA, 517 bp, Homo sapiens
agaagttttaatactgtccctcctggccctgtcttgtataagcagtgatctcatcccttctcatctcttcccttccccatttaggactctgacgcagtacagttaatctgtgcayaggaaagaagagctgtttgaagaggttattcggtaaatgcagagaatgtctttgtagtataaattattgctctatataaaactgcttgtaagtttttgttggtggtgtttttttgtttgtttgtttgttttagagatgtggtctcactcactatgttgcccaggctgggctcaagagatcctcctgacttggcctcccaaagtgctgggattataggtataagccacagcgcccacctggttgcaagtttttaaagttttgctaaaatgacaggcatatgaagacattattgccaactatatattgtcccagaaacaaacattcatcctttactataaaagtcttctgcgtatgggttctctcccaaagaagggacagcaaaatgctcacagccagctcttc

SEQ ID NO: 525355 - DNA, 571 bp, Homo sapiens
agaaagtaaaaatggccttgctgagagaattaagtttatgttcragtgtgatttctttgtggcactggggaacaagcatttctaacaggataatggaatctgaacaaggcagagcatgcattaggaaaacagaaaaccagaaggaggtcttggacaagagtgaaatctctcacacccctacccaccaccccccaaactctacccccactttgctccaccctccatttcaccactcaaggccggaccaagtcgatgactcaaactccacattttgctgtttgaagaggaagggcagtaatggcaggggctccaagaaaaccctgtgaaggacctctttcctagttcagatccaccacacacacactcttgtcaatgaaaagagtcaaaccctgtaaaatatttgaagagatttattctgagccaaatatgagtgtccattgcctgtgacacagccctcaggagaccctgagaacatgtgcccaaaatggttggagcacagcttggttttatatatttggggagatatgagacatcaatcaaatgcatttaagatatacattagtttggtcca

SEQ ID NO: 525356 - DNA, 633 bp, Homo sapiens
cagagccacagcccccgtggaaggggccttgccctggtcaggagaagctctgccccatccaggaagaagcctcatccaccataaaaccccactcctaaggaggcgctccgccctcagggagcagcctaccccagagccgtgccccatcctagagccccgcctccttcaggaggagccccgcctgcaggtagaagcctacctagtgccccgcccacccagagccacgcccttactgggaggggcctcgcccccgcaggagaagccctgtcccacccaagagaagccccgcccaatctgtagccccgcctctgtccaggggagccccgtccccagggagaagccaacgcagagcccctccccatcctggagctccgcctcattcaggagcagcccagccaccagagaggagacactrgctccagggaggagccctgccttcaggtaggagttctgcccccaggtaggagccccacccccagggaggagtcccgcccccagggaggagtactgccccgtttaggtgggagtcctgctccacccagggaaaagcccaccctcaggcagggcccgccccgtccagggggagccgcggccggtgcctacttgcaggtgtgcacgtcgtagacgcgcgtg

SEQ ID NO: 525357 - DNA, 615 bp, Homo sapiens
aataacaagtcccacagtccaccacaacctccattcctacctcagacctggatgactgaaatattctaactggatgtctcaacttaattttcccatctaatccatcgagatgcagycccttcctacttgcccacactttggcccccttaagctttcatccttagttcattctttttttttttttttttttttgagatggagtcttgctctgttgcccaggctgggagcacattggtgcagtctcggctcactgcaacctccacctcctggattcaagcaattctcctgcctcagcctcctgaatagctgagactacaggtgcatgtcaccacacctggctaatttttgtatttttagtagagacagggtttcaccatggtggccaggctagtctcgaactcctgacttcaaatgatccgcccacctcagcctcccagtggattacaggtgtacgccactacacccagccagttcattattctttaattcaaactctctctgaccagtgtgttaaccatcatgcaaggacctgcataagtcccatcttatgaagttttttcttgaatactacatttccaaaaaaataaaggttttctataaattaccattgaacac

SEQ ID NO: 525358 - DNA, 546 bp, Homo sapiens
aatgccagtaattacaaatcaaaaagcttagaaacagtaatgacaacaattaacatttattgggtacttctttctttcatcattcatccatttactgagcaagtatttactgagcatgtattacgtgcaagacttttttgtttaaattttttcacaggaatattttgatatattgaagactagtattgttttcatattttgtataaaataagctttaatataaattatgaagtataagtttataatataaattaagatatttagaagttttatcagtaagaaaagaatttatrtgttagcaatataattattacctacttcatcagtatggcattcctagatgttgaaactagtcagtgatggaatcaccttcctagagattttttgagttggcctaccttttctctttgctttagagaaatggcacatctaagccacgagaagcaaaattaggatctaattttcaaagaaggaaatgggttaattcttcagtgtgcagaattatagagcatttaacatcctggcccctaggtactaaaagtcaga

SEQ ID NO: 525359 - DNA, 580 bp, Homo sapiens
taatttagccctcacatacaaataaaacggagtctgtgaaaccggcaaggaaggcattattattcatattttaaaaactaagaaaagtgaagtaacctatgcaaaaatcaagaaaaacagtaaacccatgaatttttttgaagtgccccaactgtcagtgcatcaacaaaaattaactcaaacactctggaactcatcaaacatttagaaacctttggctcacatccttaggggccagaccagctccagagggaccaaggaacaagaatggagttggagtgggctycagaagcccactcttgaagctctatgagtctattcaagatgaatgaattgcgggatcgctcttaggatctgaaaggaaaagaggatatcaattctaggatgttgtgttaagttacaatagtatattctagtgggtggaattgagagtatttctaatacccaacagcgttaataatactgatacttcaactaaaaaaaaaaaaaaatttaagcatctgcctttgcttatacatggctaggtctcaaatatttccaaaccatatgtggatttaacatggatttgatgatactgtat

SEQ ID NO: 525360 - DNA, 680 bp, Homo sapiens
ggacttatagcctgaactggggatggaggagtgaatgagctagatgcagcccctgccccatagaccttagggtaccactctttgccagagccatggtgggggtaatagcgcatctaaaatggattgccttactcaatatacattccagcctccttccagtactcctgagtttggaaagctagaaactatatttcccagactcccttataatcagagtttagggtgtgatttggattccaccaatcagatgcactcaaaagacttggattgtaactaaattaagtggagacaatggcttgccacataatttggaagacccagtacaaaattaaagtgtgaagacctctgtacgaaaggcaggaaaaaaactttttcttcctttcttcttcccctggtctttctcaccatctatcagggtgtttgtagtcccaggaatgtgaggatactcaggtatgcrggtatgcgggcagatcctcaccattgcttataatctggcatatgtgcagcccactggctatgaggtttccctcctacccgctgcaagaccaaaggctccggaagttcaatcaggcatctttttctttccactggccatagcaactcaaggttgttgggtgacccctgagagtattatcaccttcatgtatggataaatgagacacctggatggagacaagagg

SEQ ID NO: 525361 - DNA, 605 bp, Homo sapiens
agttgtatataccttgattatctcacaggataatttttgatgctccgaaaataacaaatgtaaaataccttagaaaaatttaaaatacaaaaacaggttgattagctataagcaaattaatattggtaaaagtacctgaacatagaacttaagtgagtacaatcataatatattgtaattaaatttggcacacttttagactgtatcaaaatagttgataaggaaaactacatttctttgtatacaatactttctcactttcttttggatttagaaatcctataacagtaaatagtattttagagaatagctttttttttgcaaattaatttttccataaaaacctaccatattactagaaataagtaaaaaacagaatatcatcaccctaatgtattcacacatacatatgaatatatatatataaaataacatcatgttatataagggagaagctgtgattaatccaatcataattttataatgtattttacaaaaagtagaaatgcatgctagggaacagaagaatttttaatatgaatgttacatatrtatatatcacattaacacattttctgagatttaaaaaaacattttttattgaa

SEQ ID NO: 525362 - DNA, 600 bp, Homo sapiens
ggtaaagtacccattttgaaaattaatttaattacatgtttaaagtttaattacatttaattaagcatttaagtttaatatgaaataaatgaattatcagttaactctatgaaatgaaatactgccttgataattaaaatctataaattttcctattctgtgcgaaactgctagttcttacaaaacactcagaaaatatgtattttaaagactataggattatatcctcaaggctgattaaggagtaatttttctggcacctacgttggtgggtgtacatttactgcctcagtaaatggaggtagcacrgtacaaaaaaaaaaaagagcagaggttttagaaacttgagtttgggtgttagctcagtcactgacagcctgcaacagtaggagagttacttagcaactctaacctgaaattgcttacaaaatggggttaacattctcttggagggttgttggcaaaatttaatgagttatcccatattcaaacgtctgggagagtacctgacttggaaaatatatttgacacatgctaatcccctccttacctcagctgttgagtaaatgaagaataacactgtacttgctggtgtaaaaa

SEQ ID NO: 525363 - DNA, 521 bp, Homo sapiens
tttgctgggggcacaggtgacctttcctatgtctaggaacatatcaggctttatgttcttccctttcctttcagtgtctacattgtacccattcttcaaggtccagagggaatgccacttccttcttgaagtttcctggcagctccaattcacactcatgacatctaaataattatcctcatgtgttgtacttgggacaaaatagttgaatcctctttttcctcttgtttcgttaacaggatacctaaacggaccattacctgcgacaacgggacatgcgcggatagctatctgaagtacaaatttgtcatttccaaaatactggttctttttctaaagaagtagtaaaaaagaaagaaaaaaaagaaccagtattttggaaatgacaaatttgcttagtcgcccaggctggagtgaggtggcattatcaaagctcactgcagcctcaatttcttgggmtcgagggatcatcccatctcaaccgctccagtagctgggaccataggtgtgcgtcaccgcat

SEQ ID NO: 525364 - DNA, 590 bp, Homo sapiens
gtggtggtgggtggaggaaccccgtcccgcctctgaggaccgggagacagcccacaggccagagttgggctctagctcctggtgctgttccygcattcacccactggcctttcccacctctgctcaccttactgttcacctcatcaaatcagttctgccctgtgaaaagatccagccttccctgccgtcaaggtggcgtcttactcgggattcctgctgttgttgtggccttgggtaaaggcctcccctgagaacacaggacaggcctgctgacaaggctgagtctaccttggcaaagaccaagatattttttcctgggccactggggaatctgaggggtgatgggagagaaggaacctggagtggaaggagcagagttgcaaattaacaacttgcaaatgaggtgcaaataaaatgcagatgattgcgcggctttgaatccaattgacctgttcatttctcagtgttgggtgcttagctgagcagagagcagaagtctattcaggctggatctctggatcccccagccctcctccctgtctccagaacttgagcgtgatgttcacgggtggaggtgtctgcagagctgc

SEQ ID NO: 525365 - DNA, 590 bp, Homo sapiens
gtggtggtgggtggaggaaccccgtcccgcctctgaggaccgggagacagcccacaggccagagttgggctctagctcctggtgctgttcctgcattcacccactggcctttcccacctctgctcaccttactgttcacctcatmaaatcagttctgccctgtgaaaagatccagccttccctgccgtcaaggtggcgtcttactcgggattcctgctgttgttgtggccttgggtaaaggcctcccctgagaacacaggacaggcctgctgacaaggctgagtctaccttggcaaagaccaagatattttttcctgggccactggggaatctgaggggtgatgggagagaaggaacctggagtggaaggagcagagttgcaaattaacaacttgcaaatgaggtgcaaataaaatgcagatgattgcgcggctttgaatccaattgacctgttcatttctcagtgttgggtgcttagctgagcagagagcagaagtctattcaggctggatctctggatcccccagccctcctccctgtctccagaacttgagcgtgatgttcacgggtggaggtgtctgcagagctgc

SEQ ID NO: 525366 - DNA, 590 bp, Homo sapiens
gtggtggtgggtggaggaaccccgtcccgcctctgaggaccgggagacagcccacaggccagagttgggctctagctcctggtgctgttcctgcattcacccactggcctttcccacctctgctcaccttactgttcacctcatcaaatcagttctgccctgtgaaaagatccagccttccctgccgtcaaggtggcgtcttactcgggattyctgctgttgttgtggccttgggtaaaggcctcccctgagaacacaggacaggcctgctgacaaggctgagtctaccttggcaaagaccaagatattttttcctgggccactggggaatctgaggggtgatgggagagaaggaacctggagtggaaggagcagagttgcaaattaacaacttgcaaatgaggtgcaaataaaatgcagatgattgcgcggctttgaatccaattgacctgttcatttctcagtgttgggtgcttagctgagcagagagcagaagtctattcaggctggatctctggatcccccagccctcctccctgtctccagaacttgagcgtgatgttcacgggtggaggtgtctgcagagctgc

SEQ ID NO: 525367 - DNA, 590 bp, Homo sapiens
gtggtggtgggtggaggaaccccgtcccgcctctgaggaccgggagacagcccacaggccagagttgggctctagctcctggtgctgttcctgcattcacccactggcctttcccacctctgctcaccttactgttcacctcatcaaatcagttctgccctgtgaaaagatccagccttccctgccgtcaaggtggcgtcttactcgggattcctgctgttgttgtggccttgggtaaaggcctcccctgagaacacaggacaggcctgctgacaaggctgagtctaccttggcaaagaccaagatattttttccygggccactggggaatctgaggggtgatgggagagaaggaacctggagtggaaggagcagagttgcaaattaacaacttgcaaatgaggtgcaaataaaatgcagatgattgcgcggctttgaatccaattgacctgttcatttctcagtgttgggtgcttagctgagcagagagcagaagtctattcaggctggatctctggatcccccagccctcctccctgtctccagaacttgagcgtgatgttcacgggtggaggtgtctgcagagctgc

SEQ ID NO: 525368 - DNA, 541 bp, Homo sapiens
agctgctgaagcaactatgaagcattcacaaaggaagctcctcttcccttgaggctcasggcacacactttatttcccagagtggaagggagaatctacccaaaaatggaaagtacaggattctgctaacagattggaaggttggcagaaataatttgcataatcttcttagaagaggaggatcttaagcaatagtagacagaatagggtaattccatttttaaggaacagtctggcagacactcaaatgtgcattggaaagagccaaatatgagtccaagaaagtcacaaatgtgagtccaaaaaagcttggcttagactggtcgacaaagcccaagattggggccttgatcctgatggtggaaggagccgtttgggagtctggatcaattagcactaaccatacgacatgtaagtagcaatgtaatgtgaaaatcctcctagaaaaacaacctgtgccccccaccaggttcacttaacatggcctacaggcctggcccagaagtggtacttgagctaaaccttaaggaatggatgggaa

SEQ ID NO: 525369 - DNA, 541 bp, Homo sapiens
agctgctgaagcaactatgaagcattcacaaaggaagctcctcttcccttgaggctcagggcayacactttatttcccagagtggaagggagaatctacccaaaaatggaaagtacaggattctgctaacagattggaaggttggcagaaataatttgcataatcttcttagaagaggaggatcttaagcaatagtagacagaatagggtaattccatttttaaggaacagtctggcagacactcaaatgtgcattggaaagagccaaatatgagtccaagaaagtcacaaatgtgagtccaaaaaagcttggcttagactggtcgacaaagcccaagattggggccttgatcctgatggtggaaggagccgtttgggagtctggatcaattagcactaaccatacgacatgtaagtagcaatgtaatgtgaaaatcctcctagaaaaacaacctgtgccccccaccaggttcacttaacatggcctacaggcctggcccagaagtggtacttgagctaaaccttaaggaatggatgggaa

SEQ ID NO: 525370 - DNA, 457 bp, Homo sapiens
ctggtgagagctacttctccctgaacctcagttccttcatgtgtaagatgcaggtatatcatcctaagatcttcgtcagctctgacaaacatcctaggaacccactctaactcctcattttttcatgcctcctccagtgctcttcactcatgctgtttccccttcttctcttggcttcagactctggacattaatgtgaaggccccagccctgatgacaaaggcagtggtgccagaaatggagaaacgagggtacagagagtgagagagagcctgggtgagaggggacmccacacgggctgagggcactggtccacaatgggaagatggtcagctctcttctttttccagaggcggctcagtggtgatcgtgtcttccatagcagccttcagtccatctcctgtaagaacccttttgtctacctcttccatcccaccctccactccacatctttcca

SEQ ID NO: 525371 - DNA, 457 bp, Homo sapiens
ctggtgagagctacttctccctgaacctcagttccttcatgtgtaagatgcaggtatatcatcctaagatcttcgtcagctctgacaaacatcctaggaacccactctaactcctcattttttcatgcctcctccagtgctcttcactcatgctgtttccccttcttctcttggcttcagactctggacattaatgtgaaggccccagccctgatgacaaaggcagtggtgccagaaatggagaaacgagggtacagagagtgagagagagcctgggtgagaggggacaccacacrggctgagggcactggtccacaatgggaagatggtcagctctcttctttttccagaggcggctcagtggtgatcgtgtcttccatagcagccttcagtccatctcctgtaagaacccttttgtctacctcttccatcccaccctccactccacatctttcca

SEQ ID NO: 525372 - DNA, 457 bp, Homo sapiens
ctggtgagagctacttctccctgaacctcagttccttcatgtgtaagatgcaggtatatcatcctaagatcttcgtcagctctgacaaacatcctaggaacccactctaactcctcattttttcatgcctcctccagtgctcttcactcatgctgtttccccttcttctcttggcttcagactctggacattaatgtgaaggccccagccctgatgacaaaggcagtggtgccagaaatggagaaacgagggtacagagagtgagagagagcctgggtgagaggggacaccacacgggctgagggcactggtccacamtgggaagatggtcagctctcttctttttccagaggcggctcagtggtgatcgtgtcttccatagcagccttcagtccatctcctgtaagaacccttttgtctacctcttccatcccaccctccactccacatctttcca

SEQ ID NO: 525373 - DNA, 457 bp, Homo sapiens
ctggtgagagctacttctccctgaacctcagttccttcatgtgtaagatgcaggtatatcatcctaagatcttcgtcagctctgacaaacatcctaggaacccactctaactcctcattttttcatgcctcctccagtgctcttcactcatgctgtttccccttcttctcttggcttcagactctggacattaatgtgaaggccccagccctgatgacaaaggcagtggtgccagaaatggagaaacgagggtacagagagtgagagagagcctgggtgagaggggacaccacacgggctgagggcactggtccacaatgggaagayggtcagctctcttctttttccagaggcggctcagtggtgatcgtgtcttccatagcagccttcagtccatctcctgtaagaacccttttgtctacctcttccatcccaccctccactccacatctttcca

SEQ ID NO: 525374 - DNA, 637 bp, Homo sapiens
tgggtttgggcaaaacctcctgccagatctagaaacctgccagatctaggaaccttagtagaagctggcaaggtgtttagagttctcctctgggattcttaatagtcgcacagaattccccaccagggattaatacccatgcacagtattctgcttaacagaggtgctggtgatgctgatgtgcacccactctccacgctgcatcacaccttcgggatgtccagaatattcatgcctaccagaacatatggatcttctttgggacaatattaaactctaaaaattccactttttttagagacaggatctcaccctgtcacccaggctggaatgcagtggcacaatcatagctcactacagcctccaactcctgaactcaagtcatcctgcctcctcagcccgctgagtagctggtaatacaggtgcacgcaaccatratcagctaattttttatttcttgtagagataagagtctcactatatggcccagactggtctcaaactccttgcctcaagtgatcctcccatctctgcttcccaaagtgctgggattccaggcgtgaaccactgtgcccaactccctataaattcttaactcacagccatcttcatcctaaatttgatgagtttagatctc

SEQ ID NO: 525375 - DNA, 456 bp, Homo sapiens
gaaaaggtaagggcaatccttgtttaattaaattcaaaatgagtgagcagaacatatgtaaccagaaggacaaatccacccttcccttttgtcaagcacatctgtgtgaagagaccaccaacaggctttgtgtgagcaacaaggctgtttattcacttgagtgcaagtggrctgagtctgaaaacagagtcagtgaagggagatggggaaggggttgctttataggagttgggtaggtaatggaaaattacagtaaaaagtggttatctattgttagcagaggagggggtcacaaggtacatggtggggagatgataagacccattgtccagaagaagactgtcacaaggtcgattgatcagttaaggtaggacagggacaggtcacaatggtggaatgttgtaatgttggttaatcagttaaggcaggaactggctgttttacttcttgtgtggt

SEQ ID NO: 525376 - DNA, 456 bp, Homo sapiens
gaaaaggtaagggcaatccttgtttaattaaattcaaaatgagtgagcagaacatatgtaaccagaaggacaaatccacccttcccttttgtcaagcacatctgtgtgaagagaccaccaacaggctttgtgtgagcaacaaggctgtttattcacttgagtgcaagtgggctgagtctgaaaacagagtcagtgaagggagatggggaaggggttgctttataggagttgggtaggtaatggaaaattacagtaaaargtggttatctattgttagcagaggagggggtcacaaggtacatggtggggagatgataagacccattgtccagaagaagactgtcacaaggtcgattgatcagttaaggtaggacagggacaggtcacaatggtggaatgttgtaatgttggttaatcagttaaggcaggaactggctgttttacttcttgtgtggt

SEQ ID NO: 525377 - DNA, 273 bp, Homo sapiens
ctgcacatatactaaatgaatcttgagcaaacatgaattctattcaaaagtcatgcctagaactggatttcacaaaccaggattctttcccctttaattgtagggactggcataaggctgccaaactggtgatttcaccaataacacatctctaaacctacccatctgctttcatcatcttttctaaaagaaaacactaacacacacacacacacacaaaaagaagcaaasgtatactccacaataaaggactgttaaataagcttagcttta

SEQ ID NO: 525378 - DNA, 555 bp, Homo sapiens
tgacttctgatctagcctttacagtattattaattcaatgacatcayaaagctggcaagggaaagcttcacgcttgccctacaaagacagatagcagtgccttagagaggtccttacaagtttcttaggaaagtgacttgaaaaaataaaagtcagcttactttttctttttcccccaccatcctgataaaggactacgaacgcttttctctcgcttttgggaaaagcctaccgaactggatttcccacttatttgccttacatctttgctctgccttcatgcatttgcagcaaagcattctctttccagtggtgtagagatagcttatctcagggcaagcccctgggatttggtctaaggttaatactggagaaagggcagagcatcctccaacgttcccccagctcagacagacaaccattgaaaggcgcctggcatgcagttggcctcaaaacctgacttggcagcaaactctaattaaatgaaactcgatcgcagagtgcttgttgatcttaacttgcctaaagttccagacttggacagcaggttgaaac

SEQ ID NO: 525379 - DNA, 595 bp, Homo sapiens
gctaaggaatcatgagccacagggactgcagcagttgttcctttataaaacatagattcccgatatcmcagaaatccatattgtaaggaaaatttatatttaaggcatacatctactttcagagataatatgcacatgttcatagaaaaatagatttaatttgcatttaataggtttggtatcaaaactttctcattgactggaggagtctcagcttcacactcttgtttttctctaaagttgatttgagaaatacgatgtgtctttgccggactttcaaagagatataaatcataaattaaaaacaacaacaaaaagtcctctgttctgtgtgttctgagttcataaattattgaccctccttaatcagatgtctaccaccttgaccaaggtcaaaacacaatcatataaaagaaacatgttcaaatcattttttgaagtaatgagagatgtataaataaatagataaaatgtgggctgttattcatgccttcaagtagtctatgattctaaccgattaggcaagactgatataaaaacaactacagagccaagtgccaggatataattagtgtacatgacaagggataaaaca

SEQ ID NO: 525380 - DNA, 588 bp, Homo sapiens
aatcatgagccacagggactgcagcagttgttcctttataaaacatagattcccgatatcacagaaatccatattgtaaggaaaatttatatttaaggcatacatctactttcagagataatatgcacatgttcatagaaaaatagatttaatttgcatttaataggtttggtatcaaaactttctcattgactggaggagtctcagcttcacaytcttgtttttctctaaagttgatttgagaaatacgatgtgtctttgccggactttcaaagagatataaatcataaattaaaaacaacaacaaaaagtcctctgttctgtgtgttctgagttcataaattattgaccctccttaatcagatgtctaccaccttgaccaaggtcaaaacacaatcatataaaagaaacatgttcaaatcattttttgaagtaatgagagatgtataaataaatagataaaatgtgggctgttattcatgccttcaagtagtctatgattctaaccgattaggcaagactgatataaaaacaactacagagccaagtgccaggatataattagtgtacatgacaagggataaaaca

SEQ ID NO: 525381 - DNA, 575 bp, Homo sapiens
tcatcctgagacctttctttttatcatttccctgagtcccttcccctttttcttttctttctttctttctctcctttttgtttttttttttttttttttttgacacagggccttgctctgtcatccaggctggagtgcagtgatgtgttcatagctcactacagcctcaagctcctgggttcaagtgatcctcccacctcagcctctggagtagctgggactacaagtatgcaccaccatgcccagctacacacacacacacacacacacacacacacacacacacaygcacacacacacgtagagacagggtctctctatgttgcccaggttggccttgaactgctaacatctcagcctcccaaagctctggggttacaggtgtgagccactgaacccagcccctttctttcactttttttaatgttatgtgttcttttcctgtatcccattatgttcattttacttggtttactctcttattttggtggagcacattctcctcgttgcccaaggaaggatgcataagatggaaaaattctgagatctggaatatcggaaaatgcctttattct

SEQ ID NO: 525382 - DNA, 575 bp, Homo sapiens
tcatcctgagacctttctttttatcatttccctgagtcccttcccctttttcttttctttctttctttctctcctttttgtttttttttttttttttttttgacacagggccttgctctgtcatccaggctggagtgcagtgatgtgttcatagctcactacagcctcaagctcctgggttcaagtgatcctcccacctcagcctctggagtagctgggactacaagtatgcaccaccatgcccagctacacacacacacacacacacacacacacacacacacacatgcacacacacacgtagagacagggtctctctatgttgcccaggttggccttgaactgctaacatctcagcctcccaaagctctggggttacaggtgtgagccactgaacccagcccctttctttcactttttttaatgttatgtgttcttttcctgtatcccattatgttcattttacttggyttactctcttattttggtggagcacattctcctcgttgcccaaggaaggatgcataagatggaaaaattctgagatctggaatatcggaaaatgcctttattct

SEQ ID NO: 525383 - DNA, 434 bp, Homo sapiens
agttccccaccgccttggaggtgcctccacaaaagggaagcagctttattttcattcaaaagccttaccaaatcccttcaccacttccattgtggatctagaaccactccccctacattcctagtgtctcatgggggaagccctttgtaggatatttggagcaagagagacctgtgttcaaatcccagttttgccatttcctagcactgtggctgtgtgcaagagaactcactgagcctctgtgctytcatccataaagtggggacaatgctgcctccctctgggtcatagtctgttctgtgctgctatgacagagtaccacagactggataattaataatgaaggggaatttattggcttatggttctagagactgggaagtctcaagattgtggggctggcatctggcgagtgccttcctgatgcatcataa

SEQ ID NO: 525384 - DNA, 581 bp, Homo sapiens
ctttctgacttcatatccagagtcctgtcaaataacacatacccttatttcattcaatccgtgaataaaagtttctatattttgaggatgatcaagtactgctttagcacaatatagatgaaaaagttaaaatgaacatatttaaagataatactaataacgtttaataatatgaaaaatggtgttttcagaaaccaagtattgtcagtaaacctttatytgggttcttaacaagttactctctcattcatttgattcttttcatgtttaagatttacaaagaacagcccctattgccagcatgtttcagctaggccaacaattttgtctcttaaactgaactccttggaggatatgctctggcaaagctgttatctttatgagtccaaggcaggtaacatcgacaacatcacgcccattaaaagctaagtttggccaggcatagtggctcatgactaatcccagcactttgagaggccaaggcaggtggataggttgagctcaggagttcgagaccaggctgggcaacatgcaaaaccccatctctacaaaaaatacaaaaattagccaggcttggtggc

SEQ ID NO: 525385 - DNA, 657 bp, Homo sapiens
ctggtgctgtcattttaaaaataccatagactgggtgacttatataaccgaaatttattgctcacagttctggaggctgggaagtccaagatcaaggtgctattagaatgagccaattctgatgcaagtggatggagcaaatacagtcttaaggctcaatattatgagtatatacttcagagtatcaaccctctgagctctgtaccggtctgcactaggtggggacattcacagcctagcttgcccagaaacagataatcaggactactggaggtttggaaagtgtggcattcatgtaaagaaagttacagcaacaagttaagaagccctgccacacttctggtttgtgaacaaccagcattcaagaatgcacacctatgccttayaggacatctctgaacgcaagttgttaaacttttcaaatatatgtcttggttttagtgtagctcttcagcctgtcaagaccacttaagatagtataatttgatctgagattgaccatctcagctatctgttttagcttagtatcatctatacatctgagtgaaatgtctcctacaggttcatccaaagctctggaacaacatagcagcatcactggttatctagcccaggaaaaatcacctcacctctttgatcctccatgtatttccctat

SEQ ID NO: 525386 - DNA, 657 bp, Homo sapiens
ctggtgctgtcattttaaaaataccatagactgggtgacttatataaccgaaatttattgctcacagttctggaggctgggaagtccaagatcaaggtgctattagaatgagccaattctgatgcaagtggatggagcaaatacagtcttaaggctcaatattatgagtatatacttcagagtatcaaccctctgagctctgtaccggtctgcactaggtggggacattcacagcctagcttgcccagaaacagataatcaggactactggaggtttggaaagtgtggcattcatgtaaagaaagttacagcaacaagttaagaagccctgccacacttctggtttgtgaacaaccagcattcaagaatgcacacctatgccttataggacatctctgaacgcaagttgttaaactwttcaaatatatgtcttggttttagtgtagctcttcagcctgtcaagaccacttaagatagtataatttgatctgagattgaccatctcagctatctgttttagcttagtatcatctatacatctgagtgaaatgtctcctacaggttcatccaaagctctggaacaacatagcagcatcactggttatctagcccaggaaaaatcacctcacctctttgatcctccatgtatttccctat

SEQ ID NO: 525387 - DNA, 657 bp, Homo sapiens
ctggtgctgtcattttaaaaataccatagactgggtgacttatataaccgaaatttattgctcacagttctggaggctgggaagtccaagatcaaggtgctattagaatgagccaattctgatgcaagtggatggagcaaatacagtcttaaggctcaatattatgagtatatacttcagagtatcaaccctctgagctctgtaccggtctgcactaggtggggacattcacagcctagcttgcccagaaacagataatcaggactactggaggtttggaaagtgtggcattcatgtaaagaaagttacagcaacaagttaagaagccctgccacacttctggtttgtgaacaaccagcattcaagaatgcacacctatgccttataggacatctctgaacgcaagttgttaaacttttcaaatatatgtcttggttttagtgtagctcttcagcctgtcaagaccacttaagatagtataatttgatctgagattgaccatctcagctatctgttttagcttagtatcatctatacatctgagtgaaatgtctcctacagsttcatccaaagctctggaacaacatagcagcatcactggttatctagcccaggaaaaatcacctcacctctttgatcctccatgtatttccctat

SEQ ID NO: 525388 - DNA, 458 bp, Homo sapiens
caaccttatgattggcagtacatggtatggagatggtccaggtcctcctaagatggcccaatatgacaatggaagcggatatagaaggggaggttctagttatggcagtgaaggctatggcagtggctatagcagtggaggctatcgtagcggaggctatggtggcagctccagctcctgtcgggcaggatatggtgcaggtgttggtggaggstatagagaagtttcctgaggtggctatagaggcaactctggaggagattacagagggcctagtagaggctacagatgatctgggggattccagcgaggaggtggtaggggggcctatggaactggctactttggacaaggaagagaaggtggcatctgttaaggcttggttatgtcagttcctgtgtgtagacagtaagaaaaaaaaagccatgctatgtgtgacatttttttccaatgtttat

SEQ ID NO: 525389 - DNA, 621 bp, Homo sapiens
agtttactgaaaagttaaatggaaaacaatttacttacaaaaatgtgatgaatattacattgaaagaaccatgacctactgggacatatacaaaggtgaagctaatatatartaatttccatacatgccaaatgatgcattttaaaaagaggaaaatatcaacttttttaccaccagatttaaaagctaaaattgtttacaataaattcctgtgaagatacatgttcccaaatattaatgtcaaattcagtcttcatcaaatatgaacatagatgtgcaattttttttcaaacaatggcaatgtttcaactcgccatcactaaataggttatttcattgttttggaagtagggtggatttattctactcagttttcacgttcttattgtgttcagctcttccttaggatcagtgttttcctagcgaaatagttgtacttaggcagcttctaggtacagactaatgatagctagtcctcatatagtgctttctgtgtgccaggcactttgaagcctgttatacatattattacaggttattctccgaacaacccacaagataagtattgctattatccccatttaacacagaaaggtcaggtgacttgcccaaccttatgca

SEQ ID NO: 525390 - DNA, 482 bp, Homo sapiens
atgacaattgtataaaaatagaatttaagataaaacatttaagaaaaacagaatgcaagtttacctgaataaataacaataactgtgcgtgtggtcaagggcctggaaggaacatgccaaaatgaacattataccaagataatggggttataaatagtttcctttttctttagaaaatttataaaatgatgttaaattttgctggaattttttaaaagaccactgaagttttctaattagaggagcactttagtttctcattgaaatgattactctgattctgtaaagagcatatggaaaaagaatgacttttttttagcgcattatagctttttaatgacaaactgtacttgcattgtttgctggaggtttcaatatttgaaaagtmtcgaaggaacaataacagtaaaaaaaagaaacagtacccttttttattgtactactcttcctcataaatatgcatattcggggggttgtaatat

SEQ ID NO: 525391 - DNA, 615 bp, Homo sapiens
tcatattgttggaggtttatagtcaggacagatgcttagaaatgaaatctctgagccaaaaagtaagagaataggtagttttgctaggtcttgccatagatccctttagaagtgatgtaccatttttcattcccactagcaatgtatgagaatgcccatttctgcacaacctcacaaaatattattgctttttaatttttaccactctaaaaatgagaactgttatctctgtgctattttagtttgtatttctctatgatttaatttgaatggctttagatgtttaaggaccacttttgtatcatttttaatgtaaattgtttgttcattctttttctaatttttctatcaggtttttgatcttgtgtccctcaacttttaagagttctttgtctctgcgatgtgtggtgaattttcttccagttcrtcagttgccttttggtggtgcttttgatatggggctgcttttctattcaaatttttttatttttatatagtcagattttcaatcttttttgtctctggattttgagtcatagttataaagattttccctatatcaagtttaatgagagctcaaggttaataagagttcactcatagtttattccagta

SEQ ID NO: 525392 - DNA, 575 bp, Homo sapiens
aatgaacacatatagcataatatcmgattttctaccaactcgcatcagcggaaaggatctatttttctggcccttctcctttctgtgaatgaagcacattaaggttaaatgactttcccaggggccccgagccaggaagtggagagtcggagcacaaacccagattcctaaatccaagatggggagacccgcagtatgccaatctgagcattgcacattgaggctgaaccaaaaggagaacaaatcaggtctctttaaagctacattggctatcatttatatttatacacgaaattcagaagaattttatctttgaaaacatctaaatgtagtcttacctctgagttataaaagtcttaagtaaacacatgaattttaaattttaagcctagaacaactcacaggtggtccaggtggtccgggtttcccagggggtccgtcgctgccctgcaagggatatatagacatatcagcggcgtagacgtttctaccccaggtttacaaactatcttctgaaattaatcacagagccatcttctgaaatcgatatgacttgccatgttgtttcagccttg

SEQ ID NO: 525393 - DNA, 575 bp, Homo sapiens
aatgaacacatatagcataatatccgattttctaccaactcgcatcagcggaaaggatctatttttctggcccttctcctttctgtgaatgaagcacattaaggttaaatgactttcccaggggccccgagccaggaagtggagagtcggagcacaaacccagattcctaaatccaagatggggagacccgcagtatgccaatctgagcattgcacattgaggctgaaccaaarggagaacaaatcaggtctctttaaagctacattggctatcatttatatttatacacgaaattcagaagaattttatctttgaaaacatctaaatgtagtcttacctctgagttataaaagtcttaagtaaacacatgaattttaaattttaagcctagaacaactcacaggtggtccaggtggtccgggtttcccagggggtccgtcgctgccctgcaagggatatatagacatatcagcggcgtagacgtttctaccccaggtttacaaactatcttctgaaattaatcacagagccatcttctgaaatcgatatgacttgccatgttgtttcagccttg

SEQ ID NO: 525394 - DNA, 575 bp, Homo sapiens
aatgaacacatatagcataatatccgattttctaccaactcgcatcagcggaaaggatctatttttctggcccttctcctttctgtgaatgaagcacattaaggttaaatgactttcccaggggccccgagccaggaagtggagagtcggagcacaaacccagattcctaaatccaagatggggagacccgcagtatgccaatctgagcattgcacattgaggctgaaccaaaaggagaacaaatcaggtctctttaaagctacattggctatcatttatatttatacacgaaattcagaagamttttatctttgaaaacatctaaatgtagtcttacctctgagttataaaagtcttaagtaaacacatgaattttaaattttaagcctagaacaactcacaggtggtccaggtggtccgggtttcccagggggtccgtcgctgccctgcaagggatatatagacatatcagcggcgtagacgtttctaccccaggtttacaaactatcttctgaaattaatcacagagccatcttctgaaatcgatatgacttgccatgttgtttcagccttg

SEQ ID NO: 525395 - DNA, 467 bp, Homo sapiens
attatgagaaaaaactattttaaaatatgcttttgttatttcagataaccatgtgatacatcaagttctagactgaatgattccattctttcaggatttagtctcctttactgagtaaaatattctttctggattgccataccattctttgtcatcatacaattcctttaccttttactattatgatatatgcattttcatatactttataaatattagatgatgtggccatggaaayattactgcatattgattatcagcattctataggactgtgagctggatcaagtttctttgcatcagtgggatcaaggaccaagttcttctaggtttgtccattcaatgccaaatggcatcatgtgttacttcaggtctattcatgtgatatgatatgaagaagggcttaaaaattctacttgaacatgctagaattcctcataagtcttgggccaaatcttgtgtgtatt

SEQ ID NO: 525396 - DNA, 596 bp, Homo sapiens
ctgactacttaagcagttgctaattgacaaagacatctctgtttcccttatagttatttttgtggaagaccaaaaaaagaaaaaaatctgttccttaccatctataactgataaggagcttccccaggtagagagaactcaaatgctgggaaactcggccaataaagaagtgaccacttatgagggcttttaaattaaaaggctgaaagatcaccttacayttgcttccattattatcttaagtttacttcaaggaggagacagcagatgtatacccacaatcaaaacagtatttgatctcatgataacatattaccttcagtagtaaaatttgaaaacatacattgttactgtatggaaattgactaggaacttacagaattccagttttaattagcaatacaaccagtgaatcacaaggtggcatctaggttttagatactattcagtgtagaagatctatattgaaaaagcatcagtaattacatatctacagtttgcaattacaacatgaaatgaatagctgatgctatgtaggcagcatcttgcctaagactgcacagaacaaatacaagaagaaagtagattaaaaagat

SEQ ID NO: 525397 - DNA, 652 bp, Homo sapiens
ttgctaattaattgtgggaatttattataatttttgctatttttttctgattgctagttcatgacaccttttcattactgcagcattggacatagcagggtgatacaggttcaggggaacatttgctcatccaggcttttctgaataaggaattactcaggaagaagagctccctgggccaacacacaagtgttgagaattggcactgcagcctgaggcttagctgagacctgtagataggtgggcaagagtgatgtggctgtttatacccagaaatgtgtttctccaagatgcataatggccctctgagctctgacctggccttgtgtatgtttctttaataaaagacgccaactatcacatcataaaggcaaaatgtttcctttagtgtctttactgtgcgttaaatcctagctctcagttacctttctaaagatctgagttgagcttttcattgttcctttcagacaaaaaaggactaaaatcaggaaraaaacaaagtacaccatcctggataacatggatgaacaggaaagaatggaactgaggcccaaatgtggtaagacagtctgcagaatgactgcctggcacctttatatgatttaacctaggtaggcctgagggctaacttggatagagggagaacgatttg

SEQ ID NO: 525398 - DNA, 652 bp, Homo sapiens
ttgctaattaattgtgggaatttattataatttttgctatttttttctgattgctagttcatgacaccttttcattactgcagcattggacatagcagggtgatacaggttcaggggaacatttgctcatccaggcttttctgaataaggaattactcaggaagaagagctccctgggccaacacacaagtgttgagaattggcactgcagcctgaggcttagctgagacctgtagataggtgggcaagagtgatgtggctgtttatacccagaaatgtgtttctccaagatgcataatggccctctgagctctgacctggccttgtgtatgtttctttaataaaagacgccaactatcacatcataaaggcaaaatgtttcctttagtgtctttactgtgcgttaaatcctagctctcagttacctttctaaagatctgagttgagcttttcattgttcctttcagacaaaaaaggactaaaatcaggaagaaaacaaagtacaccatcctggataacatggatgaacaggaaagaatggaactgaggcccaaatrtggtaagacagtctgcagaatgactgcctggcacctttatatgatttaacctaggtaggcctgagggctaacttggatagagggagaacgatttg

SEQ ID NO: 525399 - DNA, 622 bp, Homo sapiens
tcgtgttatgtcaaaattcataggttgaagctctaacccccagtacctgaaatgtatttggagatagagcctttaaagagatgtgattaattaagttaaaatgagtaaaatgaggccattaagatgggtcctaatccaatcgactggttttcttattagaagaagagattaggacctgcagagagacatctggggcacgcaggcacagaggaaagatcatgggaggacatggcaagaaggcggccatctacaagccaagatgagaggcgtcaggagaaaycaaacctgccgacaccttgatctcggtcttctgagaattcattgagcgattcacttattcaattatgtatcctttttttttgcatgtatataatagtgaaaggaaagtttaaaaaagctaccaatcttgccaagttactttcaaagtcatttatgaagaggtactgccagggatttcctaggtagagatgaaacagttctgtatcttgattcaggtgctgcctacacaaatctaactattgatgtgatcaaattaggtagaggtgtacaaacactcacaaatgagtgcacataaaaacgagtgaaattggaataaggcctggattaacagttttgcactggt

SEQ ID NO: 525400 - DNA, 622 bp, Homo sapiens
tcgtgttatgtcaaaattcataggttgaagctctaacccccagtacctgaaatgtatttggagatagagcctttaaagagatgtgattaattaagttaaaatgagtaaaatgaggccattaagatgggtcctaatccaatcgactggttttcttattagaagaagagattaggacctgcagagagacatctggggcacgcaggcacagaggaaagatcatgggaggacatggcaagaaggcggccatctacaagccaagatgagaggcgtcaggagaaaccaaacctgccgacaccttgatctcggtcttctgagaattcattgagcgattcacttattcaattatgtatcctttttttttgcaygtatataatagtgaaaggaaagtttaaaaaagctaccaatcttgccaagttactttcaaagtcatttatgaagaggtactgccagggatttcctaggtagagatgaaacagttctgtatcttgattcaggtgctgcctacacaaatctaactattgatgtgatcaaattaggtagaggtgtacaaacactcacaaatgagtgcacataaaaacgagtgaaattggaataaggcctggattaacagttttgcactggt

SEQ ID NO: 525401 - DNA, 622 bp, Homo sapiens
tcgtgttatgtcaaaattcataggttgaagctctaacccccagtacctgaaatgtatttggagatagagcctttaaagagatgtgattaattaagttaaaatgagtaaaatgaggccattaagatgggtcctaatccaatcgactggttttcttattagaagaagagattaggacctgcagagagacatctggggcacgcaggcacagaggaaagatcatgggaggacatggcaagaaggcggccatctacaagccaagatgagaggcgtcaggagaaaccaaacctgccgacaccttgatctcggtcttctgagaattcattgagcgattcacttattcaattatgtatcctttttttttgcatgtatataatagtgaaaggaaagtttaaaaaagctaccaatcttgccaagttactttcaaagtcatttatgaagaggtactgccagggatttcctaggtagagatgaaacagttctgtatcttgattcaggtgctgcctacacaaatctaactattgatgtgatcaaattaggtagasgtgtacaaacactcacaaatgagtgcacataaaaacgagtgaaattggaataaggcctggattaacagttttgcactggt

SEQ ID NO: 525402 - DNA, 597 bp, Homo sapiens
actctgtttttcagaaaacttgtattcatctctaatcctagattaattagaaaagtgcccagttctcagggaatactgaccattaatctttatatgcaaagtgttaagttttctacaggataattaacatactgtatcatacatgaaccaaaaataattcatacattctaggccactcagatacagttgataaagtctatgcagtgatgcggttgataaagtctctgcagtggctaaaaattatagatactgaagtgaaaaaatcatttccactcttatttctataggacaagataacatagtatgaaaaatatagctcctaatacaaataagcagaagaaaaacaagacaaaaatattaccactataaaaaagaagaaasgcaaaaagtgaataccaaaacattttaatgttttcaaaaaggtattgggtttttaatatataaaacattaaggtcatagaaaatggtaataaaatagtatgaatataagagtgcaagtgtgagtcatgaaaggaaaagaaacgtaactgtggctactttaggactcagatcaaaatggcatggtaccaaatggagtcccaagttgaaattttgaaa

SEQ ID NO: 525403 - DNA, 514 bp, Homo sapiens
ctgtcaggagtagcacactggaagaagagaggaaccaatcaagaccattcgagctagtaatggggataatatagatgatgccttctctatgcttttcatgactagaaacagaaaattttaaacagcaattctttgttgttaatgatgatgatgatgataaggtgatttaaatgtaacattatattgagaaaagtatccggaattctgctttgcttttatcatttgaaaaatggttttcttccaaagcttaactcaattaatgttttacctcccccaatatgccagaaccacaaattctgcaggatgttagttatgcattaaattcaccttctcatattcacgacagctaaatcatttttacttttatattgccttcttactgctwttttgccaaattcacatatgcacaggaagaaagttgatattttctctctgttagcatgaggtactttattgctgaactcaatggcagcacattaattcaaagggagagaggccaatgagactagaaatc

SEQ ID NO: 525404 - DNA, 575 bp, Homo sapiens
agctgcagctttgccgcctgacactggcatatggcttgcaatattcttatacgttgatcagttttctttcttaatacatctcagattgcagattgtaggcgtgatctagctgggattggaattactgtacctttttttttttttttttggcaatttascgtttccagccttgagtgagaggggaaaacagaaaaactaggaaaacagaaaaatattttaaataaagaaaagaagaagaaaaggaaaaatatagtccaggggcctatggcaaccaaattggattggaaaacttcctagctcctgttgcttttgcatttcactttaggaaaatcctatacatatgtaatctagaagtcaactaggattaccctcatcatccttaaaatctagataagattagctcgaacttccatcctagagattacgggcagtccaaagctcttttcaagctgtgagtttccagggcgctaatgttaatgatgtcacctctagctctgagctcttgacattgctgagtctgttttatttcaagatcttctcactatggtgtgtgtgctatttcttttctacactat

SEQ ID NO: 525405 - DNA, 446 bp, Homo sapiens
ttctttgttcctgggggggaagttctcggcccccttctgtaggactgctccccacccccaccatactgcccagttggttttgaacagttgttttccctttttaagaaaaaaaaatacatatatatatacatatatatatataaagttgaggggttttggactttaatttgttggttttgttggggttcctggtattgtgtagtttatttcatgttctgtttgcctttccttttttcgcatttgggtgtatattctggctgccctttatgtttcattttaagcaactggctgtggagtcaaaaacacttgcatactgaaaaacctgtgtcagggcttctgtctcccgtctctctttttctctcccgtctctctttttctctcctcccctttgggactttttggtggtttcaraaggtgggcattgtgattcagtaaatggggagccc

SEQ ID NO: 525406 - DNA, 649 bp, Homo sapiens
tgcacctaagtgttccccctttgcagtgaatgcttgcatttcccagtgagtttcctgtgcttagagatttgtttttagatcaatgccattttttatgtgttgctcatgcatggaagagctctrctttctctgcttgttctaaataggagaaaataattttaaagactccttttaaggtgtcttaagactcctctgtgtgtgacacccttcagaggaatgaccttccattttagggattcccttttttgcacccctcccttacccccttgcattggagtaagtctcttgagactcactacggcctaggaccaggatgtaggccaagtggaaacacaccaaagtgatttaatagaaaaggtaattcctattcaaacgggatagtcccttattcatttcctcggattatcatcaaatttatgtcaccagcaaaggagctttattgagtttcacagagatattccttttgctctcattgtcgttagttggcacgctgacattttcatatgtgtctcagctaatgcctcaaaattactccatctacaaatgtaacaattgaacagataattttaataagattcagcttgacttcagactgcactccttcctttctttatagaatgcaaattgtaacctgtttttaaagccgtgc

SEQ ID NO: 525407 - DNA, 649 bp, Homo sapiens
tgcacctaagtgttccccctttgcagtgaatgcttgcatttcccagtgagtttcctgtgcttagagatttgtttttagatcaatgccattttttatgtgttgctcatgcatggaagagctctactttctctgcttgttctaaataggagaaaataattttaaagactccttttaaggtgtcttaagactcctctgtgtgtgacacccttcagaggaatgrccttccattttagggattcccttttttgcacccctcccttacccccttgcattggagtaagtctcttgagactcactacggcctaggaccaggatgtaggccaagtggaaacacaccaaagtgatttaatagaaaaggtaattcctattcaaacgggatagtcccttattcatttcctcggattatcatcaaatttatgtcaccagcaaaggagctttattgagtttcacagagatattccttttgctctcattgtcgttagttggcacgctgacattttcatatgtgtctcagctaatgcctcaaaattactccatctacaaatgtaacaattgaacagataattttaataagattcagcttgacttcagactgcactccttcctttctttatagaatgcaaattgtaacctgtttttaaagccgtgc

SEQ ID NO: 525408 - DNA, 651 bp, Homo sapiens
tgtgtgtctctgttggtcctcattcatctagcttgcgttttagagttgtggttatgtaatgggggcgtgtaataaagatttgttgattgttggacatgctgtgggagtgcaggaggagctcatgcgaatgagtggctctagtatttttggatttgtttctgaggtttgtacaggataggcaaagtctcgaccatctataagactgtcctcctggcatgygtcatttattgctcaaggtttctggattttagaacatccttctttgcttgggtgatattcccctgtgtggtatataatcaagtaaccatatgtcctggtttccctgggatagtctcaatttatgcctatttttctagtatgattattaatattggccaccccccatgccttttactctcaaaatatccagatttggatggccactttctatataatactgaaaaggaatgtttatatttgttgtcctagtaccatagaaacagtggcatattgaaataatcaaggctttggaaaaatgaccaatttatttatttatttatttatttatgttttaattatactttaagttttagggtacacgtgcacaatgtgcaggttagttacatatgtatacatgtgccatgttggtgtgctgcacccattaactcgtca

SEQ ID NO: 525409 - DNA, 649 bp, Homo sapiens
gcgatatgttggtcagtccaggagactctgttctcattaattcaggggagatttacttgtgtcaccctcattagtatttatgggatttatccacatcaatcggtagtgcattaacagggaaataactaaacctcctagggtttgttggcgctaataaaatgagctggaagttccagaaatcaccatgatcagaagtattctaaatcagggctgtaattgatcctttcaaagtaccctcaggatgtttttctgttcgcttcacttccartggcatttgcatattagcatggtgtctacagccttagagggcagtccatttcttaccatgaaacgatgtgggagaacccaatggagtgttgaaaattcatcgtcagaccagggcatctatgtaaacaaagggttaattttcttataattctttttgtttggtcctggcttataaaaaaaaaagccctgcatgtaaatatatcttttatgtattctgaacataaagatagctctgtcctaccatattgatttattagattctctgacattttagttgtggtcgttatgttatatttatgagatgaatgttggattccctcattatgttatcctcatttattttacatacttttatggctggttgtgcatcgctttacagtta

SEQ ID NO: 525410 - DNA, 649 bp, Homo sapiens
gcgatatgttggtcagtccaggagactctgttctcattaattcaggggagatttacttgtgtcaccctcattagtatttatgggatttatccacatcaatcggtagtgcattaacagggaaataactaaacctcctagggtttgttggcgctaataaaatgagctggaagttccagaaatcaccatgatcagaagtattctaaatcagggctgtaattgatcctttcaaagtaccctcaggatgtttttctgttcgcttcacttccagtggcatttgcatattagcatggtgtctacagccttagagggcagtccatttcttaccatgaaacgatgtgggagaacccaatggagtgttgaaaattcatcgtcasaccagggcatctatgtaaacaaagggttaattttcttataattctttttgtttggtcctggcttataaaaaaaaaagccctgcatgtaaatatatcttttatgtattctgaacataaagatagctctgtcctaccatattgatttattagattctctgacattttagttgtggtcgttatgttatatttatgagatgaatgttggattccctcattatgttatcctcatttattttacatacttttatggctggttgtgcatcgctttacagtta

SEQ ID NO: 525411 - DNA, 712 bp, Homo sapiens
taccatcaaaggttattcactgaaagctgaagaaaaaagcaatgaaaactaattttgattgttaatggaaatgtatttttagtcctaaagagcttccctcagcaataattatagttatgcctcttgggtgtttttggacttttaaatttacgtctagtagctctttttcatttagtagttaatcttttaacagagctctgcaaatttgttctttagtctggcgttagaaaaggattgacagagattttatttcttctcttctattcaattttttcccctcctcatcgtgctggcagcccaggctactccccttattgggcaaccctggaccctgtgactagtcatatgggcagtgagggatcaggatggaaaggctagagagggagattttgcttttctgcagccagtggccacccatggctctgtgagccacctctgctccacacagcacagaattgtggcacagcaagtgggctcatcaaaggtgtttgtgggagatgggcaacactcagctttgtggcctacaactctggaatacacactcagcctgtaaggggactggctggctgctgcctttccctggmttcagacatccaagtacctgtaggcatgtggggagcttgcaaacaacaagatgtaaagctttggtagcaatgaagattgcttgttggttttgctgcttctttgctgatttcagagagaggcatgggca

SEQ ID NO: 525412 - DNA, 518 bp, Homo sapiens
aagcttaaatgccatctttttcatraagcttttcccaatccaccctgttaaatcatcacctcttctgcaacacacgcctgttatacatttgtattattctgctttatgtagcataattttatgtggcttgtcttctctccttcttagagacaataagtgtattcagggcaaggctggttatgtcctcattgaatccagtaccttgctcaatgccctgcaatcaataaatatctgttggaatgaattaatttgaataggttaaataatataatcatgcttttgcatgcacatcaccttaactggtgcccctgacctatttttggtgcatgtccttgagtttcattttggtaatggaagaaatatcaagcagaagaaaagataaatacccagagctggtcaacatgatctactgtgtttgaacaggaatattggaacataacttctaagaatgccatttcaattatttgtaaaatatttaaatagtataatccaatttacattctatcatttctaacagc

SEQ ID NO: 525413 - DNA, 518 bp, Homo sapiens
aagcttaaatgccatctttttcataaagcttttcccaatccaccctgttaaatcatcacctcttctgcaacacacgcctgttatacatttgtattattctgctttatgtagcataattttatgtggcttgtcttctctccttcttagagacaataagtgtattcagggcaaggctggttatgtcctcattgaatccagtaccttgctcaatgccctgcaatcaataaatatctgttggaatgaattaatttgaataggttaaataatataatcatgcttttgcatgcacatcaccttaactggtgcccctgacctatttttggtgcatgtccttgagtttcattttggtaatggaagaaatatcaagcagaagaaaagataaatasccagagctggtcaacatgatctactgtgtttgaacaggaatattggaacataacttctaagaatgccatttcaattatttgtaaaatatttaaatagtataatccaatttacattctatcatttctaacagc

SEQ ID NO: 525414 - DNA, 633 bp, Homo sapiens
gccatggtatagagctactgtagtgttgtgtcatgtcatgttgcacatggcatgcttggcccacctgagaaaactgccaggaagctgttgaaagtttcttggcctatggctgggtgtggtggttcatgcctataattccagcactttgggaggctgaggtgggcagattacttgacatcaggagttcaagaccagcctagccaacatggtgaaacccatctctactaaaaatatgaaaattagttggccatggtggcatatgcctgtaatcccagctactcgggaggctgaggcaggagaattgccttgaactggggaggcagaggttgcagtgagccaagatcgcaccaccgcactccagcctgggcracagagctagactcagtctcacaaaaaaaaaaaagaaagaaagaaagaaagtttcctggccatattgtgttgtgtagcgtagtggctggcccacctgagaaaactgccaggaagctgttgagaggtccctgcccttccctgtaggaagaaacaagaatggatttggcttaattactgcagacatgtgtcttatagccccttgctaccacaagtgtagtccatagacctgcagcattggcattttctaggggtttggtagaaatt

SEQ ID NO: 525415 - DNA, 568 bp, Homo sapiens
aggttctggacatattaaactggagatgcttatcagccatccaaatggagatgtcaagaaggtaactgaattgagaggacccctgtggggaggggtcaggactggagctagaaacttgggagtttctgtcagtatgtaggtgatatttaaagtcatgaggctgaatgagatcacttcattccccaccagatacatgtagggaattagcgtgacagtgatgatcaatgggttttggtgatcatggtggtattgctggaacttaatcagctctaatgtcctctgattccatatagtgcrcttgctcgttatattccttgtctattctcattttgaatgtaattttaatattcatcaattgcagcaaaaggaagaaaatatgttattaactggacccttcagcttctgcctgtctatgccaactccagtgcacactagggaaacctggactccacactgactgggatgtccctgtcaccttgaattggctcagcccagggagctctgggtggcagggccctgaaatcctgccctattgcagcacaaagcaggatggatgagatattccaac

SEQ ID NO: 525416 - DNA, 530 bp, Homo sapiens
taataaggttactgaacttttgctcccttactactattgcttgatttaatttgtgtttgaggcccagtgtatagtaagacagtagacttttgtgcaaaatagacctgaattcaaatccagtctgccacttcataactgtaggaccttaggtaagtattgaatctctgaggtagccgaccttacaaagcacctagcacatrgtactcacccacccactcattaaacaaactgatgttgccgctaatatcacttgtacataaagccaaatatttctgatcaccaagggtatttcattggggtcaataaaattgtctaggcagcatctattcagaaactatattttggggctataatctttaagaggtactatatgccactggttttgtgttaatacgcattcacaaggcctccaggaactcctctggtgatccacccatctgttctgccaggaaaagacagctctgtggccagcatgagtgtatcagtcacatgcaccagactccaaaagcagaggacccaagcagatccag

SEQ ID NO: 525417 - DNA, 518 bp, Homo sapiens
ctgaagagaaatagagagtaatttcctcaacttgatagagaacatctacaagaaacctgcatctagcagcatacttcaatagtgagaaattcaaagatttcccgtgagaccaagaacaaggcaaggatggctccctgtgaccatagcttttcaacatcatcctggatgtcctagaattctttcaaggttctactcacaactggatttctccataatcttacatctcctcatgcacaaacttatcacatagcacacagactggtcttacataatattttctttctcttagctcattaagcactttgtacatctcgtggcccttttcattttataatgtgtatgmattttaccttacagggtgtctcctgtgacataagcctttggagagacacaataatcatgtcatcttctgctctgtcattcacacaatgtatagaacaatgatttgaccaagtaagtgctcggatttgttgatttttaataagatactatcaagtgcttataccagtgctggagat

SEQ ID NO: 525418 - DNA, 474 bp, Homo sapiens
caactgagttagaatggctgttatcaaaaaggctaaaataaataaataaataaacaaataaacaaataatgctggcaagaatacagagaaaaacaaacatctatacactgctggtggaaatgtaaattagtacagacattatcaaaaacactaggaagtttcctcaaaaaattaaaaatagaactatgatataaacaaatctttccgaaccaagttttcaaattgttatggggccagataaaggacaatattctaaggaatatgactgttctgctgtactttttaccttgggttattaccatttacttttcaaccatctgtcttcatctacattctgtcagtttttatagttccttsttaaaaccctagcaatgtgtccgcttcattttgttttcttcactaagaagacgggcgataacatccttttagaaatgaccagatttttcttttcaaaaaggaccaattacaacaatc

SEQ ID NO: 525419 - DNA, 448 bp, Homo sapiens
ttatttgtccttttctactttcttcctttaaaaatcactgataaatatgtaattgaaaaagtctctttttagtcaatattaaatgatgctgatagtggcggggcacagtggctcatgcctgtaatcccagcactctgagatgctgaggtgggtggattgcttgagtccaggagttcgagaccagcctgggcaacatagcaaaactccatctttactaaaaatacaaaaaattagccaggcgtggtggtgtgcgcctgtaatcccaggtattcaggaggctgaggtgggagaatcacytgagcccaggacatcaaggcttcagtgagccgagatcacacaactattacagcctaggtgacagagtgagaccctgtccaaaaaaaaaaaaaaaagaagatggtgatagaaaaactgcaggaaaaaacaaaaaaactccatagaatcattg

SEQ ID NO: 525420 - DNA, 448 bp, Homo sapiens
ttatttgtccttttctactttcttcctttaaaaatcactgataaatatgtaattgaaaaagtctctttttagtcaatattaaatgatgctgatagtggcggggcacagtggctcatgcctgtaatcccagcactctgagatgctgaggtgggtggattgcttgagtccaggagttcgagaccagcctgggcaacatagcaaaactccatctttactaaaaatacaaaaaattagccaggcgtggtggtgtgcgcctgtaatcccaggtattcaggaggctgaggtgggagaatcacctgagcccaggacatcaaggcttcagtgagccgagatcacacaactattacagcytaggtgacagagtgagaccctgtccaaaaaaaaaaaaaaaagaagatggtgatagaaaaactgcaggaaaaaacaaaaaaactccatagaatcattg

SEQ ID NO: 525421 - DNA, 590 bp, Homo sapiens
tggcccattactggccattatatacccaaaggaatataaatcattctactataaagatacatgcatgtgtatgttcatttcagcagtattcacaatagcaaagatatggaatcaacccaaatgcccatcaatgataaactggataaagaaaatgtggcaaatatacatcatggaatactatgcagccataaaaaggaacgagatcatgttctttgcagtgacatggatggagctggaagccattatcctcagcaaataaacacaggaacagaaaaccaaataccraatgctctcatttataagtgggaattgaacaatgagaacacatggacacactgggcaaacaacacacactggggcctgtcagagggtgggagtgggaggaaagacagcagcaggaagaacagctaatggatgctgggcttaatacctaggtgatgggacaatctgtgcagcaaaacaccatggcacacatttacctatgtaacaaaactgcacatcctgcacatgtactcccaaacctaaaagttggaaataaaaataatagtaataataatctgactagtcccacatctactggactttgtcta

SEQ ID NO: 525422 - DNA, 555 bp, Homo sapiens
cagtagataacgatcaatattaggttccttccctaatatttatcctgtctagcaaatgatattataaattttatttagatattattaatccctctctgggattgagcactgattatatggaaaataaattgactttttcgtttctaattaattcttgagtatgtacaagactcagagcaatcaataagagtgcatacacatgattattcaaggatgaaattcactccactccaaacactctgttgaatctcactcactgtaccttttcctgaatggctcacaagattctcagaytcaatatatccaaaactgaatccattcaccttttcataaaatttgctttatttcctaactttctgctttcatgaacagtagaaaatttggttagaatagaagttaccaacttttcttggttcatggcatgtgtcttgattttttcacaataccccagaccaaaagaaatacctaatagctccataagtgcttcgatacagaaaacttagtaagtatgtatgttctaacaacttagacataatacatttaaacacttaaaac

SEQ ID NO: 525423 - DNA, 555 bp, Homo sapiens
cagtagataacgatcaatattaggttccttccctaatatttatcctgtctagcaaatgatattataaattttatttagatattattaatccctctctgggattgagcactgattatatggaaaataaattgactttttcgtttctaattaattcttgagtatgtacaagactcagagcaatcaataagagtgcatacacatgattattcaaggatgaaattcactccactccaaacactctgttgaatctcactcactgtaccttttcctgaatggctcacaagattctcagactcaatatatccaaaactgaatccattcaccttttcataaaatttgctttatttcctaactttctkctttcatgaacagtagaaaatttggttagaatagaagttaccaacttttcttggttcatggcatgtgtcttgattttttcacaataccccagaccaaaagaaatacctaatagctccataagtgcttcgatacagaaaacttagtaagtatgtatgttctaacaacttagacataatacatttaaacacttaaaac

SEQ ID NO: 525424 - DNA, 656 bp, Homo sapiens
cttatctttggtcatgaagtagaaattcatgagctttgtcctctgaaaagctggtgaagaatcacatgaacagaaaagattcagggcaaacactgagtggaatgaaatggggaaaaataaaatgactatggagcaaacttaagaaccttggaggcagaatgcaacacatttgagaatcctaagggttcaactgactttctctgtgggaagcccctaagatgaaccccagtgatatccrctgcctgcctggtatccacacccttgtgtaatctccaactctcacgtgtgggctggacttactgacatatctaacaaacagaataccaagcaagggatgggatgttacttctattgttaggtcataaaagatcatgacttctgtcttgggtgctcccgttctcactcttttgtcacttaccttccaaggaagccagctgtcatgtcatgaggcagccctgtggagtgcatgtgtggtgaaggactgcagccctcagatggggctatagagccaccagtggcttgactgcaaccttgtgagagacttcgagtcagggtcatgtggctaactaagctgcccaggttcctgaaccacggaaaccatgagacaatgtttgttgttttaagctgctaggttttgggtaatttgttactcatct

SEQ ID NO: 525425 - DNA, 632 bp, Homo sapiens
tttgaggagcactgaggcactcatctgctgaccactggttgggcccggcggtctgttttaaaaagcatccaggtgataaccaattctcactaaagtttgagaagagctgtttaaaaccactggttcgcagacttaactaaacattggacccacatgagcarttgcttaaagaatgccaatgcctgggtctcactcggctgattctgatgaaattggagtgggaagcagcctgacatggggattatttgaagctcccaagatcactgtaatgggcagccaaggttgaaaaccatttgtagaccataccttcattcctgcattgcaagactacacgatctgcaatttgtactttccagtatgtcactatggtagaaaaagagatgggtaaaattctagcatctgaaaggaaataatctttgccaggcttgcatgaatttgatcctagcttatcttacatattgtacagactgtgagtaatgaagggctcaatttgaaagagctgggagtgagtcagccggaagaggtagaaatttgggcaaaagagcaagttctataaatctgtagaagtgaaacccatttagttacctccaaagggccaaatgtgctgtttaaaatgctccaatagagcattg

SEQ ID NO: 525426 - DNA, 612 bp, Homo sapiens
ccacctccttgccccatcttttactttcccacttttgatagagacttgagaaaaataaagrtttctttatataagaaaagcaatgttgtaagcacaataactggtatccaccagtagcctcagcactgaggagacaataaggagtggtgaggactggagggaactggagagagactctgaaaggggacactgaaagggggcagctcctacttaaattcagcagaggaaggccaggcatgcatgctttgtataggggtgtcaaacgtctgatttctccaggccagtaagaaatccagactttatatgaaatctctcactctaaactcaacatgttattaaaacacagtacaggcttaacaaaacatgtgtacatgcaggctctatcaatctgcggtccctgatatgtagctcttatgaaagtcctctgcaacaatttccactagccagtctcacccgatccagccccatacattcagggatgcccccaccactccatgcggtacgcggtgggcatcacatgaaggccaaccccgagtacagttcccagcacaggagctgatctaggctaccctcttcttgctcaagacccttgtctctgctccttggggctct

SEQ ID NO: 525427 - DNA, 631 bp, Homo sapiens
gtaaaacaaaacaaaaataccacctccttgccccatcttttactttcccacttttgatagagacttgagaaaaataaagatttctttatataagaaaagcaatgttgtaagcacaataactggtatccaccagtagcctcagcactgaggagamaataaggagtggtgaggactggagggaactggagagagactctgaaaggggacactgaaagggggcagctcctacttaaattcagcagaggaaggccaggcatgcatgctttgtataggggtgtcaaacgtctgatttctccaggccagtaagaaatccagactttatatgaaatctctcactctaaactcaacatgttattaaaacacagtacaggcttaacaaaacatgtgtacatgcaggctctatcaatctgcggtccctgatatgtagctcttatgaaagtcctctgcaacaatttccactagccagtctcacccgatccagccccatacattcagggatgcccccaccactccatgcggtacgcggtgggcatcacatgaaggccaaccccgagtacagttcccagcacaggagctgatctaggctaccctcttcttgctcaagacccttgtctctgctccttggggctct

SEQ ID NO: 525428 - DNA, 631 bp, Homo sapiens
gtaaaacaaaacaaaaataccacctccttgccccatcttttactttcccacttttgatagagacttgagaaaaataaagatttctttatataagaaaagcaatgttgtaagcacaataactggtatccaccagtagcctcagcactgaggagacaataaggagtggtgaggactggagggaactggagagagactctgaaaggggacactgaaagggggcagctcctacttaaattcagcagaggaaggccaggcatgcatgctttgtatagsggtgtcaaacgtctgatttctccaggccagtaagaaatccagactttatatgaaatctctcactctaaactcaacatgttattaaaacacagtacaggcttaacaaaacatgtgtacatgcaggctctatcaatctgcggtccctgatatgtagctcttatgaaagtcctctgcaacaatttccactagccagtctcacccgatccagccccatacattcagggatgcccccaccactccatgcggtacgcggtgggcatcacatgaaggccaaccccgagtacagttcccagcacaggagctgatctaggctaccctcttcttgctcaagacccttgtctctgctccttggggctct

SEQ ID NO: 525429 - DNA, 631 bp, Homo sapiens
gtaaaacaaaacaaaaataccacctccttgccccatcttttactttcccacttttgatagagacttgagaaaaataaagatttctttatataagaaaagcaatgttgtaagcacaataactggtatccaccagtagcctcagcactgaggagacaataaggagtggtgaggactggagggaactggagagagactctgaaaggggacactgaaagggggcagctcctacttaaattcagcagaggaaggccaggcatgcatgctttgtataggggtgtcaaacgtctgatttctccaggccagtaagaaatccagactttatatgaaatctctcactctaaactcaacrtgttattaaaacacagtacaggcttaacaaaacatgtgtacatgcaggctctatcaatctgcggtccctgatatgtagctcttatgaaagtcctctgcaacaatttccactagccagtctcacccgatccagccccatacattcagggatgcccccaccactccatgcggtacgcggtgggcatcacatgaaggccaaccccgagtacagttcccagcacaggagctgatctaggctaccctcttcttgctcaagacccttgtctctgctccttggggctct

SEQ ID NO: 525430 - DNA, 225 bp, Homo sapiens
aacactttctttaatatggaatctataaatcagaaaaatatgtttaaattcttaaacccaaatgtaaacagcatagccaacatggggacaccaagtcttaaaataacraagaaggagataaaccatgaccagggatcaaatttgacatgcagccttcaggtaacagtgagcatcatataaatataaatgcaagttgccattttgtattttgaagagaagttttca

SEQ ID NO: 525431 - DNA, 623 bp, Homo sapiens
taagatgtccttgttatatttccgggtttattccctttaggtcctttttaactggtacttttcaggaaactattaggacaaaagtattacttggattccaactgactctgaaattttttagtaaccttcagtgtcagaaaatttcaaagatgtattgagggttacagaagatcaagatccagaatggccacagaatcttagcataccttaacttgctgtttaaacataaaagtatcagaggaagggcaagaacccgaggaaaataaataaatgcaaaamtcacatgcagtccctggctggggtgaagtcagactcagatctgtctgggaaatagagctaagcgctgctttttctcaaaatgacacatttgcatctactgatattcattagggttgaaaggccttggtggggtagtggaaacatttgaatcatgtctctgctcagaattcaagtatagcttgggtaagacagtgagaccctgtctctacaaaataataccaacaaattttaaaaattagccagttgtggtgatgcgtgcctgtagtcacagctacttgggaggaagaagcaggaagatcatttgagctcaagattttgagccatgatcacgccactgcatgcca

SEQ ID NO: 525432 - DNA, 623 bp, Homo sapiens
taagatgtccttgttatatttccgggtttattccctttaggtcctttttaactggtacttttcaggaaactattaggacaaaagtattacttggattccaactgactctgaaattttttagtaaccttcagtgtcagaaaatttcaaagatgtattgagggttacagaagatcaagatccagaatggccacagaatcttagcataccttaacttgctgtttaaacataaaagtatcagaggaagggcaagaacccgaggaaaataaataaatgcaaaactcacatgcagtccctggctggggtgaagtcagactcagatctgtctgggaaatagagctaagcgctgctttttctcaaaatgacacatttgcatctactgatattcattagggttgaaaggccttggtggggtagtggaaacatttgaatcatgtctctgctcagaattcaagtatagcttgggtaagacagtgagaccctgtctctacaaaataataccaayaaattttaaaaattagccagttgtggtgatgcgtgcctgtagtcacagctacttgggaggaagaagcaggaagatcatttgagctcaagattttgagccatgatcacgccactgcatgcca

SEQ ID NO: 525433 - DNA, 672 bp, Homo sapiens
cacatggagtcacttaaggagaaaacaactggggtaagcgatctgttcacaacagtagtcactgtggatatggctgctatttgctaataaactgctataaaagttcctgaaagcaggagagagaggatcaaaatgggaaagagtatacctatagaacagagtgtggttgtacagtatgaggatttaatctttctagtaaagatgtggacatacagagctaataaattcctgcaggcatgaacscagggaggaaggctcattctattcaacattaggctcatggccctaaactgcctggatctctgggtaaggaaagggaataaccagaaccactgggattccctgatgcttcagagagagaactgaagacattaattcatcaagtgctcacataattcttgggcttccaaattatttctcagtgattaccagacttacataaattaatggttcatttaatttacatccttttctcttttaataggaaagattaaaaagtctatagttggctgggcatggtgactcatgcctgtaatcccaacacttagaagtctgaggcaggagaatccctcgagcccaggagtttgagagcagcctgggcaacatagtgagagcctgtctctacaaaaaaatgtaaaattaaccaggtttcatggtatgcacctgtagttt

SEQ ID NO: 525434 - DNA, 672 bp, Homo sapiens
cacatggagtcacttaaggagaaaacaactggggtaagcgatctgttcacaacagtagtcactgtggatatggctgctatttgctaataaactgctataaaagttcctgaaagcaggagagagaggatcaaaatgggaaagagtatacctatagaacagagtgtggttgtacagtatgaggatttaatctttctagtaaagatgtggacatacagagctaataaattcctgcaggcatgaacgcagggaggaaggctcattctattcaacattaggctcatggccctaaactgcctggatctctgggtaaggaaagggaataaccagaaccactgggattccctgatgcttcagagagagaactgaagacattaattcatcaagtgctcacataattcttgggcttccaaattatttctcagtgattaccagacttacakaaattaatggttcatttaatttacatccttttctcttttaataggaaagattaaaaagtctatagttggctgggcatggtgactcatgcctgtaatcccaacacttagaagtctgaggcaggagaatccctcgagcccaggagtttgagagcagcctgggcaacatagtgagagcctgtctctacaaaaaaatgtaaaattaaccaggtttcatggtatgcacctgtagttt

SEQ ID NO: 525435 - DNA, 622 bp, Homo sapiens
gtcaatcagcagtaatgaactaccaaacaattcggttagagatacacatgtcacgttcaaatggaatttgaaatagagcactcctctgtattttagaaatccattaacaggatcggcaagacccaatccaaaatggatcgataacaagatcggtacatttgacaggaaaaaattgtctcagaggcacttgactattgactgtgttagaactgaaagaattgagattggcatggtatattgacaaaggataaactgtgaactaagagaaattgatcataattgtctcagggcttgggtaagaaataaataaaaactacaggctgttaattcatttctaaacaaatgcattacttgtaacaataagtaagataaaataaagttcataatagctaaaacgtcaaatgtgattttgctaacaacaatgataattacaacaccaattttagaaaactagatttagtagaaataacacaaaattggcagtggctaaccactgatagaagaattaaatcttcctcgtaaaatttcagtcatgccaatatttgaccaagaagtctggacttcatgaaacagcaatttcaataacagaagctataatcrttaacattttaattcatgccag

SEQ ID NO: 525436 - DNA, 497 bp, Homo sapiens
tgtacattaaacctgcttaaatcacatacgatttaagtaacgatagtaagaattatagtaagaatggcagtatgatactgtatacaatagtattcagaattcyatattagttttatatacacctatatagagagagatatatattctgtagtttagaattccttaataatagatctgtatccataaaatcttttgacttccaatctccattcagtgtaataaatcctcttttctgtgcctgagaatgtgggatactttaatcgtagtcatgctgccatctagtggacatatcttagacctgagggtcttctgtcttctggaaattgtcaggaaagaattagaagttttaaggttcatgtctgacatctatttttctgtaggagactaattttttgaatacctctatagatttctcttagtttggatcagagtatttttcacactattcctcctgtcttagtagaaagatattttcaaatgtgtcagtcacactcagt

SEQ ID NO: 525437 - DNA, 482 bp, Homo sapiens
tgtacattaaacctgcttaaatcacatacgatttaagtaacgatagtaagaattatagtaagaatggcagtatgatactgtatacaatagtattcagaattctatattagttttatatacacctatatakagagagatatatattctgtagtttagaattccttaataatagatctgtatccataaaatcttttgacttccaatctccattcagtgtaataaatcctcttttctgtgcctgagaatgtgggatactttaatcgtagtcatgctgccatctagtggacatatcttagacctgagggtcttctgtcttctggaaattgtcaggaaagaattagaagttttaaggttcatgtctgacatctatttttctgtaggagactaattttttgaatacctctatagatttctcttagtttggatcagagtatttttcacactattcctcctgtcttagtagaaagatattttcaaatgtg

SEQ ID NO: 525438 - DNA, 649 bp, Homo sapiens
tacattaaacctgcttaaatcacatacgatttaagtaacgatagtaagaattatagtaagaatggcagtatgatactgtatacaatagtattcagaattctatattagttttatatacacctatatagagagagakatatattctgtagtttagaattccttaataatagatctgtatccataaaatcttttgacttccaatctccattcagtgtaataaatcctcttttctgtgcctgagaatgtgggatactttaatcgtagtcatgctgccatctagtggacatatcttagacctgagggtcttctgtcttctggaaattgtcaggaaagaattagaagttttaaggttcatgtctgacatctatttttctgtaggagactaattttttgaatacctctatagatttctcttagtttggatcagagtatttttcacactattcctcctgtcttagtagaaagatattttcaaatgtgtcagtcacactcagtgagctgaaagagaatttctgttttctgcttttgtttaaaaatgagaagagtgtgacaagagaaaatgtgtccccctggaaagaagtgccatcagaccagcaatagcctgcctcctttttttagatccatgctgtatatctttgagggacgaggc

SEQ ID NO: 525439 - DNA, 649 bp, Homo sapiens
tacattaaacctgcttaaatcacatacgatttaagtaacgatagtaagaattatagtaagaatggcagtatgatactgtatacaatagtattcagaattctatattagttttatatacacctatatagagagagatatatattctgtagtttagaattccttaataatagatytgtatccataaaatcttttgacttccaatctccattcagtgtaataaatcctcttttctgtgcctgagaatgtgggatactttaatcgtagtcatgctgccatctagtggacatatcttagacctgagggtcttctgtcttctggaaattgtcaggaaagaattagaagttttaaggttcatgtctgacatctatttttctgtaggagactaattttttgaatacctctatagatttctcttagtttggatcagagtatttttcacactattcctcctgtcttagtagaaagatattttcaaatgtgtcagtcacactcagtgagctgaaagagaatttctgttttctgcttttgtttaaaaatgagaagagtgtgacaagagaaaatgtgtccccctggaaagaagtgccatcagaccagcaatagcctgcctcctttttttagatccatgctgtatatctttgagggacgaggc

SEQ ID NO: 525440 - DNA, 649 bp, Homo sapiens
tacattaaacctgcttaaatcacatacgatttaagtaacgatagtaagaattatagtaagaatggcagtatgatactgtatacaatagtattcagaattctatattagttttatatacacctatatagagagagatatatattctgtagtttagaattccttaataatagatctgtatccataaaatcttttgacttccaatctccattcagtgtaataaatcctcttttctgtgcctgagaatgtgggatactttaatcgtagtcatgctgccatctagtggacatatcttagacctgagggtcttctgtcttctggaaattgtcaggaaagaattagaagttttaaggttcatgtctgacatctatttttctgtaggagactaattttttgaatacctctatagatttctcttagtttggatcagagtatttttcacactattcctcctgtcttagtagaaagatattttcaaatgtgtcagtcacactcagtgagctgraagagaatttctgttttctgcttttgtttaaaaatgagaagagtgtgacaagagaaaatgtgtccccctggaaagaagtgccatcagaccagcaatagcctgcctcctttttttagatccatgctgtatatctttgagggacgaggc

SEQ ID NO: 525441 - DNA, 458 bp, Homo sapiens
tcttacaaatgctaccaggtacaacactttccttctggaatgctacaaccaccccaaaccaacatgatctctgaaaatatttcacttcctactcagtatctaactgcaagtgggaagaaaaagaaagcctgcacataaccmagtcataaatcaagcaatatatctcacataaaactggaaacaccaagaaatccattctggaaatgggctggggggaatgagatctagaattatgtggcttttacatttctgtgtcttatcagtgaattttgcacagtgaaattttactacataaaggaaaatattacagaagtacctacatcagctacacagggaggacaatccacacttaattatctaagcagagctggactactttacaggaagataaatgctaagtaactcaagcccagtctctcttgtatgtcctctgacatcagagggagttttctctccat

SEQ ID NO: 525442 - DNA, 556 bp, Homo sapiens
gtgtccactcctcccacacaggagataaagaactcttttgtaaagtatcagggaagcattctagcactcacacttaatgtttaactccctgttaatggccttcaatttctcatccccttgcagggcatcaatgcaacttagcagctaacgcttctgtctttgtaggcgttatcccccatgtctttcaactacctgagccatcacacatgcaagggaattcctttccaacaggtggtcttgtcagatcactttagtgaaacttctagcaactgggccacctccttgtgccagggactagcgatgcctgacaatccactcagaatgacatcccattgctcgtcaggcagggagacagtcccagaaccccgtcttactgcctgtttcttgagatcactcctggtgccacttgtgtcagttcagatttaccaacaggcagatatcaaaacaggaytaaatgtgcaagagatttattgggaaaatgactatgaggaaaatgggggtggtggggggcaggaagagaaggcagggaaagctgtcagactgaaggacaggtctt

SEQ ID NO: 525443 - DNA, 581 bp, Homo sapiens
tccactcctcccacacaggagataaagaactcttttgtaaagtatcagggaagcattctagcactcacacttaatgtttaactccctgttaatggccttcaatttctcatccccttgcagggcatcaatgcaacttagcagctaacgcttctgtctttgtaggcgttatcccccatgtctttcaactacctgagccatcacacatgcaagggaattcctttccaacaggtggtcttgtcagatcactttagtgaaacttctagcaactgggccacctccttgtgccagggactagcgatgcctgacaatccactcagaatgacatcccattgctcgtcaggcagggagacagtcccagaaccccgtcttactgcctgtttcttgagatcactcctggtgccacttgtgtcagttcagatttaccaacaggcagatatcaaaacaggattaaatgtgcaagagatttattgggaaaatgactatgaggaaaatgggggtggtggggggcaggaagagaaggcagggaaagctgtcaractgaaggacaggtcttatctgccctgtgaaggagagagggaaag

SEQ ID NO: 525444 - DNA, 625 bp, Homo sapiens
cctggggaaaatggcatgagatcattaactcatcttagaaattcaggatattcttcatttcctttmtctgtctcttcctctttcttttcgcaatgagcaccggagtgtcgtgttgggaaatgaagaagcagaagaagagaatggtaccatcttggcactcatgccctccatttgtaaatgaatagattgtggtgagtattggtttctaccctggctaaccatcagaattacttatagaataacaacaaagtttcctgggccatctatatctgcctcaggcctattgaatcagaatttccagggccagtgcatctgttttttcaaagctttccaggagattcttaagatcagtcaggtctgagaaccactggactctatagataaaacccaggccacctcagcttcaataatcaccttccattaaatttacattctagttactgccatcgttaaggatcctgttacacacttgtatttatagcaactaacacatgtcagaaggatccaaatggtctatcttataggaaacaatatgtcacatgggaggtggctgaggtgcctctcagaaacttaagagtttatttggagctaaaacatttatcaggagggattctgttggcatttc

SEQ ID NO: 525445 - DNA, 625 bp, Homo sapiens
cctggggaaaatggcatgagatcattaactcatcttagaaattcaggatattcttcatttcctttatctgtctcttcctctttcttttcgcaatgagcaccggagtgtcgtgttgggaaatgaagaagcagaagaagagaatggtaccatcttggcactcatgccctccatttgtaaatgaatagattgtggtgagtattggtttctaccctggctaaccatcagaattacttatagaataacaacaaagtttcctgggccatctatatctgcctcaggcctattgaatcagaatttccagggccagtgcatctgttttttcaaagctttccaggagattcttaagatcrgtcaggtctgagaaccactggactctatagataaaacccaggccacctcagcttcaataatcaccttccattaaatttacattctagttactgccatcgttaaggatcctgttacacacttgtatttatagcaactaacacatgtcagaaggatccaaatggtctatcttataggaaacaatatgtcacatgggaggtggctgaggtgcctctcagaaacttaagagtttatttggagctaaaacatttatcaggagggattctgttggcatttc

SEQ ID NO: 525446 - DNA, 524 bp, Homo sapiens
cccctactccccacattcactaattccacaaacttgtattcagtgccttccatctgtcaggcactttgctagtcacctgggatacatcgggaatcaaatagcccccacagaaagatgcgaaattgctrctaggataaatacagcaaaggacagttaccaagtgccttcaaaggatgtaatgaagcaaggtggaaaagtcagaaaaggctgctctaaaggagttaatattgaattaaaatctgaaggaagagtagatactaactgagggaggatagaaagatgattattggaacagatgccctagccaggaagtagcagggaaacttgcatacatagaagaagtgtgctatagctagggttcagagaacagggggtgtgatggttaatattgagtgtcaacttgattggattgaaggatgcaaagtattgttcctggatgtgtctatgagggtattgccaaaggggattaacatttgagtcagtggacagggagaggcagacccaccctcaatctgggtgggcgc

SEQ ID NO: 525447 - DNA, 580 bp, Homo sapiens
tttctaaataaactctaataatgtgatttaagtayaaatacagaaaaatattgaggaattaatcatacagatgtggtaaacagtaaaaattatgacagtgctatgtgaatataggaaattttagaaatactctcaaggagaaaagttagcagggtgatattttgctattactagattgttcagggatcaagcgtggtaaaatgaataaaatttaaagccatgagatagaaattcacatcttcctctggtactttctagctgcatgggcaagggctcttaagggctctaagtctcaatcccttcacttttatatcaaggattagttatacaagaatgtaaggattagaggcaacaaatatgcaggtcataagattgtagacattattaacctcctttataacttcccaacaagctttcaaggttagttatgatgaactctgacctaatttctctaattctgtgagacattaggtctgcagagctgtagttggctttaaaaagaaatcaaatatattatttctcttaattattcaattcacttatataagaatttaagaactcagcataatactcactccca

SEQ ID NO: 525448 - DNA, 655 bp, Homo sapiens
cttttaaaaagtacattgtattttatgtgaattatatctcaacaaaattgattttttaaaaaaaatgtaaayaaaaaggcagagtttaccaaacaaacaaaatttagggagaaaaataacacaatcagccacaagacttacagaaagcataacagtacattttaattagctttttccttttcattgttgtttcgccattttctaaaattagtttctcccaaagaacgttcaatgggccataaatgtcttccttgttctctgggcctatcaaaaccctggggttggtattaatttatactcttggactgtgtaattatttcatgctcaaattttgtgcttcctaaattactcaaaagcagtgaagttcagatgaacttcttcttggaacagtttatgttctataaacactacctacatccttcagttattctctctcatgatttagtattctaactattaaagaataaaattatctgtacccccaaaatagttgccctgaccaaaaggttattataatagagtccaataaaggagcctttcaaaacaaacatattacaaataagtggttttaaagcagagtataaatacaataacaacaacaacaaaaacctaaaaaaggatacccatgtttttaatgctatcactaagatatgtg

SEQ ID NO: 525449 - DNA, 636 bp, Homo sapiens
tacagcaacctcatccttaagcacgtctatttcccctggatgctaaacttgacataatcaagctattctcatactcttttgacttactagcattaggctcaaaaactcctcaggaaattatttgtcattcattctaaagggaatcactctaataagctgaaaatatccagatagcttttcaaatcacttttacactgtttcaatactctattattatactttatcagcttgaaaacaagtgccttaaagggcgtaattttttcctaaaaaacaaaaacaaaaaccaggctgtatcctgttctctggaaaatgaacctctgggatgatgcagtgagccacagamctccaaagacccttagaattccctgctggaattttccactactgccatcccagatccaaaatctagagccttgaccccaaagtatttctcttcaccttttctatagcaaagaactatttctctaggcaggacttagaactagagagttcaaaactattttattttggtgtgaagaaacatagtcacccaaaattttattgcttgaccttgagtaagtgttctaacttctcaggactccaaaggggttggaagcaagtttggcctctgttaaccaccactttgtggtttcctat

SEQ ID NO: 525450 - DNA, 636 bp, Homo sapiens
tacagcaacctcatccttaagcacgtctatttcccctggatgctaaacttgacataatcaagctattctcatactcttttgacttactagcattaggctcaaaaactcctcaggaaattatttgtcattcattctaaagggaatcactctaataagctgaaaatatccagatagcttttcaaatcacttttacactgtttcaatactctattattatactttatcagcttgaaaacaagtgccttaaagggcgtaattttttcctaaaaaacaaaaacaaaaaccaggctgtatcctgttctctggaaaatgaacctctgggatgatgcagtgagccacagaactccaaagacccttagaattccctgctggaattttccactactgccatcccagatccaaaatctagagccttgaccccaaagtatttctcttcaccttttctatagcaaagaactatttctctaggcaggacttagaactagagagttcaaaactattttattttggtgtgaagaaacatagwcacccaaaattttattgcttgaccttgagtaagtgttctaacttctcaggactccaaaggggttggaagcaagtttggcctctgttaaccaccactttgtggtttcctat

SEQ ID NO: 525451 - DNA, 494 bp, Homo sapiens
accctattttaaaagcctaaatattaaagttatttcttgagggcatttcagttagcctgtgctgcataacaagtcagccctaatttgttggcttcaaacgatgctttgtgatatctcataattctgcaggttggtggagctgttactttgctggttttatctgagctcattcacacagctgcattcagctagagagttggcagggccagaaggttccagatggccttcctgatgtctagcagttgatgccagccatcagctgggatgcctcagttctcctctacttaccacttagcctccagcatgctagactagctttcccacatgactgtctcagggcaatgcctgtgtctgaagtagtataaagtaaaaagtacaatgttcctcaaggcctcaccctggaagatgcrtaatgttattgccactgcattctattgcttaaaacaagtcaaaactccaacattgccacccccttttgtttttttttttttaaa

SEQ ID NO: 525452 - DNA, 494 bp, Homo sapiens
accctattttaaaagcctaaatattaaagttatttcttgagggcatttcagttagcctgtgctgcataacaagtcagccctaatttgttggcttcaaacgatgctttgtgatatctcataattctgcaggttggtggagctgttactttgctggttttatctgagctcattcacacagctgcattcagctagagagttggcagggccagaaggttccagatggccttcctgatgtctagcagttgatgccagccatcagctgggatgcctcagttctcctctacttaccacttagcctccagcatgctagactagctttcccacatgactgtctcagggcaatgcctgtgtctgaagtagtataaagtaaaaagtacaatgttcctcaaggcctcaccctggaagatgcgtaatgttattgccactgcattctattgcttaaaacaagtcaaaactccaacatwgccacccccttttgtttttttttttttaaa

SEQ ID NO: 525453 - DNA, 633 bp, Homo sapiens
tgggtggatgttgtcctttactgaacaatgtaggagacaaacaactgcgagagagaggagtactcactgaagtgcggagaggggtcggagggagactaagcggctgatttcagatgtgttaagtttcagaaatatatgacatccaagtggggatgtcaaaaaggccattagactgtgcagtctgttgctcagaagataacactgggctagagaaatatgggaatagtcagctgagagatgtttaattgtcacaggtttgagtgagatcagctaacacacagcactacaggaggaaccagcactgagctccaaggccaccaacatttagatttgaggttgagatgaagccagtaaaggagacagatgcttaattaataagcatctgcaaaactaaaattcaggaaggcctcaagaatggcagcttaatatgtcaaacttgaaatgccataagaaattattttccaggaattacaaatgtattcttggaagctaatgagctgttttgatttctgagaacaratttaaataagtttgagaaattgcatcaaacaatttatgccagtgtatgtaattacgccaacacatatggcacctaaaaaccactcactacttcaacagcatgtgaaaatgtta

SEQ ID NO: 525454 - DNA, 585 bp, Homo sapiens
gtaatggtttagcaaaaattatggctttatccatattaatataaatcagaatgattaatctaattagcccaaatataaaaatgcaawccttaattggttcttattgtaaatgacccacaaacaaaagtttcaaccaccttcagaaaaaaaaaataaaacacttaagcaagtatagtaacacttactagagcacagtaatttgacagctaatgatttgaccaattgtattaagacttgatatgacattttcatagaaaacactgtagcctgtttaattattgagtaatgcataccaaggactcttaacaatgaacatttactttcctgtgataaactgacattaagtaagaaatagtgcaatgctaaaataaattatcttaaaataaaattcagatcaataataacaataatacataataatggccctgatttatgagtacttactatctgtcagtagcttcagttttgcctgctggaaattatcacccgatttacaggtagcaaaacgggcttaaataatttaaatgaatcacttaagacctacagtaggtagcctttctaatattctgttctgctcccacacat

SEQ ID NO: 525455 - DNA, 526 bp, Homo sapiens
tctcctcttcaagatccttaatttattcacatctgcaatgttctttttgctatgtaaggtaacacgtccacaggtttaggggattccaatgtggcatctctgaggggtcattattctgccaaccacagcatgtcacagactatggaaatgggccatatctatttttctccactgtatttmtagtggctggcatgtgatgggcactaggtaatgttggcgaaatgaatgaatataccttttttgttgccctacttaaaagcaaatcaccaaatcccccaaaatttaccaaagagaactcatgactccatactgaatccagagatttgatatttcaaaagtttttctggggcaggtgggtgagaaacactacctgtgccctgcagcctcagatatgcaccccatgtctcaacgccttccttcatctccctttcctttcagaagcactgggtatattggacctttccttcagtctttaaacactcacctctcttagctttcaggataccatatcctcctggagttcctc

SEQ ID NO: 525456 - DNA, 546 bp, Homo sapiens
gaaacttgtgggggaagttctagattaaaatcccaacacctttggtattggtgatttgaatgtcacttgctggaaccagctagtgacctctgttctatcctgtctttggctcaattttaatcacamggaacaatcagactatagagaggtgtgtgctttttctgtagtcaaataagactggctttcattctaggaagaattctccctggagctccgtttaacctgtgttttttatcaggatgctatgaagacctattaggacctaggatacaacaaattgagcataatcacctcaggctctatggcttatagcaaagatatacctccttgttagcctgttgggaagaataaatgtttttggtgtttaaaagaaaaaaaaaactattaatgttgcataataacccacgaagacaaaatgagtagaatatctccaatcttctatacccatgttctttgcctgaattttattgactttttactttcaagattataattgaagttcaatttatcttgctacctaattgttccagtacaaaagaattaaat

SEQ ID NO: 525457 - DNA, 546 bp, Homo sapiens
gaaacttgtgggggaagttctagattaaaatcccaacacctttggtattggtgatttgaatgtcacttgctggaaccagctagtgacctctgttctatcctgtctttggctcaattttaatcacaaggaacaatcagactatagagaggtgtgtgctttttctgtagtcaaataagactggctttcattctaggaagaattctccctggagctccgtttaacctgtgttttttatcaggatgctatgaagacctattaggacctaggatacaacaaattgagcataatcacctcaggctctatggcttatagcaaagatatacctccttgttagcctgttgggaagaataaatgtttttggtgtttaaaagaaaaaaaaaactattaatgttgcataataasccacgaagacaaaatgagtagaatatctccaatcttctatacccatgttctttgcctgaattttattgactttttactttcaagattataattgaagttcaatttatcttgctacctaattgttccagtacaaaagaattaaat

SEQ ID NO: 525458 - DNA, 548 bp, Homo sapiens
ctacatatgtttccgcatgtccactttctacatgtttttcatcagtatattcaaatatagtctgccccaaattaaataattatatttcttcttacatctgcatttttcttattttttctgctttatttaatagagtcattttrtgcaaggcatccatgcttaaaacatgactcatttactctcttttgtcttatattttcatgtatagtttatttttcaagtattattgaatctacccgtacagggtaatccttatcagtccacacagacagcaacaacagttgtaaatcctcagtactctctctttaaacactgtaaagcaacccattttccccattttcattcaatattttttatacattagcatgtagatcaaacttctggaacaaatatttagattacataatgtttccttttaaaatggtttaataactgatttaaaatatggaactctgtggtcctctttggaactcaatggtcctcttctactgaatgtcttttattttgaattctattcagattcaccatctcttcatttccaccctgct

SEQ ID NO: 525459 - DNA, 598 bp, Homo sapiens
gcatacatactaaagcaaaacagttgggttcatccaaacatggaacataattcaaatttttccataatttttctaagaactgttttgtcatgtaaattattgagtgtatctttgcctgaaattaaaatgtcaaagtatcactttttacagaatattaatttattgtcctttaactgaaaaagtcatcacactggaacaaaaggagacattgtcaaaaatataatacaaattttcaagaactactagagtaaatagtttttaactgaacaggcattatgttaggtagctctgttttcgccccagtttattaactcaatatatttttgaaagcgaaaacagaagcattaataaaatatttgcaatattttgtaaggtactctgaagatagcacacagtaacttttaataacataaacacacacacaattactaacgtaatggtctgttcattatggaaaaataagtttcstcaaacatcatatttgcagatatcagatgtatagaagtcaaggatatctttgctttcactaaaaactcaggaagtagtgacaaaagactcaaggttttgtttaatttaaagacaactgctcaacaaggtg

SEQ ID NO: 525460 - DNA, 633 bp, Homo sapiens
ctatggtttgcaaacatccttttggtcattttttaatttgatacccataaaagctgtaagtaggtatttttagtcttgtccaaaaatgagaaaactgagattcaaagaggctttagattatgcataaatagcaaggacagtattataatccaaacccaagagtagagaaaatagtaatgattgtcccctccttttttgtgccccactgggccccatacagacatttagcatggcacacataaatgcccccttaccttgctttctgtctttcttcccctacaaactgcagaagattcttgaataagagccagcctcttgatcacatttgaacccctaatcaatccctaacacaaaacttgtcacatagaggcacccgaaaggatttcttgaaggaatgggaaaaggaagtgaagagtaaaagaggaaaatgatagtggttttgttctctttccttctttctttttatttatttatttatttatttatttatttatattttgcttaacttgtagaaaagtctctctacttctgaaattccktaggctgtgggaacaggcccctctcttgggctcaattatggagtccatagttggaaggaagccagtgagtgcaacaagattcagggaggctcca

SEQ ID NO: 525461 - DNA, 643 bp, Homo sapiens
tgcagaaaggggaagtacggcaaaatgcctctagaaatcattcccagaaccactcagggagatgtgtgccagagtctgatcaaagctgtctactatattctggacccagatcacacagggcttcgtcagctaatataagcagccagcactaaatacggagttggataagtgaacagcatcgatgccacagtgttggttcagcatgttctgtatgactcccaccttcaagcagataatcaaatacatctgcacttaatgacacctctgaaggaacaaaatgagctagcttgagccaatcatttttaaaaaaacattttacataaaaacttgctgtagaattaacaaactgccactggcttataccttttctcctacttcaaaactgggcacccttcccaacttcaccaacagtccatcacccagatttacaaccatgatactttttttgccttaggaagtttataatttgaagayatcaagcatatgcaaaagtaggggaaaaaagtataatgcattcttgtgtactcataacctaacctcaacaacaatcatctcatggccagtcttctctcaccaataacccaccctccccaccatcttcttccctatataggattatttttaatcaaatcccagacattat

SEQ ID NO: 525462 - DNA, 452 bp, Homo sapiens
gcctgccaccaaccctaacagccaagttgactgctgtgagccctccaggcattcacagggtgtcttcactgaaatcgcactgtttccatagggatgcatctgccacctccatgaaaagttgagtgccaaaaaaaaaaaaaagtcagcacacttccttggcaatcagaaatcacttaatgaacgtaggttaaatcacgtaaatgaaagaatgattgactgaatgaccaaattgctaaattcattatttagcaatcagatccacactagtcattcaatccactgctcaggtatcagtggttatgattggactgtgaaccccagggaacataagctacatttgtagacctgccttgcacatctgaaatattcaataaatattttcaagtgaatggttggatgggtcagtaataatcaacyttcaacctgctcagaacgccacaccatagagaaaa

SEQ ID NO: 525463 - DNA, 503 bp, Homo sapiens
ctgacctcaaagaattcaccatcttaccctccttctgcactccctattactccatggaggaggggagggtgatagggtgaaatataatttgaaaaaatatttgggggccagatagtgaaaagcattaactgtcatgccaaggatttcagatctcatctcatggcaatgggaagccatgaaagattttaagcaggagatttagatccagctttgacttgcataaagatatggaggctaaaaagtgttcaaccttattagtaatgtgattagaacttcaaaatrgaatatttacctaaaggattgctgaagttgtttttgaagacaataattagctttgggaaggattccttaaaattaacaatcccttatcggcaagaatgaaatttggtataatctctgaggctaatttggcatatccatcaaatacacaaaatattgcatccctcttgacctgaaaatggtatgaatccaatgagaaatgatagaaacataacctaatgtag

SEQ ID NO: 525464 - DNA, 647 bp, Homo sapiens
ctgctgacctcaaagaattcaccatcttaccctccttctgcactccctattactccatggaggaggggagggtgatagggtgaaatataatttgaaaaaatatttgggggccagatagtgaaaagcattaactgtcatgccaaggatttcagatctcatctcatggcaatgggaagccatgaaagattttaagcaggagatttagatccagctttgacttgcataaagatatggaggctaaaaagtgttcaaccttattagtaatgtgattagaacttcaaaatagaatatttacctaaaggattgctgaagttgtttttgaagacaataattagctttgggaaggattccttaaaattaacaatcccttatcrgcaagaatgaaatttggtataatctctgaggctaatttggcatatccatcaaatacacaaaatattgcatccctcttgacctgaaaatggtatgaatccaatgagaaatgatagaaacataacctaatgtagggacagagaggtttaaaaaaaggacaatactgagaagagtttattctagagacaaaagtcataaaaccctgtaattgattgtattggggatgataaataaaaggaaagagttgaatatgacttcatgggttgtaacgtagg

SEQ ID NO: 525465 - DNA, 357 bp, Homo sapiens
gtctaggtaaggagctggggaggaaatgagtgtatactatggcctgtgactctaagrctctgttgggtgtgtctttcataggacattcatactggcattaactgaagtgtctggttgtccccgtggccttgtaatgaatcaataagacttagagctcttctaaaaccactctgtccctggcctcaaataatcaaataattaattatctctctctttcctcatcagtggttcacactcaaggaaatatttaattttccctaactgaatttgtcctgtacaacgaacaattcgcctgggttaactattgagagactgactccctgagtcctctccccgctcctcaaaacaggcgagcca

SEQ ID NO: 525466 - DNA, 357 bp, Homo sapiens
gtctaggtaaggagctggggaggaaatgagtgtatactatggcctgtgactctaaggctctgttgggtgtgtctttcataggacattcatactggcattarctgaagtgtctggttgtccccgtggccttgtaatgaatcaataagacttagagctcttctaaaaccactctgtccctggcctcaaataatcaaataattaattatctctctctttcctcatcagtggttcacactcaaggaaatatttaattttccctaactgaatttgtcctgtacaacgaacaattcgcctgggttaactattgagagactgactccctgagtcctctccccgctcctcaaaacaggcgagcca

SEQ ID NO: 525467 - DNA, 357 bp, Homo sapiens
gtctaggtaaggagctggggaggaaatgagtgtatactatggcctgtgactctaaggctctgttgggtgtgtctttcataggacattcatactggcattaactraagtgtctggttgtccccgtggccttgtaatgaatcaataagacttagagctcttctaaaaccactctgtccctggcctcaaataatcaaataattaattatctctctctttcctcatcagtggttcacactcaaggaaatatttaattttccctaactgaatttgtcctgtacaacgaacaattcgcctgggttaactattgagagactgactccctgagtcctctccccgctcctcaaaacaggcgagcca

SEQ ID NO: 525468 - DNA, 542 bp, Homo sapiens
gccatgtttgtcattcaggggccttttcatttgttttaaagtgccaggtttggagacaacacaaatgtattcgggcagaccctgtgaaagccagagctraaaggagatggtatttgtgtttcgtgacacaacaaagcacactaggaatcttcaaaattcacgacgttgccactctgcgcaggtataagagaaataatccaaagtgacaaatggatcaggctgaagctgaaggaaagataaccccttgttctgcaatacaaggtctgctctccaagctcctgccaggacagggtccccggtacacagagaactggggttcttgttgcatgcccccccagggccctgtcttctccaaagttaggtctctgtgggtggcatcatcctgacaattcagactttttaaataaaatccactctgcctgtattgtgttgctcagataaaatgtaaagtaattgcataatccatccccaaatcaaataagccctctctgtgaaatccaaggaatcaatagaaaagcaaagaataggaaaaattaaaggta

SEQ ID NO: 525469 - DNA, 492 bp, Homo sapiens
attgatgctttaaaatagcagaaagaagagacaaaaagatgattgtctttgataggaaatgaaagaacattctcttttcttaaaaacatcatggagtcatctactcttatgtaacctttttaattgaaaaatttagaacaaaatttagatctattttgagtattaaatatgtacaacatatatcaatatcaatcttagtgctaatgaagaaggaataagttacacactctccttaaaacagtatgttgaaatatgtgtatatatgtatgtatatatatgtgtatgtgcatatgtatgtgtgtaygtatgtgcctgcaaaaataattacctttatatttcaaatgccttaaaaaaaagcattggactttgaccagattatctattttcagaactgtatcctagttaaaatagaaattcagaccaaaatttattggattagattcattaaaaaatttcatgtaaacataaaaactaattatgtaaatgtctagc

SEQ ID NO: 525470 - DNA, 564 bp, Homo sapiens
atgttatgaaaacagcagagttaggaagggcataagttctttttatactcagaatctatgattttatggattccaragaggaaagctgaatgcatagtggagcagtattagggttctccagagaaaaagaaccagtagcattaatggatagatagatacagtatatatataaaatatatatgtgtatatatattatatatacgtatacaatacatagtatatataatatatagtatatatagtatatacatactatatataatacactatatatcactatatatagtatatattatatatagtatatataatatatagtgttatatatatgatatatagtatatatataatatatagtgcacacacacacacacaaacggagagaggttattttaaggaattggtttatgtggttgtgtggctggcaagtctaaaatttgcgaagtagaccagcaggatggcaatccaggggagattaggtgttgctgtgtgagttcaagggcagtctggaggcagaattccctcttccttgggggatgtcagtctttcgccttaggacttcag

SEQ ID NO: 525471 - DNA, 564 bp, Homo sapiens
atgttatgaaaacagcagagttaggaagggcataagttctttttatactcagaatctatgattttatggattccagagaggaaagctgaatgcatagtggagcagtattagggttctccagagaaaaagaaccagtagcattaatggatagatagatacagtatatatataaaatatatatgtgtatatatattatatatacgtatacaatacatagtatatataatatatagtatatatagtatatacatactatatataatacactatatatyactatatatagtatatattatatatagtatatataatatatagtgttatatatatgatatatagtatatatataatatatagtgcacacacacacacacaaacggagagaggttattttaaggaattggtttatgtggttgtgtggctggcaagtctaaaatttgcgaagtagaccagcaggatggcaatccaggggagattaggtgttgctgtgtgagttcaagggcagtctggaggcagaattccctcttccttgggggatgtcagtctttcgccttaggacttcag

SEQ ID NO: 525472 - DNA, 564 bp, Homo sapiens
atgttatgaaaacagcagagttaggaagggcataagttctttttatactcagaatctatgattttatggattccagagaggaaagctgaatgcatagtggagcagtattagggttctccagagaaaaagaaccagtagcattaatggatagatagatacagtatatatataaaatatatatgtgtatatatattatatatacgtatacaatacatagtatatataatatatagtatatatagtatatacatactatatataatacactatatatcactatatatagtatatattatatatagtatatataatatatagtgttatatatatgatatatastatatatataatatatagtgcacacacacacacacaaacggagagaggttattttaaggaattggtttatgtggttgtgtggctggcaagtctaaaatttgcgaagtagaccagcaggatggcaatccaggggagattaggtgttgctgtgtgagttcaagggcagtctggaggcagaattccctcttccttgggggatgtcagtctttcgccttaggacttcag

SEQ ID NO: 525473 - DNA, 564 bp, Homo sapiens
atgttatgaaaacagcagagttaggaagggcataagttctttttatactcagaatctatgattttatggattccagagaggaaagctgaatgcatagtggagcagtattagggttctccagagaaaaagaaccagtagcattaatggatagatagatacagtatatatataaaatatatatgtgtatatatattatatatacgtatacaatacatagtatatataatatatagtatatatagtatatacatactatatataatacactatatatcactatatatagtatatattatatatagtatatataatatatagtgttatatatatgatatatagtatatatatmatatatagtgcacacacacacacacaaacggagagaggttattttaaggaattggtttatgtggttgtgtggctggcaagtctaaaatttgcgaagtagaccagcaggatggcaatccaggggagattaggtgttgctgtgtgagttcaagggcagtctggaggcagaattccctcttccttgggggatgtcagtctttcgccttaggacttcag

SEQ ID NO: 525474 - DNA, 698 bp, Homo sapiens
agaatattatgatagtgtttctgctgtaaaaattggtgaaatttgcaattctaattggttccattagataktatttaaatcttttctagctctaagatgcacaaattcaaacaagagtcatcttacagcacataatttttggtcacaaaaaatagtcatgaaattattttcataaaattagacaattttattcataaaattataacaaaaaattgatataaaatgaatcaaatttaatttctatataattcctatataattttgagtatgaaagaaatgaaagaaaaacactatacttttatccttctttgttttttaattcaaagaaatatcaatcgtttaaatagtaatggtgatttgggcatttcaaagcatgttttccaaaacctcaaagagccaagtgattatattagatgagtaacattttgtggagagatctgagaatagatattaataaacaatgttttagagtattgtatagaaactcttaaatagcttttttcttataaatattatttttaaattattcaaatattaatgtttatttgaacattagattacagatttttccgtgttttatagtgaaaagatgtgcctaaattaataagaaaatactctctgaaatgttaaaatataaaatcttttgctagtgaccaaatgatattttcgtcttggctatcttgggtggatgtggtgtg

SEQ ID NO: 525475 - DNA, 560 bp, Homo sapiens
taaacccatttccttctcatctgttattgtcaggggtgggaggcaggcagcagttaagaaaatgtggttaatatttccaaacagtgcaatattttccattcttcttagaattatgtctcccttttgaaggtcaatttattgtcttttttattttcttttggtctttacagtaattgattttatggtacatgaaatgttggtgaaaaatgcttaaagggtgggaatttccttggagccaacttttttctctttggggacttacttgattgttctttcaataagaatttattgtatgccaggaactgcactaggttctgtctccgctgcattcacatttcttttgtgggtaagagtcttaccttgtgactgatgtctggttgtgtctgtcctctcaggtggggtgacygctctctgttgggacccagtccagcgggtgttgttctcaggcagttcagatcactctgtcatcatgtgggacatcggtgggagaaaaggaacagccatcgagctccaaggacacaagtaaggttgctggtgctttcataaagactactgagaaa

SEQ ID NO: 525476 - DNA, 442 bp, Homo sapiens
aacacagaatgaaattatgctgtttttaaatagctcaggccaggctcagtggctcacgcctgtaatctcagcactttgggaggccaaggcaggtggatcgcttgaggtcagaggttcragaccagccaagccaatatggtgaaatcccgtctctactaaaaatacaaagattacccgagtgtggtggcatgcacgtgtaatcccagctactcaggaggctgaagcaggacaatcatttaatcctgggaggtggaggttgcagtgagccaaggtcgtgccattgcactccagcctgggcaacagagtgagactcggtctcaaaaaataaaaaataaaaataaatagcccagttgctgaactgcttgagaccgactatgggctacttcatcttggtatttttagatgagcattgtcttctcccagtgttggtttgtgcctcgtg

SEQ ID NO: 525477 - DNA, 442 bp, Homo sapiens
aacacagaatgaaattatgctgtttttaaatagctcaggccaggctcagtggctcacgcctgtaatctcagcactttgggaggccaaggcaggtggatcgcttgaggtcagaggttcaagaccagccaagccaatatggtgaaatcccgtctctactaaaaatacaaagattacccgagtgtggtggcatgcacgtgtaatcccagctactcaggaggctgaagcaggacaatcayttaatcctgggaggtggaggttgcagtgagccaaggtcgtgccattgcactccagcctgggcaacagagtgagactcggtctcaaaaaataaaaaataaaaataaatagcccagttgctgaactgcttgagaccgactatgggctacttcatcttggtatttttagatgagcattgtcttctcccagtgttggtttgtgcctcgtg

SEQ ID NO: 525478 - DNA, 453 bp, Homo sapiens
agctgtcaaatttcacttgctcagtcccctgattctcattttcttataaaatctcaggttcctcaaatatgaattcttctgccatgagaaattagcaacatagtcttaaagtctggggaaagattatagtcagatccacatagataggacaacgttccaagtcgggagaatgttcatatgagaattgaatagaaggccaaatttttaggctaagaatatgatcagaggacacttccagtrgagagagtcagcgtgaagagttgaggtgcatggctgttgtgcatctgagagcgtgtacgcgggcgtgagagcgatttagatccctgtgtgttgaattcgagacccacccagacagcctccagtgtcttctcagtgactgtgcccaagatttctgtccatctgtggacatgttttaatgacagcaattagtggtaatgatggctattaaatact

SEQ ID NO: 525479 - DNA, 365 bp, Homo sapiens
ctgcagctcactcctgcagggaagcctcrcgcttaacgccagtgggcttaacccagctcagcctggctgcccctcaggatgaaaggcaagttctgaacgcagtctgagcaaaggcccgtgggcgctcccagtctcctagcatggaatgcatgtagctctggaagtcattcctgtgtctggagggttttccggaagctgccttgtgccttgttgtgggtactcgctgtgtcttgcagaggatgggacagtggtcctcgtggcgccagggccgagctgttcccagttccccgggactatagacagaaatatgtatatttggtggtggttttttttttttggtaacagctatactgagatgtaattca

SEQ ID NO: 525480 - DNA, 365 bp, Homo sapiens
ctgcagctcactcctgcagggaagcctcacgcttaacgccagtgggcttaacccagctcagcctggctgcccctcaggatgaaaggcaagttctgaacgcagtctgagcaaaggcccgtgggcgctcccagtctcctagcatggaatgcatgtagctctggaagtcattcctgtgtctggagggttttccggaagctgccttgtgccttgttgtgggtactcgctgtgtcttgcagaggatgggacagtggtcctcgtggcrccagggccgagctgttcccagttccccgggactatagacagaaatatgtatatttggtggtggttttttttttttggtaacagctatactgagatgtaattca

SEQ ID NO: 525481 - DNA, 560 bp, Homo sapiens
  misc_feature (1)...(560): n = A,T,C or G
gatctgactgtcgtgtgttttgttcctttttttcttttacactaagtattccattaattctcagagaacatttccacaacctcaaaaccacagagagggaggctaggggttagaactcacctggcagtgaagagcctgcctagacctgagggtgccagagcgcaggccacagcgcaaatgctccggagagtagccctcagccagccactgtgagggtgcccaggacagaggagacgggaaaggggaggrgtgagccacggccacggccaccatggcgcctccctgttcaccagggtcccttcgatgggctcggtggggtggggtggcttgtccctgtgctgctgagcttgcaggactgtgcctttttttaaaggattaggagcctgccgccccttggttctggttactaattcttactctcccctccccctgcctttttcaaaattcaaggtgaaatctgtgcactgtcaagctggagacacagttggagaaggggatctgctcgnggagctggaatgaaggatttataacctttcagtcatcacccaatttaattagcc

SEQ ID NO: 525482 - DNA, 516 bp, Homo sapiens
cagcggctcgtgacccgccagaaatggccccggacaccacacttgccaccaatcatgtggacaagtggaccctgaagaaactgaagaagtcacactgaactcatgggacttctgttttcttctcagcaaacaagagctgctctggggggttctaggcctcattttgctcaagaggcacgtctgctgcctcttggttctatcaccagcctgtgcaacaacagtattccccagatttcaggcacattgcactaggaaaggtgtggccgtgggaaaaacacaaggctagccagatacgtgcgccctgtgggcctggccatgtgatagccctgggacacccttcccagtgtggggacacagattagacctggggggcatgctgggataggaaagttgagatgtgaattaaggagaacctggggtaggacggtactgaggaagagaagaggcaagtgcycaggcctaaaattgccaggactcggctgctggggtgtacgtgaaaatgacaaaaggcaccag

SEQ ID NO: 525483 - DNA, 634 bp, Homo sapiens
cttctctgtcatctctccactgcctcccagccccttccactgtgccccctgtattgcccactttcagaccaacagccttttgtatcagccttttctggaatgttccactaattacttaccctaactaaaaccttagggtagttttgttctcataccacacgcacctccaagacaggaggtgggattactttcctcctygtgtcattcaggacgactgctccgctctttcttgtaagccctttcttttttgaaatcacatcatcagtcttcactacctcatcttcctcttggcaaccttcagctccccttccctgtatccctctccctgcacgtgaagaccagcagccagttcctggtctgtctgtctgtctccatacaatcattattccctgtattttctctccatccacagacaccactcctgtttttacatcctttatccaatccctggcctggcattatagtcactcactcatgaatacccttaactgctcactccttcattcttccatcagtctcaaacttagaggaactctgcctccaccttccctatgcctgcgcatgagcaccttaccatggctggtgaacgtcccataccaagggcacagttaacatgcgtctgctggtcagggcc

SEQ ID NO: 525484 - DNA, 620 bp, Homo sapiens
gtgtggggttctcattatcttgctaggggtcttttaatatgtttttgcatctgtaattgcatctgttaatctccattatttaatctccattatttctccaaatatttcttcttttcttttttttgtatttttctttctgggactcctattagatgaataatagatatttccactaattctatctgtgtccttagctttggcttttcttctcaatttcctatctcttgaccctttcctgcaaacttctaggagagtccctcaatctgatattctttccttttctttctttgtttttcttctttttttttttttttttttttttttttgagacagagttttactcggtcacttaggttggagagcactagtatgaacatgactcactgcaggctcaccctcctgggctcaagcgatcctcccaactcagcctctccagttgctgagaccacaagctcacaccmgcacacctaattttttaacatttttgtagagacaagttctcactatgttgcccaggatggtctctaactcctgagctcaagcgatcctgccaccttggcctcccaaaatgttaggattacaggcataagccaccatgcctggcctcaatctgatattct

SEQ ID NO: 525485 - DNA, 620 bp, Homo sapiens
gtgtggggttctcattatcttgctaggggtcttttaatatgtttttgcatctgtaattgcatctgttaatctccattatttaatctccattatttctccaaatatttcttcttttcttttttttgtatttttctttctgggactcctattagatgaataatagatatttccactaattctatctgtgtccttagctttggcttttcttctcaatttcctatctcttgaccctttcctgcaaacttctaggagagtccctcaatctgatattctttccttttctttctttgtttttcttctttttttttttttttttttttttttttgagacagagttttactcggtcacttaggttggagagcactagtatgaacatgactcactgcaggctcaccctcctgggctcaagcgatcctcccaactcagcctctccagttgctgagaccacaagctcacacccgcacacctaattttttaacatttttgtagagacaagttctcactatgttgcccaggatggtctctaactcctgagctcaagcgatcctgccaccttggcctcccaaaatgytaggattacaggcataagccaccatgcctggcctcaatctgatattct

SEQ ID NO: 525486 - DNA, 606 bp, Homo sapiens
ccctcgtttatgcctatcaggcaagagctggagaggggaccatgcggatgtgcgcactgtctgttttctgtggctgccgtaaccaatgaccacacaatgagcagcacagaatgagataaatttactctcttacagttctgtaggtcagagtccgagatgggtaccagggagctaaagccaaactgcgggcagggctggctgcttctggagaccccgggagaatacatttccccctcttcctgtctttggggggccctgggagaatccctactcccctgtcttctcttggttctggaggccctgggacaatccctacctccccgtcctctcctgcttccgsaggcatattccttggcatgtgacactttcctccatctctgaaatgcatccctccaacctctgcctccatcatcagctccctctctcacccctcttgtggggccccctgatgacactggacccacctggatcctgccagatggcctccccatctcaaaatagctgaatcacggtcccctttgccatgggaaataacatagacacgggttctggggattgggacgtgaagacctttggggagccacttttttttgccaaccataaatg

SEQ ID NO: 525487 - DNA, 321 bp, Homo sapiens
accccttcctttctccccacagctcttcagtatttgccagcaggtccctctgtgtgcatcagtgagttcctgagggcatgccgcagaagtgaaactgtcaatatgacccataattacrccccaccaacacacagcttactctgcaccaggcaccattttaagattttacattcattagtgtgggatacatagcaagaccctgtctctaaaagcaagaaacaacaaaactaaattaactggatgtggtggtgtgtgtctatggtcacagctactcaggacacaggcaagaggatggcctgagcccagcagttggaggctgtg

SEQ ID NO: 525488 - DNA, 644 bp, Homo sapiens
gaaaggaagatcagagccttcagacctggccccagcccccggttcaggatgtctgtatcctttctttctttctttttttttttttttgagatggagtctcgcattgttgcacgatcttggctcactgcaagctccaccttcctggttcacgccattctcctgcctcagcctcccgagtagctgggactacaggcgcccgccaccacgcctggctaattttttgtattttttagtagagatggggtttcaccgtgtgagccagtatagtctcgatctcctgacctagtgatccgcccgactcagcctcccaaagtgctgggattacaggcgtgagccaccacgcccagccgcctgtatcctttcatcacgctccgtgctgtccacaccccacaaacccaggaggaaaatatgcagagttccccggttcgatgggtgttccattctcaaggctcctgtgtcacatggaacttctcgtaaataagcctgcacggccctcttgttaacttgtctttcattacwggtacggcagccaccaggctcgtgataggcagagggtcctcttgttaacctgtctttgtaggtgccgcagccaccagcctcgtgaagaagagaggccccttctcccctcaggcatgggtggcccg

SEQ ID NO: 525489 - DNA, 584 bp, Homo sapiens
gctgcaggatcctggggccccaacagaagccggtgaaggaagagttcctgctccagcaggtgcctggtctccaccttcaggggctgctccaggagagtggcaatttggggcagcaggaggaaacatgggtgtgaactagttctttttttttttgagacagggtctcactctgtcacccaggctagagtgcagtggcaccatcatagttcatcgcagcctcaactcctgggcttcaagggatcctgccacctcagcctcccgagtagctgggagacaggtgggcaccaccacacccagctaattaaaaaaaataaaaaataaaaaataaaataaaaaatatatattgtgtgtatatatataatacatayattatatatatagcgtgtatatatataatacatatattatatatagtgtatgtatatatataatacatattatatatagtgtatgtatatatgtaatacatattatatatatatatatatacacaaaatacatgtgtgtgtatatacagtttgttgctcaggctggagtacagtggtgcgatctcagctcactgtggcatgaatctccctgggttc

SEQ ID NO: 525490 - DNA, 584 bp, Homo sapiens
gctgcaggatcctggggccccaacagaagccggtgaaggaagagttcctgctccagcaggtgcctggtctccaccttcaggggctgctccaggagagtggcaatttggggcagcaggaggaaacatgggtgtgaactagttctttttttttttgagacagggtctcactctgtcacccaggctagagtgcagtggcaccatcatagttcatcgcagcctcaactcctgggcttcaagggatcctgccacctcagcctcccgagtagctgggagacaggtgggcaccaccacacccagctaattaaaaaaaataaaaaataaaaaataaaataaaaaatatatattgtgtgtatatatataatacatatattatatatatagcgtgtatatatataatacatatattatatatagtgtatgtatatatataatacatattatatatagtgtatgtatatatrtaatacatattatatatatatatatatacacaaaatacatgtgtgtgtatatacagtttgttgctcaggctggagtacagtggtgcgatctcagctcactgtggcatgaatctccctgggttc

SEQ ID NO: 525491 - DNA, 533 bp, Homo sapiens
tgtttgacttttttgtcacgggaagtttcaaagaggcagaagtagcttcagcagcatatcaacacatagccaacccccttgggctcttttaaaggagaccttaggtctcctcatacttcatctgtaaatatttccatatgtgtctcaaaaaggcaagagtccccttttaaaacatgaccacagtgactcaagacaacgtggcctaagacatggaagaacggtggcgttgatgccggtccccttgaccttggcggcagagctgggcgttcagaccccttccagccratgcctgttgagaggcccacctcaggcatccagttctgagctttctctcttctgtggactaaatatgatgtctgcgaaagggggaggtcttgcctgtcatctctgggcatcccagagggatatgtgaccagtgtcccttccttgtggaagcctgtgagccatctggaagaaagggggccggcgcagggtggcccactgccagcgcgtctaactggaccgcgcagagctagtgggaggtgccactcctg

SEQ ID NO: 525492 - DNA, 635 bp, Homo sapiens
ctggttgacggagggcagcttgttcatgcccccgtgcaccttgttcatgggcgagaggaccggcccgtaggacgggggctgtaggtgactcctgctcagaagcaacggctcgcatgggtgggaagcaaggcagcctcgtgcccaccgaccacccatgcccgtgatgcccccatgctgcgaatgggtggagcctctgatgtcagagagtggcttcatcctcccccagcctccctgtccccaaccatggccatgcacggccactgggcctgcgcctgagaaggacactggccatggcggggccgggaggcagggggatgacctgtgccactggaatcggactctggtcttggtgggtcatggtcaytctggccacccctcctggcctttccactcagcagacatttacaaggcccctcagtggcagaggcatagcaagggccatgacccagggtcccagggcagccccaagtgctagaaggcttcctggaggaggagatgtggggtgggctctgctctggaccctgctgcctgtccctggcagatgatgccttctggaggggtttctggtcctcctggccttctcctggggggttaagccatgtcctccttccccacactgatggtgggctagggct

SEQ ID NO: 525493 - DNA, 635 bp, Homo sapiens
ctggttgacggagggcagcttgttcatgcccccgtgcaccttgttcatgggcgagaggaccggcccgtaggacgggggctgtaggtgactcctgctcagaagcaacggctcgcatgggtgggaagcaaggcagcctcgtgcccaccgaccacccatgcccgtgatgcccccatgctgcgaatgggtggagcctctgatgtcagagagtggcttcatcctcccccagcctccctgtccccaaccatggccatgcacggccactgggcctgcgcctgagaaggacactggccatggcggggccgggaggcagggggatgacctgtgccactggaatcggactctggtcttggtgggtcatggtcactctggccacccctcctggcctttccactcagcagacatttacaaggcccctcagtggcagaggcatagcaagggccrtgacccagggtcccagggcagccccaagtgctagaaggcttcctggaggaggagatgtggggtgggctctgctctggaccctgctgcctgtccctggcagatgatgccttctggaggggtttctggtcctcctggccttctcctggggggttaagccatgtcctccttccccacactgatggtgggctagggct

SEQ ID NO: 525494 - DNA, 635 bp, Homo sapiens
ctggttgacggagggcagcttgttcatgcccccgtgcaccttgttcatgggcgagaggaccggcccgtaggacgggggctgtaggtgactcctgctcagaagcaacggctcgcatgggtgggaagcaaggcagcctcgtgcccaccgaccacccatgcccgtgatgcccccatgctgcgaatgggtggagcctctgatgtcagagagtggcttcatcctcccccagcctccctgtccccaaccatggccatgcacggccactgggcctgcgcctgagaaggacactggccatggcggggccgggaggcagggggatgacctgtgccactggaatcggactctggtcttggtgggtcatggtcactctggccacccctcctggcctttccactcagcagacatttacaaggcccctcagtggcagaggcatagcaagggccatgacccagggtcccagggcagycccaagtgctagaaggcttcctggaggaggagatgtggggtgggctctgctctggaccctgctgcctgtccctggcagatgatgccttctggaggggtttctggtcctcctggccttctcctggggggttaagccatgtcctccttccccacactgatggtgggctagggct

SEQ ID NO: 525495 - DNA, 538 bp, Homo sapiens
gagacatgaaccaaaactcttttttttttttttgagacggagtctctctctgtcccccaggctggagtgcaatggcgcgatcttggctcactgcaacttctgcctcccgggttcaagcgattctcttgcctcagcctcccaagtagctggaattacaggcatgcgccacgaggctcggctaacttttgtgtttttagtacagrcagggtttcgccctgtgggccaggctggtcttgaactcctaacctcaagtgatccacccgccttggcctcccaaagtgcttggattacaggcgtgagccactgcgcccagccatgaaccaaaaccgttgatcaatgagtgtccccagaccacaatgtgggcagttttcatgtcaccctggggacaaatacaaaagctattaggggtttgggaaaatcttggcctttctcagaactgctgtcacacggcagccaccagggggcgatagagctctgccttcctggcaggcctaggcaggtgagggtgggacatgggtttcagggagccctcccgggc

SEQ ID NO: 525496 - DNA, 485 bp, Homo sapiens
tctaaggtcaccttcaaactccaccctaagcctgaccaccacccaccacctcctctgatgcacacaggactgagccaccaggtggtcacacttttcaggccccaggaccactggaaacccctccctcatggggctttgggaactgctcgctcgtcgtcctcctccctgcatgcggctccttctcagctatgcaatggctgccgggcatctccaacacagccacggccgaccgcggcgttttcacccctgctctgctgcagttctaccaatctcagggcagaaaacttggggtctcccccaccccttccctcatatccagcccatcagcaaatcttgcccagaatcccacggtgtggtaccacctgrccggcggggctgccccattccctggatcgtcccagcctgcaggcggctcctggccttggccctgcccccctgtggtctatccccagcactgcagccgggggccctcccagaacgtctgc

SEQ ID NO: 525497 - DNA, 653 bp, Homo sapiens
tggccattgctgacgcccagggcaccgggcagcagcagccgagtggacaccagcagctcctgcaggcagtgagggtctgcaggccagggcagcagggctccacctccccacccctcccgggaatggcgtctgcgcaaccacatactcaaccttggtggagtcccccgagagggtgagtcacatggtgacatctgctccattcaagggaaaagattgtactagagtcccccaggtccccaggcttctcggctggccaggcagcgacactggcctctccacccgaggcttctggatccacctcgggttccaggcggtccagcagccgggagatagcccctcccagctcacacacctcctgggagagtctgggggtacaaggcagccccccaggagccccaggcctgctgtgcgtttctaatagcaacgtgttggtggatacatgtatcaatgcacaagtgggtgacagccagayaagggagagagggacaccccatgcctgatgtagccgttccacgctctgggctacagtcccagcactgggtttcagataaaaagatcacgcaggcgtgtggagaggccatggtgccgccagactcgagtgcatggacccagcatctgggcaggctgtggggctgggtcacccacaccctcac

SEQ ID NO: 525498 - DNA, 683 bp, Homo sapiens
cctgaggagccctggggacccgccctgccccaccagcaggccgggctgaggacgaaaggacgattccaggtgttgtgccccaaggggctggggcctggagagcccagctcagggccctagggccgggaggcagcaggtgagtcctggacgcccgtctcttcctgtggcagaggatctcagcccccaacaggaagggcagcagcactcaggaggagacgactgagaaaaagacagttttgtctggtagatcaggttcaggaagggcgtctctgggaagccccctgcagggggtcggctggggcccagactggatgttctggggaaagcagcagcctccttgcaggagagcccagggcgagcactaggagactcctgctgggatcggggatgccctggggatgagggtgccttctgcttctgagcctgggacccctcttgggttgggggcgggctccccagggatggacagaccctcagagcagggccgaggcggggcctgggttccgctcccgacccscacagggcacatcctcagcctctgtaggcggtgtcctctcctgccaaagggaatgatgcattgaaaaggagactcaggcgagtcccatgcacagggccggcctgatggttttataaatagccaaaaggagagcgccaagtggaaggacgtgaggaaggaagacagc

SEQ ID NO: 525499 - DNA, 603 bp, Homo sapiens
tcccatgcacagggccggcctgatggttttataaatagccaaaaggagagcgccaagtggaaggacgtgaggaaggaagacagccaggctgccttcagcacgagccccacccatgcccagggcaccgtgcctgagaccccgcatctctccacccttagcatctgggccaggctgcggggatcccagtgcggctgagctacacgtttccaactcaaaagcaccyaaaaccactggcctctgccccagagcggcacccagctttctgcaaacgttcccaaggcccagccttgcagaggacagggacaggggatctggggccacacccccttggcgtggcccttagcgcctcctccaggttccctccctgctgggtcctccattctgctttcattctgcttctgactcaccggggattccgcctgactttccgcaggaccctgggccgcaggacaggggggaacgacgctgccgcaggccacggcactcttcaggaaccagttagtgggaggggttatgtgccagaacagacagggggacttcgtttcctggtgccagtgatgtgtcagttcaaggccaaactcatggcacagggtccctgctggg

SEQ ID NO: 525500 - DNA, 411 bp, Homo sapiens
agctacacgtttccaactcaaaagcacccaaaaccactggcctctgccccagagcggcacccagctttctgcaaacgttcccaaggcccagccttgcagaggacagggacaggggatctggggccacacccccttggcgtggcccttagcgcctcctccaggttccctccctgctgggtcctccattctgctttcattctgcttctgactcacyggggattccgcctgactttccgcaggaccctgggccgcaggacaggggggaacgacgctgccgcaggccacggcactcttcaggaaccagttagtgggaggggttatgtgccagaacagacagggggacttcgtttcctggtgccagtgatgtgtcagttcaaggccaaactcatggcacagggtccctgctgggca

SEQ ID NO: 525501 - DNA, 594 bp, Homo sapiens
gagactcaggcgagtcccatgcacagggccggcctgatggttttataaatagccaaaaggagagcgccaagtggaaggacgtgaggaaggaagacagccaggctgccttcagcacgagccccacccatgcccagggcaccgtgcctgagaccccgcatctctccacccttagcatctgggccaggctgcggggatcccagtgcggctgagctacacgtttccaactcaaaagcacccaaaaccactggcctctgccccagagcggcacccagctttctgcaaacgttcccaaggcccagccttgcagaggacagggacaggggatctggggccacacccccttggcgtggcccttagcgcctcctccaggttccctccctgctgggtcctccattctgctttcattctgcttctgactcaccggggattccgcctgactttccgcaggaccctgggccgcaggacaggggggaacgacgctgccgcaggccacggcactcttcaggaaccagttagtgggaggggttatgtgccagaacagacagggggacttcrtttcctggtgccagtgatgtgtcagttcaaggccaaact

SEQ ID NO: 525502 - DNA, 563 bp, Homo sapiens
acaagcgtgtgaggcctgtggtctgttatgatccactgtgtctaggtttggcctgggggatgcttgggccggaacaagtgtgtgaggcctgtggtctgttacsatcccctgtgtctgggtttggcctgggggatgcagccaggtttggggtctccctgatgcccgggacctggaggtggctccggtcccggtcaccccatcttgggaacagcgtgtgtgagggctgcgctggaggctgcagccaagcccccggctagagcctagctgtgcccactgctgcaggacacagacgccccctcgccttctgagctggggctccttcctgcaccccagggccacagggaagcctggcaaggctgggaacttgaagctgccctgtcctgcagccggccactgcctgggtggtcacgccttgagaaggagacacccagggattggagagctctgaccccagcgcccgtccgctggtctttgtctccaccattgctcccctgagaacccctgggcccagctcccagtggccctggacacccatgaggaggtggcagtgtccaggcagagca

SEQ ID NO: 525503 - DNA, 617 bp, Homo sapiens
aacatgactaattcctgggactgcaacccccacctgggagtagaaagctctgtgctgtttttgctaccttttgtcaccactaataaaggcttggcagtcggaatttagctgctgtgggtggttttcttacmcatgtgggctttcccttccccctacggggtcactgtagagtgaatgcttgcttgcctgctgggctggttttccaccagctttgtaatattcccagcctgaaatgccatggttttgggggcagtttgcagagaaggggccacggcattcagggttaattgggcctttgatgattttgacaagggtaggatactgcgtgatttatggagcaaagaatgggttggttgaaagtaaaagagcaaaattgcaggtgtgatgtttaacctgctgaagagaacatgattcaggacgcattccctcgcctagctggcgtgatagtctttgggagagtgggccgtgcagacagtgaaactgtgcaaattgttgtttcacccccaccgcccatcccctacccctcactagctgcaaaaccctgagcaggttacttagcttttctgagcctcagtttccacatctgcaaaatggtacagactggccatcagccccag

SEQ ID NO: 525504 - DNA, 377 bp, Homo sapiens
tcagggcgtgctgttctcaggctcgattaccagggtacaagggagtgggcagaaacatggtgcacgatgcaggcttcgccctggaactggcacactgttgctcccacccacaagccctcagccagatcacgtcacatggccacacccaatatccatggggaaggaagagattcactctgctttttctaatgggtggttgtgcgagggtacatgacacagcgtgtggaggtataattttatagggggagggcatgaaggatgatgactgatgtccagtccaccacaagtgccagtttgcatgaatgatttgctttaaaaaaargttagaggccaggctgtccccagatgattgtgctcagccctcacttgcactcatg

SEQ ID NO: 525505 - DNA, 558 bp, Homo sapiens
acttcatgctcatgcagtgaagagccattaaaaaaattgagaataacaccatcaaatgttcactttagatgaattgctctgaggatagcatagcagctagaataggatggtttgagaccagtgaggagaccactgcaataactcaagagtccaagcaagaggtgacataagacgaactcaggctgtggctgcaggaatgggaaggaaggaataggatccaggagttactaggtagcaggacaaggcttgggggctgatagggtttggatatttgatcctgcccaaatctcatattgaattataatccccaatgctggtggtggggcctggtgggaggtgtttgaatcatgagagcagatccctcatgaatggtttaggccattcccttggtgataggtgagttctcagtctgagttcacatgagatcacccaccctctctctcttgcttctgctctgccatgtaaagtgcttgctccccctttgccttccaccatgattgkgagcttcctgaggcctcccgagaaactgagcagatgccagcaccatacttcctgtac

SEQ ID NO: 525506 - DNA, 466 bp, Homo sapiens
ttgtatttttagtagagacggggtttctccatgttggtcagactggtttcgaattcccgacygcaggtgatctgcctgccttggcctcccaaagtgctgggattacaggcctgagccactgcgcctggccaacagctaccatttttaaagtcaggatagtttagtgatcgtaagtacagcctggagcctcactgcctgtgtccaaatcccagctctacaatatactgattgtgtgcccttgggcaagtcattaaactctctatgccttgattttatcatccgtagaatggggataatagtattgcctatctcctggggtttttgtgaggaataaatgagtaaatccatggaaaacacaaccgtgcttgtcatctaacaacaactatgtgtcatgtaaactattcattatcattagtaatcatctgccctaaataccagcaccacacacggcgctgtaaagatctta

SEQ ID NO: 525507 - DNA, 536 bp, Homo sapiens
gacaagtgtggtatttcattcccggggtcacatgagattggatcaccagaatggtgctgaaatgctgatttgaggtgactcaaatcgtttatatagacagaggccccacaaatgatatcacatcctcaaggcagccttgctgggggcatcagagaagccayagcttccctaacttgagctgggtttggaaggataaacaggggttcaccaggcagtcaaggagggaggggaacagcatgggcacaggctctgggaggtgaggtgactcagcccaggtcacccaggcagtaagaggtgggtggcaactggaagcctggtcctctcttcccaccatgttgagtccttaaccctggagcctcccatacctttggcattgccaagcttccctgatgatctcttccctgaaaggacttggcacccaggagcccctcatcccagcccactcacctggtggtggggaaatggctgttgcctggactggcagggctggcatcttgggtgaggctctgacctgggcctggggaggagcagggagc

SEQ ID NO: 525508 - DNA, 558 bp, Homo sapiens
ttttttacttaaagagcaaaaaaaaaaamaaaaaacaaaaaacaaaacacgatcacaatataagccagtataagcaactggttcgtgcaggatggtggtagttatcaaagagagcggggggtctaaagctctaaggagtcgtctggagaaagccaggcagagacttgctgcttttctattctacttctttcccttctcatccagcttgaaagctgcacccatcaagtgcgtcctgaatctgacgattcactatcttcacttccgccagtctgctccaggcctccatcctttctggcctaaatgaaccccaaagctggcttgtgtcctgcatccatccaccactcttgcccttgtttcacttatctattgctgtgaaataaacttcaaaaccaagtgattcagtctcacaactctggttttcctgggctgagtggggtggttcctctattcatgtgatgtggctggagctgtgggcatttgtgggcttgaatgggctgagtgttcaccgtggttcattcacatggtggcagctggctaggttctcagctaggacgatgg

SEQ ID NO: 525509 - DNA, 606 bp, Homo sapiens
tgacaaaaatcccaacctaaaaaacagtgtcaacatttktaagtaggatggggaggcagagatgaattggcagtgttatcacagctactggactatgtggactttaacaaagtaagaaacgggtgggggttgggtggtggtatcttaatagagcaggagtagagacggatgtcctggggcagaatgggtaccaatgctgcctgaagcctggagctgggagctgaggactaagaggtagacaggagggtggggaccggtacctgctccaaggaactggtgccccagaactggtgagctggggtatgcatttagctcattcgtttaccagaatgcagtcaccacctgatgaaagaaatgactaatggcaggacttgaacagttctctataaatgagtacctgggagaaaaacaggtctccaggctccacaatacccaataaacacactgcctttagcccacttcaagctgcacttcttacatggaacccaacccaaccaacctcagaggtaagggtgagagcaggcaatgaacagctatgattctccattccctggccaggcagggagcctttccatccaccctcgtgagactgcttgtaacagaaat

SEQ ID NO: 525510 - DNA, 624 bp, Homo sapiens
ttgtggaactttgttatggcagacctagaaaactcacagagatggggtccctgtctttgtgttcccttcagcacctgctcagtgccttcttctcatcccaaagggaggccacagccgttgttcaggatgttgatgtcactgatgacaaggaagagcttcagaactgggctgtgagcccccattgctgcgctcctgtctggggttctcagcttggccactccttttttgtctgtcagtattactcatgcattagggtcagctccctctcgcccctcactccatgtgttcaygtacacacagacaccatgcatgcactcatacacaggtacacataccacacatgtactctcacacatgtacacacacaccatgcatgtactgtcatatatgtacacatatacacaccatgcatgtactctcacacacacatacagtctcaccatgcatgtactcacacatgtacacagtctttatgcatgtactctcacatacacatacacaccatacatgtactctcacacacatacacagtctcaccacatatgtactttcgtacacatgtaaacatacacaacatatatgtactctcacacacatgcacacagactcaccaaacatgtactc

SEQ ID NO: 525511 - DNA, 624 bp, Homo sapiens
ttgtggaactttgttatggcagacctagaaaactcacagagatggggtccctgtctttgtgttcccttcagcacctgctcagtgccttcttctcatcccaaagggaggccacagccgttgttcaggatgttgatgtcactgatgacaaggaagagcttcagaactgggctgtgagcccccattgctgcgctcctgtctggggttctcagcttggccactccttttttgtctgtcagtattactcatgcattagggtcagctccctctcgcccctcactccatgtgttcacgtacacacagacaccatgcatgyactcatacacaggtacacataccacacatgtactctcacacatgtacacacacaccatgcatgtactgtcatatatgtacacatatacacaccatgcatgtactctcacacacacatacagtctcaccatgcatgtactcacacatgtacacagtctttatgcatgtactctcacatacacatacacaccatacatgtactctcacacacatacacagtctcaccacatatgtactttcgtacacatgtaaacatacacaacatatatgtactctcacacacatgcacacagactcaccaaacatgtactc

SEQ ID NO: 525512 - DNA, 597 bp, Homo sapiens
ggttttcaagttcccaagtggaaatgtcatgttgtccaagaagctgttatgcacaagacatttctttttcacagtcatccattccctagtttgttttccaagagcccagtagatactggataaaattgtagatgctggggtctctgtgagggaccaagacatcctatgaatgaagtggtatttggaacaatattgctgctgatcagagggtccaagggagatgtaggtgccgacgtcactgaratcctgatctggccacgtttgaacgaactatttaagcccgacctcacttcctcaagttcctaaattcctcttgacaacaaacaagccagtctgggttgagtttctgtcactaccaaaaagatcttggctaacaggaagtgaactttggttaagtgagagcagctcctggcatgtggttaggacacatttgagggtcattgtggtttttactgtcactgtggtaattccccaggggcggtgaccctccacctttcaccattccggagcacagcctccttcaccagcctcaggaaagaagcaggctcctgcagcaaagtggaaagctgctcctgctttcctggtctaggatcagga

SEQ ID NO: 525513 - DNA, 435 bp, Homo sapiens
gttgaggggagtgggtggacatggggcagggagctggaagaacacttgagagacagcaggtaaatgagacatggctttattcagaagcctcttctcagggtcagtgttacatttatacactacacaaacaatagtggctgagagccagattgggtgcttttctatgttatgtcaacatggctatgattatataaggcatgggactatgygcctgtgctacaaactcgctgagtcatccaggctgtttaccttggcctatgcctgctgccctatgcctgcttggctgcagcacagccatgttccttacatatggcattgttgaaattgaaatgtcatagccacactgcagaagagagacatccaccagtcctcattagacaacatagctgtattaaatcctgctctcttcagaagccaagacctatgcattccttc

SEQ ID NO: 525514 - DNA, 614 bp, Homo sapiens
tttttctaccttgtattctctgccactcaaacactgtcatttgatcagtctctatgcatttaccaagtatttactatgtacaaggcatagtattatatactatgaaaattcaaggcaaatcaaagtttgttctgcaccaaaagagttaataggttaagtcttgaacacacatataaataatcataacataaaaactacaaggaagataacagagaaatagaatttgacaaagaaattagaatgaaagaaatagaaatatgccatagatgaaaamtttaggagagcatcagatgtgaaggggtgaaggggagatagggcatggtgagagagagtcaaggaaggtcagagaatgcatgagaaagaaagaagcaatctcaccttgttaagcaacggttgtgcaaaaacatagacactttcatagtgaacaaaatgttacactgctattctacatagtattggaagatctggccagggcaatcaggcaagagaaagaaataaagggtattcgaataggaagataggaagtcaaattatctctgtttgcagattacatgattgtatatttagaaaaccccattgtcttagcccaaaaacttgttaagctgagaagaaac

SEQ ID NO: 525515 - DNA, 499 bp, Homo sapiens
taggaatctacataaacatgaaggcgttagtgatgtcctggaagtcagttgatttgaatgagccactgtgtgttaagatagtggaaagaactattattttctgagtgcccactatatacctggcactgtactaggtgtgttatgcgaatcatctctttttcttgccattaataacaaccatgtacttccagtgccttcaccacctggaatcccaaggttcctgaatcagataggataaattttggttttgaaggacagagtctcaagatagtaggaattaaaacacaatggaacttatctttctcacacataaaaatmtggaagtaggcagactaacgtaatgggagcagtggctctgctccatgaaatcttggggcattccagcccatgtttccatcattgatagcccacagtgtcatgatgcagaacacgtctagagctccatctttcaagaagcacaatggagggaagattaagacgaaaggagcaaaggacaggt

SEQ ID NO: 525516 - DNA, 499 bp, Homo sapiens
taggaatctacataaacatgaaggcgttagtgatgtcctggaagtcagttgatttgaatgagccactgtgtgttaagatagtggaaagaactattattttctgagtgcccactatatacctggcactgtactaggtgtgttatgcgaatcatctctttttcttgccattaataacaaccatgtacttccagtgccttcaccacctggaatcccaaggttcctgaatcagataggataaattttggttttgaaggacagagtctcaagatagtaggaattaaaacacaatggaacttatctttctcacacataaaaatctggaagtaggcagactaacgtaatgggagcagtggctctgctccatgaaatcttggggcattccagcccaygtttccatcattgatagcccacagtgtcatgatgcagaacacgtctagagctccatctttcaagaagcacaatggagggaagattaagacgaaaggagcaaaggacaggt

SEQ ID NO: 525517 - DNA, 226 bp, Homo sapiens
aggttccaataggtgaatgtagagttctacggatgagggagctgtttgatttatgcatactcatgtcagtattttgattatgccaaatctgaattcagtagtttggtatacattcgcaagaaaaaatgaaactcatatgaaagatttgtcaattataaagcctcaaaagtggggcataattaatccatgttagkgcttttggatttgtttcattctggaataaggt

SEQ ID NO: 525518 - DNA, 521 bp, Homo sapiens
catctattatttactgaccagtatctattctaacaacattatcatggacatccttaaataaatgtctcctactacaggtttcaagtttgcctgggattgaagggttggaggatgtgggacttccaatgcaaaaactgggacagtgaaaaccaggatagttggtcaccctaccatggatgggacctgaccttctgtctagtcacttttgtttaaaatatatttcccccattaagctttgatgttctttgaagrcaatgtcctcccgttggtccttggcatataatacttttcttgatgcttaataaatattcagtgaatgattttctattttcaaagggcttaaaatagctcttggggtatgaacatatttattttatgggttgtttccttcctgttaatagtagcactgtgatatggtttggctgtgtccccacccaaatcttatcttgaattcccatgtctttcccttgctgttctcatgatagagagtaagtctcacaagatctgatggttattataag

SEQ ID NO: 525519 - DNA, 521 bp, Homo sapiens
catctattatttactgaccagtatctattctaacaacattatcatggacatccttaaataaatgtctcctactacaggtttcaagtttgcctgggattgaagggttggaggatgtgggacttccaatgcaaaaactgggacagtgaaaaccaggatagttggtcaccctaccatggatgggacctgaccttctgtctagtcacttttgtttaaaatatatttcccccattaagctttgatgttctttgaaggcaatgtcctccygttggtccttggcatataatacttttcttgatgcttaataaatattcagtgaatgattttctattttcaaagggcttaaaatagctcttggggtatgaacatatttattttatgggttgtttccttcctgttaatagtagcactgtgatatggtttggctgtgtccccacccaaatcttatcttgaattcccatgtctttcccttgctgttctcatgatagagagtaagtctcacaagatctgatggttattataag

SEQ ID NO: 525520 - DNA, 573 bp, Homo sapiens
ctgatgtgcagccaggggtgagagccactaccctaaagcagctattcacaaagcgtggtccctggaccagcagcatcagcatcacccgggagcttgctaattcagatgcaaattctacagcctgctccctactaactgcatcagaacctctggacggagktccagcagtgtgtgttttaagaggtgtggcagagtctgatgctcactaaagtttgagaaatgcctccctaaaacaaagctcagagcaaggacacctttctttatttttcttcacccttgtcttcagctctccctacacataccccaaatttgagtttggcacccaaagcattattagatcattatttttcatttttacaaacagacatattcacaatctgaatttttagtcatttagtcatttgcactaatgcaatttattgccatcactgtatgggactggatggttataataatgactaagaggtgagactaaccttagggaaatacaatccagagaaatatgtgactaaatcctgacagtacagtgtgagaggtgctccagaagaggagccaaaacacaaattttgacat

SEQ ID NO: 525521 - DNA, 573 bp, Homo sapiens
ctgatgtgcagccaggggtgagagccactaccctaaagcagctattcacaaagcgtggtccctggaccagcagcatcagcatcacccgggagcttgctaattcagatgcaaattctacagcctgctccctactaactgcatcagaacctctggacggaggtccagcagtgtgtgttttaagaggtgtggcagagtctgatgctcactaaagtttgagaaatgcctccctaaaacaaagctcagagcaaggacaccttyctttatttttcttcacccttgtcttcagctctccctacacataccccaaatttgagtttggcacccaaagcattattagatcattatttttcatttttacaaacagacatattcacaatctgaatttttagtcatttagtcatttgcactaatgcaatttattgccatcactgtatgggactggatggttataataatgactaagaggtgagactaaccttagggaaatacaatccagagaaatatgtgactaaatcctgacagtacagtgtgagaggtgctccagaagaggagccaaaacacaaattttgacat

SEQ ID NO: 525522 - DNA, 599 bp, Homo sapiens
tgtatgaagaaacactttacatttttctccccacttgctttgttcagaaaaacaaaagtaattaggtttattgaagtgtcattaaaaagataaaacattgtacctaggtatttgcatttatttcaaatcttttctaagtggcatattagtttgattataaatctacgagggattgttttgctttgtattgtaatgaatttttagaaatttaaattgcgtactcttacaaaagataggagagcatattgtcagcaasgaagatgtacttgaatcttctccacccactgtccagagcactcttcgttttctaagatcaacatataaccagggatgaagcagggtaagggattgctttattctacctgttctgtcccaaacccacactaggtctctaatcttactattttggaatgtcaaagaacacagcagtcaggaagaaggtgtaagtacaagacaatagtagccagaggagaaagaccatttgctccaacgcccagagctgtttcagacctttggcacccttacttttgcggaccccacccacatcatatgttatacacaatacaccacattaaacataactttatatgccctactat

SEQ ID NO: 525523 - DNA, 593 bp, Homo sapiens
tggtttggttaatctatagtcttgtccagcgcaggaaaactagcactgtccagcaactgtaaccagggagattgaatttcaccatgggagaggaaaccacttttaactatgctatttacatccctatacttaagtactgtgtatatactgatatttattaacttattcttagagattatctgccttactactatgcaaaataaggaaaatttagcactctgatactatcacacgctcccaagttttctttcctgatctttccagtgggttaaatggcaacttggggttaaattgatattccagtttaccttactatgaccatgtaatattgtttactaccaagacaagtagtaaaagagtatgcgttcgatgttgttcaacatcttatttttcctggtgttgtcttttattttgctcacctcttttgtgtatctatcattaaccattcatgaactacccaaaagaactayagaacttatattgaaaccatttttttttttttttttacacaattagcccactggttagtctactggatctctttttccctggaggagcctcccgtccagcccctctggtctaggggttttcca

SEQ ID NO: 525524 - DNA, 541 bp, Homo sapiens
accaccatctattgatatatatatttttttcttacaagaaactgtattaggcaccgtggggtataatgatttaaattgcaaggtctctgtcctcacggactctataagtagaatatatgaaaggtgactacatgatcaaggcaaatgaccccaccgccaaccaaggaggacgtggtcatggcctgggatggttaggaaatcttcatagagcaggtatgatttttaaggggctttgaggactgggtggaattttaattagagagccataaataaaaactacaaaaagggagaaaagcagtttgagaatgagtagggaggaatcagtttaccaaagttaagtatgtatacaaataatacagttcaccttttgagccatgcaaactgtatctaaggaggcacagaaccttgtatgagaccaactgytgagcaaggaaatgtaattagcgcaatcacttttttggtgctaattacttaagacattgaaaaagaggattagactgaccaatgaaacaattggttctggataaacatacaaagcttg

SEQ ID NO: 525525 - DNA, 641 bp, Homo sapiens
ggcaaaaaaatctcttctgtaaagcgatctcaaacataataggcttaatcagagataaattaaattaggcagccatgcatactacagcatattaattctgagtagttattactacattttctgttatcactggtgtgaacaacattatgtgcaaacaaattcttcgagagggtagcaaatamagtttatgtttgggatgccatgtgcctagcattttcccatgttttcttaaaatgttaaataatcttttctgctaataatggcactaggttaagtccccataaacgagtcaacctcactcccaggaaattaaacaaatgaacatcagacgaaactgctaagtgtggtttggatttttccaaagggaacttctcaactttctctggcaattaaaaaaaaatttgttaatgagtcatagctagagcaaaattgtccaaaatgtaaggtagtgcatagtcgttacgttaaaaatcggtgcctctcattctctgttttggatgaactatgttgccttagaatactcaaagaagaaaattattcaggtagaatgctattttctaaataagatcctgccattatctctctctttctttaaacggtagtaatctaagccagcaaactagcactcagatcccacacgc

SEQ ID NO: 525526 - DNA, 652 bp, Homo sapiens
aaacataataggcttaatcagagataaattaaattaggcagccatgcatactacagcatattaattctgagtagttattactacattttctgttatcactggtgtgaacaacattatgtgcaaacaaattcttcgagagggtagcaaataaagtttatgtttgggatgccatgtgcctagcattttcccatgttttcttaaaatgttaaataatcttttctgctaataatggcactaggttaagtccccataaacgagtcaacctcactcccaggaaattaaacaaatgaacatcagacgaaactgctaagtgtggtttggatttttccaaagggaacttctcaactttctctggcaattaaaaaaaaatttgttaatgagtcatagctagagcaaaattgtccaaaatgtaaggtagtgcatagtcgttacgttaaaaatcggtgcctctcattctctgttttggatgaactatgttgccttagaatactcaaagaagaaaattattcaggtagaatgctattttctaaataagatcctgccattatctctctctttctttaaacggtagtaayctaagccagcaaactagcactcagatcccacacgctagcaaatgatgcttttgtgaaagaaaatgaaaagatgcatc

SEQ ID NO: 525527 - DNA, 509 bp, Homo sapiens
actgctcccaggccccctcagcagaaagagccaagaagtataaatacatattcaaacccagttatatgcacatgtctataattgtttctgtgtctgtccgtatgcatatttatcaaattaaatagtagttaagctaacatgaagttagctgatatgtccaactctaatccagcattacagggtttgttgcagccccctctcctagcttatggaaattgycctgacaatgagaaacctggcttgcaccacctaccatccattcatttatttgttcagcctcagtatttgggtcttcttttgaagagatttctgttactttaaaataataatatataaaagggctttatttttattcattaccatcactccaattgctctgttttcatcaaatcatttcatgtttctcctaggcacccaggaagactataattctcatgatcccttgtatttaggtccagttccagttaaaggaatgtgggtagaagtgatactgaccacttgtagcccta

SEQ ID NO: 525528 - DNA, 509 bp, Homo sapiens
actgctcccaggccccctcagcagaaagagccaagaagtataaatacatattcaaacccagttatatgcacatgtctataattgtttctgtgtctgtccgtatgcatatttatcaaattaaatagtagttaagctaacatgaagttagctgatatgtccaactctaatccagcattacagggtttgttgcagccccctctcctagcttatggaaattgtcctgacaatgagaaacctggcttgyaccacctaccatccattcatttatttgttcagcctcagtatttgggtcttcttttgaagagatttctgttactttaaaataataatatataaaagggctttatttttattcattaccatcactccaattgctctgttttcatcaaatcatttcatgtttctcctaggcacccaggaagactataattctcatgatcccttgtatttaggtccagttccagttaaaggaatgtgggtagaagtgatactgaccacttgtagcccta

SEQ ID NO: 525529 - DNA, 646 bp, Homo sapiens
ctatgattaactttttaagaaaatgtcaaggtgttttatcaaagtggttacagcactttacaatcccatcaaaatgcatgaaggytccaaatttaccacatctctgtcaacactgttattgtctgtcaattttagacaattactacattactatatactatattactatatttactgtctaaaaatgatagactatagtaattcgacagacagttaaaatagtaacccaagtgggtatgaagtggtaccacgttgtggttttgatttacatgtcttaagggctaataatgttgggcatttcttcatgtgcttattggccatttatagtatcttctttggacaaatgttattttaaaattttaaaattttaaattttaaaatttctttatatatctggtatactctttatcaaatataaaatttgcaaatattttcttccatctttgagttctcttttcactttcttgctagtgtcctttgaagcacaaaagtttaaaattttgataaagtctgatttatctatatttttcttttgctgtacatgcttttggtgtttcactcaagaaactattgcctaatccaaggtcataaagatttatacctatgtttccttataagaatttcatagttttagcttttacattta

SEQ ID NO: 525530 - DNA, 638 bp, Homo sapiens
tttatatttcagattaaaatagaattgaggagagaaacatcattckgggtgctaaaatgaatattaagataaagctagtgtaagtattattaatattgcactattattattttgggtttgcaatccataggaaatccatgtatgcttctgtttgcttcccttacaactggtattttaaataaattctgcatgctcaataaatagggtctatttactcaaaggcgacagaccccatggtactctccacaaagacttccctcatggcctcctgctgctgttgtttatagggctgcaattacagaaaggattctcagcagaacgagcaatgacaccattaccatcaacaggaattctcctggcactgtggagattctttattgaaagaaatacaaagccagtatgttgctagtagaatgcatgaatttgttgggcaatggctttctccttctggacaccaccctgcaggttaatgactctcaattctgagcatccttcttctctccttccagcaggtgttttcacacctttctaagttaagtgtcccagaatgtaaaggctgccactacagggaggcagcaggacacaatgcatgagactgatcggcagtgaagccggactgcctgtgttcacatcccggc

SEQ ID NO: 525531 - DNA, 527 bp, Homo sapiens
ctggaaaaggagggtacctaaattacaatagtcaggaaaggcagaagagaagaatggcatgctgtccataaaggaagatctagagggtgttagggaggcaaaggaagagcatttggttttttcagctcattggaaagataatttaactggccacaactttttggtttgaattttccttagaattgcccagcttatatatatatatatwtttatatatttatatatatttatatatatatatttatatatagtcttttaatgcacttatctaataaatataacaattaaacattaaagttacaaagttcttctcaatctcacactatttataaaatgctatgccttctctccacccttagaaatgcaaaaacagagctttcacatgtattttaagtgcactttcaccatttcaaaactcagatgagtggcatgacaagtttgatcttaagtagattagatataacaactaagtctaaatatttatttttattttagtataaatttagaagtttttctaaaccatgttc

SEQ ID NO: 525532 - DNA, 655 bp, Homo sapiens
ggtttagcatcccaagtccacaaggccccaagatgtcaaagcaytgtaaaatacagaaaatttttaaaaacaacaacataattaatagaagcctgtctgaaacactgctataagaaacatgaaaacagagcttctgaaacttcactgtccacagggatcacccgggtattttgttaaactgcagattttgattcattaaatcaggtaaacgttgagaccttgcatttctcataaacttcttggtgatgttgggaccacattttgagtagttagaagtaaaaatatcatgaagggtcttctctctggctcatcttcggtcaggaaaggggaaggaccttacataccgagtcttaccttggaccagacgctgcaaggcactgaatatatatacttggtcttattttgctttaagagcaaactttgctagtgggaaaattatcccaattttataggtaagggaactcaggctggttaagtaacctgctctaggtcatttagttaaaaggtagtagatataaatgtatctggcctaaaaatccatttttctcccaccacaatgtaagtacacagggcactcctctgatggaaaatgaaaagtctgttggtaaaggcttcataaaatataaagcccatgaacttcaatagtggcccattt

SEQ ID NO: 525533 - DNA, 593 bp, Homo sapiens
tggtttggttaatctatagtcttgtccagcgcaggaaaactagcactgtccagcaactgtaaccagggagattgaatttcaccatgggagaggaaaccacttttaactatgctatttacatccctatacttaagtactgtgtatatactgatatttattaacttattcttagagattatctgccttactactatgcaaaataaggaaaatttagcactctgatactatcacacgctcccaagttttctttcctgatctttccagtgggttaaatggcaacttggggttaaattgatattcyagtttaccttactatgaccatgtaatattgtttactaccaagacaagtagtaaaagagtatgcgttcgatgttgttcaacatcttatttttcctggtgttgtcttttattttgctcacctcttttgtgtatctatcattaaccattcatgaactacccaaaagaactatagaacttatattgaaaccatttttttttttttttttacacaattagcccactggttagtctactggatctctttttccctggaggagcctcccgtccagcccctctggtctaggggttttcca

SEQ ID NO: 525534 - DNA, 593 bp, Homo sapiens
tggtttggttaatctatagtcttgtccagcgcaggaaaactagcactgtccagcaactgtaaccagggagattgaatttcaccatgggagaggaaaccacttttaactatgctatttacatccctatacttaagtactgtgtatatactgatatttattaacttattcttagagattatctgccttactactatgcaaaataaggaaaatttagcactctgatactatcacacgctcccaagttttctttcctgatctttccagtgggttaaatggcaacttggggttaaattgatattccagtttaccttactatgaccatgtaatattgtttrctaccaagacaagtagtaaaagagtatgcgttcgatgttgttcaacatcttatttttcctggtgttgtcttttattttgctcacctcttttgtgtatctatcattaaccattcatgaactacccaaaagaactatagaacttatattgaaaccatttttttttttttttttacacaattagcccactggttagtctactggatctctttttccctggaggagcctcccgtccagcccctctggtctaggggttttcca

SEQ ID NO: 525535 - DNA, 692 bp, Homo sapiens
tgggtgttttctatcttatttataccttttttttgaagactaattgagaggattaactgtaattatatattaaagtgatgtgagatgtcataaattgggaaaatctacttgaactttgttttataatgctatatattttttgtttttaaaatatatacttcttaaaagaagatraataaagcatgagaaaactactatgacttctaaattacgaaaaaatgttaaaaagtcataatgtttttcttttcaggacatgtgaacttatatatttgacacaacccagcagttcgtaagtagttcacagaatgttatttttcacttaaaaaaaaagatttttatggaataatctcaaacatcttgatagttagggttagtttgatcgattatagcaggctacttcataaattaagcccatagatttaagtcctgtgtagattatttatcttctcacaaagaaaatagtataaaatacatgccttgtactacaaagaagaactaataaggtggaattgattcaggacagcatatcaccaactctgagaaaaatgcaacaaatgcaaattcattgactaaatctttattgagggtctgttacaggcactttattaactaataatcagcataatttctgtgtgagaataaatgtaaaaatctgtattaaaatttccaaatgattattttaaatgtataat

SEQ ID NO: 525536 - DNA, 586 bp, Homo sapiens
aacgggtttccaaacatatagaagtagtaacatgtgcatatcaacaaaaatcacttggtaggaacccaatactagctaataagcctactcctactgtcttagatctagttctgtttcagaattggaagctttaaggattatgaaattctgggaacttggagtaggtccacctagaagtagaagcagcaaaacccaaaaaaccaatacaatttttaatagtgttgtttaatttttaagtgttatttactagaaaataaaactatactgtgtttaatcatcaagcaatttttaacaaaaaastttagcactaggaataggttaaacttgacacaatttgctatcatagaattatatatatgggtaaagggtaccagttagattcccattggcaaaaacctggtgattttcattctgtggtatagagatcctagttaagaggcaggaattatttaaaaatgactttaattttgatcatttaattataggacctatttattcacttgtttttaacttattcacaaatcttagtcatgagcattattaatagataatttgatgccttgtcacttagcagtacaagcatgtt

SEQ ID NO: 525537 - DNA, 586 bp, Homo sapiens
aacgggtttccaaacatatagaagtagtaacatgtgcatatcaacaaaaatcacttggtaggaacccaatactagctaataagcctactcctactgtcttagatctagttctgtttcagaattggaagctttaaggattatgaaattctgggaacttggagtaggtccacctagaagtagaagcagcaaaacccaaaaaaccaatacaatttttaatagtgttgtttaatttttaagtgttatttactagaaaataaaactatactgtgtttaatcatcaagcaatttttaacaaaaaagtttagcactaggaataggttaaacttgacacaatttgctatcatagaattatatatatgggtaaagggtaccagttagattcccattggcaaaaacctggtgattttcattctgtggtrtagagatcctagttaagaggcaggaattatttaaaaatgactttaattttgatcatttaattataggacctatttattcacttgtttttaacttattcacaaatcttagtcatgagcattattaatagataatttgatgccttgtcacttagcagtacaagcatgtt

SEQ ID NO: 525538 - DNA, 576 bp, Homo sapiens
ctacgttattttaaaaaatgcactgtcctctcaattctactgttaaaaacaaaaccaaaccaaaatayaacacacacaaaacaaatgtgataaatggcagccgcatcaactgctatcaacacaaacgcagcaaatgctagaacagggaaaactccagccagtaaggcctaagtgcaggcactgtgtcaggactggggacacagagatgtgagatacacctggctagccatccagtgagaaggatggcagggactgggtggcagacggaggtgcacggcacagcgggttcctacccccacttgcccagtctagaattcctcacgtatcagtccttcttcccaggctgagcaccccaggacagggaagaagaggcagtcctggttctcctagcacctggcacaatgcttggcacagtttaggagctcactacatttagggccacaaaataatccttattctagaacaactgtatgactcacatttgaattgactatacagagttctcaaaaacctcccattagattattaattctgagagaaagcatcatattttatctaggtttgccaaatgcagat

SEQ ID NO: 525539 - DNA, 587 bp, Homo sapiens
ccacctgggaccaggaagagcctcctcctgtgtgttccttggcaccctgaagttgctatctctgcggcgtgcctgtcaccccatagagctctcacctgtctacctgtctactttgctagaagggagggtctgtcagtgccgaagacctaggtggttctgggaggtcagcatagtgtagacacttggtgagcactacatgggtgagtgagtgtgttactccagcgtcagcagtcctgtcaatgattaaatgtaaaaaaagaggaacaagtacatctgtgcccaccccacactccttttcctcttcatcattaaaaaagaaagaaaaagcaaaaacggcagcacctggacagctcaaccacactgctgctctgcccacgtgtggggctgaagcagctctgggaacacagacgtgcaaaccacagagatgcgatagcggtgccagctccgctttcccggggcaggcacagagcgaggcagaaatcagtaccttgtgaagccacttcaagggtagcagccggtaggtgggctcagccacagttgcacygtccgcagcccctgctctacctgtcctcaggaacactggccca

SEQ ID NO: 525540 - DNA, 650 bp, Homo sapiens
gtcaatcccaggttatcttaattatgcctccctggacagaactggtaagtggtaactggctctctcctgcagaaatgaatcaagccagtgccacacttgagtaggtgcacttgagtaggaacatttgcgcagtccttcacattgcagagacttgcttgcatggttatcatgccagttctgctgttttggccaaaggtgcacagttctgtcccactttgtcctgtcaaaagcctcttgtcctcgtgctgtcagcctcacctctgattccagccctggggagggtgaacagctccaacaagtctcagctcaagcgagcgcagcttgtctgttgcgtcccacacgtggtaggctgaaaaatggcyccccaaaggtaagtccacatcatagtccatggatcctgtaaatgtggccttatttcgggaaaaggtctttgcagatgtgactaaggacctttggatgaggagagcgtcccgtcttattgccagataagccctggatgtcatcacaagagttgttttaagagagaggcagaggaagatgtgaggacacacagaggagaaggtgatgtgaagatgaggtagaggtcagagtgacaagcccacgtggccacaagcttagctggaggaggtcaggaaggatcctcccctaga

SEQ ID NO: 525541 - DNA, 442 bp, Homo sapiens
ctgtcaatcccaggttatcttaattatgcctccctggacagaactggtaagtggtaactggctctctcctgcagaaatgaatcaagccagtgccacacttgagtaggtgcacttgagtaggaacatttgcgcagtccttcacattgcagagacttgcttgcatggttatcatgccagttctgctgttttggccaaaggtgcacagttctgtcccactttgtcctgtcaaaagcctcttgtcctcgtgctgtcagcctcacctctgattccagccctggggagggtgaacagctccaacaagtctcagctcaagcgagcgcagcttgtctgttgcgtcccacacgtggtaggctgaaaaatggctccccaaaggtaagtccacatcatagtccatggatcctgtaaatgtggccttatttygggaaaaggtctttgcagatgt

SEQ ID NO: 525542 - DNA, 539 bp, Homo sapiens
aaaggaaccgaggccgcaccacccaaagacataatgactgcccaagaacacctcagacagataagaaacttatctgtctgtgtttgtttcgcttctaacccaaacaagtttaggtgagaacattaccaaagtttaggtgtcccataaaccaagttaggtgagtcaaaatttatccaagattacaaactttgtaataggtagtagttttgtctttgatactcccatgcttttgagtctgacagaatatttgatttgagatagtccaatattgtcactactaaaccagggcattggtagaagatttgtttcctctaggctttgatcagcattaggagtgatgataagatggcaagcatttagtgtgaatttgcttaggcacaggtactatactaagtgttatcyaggcttatgttatgtaattttcccaatagacttgaaccaggattctgtgttgcaagtgacagaaaaccaatccatactggcttaaacaaaaacagaaaatgtgctggctcctataacagaatctaggtccagtggca

SEQ ID NO: 525543 - DNA, 373 bp, Homo sapiens
tcaaacatttctttcttggggagagagcaggatgagggggctggaataatagcctgtgctagagaagccgggagttccaggagaaggacccctgtggcattgaaagaaactgaatggtaggaggaaaaactgacttagtcatagttcggaggtgagactgagggagaagaaggttctaaggctgactcctggctttctgtccgaataacaaaaacactgcagatggcaccacctcagacaacggataagcttgggaggggacccgggttrttgctggagactggaggaggaatcaggggttcggtctgtgaggttactgtgtggttccctgatgaatgacagaggaagggctgaactgcaggtctcaatttga

SEQ ID NO: 525544 - DNA, 649 bp, Homo sapiens
cctcctcctcatagtccaaagtggctgcaagaagtccagccatctcatttgagttctgatcaaaagtgtgaataaagtagtgaaaaatgtcatactttctcctttcaaggaacatttccgcaagttgcatccatttgcacttaaatctcactggccagaatttacacctagattcctgggatcctgaagagtatgatcttttagtggggtgaaatactgtccagaataaattctgttgaatgctgtgcaatgctcctaaggaagagagggagaagagatgtttgtggccacgaggaccgctggttcctttgtgtaccatatgcataccgtggctagtcactctggctctgggcatagagaggcctgggccgcacaaggataataatggtagcaagaaattaagaaaacacatgagcagtgttttccagagccggcactttcagagccattatctcaatcagtccttataatgatgtcctgaggtraacagtatcccagtgccatggacactcatggtataatgtaaattttctaaaataattcaatccataagggatgagtccctcattctgggatctgagtaaaaaatctgcctgctgtctgctgggccaggctgccttggcatcccttgtggtagtgaacgctctgc

SEQ ID NO: 525545 - DNA, 649 bp, Homo sapiens
cctcctcctcatagtccaaagtggctgcaagaagtccagccatctcatttgagttctgatcaaaagtgtgaataaagtagtgaaaaatgtcatactttctcctttcaaggaacatttccgcaagttgcatccatttgcacttaaatctcactggccagaatttacacctagattcctgggatcctgaagagtatgatcttttagtggggtgaaatactgtccagaataaattctgttgaatgctgtgcaatgctcctaaggaagagagggagaagagatgtttgtggccacgaggaccgctggttcctttgtgtaccatatgcataccgtggctagtcactctggctctgggcatagagaggcctgggccgcacaaggataataatggtagcaagaaattaagaaaacacatgagcagtgttttccagagccggcactttcagagccattatctcaatcagtccttataatgatgtcctgaggtgaacagtatcccagtgccatggacactcatrgtataatgtaaattttctaaaataattcaatccataagggatgagtccctcattctgggatctgagtaaaaaatctgcctgctgtctgctgggccaggctgccttggcatcccttgtggtagtgaacgctctgc

SEQ ID NO: 525546 - DNA, 575 bp, Homo sapiens
ttggtcttgtctgcgctgttctgtcaagcccaccggcgtgcagcaagggcagccccagggacagtggctagagaggacaggtctgcattctgcttatctcactctcagcatgaaggtttccagtgggttttcccatagtttttcatctttttctttggaaaatactaagtctacttgatcgaagagtgagcaactgtcttcttcatagaaacttacrgaagtcctcagagtgtttctattggccgacaatatcctgacttcatgcagggtcacagctccattctttgtctggaaccagatgcaacctagctgcccttctgttgatctttcattataaaaacaaccattctggataacagcattgcttatggcaatgatgatagtacttcttgatattgtttaacacttaatatgcatctgtatgcacactatactatactaaagtatgcatacttaatatgcatactataccaggaatcgtatcagtattccccacttatctgtggggatacagtcttaagaccccccagtgatgcttaaaacctcagatagtaataaaccatatatacactatg

SEQ ID NO: 525547 - DNA, 575 bp, Homo sapiens
ttggtcttgtctgcgctgttctgtcaagcccaccggcgtgcagcaagggcagccccagggacagtggctagagaggacaggtctgcattctgcttatctcactctcagcatgaaggtttccagtgggttttcccatagtttttcatctttttctttggaaaatactaagtctacttgatcgaagagtgagcaactgtcttcttcatagaaacttacagaagtcctcagagtgtttctattggccgacaatatcctgacttcatgcagggtcacagctccattctttgtctggaaccagatgcaacctagctgcccttctgttgatctttcattataaaaacaaccattctggataacagcattgcttatggcaatgatgatagtacttcttgatattgtttaacacttaatatgcatctgtatgcacactatactatactaaagtatgcatacttaatatgcatactataccaggaatygtatcagtattccccacttatctgtggggatacagtcttaagaccccccagtgatgcttaaaacctcagatagtaataaaccatatatacactatg

SEQ ID NO: 525548 - DNA, 488 bp, Homo sapiens
tgggtggggtgccatggtttatgcctacaatcccagcactctgggaggctgaggyaggaagattgcttgagcccaggagtttgagaccagcctgagcaatctggcaaaaccccatctctacaagaaccagctaggcatggtggaccacacctgtagtcccagctatttgagaggctgaggtgggaagattgcttgagcccgggaggcaggagttgcagtgagccatgacctcaccactgcactccagcctcggggacagtgagaccctgtctcaaaaaacaaaacaaaaacaaatatccaagtagaaaatacatattgagttgtggcaacaggtactaggtggagtagaaacagaagtgaagaattacaccaagtgagcaggagaagaacaggtggcttcataaaaaagaaaatgcttaaattaaatctggaagcatgatttaggttaggaaagtcagacgcaggatggaaattcatgtagtaggcat

SEQ ID NO: 525549 - DNA, 611 bp, Homo sapiens
cctaaggcacaggataaggggtagagagcaaaggaaactgctggaaattgaaccacactttgggttttcagatgaaggtagccgcacagggtggagagcagggcctgtctgaggctccacattagtgtgaggatagtatcgggggcagcccttgtctgccaacatcaytgaacttttgtcattgtgccaacattgatttcttacacctttttgtcccatattgggatgaaatattttcacctgatagtagcacatgacattgtacagggagcacttccagctccaagagttcctctctagattacaaggaagttgatggaaataactagatttgttagagcatggtctcctgcccatggaagggaggagagtagagtggggaagcatgctggcctgccctctgtcacacattgcaatccaccagttccttgggggtgaaaatacaggccagtcctcttctctgcactcccgacagacatgctaccatacataatgttcctgccatcttcaatgcaaaagcttttgtggatggtcccaggcttgctgtccatagggttggtctccgtggtttcctctgtggcctgtattcacattcagtgcctcccagatta

SEQ ID NO: 525550 - DNA, 496 bp, Homo sapiens
gtagcacatgacattgtacagggagcacttccagctccaagagttcctctctagattacaaggaagttgatggaaataactagatttgttagagcatggtctcctgcccatggaagggaggagagtagagtggggaagcatgctggcctgccctctgtcacacattgcaatccaccagttccttgggggtgaaaatacaggccagtcctcttctctgcactcccgacagacatgctaccatacataatgttcctgccatcttcaatgcaaaagcttttgtggatggtcccaggcttgctgtccatagggttggtctccgtggtttcctctgtggcctgtattcacattcagtgcctcccagattatagcagccactggcyctgagtgccagtattgcacagaatgcatgaggaggtcatcagaagcctatttgaatttgaaaccaacaagacaaatcccgtttgcttgaaacactcaatgatctccccaataaggc

SEQ ID NO: 525551 - DNA, 616 bp, Homo sapiens
tgtcagcaacatgctgtagaattttcagcttccagaaatgtgagccaagcaaacttataaattagtcagtctgtgctatttttttatagcagcagaaaaaggactaagacatcatcatcttcaagaacttatattgatcatctctctgttatagaaatttggcccattctaagatgatgattttgaatgcttgtgattgttgccaagaagtctgtccataaataaaactcacaaatttacactggctcattttaagttttcaagatrtccaactcatcaccagtttctctctctctctctctctctcttccttccttcctttctctctctttctttctctttcttctttctgtctcttcctttcctttcctttccttccaaatgccaaactcaagcacaattttttttattaattaaaacaataattcacatgttggttttatgtcagacttgtggcattttcttccctgatgtatattcgtagtgcaccaggatccccttacggtcaatggggtgatgagcaaggtgcctaggagcactgcctcattctgcttctgctccctttgggcagccttctcttctggaaaactttgctaacataatgtttgcccaggag

SEQ ID NO: 525552 - DNA, 616 bp, Homo sapiens
tgtcagcaacatgctgtagaattttcagcttccagaaatgtgagccaagcaaacttataaattagtcagtctgtgctatttttttatagcagcagaaaaaggactaagacatcatcatcttcaagaacttatattgatcatctctctgttatagaaatttggcccattctaagatgatgattttgaatgcttgtgattgttgccaagaagtctgtccataaataaaactcacaaatttacactggctcattttaagttttcaagatgtccaactcatcaccagtttctcyctctctctctctctctcttccttccttcctttctctctctttctttctctttcttctttctgtctcttcctttcctttcctttccttccaaatgccaaactcaagcacaattttttttattaattaaaacaataattcacatgttggttttatgtcagacttgtggcattttcttccctgatgtatattcgtagtgcaccaggatccccttacggtcaatggggtgatgagcaaggtgcctaggagcactgcctcattctgcttctgctccctttgggcagccttctcttctggaaaactttgctaacataatgtttgcccaggag

SEQ ID NO: 525553 - DNA, 582 bp, Homo sapiens
tgtgagccaagcaaacttataaattagtcagtctgtgctatttttttatagcagcagaaaaaggactaagacatcatcatcttcaagaacttatattgatcatctctctgttatagaaatttggcccattctaagatgatgattttgaatgcttgtgattgttgccaagaagtctgtccataaataaaactcacaaatttacactggctcattttaagttttcaagatgtccaactcatcaccagtttctctctctctctctctctctcttccttccttcctttctctctctttctttctctttcttctttctgtctcttcctttcctttcctttccttscaaatgccaaactcaagcacaattttttttattaattaaaacaataattcacatgttggttttatgtcagacttgtggcattttcttccctgatgtatattcgtagtgcaccaggatccccttacggtcaatggggtgatgagcaaggtgcctaggagcactgcctcattctgcttctgctccctttgggcagccttctcttctggaaaactttgctaacataatgtttgcccaggagcaca

SEQ ID NO: 525554 - DNA, 639 bp, Homo sapiens
ggcctctggatgagtttattattttccgctgcccataactccaagcatgcattggatggaagatgatatctgattgttcagataatttttttcttaccatcaagaatggaatgctttttccacttataattaaaattgtttcaagaagactactctgattaattggcctggtggtatgtgtgatgcatgtctcgtactttaggcagaacaggatgcagagaaggtggaaaggagatagaatgatgaccgtattgagtaactgggccatgacagtgagtgtagtctgctttgctaaatgtgagtttctgtaatttagcttgtaggtgactggtaaataggggcagagtgtcaccatcatgtgaaagttgtgctgattcatagcaatttctgccctacacgttaatgctggccaagcttgtctatccactctcttctgtgtgctcccttctccgttggaagtrgtgattgctcggtgctctcaatctgggagcattttgcccttgtcttcatatctcagcagggtcaactctcaagctgttaagccccttccaggaagccacccacaccttttaaaaaaacttgtagtaaatatacagaacaaaacgtaccatcttaaccatgtttaagtctattaagtac

SEQ ID NO: 525555 - DNA, 639 bp, Homo sapiens
ggcctctggatgagtttattattttccgctgcccataactccaagcatgcattggatggaagatgatatctgattgttcagataatttttttcttaccatcaagaatggaatgctttttccacttataattaaaattgtttcaagaagactactctgattaattggcctggtggtatgtgtgatgcatgtctcgtactttaggcagaacaggatgcagagaaggtggaaaggagatagaatgatgaccgtattgagtaactgggccatgacagtgagtgtagtctgctttgctaaatgtgagtttctgtaatttagcttgtaggtgactggtaaataggggcagagtgtcaccatcatgtgaaagttgtgctgattcatagcaatttctgccctacacgttaatgctggccaagcttgtctatccactctcttctgtgtgctcccttctccgttggaagtggtgattgctcggtgctctcaatctgggagcattttgcccttgtcttcatatctcagcagggtcaactctcaagctgttaagccccttccaggaagccacccacaccttttaaaaaaacttgtagtaaatatacagaacaaaaygtaccatcttaaccatgtttaagtctattaagtac

SEQ ID NO: 525556 - DNA, 546 bp, Homo sapiens
aactcatttcctctttcaggmttttgagataacctgggcagactctggccatgggaaaggaaggctcaggggccctgtgagatgctggtgccgtccagcttggctccagctaggaaagattgggcctggggtcctggacacacagaaagcaatgggatttgtcagaatcgtcaccagcttcctctaagcctgggcagcagagtcttctaagcacccagcaacatacaaattcaccaaagaaagcagttattagagttcatacagagaaaggagctgatgataaactgattttcggtttttaaagatttgtttggtgtattaaaatgtgtttttgttgtctttagtagtctattgacaccaccttagaatctctctcattcatttctcatctataagatgaggaaggtaacagccacacttctttctcttaagttacagactcccagggagcaggttgctgaaagctctttcaggacacagtcgaggtgtagagccccgtcagtgtctaacataacagaaggacaaggtggatagaagggcaaggtg

SEQ ID NO: 525557 - DNA, 523 bp, Homo sapiens
ccactaaattgtctgattgttaatatagggaccatatcactaaattgtctgattgttaatatagggaccatatcactaaattgtctgattgttaatatagggacccctagatatatttgttttgactctagtgcctaacatagcccctgcaaaaagtatttgtggaaggaggaaattaatgagaaaaaaaactatgaatagatgaatttccctaaagctattttctcccctaattttcttagctacctgcattttggatgatgcgtggttggattaaggctgtaatggaattctttcttcatcartacaaagcctggggaaatggtcctcagattggagaacacaaaatcaagggaagaacagaagtcatgagtctgatagtctagacaggaaattctggcctgtactaatccagattgaggaatttgaataactgattcagacagaaaatcattggtctctcagctccattatgcatgtgtagaagattcccccattctgtctatacaaatacaggtaatca

SEQ ID NO: 525558 - DNA, 651 bp, Homo sapiens
tgtctctggcccatttccctttctaccgcctcttgtgcattccagcaatctaactcgatgaatgatcttccagttggaaagatggggacttcacaatgtgcagacccaaagatctgtcttccaaaggccaatcaccactgtatccttcgttcctttaaatgtcgttgtttatttgaatatattaagaataatatcaaggtaattatctatgtataaaatgtatgtttaattttttaggaaccatcatactgttttccacagtggctgtacattttacattcccaccaacaaygcacaagggttccaatcgctccatatccctgccaacacttgctattttttgattctgggacagcgaacctaatggctggaaaatggtaactcactgtggtttggatttgggtttccctgatgattagaaatatttcacatcttttcatgtcttttggccatttgtgtatctttgctggagaaatatctattcaagccctttggccatgttttaatcaatttcggggagcggggggaggattcttgttgttgagtgtttccatccctcctctttttccctccaaacactctctccgtgtgatctcaccccttcccatatatttaagctccttctgcaccacaggcctccaaagggaggtc

SEQ ID NO: 525559 - DNA, 548 bp, Homo sapiens
ttccccagggctgtcctccagtgggagccagcactaaccccctcgactcctcacatcagtaccttcagctccaccttcacctggtgaaattcgcttatgcctgaccccccaccatgaacaccaccttctccaaaacacattcccattctcttcactcagaagtcattctgagcgttccttcttgttctcatcaactttcaaaacctccaggacaccatcctcctcttcctgcctcgttatttcatgacattgcaactccctctgttacatggtttacctgcttaaacacagggctgtgtcttaatcatggttttagcttccatgggcttgagcacagatgagttacatcaaaaatatttgtattgacagggttttaaatgtctgtcatctaccacrtttcttgcaaagtcgttcccgctgaaacataggccttcttggcctctttttacagcaaagatgctgagattcagagagggaacttactaaaatagaaaaagctggtgttaaaaccagaattccagcacaggtttcataaagcccttgaccct

SEQ ID NO: 525560 - DNA, 548 bp, Homo sapiens
ttccccagggctgtcctccagtgggagccagcactaaccccctcgactcctcacatcagtaccttcagctccaccttcacctggtgaaattcgcttatgcctgaccccccaccatgaacaccaccttctccaaaacacattcccattctcttcactcagaagtcattctgagcgttccttcttgttctcatcaactttcaaaacctccaggacaccatcctcctcttcctgcctcgttatttcatgacattgcaactccctctgttacatggtttacctgcttaaacacagggctgtgtcttaatcatggttttagcttccatgggcttgagcacagatgagttacatcaaaaatatttgtattgacagggttttaaatgtctgtcatctaccacatttcttgcaaagtcgttcccgctgaaacataggccttcttggcctctttttacagcaaagatgctgagattcagagagggaacttactaaaatagaaaaagctggtgttaaaaccagaattcyagcacaggtttcataaagcccttgaccct

SEQ ID NO: 525561 - DNA, 625 bp, Homo sapiens
tttgctgtagtagaacagggtgtctcaacctcggcactgtggacatttggggctggctgattctttgttgtgggggttgctgtgtgcgttgtaggatgtttagtagcatccctgatctctgtctgcccactggatgccaataccactcccaccttcaactgctgctgtgaaaccaaaaatgtctccagacattggcaaacatcccctgcgaggagaaattgctgccccatcccccactgaaaaccaccacggtagaaagcatgagagcagaaagttctaaacatgaggctcagccgggtccctctgaagtcctggggcctacacagttggagtccgggacaggagaactgggtttgtagaggctggataacagagccagagatctccaggcctgttcaaatccttgtttgggcctggcctcagtggccccagggtctctcctctaattcaagtttaacgtgatcacaagttstaccacttactgagtgccttacaaggcctccccaggtgcactttctcacttaaccatcacatcgacactccagtacaggtgttaccttcatttcacaaaggcagaaactgaagctctgagaaattaactgcccccaaaatcacagttagtagg

SEQ ID NO: 525562 - DNA, 616 bp, Homo sapiens
tgtcagacagtaccttgctatgcatgatttttaaataaagaaggcaccctacttcaacatgggattatataatttctaggatttagatccttccttgatcagcaagaaatatgtatgtatttgccaaatcttgcctcctacagagtgctaaattaacagcacatttggtgcctgtgatcagcagagttccatagtactttggctggttatgtgcttgataggggtctagctgaatccataaagatatgggtgatgaactgggcgtagtggctcacgcctgtaatcccagcactttgggaggccaaggcaggtggatcacctgaggtcaggagttccagaccagcctggccaacatggtgaaccctgtctctactaaaaatccaaaaaattagccgggcatggtggcggtgggcacctgtaatcccaactagtcatgaggctgaggcaggagaatcgcttgaacccaggaggcagaggttgcagtgagctgaggtcgcaccattgcactccatcctgggcaataagagygaaactccatctcaaaaaaaaaaaaaaaaaagatatgggtgataataatgctatttccaccaggttaaattccaacacaaggtgctca

SEQ ID NO: 525563 - DNA, 605 bp, Homo sapiens
gaacacttgcagaatacaattttgaattctctgttatatgctagataagtgctaggttttgctaactgtctagaatgttgatagcaaatagtgcgatttggtttaggaatttttacttctcaagcactatcataagtgatatttccaaatttctatatattatcctacctctgataacggtaacatagtgtcattgctcccattctagaagtaaaaacaaaacaaagcaagacaaagagttaccaaaaatgtggataacttggattaaggacttggttatatgcatgaaataaattattgaaaagtagactggcagtggaatctagatttcccaatttctggttccayacacattctttttgacagtagtctctttctagattatttcatgagcacaaattataatagtgggacttctgttttaagaatgtaacctgtcataaggtttaattgtttgaccaaaaaataatgatttactgtcttgctatgttcaaaatatttaggattgggattatgtctatatgagactccattttcctatttaaatatgcttttatttgccccagtgacctccctcttaatttgtatggccctattcactctat

SEQ ID NO: 525564 - DNA, 234 bp, Homo sapiens
tttttatcttgatttttttcaacattctttttttataggggcattttctgtggcttttagaagaaaatatatttgaatctcaatcccctcatatctttttgtttctgtttgcgtttgacataagtatttgctgaaagtcaggggcattctaggcttccctggagwtggagggtcagaggacaggtccacatttggcctgtctgccatctgtagcaggtatacattaggaaaagc

SEQ ID NO: 525565 - DNA, 234 bp, Homo sapiens
tttttatcttgatttttttcaacattctttttttataggggcattttctgtggcttttagaagaaaatatatttgaatctcaatcccctcatatctttttgtttctgtttgcgtttgacataagtatttgctgaaagtcaggggcattctaggcttccctggagttggagggtcagaggacaggtccacatttggccwgtctgccatctgtagcaggtatacattaggaaaagc

SEQ ID NO: 525566 - DNA, 630 bp, Homo sapiens
tctaggaaggatttaacagctcatagaaattgcgattagacctacaaatgacacaggacagggctctcgggtcagagagacagtgttctgcagtagctgcaaactttgaagccagtcaactggggttcaaaccctgattctgccattaaccagttgcatggctattgagcctgtctgtgctaagtgctgcggaagtagtcatggttcctgatttcayggcatcagcagtctagctggagagtcagagactcagaaaaggttggcagaccccttgggtggcgggtaacacacccattcacatcagagagtcagtacttgagctggagccaaggaggatgttagtgcaggttctcagagaggtctccattgaccaggacatgccaggctgggtttggagagattaaggggaaagcatttagagagaggagagtctggagacaggaacacaaatagcctgtctcaccagagcagggagtggggttatggggtgggagttaaggtagaggggccttagggagccaagaaccttgaataaagatggagaagtttgaagctcccagctacatccactccctctgggcagaggcaggagtaaaggacacaaagatcactaaggaggacaatgggact

SEQ ID NO: 525567 - DNA, 604 bp, Homo sapiens
ctatactgtttgctcattgacttgtataaatgcctatggtacttggggtaaagaaaccagcacaggagtgtgtagattcctgagttacagtcctgcctctaacctccctttccctgaacctcagcttctcatctgtaaaacggggtgtgaggaggcagtcccaggtccctcccagtctagcatttctttgcaggtttgctctgcccctttcctaagtcttcagactctctctcttctggcctcttcctgcttcctttctgtgctgtttagctgaccatctctaggctcagtaggtgcagagacctgttattccaggaaatgccacgagggggagccttcatttggatgcctggggtcagaaaggaagccaatttcaagtataaggctggggaaaaataaaattcagtcagtcccaagggaccccatcaacagccaggcgaaaataggagggagagggctctaagctacaaagaccatactctaagytctcaaaggactgtgatcttgatgtatatgttcattcttgtttctcagtcatacactttaagtatgtatggtgggattatctcatttgacactcagtctaattcgtgagtcctgtagg

SEQ ID NO: 525568 - DNA, 455 bp, Homo sapiens
gctgttggtaaatttaattcaatatgtattgtgcgcttattttgtgcctactgtgtggcattcakcatcatcttgttgctgctattcattgtggtgaagagaatacggcagcaggtaagtctgatctgggcccagagcacagaccgtaggcgcagctcatctcttcattgctttctccccattcttggagtggcagtaggaacccccaccccccccccacacacacacacatacacacacagagagagagagagagagagagagaaagagagagagagacgggacagcctcctctatgcactgcttcctcttccccagccctgctccctgcatccttccctctggtcctagtgtcctggtgtcttgaagatgctgggtagttagaccgacatccctctccctctctcaccctgggctctgggacgctggccctgcttccccagagagcgatcgcc

SEQ ID NO: 525569 - DNA, 543 bp, Homo sapiens
ttggtaaatttaattcaatatgtattgtgcgcttattttgtgcctactgtgtggcattcagcatcatcttgttgctgctattcattgtggtgaagagaatacggcagcaggtaagtctgatctgggcccagagcacagaccgtaggcgcagctcatctcttcattgctttctccccattcttggagtggcagtaggaacccccaccccccccccacacacacacacayacacacacagagagagagagagagagagagagaaagagagagagagacgggacagcctcctctatgcactgcttcctcttccccagccctgctccctgcatccttccctctggtcctagtgtcctggtgtcttgaagatgctgggtagttagaccgacatccctctccctctctcaccctgggctctgggacgctggccctgcttccccagagagcgatcgccccggacttgtgcctgtgttccggcctagggcagccggaacctcccgatatccccagaggagtctcaggacagcgcacagggaagtactggct

SEQ ID NO: 525570 - DNA, 279 bp, Homo sapiens
cctcagggtggagatgtgaacatggacactgggtaaatatgggctttacagcagatgactgagacacagacacaggaggagaggcaggcacagccacaaggcagtgacctagctggggaggggagggctgttccagatgtgagcagggctctgtggctaggggtgaagggtgtytttgatggggacgggagcacagagaggtttgggttgggggccaggaacaggcatgacgggctggtcatgccacccccccttgaattatacatggcccttcaagga

SEQ ID NO: 525571 - DNA, 279 bp, Homo sapiens
cctcagggtggagatgtgaacatggacactgggtaaatatgggctttacagcagatgactgagacacagacacaggaggagaggcaggcacagccacaaggcagtgacctagctggggaggggagggctgttccagatgtgagcagggctctgtggctaggggtgaagggtgtctttgatggggacgggagcacagagaggtttgggttgggggccaggaacaggcatgaygggctggtcatgccacccccccttgaattatacatggcccttcaagga

SEQ ID NO: 525572 - DNA, 471 bp, Homo sapiens
tttggggaaagaaattttaaaaaagaaaatatataagagttacactgacagagactcaaatttaaattataagtattcaagtccaagggatgtaaaatccaaccaagtggccaacacacagcccttctctaatgcccctaacaacccctggggtttgtgcagagcttagattgtagaggccctcgtcataagatggaaacagggcatcaccaaaacgaagcaaaacagaggcaggagtgatagagcaagaagactaagcccagaataagctgatgcttgccagaatactggagccygcagaacatccccacagagcagaaagcctccttaaaggccctggcacctgcccgaggtattggaaggtttggtgatctccagtagctcacagaggctgaaagtgatcacctggctcctggtcgaccctggggagctcttccagcaggagagagcgcagagtcttcaaaagcccgt

SEQ ID NO: 525573 - DNA, 196 bp, Homo sapiens
cagaatactggagcctgcagaacatccccacagagcagaaagcctccttaaaggccctggcacctgcccgaggtattggaaggtttggtgatctccagtagctcacagaggctgaragtgatcacctggctcctggtcgaccctggggagctcttccagcaggagagagcgcagagtcttcaaaagcccgtcacca

SEQ ID NO: 525574 - DNA, 551 bp, Homo sapiens
ttgggaggtgtcctgtctttttggtggcctcatgagggctgtgtgagtcctgataaatggcataggatggggagtccccttaatgggggacagtacaggtctcctgtcygtggggctattccaggttaaaaatagattctaccgctgcagaatgattatgctggctctactgtgctttctaagtcaccaaagggactcacaagcatgtgtgagtagaactgggaggatgccagaagagggatgaaataaaaattgtgtacgtatatgtttctttttgtggaattctacctggagccataggagtacgacttaccactcaagagaaaggctgtgcccagagccaaggaggagctgtggagacgtttctcccaagtcatccgttctccctatttagacttcaaccttaggacggaccttcaggcatccaggccacctactgacctctctggcatgggtgggaaccgggagctcgttggtaagcaggaggattcaggactatcgagcgaacaccacttcctccgtggcacgcaccgcgctgtgtctttgggctc

SEQ ID NO: 525575 - DNA, 551 bp, Homo sapiens
ttgggaggtgtcctgtctttttggtggcctcatgagggctgtgtgagtcctgataaatggcataggatggggagtccccttaatgggggacagtacaggtctcctgtccgtggggctattccaggttaaaaatagattctaccgctgcagaatgattatgctggctctactgtgctttctaagtcaccaaagggactcacaagcatgtgtgagtagaactgggaggatgccagaagagggatgaaataaaaattgtgtacgtatatgtttctttttgtggaattctacctggagccataggagtacgacttaccactcawgagaaaggctgtgcccagagccaaggaggagctgtggagacgtttctcccaagtcatccgttctccctatttagacttcaaccttaggacggaccttcaggcatccaggccacctactgacctctctggcatgggtgggaaccgggagctcgttggtaagcaggaggattcaggactatcgagcgaacaccacttcctccgtggcacgcaccgcgctgtgtctttgggctc

SEQ ID NO: 525576 - DNA, 551 bp, Homo sapiens
ttgggaggtgtcctgtctttttggtggcctcatgagggctgtgtgagtcctgataaatggcataggatggggagtccccttaatgggggacagtacaggtctcctgtccgtggggctattccaggttaaaaatagattctaccgctgcagaatgattatgctggctctactgtgctttctaagtcaccaaagggactcacaagcatgtgtgagtagaactgggaggatgccagaagagggatgaaataaaaattgtgtacgtatatgtttctttttgtggaattctacctggagccataggagtacgacttaccactcaagagaaaggctgtgcccagagccaaggaggagctgtggrgacgtttctcccaagtcatccgttctccctatttagacttcaaccttaggacggaccttcaggcatccaggccacctactgacctctctggcatgggtgggaaccgggagctcgttggtaagcaggaggattcaggactatcgagcgaacaccacttcctccgtggcacgcaccgcgctgtgtctttgggctc

SEQ ID NO: 525577 - DNA, 590 bp, Homo sapiens
agttagaagtatgtgtgttacacccccacataggtgtgatttgtggggcagttcaacacaaatataacaatgtatttttgtgaatgagttgccatgttaaatgcatcctctagaaaaatagtgttatagtgttamgatttgctttttaaggttgatactgtgggttattttgttaacagcctgatgtttgggacctatttttctcaaaataaacaagtctttattaaaccagaaatttgggggaaaaaaacagtgtcttccctacatttcctaccttaacacgtaagttattctcctctcagttttgattcaccagaggattgaatcatatatcctgaagaatcaaaaccgaataatatatctgttaaggcaatgcaggttgtacactaaaatttcacatgcttagaataatatattttttgctcacatccccatcgtctgtgaactttttttttttgagatggagtctcgctctgtctcccaggctggagtgcagtggcactaggtctagttgaatctgctcaacctgttaatcagtgtcaggtgccagattccaattcactatcagtgtgcctgtatgactcttcttt

SEQ ID NO: 525578 - DNA, 590 bp, Homo sapiens
agttagaagtatgtgtgttacacccccacataggtgtgatttgtggggcagttcaacacaaatataacaatgtatttttgtgaatgagttgccatgttaaatgcatcctctagaaaaatagtgttatagtgttacgatttgctttttaaggttgatactgtgggttattttgttaacagcctgatgtttgggacctatttttctcaaaataaacaagtctttattaaaccagaaatttggrggaaaaaaacagtgtcttccctacatttcctaccttaacacgtaagttattctcctctcagttttgattcaccagaggattgaatcatatatcctgaagaatcaaaaccgaataatatatctgttaaggcaatgcaggttgtacactaaaatttcacatgcttagaataatatattttttgctcacatccccatcgtctgtgaactttttttttttgagatggagtctcgctctgtctcccaggctggagtgcagtggcactaggtctagttgaatctgctcaacctgttaatcagtgtcaggtgccagattccaattcactatcagtgtgcctgtatgactcttcttt

SEQ ID NO: 525579 - DNA, 462 bp, Homo sapiens
attgctttcacatgttcatacctgctttacctttgtctataaacacacgtaaattaaggatggcaagaaaaaatattataaacaaaagaccttattttaacctacaagatattgctattgatagtgttttttgttttgtttttaggttgatctataactcaggaaatcatattgaatcttctttttttatgttaccaatgagcggatgtatcattcttattttctaatttattatatgtgggactatagatggaaaacaataagaaacacaagcttttaagaaactgggcttaatcttgctaaattaaagttaasagaataaaaaaggagagagatacagaaaagaaacatggtatacagattattttgaaatcataatgattatctttaataatctaattttcaaatcgtaatgattatctttaataatctaataatttagctttaataaattcagataaa

SEQ ID NO: 525580 - DNA, 561 bp, Homo sapiens
gcttacctctttgcaccaccctttccttcatgatcttgaatacttaggttcttgcaaggacttgggtctttggtcttcacacagatttttttgtttgttcaatgttttgttgagcttttctkgttgttactggtggtaggattggtatggtcggcaggtaaaatgtctgccctgccaaagacatactcatttcctaaccttcagaacctgtgcatattaccttaaatgataaatgagtgatattaccttatgtggccccccaaaatgttattaaggatcttgagagaaggtgcctctcctggattatatggacaggatcttgagagaaggtgcttctcctggattatctgggtaggatcttgggagaaggtgcttctcctggattatctggataggatcttgagagaaggtgcctctcctggattactagggtaggatctggagagaaggtgcctctcctggattatctgggtggaccctaagtgcaatcacatatatccttataagaaagacagagggaaattagacagagacgcacgaagagaaggtgaagtgaaaacc

SEQ ID NO: 525581 - DNA, 651 bp, Homo sapiens
aaaactaaaacttgacagtatttgaaaaattaggtttcctatttttcatcacttgaatggataaatcacaaatttctaattcaatcataatgattcttctgttttgattgtgttgtttaaatacataatcaaaattataagaactgtatctaaaataagaataaaggtacatgcgacatgttaagggttctcctatgaatgtagtatgttagggttctatgttttgagatcatactcatatttgtgaggttcctggacaagtgatttccttatcctttcatagcctatgttcatttattctatttgtttttattagtagtagtaatgaataccaattttacatttttactctagggaaaatttgcaattttttatagaattaatttgtttcagaaaattctgatgataaaaaacagatgacaggacttatatcagaaaattagtttccttgttaaaacaagctacagaaaattgtcttggaatagaaacattcccagattaagaaatttacacatttacatgctattccctagaccaactgggggctgtatactatttttctttatatatgatatcatcatwaagcactttctataagctgattaatgaatgccttgacacataattttttttaaaaaaaagtacatctga

SEQ ID NO: 525582 - DNA, 311 bp, Homo sapiens
tgttggcaggtaaaactattaaaatcaacagcaggttattgcttaaaatatgttgaaaaattatcatagtaccaaagagaaatggcagttttgtctttagatttctaacaatttaacatcacctttaataaaatctgttactatttcataaatataaaatgaaatctttcaagcaaaaatatctattgaaataaaagatttcattcattctaggcaattatagttcagaatttaaaaagtatgcarcagtttcagctagcatatgttaaactctcagatatggccagtagccatgacaaaaataagttacc

SEQ ID NO: 525583 - DNA, 478 bp, Homo sapiens
catcgaaaggatgattatcctggacctctcttaattaggtgaacccttaaaagggactcagatcttcctgaaggtagcctaatcaagtggcttgaacaaaggataaaaaaatgctgatatgtctcaaaacatatccaagataaaactagttctcagcacctccacagccacaaccagttcaacttatcatcatctctggcctaaattaccacaacagttttccaactggacatctagaacttctctttcttgtagtgtattttaatgaagtagttaacttgatcttattaaaatagaaggtatattatattaatcctgcactcaaaatcctccaatgacttctaatctctctcaaataaagctaaagattataacamcctgaatgtctaacttcatctcctacttggtagtctcccactcactcactggaatactcctttgcacacctctagttcccttttctattttattttcaacc

SEQ ID NO: 525584 - DNA, 652 bp, Homo sapiens
tgtttaagctatccagtctacggtatcttgtaatagcagcttgaatgaagacagcaggaaatagagaaatcattcctagtctagctagaggactagcagcagcagcaaacatcaggagaatgtgtcgtgtgaggggtaagggtggcaacgcctgccgccctcttctgagctttgcttctgaacaatttttacctaatggagtcaggccaaagtgctgctgtggtgagtaaacacattttatcccccaagaagttggatgtcttttctttcatgcttcaccattccctcatacattccaggcaccaaacctagtgaaatgagggagccatcagacaagcagtatgcaaataatagatttaacaatgaactcgaataaaacatcctagcatcctgtaccaaaaacacatgcttygtaattctttcagatctcagaccttcatcttaggaggcacagggactcttctttctaagagcacattaaccttactcacagacccagagcatagggagtgggaacctgtagttaattacttttcagactcacctctacatatattcagaaaagctgggaaattgattttggttcccaccaagcagtatgtcttccttcctttaaagctctttttttctcagcaaaagtgcgatttaaaca

SEQ ID NO: 525585 - DNA, 629 bp, Homo sapiens
aaaaaagtcacacaaggattcatagagaataatacccattatggccaggcatagtggctcaggcctgtaatcccagcactttgggaggccaaggcaggtggattgcttgagcctaggagttcgagacaagcctgggcagcatggcaacacccatctctacaaaaayagaaaaactagccaggcatggtgacgcaatcctgtagttccagaaactcaggaagctgaggtgggaagatcacctgagccttgggaggttgaggttgcagtgagccatggttgcaccactgcactccagcctgagcaacagagtgaaaccctgccttaaaaaaaaaaaaaaagacagagagataataataccagttatgtgaaattttgaaaggcacaatatagcactatacatgtatattttaagaataaacgtgtggaagtaaaaaacgtatgcactagaatgacatatgtcaacttcaggacagtatttacccctggggaggagggaattcggaggagtgttctagggcttcagttacatttgtaatgcaatattttcttataagaaaaatgatttgaagctcatatgtagacaaaaaatattaaatttgggtggtaggtacactggtgtctgtatactg

SEQ ID NO: 525586 - DNA, 601 bp, Homo sapiens
cagatgaccaactgagatgagatcaggtgaattttttttttttttttttttgagacggggtctccctttgtctcccaggctagagtgcagtggctcgatctccgcttactgcaacctccgcctcccaggctcaagcgattctcctgcctcagcctcatgtgtagctgggattacaggcgcgtgccaccacamctggctaattttttttttttttttaagtagagatggggtttcagcatgtttgtcaggctggtcttgaacccctgacctcatgatccacctgcctcagcctcccaaagtgctgggattacaggcatgagccacggcgccgagattgggtgaatttttaacctcattgaaaggctggattatatttagggtgtccacgcatctcagttttcccaggacagttctagtttacatgtttccctagcataattattagttctaccccatttcgctatcaaaaatgtcccagtttggaagataaatcatatagtcactctagttatattaaatgactttaaagtccctttcaactttaattatcttgctcagtgttttgcttaggagtgggagatttataaaataaagaacatct

SEQ ID NO: 525587 - DNA, 511 bp, Homo sapiens
agcagcccacagtgagagccaacagaccctctggcaggttagacagcagagcaaaacaagaagggggtggaggtggggaaagggcaatacagaagcaaattagtgtctcaggatcttgtccacccttagggaagtgagagcaatacagacatagctggaatagtgaattgaattcagactggatctttgagaacaaggacagggcaccgtgaggaaggacaatgaagcctttggacctccatgttcaagagcctgtgctggaggcaagctatagaataaacccggttcaacttttcaagtgttcatcagctccttctatttcagaaagtgattttgttgtggttttgttcctaagcgggtactgagctcagcagtagcagccagactcycaaggaagctgaatttctactggacaatgaccagaagtggcaccttgcagggcagaggctcgccttcctctcacttggtgtagggccctgcaggcacccctttgacaacactccttggggaa

SEQ ID NO: 525588 - DNA, 511 bp, Homo sapiens
agcagcccacagtgagagccaacagaccctctggcaggttagacagcagagcaaaacaagaagggggtggaggtggggaaagggcaatacagaagcaaattagtgtctcaggatcttgtccacccttagggaagtgagagcaatacagacatagctggaatagtgaattgaattcagactggatctttgagaacaaggacagggcaccgtgaggaaggacaatgaagcctttggacctccatgttcaagagcctgtgctggaggcaagctatagaataaacccggttcaacttttcaagtgttcatcagctccttctatttcagaaagtgattttgttgtggttttgttcctaagcgggtactgagctcagcagtagcagccagactcccaaggaagctgaatttctactggacaatgaccagawgtggcaccttgcagggcagaggctcgccttcctctcacttggtgtagggccctgcaggcacccctttgacaacactccttggggaa

SEQ ID NO: 525589 - DNA, 595 bp, Homo sapiens
agctggaaagtggcagacccaggacgtcaataacctaagacagcctggctccaaagtccatgctcttaaataccatatttcccataatgaaagatcaacaaatgtcaagtcattcttatgatgaatggtgtattctgaatacgtatactggaaaaactccatatttttggaccaaaaaaatccactttacttttcataacaagggctgttgaaatgcaggtgtatyatggccattctacacaggacttttgacaaacagatcgtcttcgttctgaatcctcagtgttgattttccttccccatggacatgtggcttgggatttatgtgatttttctttaccatgttctatcatggccagatctcaccttagctgaccctgttctccaaattatacagaggtctgcatcttatgatgacagcaaactcagggagaaagggacatttagagagagacgctggataacttccctaaagatacaggtttcatttttattctcccacaagatgttactgccatgatagcactctgggatggcttgggacagctacaacagaatttcttgctattcctatattaagcatgtgttctcagaa

SEQ ID NO: 525590 - DNA, 637 bp, Homo sapiens
ctgctgcttctctccttctctcccactccagtgctaatggagcctggggttttatgggtacaggataggagacagggcaggccaggggggctttggaaaaggcaacattcaggctggaaaacaggaatgcatgttctcactttgggccatgggtctaggcttgagggtgtggctttgccagggacctaacccttctctgcctggtatttccctgccttctgtccctataggtaatgccaatagtgctaaggctgagaaactctgctctaggtgctagactcccatggctttgacacttcactacatctgtattccccagtccttggggacagttaaagggcatgatggaacatgggaacaaggtcctatagatcttatttggagggtccattctgttcaccatcttttttttttttcttttgtgagaccaagtctsgcttcatcacccagcctggagggcaatggcatgatctcggctcactgcaatctccgcttcccagtttcaagcgattctcgtgcctcagcctcctgagtagctgggattacaggcgcacgccatcacgcccaggtaatttttgtatttttagtagagacagggtttcaccacattggccaggctggtctcgaactcctgact

SEQ ID NO: 525591 - DNA, 608 bp, Homo sapiens
atcacacagctggtgactgagagatcttccagctcaaactcagtgctctttcctccgcactttcccaacagttgatgaaattctgcctatggcaacaagtgcaagtcagtcgtcaatccaggtaaattgaggaaaatttggagagtagttactcccacaacacaggcttcattagactgagctactgccccctttccaatctgtgcacagtattccccaaatcagacccagttatcaaaatgtcagaaccctraagctcaaactctcatttacactaaagcataaatttgccttaataacttcggtattagcctacttatacgttcattttggaggtaatcagagctttaaatgggaggaagaaaactcaagggaatggaatctcatgcattgggtagctgacagaagaacatgtgagcaagtagcaggcattaagtatacggctgcaaagctagaatcaccatggagtgagctagctccatttacacgaatggcttaacttctaaaatcataacttagctatgttggaaaaggagattttttttccaacggtttgtctagatttacctgtacctgcctaccccttctaacatccttagattaggaga

SEQ ID NO: 525592 - DNA, 577 bp, Homo sapiens
ctgagagatcttccagctcaaactcagtgctctttcctccgcactttcccaacagttgatgaaattctgcctatggcaacaagtgcaagtcagtcgtcaatccaggtaaattgaggaaaatttggagagtagttactcccacaacacaggcttcattagactgagctactgccccctttccaatctgtgcacagtattccccaaatcagacccagttatcaaaatgtcagaaccctgaagctcaaactctcatttacactaaagcataaatttgccttaataacttcggtattagyctacttatacgttcattttggaggtaatcagagctttaaatgggaggaagaaaactcaagggaatggaatctcatgcattgggtagctgacagaagaacatgtgagcaagtagcaggcattaagtatacggctgcaaagctagaatcaccatggagtgagctagctccatttacacgaatggcttaacttctaaaatcataacttagctatgttggaaaaggagattttttttccaacggtttgtctagatttacctgtacctgcctaccccttctaacat

SEQ ID NO: 525593 - DNA, 608 bp, Homo sapiens
atcacacagctggtgactgagagatcttccagctcaaactcagtgctctttcctccgcactttcccaacagttgatgaaattctgcctatggcaacaagtgcaagtcagtcgtcaatccaggtaaattgaggaaaatttggagagtagttactcccacaacacaggcttcattagactgagctactgccccctttccaatctgtgcacagtattccccaaatcagacccagttatcaaaatgtcagaaccctgaagctcaaactctcatttacactaaagcataaatttgccttaataacttcggtattagcctacttatacgttcattttggaggtaatcagagctttaaatgggaggaagaaaactcaagggaatggaatctcatgcattgggtagctgacagaagaacatgtgagcaagtagcaggcattaagtatacggctgcaaagcyagaatcaccatggagtgagctagctccatttacacgaatggcttaacttctaaaatcataacttagctatgttggaaaaggagattttttttccaacggtttgtctagatttacctgtacctgcctaccccttctaacatccttagattaggaga

SEQ ID NO: 525594 - DNA, 602 bp, Homo sapiens
aactgcatttctacacacagacacacacacacacacacacacacacacagatggaacaaatacggtaaaatgttaaccactgggaaatctgagtctgggtgaggaagacatgagagctctttttatgtacgattaaaattatttaaaaataaattttatttctgtctttcctttcttcatctgtgcatcaatgtccttagggtgcacgagtgcagtcagcctgccactagggagcacagcccagactctgctgttactcatactgcaaatatgcagcctgttttcaggggcagatggctttgctttcctgtattacatattatttgagaaattttacatttgtttcaggtattcctggaaacgtctacaacttctcaatcactatccttgcaaagtgatgtgccaggagctccactttaaagaagaaagcctaaaagctcttttctgtggcacgaaatgtcaacaatttagccccaatccagcacctyccaggttcctccccaccccaaacctcaacgtactgagaaattttcaagcttatctatctttgctcattctatcccctctacccagcacacccttccccacactctcccatctgt

SEQ ID NO: 525595 - DNA, 606 bp, Homo sapiens
ttgagatgatcagtcgtcggatgtattttgtgccaagggcatggtttgccctttcccagaggctcctcttttgcttgttttattactaacactatggaaagtgcttcttttgccactgccctgactccatcgtcacatgaaatttcccctcatgctctatgaagcccaagcagcaatttttggaaattgaagaaacatataatttactcyacatctgaaactcctactaaacccaaatagcttatccttttctcataggagaccagtaattggccctcactagctgccatgaagccctctttatctcatcttcatctaggttctctaaatgttatttacatgcacagaagtgtatttataacccgcatctcttacattgagtatttttttaaacattggagaggtgtttcctttgtaatacaaagtgggaaaaggtaaaggaatgatttttattaacatattctcaaccatgtgaaatatataacatttgacaactatataaaaaataggaagacatttatttctaggtggtattatcaccagtaattcttgcttttgttttggttttcagacaatacaacacacatctatacttttaaattttca

SEQ ID NO: 525596 - DNA, 606 bp, Homo sapiens
ttgagatgatcagtcgtcggatgtattttgtgccaagggcatggtttgccctttcccagaggctcctcttttgcttgttttattactaacactatggaaagtgcttcttttgccactgccctgactccatcgtcacatgaaatttcccctcatgctctatgaagcccaagcagcaatttttggaaattgaagaaacatataatttactccacatctgaaactcctactaaacccaaatagcttatccttttctcataggagaccagtaattggccctcactagctgccatgaagccctctttatctcatcttcatctaggttctctaaatgttatttacatgcacagaagtgtatttataacccgcatctcttacattgagtatttttttaaacattggagaggtgtttcytttgtaatacaaagtgggaaaaggtaaaggaatgatttttattaacatattctcaaccatgtgaaatatataacatttgacaactatataaaaaataggaagacatttatttctaggtggtattatcaccagtaattcttgcttttgttttggttttcagacaatacaacacacatctatacttttaaattttca

SEQ ID NO: 525597 - DNA, 606 bp, Homo sapiens
ttgagatgatcagtcgtcggatgtattttgtgccaagggcatggtttgccctttcccagaggctcctcttttgcttgttttattactaacactatggaaagtgcttcttttgccactgccctgactccatcgtcacatgaaatttcccctcatgctctatgaagcccaagcagcaatttttggaaattgaagaaacatataatttactccacatctgaaactcctactaaacccaaatagcttatccttttctcataggagaccagtaattggccctcactagctgccatgaagccctctttatctcatcttcatctaggttctctaaatgttatttacatgcacagaagtgtatttataacccgcatctcttacattgagtatttttttaaacattggagaggtgtttcctttgtaatacaaagtgggaaaaggtaaaggaatgatttttattaacatattctcaaccatgtgaaatatataacatttgacaactatataaaaaataggaagacatttatttctaggtggtattatcaccagtaattcttgcttttgttttggttttcagacaatacaacacrcatctatacttttaaattttca

SEQ ID NO: 525598 - DNA, 558 bp, Homo sapiens
tttttttaacacttagcaggcattacttttactattagaataaaacaatatgttgttttattggtgaggcaatatagcatattgattaaatgcatagctttgaatccaagctctgtgaccttaggctccttaaccgttctgtgactcagtctcctcacctataaaaaggggttaatactaatgcctacttcaaagggttastgagaagactaaattagttaatacttgtggagtgctgagaaaagtaagtggtacacagtaacatgtcttctactgtggttgttatttcccgattggaaagaaaaaaagagtacagagaaagcagatatatacacatatacacctgccacatattggaagaacttgtggggaggggcagctacagaaggcactgatgatcaattccatctacttcgcatttcatccacagaaagctgtttttgtcccagatcttggtacaacacgtcaagggaaacttctctgtggtgcctctgaccatgtatatgaagtgagatactatgtgatcaaaatattcagctccctatgccaagcatgcag

SEQ ID NO: 525599 - DNA, 374 bp, Homo sapiens
ttctgtttttgcagggagaagccagaggtygtcaggcatttcagcctccctccatgagcagaaggaggatcagaccactggctcattaaccccatcatgttcagtgcttccaaaagtgttgaacatgattttcatctttgttcccccattagctccacctgctctcctataaggctgttgttcatgtttgaccaaagtgatgaccacagcatgttccaccttcagagcaggcagaagagctgaaacgtccttgcgcaatgaggattcccttaacttcattagcaagtggtaacctctcctctcagtcagttcctccacttcctcctcctggggttagtatggcacaaccaatgtccaactcctatgtgacaagt

SEQ ID NO: 525600 - DNA, 572 bp, Homo sapiens
gactctttaatcagtcctcctgaatagattgctaccctggggcacaatatgtgccagtgtgatggaaacattctccttggctttactagccagtcaaatcccagtcyagaattgatggaagctatttacctgtgagttaatgtgcttgttttagcaagcttgattcccattagaccaatgtgggcagaggtctgagggggttcttctcaattttgctgttagataccactaaactattttgtattaaagaacagtatctttttgtgaatactcttgtgtaaatatattcaaaggcactgttcatattttagggcttgtattataatttgcaaggttttaatgctggattctgcatgtctacacatacaaagacagggcttgctcctctgcaaaactgaggaagacaggtttattggcttggtcatgaagtaacagaaatggtcacactgatcatgaaatgcagcaagttttgtgcaaattaacatagtctcttatttattgcttttgtaaattgaataaagatggacttctatgtaaatagactgctgaatcctgtattaccacggctacta

SEQ ID NO: 525601 - DNA, 634 bp, Homo sapiens
gaataacaccttttgcttcccaccaggaatcattcactgccattcagaaagtctttagcaatttacttgtgggtaatctttcaataagtagaggctgaccctttcacaatttcatgttcctttgtcaccattcaagtgattatgtgtcaacaaatgttcattacaagtgagattttctcaattacattagcagcaaatcctgaaccttttttttttttcagttgaagttgtattagggactatctcagtatgtctgttaagtttatagagctttggcataatcaggatgtcagttttaaacactgaaatccttgaagtcagtgagaatacaataggaattcttttagtaatttagtttcagcattcctatgaactaattatctatttggttaacaatctgggaaaactatataaacatagattgcaaacgaataaatrttgggaaaattcttgaggtggatactatgagtcttaacagcaatttttattatgtatatatcagagcctgagtttttttattaaacatatgctactacagaaagaaaaggttccacatgcaaatacttggtttatacacaatcatttagcaacacattcatagcaaatataaaaatacaagggctatagtctaagt

SEQ ID NO: 525602 - DNA, 537 bp, Homo sapiens
gaccacgcccaggtcatttttgtatttttagtagsgacggggtttcaccatgttggccaggatggtctcggtctcttgagctcgtgatctgcctgcctcggcctcccaaagtgctgggattacaggcatgagccaccgtgctcaaccctttttgtaatattttattagctgggtcacaccacatgctccttcctaaaccaggcactgggaaagcaaatgtagttatctgattagcttagaataatcacttatcctttgaagctggggaggggtattgggataataaatacccaaataaatttgtgattctccagcaagaaacaacaaggaactgctcttgggtagggagccagctgtatttgctctagaaattcattggaaaattgtgagcaggggaggcattagattcgatttgagaattagggcattctgttcagggtataaggcagggattggcaagctttttctgtaaagggccaaataggaaatattttaggccatgtggtctctctctctctttcaaaaatgatttaagca

SEQ ID NO: 525603 - DNA, 613 bp, Homo sapiens
gtagatggaggatagatgtcacctgggagcatgtagttattatttactaggtgtttattatgttcattagatgccatgcacttttaaatttgtggtgatgactgcaagcttctaaaaaaatgggtaggatttaggggaagcacgcagagttagtgaagctttgccaggtaaagaggcagagggatgatgttttccagaaggaatatctaacaagcttgcatgtttgacagaaacagcagctatgaagccttgaattttgaaaaaaagacaagaaggtgcaaaaggtaagacatttgagtgtttctactcttaaccacgtaaagaggctgggagacaagggaagcttcagccatagttaatgctatagattccttgtcacaaatccatggagtacatgagtctattacaaagttttcacccatccatgataaaataaaatgatggcgctccagtttrttcatttgaaaatattggtattgccggggatggtggttcctgcctgtaatctcgtcagtgttggaggctgagatagaagcatcccttgagtctaggaggtccagcagcctgggcaacatcaccagaccccgtgtctattttttcaaacactgtagct

SEQ ID NO: 525604 - DNA, 578 bp, Homo sapiens
ctctacctgcaaaactaaataaatactgttaaaaataaaagatgatctccaagatctctaaacattaaaattttacaataaactggttgaggtgacacatgcctatattttcagctactcaggagtttgagactggcctggacaacatagcaagaccctgtctctaaatttaaaaaacaaattacaatgagataatcttagaccagagaaaagaaagtgaaatagctatttggattataaactgttttagtaactcaaatgtaatgtgtggtggtgacaatatctttgattcctgggaaggtcattgtgaaagggaatagaaaatgccttgaagtcaaaatataaggctctcaaatagaaaaataaatataacatttaagtattrtcaacagagaaccaagttagaaaaaactagttatagtctgaaacaatgctgtttaaaagactgcagtcaccagtgtaaactgactcaggcaacacttcccagggtccatgccgtggacaactgactaatctctctataaatactaaaagataataaggttccataaccaaacaagatggggaaatgctggatt

SEQ ID NO: 525605 - DNA, 578 bp, Homo sapiens
ctctacctgcaaaactaaataaatactgttaaaaataaaagatgatctccaagatctctaaacattaaaattttacaataaactggttgaggtgacacatgcctatattttcagctactcaggagtttgagactggcctggacaacatagcaagaccctgtctctaaatttaaaaaacaaattacaatgagataatcttagaccagagaaaagaaagtgaaatagctatttggattataaactgttttagtaactcaaatgtaatgtgtggtggtgacaatatctttgattcctgggaaggtcattgtgaaagggaatagaaaatgccttgaagtcaaaatataaggctctcaaatagaaaaataaatataacatttaagtattatcaacagagaaccaagttagaaaaaactagttatagtctgaaacaatgctgtttaaaagactgyagtcaccagtgtaaactgactcaggcaacacttcccagggtccatgccgtggacaactgactaatctctctataaatactaaaagataataaggttccataaccaaacaagatggggaaatgctggatt

SEQ ID NO: 525606 - DNA, 645 bp, Homo sapiens
gtttccatactggttataggcttgagaaccctatggagcaagtctttctggatttgaatcccagctcttccattctagcttagcagtgtaacttaaatgagatagttgctgtaaagactggaaacaataatgcaygtgggagccttagaacagagccttagacagtgctcaataaaggttaaatcattaatagtaacatcatttcccagagcctttattaatctaagttgaggttcattgtgaattaccaatgggatagagtttgcagtttctcaaacttattggatgatggaacccactttttcatagaatatccctcgagaaaactggttaatgtctttaaaacaaacaaaactcttcgaaacaatagagaattccatcaccaaaataaaatgctgttttttgttttttggggttttttgagacagggtttccctctgttgcccaggttggagcgcagtggcacaatcacagctcactgcagcctcaacttcctgggctcaagagatcctcccacctcagcctctcaagtagctgggactacaggtgcatgccaccatacctgactaattttttgtattttttgtagaaacaaggttttgccatgttgcccaggctggtttcaaactcctgggctcaagccag

SEQ ID NO: 525607 - DNA, 658 bp, Homo sapiens
ttaatgtcaagcctgtttccatactggttataggcttgagaaccctatggagcaagtctttctggatttgaatcccagctcttccattctagcttagcagtgtaacttaaatgagatagttgctgtaaagactggaaacaataatgcacgtgggagccttagaacagagccttagacagtgctcaataaakgttaaatcattaatagtaacatcatttcccagagcctttattaatctaagttgaggttcattgtgaattaccaatgggatagagtttgcagtttctcaaacttattggatgatggaacccactttttcatagaatatccctcgagaaaactggttaatgtctttaaaacaaacaaaactcttcgaaacaatagagaattccatcaccaaaataaaatgctgttttttgttttttggggttttttgagacagggtttccctctgttgcccaggttggagcgcagtggcacaatcacagctcactgcagcctcaacttcctgggctcaagagatcctcccacctcagcctctcaagtagctgggactacaggtgcatgccaccatacctgactaattttttgtattttttgtagaaacaaggttttgccatgttgcccaggctggtttcaaactcctgggctcaagcca

SEQ ID NO: 525608 - DNA, 645 bp, Homo sapiens
gtttccatactggttataggcttgagaaccctatggagcaagtctttctggatttgaatcccagctcttccattctagcttagcagtgtaacttaaatgagatagttgctgtaaagactggaaacaataatgcacgtgggagccttagaacagagccttagacagtgctcaataaaggttaaatcattaatagtaacatcatttcccagagcctttattaatctaagttgaggttcattgtgaattaccaaygggatagagtttgcagtttctcaaacttattggatgatggaacccactttttcatagaatatccctcgagaaaactggttaatgtctttaaaacaaacaaaactcttcgaaacaatagagaattccatcaccaaaataaaatgctgttttttgttttttggggttttttgagacagggtttccctctgttgcccaggttggagcgcagtggcacaatcacagctcactgcagcctcaacttcctgggctcaagagatcctcccacctcagcctctcaagtagctgggactacaggtgcatgccaccatacctgactaattttttgtattttttgtagaaacaaggttttgccatgttgcccaggctggtttcaaactcctgggctcaagccag

SEQ ID NO: 525609 - DNA, 447 bp, Homo sapiens
atcatttcccagagcctttattaatctaagttgaggttcattgtgaattaccaatgggatagagtttgcagtttctcaaacttattggatgatggaacccactttttcatagaatatccctcgagaaaactggttaatgtctttaaaacaaacaaaactcttcgaaacaatagagaattccatcaccaaaataaaatgytgttttttgttttttggggttttttgagacagggtttccctctgttgcccaggttggagcgcagtggcacaatcacagctcactgcagcctcaacttcctgggctcaagagatcctcccacctcagcctctcaagtagctgggactacaggtgcatgccaccatacctgactaattttttgtattttttgtagaaacaaggttttgccatgttgcccaggctggtttcaaactcctgggctcaagcca

SEQ ID NO: 525610 - DNA, 491 bp, Homo sapiens
taaaaaataaatttttaaaaggagagaagtcttaaaaaccagttatttaccccatcattaagttataatgaactttcttatgggaattctttgataaggaagctcctttaygctgaagttttattcttttcatacctctttagataaatcagtgctttgggagcatatgtcatatgactcaatggcagtgttctaacttggattctagctccacattgtgcaaaggcaaaaaaccagagagtcagtgtggtagttaagaacttatgttttgctgtttgatttcctacatgccagtactccctccactacctgcagtcttcctgacctggggcaagttccttttgtaaactctgttttctagggggatggtggtggaagaaggatggtgatttgagccaggcagtagcaggtggaggtggagaaaagtggtcaaaccctgaatgaacgttaaagataggaccaaaaggatttgatgagaaattggaagtaga

SEQ ID NO: 525611 - DNA, 491 bp, Homo sapiens
taaaaaataaatttttaaaaggagagaagtcttaaaaaccagttatttaccccatcattaagttataatgaactttcttatgggaattctttgataaggaagctcctttacgctgaagttttattcttttcatacctctttagataaatcagtgctttgggagcatatgtcatatgactcaatggcagtgttctaacttggattctagctccacattgtgcaaaggcaaaaaaccagagagtcagtgtggtagttaagaacttatgttytgctgtttgatttcctacatgccagtactccctccactacctgcagtcttcctgacctggggcaagttccttttgtaaactctgttttctagggggatggtggtggaagaaggatggtgatttgagccaggcagtagcaggtggaggtggagaaaagtggtcaaaccctgaatgaacgttaaagataggaccaaaaggatttgatgagaaattggaagtaga

SEQ ID NO: 525612 - DNA, 593 bp, Homo sapiens
tgaggttgggagttccagaccagcctgacttacatggagaaaccccatctctactaaaaatacaaaattagctgggcatggtggtgcatgcctgtaatctcagctacttgggaggctgaggcaggagaatcgcttaaacccaggaggcagaggttgcagtgagctgagatcgtgccattgcactccagcctgggtgacaaaagcgagactctgtctcaaaaaaaaaaaaaaagaaaaaaaaamaaaaaccaaaaaaaccttgtgttttatggatctcacattcatctcagatatttcttgccctgagagatcctctgaattctcaggattgcttcatgttgattctactgtgatcctatcaaatatagtaatgctagaaatataggtctgaagtttgggagagagattggctcagtatagatatgtaaagcacagttggatatgtggtagttatatgaatgggattggatgaaattctctagaggtgtgtggaatggaaagaggtggcccaaggaggaagagagagagagagaaattggagaggtagaacaatttaggaaagagtaatgttctagaaactaaggagagagttt

SEQ ID NO: 525613 - DNA, 593 bp, Homo sapiens
tgaggttgggagttccagaccagcctgacttacatggagaaaccccatctctactaaaaatacaaaattagctgggcatggtggtgcatgcctgtaatctcagctacttgggaggctgaggcaggagaatcgcttaaacccaggaggcagaggttgcagtgagctgagatcgtgccattgcactccagcctgggtgacaaaagcgagactctgtctcaaaaaaaaaaaaaaagaaaaaaaaaaaaaaaccaaaaaaaccttgtgttttatggatctcacattcatctcagatatttcttgccctgagagatcctctgaattctcaggaytgcttcatgttgattctactgtgatcctatcaaatatagtaatgctagaaatataggtctgaagtttgggagagagattggctcagtatagatatgtaaagcacagttggatatgtggtagttatatgaatgggattggatgaaattctctagaggtgtgtggaatggaaagaggtggcccaaggaggaagagagagagagagaaattggagaggtagaacaatttaggaaagagtaatgttctagaaactaaggagagagttt

SEQ ID NO: 525614 - DNA, 685 bp, Homo sapiens
ctgatgctcactcacccaagagtgtctgtgaggccagcagtgccctcctatcccctggcagtcctggaggagtagacagaggcctccaccaccactcagggagatgcttctggccttagctagaatcccctagaaagcagcttccctggctcctggtgcatcacatgaggagtggcagggctgctccctagttactcatgatggacagacatgcctcaagccacctgccacatgctgcttcccttagtcaccagcccaacctgagcctccgtttcctcatctgtaaaatggggatagcgtgccttcctggctgtgtcactaatcgtccctgagacaaagcatgcaagctcctggtaaacacctgttccctccactcatcattgaggtgccctttggcagtgagctctgaccaaccggtagggtgggccaaggagtgactgggacgtgaggctgccttggagccagagggctggggaatgtgacttccgctggccaggagccaaggagaggtcttcccrtcctcctacttctggggtgcaggcctgtggcaggggtctgaggctctctcttcaatgcaggctcctggagctgctctcctgggtgtgttggggcctgattagtttactggactgtgggccctcccagcctgggactcgggagctgagaccctcttgcattcctgcat

SEQ ID NO: 525615 - DNA, 324 bp, Homo sapiens
ttttgtgtttttttgagatggaataaataggaaatggattcacaggctcctcgttcttgctctatttgtttgtttgtttttgagatggagttaaatggcatgatcttggctcactgcaacctctgcctcgcgagttcaagcgattatcctgactcagcctcccaaggagctgggattacaggcatgygccaccacacccagctaattttgactttttttttttttttgagacagagtcttgctctgtcacccaggctggagtgcagtggcacaatcatggctcactgcagtcccagcctcttgggatcaagcagtcctcccacc

SEQ ID NO: 525616 - DNA, 570 bp, Homo sapiens
ggttacagctcagcatttgcctcatttgaacatggttcaaacagttgactacatttgattggccaaaactcggtgattggcgtaggtgtaggctacggtctggttacacctccacttgttatagttcaccatgtacagaaaaacctttagccaaacttaaaatacgtaatgaggcagctttaggctaaacttgrtttaacagtagagacttttcctttttgttccagacttgtaaattctgctgtctgttgaacttctctcaacggtgcatcacattaaacatatccaaactcattcttctccctttcaggccacactttttcctctactcatattttcctgctcatctccttcactcagttgcacatgttacttagtaccaaggcttccttctttatattgttcatacctagttcttttccattctcatggctactactttaattctagctcctactcttgcctagggttcatggactggctccctcactattttcatacttactccctcaaatctatattcatactgttacttaagtaaacaaaagaattttttttcttatttttttt

SEQ ID NO: 525617 - DNA, 512 bp, Homo sapiens
ctgttttaaaatctctggcccaaaatttcaaagttacactttctcccaggagaggtcctgtaagaattgtaactaatcatagcatttactgtttgatattatgtaattcaagaagtgagatgctagaggttataagaagggctgaaaagaactataagacataatcttactctcaaggaacttcctatctagtatgggagttagrgctaagtcttagacttgtgggcaaaatatacgatttgggaaaagaaagactcctctgtgttgagctggtttgtgaaggtctcagagaaaaattggatcttgttttaagccttaaaaaatgactgatgtttagactataaccctgggaacttaattcataagtcagggccattgagtagtgctggtaacatttcccttttcagcaagattgttgatttctttagttctttgtggaataggaggaagatataagaagattctagtaatttatccactgaaaaatgtctgaatccagaaagctgctaata

SEQ ID NO: 525618 - DNA, 552 bp, Homo sapiens
ctgcccaacaaacctggaatagcactgccctccggaatatcctctcccttggacaggactagggacgtgcggtccaggcctttctcttgggcccctctttcacctacctccttgcacatcagagctcttggatctatytcatgacctctgtgtctctcagaggtcatagtttgctttcttattaccagtggatcctctggttgtcttcattcaacacccacctcctgggccaggcacctgtggatctctggggtgcagagttgaacacagcctcttctctgaggcattcccaggttgggggcattgaaccagggtagaaagggtggatggaaggaagtccagaggcttgtggaagcatggaggaggagcacacaggcagttaggaaagacttcagagggtgtagtcaatgggtttggttttaaaggatgcacaaggattttacaggcaaagagattggtggtgggaattccacccagagggatttttatccctcttcagtacttgtgactctgagggaccacacaggtgtgtgcatgggttctgcaggacag

SEQ ID NO: 525619 - DNA, 552 bp, Homo sapiens
ctgcccaacaaacctggaatagcactgccctccggaatatcctctcccttggacaggactagggacgtgcggtccaggcctttctcttgggcccctctttcacctacctccttgcacatcagagctcttggatctatttcatgacctctgtgtctctcagaggtcatagtttgctttcttattaccagtggatcctctggttgtcttcatycaacacccacctcctgggccaggcacctgtggatctctggggtgcagagttgaacacagcctcttctctgaggcattcccaggttgggggcattgaaccagggtagaaagggtggatggaaggaagtccagaggcttgtggaagcatggaggaggagcacacaggcagttaggaaagacttcagagggtgtagtcaatgggtttggttttaaaggatgcacaaggattttacaggcaaagagattggtggtgggaattccacccagagggatttttatccctcttcagtacttgtgactctgagggaccacacaggtgtgtgcatgggttctgcaggacag

SEQ ID NO: 525620 - DNA, 649 bp, Homo sapiens
ttcattctggttttatataagggaaaattctagtaagccttctcaaagcaatttaaaaaccataaatttcatgttcccttaacttagtaaatttcaaacccatttcatccttaatagtctacaaaatcaacatcagtttcaactaatggtctgtttatagcttacatggtaagtttcaaattgcaaatgcatttttacactggcgtttgaaggttgatattggaaagaatgacagaggagtcaccatgaaacgtggagcggagtttgaggctagctcccagttttccataatgggatacaattataccaaagaatggaaaattttggaaactcaaaccaagtgataggagccctcatgacacttgttgaggctaaaaactagcctttcaggatcrgatgagcctgcatttgaattctgcttctcttaattactgagcctaagtttcttcatttatataagtgggaaaatgtgacacacagtataggattgacatgaggattcaatgaggtaacacgtgtttttttaaaaaaagcctagcacagtatgtgacacatagtaagctctcaacaaatgctagctgttattattattattattactaatttgtagtcaggaagacttggatttgtatcctagctcaggcgctga

SEQ ID NO: 525621 - DNA, 643 bp, Homo sapiens
atctgtgaattcaacggccaaggtgttgacaatggatgaaatgcatcatgaacctggtgtgtcaacaaggtggattagggtacaagctgaaaatgtatgtttagtggaaggatgaggggctccacccttccaattggtttcccacagtcttgccatgaatgcctcactgaacttgcccagttttggtcaaccccaaacttaaagtatggaygcctgcagcacagcaatgcccaagcttagtcaacatgtttgacctggttgaaatccagaaattgaatgaagtgaaagttctggtgcatccagttatagctgagattttaatgccatcagatacgtttgctattcaactcatggccatgtttctacttggcagcagtttaagacattgagcaaagccaaatatgaggctttgtctattactaggttggactgcctgcagaaatatgattcacagccatggaaaatgatgactggatttggtaaaacagtttttcttgttttccttatcacttagtaaaccaaaagttaacagaaagaactcttgggacagcttcccattgtatgtgtgagagcctggatgtgaacctaggtctttgcaactctaatgcctatgttcattttacatagttacactgttctctaa

SEQ ID NO: 525622 - DNA, 591 bp, Homo sapiens
ttgcaaaaaatagctatccatttggctagataaaaagttataccttttaaccagcattgcaggcatccaagaaggcccacatagggtactacgagtgggagggagcactaraggtggtaaagccagggccaggatacctggatggtagagacaagggctgaagaaggtgatgagaaaatgagagagtgcaaaaaatatcaagctcagtttatttatcctgcagtggctatctctggcatttcctggactcctgacccacagggagggatcctgcctgtggctcacccttcctgttattttaattcttttgttggatgcctttaatgaatgtagacatggacactcatacatcagagagcagaagtactttaagaaccatctagccctactctttcattacacggatgagaacgctgaggtccagggaaatggaaagctttgctctgtctcctgctgggacaagatccttaatcgcctgattcctcacatcatgctgatctttcctctaacaagaaattgactgagctttcacagacaacgaggcaacacctgaaagagcaaagataccaagtcagattcatctgagtttgg

SEQ ID NO: 525623 - DNA, 486 bp, Homo sapiens
tgggctctgggtatattaaagaaaatgaatagaatggaaggaatatctccatttggggtttgtaaaagactttccaggaggaaatattcagatattttagggattgagtaaggttggttttacacataagtttcctcaagtaatctcacctgaattataaaagtaaatgtgttatgtattctataccttcccccatttttttggacacttccaacaggacaccctccctatgggaatctgtgaacatggtttgaaaatttttctgatagaatgatcccatrggatcctgcttcacaatgaaatggaaatgaagcctctaagtggctttcaatcaaatgagaaaaaatgaagcaaaaacgtgtgacacaaagtattgtagctagcgttcggatttctaaaatgaactctaagctcaaattatcaaggggcagcatatgaatgctgaggaggagaatttgtccccatgatccacattcatacactcac

SEQ ID NO: 525624 - DNA, 520 bp, Homo sapiens
gtgcccagtgaacattagctctcatcttctaagctcccagcacaagcatggccccccagctgatgccagaacacatgttgggagtgtcrgaaggaggacccaggtgaggggagcatgtcatgggatgggaccttagaagccctgtccagtgctgaaagctgaccatatggacacacaagtgtgtaccctgtgccgtgaggtttggagctggcaggaggtgcagctgagccatgcatgtggcgtgtgggaattgcgagggctctgggcttgtatgagtcagcttggagctgccagaacaaaacagtgcaggctcgggggggcttgcacaacgcacagccccggatgccggaagtccaggatcaaggtgtctgcagggttggttgctcctgaagcctctccatggcgtgggacggctgtcttctccctgcgtccacacgtggccgcccctttgtgtgggtctgtgtcatcatctcttataagcacagcagtcagactggatcagggccatcctcatgacctg

SEQ ID NO: 525625 - DNA, 604 bp, Homo sapiens
gcttcagctaagcatggaatggtaaagattttggtccaaaccctgtgacttgagttggatttaaaagcttgtcagaaatgagttctctggagcttggcatttgagactggcatccgttgttccagatgagatttcacggattgaaagctcaggaagaggtgtgaattacaagcaattagttcacagggcagttggaactgtagtaatcctggaaaccttttggcccacattttaaaaatatccccacaatccagcttctccctctgtagggcttctgcttgggaaagtttgtgtaactccccaaaacatctgaagagtgaatagcagtagkgttcttggactgcgaaggagaccctgcttcttatgtgcatgctcttgtgcacacagacagaaacacacacatacatgcacacacacacagacatgtacacccatgttcgctttagcatctgatagaaaaagaggaacatgaggaaagacagagattgagtcaccaacatgtgacctggtgatttctgagtcctctgactttgaaatcagtggaaatttagagctctactttgtcacttgtaatgctttgttgttgcaaataaatatttttgca

SEQ ID NO: 525626 - DNA, 477 bp, Homo sapiens
taagtcctgagtctctaggaaatactgctcagtgagcactgactctatactagatgtgaagccgggggtagcacaggatatcttatctaagcctcccaacagcccaatacacctagcactctctttaactccattttctagataaagagatcgagacttgtggagatggcatgacttgccccaggatccagtggtggagttgggatttccgcattatctaacatcctcccatgttagactccaatgcttatgctccttcaattcattaygtgtctggaggactttggaagctatacgtggctctcccacactacctgtcccctgtggccagcataagtgaactcttgcatgggtggcttctctctccatccccggcaggctgtggactcttggctgccctgccctggcctgtctctccccaggtttggccacagatatcagagatgccaaccaagttatttgtaactaaaataaatc

SEQ ID NO: 525627 - DNA, 351 bp, Homo sapiens
agcttctccctctgtagggcttctgcttgggaaagtttgtgtaactccccaaaacatctgaagagtgaatagcagtagtgttcttggactgcgaaggagaccctgcttcttatgtgcatgctcttgtgcacacagacagaaacacacacatacatgcacacacacacagacatgtacacccatgttcgctttagcatctgatagaaaaagaggaacatgaggaaagacagagattgagtcaycaacatgtgacctggtgatttctgagtcctctgactttgaaatcagtggaaatttagagctctactttgtcacttgtaatgctttgttgttgcaaataaatatttttgc

SEQ ID NO: 525628 - DNA, 351 bp, Homo sapiens
agcttctccctctgtagggcttctgcttgggaaagtttgtgtaactccccaaaacatctgaagagtgaatagcagtagtgttcttggactgcgaaggagaccctgcttcttatgtgcatgctcttgtgcacacagacagaaacacacacatacatgcacacacacacagacatgtacacccatgttcgctttagcatctgatagaaaaagaggaacatgaggaaagacagagattgagtcaccaacatgtgacctggtgatttctgwgtcctctgactttgaaatcagtggaaatttagagctctactttgtcacttgtaatgctttgttgttgcaaataaatatttttgc

SEQ ID NO: 525629 - DNA, 599 bp, Homo sapiens
cacagatacacagaggagaacatcatatgaacacgaagacagggatctataagccaaggaatgtaaaaaatctccagcaaaccagaagccagggaagagtcatggagcagattctccctcacagcccttagaaggaaccaacctgcagatacttagatgtccaacttgtagactccagaaccatgagacaataaatttctgttgtttaygtcactctgtttgctgtactttctttttttttttgagacggagtcttgctctgtcgcccaggctggagtgcagtggcgcgatctcggctcagtgcaagctccgcctcccgggttcacgccattctcctgcctcagcctcgctgggactacaggtgccctgtttgccgtactttctatggcagccctagaaaactaataaacaggtcaaagggaagcttgcctatcgggggctgattatttctaggaggctcaaagagtcagggaattttaacagaaaagtcaacttggagaccagatagacaagttctttctcctcagccacacatccattttacaaataaagaaaccagagcccagagaatttgcaggcattgatcaaagtcactatgc

SEQ ID NO: 525630 - DNA, 599 bp, Homo sapiens
cacagatacacagaggagaacatcatatgaacacgaagacagggatctataagccaaggaatgtaaaaaatctccagcaaaccagaagccagggaagagtcatggagcagattctccctcacagcccttagaaggaaccaacctgcagatacttagatgtccaacttgtagactccagaaccatgagacaataaatttctgttgtttacgtcactctgtttgctgtactttctttttttttttgagacggagtcttgctctgtcgcccaggctggagtgcagtggcgcgatctcggctcagtgcaagctccgcctcccgggttcacgccattctcctgcctcagcctcgctgggactacaggtgccctgtttgccgtactttctatggcagccctagaaaactaataaacaggtcaaagggaagcttgcctatsgggggctgattatttctaggaggctcaaagagtcagggaattttaacagaaaagtcaacttggagaccagatagacaagttctttctcctcagccacacatccattttacaaataaagaaaccagagcccagagaatttgcaggcattgatcaaagtcactatgc

SEQ ID NO: 525631 - DNA, 537 bp, Homo sapiens
ctgaacagcaagttctttctcagagggagatcctcatgggtgcctccaatactgtcacagtggtggaaaggtcactagagaatgattggtagggaagaataatgaaaatcccatcagtttaatgtyttgtaagtgttttttacatattgcccaagcttctaaagtcatcactgagcataatctttgcccacatcctcttcactgcaggtgaggtttatccactgtgaccacagcatacagcaagttacacagatttgacttctcttgaacctttcccaagaacatcttcacagaatatagtgctggggtgatgcctgaaaactgtgagcgtggttctcacagagtcttctgctttttatctcagagatttccatgaaacccaaaaatctccattttaatttaatgtttggaaccaggaagtgcccagcagttaatctaaacctgtttttaccacgacagcattctgtgtactgcccgggaaatgtcaatggtttgttgataccaaattaatgatgcatatctctagcaaagaaatct

SEQ ID NO: 525632 - DNA, 524 bp, Homo sapiens
ctgtaaatattcagtatgtatctctaaaagataagggcttttaaacccttatttaaccacaatactattattacattattggtaattttaaactctttctactagtggctttgtacatgtattataaaaatatgtatattacttttgaattgagcatattattttaaaaacattaagattcagtaaacatcacacacacacacacacacacacacacacacatgttgagtggctctgagatcacctctatggaaacaccctaatcatgaggacagttttcaacacatgttaggtggactcgatacatctgcattagaagtgaaaaggaagcctctcatgctcacactagtcctggggaaatgggggctggggatctggcccaatcttacacccagcccacagcacaagcatagtgagtggtcccaacaggggactctgaatgacactgacaaagaygagaaagcaggaggcaaggcaccctatggtgtccttcagagaaggtccttctggcccctcgtctgcca

SEQ ID NO: 525633 - DNA, 535 bp, Homo sapiens
ctgttcccaccttcatctcattgtgtcctcttctgattctgctctgacacccccagataccagtgtcttcttgccctttactctttatacttttctaattagctcttggccctccatggcaccagcagccctccagggagcagctcwtggctagaaagccaatcaaagggcaacagcgcattcctctatggtatttccaggtaggacttggaagtctggtggactcaaactcagacacatatttgagggagcttcatactttcctaagtgggcctttctacttgagaccacttgaaaaatgaattcagattctcagagaatggaaccccagggccgggagaagtttgaatctaagaagctctggctatcagatatgggggagctcctaggaatcatctaacacctctcaaacttccccatcaaaactggcctagtagcagataacagtgacatatttccctaggagggaatggggttgatacataaactatactactctaacttcattttatttcaataatccatgagaacattg

SEQ ID NO: 525634 - DNA, 535 bp, Homo sapiens
ctgttcccaccttcatctcattgtgtcctcttctgattctgctctgacacccccagataccagtgtcttcttgccctttactctttatacttttctaattagctcttggccctccatggcaccagcagccctccagggagcagctcttggctagaaagccaatcaaagggcaacagcgcattcctctatggtatttccaggtaggacttggaagtctggtggactcaaactcagacacatatttgagggagcttcatactttcctaagtgggcctttctacttgagaccacttgaaaaatgaattcagattctcagagaatggaaccccagggccrggagaagtttgaatctaagaagctctggctatcagatatgggggagctcctaggaatcatctaacacctctcaaacttccccatcaaaactggcctagtagcagataacagtgacatatttccctaggagggaatggggttgatacataaactatactactctaacttcattttatttcaataatccatgagaacattg

SEQ ID NO: 525635 - DNA, 535 bp, Homo sapiens
ctgttcccaccttcatctcattgtgtcctcttctgattctgctctgacacccccagataccagtgtcttcttgccctttactctttatacttttctaattagctcttggccctccatggcaccagcagccctccagggagcagctcttggctagaaagccaatcaaagggcaacagcgcattcctctatggtatttccaggtaggacttggaagtctggtggactcaaactcagacacatatttgagggagcttcatactttcctaagtgggcctttctacttgagaccacttgaaaaatgaattcagattctcagagaatggaaccccagggccgggagaagtttgaatctaagaagctctggctatcagatatgggggagctcctaggaatcatctarcacctctcaaacttccccatcaaaactggcctagtagcagataacagtgacatatttccctaggagggaatggggttgatacataaactatactactctaacttcattttatttcaataatccatgagaacattg

SEQ ID NO: 525636 - DNA, 593 bp, Homo sapiens
caattaaaggtatttttggagatgagagaattgattaaaaacgatggacacactttatgcactcagaagctggcacctcattggcaaccaagaaattccaagcttgcgcttctagggaggaagtggactctgggaaactccaaacttctcagaatgaaaaggaagctactctgttaaactgcctctggaaagagcccttctgttctctggcctcagagaacagcactgtaaggaaacaattgcaatgggagagggaggaaaacaccatttcttcctccagccccaccacccactgccaggacagaaggcaggaagaggctgatcctgctgagacaagcagccttggggattgactgtaattgtgcaagtaaagacaggacctggagtgcgtttcccagttcactttcaccagctacagcaataatcctgcttcccggaacattccatgctgcttcatttgctcagcaacagttgttccaggaagcctgtatgcacatagtgtcagcttgctggtgtgcccgccctgccaaattcaatgagartttattggctaatgtttttcccagaaatgggatgaaaatcttccagaggca

SEQ ID NO: 525637 - DNA, 453 bp, Homo sapiens
gcagctgctggctgggaaaggcttaccctgaccccaaccacctgctcccttttcccagtcagggctttcgccccagccccaaccccgggggtgggtagttttgtctttcccttggcccctggctggcctggccagcaacagctctgtctcctgctgtcaggccaccagaatgtgacaagtggcagatgggcctctgatcaatggaccccatccccaagcaaggacagtggggctgggggcagggtggggagcggccgctaatggatgggcctgagagcagtgacggatgggcagaaagaagctgccatttgtcttggaagtgagtgactccagggaggaggagaagggagggtggctgttgggctccagggtggagagaaagcaaccggagccaaagcccagcagggctgggrggatggggcctgagggtgccctggatgggatgggattggg

SEQ ID NO: 525638 - DNA, 604 bp, Homo sapiens
atactcataaaattacccttgaacggcctttgttcatgaaccactgtggttctcacagtgtgttccagggatcccggggcctccaagacccttgtacattcgtaggatcaaaactattttcataataatcctgagatgttatttacccttttcaccctcattagtctcatgagtacagtgtagttttccagaggctgcatgatgtgatatcacaagaggttgaaggcaaaagcagatatgagaagccagcaggctgtcttctattaggccagacacttaaaacgcttgcaaaactgtaaaacaattctgctcgttccataaaattgttttgttcggaaaatgttatttaaataaaatatatttttatgttaacaggtaatcagtttattattttaagtgaattaataactaagtacagtatttacatttttttctcaatgttaaactctgtgaaagaaaatgaagtcattaaggctaaggctttaaagaggggttgggagatttcaagaggattgcactcacacctgctaaaggtcaaaccacaggatgttgcaatagactyggaaaacaactgaagtcagtcttcgtctgccttcaacatctc

SEQ ID NO: 525639 - DNA, 391 bp, Homo sapiens
gacttgaaagctccatcaatcaagatatggcagctttatccatgtggcctgacttggttaatagatatcatcacacatgatgaaaacagaggcttgaaaagtgcttgctcaagaagscttgcccactggctgcctttggaactgagcttccatgtgaagaagcctggaatagaagacacggagcagttgaggcaccttatctggttcccccaagaccaacctacctgccaatcaccagacacataagtgaggccatcctggaccatccagctcccaccaggccataaacacctgaaagatcctggcagatatcagtgaagccactcaacctacccagagaattgtgaactaaactaaattgttgctttagattactaagtttagggttagt

SEQ ID NO: 525640 - DNA, 649 bp, Homo sapiens
atacgtccttgccatgttacatataccaacaaattcattttaaagcagtgtttaaacaaatctgctaactacttcttccctgaaaacaagagttcttccttcaaaagcagagccttttgtaaattttagttttggatataacaaaggtccccattttcctctcatactgtcttggagtctggctacctaagggaagaaagggacaaataaataactgtgtggactcatattctgaacccattcaagaaaactctggttcacawcatcaaatacagataatattccctctccttacttccccacctcccaccaggggccaggtcctgtgagctgaaggaacctgttatgctataaaggggaagagagaataagtgtgttctgagcatgggacccatctaggcaatgtgccatattggtgaactcaacttgctgaatttattcattttccaaaatattacagagaccattacccttgctgtttcctcatgagatcccagaaagcagcccctttccaactgagtggaaagctcctttaaatgggtccctctgtgctggaaaggagccacagtgccccgtgcctgtccacaccagctctgaaggagagcagctcctgtcactctgaccatgtctttcataggctgacagcagg

SEQ ID NO: 525641 - DNA, 649 bp, Homo sapiens
atacgtccttgccatgttacatataccaacaaattcattttaaagcagtgtttaaacaaatctgctaactacttcttccctgaaaacaagagttcttccttcaaaagcagagccttttgtaaattttagttttggatataacaaaggtccccattttcctctcatactgtcttggagtctggctacctaagggaagaaagggacaaataaataactgtgtggactcatattctgaacccattcaagaaaactctggttcacatcatcaaatacagataatattccctctccttacttccccacctcccaccaggggccaggtcctgtgagctgaaggaacctgttatgctataaaggggaagagagaataagtgtgttctgagcatgggacccatctaggcaatrtgccatattggtgaactcaacttgctgaatttattcattttccaaaatattacagagaccattacccttgctgtttcctcatgagatcccagaaagcagcccctttccaactgagtggaaagctcctttaaatgggtccctctgtgctggaaaggagccacagtgccccgtgcctgtccacaccagctctgaaggagagcagctcctgtcactctgaccatgtctttcataggctgacagcagg

SEQ ID NO: 525642 - DNA, 583 bp, Homo sapiens
tcagttcctcaactcatcttttggagccctcttaaagaaaggaggacatccatgtgaacattgcaaagatccaagattctcaattacacatttttaaaggctcgcaatatttagaaatcataactacttaattgattgatcaaaactgccttgtgctaaatgtactttaatttgcagggcaacctaaaaagattaaaaagacatatatactttgcagtaacctggaaaataacttcttgaagtcaaaagacaccatgggagaaagcagtttgttctcttaagctcataaagcaatggagtattgatgcaggtttatacagatcacagaaaacccttctcagcaacctatggagaggctctggtatcttccccaaagcctcaccttcttcacgatccctctgtcaaatggcacctccaaatgtcttctctccatcctggactttctggtaacaaagatttcatcccattttcaagatcttaagttgtcttaagttttacataccrcagaaaaattgctgtcaatcaaggttataaatattttacgcaagcaggcagtgaaaaggagattaggaagggcctagaa

SEQ ID NO: 525643 - DNA, 583 bp, Homo sapiens
tcagttcctcaactcatcttttggagccctcttaaagaaaggaggacatccatgtgaacattgcaaagatccaagattctcaattacacatttttaaaggctcgcaatatttagaaatcataactacttaattgattgatcaaaactgccttgtgctaaatgtactttaatttgcagggcaacctaaaaagattaaaaagacatatatactttgcagtaacctggaaaataacttcttgaagtcaaaagacaccatgggagaaagcagtttgttctcttaagctcataaagcaatggagtattgatgcaggtttatacagatcacagaaaacccttctcagcaacctatggagaggctctggtatcttccccaaagcctcaccttcttcacgatccctctgtcaaatggcacctccaaatgtcttctctccatcctggactttctggtaacaaagatttcatcccattttcaagatcttaagttgtcttaagttttacataccamagaaaaattgctgtcaatcaaggttataaatattttacgcaagcaggcagtgaaaaggagattaggaagggcctagaa

SEQ ID NO: 525644 - DNA, 585 bp, Homo sapiens
ttagcaaaaagtaggtcattttagtaagcaaatactgctcccaaagtttcagtttctttttttttttttttttttttgagacagmgtctcactctgttgcccaggctggagtgcagtggcgcgatcttggctcactgcaagctctgcctcccgggttcatgccattctcctgcctcagcctcctgcgtagcagggactacaggcgcccactaccatacccggctaagtttttgtagtttttagtagagacggggtttcaccatgttagccaggatggtctcgatctcctgacattgtgatccgcccacctcggcctcccaaagtgctgggattacaggagtgagccaccgcgcccagcctcagtttcttttttaattttagctatagcttttatgtaattaataaaatttctagttgtgaatacattaaacatgcatagtagaagaggtccaagaaccttaacattgttgttttggtgaaaagcaatcagtaagccaatgactctcaagcttttacatgtacaagaatcactagggcagcttgttaaattgcagattacgaggctctgccaatcacaggttctta

SEQ ID NO: 525645 - DNA, 585 bp, Homo sapiens
ttagcaaaaagtaggtcattttagtaagcaaatactgctcccaaagtttcagtttctttttttttttttttttttttgagacagcgtctcactctgttgcccaggctggagtgcagtggcgcgatcttggctcactgcaagctctgcctcccgggttcatgccattctcctgcctcagcctcctgcgtagcagggactacaggcgcccaytaccatacccggctaagtttttgtagtttttagtagagacggggtttcaccatgttagccaggatggtctcgatctcctgacattgtgatccgcccacctcggcctcccaaagtgctgggattacaggagtgagccaccgcgcccagcctcagtttcttttttaattttagctatagcttttatgtaattaataaaatttctagttgtgaatacattaaacatgcatagtagaagaggtccaagaaccttaacattgttgttttggtgaaaagcaatcagtaagccaatgactctcaagcttttacatgtacaagaatcactagggcagcttgttaaattgcagattacgaggctctgccaatcacaggttctta

SEQ ID NO: 525646 - DNA, 585 bp, Homo sapiens
ttagcaaaaagtaggtcattttagtaagcaaatactgctcccaaagtttcagtttctttttttttttttttttttttgagacagcgtctcactctgttgcccaggctggagtgcagtggcgcgatcttggctcactgcaagctctgcctcccgggttcatgccattctcctgcctcagcctcctgcgtagcagggactacaggcgcccactaccataccyggctaagtttttgtagtttttagtagagacggggtttcaccatgttagccaggatggtctcgatctcctgacattgtgatccgcccacctcggcctcccaaagtgctgggattacaggagtgagccaccgcgcccagcctcagtttcttttttaattttagctatagcttttatgtaattaataaaatttctagttgtgaatacattaaacatgcatagtagaagaggtccaagaaccttaacattgttgttttggtgaaaagcaatcagtaagccaatgactctcaagcttttacatgtacaagaatcactagggcagcttgttaaattgcagattacgaggctctgccaatcacaggttctta

SEQ ID NO: 525647 - DNA, 546 bp, Homo sapiens
aacctcttgtaggtagcatcagatatgaggccagaaggagggggaatgtaatcatgcagtcacaagagatgcatcctttgagactctagcggaatctgagtcttcctcctggaggagatctgcactaagctagctagctatagttcccaagtccttctctgcctctttgggaaacggagagagatcagagggtctcttaaaatcacctccagccttggaccagtgttcacctccactgtcggctttgggatgtttctttttccaacaattttatcttattgctacagagtaggatgctcccttccctgtagaaattgggaaatgctaaatacctatgtctcccaggaaatwcagctgtaagaaaatgaggcttaatctgttttgattaacaaggaggcagcaaaaggctgaccatgcactggaggatgcaggaggaaaaacaaaagagaggtagaaatgtgcccagaaaagcaaagggaaaaatcagggaaggttaagcaacagaaaaagatctctggattccgattcaattttagtgattgcaaa

SEQ ID NO: 525648 - DNA, 549 bp, Homo sapiens
cttcagtacaaacttttcagcatcaggccatcatagcagagttagaaccagagaaaaatgtttcaggaggtgagaaagaaaatcgaaagagagtattatcactccagccaagcaaaaagatgtaccttctcaaagagagaaggagtggcagaaggcaatgatgtatgaccagtaartcacatgcagtaagatatggcaaaattcttaccaaaaatacatcttcatgcttacaacttttttcttatctttctcctacttatttgttcctttatatcttgcttgtatttccttcctaaatttactttttgaaacgaccttaaataacatctgaatttagataaaagtaagtttttttaataaagaacatgtttttaatgcctttttaattttttaattttaatttttatttatttatttatttttatttatttattttttttgcgatggagtcttgctcttgtcgcccaggctggagtgcaatgacacaatctcggctcactgcaacctctgcctcccaggttccagcaattctcctgcaccagcctcccg

SEQ ID NO: 525649 - DNA, 549 bp, Homo sapiens
cttcagtacaaacttttcagcatcaggccatcatagcagagttagaaccagagaaaaatgtttcaggaggtgagaaagaaaatcgaaagagagtattatcactccagccaagcaaaaagatgtaccttctcaaagagagaaggagtggcagaaggcaatgatgtatgaccagtaaatcacatgcagtaagatatggcaaaattcttaccaaaaatacatcttcatgcttacaacttttttcttatctttctcctacttatttgttcctttatatcttgcttgtatttccttcctaaatttactttttgaaacgaccttaaataacatctgaatttagataaaagtaagtttttttaataaagaacatgtttttaatgcctttttaattttttaattttwatttttatttatttatttatttttatttatttattttttttgcgatggagtcttgctcttgtcgcccaggctggagtgcaatgacacaatctcggctcactgcaacctctgcctcccaggttccagcaattctcctgcaccagcctcccg

SEQ ID NO: 525650 - DNA, 290 bp, Homo sapiens
ctgacagagaagaaaagcaggtagataggctcacctagatgaaggcaggtttgaagagatggaggccctacacagcagtcctgagaagaattttttttactaattcaggattagcaaattgttttcctggtggtttttggttttgaattactatgttgcaaagttggtaatcttagtgagaatacaagaaaacataaggttattcacattcaggtttattttrttttgtatccactgtgatgattaaaattgggattaaatattcaagtgtacaaatacaattaaaattg

SEQ ID NO: 525651 - DNA, 633 bp, Homo sapiens
cctcaaatattcttgcttcactatttgctcattgttttggatatacagagcacttaaatatttgctattttagtgcatcattaatgaaccgtttattatgttttcaaagtcaaatatgggtcaaagtaatttttttaactaagttttactcttcrggttcttttttaatgtgaaaaaaagaggcccacactgtttctgtctatttataggtggtaattggaagttggtacaagagtagtctaaacagaggagtcatattgctccaggcagattaaaaaaggtatctagttatataagcctacataaagccacatctccagactaatattttcaaacgtgaaggggataaaatttatattatgaacagctgtagatttaactttgtaaagcctaaaattatagtagaaaatatttcaattatagttcttaaaatatgaaagagatgttgattgtacattgaaatattttgcataatgacatctatttttcacacacatgcatacatacacacacattcccattttgtagattataaaacagaggcacacagtagttaagaggcttgtataagcttacacagctagcagggagaccatgattcaaacatcaggcagtagaactcctgagtaccct

SEQ ID NO: 525652 - DNA, 620 bp, Homo sapiens
gctactccaatacatatggaattcaggaaacttggatttgaattgtctctcttttagttattatctgtgrcaagtcacttagctcctctcagtatctctgtttcctcatcttttaagtggagacaataagatttttagagtccttgtatggactaagtaagataaagcatgcatccctggcacattgtcaatgctcataaatagtagctgtaaaaatactgcacctagggtaaactatagaacagtatatttattctgaaacattattcctgttagctattatttaattcacccagcttactttcctcatcagttaatctgtaacccttttctccttatataaaagacttggaattatttcattgagggaggtcaataagaagattcccaaggaggatctgattaaagagtatctattttccccatgataagatcaataattccttctcaagggggtgtcagaacgaatatttgaaaattaccttccaacaaactctttctttgcttctgggaatagtacatatttggaaaggagacaataaatagatgggcagtatcttgtgcaggagttctgaacaactatagaatgcttccatctgttcacttttcagttttgttct

SEQ ID NO: 525653 - DNA, 506 bp, Homo sapiens
ctaaaattgatacacaccttaatagcagtgtacctacagatcccttcaaacttctaaaagtacatggtaggtacttttcaggaaagagttatgttgaacagcttgacagtaaaaaggttccygtaacttttttctaacaatacacactagagtgtggaattcaggatagaataattctattgaactctgctcaatatgccttttttcctgaagtaataaaagaacatctgtagcagtcaatcttgtctatggagcaatttcaccaaagagatattaagaaaatcctttttcctcttccctctttcttccagaaacatttattgaaaccatgtaaatattccaggcaatacaagaagagctgaaactgcagagactcataaggcttagttctatgtctacttcgtctagtacagtgggcagacttgaaaagtaaaaatagtaacaccttgtgaaaatgtatataaggctgacaaatcaattcttccgtggaaaagatgaggattgag

SEQ ID NO: 525654 - DNA, 590 bp, Homo sapiens
tcacttctttctcctgctcatctactagattttttttttaactctggagggaactcatcagcaaattttaaaagttatttaacatatgagcaaagcatagaaaatggacagattgaggcggctgtgtactgtgtttatattttagtcctactttttctataaaagaaacccatgtatttattgtgcttcatcaaggtacccacatttgggcattgtttagccctagagttttcatatccatccctcaaggtgatttacaataccccaaatgacgtattgttattatcacctaagcattaaagtggcctccattcaagtaaaatcagtactcagtgagcagtaattstattgtgcataattacaattatccctgtcctcctaactttttgccagtgttcacacttgctcaccttcaatcagacagctttgttttattaatatctattcaagttttggtacttggttccctgggaatttcatccattttacccactagcttgttacttttcttcatttgatttaatttggatattattttctaagtatatgacattgaaatctattataattatcagattctatctgcatga

SEQ ID NO: 525655 - DNA, 590 bp, Homo sapiens
tcacttctttctcctgctcatctactagattttttttttaactctggagggaactcatcagcaaattttaaaagttatttaacatatgagcaaagcatagaaaatggacagattgaggcggctgtgtactgtgtttatattttagtcctactttttctataaaagaaacccatgtatttattgtgcttcatcaaggtacccacatttgggcattgtttagccctagagttttcatatccatccctcaaggtgatttacaataccccaaatgacgtattgttattatcacctaagcattaaagtggcctccattcaagtaaaatcagtactcagtgagcagtaattctattgtgyataattacaattatccctgtcctcctaactttttgccagtgttcacacttgctcaccttcaatcagacagctttgttttattaatatctattcaagttttggtacttggttccctgggaatttcatccattttacccactagcttgttacttttcttcatttgatttaatttggatattattttctaagtatatgacattgaaatctattataattatcagattctatctgcatga

SEQ ID NO: 525656 - DNA, 601 bp, Homo sapiens
gctggctcaaggtcccatttgctcctcatgccacagattcctctacctgtcttctgatgttctgtgttttttttttctttttttatttctccatattttggatgctctcaaagcagcctcatgaaactattttgccagaagctatgtaaggtgaccccacttgtagaaatgccagaagtaagttaaaaggtaggttttgctctttacctagaaggagacaataaatctttctgtaccctaacaaaatagtccaagaattttgtctcactaccctgggcaattccagaatgagtttccagaagaattgttctamaatatgtcagaaatactgtattgttattaatactgattcaaaatacactaaatagactactgtgagaatcagagatcttcacattctattaactacttccttataatgacttttattgatatggttttgacttgctatatttgaggtatgaggcaaaaagatttgaatatatgaaatatattaacagttatatttgtcttaccaactttctgaagtaggttatttttatcaccctcctcctcttttatatttaagaaaaataaaacctagatacacttgtggaccaaa

SEQ ID NO: 525657 - DNA, 532 bp, Homo sapiens
gtgagaccctgtctcaaggaaaaaaaaaagaaaagaaaatcagaacctcaatccccaccggcacctactgagtcagaatctgttcctaaagacaagccaggcctgggtgccactgcagcacagcctgtttagggcccttggccaaccctaagtgccctgtcactaattacccagggttctccatgacccatcagggctataacttctgttacaggggccacagaatcccatctagaggagcagcccaaatgygtggctcaagtcccagagctgccttcctgcaggcgtctttgcatgcggccacgaagtctgtgctgaggtgctagctttgactcgcttctctgggaattcacttcttctacatttctagattatatttgctcaaagaaaacgccaagcctgagcgatgggaatcatgtatggatcagagccacctgaactgtggaggtaagtcacttatccttcacgagccctggttactcagctctcaggcaaagtgctttgccaggcacatctcaatagccccagacag

SEQ ID NO: 525658 - DNA, 532 bp, Homo sapiens
gtgagaccctgtctcaaggaaaaaaaaaagaaaagaaaatcagaacctcaatccccaccggcacctactgagtcagaatctgttcctaaagacaagccaggcctgggtgccactgcagcacagcctgtttagggcccttggccaaccctaagtgccctgtcactaattacccagggttctccatgacccatcagggctataacttctgttacaggggccacagaatcccatctagaggagcagcccaaatgtgtggctcaagtcccagagctgccttcctgcaggcgtctttgcatgcggccacgaagtctgtgctgaggtgctagctttgactcgcttctctgggaattcacttcttctacatttctagattatatttgctcaaagaaaacgccaagcctgagcgatgggaatcaygtatggatcagagccacctgaactgtggaggtaagtcacttatccttcacgagccctggttactcagctctcaggcaaagtgctttgccaggcacatctcaatagccccagacag

SEQ ID NO: 525659 - DNA, 630 bp, Homo sapiens
gacaggtgggggcagcagggctgtccaggacccccgggtctgttcaaaagcagaggcccagacaggacagaagccagggmagcctggggacagcggaggaagaggaggcccctctggtggggacacgagagacagggaccctagacttgtttgcatcctggacaaagtggacaggcaggggcaccaagggggacccaggcctgggaagggaatgtgtgagggagagacggagcagggggagaccctcgtggggtggaaaggggagacccctgggaaggctgagtggatcctcagtgcatcactgacctaaacggcccctccgcctggtgacttggagctccagtcacatcacacgggggtcttctccatcccaccctcaaccccctgccctccccagcctctgtcccctgagccacatcttcctgtctcccacgcggaacgggactcccgtcttcatggggtactgtgtggctccaactcgcccagccttcttcctccccctcaggccacactgccccctgcaggagcccactgtgatgcttgtggtgggatgagatcagcgtgggtggaacaaggccctggaaggacccatgccatcatcatcgacagcaaagctactctgcaaacaga

SEQ ID NO: 525660 - DNA, 360 bp, Homo sapiens
acaaaacccatcttgtgggctctgtgctttgcttcaacactcctactgtccccagtggccaagtacgccattaaggaggggccaaaaatacagatgctgggctccagccagaaatccggaattggcacatcagggcaggagtggtgctggtggtggcagtaatagtaatagtggtggtggtggcagcagtaatatagtggtggacaggtggtggtggcagtagtaatagcggtggtggcggtgacagtaatactggtggtggcagcagcagtaatagtggtgggcgggtagtggtggcagcagtaatrgtggtgggcgggtagtggtggcagcagtaatggtggtgggcgggtagtggtg

SEQ ID NO: 525661 - DNA, 360 bp, Homo sapiens
acaaaacccatcttgtgggctctgtgctttgcttcaacactcctactgtccccagtggccaagtacgccattaaggaggggccaaaaatacagatgctgggctccagccagaaatccggaattggcacatcagggcaggagtggtgctggtggtggcagtaatagtaatagtggtggtggtggcagcagtaatatagtggtggacaggtggtggtggcagtagtaatagcggtggtggcggtgacagtaatactggtggtggcagcagcagtaatagtggtgggcgggtagtggtggcagcagtaatagtggtgggcrggtagtggtggcagcagtaatggtggtgggcgggtagtggtg

SEQ ID NO: 525662 - DNA, 400 bp, Homo sapiens
ctgcacaggtcgtgccccgaggctcctgctgccggcacctcccccagcctggactttggctgtgtttgtagccctgtcccagcgctccgggtgggaatggcaggctgcgtcccactgctccagggcctggtcctggtcctcgccctccatcgtgtggagccctcargtaggcatctggcttacctgtctgttgtgcctgtgctgtgtctttcttgactcggtccatggtggatttgtagatgaggctttttccaggagccagaggagccctgagtgcccagactagtcttaattcccctgaaaaagctgtttggatctttatcatttggtgacaagtatttgggacatgatagtgtcacttggggtcctcccaagagatgcccaaatggaaagaagcctg

SEQ ID NO: 525663 - DNA, 611 bp, Homo sapiens
tacagtaatgtttcaaccaacatggtggaaaatgggctaaaacctttttggagtggtattggttctgttctacatttctgtgtcctccaggccccggacctgtccagccaaggcccagaaacccaggcaccaagtcccatccctccctttctctcctccccagtttctcactgcccgcccccccaactctccctcccaaagctgaaaatatccttttaagcacatgaacctggagaagttaagcattytgtgcatgcaaggttatccaagtgagcagagggagggctggagctagagttcctgatccctaatccagtgtcctctctgaaagagttattctagagtcgaatcgctaggttagaaagcgtggagagaagagctttggaattagaacatgaagcttcccgcactgctggcagcatttacgggctgtttccaaagaaacctatcagcctgtcaacgttcccacagcccctcttaccttcccggtgtcacaggcaccacaatgtgcagacaaatgcgcttctcacaacctcctcagccaggagctatccaggcagtgtttcatgtctcctgtccaaagcgtatgatggcagcgagttccaggcagc

SEQ ID NO: 525664 - DNA, 635 bp, Homo sapiens
gcagctgggatgggtgtggagagtagccacgtcgggcaygcagacatgtgtctcagcagccgtcctcctgcacagcggggcgtatgacaggcgggcagagagtcagtcagcaaagccaccaagtctccccagacttacaacttccagttctaatttgtatttgttgtgctttgggatggtggtgattagtgtcatttgctgaagcctccaaaaaataattccccccacttttttttttttttttttttagtgaaatgtagtttttcaggcaaactgtggtacccacccccatgtttgttagaaagttggacaaaatgtcatccagccggcagcttggaaaggagctctgagcagttggtggaggctcggtgggtatttcccagccatctagaacagagactctatccttgcgtgtgctaggaacagctcagccccatccctgtggcttcatggtggggtctcctggttagagtcccagctcagatgcctctctccaccttccccgacccgagggcgtcagggcctccactgtgcctccttcctggctgccttatgctgtgagccttgtcttgtcgtcgtttgaacttcccctggaaactctctattagatttagagaacaaaaacagccagtgaa

SEQ ID NO: 525665 - DNA, 528 bp, Homo sapiens
gggaaaataaaccctacacaggcaaaaagcaattaatatttgctttgaaattcagagatggatggttccatggagccctagcacccttatcagagaagggcgatgccaccatcrcaaacctcccctgataagaggaagagatgggtttgccattaccctgagcacagaaggcagtttccctggaattctaatgcattgcaatgaggcttaacatatcaatttttaaaaaatggtcatgcgtctgtttgaaaacaaacctgagagttagctgtatataaatgcacacgcgtcgtctatttctaatacccacactcgctttatttctaggtttcctttttctgccccctcctttttggtgcatatttaacactcacgttattgcaaagcagcctgggatgagccacttaggaccatcttggctcccattacacttatgtctcttagttaaggatgctaattctcgcaactcctcatctgcctctgtactcctctggattcttaaggcgatgctaatcagttctcgctcca

SEQ ID NO: 525666 - DNA, 482 bp, Homo sapiens
gcaattaatatttgctttgaaattcagagatggatggttccatggagccctagcacccttatcagagaagggcgatgccaccatcacaaacctcccctgataagaggaagagatgggtttgccattaccctgagcacagaaggcagtttccctggaattctaatgcattgcaatgaggcttaacatatcaatttttaaaaaatggtcatgygtctgtttgaaaacaaacctgagagttagctgtatataaatgcacacgcgtcgtctatttctaatacccacactcgctttatttctaggtttcctttttctgccccctcctttttggtgcatatttaacactcacgttattgcaaagcagcctgggatgagccacttaggaccatcttggctcccattacacttatgtctcttagttaaggatgctaattctcgcaactcctcatctgcctctgtactcctctggattcttaaggcgatgc

SEQ ID NO: 525667 - DNA, 601 bp, Homo sapiens
gctgctccctgaaactctcactctctctgcatttttcctttccagtgcctcaaaactgcacaccacctggtacttggcagtgcagcactttgctcagggggatgggtctccatctctctgcygtcctgtttttcttttttcccgtcaattattctttgccttttccatagatcaagaagaaggtgatgtgtactcatgtacattaaaaactcctgtctccattgcctatgaacagcagcatcaaaccactatgcagaattagcatgaatttatagctagaataggaaagttcaaacttggaaacaaccatcgtagtttaccagttgggttttgaagttttttctctcagatctgttgcttactagcaatgtgaactaggtagcaaattaccctctcttgaaatgttagcagattcacttgtgaaatgaagttagtgatgaaggccaaggtagggatagccatgcagttctgtttctccttatctcatcatctcactttcccagggagatctttaatcttggaaattagcactctctggtcacgtggtgaaagtgggttggaagaaagatgcatgcaaggagcagtgcttctaccccaccca

SEQ ID NO: 525668 - DNA, 596 bp, Homo sapiens
ttcttacttctaagctactctgaaataggccccactgtgcatcagacattgttctggtgcttcctgtgactcacactgtagcttcggggaagtctttgttttctactactttctactacctgaggctgctaatcttcaagtggaagttgttgggtagctagtgttagacagttctcctagggcctggagacctctgaacttaatatgtaaggtaggggctttcactaagataaatgctggttcccctggaccagtaggactctctctaaagaggcaagctgagcagtagagtacttacactgtattgtgttttgacactggccacactagtctcccccagtggaactaatcctccattagttttttttctccctggaaaatgataaaatggtagtccttgtctgctgtatacaggccaaagtcgatgaagaacttggttggatagccatcatttggtttatttggacatagattagtttactgagccatagagttatttaaaggtcccagatagtaccaggggatgcgtccctgagaaatcttacctagctcttgatgatgtgtagarcattgagaaggtagagtcaactctgaac

SEQ ID NO: 525669 - DNA, 549 bp, Homo sapiens
tctggtaatatctcagactgagcaacctgaaaggacattgactaaaaaaaaaaagtctcagatatataacaacaacaataacttttaatgcgtccctgggctcactagaaagtaaggagaatgtctgaagaaagattaaaaacaaaaacaagaacaggggtctaagatcatagagcagtaaagagtagacaaacacttggaaagtggtcttgaaattaaatgcctaggtcagtaccactatgcaggaagctttgagactataaawggtggagagataaaacttaaaacttccatattaacccagttctcttaacaaagactagagtgattacaaataaatagtgccactggctcttgagagaagcaaacacaatcccctgtaaacaggagctttacaaatttagttgccaggatcattacagattaaggtaaacaaaatctgatttcacaaaaaattactcaaaggaaaaatatcagccactataaaggaaaataagccaaaagaacaagcactgtatgtaaaacctcattttaaaatatcaaaatgac

SEQ ID NO: 525670 - DNA, 568 bp, Homo sapiens
ctgaaattatgtctacaaaccaacaaagtttataaaaattaatattcagctctcatgagcactattagctttctccatcacaccactggaaaggtactttcctaagtattaatttggggttgagcagagtgttagagaactagaaacatgtgcataataaggatgaggagaggcaatagagattgttgttgagggagctgttgaaatgatagaagaaagtatgtggtgtgtgtctgcatatgtgtgtgtagcagacaattcctcacaatgttatagactaacacagtcactaattagcataatgtggctgagaatttaaaaaaaacttgtggcaakattttaataccaagatgacaatacaattatttcattatcaacactcactgaatcttatgtactaggtaagcactggtgataaaagcatgacaccagacttaggtaccagttgtgtccttattttacatagcaaacatagccacaggataatatacaacctcttgaagatcaggctgttgtaaactgggttaatagatctgggtttcaacacatagagtcaattatgagaata

SEQ ID NO: 525671 - DNA, 358 bp, Homo sapiens
gtaaatgctgctctgttttcaagacgatgccttgttgctggatcctagaggggaggaaccctgtgttctcacataatagaagggatggaaggacaaataggaagggtctaccttccagccttttcataaggcactaatccattcatgagggmagagccctcatgatttaatcacttccccccaaatccccacctcttaatatcaccaaaatggagattaagttttaacacatgaattttgggggacattcagactatagcatatgcatatggacatatgcatacatgtaagatcattctaagtagggcactttaattttactcacgtgatgtgtagcactacatagttgtggttatga

SEQ ID NO: 525672 - DNA, 612 bp, Homo sapiens
ctttttcaaagcaagcatttctccttccttcccaagatgtcataacagttgggagtggggagagaaaggttgagaagggaggcatgagtatgtgcagtgtggaattgttcttcaggtcattccatcattcatgcattcattcattcattcattcattcaacaaacattcattgaccgtctactttgtgtcaaacactgtgttaagcactgataatgttagagttgtaaatcaaaaataaaattctaagcccctcaaccaackaaatggaccccctgcttggcccaggagatcccaaagaaacctgaaacactagttcaggccatgactggaaggtggaggtagagtagccagacatgcctccttataacctcctccctttggagtttaggcacaactgactaccattaacattaaaacagagatcttaagactgacaaacagactctttgtagcagtaaggtatgcaaacccaggtttggctgctaacccctggaaaaccagacatgagagacaagaattggtgggaagaaaagcaggcttctttggaaagcccgcaaaaccaagaagatggtggactagtcacaaagaccatcttaaattttaaaatttta

SEQ ID NO: 525673 - DNA, 538 bp, Homo sapiens
gaaagaataatgagagccgagccaagggggaagccccttataaaaccatcacatctcatgagaaattactatcacaagaatagcatgggggaaccacccccatgattcaattacctcccactgggtccctccyatcacacatggggattacgggaattacaattcaagatgagatttgggtggagacacagccaaaccatatcagtgtccgtgatgcaaaaatgttttaaatctcagttgaattgtgaacaagtggttttatccaccaagatgtgagatattaagacattttagaccagtgccattctcgtagtcttagaagaccctggccaatgggtgccaattgaacttgaatcttataattcatgagcccccaaactatgaactatagtcaaaaaccatgtcaggacaatcatctgggacagtggttttctgaatgtgtcaatagtggttaggattccatggatgcctcgggattttctgtatgggtgaaaaacataaaaacattaggaccaagatgggggggatctacttccag

SEQ ID NO: 525674 - DNA, 664 bp, Homo sapiens
ataaaataatgctataaatgtgtggcaaaattaaaaggagaacataagcatccttcttgtaatcccaggatttacccagtcatctagcctaccttgcttttaagctacccatgagtccttttgctacatgacatttcatggatgatcawcccttgcagtgggtctggatctctatagtcaacatctaataggacagcttccctgtcatatttctctggctccctgccacatgtttacacctgatagccctattccactggtcctagcttattgacccagaggtaaataccttcttcacgttgagctcatcaaattccttctaactgaaatttggaattgggaccataaaagaaataatcagtgtctcctttactcgacctaaatcatatatatcctgaaccatggagtgaccaagttcctctttctggactacaggaagaaagaagcacatatatgaattccatgaacttatcctcctaataaatcccactttttttctcaaaccagagctgccgagattttattatttgtaactaaaatcccaaataatgtatctgataatcccctaaactcatctactcatcttcatcacttcatcctcaacccttgagcagaacttccaaaattcatttaggtagatgactatgagcagacaataaaaatt

SEQ ID NO: 525675 - DNA, 664 bp, Homo sapiens
ataaaataatgctataaatgtgtggcaaaattaaaaggagaacataagcatccttcttgtaatcccaggatttacccagtcatctagcctaccttgcttttaagctacccatgagtccttttgctacatgacatttcatggatgatcatcccttgcagtgggtctggatctctatagtcaacatctaataggacagcttccctgtcatatttctctggctccctgccacatgtttacacctgatagccctattccactggtcctagcttattgacccagaggtaaataccttcttcacgttgagctcatcaaattccttctaactgaaatttggaattgggaccataaaagaaataatcagtgtctcctttactcgacctaaatcatatatatcctgaaccatggagtgaccaagttcctctttctggactacaggaagaaagaagcacatatatgaattccatgaacttatcctcctaataaatcccactttttttctcaaaccagagctgccgagattttattatttgtaactaaaatcccaaataatgtatctgataatccmctaaactcatctactcatcttcatcacttcatcctcaacccttgagcagaacttccaaaattcatttaggtagatgactatgagcagacaataaaaatt

SEQ ID NO: 525676 - DNA, 591 bp, Homo sapiens
tagactgaaagtgagggaggctggtgggaatgttataagttagcaggtgctcaccattgcccctgcatgaagcactagaggattgcagtgaaccgagatcatgccactgcacaccagtttgggaaacagagcaagactctgtctcaaaaaatatacatataaaatgaaaatttaaaataaaaagtctgtgaggacagagaatatattcatctcctgcactttatcttcatcaccttctatggtatctggcacctaactagtatgcaacatttgccaaataaagatatagctgaagctataattgtgaaaaaagttatctcgaaaataactatttaaaaaaagatgtgaaagaaaagtatatttcaacaataaaaaattattacttattattattattgctgttgctaccatttgcagagtacctgttacctaatcttcacaaccacactgcaaggttgtagatcttattaaccatagtttaaataggagagaaattgtacctctaaamtttacactactaaaaaaattcaggactagcatttagcccccaaccttttgactccctattccaaaatctttctagaacattaa

SEQ ID NO: 525677 - DNA, 460 bp, Homo sapiens
caagctgagaactgggtcacgcaaacctgcctcccctctttggttcctaaataagatggctacaagatgaaaaaatacctgccttccctatattttgcccacagggaaattcctggtgagctgttaaaacttcaccatggcaatgcaaattgatagtttatcttatacaggcgcagtcacccaggccctgccagactcaaaagcatatctgattgttcccctaccccattttgtctgtgctatcttatgtaaaatgcagattctccacattttttcctctgccccttttgtttatgtgaaaactgtgtgcttctcaatatcycaccttttctcctttaaatttggaatcctcaaaatcatctctggagaaaggcatacatctgtctcccaggcatgttcttaactttggcaaataaatctaaaatgattgagatttgtcttgtcattttcttccattgac

SEQ ID NO: 525678 - DNA, 554 bp, Homo sapiens
gtcagaaagggcttgttctgagggtgacctgcaggttgcaaggctgtggaaacatagcggtgacagcgttgaatggcttgtccccatcagtaagctttggtgtcacaccagccggatgactttctggtggagggccagcttcctgcacttccgtgacarcagcctgacagccccacggaggcatggctgtagacattaagacatttctgtagacatttgttctagttgttgtccttttttgtctgttatttattatttatttatttatcattatttatttagagacaaggtctcactctgtcaccaggctagagtgcagtggtgcaatcatggcttattacaaccttgatctcctgggcccaagcgatactcccacctcagcctcctgagaggctgggaccacaggtgtgcaccacaatgcctggctaatttttaaattttctgtagacagggtcacaccatgttgtccaggctggtctcaaactcctgagctccagcgatcctcccaccttggtgtcccagagtgtggggtcttaggtgtgagccatcgtgcc

SEQ ID NO: 525679 - DNA, 377 bp, Homo sapiens
ctcattggtttatagactctgataatatmcctatccatggatcatttgagtattgactaatgtacataggtacccaactggttgattattaatcaagaatacagaactttatttaataattagcacaccctgatctggcttctttgcttgcttttctttggatccctgtccaataacctctgtggaatctcattccctaattgttgatactcattttctccgtttgcaaaatgaagatactcattgttaggatcctactgctgaagggtgctatgtcactttctagtgctcttatatgtctttaattataggactggaatgaaaagcttaaccatacagtatttctaagcaaaataatgtactccattcttttgtcc

SEQ ID NO: 525680 - DNA, 377 bp, Homo sapiens
ctcattggtttatagactctgataatatccctatccatggatcatttgagtattgactaatgtacataggtacccaactggttgattattaatcaagaatacagaaytttatttaataattagcacaccctgatctggcttctttgcttgcttttctttggatccctgtccaataacctctgtggaatctcattccctaattgttgatactcattttctccgtttgcaaaatgaagatactcattgttaggatcctactgctgaagggtgctatgtcactttctagtgctcttatatgtctttaattataggactggaatgaaaagcttaaccatacagtatttctaagcaaaataatgtactccattcttttgtcc

SEQ ID NO: 525681 - DNA, 377 bp, Homo sapiens
ctcattggtttatagactctgataatatccctatccatggatcatttgagtattgactaatgtacataggtacccaactggttgattattaatcaagaatacagaactttatttaataattagcacaccctgatctggcttctttgcttgsttttctttggatccctgtccaataacctctgtggaatctcattccctaattgttgatactcattttctccgtttgcaaaatgaagatactcattgttaggatcctactgctgaagggtgctatgtcactttctagtgctcttatatgtctttaattataggactggaatgaaaagcttaaccatacagtatttctaagcaaaataatgtactccattcttttgtcc

SEQ ID NO: 525682 - DNA, 558 bp, Homo sapiens
tcagctgacattggctgaagcctagaggagcttgctattgcaggtaaagagtaagtgaggaaatgttagtagtccacatcaccaccattaatagttgcaatccaaacaacagggagagctccgctacccacagaaatgctgactaccattgtcagtaatctggagaccctgtaagagcattacaccagacaggggatgtgttcttggtcgctcacaccccagacacctaagtggttggatcagggcacsattgtgagagcatagccataatgggactgtatcctgccctggggagccacagcctccatatctccacattctgggagctccaacatatatcccccggtgttacagctacagtggtacagtgctggctgaacccaaaggtgtcacaggattctcaagactctagccaatagggagtaccactccctgagaatagaacagtgcagcacaccaaaagatgaccaaagcacatgctttccagagcccaagagctctggtgctgtgaaaagagattcttttcccagcagtggcacaaacttttgcttggactgg

SEQ ID NO: 525683 - DNA, 558 bp, Homo sapiens
tcagctgacattggctgaagcctagaggagcttgctattgcaggtaaagagtaagtgaggaaatgttagtagtccacatcaccaccattaatagttgcaatccaaacaacagggagagctccgctacccacagaaatgctgactaccattgtcagtaatctggagaccctgtaagagcattacaccagacaggggatgtgttcttggtcgctcacaccccagacacctaagtggttggatcagggcaccattgtgagagcatagccataatgggactgtatcctgccctggggagccmcagcctccatatctccacattctgggagctccaacatatatcccccggtgttacagctacagtggtacagtgctggctgaacccaaaggtgtcacaggattctcaagactctagccaatagggagtaccactccctgagaatagaacagtgcagcacaccaaaagatgaccaaagcacatgctttccagagcccaagagctctggtgctgtgaaaagagattcttttcccagcagtggcacaaacttttgcttggactgg

SEQ ID NO: 525684 - DNA, 558 bp, Homo sapiens
tcagctgacattggctgaagcctagaggagcttgctattgcaggtaaagagtaagtgaggaaatgttagtagtccacatcaccaccattaatagttgcaatccaaacaacagggagagctccgctacccacagaaatgctgactaccattgtcagtaatctggagaccctgtaagagcattacaccagacaggggatgtgttcttggtcgctcacaccccagacacctaagtggttggatcagggcaccattgtgagagcatagccataatgggactgtatcctgccctggggagccacagcctccatatctccacattctgggagctccaacatatatcccccggtgttacagctacagtggtacagtgctggctgaacccaaaggtgtcacaggattctcaagactctagccaatagggagtaccactccctgagaatagracagtgcagcacaccaaaagatgaccaaagcacatgctttccagagcccaagagctctggtgctgtgaaaagagattcttttcccagcagtggcacaaacttttgcttggactgg

SEQ ID NO: 525685 - DNA, 563 bp, Homo sapiens
atttataagagggtttcactattctggttttctattatcatcagaatattgtaatctttctgaagtgtctctggcattctctatgcgacatctttaaatctaccatcacagtatctgtctttgtcttccttttatttgaaaagcaaataaactaccaattgttttttaattaatwtgatcaatgatataaagctcttcatttagtttctatctgtgtggaaactcacccacagcatcttttgctttcatgtgattccagaagcaaattttataataaagtttccctacaggttttaaaatgatcaagtttatattctacctgattttcattgtactttatttctccctatataattggaaaaagatattagaagatacattgattttatctgcctctatataggaagtctataaaccagatgactgaaaagaacaaaacggaaaacacttaaacttcactgattatcagaatcaggaaaacaatggtttaggaaataatagcattctgcaatccactgaagacatgctgaatcagtttcttctaggtctggaaacaagaaatt

SEQ ID NO: 525686 - DNA, 529 bp, Homo sapiens
tttagcaagactttaagaagagtgaatgaatatagagctttcaaggacttatcaaacttaaaggtaaccaatgcagacaaaatgcttgtaaaatgctaattaaggtacacytctttgccagtaagataaggtgaggagatgatatgatctaaggcattcagggcagtgaaggggaagggggtcatttccaacatttagcgtaacataaacacaaaaaatgcccacttattaatgaatagagatgcattctttgttagctggtacccaggttgggtagaggggtgagagtgggtattccatttggcttggaggctttaattttgttgcactatttctgagtgtgtaaaaattgctgcccaaagcagctctaatttgctcctctttcagcttctctcaggaaaagtctggaacacgagatgatattctccactcgaataagatgctggcaggaactggatagaaaactggtggagatacagtggatgtatatgaagaaggagctatctgtcacttgtgaggcattttgaat

SEQ ID NO: 525687 - DNA, 529 bp, Homo sapiens
tttagcaagactttaagaagagtgaatgaatatagagctttcaaggacttatcaaacttaaaggtaaccaatgcagacaaaatgcttgtaaaatgctaattaaggtacacctctttgccagtaagataaggtgaggagatgatatgatctaaggcattcagggcagtgaaggggaagggggtcatttccaacatttagcgtaacataaacacaaaaaatgcccacttattaatgaatagagatgcattctttgttagctggtacccaggttgggtagaggggtgagagtgggtattccatttggcttggaggctttaattttgttgcactatttctgagtgtgtaaaaatwgctgcccaaagcagctctaatttgctcctctttcagcttctctcaggaaaagtctggaacacgagatgatattctccactcgaataagatgctggcaggaactggatagaaaactggtggagatacagtggatgtatatgaagaaggagctatctgtcacttgtgaggcattttgaat

SEQ ID NO: 525688 - DNA, 529 bp, Homo sapiens
tttagcaagactttaagaagagtgaatgaatatagagctttcaaggacttatcaaacttaaaggtaaccaatgcagacaaaatgcttgtaaaatgctaattaaggtacacctctttgccagtaagataaggtgaggagatgatatgatctaaggcattcagggcagtgaaggggaagggggtcatttccaacatttagcgtaacataaacacaaaaaatgcccacttattaatgaatagagatgcattctttgttagctggtacccaggttgggtagaggggtgagagtgggtattccatttggcttggaggctttaattttgttgcactatttctgagtgtgtaaaaattgctgcccaaagcagctctaatttgctcctctttcagcttctctcaggaaaagtctggaacacgagatgatattctccactcgaataagatgctggcaggaactggatwgaaaactggtggagatacagtggatgtatatgaagaaggagctatctgtcacttgtgaggcattttgaat

SEQ ID NO: 525689 - DNA, 642 bp, Homo sapiens
ttattgtcattgcagcagagccatgttgcagagtctatgtgcaactctgtgtgtctgctccattttctcctctctttactcactggctttccctgcttgctcctggttcctgttcttatacaactctaaattgcatatggttttggtttgccatatttgtgagctttcaacttactcctatttcagcttcatgatctcacttccaaatagcaaattccttctgttccttggtttgcccccctgaaaaagagaatttgaattgtcctatctaccttttacccttctatggatgaactccataagggccagatggtcatctctggactaattaacaatggtgggagtagaggagtcacatagtacaaaacctggctgcttaggcagcaggggcttgggatagggggatttcctctagagagggcacgagcagacacgcaggcaggcaatgattagcatcttgtagtataaattcgagaccacatgtccacagcaattacattcagagtttctttcatgaactctgatttctgccgaaactaggaggaaayacctaaaagaagactggacaaagagccaggggaacggaacccagactctaatcacaatttgttgtaagacctcagtgtaacccatttcaccctc

SEQ ID NO: 525690 - DNA, 527 bp, Homo sapiens
agtattacacacacacaaatgcacttgcctttaattgatttttaatttatttaggcccgcatgatttttttatgtctccacttttgctgaaaaactcatagatttgttttccagttatgcaaagggaagatttccaacatacaaatgcatggcttattttcagaaccatgaccgtttttcaccatcacctcctaagtattgactgtggcacaggcttcagttcacatagaagtcactgtgcagagtcttcaggaagccgctggacatggtgtgaggacgragatgaactgcacaaccctgatatcaactccatactacaaggattttatcagacatatgctgaataaatgtgttatgttttcaaggaggattttttcccttaacatttactgagcatttatcatgttcctgccttacattgttcaggtggctttaatagaatatcataaactgggtggcttataaataatagaaatgtatttatcatagttctagaggctgggaagtcctagatcaaagtgctggca

SEQ ID NO: 525691 - DNA, 625 bp, Homo sapiens
tttctctacaatttttcactcttataatgatgtaatgaatatccttgcacatgcatattttcacattgctatgagtgattgctgcaggaaaagccctagaagtggaattatggtcaagacataagcatatttaaaattttgatagactctctcaaattgctcacaaaatagcatgtgtattcattcccatcaccagggtgcacactcacaaaggatatttgtaaagcyttttagaacaactttaaacagttgctggcatattacatcatccttgcagatgttaaatagttgggattagaccaagaaattatttgtaaacactgccacctaaacccactgcaaatctacatgacagggaaaaaatattggaaataaaactaaatagagatcccaggtccctcacccagtgaataaaagagaatctaagtctagttagaattttagtaggaagctaatcttacagacaatcactgaggaaaggcacagaaaagcacccttgtgggggattgcagggggctctgggagtgcatgtagataccagcaagtagcagtgacatcatcttcttctttatatgggaaacaccctcatggtactgaaacccatactagcagacttccaaatgaa

SEQ ID NO: 525692 - DNA, 482 bp, Homo sapiens
tgctccctgcatatttgctttactgaaaaagaaaaatgtttattctggttagtactgcaagcctcaggcatcaacgtstcaagtgtctcctaatctctcctcgcacagccgtccgtctggcggtgggaaaagcagcagctctggatgtttgaatccaggatttagtgtgccaggccaaagtcttgttaccctttccacttgtaagctgtgaacaaatgagagaaagacagagacagactgtggatatacctaaactagtttttacactctaactgtgagcctaattgggttttcaataccatttaggcacaacctgaaaattatttcttctgaatgtaacatcttcttttgtaatattactgaaattattttcttcttcttttgtaatgttgcactagcttttattgaagagctactaggtgctattctatgtcctatgctttagattttgttgcacagacaagaagactgaccaacatttg

SEQ ID NO: 525693 - DNA, 630 bp, Homo sapiens
  misc_feature (1)...(630): n = A,T,C or G
gctggttaagagagtntgaataattccnaagcgactncagttaagtgnacacttgaacactctgtacctatgaaaatatagaaaagacacagttttccaccctggacccaaagtgagtctttcagaatgggactctgaatcatctttcttttttgcttaaaaccctctcagagaacataacgtgaactatgagggcttacataatctggccrtgcacacctctctggcattacctcacccactgctgcagcgactctgaactgccttcagttcttccagagtgcaaagcgctacagcatctttgcacatgatcctagggcatgttatgtaccctctgccccagcacctaattaggtctctcactcttccatcagagctcagcttcaatgtcactttctcaggacagccatcccaggcctgccacaagtcagggcatcttcttacctcccatttttcctcccgctattcttctttggcactcaccacagtttttcagtctgcttttgactgtgtggtaaacttatttcatcagtttcatcaagtagactacaaacaagagtcataatgttttgtgcattctggtgtttagccaagtgcctgctacatactaggcatgcaattccttgtggt

SEQ ID NO: 525694 - DNA, 552 bp, Homo sapiens
gcaatcagaaattttgtttcaagcttacctatccttgatcagctatgatctgtagagtcaatattaatttctaaaaattaaacgaatagtatttatataattatttcctatgctattctatacataagggaagtgactaacaattctgtttcaacagtcacatcacatagatgtgtatatctttgaagatcattcaaatctaacacattctccagctctccccactttttctcagtgatcagttctgatatccagctccaaagcaccactctaagtttcccttcccactctccttcactcctcctgatctttattcctcaaaagcctattttagtcttattactactactaatcagagtgaagaatccagtgctatactctacattgctgctttccttattggttcagctatacatcatactcttyaggagtaaaattcttgtcttcaacatatccaacaaatccttcagagcattaatattgagctttatgttcaggagacccttagtaagtgtggacagtgtggtagcatattccatgagctaaaaatgg

SEQ ID NO: 525695 - DNA, 487 bp, Homo sapiens
tttggctgttcctaagttttatcctttataataaacactaacagcaaataaagtgctttcccgtgttctattacttgtaaaagtgaattattgaacctgagggggatcttaaaagcaccaaaatatgcagtcmactaggcagaagtgggagtgtcctggaaaccccatttccatctggcatctgaaaggggagcagtcttgggggaccaagcgctttgatttgtaggatctgacactaacttcaggtagagtagtgttgaaaaacatgccacatatttggtcctgagggaaagaatctctcaacatgttattccattttctaaattcctagcaatcctaggcaattttccccaggctggtatttgttgaaagtagttttccattacaactttgataaaaaacaaattccataatcattccaaaaaaattggctcagtaatgtagagcagttcttctcaaacttacatgtgcatatgacttatttgga

SEQ ID NO: 525696 - DNA, 626 bp, Homo sapiens
atgggatgaagtagtggctgccccaaaagtgaactccctcacagtccttggtagtgactgtgagattttctaatctaagactgcctccctgtctgaggtgtaaaactgaaatggatggarattttcttctagaattcctttctagctggtgaggtcattctatttatagatatgattctaccccagatcattctcaaagccatccatctgtattgaaagttcatacccttaacttccagtggcattgggtatgtgtgtgttttcttatattttcatgagtttttttatggtaatatgtgtgtggttttatcactgggtgacaaggagacaacacaactacatgctttgctgtctgaaaacgaagtgacaaattcatggtgacaaatcactgaaagacactgaaggaagtgacatcactggtaactgatcataatgtacacctgttatttgcatagtcatttgtgtactgaagaactagcagcaatgtctgtactttatacaattattaacacttaatatttcttggtaattgaaatttgaaccagcaccgcaaacacagtgaatatagtaagtactcaatagacactttataattaatgatcagtcatctaatcatctaagacaga

SEQ ID NO: 525697 - DNA, 538 bp, Homo sapiens
caaaagtgaactccctcacagtccttggtagtgactgtgagattttctaatctaagactgcctccctgtctgaggtgtaaaactgaaatggatggagattttcttctagaattcctttctagctggtgaggtcattctatttatagatatgattctaccccagatcattctcaaagccatccatctgtattgaaagttcatacccttaacttccagtggcattgggtatgtgtgtgttttcttatattttcatgagtttttttatggtaatatgtgtgtggttttatcactgggtgacaaggagacaacacaactacatgctttgctgtctgaaaacgaagtgacaaattcatggtgacaaatcactgaaagacactgaaggaagtgacatcactggtaactgatcataatgyacacctgttatttgcatagtcatttgtgtactgaagaactagcagcaatgtctgtactttatacaattattaacacttaatatttcttggtaattgaaatttgaaccagcaccgcaaacacagtg

SEQ ID NO: 525698 - DNA, 628 bp, Homo sapiens
gacagttgtgaagtttcacaacaagacaaggccttgagtagatmaaaaaaaaaaaaaactcatgaacaaatggtagtctaccaacaatgcacaatgcattaggattaatatatcatctatctatctatgaaatctatctacatacttaaaagttattaaggaaaagaggaattaaagagagaaagcagacattcacattctatgatttgaatgattttgtgcttaaagtagggactttttatacataaattagctaggagtttttctgttaagttcaattttttgttttttgttttatttctttgagacagagtctcgctctgtcacccaggctggagtgcaatggcacaatcctggctcactgcaacctccgcctcccgggcacaagcaattctcctgcctcagcctcctgagtagctgggattggacacatgggccactgcacccagctaattttttatttttagcagagacagggtttcaccatgttgcccaggctggtcttgaactcctgacctcaggtgatccacccgcctcagccttccaaagtgctgggattacaagtgtgagccaccacacctggccttaagttcagttttttataaccttcctactcttagctaaggtt

SEQ ID NO: 525699 - DNA, 555 bp, Homo sapiens
tgactgtcacaagaattacataagtcaatgaagacacaagcacatagtaataaagggaaaactattttagctaatctataaatgctgacagtaacaggtgacaggcaggtagtgatgactataagcattgaatattttatattarcttaattttttaagaactaatttagagttaaatatatgccatctattttggtcataatacagttcataaatgtgtttattacaattctgtgtaatctggagttggtcaaaggcaccaatgtggttgaatccatttacagttcctaaaatacattcagtcatgggttagtattcattactttcgcagaagaataatttaggaagattatcgattgtatctcaagtgactatatgaacaaaatgtctttaatatttcattaataactgtgaaactgtataaattaatctaggtagagcttatggcataggagcctcctaggcatgcttcacattcttggtgctagaattgccaatgtgcctcagcttcctccaaagcaaatcaacataaatccacgtgctttcttactacaa

SEQ ID NO: 525700 - DNA, 486 bp, Homo sapiens
tctgccagtgttggaaaattctgactcgcattcagctactgctacaggaagagctgctgctgcccagatgaagcaccaaggctggggtgactcgcaggagtaggaagcagacaggaaggagcacatccctccccacaagcgccccctatggatagaatctcttatgaagcctgctggcaaagcagaaatgaggtttgcaggctcccagccctagctccacgaagtggaatgtagaaggrtgggtttggagatgagagatagtcttctgagatataaaggaatttagaaggatgcttgacctgcctgagagttaaaaggcttagaagagtgattgctgcaactggattcaatatctagccataatatcaatacttaccaaatgcttcttatgtgccacatatggctctaagtgtcctatatgtgttatttctttacaataacctttaagtctttgtaataatccagtgaggtgtgcactactattag

SEQ ID NO: 525701 - DNA, 486 bp, Homo sapiens
tctgccagtgttggaaaattctgactcgcattcagctactgctacaggaagagctgctgctgcccagatgaagcaccaaggctggggtgactcgcaggagtaggaagcagacaggaaggagcacatccctccccacaagcgccccctatggatagaatctcttatgaagcctgctggcaaagcagaaatgaggtttgcaggctcccagccctagctccacgaagtggaatgtagaagggtgggtttggagatgrgagatagtcttctgagatataaaggaatttagaaggatgcttgacctgcctgagagttaaaaggcttagaagagtgattgctgcaactggattcaatatctagccataatatcaatacttaccaaatgcttcttatgtgccacatatggctctaagtgtcctatatgtgttatttctttacaataacctttaagtctttgtaataatccagtgaggtgtgcactactattag

SEQ ID NO: 525702 - DNA, 502 bp, Homo sapiens
tcatttcgttgctaaagaatcccaaatctatctttaactcaggtctgccctgcaaataccagattcttgtagcaacacattgctgtaacccccacctggatttattctttcattcagcaaatatctattaagtatcataacttgtggtcaggcactgttaggtacaargactacagtggaaaacaatgcagaaatcagtgactttgtggaacatatattatagatgcaagacagtgggagaaatacaaacagtcgataaaatttaaaggtaaaatatagagtatgattgatggtgatatgtactaaaggggaaaaaaacagaaaggagggattgggagatcagagggagaagggaacctacctcttagggaaggtggccataggagacctcactggggaggtgatgtcacagcaaagacctggaggaggagaaggagctgctgaggtgggcacctgaggaaaagccattccgggctgggggacagttgctggaaggctccta

SEQ ID NO: 525703 - DNA, 502 bp, Homo sapiens
tcatttcgttgctaaagaatcccaaatctatctttaactcaggtctgccctgcaaataccagattcttgtagcaacacattgctgtaacccccacctggatttattctttcattcagcaaatatctattaagtatcataacttgtggtcaggcactgttaggtacaaggactacagtggaaaacaatgcagaaatcagtgactttgtggaacatatattatagatgcaagacagtgggagaaatacaaacagtcgataaaatttaaaggtaaaatatagagtatgattgatggtgatatgtactaaaggggaaaaaaacagaaaggagggattgggagatcagagggagargggaacctacctcttagggaaggtggccataggagacctcactggggaggtgatgtcacagcaaagacctggaggaggagaaggagctgctgaggtgggcacctgaggaaaagccattccgggctgggggacagttgctggaaggctccta

SEQ ID NO: 525704 - DNA, 507 bp, Homo sapiens
gtatagtgagtatcacaaatctccctgccctctggtttttggttgggcttcgccaaagagaagtgccagcaagtgatcagaaggtaaaagcagagaaagagattgaggtatttattcttccgtatactcccagccttgcaccgagctgtggctgcaattctaccactctaggtctattacgccatgcttgttccaaggctccagcattcaagttctatctctggcttttctgcctgggacaataagaccttcctgctattgacgattcctggatgtctaacyattccttgttgattcttttaacattgcttatgtgtctgtagatcctgtctttatgaaattatattcagctaaccccttttgagtgtaccattttgttccctgttaagactctaatgatatagtattgagctaaaaactagtgtatatttaattccaccatagtttagagacttaaattggtcttaagatatctagtaaatagcatcgtcttgcatcttatggaaa

SEQ ID NO: 525705 - DNA, 381 bp, Homo sapiens
atagacatgcacacaaggctctctggtttgcaagtggcagaaaccaaccttgaagcaacttcacagagagggagaacttgctggatggataaatatattgcattaagttcaaagtctcattttggaagcaaccaggtccccagaccatagacacagctacattctcaggacagggaaggggagagagaaaaagaaattcttatatcctagaaaagaaaatgccctgcaattttgagtatatatttggtgaaaaacaacttttgcagcatcttcagtttttaggmcaaggatgtcaggattgtgacccattgggtgaggatgcctgagcaacaagtgagagaagcctataaaaagaattctaatttctagtatcaaacaagc

SEQ ID NO: 525706 - DNA, 595 bp, Homo sapiens
taagacagtgtatagagtaggaccctgtcatgagagagataaaaaaataagattaaaagtatatattcattatttagagaaattatcatcagtgttgggattttctatgttctaagtacttttctgtattctccaacgaggatgcactaaatgtgttgattctgtaattagaaaaaaagatattctttaaacaaaagcctatttttcaccaatcctttcattttataaaacaggaaatgtttatgtaaaccagaggagttgcttgctcagggaagggatgaaatttctcctcagttcagaatctggaagcttattcttaaattatcaaaggtawaaaaagcacaagactgaatcaaaactatgaacgctcagagaaatgacacacacttccctctccacttgtaatttcccttcaatggactcccctttcatattaggagagttagtaagtgctttcttccgtagacaaatcatgaaaagcattagagagcataacagcacatggcattttggagcttctcacagaatctcccaatgcgaatatcaaaggattccaggctgagaaaaactgaaatgcagaccttgatattgttga

SEQ ID NO: 525707 - DNA, 639 bp, Homo sapiens
catgagacttaagtgcttgccawttttttgcagctcatttctcttctgctcttatgaatcttttgactctttcttctcatctgtgtctccttatagcatggagaatcccttcaccaaccatccatgatatctcttactttaaatcctttttcctctctaattcaggagtagcatggactatttctgagctgctacaatattccaaacactgtacagggtcctggggttacaaagatgaataaaacagagtctttgccttcaattaacttccaatctagtggtaccaataagcgtagtcaaaagaagtagatcttatgttggaacgacattagaaattgtcacagagatgcaaacagcatgaaaaagacattgggtctgagtataattccaacagaaaatgggtgatttcatgaaagaggtacatgctagttatctgcctctttatgatacattcctcatccttcccttgctctgccctatatcacaggaaggttgcctcctggaaactgtatttcccaggctccttgatacctgactctaggctaggttttgccaatgggagactcatgcaggagattagaggtaagcaggaagaaaacatatttctatctttcttaatgcttcaggtggcttctctgg

SEQ ID NO: 525708 - DNA, 558 bp, Homo sapiens
tccctgccaccaaattcacatgttgtagtcctaaccgccaggatctcagaatgtgactgtatttacatgtaaggtatttacaaaggtaattaaggttaagtaaggtcatatggataggccctaatccartatgtctggcctccttgtaagaagagggaaagaaaccaagaatgtacatgcacagagagaaggccacatggggacataacaagaaaatggccatctgcaatcaaatgagagagagaggactcaggagacaccaagcctgccaacatctaggtatggacttccagactccataactgaaaatggccacctgcaatcaaacgagagagagaggactcaggagacaccaagcctgccaacatctaggtatggacttccagactccataactgaaaacaaatgttgtttaagccacccattctatgatattttgttatggcagccctaggaaactaacaccgaaggcaattcaaaaagtagcatggagccaaaccttgattctagaacccagcaccaaagggtggggataagcttcatgtctttggttgcttc

SEQ ID NO: 525709 - DNA, 623 bp, Homo sapiens
gttccagtaccagcatcgcttatactgaccccactttcaggtgcccacttaccctgggagccccaacactttggcatgttttggtttccagttgcctctatacgcagatctatatcagtgggtgtctgtttcaaggaaagtaactgaggatgctaactaaccttgttacttttttagtagattgaaaaaagatatcacaattgaaatattaattgaccaactattcagtgttcattaagcaaatcagatgttagcaagaatcagccttcaaatgaagactaatatctggtgtgaaaagaatagaaaagctcttacttcaraggttcattaactgtcagaaaaagggcatgacataatccttgatgtgattctgaaccgggcattccacagttgcgtgcatcagtaaagcgaaatttaccaccctccttttatgtgtttttaagccttggtggattaaaagctcttgtttggataaatctaacaatggtgtgttatctacatattattttcattctccttgcctgggaatctacaaacagcaaaattcttcttaatttcacattaagaatattttgatttgacaggttttcaacaacacaagaatcatttgggggagtttctga

SEQ ID NO: 525710 - DNA, 522 bp, Homo sapiens
ataaaaaagaagattctaaaatgagttttttttttttcgtgcaactcaatttacaatatacgtttttggaaggcttcttttgaattcacatgagtagagaaaaccaattatagataattctttgtagattcttagctttcgacttaagaagaaaataaagatcaaggttttaagaacaacaataatgaaaagtcaacccagtgaaatgacatgtatagtccccttgcttctcttttgtactaaagccattgtctgaaaatctcagctactttgccttttctccctttggtagcatatttttctgaaactgctttagtgatttgcctctttcatatttgttggagtttttgtattgtaataagctaattcctgtgttcctctcatacttctcatcctgtaaatccttcctcatgggattcccccctcygccagaatccgactccctctgctgcttcctcctcactcatggcaccatagctgttgcctggatgactgcagcaattgcttccttcttattcagga

SEQ ID NO: 525711 - DNA, 684 bp, Homo sapiens
ctgaggtctggagttcgagaccagccttgccaatattgtgaaacyctatctttacttaaaaaaaaaaaaaaaattagctgggcatggtgatgcatgcctgtaatcccagctactcaggaggctaaagcaggagaatcacttgaacctgggtggcggaggttgcagtgagctgagattatgacactgcactccagcctgggtgacagaatgagactctctcaaaataaaataaaaaaattctacatataggcatattattttcaaactgcagttaaaataataaagccaaagaggaaactttttacaaagctagtgaaaacatcttacctagagaagaacaagtataatcaaacttctcacagaaacattgatgccagcaggaagacaatgtagtaaaatacttaaaagtgttggggaaaaaaataccaggaattctatatctaatgaaattatccttcaaaagtaaagcagaaataaagacaaataaaaatgaaagcaatttatcagcagccttgttctgtaaggaatgttataaaaatttagacagaaaaaaatattatataggtcagaaacctggaaccaaaaaaataatgtcagtgaaggaaaaaataaaatattttatttttgttattcttaactaaaatgtaattgtatttaaagtagtaatggtaaaaatgtattagg

SEQ ID NO: 525712 - DNA, 616 bp, Homo sapiens
cagcatcaacagccagccatgagagccaacaaggacatcacagtttagcaaacaactgccctccaggttagtaatactatctgagatttgtcaaagggctagaaaaggaagacctctccatcttggtagcacctagtcaatgtcttaaaacatgataaaaatattctattttcttactagactccagtttatttataagggctactacattctaacccctttgaaggtccaggataatccatatgaattaataaattccccagatgatattcatgcaaccaggccagcatggaccttaacactggggtttagtawacaaaggcatatgaagaacaagagctttgaagtcaaacagacctacagtcacaacacagctcaatcactttctagctatgtgccctcagaataatcactaacctctttgaatttgtttctttggcaataaaatgggagttgttttgccattagagataacattcataaagtgcttaaattctaggcactaagtaaatggcaactactaaattactaattagcataagaattcagtggccaaactaaggtggggcaaattccagtagaatatattttgaactaaatcaaaatgatcatcaga

SEQ ID NO: 525713 - DNA, 582 bp, Homo sapiens
tatcaccattttagggcggaaattcattggctttaaccaactactttgaatcagaaataaaattaaaagcaagagcctgcgcaagaaagataaacttatgattcactgcatgttgcagcagccacaggaggttgaaattttttttcctgatagggggtcagaagaaaaaaataatcttgtwcctggctgctcttgcagataaccccaagagagaggaactggcctgctgtgcaaatgaggttcaagaggatgattctatcctcacttaactctttttgctagaataatttattttacaataaaagtaatatatgttgcttctcacggcctcctaccaactcatctgggaagcaagctccacgcttcagagtgggtgggctcttgaagcatgagaccatgaaagcaggaatttgtgagtgatatatttaatagaacttatttggatatttcctcaatgtaaaatagcactattcattataggcaatgcagaaaataaagtagagagatggaagcaagcatctactacctcatcatccaaatcatgttattttagcatttggggatgattgacaagtggataga

SEQ ID NO: 525714 - DNA, 582 bp, Homo sapiens
tatcaccattttagggcggaaattcattggctttaaccaactactttgaatcagaaataaaattaaaagcaagagcctgcgcaagaaagataaacttatgattcactgcatgttgcagcagccacaggaggttgaaattttttttcctgatagggggtcagaagaaaaaaataatcttgtacctggctgctcttgcagataaccccaagagagaggaactggcctgctgtgcaaaygaggttcaagaggatgattctatcctcacttaactctttttgctagaataatttattttacaataaaagtaatatatgttgcttctcacggcctcctaccaactcatctgggaagcaagctccacgcttcagagtgggtgggctcttgaagcatgagaccatgaaagcaggaatttgtgagtgatatatttaatagaacttatttggatatttcctcaatgtaaaatagcactattcattataggcaatgcagaaaataaagtagagagatggaagcaagcatctactacctcatcatccaaatcatgttattttagcatttggggatgattgacaagtggataga

SEQ ID NO: 525715 - DNA, 496 bp, Homo sapiens
agctgaatcctttatattataaactcccaactgaaatctgttttttacatttgttacatcagccctagggaactaatacagatagatgatagacatctagatgataaggataaaaatgtagatagatagatgatagayagatagatagatagatagatagatagatagatagatagatagatggatgcaagctggtcaatgcccttggtaattaaatttacttctgattatcctggaagccatgacaaaaagaaacataggatgggttggaaatttttttaattggaaaaagaagaagttaacctatatttagttctagattctaaaataattctttttgaaaaatggcattgagtaagagagttagcaatgtttacaagatgcaaaaacatttctcctctggataacttttatattgatcaaacatttgaaggaagcatagaggaaaatggggacttagggagctagcatgtctgtttcctaccatgtaatagaa

SEQ ID NO: 525716 - DNA, 424 bp, Homo sapiens
tgaagacagttctatatttgaatcccagctctaccarctgtgataccaggacatattatttgagcattttgaggctcagcttctacaaactggggagatagtcatatatactttataggattgtggtaaaaatgaagttcgatagtgcttttcaaatattgagcatattcctacatatgataaccacacagttacccatgttcttaaggattatgaagtttcaccatatatgttacagggctatatggatttatcagcaatttcaaacaaaatcaagtatagaccaaaaaaaaagatgttttgaaaaacaagtgaaagccataaactgttgagatgatgcatctaaaatacagcaaaattttttccattgcagtttttaacaggccaaattcaggggaacggcagttgggaaattctagatgta

SEQ ID NO: 525717 - DNA, 604 bp, Homo sapiens
attccctgtgccaaatatctagatagatcgatagatacatagataaatagaaggtgtagttacaattgaacatagtcaacaatagaaataggatatgttaaagatgctgaaaacctccatagcttgaaaagttgtgagaatatgcaattaacagtttacaacagaaaatggttaacacatctcttaactaggaattaaaacatttggagtaagactaagagtcaagcacctggctagaatattagaacctgagagtgaaatctcatttgcttagtgcaataggactttactcctataatagagaatgagtccagcttattaacatttgaagaaattataggcactgtctttttaaataaaaattcgaatttatttttattaagacaaggaagcaaagctgaacactgcttcctatcttwggcctcactgcttttcttactttttgcctttgctcctctttcccaggtttctagccaataccactttcagaggcctcagtggttccatcagagtaaaaggttccaccatcgtcagctcagaaaacaactttttcatctggaatcttcaacatgaccccatgggaaagccaatgtggacccgcttg

SEQ ID NO: 525718 - DNA, 428 bp, Homo sapiens
ctactgaacaggacattcatatgtagaacattttcatcatcatggaagkttctactggacagatagtctggagcctggcctgtgaacactgatacaattttgctctctctgaaacataaacccctgaccgtagctccctggtgcatgtcagtttatctcctccttcccgttgctttaaattgatattctcttcctggaccccttgccaccagtcagttgcactgcagacatgggcattacccaggtggcatctgcatctctgaaagcagtatcttgccagtagaccagatctctcccaaacctgtgacttccccaggggcctctcttccaggaaggagagaaatgtagacatcaccgaagtgtcccctttcaccacctgcacatatgagtcatgtttggaaaaggattctggggtgggcaggagcccc

SEQ ID NO: 525719 - DNA, 640 bp, Homo sapiens
atctgcatgatttctacttcacctcattaacggccatgctctctctctctctctcacattcctcagtgcaggactcaaatatatttctgttcaatcaagtgaataaataaattaatgtataaattgttatattacaaggtatagtatggtttgtattttattttatttttatttttcttgagatggattttccctctcatcaccaaggctggaatgtaatggcaccgtctyggctcactgcaaccgcttgaaccgggttcaagcgattctcctgcctcagcttcccaagtagctgggattacaggtgcctgccaccacaaccgactcaattttgtatttttagtagagacggggtttcaccatgttggtcaggctggcctcaaactcctgacctcaggtgatccgcccgcctcagcctcccaaagcgctggaattacaagcgtgagccaccgtgcccggcctggtttgtattctagtagaggcatgaagtattatggatgggccaaggaatgataatagcaactcaaaatgaagtggccaaggactaatatacccaatcgtgggttaatgggacataaagtcagagaatcaattacaaagaaaagaggcatacctaggtctcacctgccttctagtgcag

SEQ ID NO: 525720 - DNA, 433 bp, Homo sapiens
ttgcggtgagccgatatcgtgccactgtactccagcctgggtgacaaacgagactccatctcaaaataaataaataaataaataaataaataaataaataaataaataaattatttatttggaatccacacctgaacctcaatctcatgacttcatagtcccacaatgcactctgtagagagagaatccatttggaaagttctctgacctcatgatccacccacctcagcctcccaaagtgctgggattacaggcatgagccaccgcacctgaccagattccaaattattatagtaactttaccrtatacatatatttgaacaccaagccaccattttggctctctgttcccatactcagttccagtgcagcaatttcagactcccaggccccaagataagcacagactcttcactaaggaaccccagaacca

SEQ ID NO: 525721 - DNA, 568 bp, Homo sapiens
tggtactgtcaagcccatcacattagtcacgatggactattactcagtcttgaaaaaaaaagaaggaaattctgtcatctgcaacaacatggatgaaccatgttcaaggagataaccatgttataggaaacgtggaggccaccatgttaagggaaataatccagtcacagaaagacaaatactgcatgattcgacttatagatggcatgtaaagtagggaagctcatagaagtagaaagtaaaatggtggtttccaggatctcgggggaggaggaaatggagagttgcttttcagtgagtatgtggtttcaattgtgcaacatgaaaaagttataggaatctgctgtaaaatagtgtgcttatagttaacaatattgtactttacatttaaaatatataaagaaggtagaccttgtgttgtgtgtctatactgtaataaaaagttcacaaacactttcaccttcattattcraaatattcctcataaaaacttcatgtggaagatattattcttccagatgaggaaactgagattccatacatctttaataacttgcccaagatcaca

SEQ ID NO: 525722 - DNA, 502 bp, Homo sapiens
tccacaatgtgaacttctcaacaacccctgcacctgccacttccctgaatcttccactaagcaccagaagacacatgcattttaaatcaaaggaatgtgagttggaatttcagcttctgccattcactgacaacatggccttgaacccttcataaactctaatatcttccactgcagaatgagatgatggtacctatgttgtagcattgtgaggattcaaagagctcttgcacatgcaaatatttagatacaccctactcactaaaaatacaaaattgacattttcctccatcacttgctgcttctttcttcctggctgtagagggacatggytctggtttcaaattctagacttccctgttctaccactgggctacctgtagaacttgggtaagtgacctaacctttgtgagtcttaattacagtagttacctcatacagtggttgacaggtttaaatgtacaaaaaacagtgtagagttctctacataatgtaatcactc

SEQ ID NO: 525723 - DNA, 603 bp, Homo sapiens
gttctgagatgcagtgcctgagaatctgggatccacaatgtgaacttctcaacaacccctgcacctgccacttccctgaatcttccactaagcaccagaagacacatgcattttaaatcaaaggaatgtgagttggaatttcagcttctgccattcactgacaacatggccttgaacccttcataaactctaatatcttccactgcagaatgagatgatggtacctatgttgtagcattgtgaggattcaaagagctcttgcacatgcaaatatttagatacaccctactcactaaaaatacaaaattgacattttcctccatcacttgctgcttctttcttcctggctgtagagggacatggttctggtttcaaattctagacttccctgttctaccactgggctacctgtagaacttgggtaagtgacctaacctttgtgagtcttaattacagtagttacctcatacrgtggttgacaggtttaaatgtacaaaaaacagtgtagagttctctacataatgtaatcactctgacagccaagccattctctttactctactcatcattatcaatttctgtgattactattacattatggtt

SEQ ID NO: 525724 - DNA, 540 bp, Homo sapiens
aacggtctcagagcactggatcaattgtcttgggtattcagtctgaagaaagaggacttacctgagggctttgattcatggggcaagagagtgattctagggactttctagcagagatttttgttgggataggaggtagagggtgagaacagtgggtagtaaggcacaaggtggatgacagtggtggtggaaggaaagaggttggtgagaggctaaggtaggtgtttcctgttgctttcctactgtatgggttgagtaatccccccaaaactcatgtccacttggaacttcagaatgtacttggaaatagggtctttccagtgtaatyagttaagttaaaacgaggtcatactgtattaggtatcctaatcctagcaaattcaatgacttgtgtccttacaagaaaaggccagatacagtggctcacacctcccagcactttgggaagccaaagcgggaacactgcttgagctcaggagtttgagaccagcttgggcaacatagggagactctacctccataaaaaatataaaattagca

SEQ ID NO: 525725 - DNA, 620 bp, Homo sapiens
aatataaaattagcagggcgtgatggcacaggcctgtggtcccagccactcagaaggttgaggcaggaggattgcttgagccctggaggtggaggctgcagtgagctgtgatcctaccactgtactccaacttgggcaacagattgagaccccataagaaaagaaagaagaaagaaaggaagaaaaagaaggaaagaaagaaaagaaagaaagaaagaaagaaagaaagaaagaaagaaagaaagaaagaagcmaagaaagaaagaaagaaaaagaaggaaagaaagaaaaagaaggaaagaaagaaagaaagaaagaaagaaagaaggaaagaaggaaggaaagaaaagaaagaaagaaaaagaaggaaagaaagaaagaaagaaggaaggaaggaaggaaagaaagagaaaaagaaagaaagaaagaaagaaagaaagaaagaaagaaagaaagaaagaaagaaagaaagaaagaaaggggaagtgaaagggaaaggaaaggaaaggcaaaggaaaagagagaactgagagacagatacagggggaagaggctatgtgagatggagatgggaattctgttcccacaaggctgaggaggctgaggtttgccacagccac

SEQ ID NO: 525726 - DNA, 630 bp, Homo sapiens
cagtgctagtgagtggtgtctgagccacatgaggctgactgtagactgggcccaccgttccaccgcaccatgccgagtctcaagaatgtatrtgctctgttgaaaatcaaaccctggctcctgagtgacagatggaaacactggggtgaatcgtgttgattcacttccataagcatttaccaagccccttctatgccaggcatacaccatgatcagcactggggagacagagggaaaatcttgagcaagtgaacttccagctgagacagagacacaataagctaatggacaaataaagtcattttagaacatgctcagggctctgaagggaataagaggaggtgaatgaaagtgatcatatgaaggggcaattaaagttgggctgtcaaggtctccaggagcccaagttccagggaactcctgccaggttggagcttcttccaggctgtgcagtttgcctcgaagaccacgttctgatcctgtgggccagcaggtgtgttacttgctggccaaggacctggggttctatcatcagtaatgtttgccaaagggactaagcagtttttatttctaaggcaaggtaaatcctgcaacagtcaaaactggcctgtgataaagatttggtgaaca

SEQ ID NO: 525727 - DNA, 630 bp, Homo sapiens
cagtgctagtgagtggtgtctgagccacatgaggctgactgtagactgggcccaccgttccaccgcaccatgccgagtctcaagaatgtatatgctctgttgaaaatcaaaccctggctcctgagtgacagatggaaacactggggtgaatcgtgttgattcacttccataagcatttaccaagccccttctatgccaggcatacaccatgatcagcactggggagacagagggaaaatcttgagcaagtgaacttccagctgagacagagacacaataagctaatggacaaataaagtcattttagaacatgctcagggctctgaagggaataagaggaggtgaatgaaagtgatcatatgaaggggcaattaaagttgggctgtcaaggtctccaggagcccaagttccagggaactcctgccaggttggagcttcttccaggctgtgcagtttgcctcgaagaccacgttctgatcctgtgggccagcaggtgtgttacttgctggccaaggacctggggttctatcatcagtaatgtttgccaaagggactaagcagttttyatttctaaggcaaggtaaatcctgcaacagtcaaaactggcctgtgataaagatttggtgaaca

SEQ ID NO: 525728 - DNA, 595 bp, Homo sapiens
ctacattacaggaattcttagactattaaagtgcaggttccattgtggaaaaacacaagttgttcacaaggccttcaatagctcatagtcttgttgctaattgaagaataaccagaccagggcttcctgggactggcaggctgggcccactgacacattattgtttcaatggtacttagtctgtgggggattttgtttgtttataggcttctaaatttggggttcatggctattttataagtctatgtaatcctcaattttcttatgaattgtatacctatgttttatttaaaagtgtatcattcctgtgattattacatatggcatgcctgtaacaaaatatctcatgtaccctataaatataaacacctactatgtgccaataaaaattttaaaaaatttattatagtttaagttctgggatacatgtgtagaacgtgcaggtctgttacataggtatacacatgtcacagtggtttgctgcccycatcaactcgtcatctatattaggtatttctcctaatgctatcactccccttgccacccacctcccaacatgccccagtgtgggatgctccctccctatgtccatgtg

SEQ ID NO: 525729 - DNA, 588 bp, Homo sapiens
gctgcagatggaattggggtgtatttgcactgcagtgcagccatttaagatgattgggtacctctctatgttctgatctggaaatatctctatggcataggtgaaaaaaggaatttgatgacaatgtgtgatacaatgctaaatatgttaagatgtttaacataatatgttatgttaatatgttaaatatgttaactactaatttttacgtgtaaaaatgtatataaaaggtcagacatcaaactgataacctttgaagatacagctacaattagaacrggggacagtagtagccaagggaacttttactttatgtgtaatttagaatagttcaaaattaatatgtcccaaaatggtatattcatgtatttatattcagtattgcttttttaaatgatggaaatcaggagaggaaaagtcagagacagcaggacaggtctgggagagctgctctgtttgtttccaggagcagggctaagcccggccctctgaaggtgctccacgaggtggggctgcacactccagctcccagtccatctcaggcatgccgcagtgtgtccacgctgcagctcccctgctgcaccagca

SEQ ID NO: 525730 - DNA, 575 bp, Homo sapiens
ccacatgactcacagcacctgcttctcgcttccctggacctaattaatctccttgtgtcagaaatttgttggccctgagccgactccaggggatgatggtgccagctcagcacaccaggcagggccaggagccaggagccagcacagggtatgcaaggcctagacagcaaaaggagagaaaggagcagaaagcygggaatgttcctaggctctaggacagactagcaagtgtcaaaggatgattcttgagaaaagaaccatcccaagattttttgacagctccaataaggaaataataaggtctgtgctgaaggaggccatgacaatggcctccttgatatctaaggcaggatttcaggaaaacctttggggacagtgagaagtaggggacacgttgctacagaggtgcccagggctcttgtctgaaggcaccatggactcttctggatcagagcactcaatgtgtccataatgtagtcattcaaaaagtccttttaatacagcacacagcaggacaagttattcgttgtatgacacatggctgcttggcattattccagctttctgtattactg

SEQ ID NO: 525731 - DNA, 603 bp, Homo sapiens
gacacatggctgcttggcattattccagctttctgtattactgtcaccaaataaattaaaaattaagaaatagagatattttagataatcaagtgttattttccctgcccccatccccatctcttcatttctggaaaagccacagcccaggtgcctctgtgctgggaggtgagagtatttctgaagaggtggtagaagagaactaatgggattatccgccagagtgatcatttgcaaagagtagctcatggttgctggaaaggtttccactgccatcaccattgaccacagttatttgctctactgtggtgaaatgattttaataagttatctgaaatcragtattattaagttatgccagtcgaggggctctgcccgggtgggccttaaaatggcccacttacaggagataggaagctgcatcccaccagaattatgatgtgaccttaggcacattgttaacctcaagttgttgaatctcctgagtctcgtttcatcatgtgtgaaatgagaaaacaaggcagttgtcagggttcgaggagctaagagatgtaaatcccttagcatggtgtcttgtcacatgtgggggtgctcagtcaggtc

SEQ ID NO: 525732 - DNA, 354 bp, Homo sapiens
ctggcagcaacaacagcgctgagggagctggcctgacggataatggatgtcgccgccgccgacaggataggaccaaggagaggccacsactgaagaagcaagtgtctgtgtcctcaaccgattccttagacgaggacagaattgatgagcctgatggattaggacccaggagaagttcagaaaggaagagacatttagaaagaaactggtctggccgtggggagggtgagcagaaaaacagtgctaaagaatatcgaggcactcttcgtgtcactttcgatgcagaagccatgaacaaagagtctcccatggtgaggtcagccagggatgatatggatagaggaaagcctgaca

SEQ ID NO: 525733 - DNA, 354 bp, Homo sapiens
ctggcagcaacaacagcgctgagggagctggcctgacggataatggatgtcgccgccgccgacaggataggaccaaggagaggccacgactgaagaagcaagtgtctgtgtcctcaaccgattccttagacgaggacagaattgatgagcctgatggattaggacccaggagaagttcagaaaggaagagacatttagaaagaaactggtctggccgtggggagggtgagcagaaaamcagtgctaaagaatatcgaggcactcttcgtgtcactttcgatgcagaagccatgaacaaagagtctcccatggtgaggtcagccagggatgatatggatagaggaaagcctgaca

SEQ ID NO: 525734 - DNA, 494 bp, Homo sapiens
agcccaggtatccatttgtttcagtcactgagagagactctgttaggggcaatagagagtgctgagaactgctcggctgacaccttggggatgaggaggtattttgccaatgcccaaacccagtgctttctgtttgtgggagagggtaatgctgagccaaacgtagcctcttcgtgccrtgacgaagtggagatttaaaattaggaagcattcagcatgtcagtttagttacatggtgttattgtacagatttcagtcaacttaaccagatacgtatgaactgattagctaatcacttaaccgacagcagcaattcaagggtgccagtttttgtgaatgttcaagcagaacattagaaagcaccaaagcctctgattttaaattaatctttggctgtttcccttttttaggaggagatatttcatcaaatactccagactatgcctggaatagctacattctcatctaggccacaagctgttcaaggaggaaaa

SEQ ID NO: 525735 - DNA, 494 bp, Homo sapiens
agcccaggtatccatttgtttcagtcactgagagagactctgttaggggcaatagagagtgctgagaactgctcggctgacaccttggggatgaggaggtattttgccaatgcccaaacccagtgctttctgtttgtgggagagggtaatgctgagccaaacgtagcctcttcgtgccatgacgaagtggagatttaaaattaggaagcattcagcatgtcagtttagttacatggtgttattgtacagatttcagtcaacttaaccagatacgtatgaactgattagctaatcacttaaccgacagcagcaattcaagggtgycagtttttgtgaatgttcaagcagaacattagaaagcaccaaagcctctgattttaaattaatctttggctgtttcccttttttaggaggagatatttcatcaaatactccagactatgcctggaatagctacattctcatctaggccacaagctgttcaaggaggaaaa

SEQ ID NO: 525736 - DNA, 615 bp, Homo sapiens
tgaccctcagcagaggaccatggatggcatcaggcctacatttaggaagttggcaatgtcttcagaatgtaactggaagagttccaaatgatcaacctgtcaaaaaccatctccccgggtgcggacctgaaatttttcctgggtgtagaatgcagacagaagagaagataagggcgagttatgggtgggaagacaacattaaaacgtgggagaggaaagacagccctttgtagggaggcaatttcaggggccatcaaacrtaaacttcaccttcctctcagcctcatccatcctggcctccactgtggtcctgctgaaggctttcttacaggtcagactcaaggtgcatggttcttttgtagcagttccaacatcaccagtttatagaaaccctgaacctgcccccgacagcacttcatgtaatattttatcataaagcaataataataatactaatgtggtatctaacatttaggagacatcccagctatatgttaaaatcactatcttcattttatagacaagtgagaaacatttgataacctgcccaagtaacagctaatgaatgtcccaagcccagttttcccagatagcaaagcccaagctctttcccag

SEQ ID NO: 525737 - DNA, 615 bp, Homo sapiens
tgaccctcagcagaggaccatggatggcatcaggcctacatttaggaagttggcaatgtcttcagaatgtaactggaagagttccaaatgatcaacctgtcaaaaaccatctccccgggtgcggacctgaaatttttcctgggtgtagaatgcagacagaagagaagataagggcgagttatgggtgggaagacaacattaaaacgtgggagaggaaagacagccctttgtagggaggcaatttcaggggccatcaaacgtaaacttcaccttcctctcagcctcatccatyctggcctccactgtggtcctgctgaaggctttcttacaggtcagactcaaggtgcatggttcttttgtagcagttccaacatcaccagtttatagaaaccctgaacctgcccccgacagcacttcatgtaatattttatcataaagcaataataataatactaatgtggtatctaacatttaggagacatcccagctatatgttaaaatcactatcttcattttatagacaagtgagaaacatttgataacctgcccaagtaacagctaatgaatgtcccaagcccagttttcccagatagcaaagcccaagctctttcccag

SEQ ID NO: 525738 - DNA, 186 bp, Homo sapiens
acgagtcctttctgttggcagctcctctcctgcacagatttctcatttgtagctttcctacggctgtgtgtgctgcctcctcaggaaagccatgggtcatttgtcayggaattagggacaaaagtcaccaaatcattttgcttctttcctcagaagcctaattcccatttagtacagtatcttaca

SEQ ID NO: 525739 - DNA, 559 bp, Homo sapiens
ggtaataaccataaatcaatgcatgtcatacactgtggatggagcatctggccacagatactcaccattactgacgggcatctgaaatgccagctagaaatgtgaagggtgtagtttgtaggcattcgtgacacatccgaaggtgtagaggttaaatgccagcagccctgccatagctccttggctgtttccttcggcccgtgcattcattcgacatgtgcatgctgagccaggctctgagctgtagtgccggggaacacagcagtgaacaaaatggacaaagtccatgttctcatgaagctttcattccagtgaggaaagattatgaacatatatgcaaataaatatagaatgtgtccagcagtgatgaatgcagtaaagtttttaaaaggcaaggtaatgggtttgagagtgttggggtgtgctcttttatggaagggtcagggaagggctcgctgagtaggtagcrtttgagcagagacgaggtaaatgaaccatgaggctatctgagggaagagtgttgcagggagagagaacttctgggtgccaggacccagag

SEQ ID NO: 525740 - DNA, 597 bp, Homo sapiens
ctggccccggtgcccgcccccagagccaggagcaggcacgcagcgcagcttccggtccaggccaggcccgcgcagggcgggagcggccccttagaggccctgcgcgccggaggcaagggggcggcgcgaggtccctctcaacccatgtgaatttaagaagagttttttctaattctgtgaaaaacgatgttggtaatttgataggaatagcactgaatctgtaaattgctttgggcagtatggccattttagcaacattgattcttcttactcatgagcatggaatgtttttccatttgtttttgttgtctctgatttctttcagcagtgttttgtaactcttgttggagagattgttcacctctgtgattggctgtattcctaggtattttattctttttgtggctgttgtgaatagaattgtattcttttattattattatacacyatccttctgcagcatagaattgcatttttgatttggccctcagcttggatgtttttgatgtatagaaatactactgattattgtgcgttgattttgtatcctgaaattttactgaagttgtttatcaattctaggaggctttgggcaga

SEQ ID NO: 525741 - DNA, 583 bp, Homo sapiens
tttgctgcattgctgatgatacatgttgatcaataattgttttccaaaaaataaagttttgatttgtgtactataaaaatcattgttcttttaaggctgaaagaatccctgctcccaaaaaggacatgattccttggtagaaaaaaactgatccctgagaaaattcaccttcagcatagctggtttcctagatacacgttttccctttgaatgtgatagccacagtggcaaagcttccagacgagggtccagttaccatttccataccgctgaaaaaagtaattggatgtgcagcattcatatgcacacacagcttattctgttaattgaggcataaaacacggtatgaagaactgayaaaaatttttttcttaggctcctaaaatgtttgtgaggtccaaaatttatcagcaattgaggtgtaccatgtaaagagttgccatacattatttgatcacaaaatcatgtggttcttaggtaaatggcttaattgtatagcatttttaaactatgtgtaattgtaagacttggtgttatataatttggttgctgttgctcttcattaaagacttttgatagtaat

SEQ ID NO: 525742 - DNA, 655 bp, Homo sapiens
ctgcatttcatgtttacatacagtttttacaagctgtgtgggcagcccaagcagcctcaggcaggtggtccagttccaattctgaaccattgcaaaatgagactctagacttcaaaaaagtcagggaaaggcaagacctgatccagaagtctgtgtcatctaagttaggccgatagttctgagatgcacttctttctaatcattagccagtttatcataaagtggatctaaagttgtgagggccgtgtaagagctactcttcctgacagygttgctgaatggtggagccagccagaaggttctgaggcattagaatattttcctttgggtttttacaagacaaggaaggcacctacctgcttcaggtgccatatagactgttgtatgtgcttattggagcctgaaactatggtgtctccacttatccacagggcatggccttcaaagacgctctttccacatacaaggtgtgggtgtggattgactcatgttaacccccatatcagaggtggtttggcagaggggttaggagactagactccacctaactctctaaatcctggctccactgtttattccctctgggtttggggcaagtggcctaaccgcttggtgcccacattttcctatacatgatataggaacaataaccgca

SEQ ID NO: 525743 - DNA, 580 bp, Homo sapiens
ttagatggctacttctcaatgttcatgttccttttagttcatttatgcttctgtttggtaaaccttctacagggaccaacaaattgctcaaaggcaaaggccttggtccctattttttttgtaacactgttcacacagtgactcccccatgtctctgagtgggtggagaggaagttatacagggcaaggggagcacagagatgtgctgcttagtaagagtttctttacgtttttccatttcctgtaattggtgcattggtatttccacaactcctgcacattaccactgtgtaggagttagtgtcatatttattgacaggcacctgttaagtcaatggaacatacagggtgcaggcatggattagggcctgaagatcttactctggattatgagacagagctacttcttttcctgtctcgggtatgcatgaacacatcacatcayggctttcagtgttcagtggtgactggtacataggtctgggaaggaacttaggggtcattgtctacttccctcatgaggagactgagacagaaaagggcgcagtggctcatgcctgtaatcccaacactttgggag

SEQ ID NO: 525744 - DNA, 617 bp, Homo sapiens
cttgctgccttttatgcaaaattaccaggccaagtataataagcckaaaacttattttgcacacaaattggtcttgctataatttctctttaatagaaaaaaagggcggggggataaaggaattgcttcaaaggaaaacatttaatactcaatttcagtcctaatcttttttttttttttttcagtggagactgaaacatcattttttggctatggtaatccactagcaagtaccagattataatttttcttcgtatttttagttggtaccctaatggaataggttcctttttctattctgacgcacaaattgctcttttaatgatcaaactgtaaatgttatttatctcttcttgttttacttccaggaaaacccaaatcatgatattttgaagatcagagatgtggctctccgtcattttggcatcccactgggccgggatctgtatttcactgagaatgctctgctgcacaaactatacaagcccccttccctctaggcccagctactgtcacagaagaggagggggcagaagattgtaagggctggttttaaagaaaaaaattaggtcaaggtcaaacctccaaatcaaggaggggttacaaaaatgcctaaa

SEQ ID NO: 525745 - DNA, 639 bp, Homo sapiens
tatagtttccttagtgaagaaaaggagaagagaataagatattcaagcaaggttaaaatattgaagcagaaataaaataagctaataacgggacttggagggtgattaaaaggtaactagcaaagactctggatttgggaaaaggaaaagaagcatttgtgatatctatctctctttcctgcagttctctgcttaatttttgctgagtaactcaacttacatttatagaatgtggggagggagcaaaattagaactcaatgttatcaagggctagttcctttggccctgagagtctctgtcttcgctcagcttgcttctaacaccacaaagtcatgtgaggggggatacacagaaaggcaaacgtatattttgtggaacacagataagatataagactctcagactgtggctggaatgatcaaagatccaaaaagcaaggttaaattacaatragaaagaggaatgaagcaatggaaagtccagagcctgagatataggaaaggaatatcttcaaaggcggagtgttaacctacttcaggcattaaatatgcagttctaagcattaaaggatcaagaactaatcctggcacattcctggtggtttacaaaaatacatgggacatgttttataatgaaat

SEQ ID NO: 525746 - DNA, 560 bp, Homo sapiens
tttgcaagcgttctgttatgtaatcccgaccactgccctttttgagaggcagctttagatgcctagcttcaagcaaggctctgctgagaaactgcctggttcaaatcccgtttggctgctcactgggtgggaactccagctgtaaaatggggtgagagtacytgcctcccagacgtctgaggagtaaatacgctaaatacgtaaaacaatatctggaacatagcagctgcaatcgctaagtgtctactaacagtgcgaggaaagtactattaggatcccatttttatggaagttaagtggcttgccaagggtcacagttactaattggtagctatgagattggaacctaggcagtgtgacttaaggttactataattaataattttttaaattgaacattgaggcccagtgagaaatatctgtattaggctgattttcccaaagtatttacatccaaactttttgaatttgaatatttgagttttctttttaaactagcattgaaaaaaagtaatgcctttttatttcgaagaaaacaaaatatgcaaataagcatgtgg

SEQ ID NO: 525747 - DNA, 560 bp, Homo sapiens
tttgcaagcgttctgttatgtaatcccgaccactgccctttttgagaggcagctttagatgcctagcttcaagcaaggctctgctgagaaactgcctggttcaaatcccgtttggctgctcactgggtgggaactccagctgtaaaatggggtgagagtacctgcctcccagacgtctgaggagtaaatacgctaaatacgtaaaacaatatctggaacatagcagctgcaatcgctaagtgtctactaacagtgcgaggaaagtactattaggatcccatttttatggaagttaagtggcttgccaagggtcacagttactaattggtagcyatgagattggaacctaggcagtgtgacttaaggttactataattaataattttttaaattgaacattgaggcccagtgagaaatatctgtattaggctgattttcccaaagtatttacatccaaactttttgaatttgaatatttgagttttctttttaaactagcattgaaaaaaagtaatgcctttttatttcgaagaaaacaaaatatgcaaataagcatgtgg

SEQ ID NO: 525748 - DNA, 622 bp, Homo sapiens
gagagctgtagggggcttttcctgcctaacaacattttcaaaatgtgtaagcccttgaggtttttgtacgatctgggggaggggagggagtcatgagagtaagatagtgctctcctctgcctttggtggatgggaccaggaaacagttctaatttagtttgcaaaataaatgaaggaggtcttccttgcatccttggaatatggagctctttggactgccaaggtcatctttgcttctccctggccctttctctcatcagtgctctctcttcgccttcctctcagcctcacrcctcagtacactccctcttcctcctcctccctgcagactgcaggcatctgtcttggagctgcatttacagactattttctctttttcctttttaatattagagaaggttatgaaaacatgaaggaggagatttattttgttatgatactgactttttgtccttacacagttaaaaaacataaacagagtaaagcactttaccagcttaggccttagttgcaatctctttaaaatgcaggggttagaatctctaacagcctttctagttcaaaagtcttgtgatctttgatatagttgggaagtactattcagtcatattcacacacccag

SEQ ID NO: 525749 - DNA, 521 bp, Homo sapiens
tgattttggaaaacagtggtagtttcttaaaaagttaaacataaattgatcatatgacccagccattcaactaccaggtatttaaccaaagaaaaataaaaacatatgtctacacaaagatttgtatgcaaatgttcatgacaactttatttgtaatagccaaaaactagaaaccctccaaatgttcatgggcagcaggtggaggaacaaattgtggtacacccgtcttcttttgatgacccaattgatttcacatcaccttctgtactttctccagttccccaagtatcttctgccattgaggccagatctgcccatctatacactatcaggagaaactggaggcttctatttttcatgttcaccctgttgagagaacccacagtctggtgggagagacagatacacaagtcagccatcccagcakctgtcttgtgtgatgttctatgaaagagaggctgtgtgctaccccaggaacaaggaagatgcaggatagcaatgaaagaaggcttctcaaatat

SEQ ID NO: 525750 - DNA, 607 bp, Homo sapiens
atatggtgcccacccagattaacggtgggtctgcctttcccagcccactgactcagatgttaatctctttcggcaatacccttacagacatacccaagattaatactttgcatccttcaagccaatcaagttgacactcagtattaaccatcacactggggtttcacttagcatcactaggagctgggtctacttcatcctttcccagcacacagcctggcagatactaggcctgcagaaaagtttggggggaaccaacatcttcaattcccagaacgtctgatttgcaaagacttrgaggttgtctaaaccaatttcccaccaattttaggaattcctcttttagaccattttgcagatagtcttctagtctctgcttacatacttcccgttatgggagacttgctattactcagggcagcccattctctttttttttaaaccaccctaattttagagctttctaattttactcaataggattaattttttcaccatttgcatcaagttttggctggagactgcaaaatcatgcagtgagagagttggtaaataagaattattctgggtttatggatgacgttatgaaatagtgaaaaagctgaca

SEQ ID NO: 525751 - DNA, 637 bp, Homo sapiens
tgctctcacagtctggcataattattcccaagggggaaatatgtaataagaagttttaaaatattctcgggaactcttttctagatcactactagacagcttttgagtcacaacaggtatgttaccctgttactaataatacagagcagcacagtgcagtcatccctcaccaccaaggtttttattccaaaacagttatttggctagacgtgaaccgttaagatacgggatcaatggagttacaataaagacaatgaaagtgacaatttattaatacacagtaagttctagaaggcatctttcaaaacaaaacttgatttcttttgtatttacattttttgtttcaagtcttagcaaaatgctaaaaggcctggcctagtcacaattactgacatccttctgggacacaattttctgggcctgtgttgaatgaggataaattatcttttctctaaaatgccacatgaaccctctctatattcccacatgaagaggaatggaaggtaattatttggtcttttcttctgtttaggggaatgaactgaacsactcatttttttaaaatcacacttaaaagacacatgggcaaaaaagttccccaaaactactgtcttaccgaatttgagaagggaggtaa

SEQ ID NO: 525752 - DNA, 348 bp, Homo sapiens
gggtagcatgggagtatacctcagaatcatctaacctggtgacaggatagggcctgggcaggcttctcaaaatttttttttaaaacttaagacctgtaggatgcaaaatagcccagtaggaggtagaggaagacagttctagggaaagygtgtgaataaaagcctataggtgagaagaggcatcacaaatctgaagaaatgggataactttaagaaagctgcagtagagtatgcttgaagatgaggcagaagagggaggttgagtccaaattatgaagaactttatcagcttttcgcaagccttttggatcttatcctaagagtaacaggaagctgttgaaggatttt

SEQ ID NO: 525753 - DNA, 281 bp, Homo sapiens
cttgggtctaaaaatacaacttcctgaccatataatggggaagatgtggtttaacagaaatatgtggaaaggcttatgaattgtagttgactgtgtgctagatgatatggcttcccaaaagactaatgctrtcttgagctgcattatgtactcctagatatttgtattttttaaaaacaacattgtaggtgaggctgttcattggcaaaaacatttagaaggcgatctggcaaaattatccaaaattttgtgagttataggtctttttggacatggaatcc

SEQ ID NO: 525754 - DNA, 615 bp, Homo sapiens
aggtttaaggacttttttttttgagacagagtcttgctctgttgctaggctggagtacagtggcatgatgwcggctcactgcaacctccgcctcctgggttcaagtgattttcctgcctcagcctcctgagtagctgggactacaggtgcgcgccaccatgcctggccaattttttgtatgttagtagagatggggtttcaccatgttggtcaggctggtctacaaactcccgacctcaggcgatccacccacctcagcctcccaaagtgctgggattacaggcatgggccaccgtgcctggccgagacctcttttaggttgatgataagttgtagtttgctgtctccttttagggttggttgaaagatccactagtttaaattatacttgcaagttacagaaaacatatccaataaatatttattgattggccattgagggccaggtactgtggattctctagggaaagcacagacatggtcaccatcctgtggagctgacagatctctgattggtaaactttagtccagcaagtgaaacaggtatggaagaaagaaagggacaggattctttggccaaggaggaagtagtcagggaagaccaccctacagaaa

SEQ ID NO: 525755 - DNA, 601 bp, Homo sapiens
aagggaaatcaaaagttagggggctgcatcttttaatcaggtgcttagagattcgggacaaagcgttttgcttaaactgtcctgagaggctcatgacayagtggttaaaaagacagactctttcaccggactgcaagagttcagaatgcagctctgttgtttattaattgtgtgaccttgaaaaacttactttattttttcaggtctcggttttctcattcataaagtgaggttagtattagtacctactgagttttattttacatataggatttagaacatggggtgtaggtagtacacgttatatgctgcatgtagtatgtcatactatgtgaattccctcaatattattttctaaaaagagtgtacacttcaatttagagacatatgggttcgaaagtcaaagatgtttttttctctgctcactaatctgaacctcagttgtatgatcagggaagtgaagataattcctactgctgaaagctgttttgaggattagaagaaagttcatttatatatgggcaggagatccttgctgaatgtcaagcctctttgctctcctcttcgaaaccctgttgaaattcttcatagtcttcttata

SEQ ID NO: 525756 - DNA, 601 bp, Homo sapiens
aagggaaatcaaaagttagggggctgcatcttttaatcaggtgcttagagattcgggacaaagcgttttgcttaaactgtcctgagaggctcatgacacagtggttaaaaagacagactctttcaccggactgcaagagttcagaatgcagctctgttgtttattaattgtgtgaccttgaaaaacttactttattttttcaggtctcggttttctcattcataaagtgaggttagtattagtacctactgagttttattttacatataggatttagaacatggggtgtaggtagtacacgttatatgctgcatgtagtatgtcatactatgtgaattccctcaatattattttctaaaaagagtgtacacttcaatttagagacatatgggttcgaaagtcaaagatgtttttttctctsctcactaatctgaacctcagttgtatgatcagggaagtgaagataattcctactgctgaaagctgttttgaggattagaagaaagttcatttatatatgggcaggagatccttgctgaatgtcaagcctctttgctctcctcttcgaaaccctgttgaaattcttcatagtcttcttata

SEQ ID NO: 525757 - DNA, 591 bp, Homo sapiens
gcaagtagatataacccttcccacagatgatgaaaatctgagctctctactataaggagagactgaattaatgagctttataataaaaagattttaaaagtttatattttttctctttcagtatgccagttcctttgccaaactgtaaatacagaggtcttgaaagagatccacatatactgctgaaataggaattatataaatagagataataactcattaaaaaacaaaaacaataattattataataatggaatgtgaaatcaaccagttgccagacaaccttgggagtggcggaaacaaaaacatcgaattggagtccaaagactcataaattacttgaagttgaagtctatctctgattttccttaattttctcaatgtggtgttgtttatcaccgtatagatgctcctctatttacaatgggattatgttstgataaacccatcgtaagtcaaaaatatcataaactgataatgcatttgataatctgataaacctatcataaagtccaaaaatcataaatggaacccttataattccagatgctccttgacacacgatgaggttacctccatcattaattagac

SEQ ID NO: 525758 - DNA, 613 bp, Homo sapiens
ggcttcccaaatcatgcaatctgtgattgaccttattttaaaaacaaacattttagagatgaaactgaaagctcaaatgataaaagtgacacaagcataataatcaagccattcatgctagatctctcatataaaaaatgaatcataattatatattttctaatcatgaaaatgaactacatgtgcatacattttaatgtcaacttgctatttctctttcttttctctatatatgtttgtaaatcttttctatccactacctctcacatcattcccagatgcacttaaatggcaaggaagtagagttaggaggtacaaatctatattatcttgtcccacagccctgaagaaacttatgaccaagcactcaaataccagagaaaacctgcaatkctgaaaggatgagtgtgatacttggctgtataataatgtcaaaagagaaaacttggaatttgaagacataacttctaatcctgcctcaaccattcattcaaaatagtctatcaatagtggctagtggatagtgttgatcactgttgtactcttgcaagtttccccccttggcttgtgtcatgatgtatactcatgattatttatttatctgtatcatcta

SEQ ID NO: 525759 - DNA, 613 bp, Homo sapiens
ggcttcccaaatcatgcaatctgtgattgaccttattttaaaaacaaacattttagagatgaaactgaaagctcaaatgataaaagtgacacaagcataataatcaagccattcatgctagatctctcatataaaaaatgaatcataattatatattttctaatcatgaaaatgaactacatgtgcatacattttaatgtcaacttgctatttctctttcttttctctatatatgtttgtaaatcttttctatccactacctctcacatcattcccagatgcacttaaatggcaaggaagtagagttaggaggtacaaatctatattatcttgtcccacagccctgaagaaacttatgaccaagcactcaaataccagagaaaacctgcaattctgaaaggatgastgtgatacttggctgtataataatgtcaaaagagaaaacttggaatttgaagacataacttctaatcctgcctcaaccattcattcaaaatagtctatcaatagtggctagtggatagtgttgatcactgttgtactcttgcaagtttccccccttggcttgtgtcatgatgtatactcatgattatttatttatctgtatcatcta

SEQ ID NO: 525760 - DNA, 602 bp, Homo sapiens
tctggaatacaaaagtgggtagtattggccattatttgtagtgacttattcttttatgtaacttactaactaatgtaacattaatttatatacacacattataacackcattaagtgttcctcattcagtaacattaaatggaagaaactgtattttatgtgttgggggcttaataaaatagtggaaaaaaaaacagaaaaatcctacagtcattcatcaggagagtgccggaaagttaaataaattaattagtgtatgatttcaggtggttaaaaaaaagaacaaaaaagggatgtttttgacatatttcatttgatttcactagattttgttgggtagcaaccaaccctaagattgcccaaaaataacagttggttcctctcttatgttacatgttttctgtgggctattttgggtcagtcttctgaacttagcttgtgtcttcttcactctgatatctaggctgtacagatcatatgatctttgtagacaatttttgagacttttgcttttattccaagagaaatgagaaggtattggaaggttttgagcagaataacatgatccattgtatatatttttataagggtgatgtcaggaa

SEQ ID NO: 525761 - DNA, 602 bp, Homo sapiens
tctggaatacaaaagtgggtagtattggccattatttgtagtgacttattcttttatgtaacttactaactaatgtaacattaatttatatacacacattataacactcattaagtgttcctcattcagtaacattaaatggaagaaactgtattttatgtgttgggggcttaataaaatagtggaaaaaaaaacagaaaaatsctacagtcattcatcaggagagtgccggaaagttaaataaattaattagtgtatgatttcaggtggttaaaaaaaagaacaaaaaagggatgtttttgacatatttcatttgatttcactagattttgttgggtagcaaccaaccctaagattgcccaaaaataacagttggttcctctcttatgttacatgttttctgtgggctattttgggtcagtcttctgaacttagcttgtgtcttcttcactctgatatctaggctgtacagatcatatgatctttgtagacaatttttgagacttttgcttttattccaagagaaatgagaaggtattggaaggttttgagcagaataacatgatccattgtatatatttttataagggtgatgtcaggaa

SEQ ID NO: 525762 - DNA, 576 bp, Homo sapiens
tcatggttatgggttatgggttatagtaaaagaatacagttatacaaatatatatatagatataggtagatatagatatagatatagacatatctgtagtccaggctggagtgcagtggcacaatcatagtacactacagcctcgaacttcgggactcaagcaatttttcccaattcaggttccgagtagctgggattgtaggcatataccrccatgcctggctaattatttttaaatatttgtaatgacagggtctcgctgtgttgtccaggctggtctcagactcctggtctcaagcactcctctggcctccaccttcccaagtgttgggatgacaggtgtgagcccactgcacctggttctggttaacatattatataaattgctaaacacacaagcagaggaaggccagaaaatattgttttgatttgagagatggtagaacaatggatgatgcatacaattcagttaatgtattaattttacctgctcctaattaatatcagtcatgtgtcacttaatgacaacaatacattctgagaaatgcatggttaaatgatttggttattgtgcaa

SEQ ID NO: 525763 - DNA, 642 bp, Homo sapiens
ttatatctgttcatcttttttgtctttgttttaaaaacacatacttgataatcatattagatggttacagctttctattgctgcataataaaccagtctaaacatagcagcttaaaacagctaagtagcacagatggacctgctcatgattcttcaatctgggctgaactcagctgggtggctcatctcttccctagatggtgtcttctgctggactctttaatatgtttgtatttagaggcagctccatagggactggaggatcctagctggccccattcatatgttgtgctggaatgactagaaactgggtcttcctctctatcttcccagtctttcattcctcctggtctttttcatcataaggtgtctcatccacaaggacgctaacctagacatctttgcacagtggctcaaggtaaaagacagagtaaacaaaagctataaagcttccttaagcctaggactgaaacttatacagtgtctctttagctgcattctcatggctcaactaattcacaaggctaatctattgtctggttgggaggataatkcaaggacatgaaatcaagggacatccataattcattggggactgtttggtaagaatatgagttaaggcttaaatttgttcgaatacaa

SEQ ID NO: 525764 - DNA, 642 bp, Homo sapiens
ttatatctgttcatcttttttgtctttgttttaaaaacacatacttgataatcatattagatggttacagctttctattgctgcataataaaccagtctaaacatagcagcttaaaacagctaagtagcacagatggacctgctcatgattcttcaatctgggctgaactcagctgggtggctcatctcttccctagatggtgtcttctgctggactctttaatatgtttgtatttagaggcagctccatagggactggaggatcctagctggccccattcatatgttgtgctggaatgactagaaactgggtcttcctctctatcttcccagtctttcattcctcctggtctttttcatcataaggtgtctcatccacaaggacgctaacctagacatctttgcacagtggctcaaggtaaaagacagagtaaacaaaagctataaagcttccttaagcctaggactgaaacttatacagtgtctctttagctgcattctcatggctcaactaattcacaaggctaatctattgtctggttgggaggataattcaaggacatgaaatcaarggacatccataattcattggggactgtttggtaagaatatgagttaaggcttaaatttgttcgaatacaa

SEQ ID NO: 525765 - DNA, 467 bp, Homo sapiens
aggcagctccatagggactggaggatcctagctggccccattcatatgttgtgctggaatgactagaaactgggtcttcctctctatcttcccagtctttcattcctcctggtctttttcatcataaggtgtctcatccacaaggacgctaacctagacatctttgcacagtggctcaaggtaaaagacagagtaaacaaaagctataaagcttccttaagcctaggactgaaacttatacagtgtctctttagctgcattctcatggctcaactaattcacaaggctaatctattgtctggttgggaggataattcaaggacatgaaatcaagggacatccataattcattggggactgtttggtaagaatatgagttaaggcttaaatttgttcgaayacaactggttctaaagcatcacattgttgtattaggtttccagggttgtcataacaaattacaacaa

SEQ ID NO: 525766 - DNA, 498 bp, Homo sapiens
atacaggtttatatgcttctctggagtaccctgcaatacaactagaagataatggctgatgccatccacataaatgtcaaaaggtaccatcaagcattcctaaataccaggtctaattaacttcatgttaggaaaagctctggaaacatctgcatttcagaacaaagacattttgttaccagtagaatggcatcatctggcagctctatcaacttctctgggatgaacctttcayacagccctcttagatctttccaagcaatgcatgacacagctaacctcaaatctcctaccttttctgtcttttctccacctcccaacctacctgctactcaccttcgaaggattcatgacacagaaagtcagtaaaatagctggaacaagcaaactattcagactaccctgtgggaaatctgtcatttcctcctggtctgtgtgttatgttaaccctcattggggcagagtgggaaggcagaaaaaaaggagaaagacggggta

SEQ ID NO: 525767 - DNA, 453 bp, Homo sapiens
caaatttaaaacgttgtacaaggatgtctttctcccattccactgcaatgcatctgtaaattttaaattctaatggcttattcatacttttygaaagaaaaaaacagtctgctgccaaacctggctctggaatcagatgggggtgggggtagtatctgcaacccacagaaaatagaaaattctcattgtctggaatgtggagctggtaaatcttttttctcatcttcatagcatgactgtaagagtgttccatatgtaaggacaatcactaattatgtttgcataagtatatcaccattacagagagtagaaaatgcataaaaatccaggctgagtaaaagaaaaataacttccttatggtatattaatcttttcttattttttttgttttttactacatacatgtaattttccaaatatagtcacctattattcaaacctaggcagatggaa

SEQ ID NO: 525768 - DNA, 453 bp, Homo sapiens
caaatttaaaacgttgtacaaggatgtctttctcccattccactgcaatgcatctgtaaattttaaattctaatggcttattcatacttttcgaaagaaaaaaacagtctgctgccaaacctggctctggaatcagatgggggtgggggtagtatctgcaacccacagaaaatagaaaattctcattgtctggaatgtggagctggtaaatcttttttctcatcttcatagcatgactgtaagagtgttccatatgtaaggacaatcactaattatgtttgcataagtatatcaccattacagagagtagaaaatscataaaaatccaggctgagtaaaagaaaaataacttccttatggtatattaatcttttcttattttttttgttttttactacatacatgtaattttccaaatatagtcacctattattcaaacctaggcagatggaa

SEQ ID NO: 525769 - DNA, 545 bp, Homo sapiens
aaacaaagatggtttagttggccaaataattttgagcaacgcctaatgttaccttccttctggaatactggtatatccaaggctctgagaactattgcaagaaagaaacccttgggtagtacttaacttagtgtgtcctaaatttatatgaccaaaaaaactttttaaaagaaatatctaataacattctgtggaacgtattctaaagcgcacacctcgggcaacagctttaagcacgaaataagatcctggaccattaccccagagatggtggtagatatctttcgatatttttctgtatttacggaaaggccaaagacagcttttctgatcactcaagaaaggaagagaagcttattcttactaagtggtcactttcattgacaacctctccyaaatcctgcaaattatggattcttacctctttttaaatggctcccatcactatgtagcatcaaaatgctctggaaagcatagctggcagcatattgggtctacctaaaagggaagcctccaagcaactggtttcaaatccaaatcactgc

SEQ ID NO: 525770 - DNA, 545 bp, Homo sapiens
aaacaaagatggtttagttggccaaataattttgagcaacgcctaatgttaccttccttctggaatactggtatatccaaggctctgagaactattgcaagaaagaaacccttgggtagtacttaacttagtgtgtcctaaatttatatgaccaaaaaaactttttaaaagaaatatctaataacattctgtggaacgtattctaaagcgcacacctcgggcaacagctttaagcacgaaataagatcctggaccattaccccagagatggtggtagatatctttcgatatttttctgtatttacggaaaggccaaagacagcttttctgatcactcaagaaaggaagagaagcttattcttactaagtggtcactttcattgacaacctctcctaaatcctgcaaattatggattcttacctcttttwaaatggctcccatcactatgtagcatcaaaatgctctggaaagcatagctggcagcatattgggtctacctaaaagggaagcctccaagcaactggtttcaaatccaaatcactgc

SEQ ID NO: 525771 - DNA, 545 bp, Homo sapiens
aaacaaagatggtttagttggccaaataattttgagcaacgcctaatgttaccttccttctggaatactggtatatccaaggctctgagaactattgcaagaaagaaacccttgggtagtacttaacttagtgtgtcctaaatttatatgaccaaaaaaactttttaaaagaaatatctaataacattctgtggaacgtattctaaagcgcacacctcgggcaacagctttaagcacgaaataagatcctggaccattaccccagagatggtggtagatatctttcgatatttttctgtatttacggaaaggccaaagacagcttttctgatcactcaagaaaggaagagaagcttattcttactaagtggtcactttcattgacaacctctcctaaatcctgcaaattatggattcttacctctttttaaatggctcccatcactatgtagcatcaaaatgctctggaaagcatagctggcagcatattgggtytacctaaaagggaagcctccaagcaactggtttcaaatccaaatcactgc

SEQ ID NO: 525772 - DNA, 511 bp, Homo sapiens
tccgggaatgacatttcctttttctgttggatggagcaacttgcatcattttaacttccgcaaattaatccatcatggattcataaagaatttttaaaatctttggataaaaaggcaggctaaaatcggaaagtaaacactgcaaacttatcactaagggctgtgcaatgcgagtcaacaagtcaatgaaatccaattcaaccacttgcagaaaacagtgaacatcaaaagctaagccatttgagagacagtgtctccatttacataagacaaaattaagagaacactgcaatttgacatgagattacaatactgctccttgaaagtatactcttctttatttaggttgtttgttaaagggtgtctgcaaattgtcaataaaataatattttgyagtctcaagatatggttttcttttttcagttagtgcttcaataatctttcacacaatcaaaactactctttctttatacagaggttgaaacacaacaaatttgaacaggagaaacca

SEQ ID NO: 525773 - DNA, 511 bp, Homo sapiens
tccgggaatgacatttcctttttctgttggatggagcaacttgcatcattttaacttccgcaaattaatccatcatggattcataaagaatttttaaaatctttggataaaaaggcaggctaaaatcggaaagtaaacactgcaaacttatcactaagggctgtgcaatgcgagtcaacaagtcaatgaaatccaattcaaccacttgcagaaaacagtgaacatcaaaagctaagccatttgagagacagtgtctccatttacataagacaaaattaagagaacactgcaatttgacatgagattacaatactgctccttgaaagtatactcttctttatttaggttgtttgttaaagggtgtctgcaaattgtcaataaaataatattttgcagtctcaagatmtggttttcttttttcagttagtgcttcaataatctttcacacaatcaaaactactctttctttatacagaggttgaaacacaacaaatttgaacaggagaaacca

SEQ ID NO: 525774 - DNA, 609 bp, Homo sapiens
tctaattctgggctaaaaggttttaaacttaacctcttcttacatctctactccttttgctcacccagtcaagaatgatagaatatcacattgtctagatgaaaaacctgagatgcaagagcttgagtaatttrtcattaaatggcagaaccagggttcaaatatgtatctgtttgactctaaagtctgtgcttaaagtcatctttagaaaatttgtgtttagccagagctcctttgggaagcctaggcaggatgaggggttgagcccaggagttcaagaccagccctggcaacataggaagaccccatctctacaaacaacaacaacaaaacaaaacaaaaactagccaggcatggtggtacatgcctgttgtcccagctactcaagaagctgaggtggaaggaccacttgagcctgggaggtcagggctgctgggagccgtgctcccaccactgtactctagcctgggcaagagaatgagaccttgtttaagaaaaaaaagaagccacagatcccttgctgcaaggcgtagcatttttagcagaactgccaggtagagaattcaattcaactaacacacactgagcacctattaatatttttataca

SEQ ID NO: 525775 - DNA, 544 bp, Homo sapiens
cctatggataggttcagaggctagctcatacacaggcctatggattatagctttaagctagcctgggaattagtccacatttttatggttgcaatgggtcaatgagcctggacacaaatatatatttactgaatgatcaaatgaagaaaataaaatgtatttcaaactcttgatttatgaacacatgttgaagcaacgtaagtacacagaggacctttgcagagaaaccaagagagcaaatatctcctcccaaccaagttatgctccaagyagtttttatagatccactttgtaaagtagaaaatacaaaagaagcttcacgacgctataccttgttctaactctcagcacagtggcaaccagtatggaaaacagccaccagaaaacttcttgtataagcagatgaggctgattatgcaatatggtcagaaaggggtagagagagagagggaaggggagagagagagagagaaagagagcaagagaatatcatggtcatgaaataaggaagtacgccatctggtttgggtcccactggttcaaa

SEQ ID NO: 525776 - DNA, 597 bp, Homo sapiens
cattatgcattgtgagctgcaaataatggttgccaacatcagtggtcatgggaaaaaaaattaacagcagtagctactacagagggtggataatctgtgtcacattcatttgatgtaaaaagtagtgttacttccagccctattttttttttggaggcacagtatgggtttttcacttttaccctaacctcccatacccattgccattgggactttctgaatcccagggaagggttctagagagacaaaactttcagtgctaacactgggataatccccaggcaaactggggtggttggtcttcttatgttataaagaggtcccaaaaagattgatgccactacytggtggatgaattcacattgtgggatatcccttacttctgattttaaatttggcatgaccatctctgctcaccaatattctgcaatggttttcccgaggaatatctttccttctccactttttccctcctccctcactacatacctctcacagcacactttaaactggcccttcattttagaggcaaaagtaaaaagcactgatagagcttcacaagagaaaggaagaatggaggtaattatctggacaacc

SEQ ID NO: 525777 - DNA, 618 bp, Homo sapiens
ctcaactgagatactacatttaagtgctagaattaagtgatctgtggctcaggatacacatgtgtgatctgcttaaattacctgaagctttaatgtgcaaatgattcgtttactaaagggagggtctaaactgaggaaatgtgtctttgagatctgttactatgttggttctgcagccatcttctgtgttatttattttatttttttatttttccataggttatcagggtacaggtggtattttgttacatgagtaasttctttactggtggtttgtgagcttttggtgcacacataacctgagcagtatacacagcaccctatttgtagtcttttgtctctcactccccttcaatccttccccccaagtccccaaagtccattgtatcattcttatgaatttggtcctcatagcttagctctcacatatcagtgagaacatatgatgtttggttttctgttcctgagttacttcatttagaataatagtctccaatctcattcaggtcactgcaaatgctgttaattcattcttttttatggctaagtagtattccatcatctatatatactacagtttctttatgcactcgttgattgatggacatttgggttggt

SEQ ID NO: 525778 - DNA, 586 bp, Homo sapiens
ggccaccacttgccccttgacgtggacacataaaagcaaatcctccagcactgtgccagccaggatcagggaaaaaacacagccctcataaatcaagcctgcactgttgtacagctttagctcaatgaagttcatgtgtatgggataaagggtttgagctgtgactgagaagaagagagtcttgccctgccaccttcctgcaagccycatggatataagccagcaccaatccacacaaaacttttgtcataccctcagtctcccagcgctggtcaaatcactcagtcaagatctcacactcctgtgggcaaagctttgtagtgcttcattttgctctttgtaaagaagagcctggtcccagtttaagcttcagaaagagtgactctcaagggagcagagcagaggatagcagggcattgtccattactgaccggctgaattactagagagagtgaggcagattggggacttggttctaggaaggagaggaaaacagaggtatttcctaaggaacaggaagacaggaataacaggggaagggtagaaggaaaaattgaaatgacataagcaccccccaaaatgactg

SEQ ID NO: 525779 - DNA, 601 bp, Homo sapiens
gacaattgcaatgggataaaataatttatagagttatgctgaaatatgctttcttctattttcaattctttggttttagttatatcctaaaggtattgtctctctaaaaggatcaaccctacatgacgcattcaagagacattgtcataatagtcctactgttgcctatagggattcaatcagagtttcaggcatggtagaacctgaaatttctctaataagcagttttgtagataccctttatgagttatgttagaggaagtttcagtagaacctgcaaaatggtaaggaaagggaatcccagatagcggtgggatctataaaattcaggaatatttaaaaaatccttaagacaatgtacaaaggacccatttattgcccacatattatgccagacacagttctggcgctgtgtctacagtggtaaacacaataggcaaagtacctgccctcctgaagcatacctttaaatgagcacaagacyccaaatcaaatgagtaaactagtcagtatcgtaaagcgataaacactatgaagaaaatgaataaggcaatgagatagacagcaactctgtgtttatctgtaattttgaaataggaaa

SEQ ID NO: 525780 - DNA, 543 bp, Homo sapiens
gccagcaactaactgtcttagtccatttgtgctgctaaaactaaatacctgagacttggtaatttataaagaacagaaatttattttctcacagttctggagactggaaagtccaagatcaaaatcctggtatttggtctggtgaggaccttcttgctgcaacctcacatggcagaaggtgggagggcaagagagagccgaagagcaggttagcaagccaactgaatgctggcagaagcctctttaataagtgccttgatcccatgaatgacagaggagcccttatggcctaatcacctctgaaaggctcccatcgcctaatactgtcatattggcaccacttgaaytttgaaagcgacgtattcaaaccataacagaaacccacattctatttggaagaatttctcatttttgtgaatcttggtaagagagagtctgcctcctacatactacaggagccaactgaactctttcttccagagatgccagtagggataccagtaccatttagaaaactgcttctacccctttggatgtcattgc

SEQ ID NO: 525781 - DNA, 543 bp, Homo sapiens
gccagcaactaactgtcttagtccatttgtgctgctaaaactaaatacctgagacttggtaatttataaagaacagaaatttattttctcacagttctggagactggaaagtccaagatcaaaatcctggtatttggtctggtgaggaccttcttgctgcaacctcacatggcagaaggtgggagggcaagagagagccgaagagcaggttagcaagccaactgaatgctggcagaagcctctttaataagtgccttgatcccatgaatgacagaggagcccttatggcctaatcacctctgaaaggctcccatcgcctaatactgtcatattggcaccacttgaattttgaaagcgacgtattcaaaccataacagaaacccacattctatttggaagaatttctcatttttgtgaatcttggtaagagagagtctgcctcctacatactacaggagccaactgaactctttcttccagagatgccagtagrgataccagtaccatttagaaaactgcttctacccctttggatgtcattgc

SEQ ID NO: 525782 - DNA, 570 bp, Homo sapiens
cctgctactttccttgaagatttttgtcctttatgttctattctcttgtcatcaggtttgttttatgaaataaattacctaatgaattaaataaccatcgaccatggacttaatttttgctatataccactctggggattaaatgacctcatttaatcctcaaataaggattttcctatgagtaaacacttttattctgrccattttacagatgaggaggatgaggcagactggttatgtgatggtctgtggctgtggagcctcctctggtggaaatcgtggcactggttttcctgtccttaggctgtaaagttgcagctccactctcaagtttctttttttgggggtgggatgagagcaaagataagtagagttcacaattgagtattttcttttgtttcaggagataatcattcagaaaaatctcaggaaactttgtcaattgcaaaaactgttgtatttgttatctcatctgtttgctggtagtgattagaaataaaacttttgaaatattaagggctgatgtaatttttttgggggggtggtgaacaggaaagaagatactaagcg

SEQ ID NO: 525783 - DNA, 572 bp, Homo sapiens
acagagtgagactccgtctcaaaaaaaagaaaataccagaaggaggccaggcgtggtggctcacatggctcacatcggtaggcagaggttgcagtgagccgagatcgcaccactgcactccagcctgggcgacagagcgagactccatctccaaacaaacaaacaaacaaacaaaaaaacaaaaaaaaaaaaaagaagaaagaaagacaaccctgggcatagtgtagaaggagaggggaaaggaatgatggggaggcagcaggtccaggtaggattcaactgcaataacctgagtgatagctgataagaacttgagctggcacagtgtcarccggcggaagagaagtcaaactggaaaatgagaggagttgcaccagactgagcttatcagttgtctggggttggggatgacagagcagaaagagtctgggaaggtgaacgttcagggtttgaggtcctgctgcaagggacaacattctttgaaatgtttttatcttaaacattcatgcaaatttctattttttacttaaaaatgtaccaatgtttgcatttctatgaaaataatatgtaaa

SEQ ID NO: 525784 - DNA, 572 bp, Homo sapiens
acagagtgagactccgtctcaaaaaaaagaaaataccagaaggaggccaggcgtggtggctcacatggctcacatcggtaggcagaggttgcagtgagccgagatcgcaccactgcactccagcctgggcgacagagcgagactccatctccaaacaaacaaacaaacaaacaaaaaaacaaaaaaaaaaaaaagaagaaagaaagacaaccctgggcatagtgtagaaggagaggggaaaggaatgatggggaggcagcaggtccaggtaggattcaactgcaataacctgagtgatagctgataagaacttgagctggcacagtgtcagccggcggaagagaagtcaaactggraaatgagaggagttgcaccagactgagcttatcagttgtctggggttggggatgacagagcagaaagagtctgggaaggtgaacgttcagggtttgaggtcctgctgcaagggacaacattctttgaaatgtttttatcttaaacattcatgcaaatttctattttttacttaaaaatgtaccaatgtttgcatttctatgaaaataatatgtaaa

SEQ ID NO: 525785 - DNA, 344 bp, Homo sapiens
ggctgggagtaagtggcccttcaccttagctctcagcctgccctccacaaacctggccccagccattttgggagtcagagcccaagcatgggacagagttgggccttggccggccatcggagggccggcaggtgacaaagtggggaagaagcagagctcagcagaccaaccgcagcagccccaggccctcccaccagccagagcccctccacagccacccccaggggcctctctggaagccacagacatggggggtgctggagggggtgaaggcagtcaccacccctcagcctgatcctttctgtwccctctgtccactctcccaggaggctcacactgctgtc

SEQ ID NO: 525786 - DNA, 606 bp, Homo sapiens
tccccctgagcctcttcccctggctccccgacttctccttcaggtctcagcatagacaccacctcctctcagaagtcctccccttctccatgtccagggcctggcctgcccctagctccccagcccctcccacatcttcccccatctcagcactggccaggctgggctgtgattgattctgtgtctgttycgccagccagaccggaggctccctgaggacagggacacggccttgtccctctctgcgtccccagggtggccagcccagtggatgaacagccacaagtgggctatagatgctgcctaagggatgaatggatgatctcgggaggggctgggtgtgggagatgaggaaagaagggacatggagcaggagggagaaaacagcggagaggaggttaattaggagagaggccctaggacaccccagccaccagggtgcagggcctgggccccagcaccgcgggattcccgccctcccatggacctcagtgatcttccttctgaggtcagtgcccacctggctctggacccctctgacgatcaggaagttcttcttcctcgtgggaatcagggctgcttgagtcacaagtgacagaatctgct

SEQ ID NO: 525787 - DNA, 446 bp, Homo sapiens
ctcaggttaccaagggacaccgaaaatgagaaggaaaacaagccagcatttgagcagtggtttgccatttgccatttgcaaagcccttttctcacctgttgtttcatttggtttttaccataagccgcaggctgcagagtgctgtcttcattatgcaggtgagtcaactgaggcttggttaagggacttgtctaaggacttccagctaatgargggagaaaacagatttgcattcaaacctgtctaattcctaaattccatttccacatttttcaccagactgacaggcaggattttaaataggggagtgacttttaatctggtcatagaaacagaaaggaataggaatcggatgttagggaaaggaaagagaggaaagtctgcgggtggggcccgggcagaggcagtctctgcaggtgcagtcagcatgccaataagaacaacag

SEQ ID NO: 525788 - DNA, 474 bp, Homo sapiens
cctgtcggtgcatttccgtcctgtcagggtcttttgctttggattttatgctcaccaaagccgcgcgtgcacatcaggagtcaagaagcaccatgggcgtgtgtgttagttgttctyacactgctatgaagaaatatctgagatggggtaatttataaaggaaagaggcttaattaactcacagttccacagggctggggaggcctcaggaaacttagaatcatggcggaaggggaagcaaggcaccttcttcacaaggcggcaggaaggagaagcgcaagcaggggagatgccaggtgcttgtaaaaccaacagatctcatgcagactcactcaccatcacaagaactgcatgggggagacagctcccatccatctaatttcttcccactgggttcctcccacgacacgtggggcttatgggaactacaattgaagatgagatttgggtggggacacagacagaccctatcag

SEQ ID NO: 525789 - DNA, 513 bp, Homo sapiens
tggttctgatgtgtacaccatcacaacacataccagctcatgatgagggagcccgcaccattttgttgtttaagctgtctttagaggaagaaaacacctctgaaatttttttaaaactgcccctctacgtttggtgaatccctctgcccatgaaagggaatgtgctcaaaatgtaattcttctggcaaagacatcctttctctagctgcagagcaaacrtcatgactataaaaccaagaaagccagatccaaactgcacataagtgaaccgctatgagcagccgcggcttcgcctcccgggactcacctaaatccaccctgtgctgtgagctgctaccctgcctccagtctcctgcccacctgtcccacgcaggtgcccgtgtcttacgcttggaccgctgctcctaatccaagagaacatctatctacaagatcctctaaaagcacgctgcattcatttacaccagtaacatccccagacaaggcagggcggggacgtgccggtggttcaaa

SEQ ID NO: 525790 - DNA, 620 bp, Homo sapiens
tgggaccagtggtggacagaacacacgtggtgayggcccagatgtggaaagggcccctccagaatccagcgtgcgctccttacacaggctggctttctctctaagcgggtgctgtgctgtgacagatgcacagcctcatcttccttctaacctgttctggctaaagcaagtgttctctcccacctctcggggtttggcaggcataagggacggcgcaaagcagcacaggggaacatgtgctgcccggcgcaggcgctaccaccactgtaacccgaatattttgctaaaaattaaacttctgacgcagctcctggtccagcacttgcagccccccccccgcacattgcagatactattgtaaaatcatgaactttgattcatcctcccctaaaactacaaaatgctgattaaaacaaaaatgcgagcaagtgaagggacgtgcactgtgttcatgggtcaggagactcacaatagttaagatgtcaactcctcccaaactgatctgcagaagcaatgcatcccaaagtcccagcagcctcctgtgtagaaactgacaaggtgattctgaaattcatacagaaatgcaaaagtcttagattaaccaacacaactgtaaaaaa

SEQ ID NO: 525791 - DNA, 410 bp, Homo sapiens
ttctggatgttggtcgggttctgaggcggctgcggcaagcggggggccagcacggtgggcgtcagggtggcccgaatcccgctggtggtggccgtgggcgtccgggacaggctctgggtcactgcgccggccgcgcctttgggcagcccggtgggggtcccgggggcgggcggcgggacggcggccgggctgggcagcgccccttgcatagttggcccgatgaccatgctggccgccgtgctggccgggccgctggccgccagggtatgcgccgccgggggcgccgcctgcaccaccctcttgggcgactcggccttgacccccggcgccggcgccgcagccgccgcgccgggcccgggytggccgctgacccccgcggggcccccggcggccggggcgggggcgggggc

SEQ ID NO: 525792 - DNA, 475 bp, Homo sapiens
tccagttgcccacagtggcaacaccctgtctcacttccccactcccctgttggtatttcctgggaccacctcccacataaactattatattaggttggtgcaaaagtaatcacggtttttgcataatggcaattatttttgcacctacctaatacttgcactaaaatccttgtcttgggatctgcttctgggaaaccaaagccaggtggaaagcaattgggaacatgggataacttgatagagagtgggcaggggtgagcaaggagctgtcagagagggcagtccaggaggcctccctgaggaggcaacctaggaataggagctgccgggtgaagatgcaggggaagggtgtcccaagctgaggaaatggcaaggccccaaatcagaaacgagcttagcatactggcccatacgcctctaggatgaatctaaatgggacaagcactaatartattaataagaataggaatagcag

SEQ ID NO: 525793 - DNA, 609 bp, Homo sapiens
tcagatgggtcagaggtcatcactgtctgatgaagatagtatttatagatgtaaakgaaagaatgttagagctcaagcacaagaaaatacccatggtccttctgcttttcttcaatctaatgagctgtttgataagaaatgcaagagtgatattgaagagagatcaggtgtaatccaagaggccatgattatagaggtcagttcaagtgcagaggaagagagcaccatttcagaaggcaataatgtggaaagctggatgctactgggatgtgaaatagatgataaagataatgatatccttctcaaccttctgggatgtgaaaactctgttactgaaggagaagatggtataaactggttcatcagtgacaaagacattgaggcccagatagctaataaccaataacctggaagatggacccagcgatattattcagccaatgaaaacattatctgtagaaattgtgacaaacacggccatttatcaaaaaactgtcccttaccatgaaaagttcgttgctgcttcctgtgctcctggagaggacacctcctgtattcctgtccagcccccctttgcaaatactgtcctgtgcctaagatgttggacca

SEQ ID NO: 525794 - DNA, 561 bp, Homo sapiens
tcaataaatccctcctctcatggcaccctgttcttttctttcttagcagttattcacaattagttattacatatttattggcatgtttatttatttgatagtcttggctttagattccatgaggtgtaccctgtggtccactccgatttgttccccattatattcccagcacaaagctcagtatctgatacatcgtatgtagtcaataaaaatctgctgaatgaacaaatgaatggtcagatgagtgacggattgcaatagatcccattactaaatgtctkctaggtaacaagactgcagtaagcacatagatcatcaaatttaatatattcaacaacgataccaggcacatttattatcagttttacagaggaagaagtggagccctagaaaagataaataacttgttcagtgtcatataatgaatacatggctgaagctataccaggtaggtctaactccaaagtttgtgtagtgagtcactgcacaatattgcctcccattaatttggtacttaccatgtactcatcatttgacatacattatctcatttcattcaca

SEQ ID NO: 525795 - DNA, 578 bp, Homo sapiens
cccttggcattgccctcgtagctctggctgggccacaggtaacttctcaatgttgtagctggggctgtgtgcacgggccacacccaaacgtatttcaggacgcttctaatgtaagttctggagactgaagagaacacacaacaattttcattgtggaagtactggtgtccccaaagttgtctggtattttagctttggatttttcccttccacttggagggtgtcttagccgcctacccacatccagccacacattttttccatgcaggcacatgggcaatgcccaaaaccctgctccaccgctgggctcgcattagccggcctcccaaccacgatgactgttaagtgttgacaggtaccagasattcacgttccaggctcttccatagcaaaacaacgctgataccagcagctttgtttcacatggcattgcagttttgtttttagccagacagaagtcaggaagtttaaggttagttaatcaaatctgacgttagtccaccctgatgatctgatcatcagatggtccagcagattctcctttttctcaaaatactttattgtgcacttgtggagaa

SEQ ID NO: 525796 - DNA, 661 bp, Homo sapiens
gttctcaataatcacagtaacgctgagaaccacaactacatcgttatattaaagcatcttgtcacagtgtcttatagctatcactattttatagccatacctccaggmcaaattaaatgtgaatataaattttaaagaaccagttaatctggcctctgggccatacttgctgggtcacacctgtgtgtcatttgaggtgtcacacactcagtgactggtgacattttactgttagcacccacccacccaaagaagtcacaatctaatagcaaaacaatcccagctcaaatctgaaatgaatttagaagttatgaatgtgttcacaaataactgtgattatattattagcatttctggcaccattacctagaaaatatgaaaatgaaaatgtaactagttaacaatagggaagggcagtgctgatggaattggttttgagtccagagatggatgtcagactaagcccttttcagtttcagagctttggcctcaactcattagagtagttggatctcaaaaattactatgggaaatataacaaaatattaacaattgctaaatctcgatgacgagcaagtggatattcattatagtattctccctacttttatgtaagattgacaatttcataacaaaaagttagaaaacaaaaagcaaggga

SEQ ID NO: 525797 - DNA, 661 bp, Homo sapiens
gttctcaataatcacagtaacgctgagaaccacaactacatcgttatattaaagcatcttgtcacagtgtcttatagctatcactattttatagccatacctccaggccaaaytaaatgtgaatataaattttaaagaaccagttaatctggcctctgggccatacttgctgggtcacacctgtgtgtcatttgaggtgtcacacactcagtgactggtgacattttactgttagcacccacccacccaaagaagtcacaatctaatagcaaaacaatcccagctcaaatctgaaatgaatttagaagttatgaatgtgttcacaaataactgtgattatattattagcatttctggcaccattacctagaaaatatgaaaatgaaaatgtaactagttaacaatagggaagggcagtgctgatggaattggttttgagtccagagatggatgtcagactaagcccttttcagtttcagagctttggcctcaactcattagagtagttggatctcaaaaattactatgggaaatataacaaaatattaacaattgctaaatctcgatgacgagcaagtggatattcattatagtattctccctacttttatgtaagattgacaatttcataacaaaaagttagaaaacaaaaagcaaggga

SEQ ID NO: 525798 - DNA, 556 bp, Homo sapiens
ttttttcctaatggcatagttgtaattcatcatttyttgtacttgttaatcttttcatgcctcatcttcatttattgaaatatgcttactttatgatcatgtctaataatttcatcttaaagtctttgtctatctgatctgctgtatatcatttttgctgtctgtcgcccatgctgacttggtatattttgccattttaaacaatgaatccctgttctttggaactctatcagtggaatttttaaggcttatcttgactttcctccagagatgttttgcatttatttctgccaagttttgggatacattaaaatcctggggctacattaaattaaattcactgcttgattttttaatatcacataggccttgtaaattctgaccataacttctccaataatcaaattgtgattcaaaattttcaagatagatatttttctccccttacctaatgaaggggtccagacaggcaaggtgcattgttgctttcttctgtataataggtttgtttctcatatgcccttatactaagagtgaagcctatagtattctagct

SEQ ID NO: 525799 - DNA, 516 bp, Homo sapiens
aggaaactagtggagaaaaaaaaggattaaaaagaggtctgagagagttcaaagaatcaaggagaggagctttgtaaagaatcaaggatgggcagtataggaagaggargaagaagaatctagcaactgacataatgcagacccttaacagagatgcagggctacaacccatcttgtgctgctgctgaggcccagggaggagccacctgggtgcccagagctgtgctgggcagacacagggcaattcagccctgtgggagacacacaggtctccacaggaggcagcagttttttagcacgggaattcatcaggcttgggcacctgctggggaggagatggaaacacagtcaatacatctcatcatcaaaaacaggaaggaaacgaaacattttggaagtcattgaaaggcaggttttatgttaatttgaaataaaatgtttgcttaaccgactgctctctgaagacttcttgatttggtatttggagacagacatcaccctgacgtacattaggag

SEQ ID NO: 525800 - DNA, 516 bp, Homo sapiens
aggaaactagtggagaaaaaaaaggattaaaaagaggtctgagagagttcaaagaatcaaggagaggagctttgtaaagaatcaaggatgggcagtataggaagaggaggaagaagaatctagcaactgacataatgcagacccttaacagagatgcagggctacaacccatcttgtgctgctgctgaggcccagggaggagccacctgggtgcccagagctgtgctgggcagacacagggcaattcagccctgtgggagacacacaggtctccacaggaggcagcagtttkttagcacgggaattcatcaggcttgggcacctgctggggaggagatggaaacacagtcaatacatctcatcatcaaaaacaggaaggaaacgaaacattttggaagtcattgaaaggcaggttttatgttaatttgaaataaaatgtttgcttaaccgactgctctctgaagacttcttgatttggtatttggagacagacatcaccctgacgtacattaggag

SEQ ID NO: 525801 - DNA, 640 bp, Homo sapiens
ggaaaacataatcagcaagatctatgcatgtaagctgagttaacatcagaggatgtctgtgtcgtactgggaaagggcagaagcaagtttcaggataatgtagatgatacatgtgaaacaaaaaaaaggaaaaakaatcctatgaattttcttatgtgttgatatgaaagataagacaagaagggctccacaccagactttggcttcttcaggcacaggaattaaaagagggtagataattaccagatttttaaagagagacttttgtattgtataagtagctactatgagcctgtatttttcttttatactttttagttaggaataagtatagattcatcagaagttgcaaaaatagtacagagaatcctgtgttccattcatccactttccccagtggtaacatcttacatgatgataaaagctaggaaattaacattggtataattcatacacattgttcagatctcacttgttttatatccactcatgtgtgtgtgcctgagtgcatatacagttaatgcaaaactatcacatgtgtagatttatgtatcctccaccactgtcaagatacacaatggttctatcaccacaaagatccctcatgctacccctttacattcacacccctccccgctcc

SEQ ID NO: 525802 - DNA, 640 bp, Homo sapiens
ggaaaacataatcagcaagatctatgcatgtaagctgagttaacatcagaggatgtctgtgtcgtactgggaaagggcagaagcaagtttcaggataatgtagatgatacatgtgaaacaaaaaaaaggaaaaataatcctatgaattttcttatgtgttgatatgaaagataagacaagaagggctccacaccagactttggcttcttcaggcacaggaattaaaagagggtagataattaccagatttttaaagagagacttttgtattgtrtaagtagctactatgagcctgtatttttcttttatactttttagttaggaataagtatagattcatcagaagttgcaaaaatagtacagagaatcctgtgttccattcatccactttccccagtggtaacatcttacatgatgataaaagctaggaaattaacattggtataattcatacacattgttcagatctcacttgttttatatccactcatgtgtgtgtgcctgagtgcatatacagttaatgcaaaactatcacatgtgtagatttatgtatcctccaccactgtcaagatacacaatggttctatcaccacaaagatccctcatgctacccctttacattcacacccctccccgctcc

SEQ ID NO: 525803 - DNA, 640 bp, Homo sapiens
ggaaaacataatcagcaagatctatgcatgtaagctgagttaacatcagaggatgtctgtgtcgtactgggaaagggcagaagcaagtttcaggataatgtagatgatacatgtgaaacaaaaaaaaggaaaaataatcctatgaattttcttatgtgttgatatgaaagataagacaagaagggctccacaccagactttggcttcttcaggcacaggaattaaaagagggtagataattaccagatttttaaagagagacttttgtattgtataagtagctactatgagcctgtatttttcttttatactttttagttaggaataagtatagattcatcagaagttgcaaaaatagtacagagaatcctgtgttccattcatccactttccccagtggtaacatcttacatgatgataaaagctaggaaattaacattggtataattcatacacattgttcagatctcacttgttttatatccactcatgtgtgtgtgcctgagtgcatatayagttaatgcaaaactatcacatgtgtagatttatgtatcctccaccactgtcaagatacacaatggttctatcaccacaaagatccctcatgctacccctttacattcacacccctccccgctcc

SEQ ID NO: 525804 - DNA, 640 bp, Homo sapiens
ggaaaacataatcagcaagatctatgcatgtaagctgagttaacatcagaggatgtctgtgtcgtactgggaaagggcagaagcaagtttcaggataatgtagatgatacatgtgaaacaaaaaaaaggaaaaataatcctatgaattttcttatgtgttgatatgaaagataagacaagaagggctccacaccagactttggcttcttcaggcacaggaattaaaagagggtagataattaccagatttttaaagagagacttttgtattgtataagtagctactatgagcctgtatttttcttttatactttttagttaggaataagtatagattcatcagaagttgcaaaaatagtacagagaatcctgtgttccattcatccactttccccagtggtaacatcttacatgatgataaaagctaggaaattaacattggtataattcatacacattgttcagatctcacttgttttatatccactcatgtgtgtgtgcctgagtgcatatacagttaatgcaaaactatcacatgtgtagatttatgtatcctccaccactrtcaagatacacaatggttctatcaccacaaagatccctcatgctacccctttacattcacacccctccccgctcc

SEQ ID NO: 525805 - DNA, 603 bp, Homo sapiens
atcagcaaaggtcattttatgtcttgtaatgtttgcgaagataaaactgaactcaaatagtaagaatttttgttttaagttctcacctttcccatgatgcaacagagacaactatgtcagaattcagaaaaacaaagatgaaaatgtaatatccatgaagaataagacaartcaaattatatcatacctgaaagaaacggaattttgtttttaaggcaaacaagatccagcagatataatttttggctcttttgccacatacaaatcactaagaagcaatagcattttattattgcacaaaacaattcctgaagagaagaaaatgatgagtgggcattgtcatgtcaggcttttgttcaggcttaaggaatatattaagaaacaccaaggcaaacatctatccaaacctcattcaaatagatggagcagactccaagactaaaaagtataaaatagcacgcaatagaacattgatctccataagcatacattacaaattttaatggaaagttattgaaaataaatttactatacctattacttgagcctactcgagagaattcagaactaatattagaggaagaaatgggcacagcagccaga

SEQ ID NO: 525806 - DNA, 604 bp, Homo sapiens
atcagcaaaggtcattttatgtcttgtaatgtttgcgaagataaaactgaactcaaatagtaagaatttttgttttaagttctcacctttcccatgatgcaacagagacaactatgtcagaattcagaaaaacaaagatgaaaatgtaatatccatgaagaataagacaagtcaaattatatcatacctgaaagaaacggaattttgtttttaaggcaaacaagatccagcagatataatttttggctcttttgccacatacaaatcactaagaagcaatagcattttattattgcacaaaacaattcctgaagagaagaaaatgatgagtgggcattgtcatgtcaggcttttgttcaggcttaaggaatatattaagaaacaccaaggcaaacatctatccaaacctcattcaaatagatggagcagactccaagactaaaaagtataaaatagcacgcaatagaacattgatctccataagcatacattacaaattttaatggaaagttattgaaaataaatttactatacctattacttgagcctactygagagaattcagaactaatattagaggaagaaatgggcacagcagccagaa

SEQ ID NO: 525807 - DNA, 608 bp, Homo sapiens
cctcttggatgtctggtatgctttttgacaggtacagaatagattaatacacacacacacagttttagttgtggatttattgagatataattgacatatcatgcaattcacacatttaaggtatgctgttcagaggtttttagcacattcacagttgtgcaatcatttcagtcaattttagaacacttgagtcactccattaaaaaacctcgtaacttttagctaccattttctactccccacttctccagttctgggcaaccagtaatctactttctgtctctacagatttgcctattatagacatttctcgtaaatggaataaaatattcagtggtcttttgtgtcttgtttattcacttagcataatgtctttaaggtttgtccatgttgtagtgtatatcagaacttcactcctctttaggtctgaataatattccattgtatggatgtaccacattttgtttatccattcatcagttgatggacatttcagggatgttggaaattatgaataatgctgttatgaacattcaaacatttatttttaaaattacytttatgtaaaattgtctgctttttaacattatgacaaatactttcttccc

SEQ ID NO: 525808 - DNA, 599 bp, Homo sapiens
atatcggcccagcagtgacgtgagccgccccttacctctgaattggtacttggagtgacggggatgacgctgggtgggcaaatttaggagggaatacaaatcccttgctggcgtcgaggcaacgttttcccttcccccctcccttcccgggagcaggctcggtgtccttaggccccctcccttccagattttgcctttcacatgggttttggccccaratatgtattttgcgctgttttgccccacttacgcaggagggggctgttgtgcgcatggtgggggtaataatagaaggaccgaacctccttgacctcttattcccttctctgcctccttctggcagaaagggttgggttctcccaccaggttgtgtgtttttgatacatttttcttttttcctcctatcccaggaccaagaatcgccttcagccctgtctggtgcatccttggcagaaagtgaggaggaaaacacccccattgtgagtcctttgcccctaatttgttgctaatagaggacattgtcaggttgtaggggttaagctatgggacctggccctccccgttgttttgagggggaggagctttcccttgggtggcag

SEQ ID NO: 525809 - DNA, 452 bp, Homo sapiens
ctgctcgggaggctgaggcacgataatttgttgaacctgggaggcggaggttgcagtgagcagagattgcrccactgcactccagcctgggcgacagactgagactctgtctcaaaaaacaaaacaaaaaaaactagccaggcatggtggtgcacacctgtagcctcagctacttgggaggctgaagctggaaggttgttttaagtctgggagatcaaggctgcagtgagctatgattgtgccactacactctagcccaggcagcagagtgagacattgtctaaaacaaataaagaaagctgagcatgaaggtgtggggtgtggagctgttgagatatgaggatcccttgaagctgggagttggagactgtagtgctctgtgctggtgcgtgttaatagccagcacacagcagcctgcgcaacacagtgagacccaatcatagtcctcctga

SEQ ID NO: 525810 - DNA, 452 bp, Homo sapiens
ctgctcgggaggctgaggcacgataatttgttgaacctgggaggcggaggttgcagtgagcagagattgcaccactgcactccagcctgggcgacagactgagacwctgtctcaaaaaacaaaacaaaaaaaactagccaggcatggtggtgcacacctgtagcctcagctacttgggaggctgaagctggaaggttgttttaagtctgggagatcaaggctgcagtgagctatgattgtgccactacactctagcccaggcagcagagtgagacattgtctaaaacaaataaagaaagctgagcatgaaggtgtggggtgtggagctgttgagatatgaggatcccttgaagctgggagttggagactgtagtgctctgtgctggtgcgtgttaatagccagcacacagcagcctgcgcaacacagtgagacccaatcatagtcctcctga

SEQ ID NO: 525811 - DNA, 356 bp, Homo sapiens
gtgttcctgtgtgtataaaaacaatttaaataattatgaaaatggggccaggctcagtagctcacacctatataatcctagcactttgggaagccaaggtgggaggatcacttgaggccaggagtttgaaatcagcctgrgaagcatagtgggaccctatccctacctaaaagaaaaaacattagttaggcgtggttgtgtgtgtctatagtctcagctactcgggaggctgaggtaggaggattgcttgagcccaggggattgaggctgcagtcagctttgatggtgccactgtactttagcctgggtaatgagtgagaccctgtctttaaaaaaaaaaaaaaaatttttttttt

SEQ ID NO: 525812 - DNA, 578 bp, Homo sapiens
tgttcagtggcttatgagaattgagtgtgggtagctgctaagttcctttggacacattttttataagcctacaaagtctacttttggttcttgactatgatatagtttcatatgtgtttactccaaagtcctaaaaacactgatgggggataattgtccaaatgtaaactattattgatatattaagatctgtatttataaataaatttttattttgataggcttatccaatttatcagaaatggggccattacaaatgttaagatagcctctgatactgataaacaatattaaagcaagcaaaggcacagatctttgctcagatggaaaccggttgggtgattttactaattcattaatccttgactgccatcaaaggcatagttgcattatctatcgatagaatttatcatagtaagaaaagacctctgcatttaggtagagtcataagtgtttatgcagataaatatatgcttctaatgtattccaccaatgytttggagagtaaatacccataactagagcaaattgaggataaagtgcaatgctggcttatccagtgagcaggagctcttctg

SEQ ID NO: 525813 - DNA, 624 bp, Homo sapiens
cttggatggtaccgcttctcctgtgttatcaaaagaaattgtcttacaaggacagcctgaggctaaatgtgtgaagtggctaaaagttgtcacattatctttctgcacctgcctctgttcctcttctaaagtccttgtcatctccccaacatcctcccaacacatgcacatgcatcacccccaccccccaactcctgtagctgtcctgggtcttattcctacagagcctggtgaagctatttctccactaagctggggctgttgaatttgtctctgtgtccccagggcttagcccaacacctggaatcatraaagtgctcaataaatctttcatgagtaaaggaagcttcaataagatgttagataaaagaggcttagtcacttctggagggagaggtgtttacaattcaataagacattcttaaagctagagcctctaataacagaatttctggcaacaggatgggtggtgcatcacatcaggaagaggagcagctagctttgcctggcaatgaggaagtcatgtcctatacgcctattgtttgtaagcaggaggcagctcctgcatttctaggactctgggctctatctcaatccagggcattcagtcacagaaggctgcca

SEQ ID NO: 525814 - DNA, 509 bp, Homo sapiens
atgaaactttggataattcaattttacaagtctttcatgtgtaagaactatctcacaggatttccacacaggtttttacagagtacattacagcttcaaccccacccattgtcaaaggcagtttactccgtcaaaggtacatagcggggatagccctccagtttaggagagtgatcagattcagctctgagctgtgtttgtgaattcactgctaccgttatggtgtccctgttttaccagccctgttatactgaaagtcwgcttctgttggttgattcagccattggatgttacacctggctcacaacagcatgcctgctcctgaacactctcttagacactctctgccactctctatgacccatagactgataccaccccattctatacctagttctccttgaacctggtgtgagtctaagaccagggttccaagttgactgagaagaggccaaatggaaatatgataaattaaattataaacataaaatttctttgtaaactttaaa

SEQ ID NO: 525815 - DNA, 418 bp, Homo sapiens
tgcgtatagaaggaaaaagattttcagactttcggtcacaagaaagcatctgagtgaaagcatcgttaaccacctccccctttcccccaacctgagtgactcrgaatgagagttctttagacttgggcaagataaggtatgagatagtctggtcttgaggcactgcctgcatgatatgatttgatggaaaataggttctaagttgctagagggcatggacatactgtacccttttcggcatcatcccataaggctcaaggcagaatcctgcacatagaaggcattccttccatctgtaacatgtcaaatgaggcagtgtggtatagaagaaagagtactgactggaaatcagagaggcatgaagagcttgttctacctttgacgcattcctgctttctgcccgtgggcaagtcacttc

SEQ ID NO: 525816 - DNA, 559 bp, Homo sapiens
taacatattttagccttcttttttttttttttttttgaaacagagtctcactctgtcacccaggctggagtgcagtgacgtgatcttgactcagtgcaacctctgcctccagggaccaagggattctcttgcctcagcctcccaagtagctaggattacaggcacccgccaccatgcccagctaattttttttttttttagtagagatggcgtttcaccatgttggccaggctggttttgaacttctgacctcaagtgatccgccygccttggcctcccaaggtcctgggattacaggcgtaagccactgtgcccagcctgattattttaaccttcttattcaaatctgctaatgtttactgagtacctactatgtgctagggacagtcacatataatgtattatttaataatctcccaaatactatgctatttattacccatcccatttttctgatgaagaaactgagtttcagagaggcttggtgacttgcttaaagtcacaggactatttagtgacagagctgggatttgaacccagctcctctgactccaggcct

SEQ ID NO: 525817 - DNA, 539 bp, Homo sapiens
ctaccagctgcttccaactgcagcctcctaaaatccagaacacatggaggaagaagcatatccactaggtatggctcagtggaaagatctctggagcaaaggatgggatacctaggttgtacttctagttttgtctctctctagaagtatgaccatgagcaagtcacttgcttgtgagcaaatggagttaattatacttgcatagtgtacctcagagctgtagcctgaaacacacacacacacacacacacacacacagagagagagagagaaaaaaaacagaaaaagagagagagagttattaatataaagttctgtagtcacttacacaggccaaaccttgactatgccttgtaatattgaagaatggaaaagaaaaaaaatcctgagaaattgaaagtaacattttaacaaaatgacactatcatttttaattggcatttcactttgtttttcaatggaggaactagattccagctttgtccataccgartacaagtgggcccccttctcttcctaaattctttttaaataaaata

SEQ ID NO: 525818 - DNA, 551 bp, Homo sapiens
cttgaaatattgccaaaagcataataagtacaaaatacctaaaagtattgttatttacaactgagtaggaacttactctctagcactacatgtaacattcaaaattatttccaattaaatttatgaaatcctacctttacgccaataacaaaacctaacaggcaaacagaatcactcagcattttttcttaccagcccacattttgaagaagaggtgtaagaaaggaaaaacaaaacaaaacaaaackctatcacttacaaataatgacttctaatctctaaactatgttaaattatttaaagaactacacctaatacaaacaaaatatcctctctagtgccacaaagctaaactactacaaaaattaagaagtttataggatacacttatcagaaatatggtaacttaaagagatcatctataattctcatgttagccatgtcatctattcaacagacaatttggaagagctgtttatcagctgtaacaaagaatggaaagtctattcagtttaaaacaccttactcaaatgaactagaataattagtaa

SEQ ID NO: 525819 - DNA, 551 bp, Homo sapiens
cttgaaatattgccaaaagcataataagtacaaaatacctaaaagtattgttatttacaactgagtaggaacttactctctagcactacatgtaacattcaaaattatttccaattaaatttatgaaatcctacctttacgccaataacaaaacctaacaggcaaacagaatcactcagcattttttcttaccagcccacattttgaagaagaggtgtaagaaaggaaaaacaaaacaaaacaaaactctatcacttacaaataatgacttctaatctctaaactaygttaaattatttaaagaactacacctaatacaaacaaaatatcctctctagtgccacaaagctaaactactacaaaaattaagaagtttataggatacacttatcagaaatatggtaacttaaagagatcatctataattctcatgttagccatgtcatctattcaacagacaatttggaagagctgtttatcagctgtaacaaagaatggaaagtctattcagtttaaaacaccttactcaaatgaactagaataattagtaa

SEQ ID NO: 525820 - DNA, 551 bp, Homo sapiens
cttgaaatattgccaaaagcataataagtacaaaatacctaaaagtattgttatttacaactgagtaggaacttactctctagcactacatgtaacattcaaaattatttccaattaaatttatgaaatcctacctttacgccaataacaaaacctaacaggcaaacagaatcactcagcattttttcttaccagcccacattttgaagaagaggtgtaagaaaggaaaaacaaaacaaaacaaaactctatcacttacaaataatgacttctaatctctaaactatgttaaattatttaaagaamtacacctaatacaaacaaaatatcctctctagtgccacaaagctaaactactacaaaaattaagaagtttataggatacacttatcagaaatatggtaacttaaagagatcatctataattctcatgttagccatgtcatctattcaacagacaatttggaagagctgtttatcagctgtaacaaagaatggaaagtctattcagtttaaaacaccttactcaaatgaactagaataattagtaa

SEQ ID NO: 525821 - DNA, 551 bp, Homo sapiens
cttgaaatattgccaaaagcataataagtacaaaatacctaaaagtattgttatttacaactgagtaggaacttactctctagcactacatgtaacattcaaaattatttccaattaaatttatgaaatcctacctttacgccaataacaaaacctaacaggcaaacagaatcactcagcattttttcttaccagcccacattttgaagaagaggtgtaagaaaggaaaaacaaaacaaaacaaaactctatcacttacaaataatgacttctaatctctaaactatgttaaattatttaaagaactacacctaatacaaacaaaatatcctctctagtgccacaaagctaaactactacaaaaattaagaagtttatagratacacttatcagaaatatggtaacttaaagagatcatctataattctcatgttagccatgtcatctattcaacagacaatttggaagagctgtttatcagctgtaacaaagaatggaaagtctattcagtttaaaacaccttactcaaatgaactagaataattagtaa

SEQ ID NO: 525822 - DNA, 608 bp, Homo sapiens
ataaatatgtgaaagcaactccaagacaagggatgaaaaagactaacaagagaaaccttcacattatcagatgctgatatattagaagagattaatatttgaataaaatgtagagattatctctaaagaaaggttgacacatattgcactgctaaacaacagtttcatcttgctatagtataaatatgaaatatgaccaaagatactagaaaacccatgattgctaaaatatccagtattttaytaaggtacatgttttaaaatgtgtgtatctagcatattgataaatgataatgacaataaaaccgacagccagaattataacggtagtaaaacaaagcaaaattcaaaacaaagagtctgatgtgtaaatgccacaaatatatcattgacaaaataagtacttaatacacaagcatcagcacaaatcttattctcaacagtcattaaatataaatgagaaaaagttaaattttattatagttgtatttatatccagtgctcctttactcattgctaaatctattcagaaaaagcatttaaattggactcataactttggttattagaaagcagtctttttctagtttgcttgtataggcctgttg

SEQ ID NO: 525823 - DNA, 623 bp, Homo sapiens
taactgtatttcatgggtttgctgtgaagactaatgagccaatccactaagattcttagaatgtaactggaacccacaaaaaaaccttagtattagctgcagttattactattattataccaaaagcttggccaattagccccttgccccaataaataaatggtataactgaaataccgataaacattgaaaagaacaaaatgtggaatacattgaaatgaaattaaattgcgatgaaacaataacatctatattctggtaagacacaataccattactaaaaattttcttgtaaatgaaaaaccaaaaattttaaggtgcaaaagaatagaaatttcaaatcaatgctttattcttaatatttaaaaattgctgaaggaagtaaattaaggcacattcaccaatcactttttaaggtatgttatggtcatattaatatgcattctatattccacatcagaaatakccaatgtagctacatgacaaatatttgcaataaaatccatctttttagaggtctaattctttctttttagcagaagaatacaaatcaaaatactactaattaaaaatataaactgtctgctttgctgacctcatattcaagtgccttattctaaaca

SEQ ID NO: 525824 - DNA, 553 bp, Homo sapiens
gcttaaatgtattttgcttagttttctttcgatgatcacaacatggataattctggctgtccacattcttatcacattatttttaaacacttattatgtgatgtgctagaatgattgttttctaacacagaaaccatttctaggaaagatgtggaagatgaagagtttggtcatcattggtaataatactaaagagttttaaaacgttgtcataaaatattaaaagacatataayggtctaaattaggcccaacatgaatgtaactagtaaccttttttcctgataaatttcagaggtctcatcattctcattttcgatttgaaaaatggaaagaataatgaatagaaacagattttaaattttgccttgctctattttttttctattaagattataaaatgttagtgcgagtttatttcttgcagtgagaactatctactatgtggaggagttatgtaggtgaaaaggaaatggaagatcacttgacattttggatctgtcagaaactgctaatactataaaagcatgtggttgtttgggatgtgggtaata

SEQ ID NO: 525825 - DNA, 502 bp, Homo sapiens
atcaatgtctctgaaatatgtaagacaaaaaggcaacaaaaaggtaagaaggtagttttgaaaagttaacttcaaaatgtaaaagaagtgactacaaaaagccaagaaaaacmcagaagactttagatggaggcacagagacgggctggactgcaagaccataggagccaacagttcttttaaagagaagcaaattactgcattgagattgaaaaaaatgaaaaaaaaaaaaaaaaaaaaaaaaaaaaaaagggccaggctgtagcaaagacaagtctttggcaaaaatactaaagtaacagcaatgctgggtaaaaagatgagcagagaaaaaagattactgtgagcctattgaaagacagcagatcaagactgtgtcagaagggtgcaaactgacgtagcggaggcaacataccatcttcattggttcgaatcaacacggacaagctctcagggccagggccgacatctgtatgggctgtcacagtgatccggtattcag

SEQ ID NO: 525826 - DNA, 502 bp, Homo sapiens
atcaatgtctctgaaatatgtaagacaaaaaggcaacaaaaaggtaagaaggtagttttgaaaagttaacttcaaaatgtaaaagaagtgactacaaaaagccaagaaaaacacagaagactttagatggaggcacagagacgggctggactgcaagaccataggagccaacagttyttttaaagagaagcaaattactgcattgagattgaaaaaaatgaaaaaaaaaaaaaaaaaaaaaaaaaaaaaaagggccaggctgtagcaaagacaagtctttggcaaaaatactaaagtaacagcaatgctgggtaaaaagatgagcagagaaaaaagattactgtgagcctattgaaagacagcagatcaagactgtgtcagaagggtgcaaactgacgtagcggaggcaacataccatcttcattggttcgaatcaacacggacaagctctcagggccagggccgacatctgtatgggctgtcacagtgatccggtattcag

SEQ ID NO: 525827 - DNA, 502 bp, Homo sapiens
atcaatgtctctgaaatatgtaagacaaaaaggcaacaaaaaggtaagaaggtagttttgaaaagttaacttcaaaatgtaaaagaagtgactacaaaaagccaagaaaaacacagaagactttagatggaggcacagagacgggctggactgcaagaccataggagccaacagttcttttaaaragaagcaaattactgcattgagattgaaaaaaatgaaaaaaaaaaaaaaaaaaaaaaaaaaaaaaagggccaggctgtagcaaagacaagtctttggcaaaaatactaaagtaacagcaatgctgggtaaaaagatgagcagagaaaaaagattactgtgagcctattgaaagacagcagatcaagactgtgtcagaagggtgcaaactgacgtagcggaggcaacataccatcttcattggttcgaatcaacacggacaagctctcagggccagggccgacatctgtatgggctgtcacagtgatccggtattcag

SEQ ID NO: 525828 - DNA, 525 bp, Homo sapiens
ttcccaaacagctctgtgcctccgcattggctgccccttgcagtgtcctcagcggaagctctgtgctgggatggtcttcgtcgacctggtgcctgcctccgcgtctgggcgggcctgtgctaacactgctcacctctgtgtgtttgttaactccaccacctctttacggctcccactggctctgtttcagcctagatgtttcaccagcatcataccttagcacatgcctygcgttcttcccagaaagtcagccctgggaccaggtgggctggtaaagtcctcagtgctgggccctgtgcctgttgcatgagcctgtgtcactgtgactgtggaagttggagctagtgagaggaggaggaggtgggcagaggaaggagggtcccttgggctcgagctccacatcagccctgagctgctggcaagcacccctggcctgcagccagggagagccagagcctttgccaggcagcgagcctccgtgccttccactcctaggtcaggttttgacagcaccactttattact

SEQ ID NO: 525829 - DNA, 525 bp, Homo sapiens
ttcccaaacagctctgtgcctccgcattggctgccccttgcagtgtcctcagcggaagctctgtgctgggatggtcttcgtcgacctggtgcctgcctccgcgtctgggcgggcctgtgctaacactgctcacctctgtgtgtttgttaactccaccacctctttacggctcccactggctctgtttcagcctagatgtttcaccagcatcataccttagcacatgcctcgcgttcttcccagaaagtcagccctgggaccaggtgggctggtaaagtcctcagtgctgggccctgtgcctgttgcatgagcctgtgtcactgtgactgtggaagttggagctagtgagaggaggaggaggtgggcagaggaaggagggtcccytgggctcgagctccacatcagccctgagctgctggcaagcacccctggcctgcagccagggagagccagagcctttgccaggcagcgagcctccgtgccttccactcctaggtcaggttttgacagcaccactttattact

SEQ ID NO: 525830 - DNA, 525 bp, Homo sapiens
ttcccaaacagctctgtgcctccgcattggctgccccttgcagtgtcctcagcggaagctctgtgctgggatggtcttcgtcgacctggtgcctgcctccgcgtctgggcgggcctgtgctaacactgctcacctctgtgtgtttgttaactccaccacctctttacggctcccactggctctgtttcagcctagatgtttcaccagcatcataccttagcacatgcctcgcgttcttcccagaaagtcagccctgggaccaggtgggctggtaaagtcctcagtgctgggccctgtgcctgttgcatgagcctgtgtcactgtgactgtggaagttggagctagtgagaggaggaggaggtgggcagaggaaggagggtcccttgggctcgagctccacatcagccctgagctgctggcaagcacccctggcctgcagccagggagagccagagcctttgccaggcagygagcctccgtgccttccactcctaggtcaggttttgacagcaccactttattact

SEQ ID NO: 525831 - DNA, 625 bp, Homo sapiens
tgtgatttgtttgagggtctaacaaaaggttgagatgagcaggtggattctgagaaatgtagacttcaattatttaagtcataaatgtttcctattatgatgatgtttaaacagttcatgacagtwaaaaatacagatgtttttggccattaacagagtcacattttacagtattgcagtatgaggtttttgatatttttatcaaaagattgtatgaccaaattgccagaaatcaggcattttataaaaagaatgtacaattcagctaatgtgttttcatatatccccaaccttagggctatgaaaagggttatggtcatagattatatagctctattttttactatgaaaatttatatgctgtctagatctttattctattgaaactgaactggaaaggcctttaaataaaatggttccttcaaaatttacagactgtaatagatctgattgataaagagattcaaaatccctttttaagggtacacctgtggggagagagaaaaaggaaaggcaaagatcctcctttacacggtggctgtatctatttgtgtttccaatgtggagtcagactgtctggtccaagccaaattccagcagttaatgggatcttagctaagtcact

SEQ ID NO: 525832 - DNA, 565 bp, Homo sapiens
ccaatcaataaggtgcattgatacatcactgggctagagcagacatggcagaaaatgcaacaagacagagaaaacagtattacctagaaatcttcgcaggaggaacactgtatgtgttagtagaagaatttcgatgagtcatttggagtaggatggagagaggaaaaagaggatgagagacaccctccctctccaaaagccatgctgtggtaataacaggtggtttgatagactggtttctaaggagaacgggttgcsttaacttggaagattatgcttgggctaaatgtgttttcttgggtcagagctggagtgaaatttttcttgaaggaaaaggtagaaagtttgaaatggcctcattgactctcttttgtaatcatttccccatgcagcttgcctaacccctgaatttctgcccatcatttgctaaacaaaatgatgtctgtgtcacttggcttctgggcttttggtatatgtatcccacatcagggcaatagggctctgcttctttgtgaaggcttgggaagagccttagacaacattgtggggtatatttgacaataaa

SEQ ID NO: 525833 - DNA, 605 bp, Homo sapiens
aaagttctcgaagtgaccttgatagacacagtggtcaagaaaggcctttgtgaggaggtgactgttaaaacctaagtcagacaatgtcattgccctgctcaaacctctgcaagttctccagttttggggttcaccctgtgatgcctttattatttgtccctaacccagccctcacctttgaagtctcttcaacttggcycatctggtgtgaattctgtttctagcctagaacctgagtgttacaaaaaggagatccacgtgaaggagttggaaggagccgtacaaaagaggaaacagcatgtgtatgaaggtcccaatacaggaaaagcctggagtgtttgtgaagttaggagggctgtgtggctgaagtcccactagtaaggggaaaatggcttgagatggttatggagatgcaggcagggtcaggcagttagagccttgaggctacctaagaagcttgggttttactttatgagtgaactcacaagttctcactcttataaagaaggcaagttacttgctaattcaaattgctctttatttaagcaggaggacagaaagccaggaatgaatgagaagcttttgcttctcaagaggagaattat

SEQ ID NO: 525834 - DNA, 675 bp, Homo sapiens
tggagctaaaggtattttcattgtgtattcccattctttatactgcccctggaaaattcataaataaatgttgagtgagtgcagccactgtgaaccaaatatctggcattttctccattattgtgtttttaagcaacctcccccacccccaaatctagaaatcttgagaagacagaaaagcacaggaatgacagaggatgaatgtcccaccaaccaaatatgtggacagtcaggaagattaaatttgattgagaacaaaaagggaaatgtgcttttatctcactctactgttgtggactaaaatcaatacctgctgaatcagttatgaacatattggtaacaaaacccctactggtgacagaaaatatggcagtttattcaatcatgacagaaaaatctagaagtagactctccagactgtcagtgataccatcaaggtcttctttctgctctgccatcctttgcgtgtagcttttgtctgctttgttacaagatggcagccggtcccctaaaccatttgtccagggaggaagaaggaacagtgggcagggaggaaggggtggtattkaaatcaggaaagcaatcacttcccagaagctgtcactttatatttcactggccaggactgtgccacatgctcatctttctgatgtgtgatgatgaagctataatttt

SEQ ID NO: 525835 - DNA, 454 bp, Homo sapiens
ccacactgtctgactgtgtcaccctttcaagtccccctcatactcacggctggaagcttctccaagcagcgccaggagaaatcccatctcatgactgcatgttccccaacacccaccctgaggacttggtcatactttggcctcacttttctcaaaattgcctcatcccgaaytctcaagccctgaaatccacctctctaatgacagctcctccctgagctgccccttgtcgttgtcatctggtttaccttcccctgtcttccaagtcctggcccctgggcggtcagctcactgtcagattttcttgccaatctaccacctaccctggacttcctggttaactgtgcacagtgataccttcacagcatcctcaagtcttgtctctgttagttctgttttactcttacctgggtctgggatttggcttgctgggggaaaaaggccttcatcattc

SEQ ID NO: 525836 - DNA, 615 bp, Homo sapiens
gctcacagcaaccattcttccttttcctttgagttttggcacttcttaaagcctgcatatcccagacccacttgcagctagcatgcgaatggaacagaagtggtgtaggcaacatttaacccttaaaaggaagccacctgccctccactctctcttcctccatctccgatgctggaactcaaacatggtagggtgagccggcatcagccatgcagatgaggatgtcagagcaacagggcagacgcaacgtgggtctctgaatgaacatggaggaggagcacttcccacctgccttggaccacccggctacctctttctgtgctgttgggtgagagagaaataaacttcatttggtttgagctgctgttgctttgtgtcttttctgtygtagcagcttagcctgcacgctgacacaaaagcagagatgaatcagccgctcatagagggtagaggcgacggtgagaacagagtagtggcaggagcaagaaaagcatctggaaagaggtaaccacagagagacaggctctgggctttggcactacttggcaatctttttactgatcttggagaattccctttctcactgtgtgtgttaggaagagggaggtgtgttcc

SEQ ID NO: 525837 - DNA, 588 bp, Homo sapiens
gacatagttggaaaggattctgagcctgaatctagacatagttggaaaggattctgagcctgaatctagacatagttggaaaggattctgagcctgaatctagatgcagttggaaaggatactgagcctgaatctagatgcagttggaaaggatactgagggtaattagcaatgtctgcccttgacccagaggggagtagcagttgtttagaatgtatttacaatccatgtataggtatttttcagcattgacagttttcttcttctgacaaatactcattattttccacaaacagatagcartctaactgttccttctcttattaacctgagtccacagcactggagtggtgttgggtcatgagtcctatcacaggagaaaaatcagtcatttacaaaggcaaagccaaacagagagttcttgatgagagtttaaagttcagaggacacaggaaatatttatttgtttcatgtattttacatttgttactagtatgtgctgggcactatcctgttttacaaacattcactcactaacaaccctatgagatgagttccagtaatatcaccattttacagaatgagaca

SEQ ID NO: 525838 - DNA, 574 bp, Homo sapiens
caaattctgattttcactcacacttattttcctcatatctgattattcttatgtaaaacaacaataaaatgaaatcttaacagacatttttctgatttgaaaacttttaaatgtccattttagaaaatagggaaactccaaaatcccctgtagtgacatttacttattttattgtttrttttatttcttgatgatcacagtgacaggtgctcattgtagtccatttggaatgtacaggaaagtataaaaggaacaaagtgaaataaccaaatggaggcaaacttctcagcattttcccttttgccattaaacatgttgaatctggcagagtgtcatggctcatgcctgtaatcctagcactttgggaggctgaggcaggtggatcacttgagcccaggagttcaagaacagactgggcaacatggtgagaccccgtttctacaaaaaatacaaaaatcatctgggagtggtggcacaggcctgtagttcctgctacttgggtggggtcctggctgaggtgggaggatggcttgagcaggggaggtcgaggctgcagtgagccgagatcgtgcag

SEQ ID NO: 525839 - DNA, 496 bp, Homo sapiens
gtgccttctaattggtctcgcttagcccgggctcagtgaggaaagagaaggtagctgccttccccaaccgactggtacaaagtacagtcaggagcaaagctgctctctccctcttaactcgctatatttatgtttccccacttctscgggttagaggaggtaattaactgttttggtttaaaagcctcctgctgggtctcagtctgcgtgggagaataaaagtaaacaagcaaaagggaacagtgtcatcaaaggacctcgtacctagctttcttcattatgaggatgaaaacgtgcctttttccaaaggtgccatgaattacctgtgcagggcagggtccgccagcctttcactctttttaacggtaaatcaagagtgattggctcataatttaatggggcagccttaccatggttccagatacacatcagataacagacgtgtcacctgtccctggcctgagcagtttagagtgatgttcacaacatctttcag

SEQ ID NO: 525840 - DNA, 496 bp, Homo sapiens
gtgccttctaattggtctcgcttagcccgggctcagtgaggaaagagaaggtagctgccttccccaaccgactggtacaaagtacagtcaggagcaaagctgctctctccctcttaactcgctatatttatgtttccccacttctccgggttagaggaggtaattaactgttttggtttaaaagcctcctgctgggtctcagtctgcgtgggagaataaaagtaaacaagcaaaagggaacagtgtcatcaaaggacctcgtacctagctttcttcattatgaggatgaaaacgtgcctttttccaaaggtgccatgaattacctgtgcagggcagggtccgccagcctttcactctttttaacggtaaatcaagagtgattggctcataatttaatggggcagccttaccatggttccagatacacatcagataacagacgtgtcacctgtccctggccygagcagtttagagtgatgttcacaacatctttcag

SEQ ID NO: 525841 - DNA, 544 bp, Homo sapiens
attaactaaatataactagtaaaatgttttactttattaaaatacatcattttaaatgataccaaatgctcattaaggttaaccaaagtgttaaatgcttagagtgtaacacttacccataattttagagtagcaaggttcacartgtattgtctgtctataaatccaaatactatcacccgcttgtagattttccaaaggctgcttgcatatttcacactaaagaaaaaaatacatatataaagtttccattgtaaatgaaatctagattattagaggaacagacatcatctctctaccatcgaggcacttttaagggatgtttatcactgaagttttctacttcactcacagtggagtagatatgaatgtccagaaattgtttatgccaaggacaagatgaccactcaatatctcaaacaaacaaacaaaaaaacacaaaggtgcatttattgtttgctaacttaagggagagctagttatgctgtccaggcacaacctcatggagagaaataaactgcttatctgactgggtttgagaaaa

SEQ ID NO: 525842 - DNA, 629 bp, Homo sapiens
gatgtgaatggaggcagcgtggtaccaacacaatgagtccaaagatctgatgcgctcattgtgttgaaatgagttagtcgtacccaggaaccactaatctattatcaagcccagaagtaggagcagagaggagagagaatggaaaggaaaagtaagtaggagaagaaaggcattatagtagataaactttatctagctttatacttttaatcattctagtaatgtctttctaagtctcatgtatataaataaatattttctgcttttatttgttctgtacccacttgcttatagctacctagcaaatattttcctatggattatccataaacacacacacatatgtatgcatacacttaaatttcccatttaagactgtaagcacttcaagagtagaaaataggtgctctatgtccttcatccattccacaggcactgatctaggagctgcaaatacaaagagtggtgagccagtctcctctgacaagatgctctttccactggggaaactagatgcatgatataacatgcatgattgtttccagggcttgggttgaaatgcasagtggaatacaggtacgtggacagactgaggagaacagagccaagagaaccactaacccctgggg

SEQ ID NO: 525843 - DNA, 597 bp, Homo sapiens
catcacctcaatgattgcaacccacaccttctattccagatagaatgttgtaaagctttcctctagtttctctggaaaaagttaaaagtacaaaagataaggaaaaaagttagaaaatattagtgtactatataacattcatacaccattactaaaatcagccagtgtgacactactagtaaaagtgccaaaatataaggtgacgttttgcaaaaccaagttcatgtttagttcactaaaatgtatatgacctgcccaaatacacacataaagaattcattctgatataccatgtgatgtactcttccacaaaagtattgtgtcaggtgccattctactggaattagggcaggaaagatcagctcagtatttgggccaagatttggagagtcagaatccatttcaactggaaagaaataaagaacttattttttaagagcccaggtaggtctatgataaacagaataatagcccctacccctcgcccaatactcgataacgtcatgataatcacattggaaggattgccacacaattcatatttagaggatagtcaatgtaaaaggaaagaagaagtrggggagggaaggaaggcag

SEQ ID NO: 525844 - DNA, 601 bp, Homo sapiens
ctgaggtcactgggtgagtaaaattgccagaaaaagcagcagagttggaagagtgtccataaatgttggcaccatccactattcaggaatacttatctggagaaactgatgctttcttattttaaattatatacgatatacagcactaggattttgttcatatttggaacttttaaaggtgtggttaagcatttttgaaacaccagggaagataaaacccaagctcaaaagctctgagatctcaccctttgtcacttctctgaagtgaagtggccactttgacgatgttatcaagatcctgactccttcaaacaatgaaaaataaatacaggtcaatgatagtcgagctatttttgaaggagctaaaatttctcatttgttttcagtaaataaagtaaatagtctaggtggtgttcaggaattactgagtttaacagaatgacaaaatggttctattatgtcagctcatggcacacagagacacacacatcccccactgacacacacacacacacacacagacrcacacacacacacacacacacacacacacacacactcccctctgttattccacctgggtgttggctctgccatctag

SEQ ID NO: 525845 - DNA, 620 bp, Homo sapiens
aagcaagtctatttttcctgattcagagacaagtcaattagaacatctttcaaaatttgtgatagttttgaaataaattacaaatcccttcagtaaaaaaagattaaagaactactcaaaggtatttgtaacataagcaaggatttgagtggtaacacaaagtttcaagaacatcgttcatcagaatctgtatctcttagtgggaaacttracttggaacaaacatgaacaaaaaatacatttttaatatggtttatatgtatattatatgtgatacatgtcaaatacatatatgtatttatatttgtatattaggagcaaatatataaaaagtctgtgtacaaacactttctgaacatgaatattgttccatttttatcttgaaggcatattttcttaagacaagttagccattagtattcaaagacaaacataaataaacatatgtgttgggaaataaaattagaaaaagttctacaggcgcttctttagggaatgtgcacacaaaacattcatgctttgcccacagcgggtcacagtccatttactttcatttcccttgaacttcattttgtcaagaaattctggagtactaggtcttacctattatcctgtctcag

SEQ ID NO: 525846 - DNA, 649 bp, Homo sapiens
gggcacaggtctcacataatcattgcaaccaatactcaagcatcctgtgatcatttgaaaacatgcctgttaaatgaatactgttcatgtcactcatgaatggaaggtagaaaatgactataaaaattcatgtgtttctagcatttgtttacatggcttttaaatacaaaattttagaagcaatctaaatatgtcacctactttaacttaataaaagtcataatagtatagaattctcttgtatctatctactaaatcaaattattgcatgcattttgaacttcatttacttaatgaaatatttaggtttttttaattgtaaaaatagaggaagttataggaaacttggaaacattgtaaaaatatgrtaggtgtggtagattggattatggtcccccaaagatgttcatatcctaatgtccgggctctgtgaatatgttatcttacatgttaaaagggactttgcagatgtgattaaattaatacattgacatgagagaattatcctggggtattcaggtgggcccaatataatcacaagtgtccttataagagggagatgagaggatcagagtcattgacaggagatgtggtggcagagcaagaggttgaaatgacaccacgaagagatcatggaccaggaatgcag

SEQ ID NO: 525847 - DNA, 596 bp, Homo sapiens
ctggctctgattccaccaacaaaggagaggctcaccatttgagtccagccacctctatgttactcacctttctctggaacatttaagaacagaaatgcttgtgttttttaagtgtgaaatacrcttcatattcttaatgtacatacaatgtgttttaggttaacaagagcttaatgcctttcatgcttatttcatattttaaattgtattcgtttcctgaacccttcctcatggtggccaacattgtggctaaagtataatatcagtcttttaaggaacaaaaatctgtaagccctagacatttccctcttgacctataactaacatcacagaatcaatctccctaaaagagtagggcagattatttttctcctggtacttgctcagagggtatcacttgtcatttttctgctctgcagaggatgtctttaccttgatgcccactgaacagccactttggagcacctgctatgtgccagcattgtgcaaggtgccaggaatacaaagatgcatagaacataatctttgacctgaaaatatccacaaatgaaaatactaaagtttatcacggaaagtgctatagtagaggtgtgtga

SEQ ID NO: 525848 - DNA, 643 bp, Homo sapiens
tgtaaatttacctaatttcctgtcattaaatggctgtgttctctagaaccaccattttgtgctttgggaagtgtctgtatgagataggagctggccagatgagcacttacttatacagtgttgtgcctgttctctggcagccgctgcatggcaactgactccgtgctgtcatgtgtatgtctgagtagccagccagcaaccttgggagaygtctttaaatcgtgtaaattggcaaaggcgaggagaacacccaggctagagtgagtgagaaggttcatgagagtcaggtgaaatgaggttactcttagccaaactaaaaagatgtaacccagggcaggcagatggtattggtgcctgacacctgcatgtgactttcactgacttcaaaatagctacagtgaaaagtcagagaagggagggtagatagaagggagatgaagatcattttccccaggtgcaacatcaatgattcacactctctggttctcctctttctaatgccaaaagtggtgagcatacctctcctctgcccaggccttacctaccctaaccagttgtagaaacaaaataatagctgatttttcgatctttatgagaaattgagatgctattaaatgatttaaataaactacctgaaaatctg

SEQ ID NO: 525849 - DNA, 627 bp, Homo sapiens
taaatttacctaatttcctgtcattaaatggctgtgttctctagaaccaccattttgtgctttgggaagtgtctgtatgagataggagctggccagatgagcacttacttatacagtgttgtgcctgttctctggcagccgctgcatggcaactgactccgtgctgtcatgtgtatgtctgagtagccagccagcaaccttgggagatgtctttaaatcgtgtaaattggcaaaggcgaggagaacacccaggctagagtgagtgagaaggttcatgagagtcaggtgaaatgaggttactcttagccaaactaaaaagatgtaacccrgggcaggcagatggtattggtgcctgacacctgcatgtgactttcactgacttcaaaatagctacagtgaaaagtcagagaagggagggtagatagaagggagatgaagatcattttccccaggtgcaacatcaatgattcacactctctggttctcctctttctaatgccaaaagtggtgagcatacctctcctctgcccaggccttacctaccctaaccagttgtagaaacaaaataatagctgatttttcgatctttatgagaaattgagatgctattaaatgatttaaataaac

SEQ ID NO: 525850 - DNA, 522 bp, Homo sapiens
gcaataaatgatgaggatctgtacattcaaatgaggagataatagattcattaaggcaaaatttgccaaggggtggccaaaattagtccttcaacacttcaccctttacccatctgttgtctatatgggattgctagagactgatctgagtttggagacagtatttcttctgaacagagctattggagttctatgcatttccctgatttttccctccccatggagggtgtaggagggatgatgtcccctatctcaaaccaagtgagggagactttttatagagaagaggaatatatgccacaaggagaaagtaacatctcactcttcccctatccacctccctgactgatacttgtagarcagcaaaatgtattggtttactagtgctgtttcctgatcagagtaatataagagaatcattttaactacttgacttgtatctcctgacatttccatggggtacaagactgatgctgattctcactttaatttttaactttttaacaacttaactcttcccca

SEQ ID NO: 525851 - DNA, 597 bp, Homo sapiens
tcgtgtttttttttcaccttttaacatgagcattgttaaaatgctcacgacttaacgtttttactctcccattgaattacttagttcacactctttttcttttattttctgtatgcttattttaaaacctttgttcctatatttgtattctcggtggttcgaagagtctcaaacattgtctcagcagcagcatcatatcttacaaaagttgaggaaatactgtatttccagcttaggaaactgaaggtaagtagcacaatcaatttcaactggcatctgtttcaatgactctgtaaatgcaaatgggttgtaaaatgtcagtaaatatctagggagttgttataagctacaggtaagtgaattttctacttttgaaatggttgtagcctgcatcatttgctgagttccactttttaatacataggaatactgcagagacaacatttttatgtgtttgacattttatgaaaaaaaattgcaagtcatgaacagccctctttctttcttaagctacctgaaaataataactataattaacttttsttacattgttatcagaaaggaatagtcaaattagcattaaacagatgtaaagtc

SEQ ID NO: 525852 - DNA, 575 bp, Homo sapiens
tgtatataaattctctggaagacctatcgtgcttagagaatgaattttagatatatatttattttattttattttattttwttttttttgagacagggtctcgtactttcgcccaggccggactgcagtggcgctatctcggctcactgcaagctccgccttctgggttcacgccattctcctgcctcaaccttccgagtagctgggaccacaggcacccgccaccgtgtccagctaattttttgtatttttaatagagacggggtttcaccgtgttagccaggatggtctcgatctcctgacctcgtgatccgccggcctcggcctcccaaagtgctgggattacaagcgtgagccaccgtgcctggccgaattttagatatatatttaaaatgtctaattactttagctctttggtttaatgttaaaacgccatattgtttatagaatcagcttgctttctcaactaatgaaatatgcattgaaattgctctatgtgcaacgcaccatgttaggtgctgtggaagggtgcaattcctgtactccagaagctgacatttcagttagatgtatat

SEQ ID NO: 525853 - DNA, 532 bp, Homo sapiens
ctggcccagcatctttactcttcaccactttgatgctccctctctctgcctcccaggtcccatgtctgggttagtgctgtgtgctcctagggacgctgcttttcgtctgttgtgcttccaagtagataactcttcacttgccttttttccttgtctgtgtcttcaactasagtggacattctacaatggcaaggactgtacccatcttaattcatcttcattccctgcccatgatatgttgggatgagggtgggctgcagagtgaagcaaaggtgtttttctcttcatacaaatcccatgagtgcatggagaggaagtggggagagctgaagatgctagcattaagatgctagagaaacacgagacaattgatggagcaagatatctaaggaagtagaatattaagagtgagatagtgttgaaacactgaccttgggaagaaagaagaatgccgcttccattaagactgaaagagaggaggaagaggtggatattgtggaagtagagaggaagctcataccagacgacttgg

SEQ ID NO: 525854 - DNA, 532 bp, Homo sapiens
ctggcccagcatctttactcttcaccactttgatgctccctctctctgcctcccaggtcccatgtctgggttagtgctgtgtgctcctagggacgctgcttttcgtctgttgtgcttccaagtagataactcttcacttgccttttttccttgtctgtgtcttcaactacagtggacattctacaatggcaaggactgtacccatcttaattcatcttcattccctgcccatgatatrttgggatgagggtgggctgcagagtgaagcaaaggtgtttttctcttcatacaaatcccatgagtgcatggagaggaagtggggagagctgaagatgctagcattaagatgctagagaaacacgagacaattgatggagcaagatatctaaggaagtagaatattaagagtgagatagtgttgaaacactgaccttgggaagaaagaagaatgccgcttccattaagactgaaagagaggaggaagaggtggatattgtggaagtagagaggaagctcataccagacgacttgg

SEQ ID NO: 525855 - DNA, 535 bp, Homo sapiens
gctggggctttgtatgtttgttttggccacttaggaataaaattcactttggctaaagttttaactcaagctttccttagcaatttatctttgatttgatgccaaataaacagcattttagatgaaaacataagcctttctaagaagcgagggggtgaaaarcgggaagtactctggcagccttcatagtaattttggccacagccacgagtataataaatataacttgcttttattccatcaatttgttgattaactggaatagtaaccagcagtaagtgtatttctgtgttgtgttccaatattttaacattatcataattcttttgctaagaaaccatatctaacttcttaaatcatgaacgatacattatctcctgtgtggatttaagcaaccttgtgtactttaaaaatggaaatggtaaccaaattgagaacaatgattaaacacatatgaatgcacttaatgttaaatttactcataatcttgaccatatatagaaacagtatttttcactcatcatttaagcactag

SEQ ID NO: 525856 - DNA, 623 bp, Homo sapiens
aagtcactctaaaatcactgaagtcagagtgctgggggaaatggcacatctggtttccttcccatttkcaggggagattcttgttaatcagggccaggagggagaaaccttttctctgtattttgcttcagaattagaaataagtcttgccgatcaaggtggctcatgcctgtaaacacagagttttgggaggctgaggtaggaggattgcttgaggccaggagttcaagaccagcctgggcaacctagcaagactccgcctctacaaaaaataaaaaatagaaaattagccaggcatggtggcatgcgcctgtaatactagctactcagaagactgaggtgggaggatcgcttaagcccaggagtttgaggctgcggtgagctatgattgctccaatgcactccagcctgggtgacagagggagaccttgtctcaaaaaataaataaataggcttaaatgcaaattcccttgggaggtggtgaaggaaacacagtggaaggtgaatgactggatatcctagaagaacaggtttggactggacaaagacaggagggcaccagattcttgaatcaaggaggggatagaagaatgagaagggaacacgcagacattgaaatccag

SEQ ID NO: 525857 - DNA, 538 bp, Homo sapiens
ctgagaacacaaagcatcagagaaatggtggcatgccaagcttatacagctataagaggcagagttgtaacttgaacccaagaccatttgatcatcccatacactagagaaactatgaaaacatggcacgtgagtggtcagtctcacatgttgggttctgagaacattaagctgtaactatttgcaattgaatgtgacttatattcttaactagtgtcatatccgtgaaytgcagatcatttgcccaaacattctaagtaacttcagttaaggttttcttccagatgttatgtcttacatacttttgtgtacttgtgtacttatgtaccgtttactttatttcttaatatgttaaaatactatctgtaaacaggaaacacatggttaaacatattcacacctctataactgagctaaaatcactttctaccatcttggtagtagtaattttccggaaaaggaagcagatgaagaatgtaagcaattaagagtgaaaacaatttaactggcattggatttatattagtgttagtcagca

SEQ ID NO: 525858 - DNA, 583 bp, Homo sapiens
tggtggcatgccaagcttatacagctataagaggcagagttgtaacttgaacccaagaccatttgatcatcccatacactagagaaactatgaaaacatggcacgtgagtggtcagtctcacatgttgggttctgagaacattaagctgtaactatttgcaattgaatgtgacttatattcttaactagtgtcatatccgtgaattgcagatcatttgcccaaacattctaagtaacttcagttaaggttttcttccagatgttatgtcttacatacttttgtgtacttgtgtacttatgtaccgtttactttatttcttaatatgttaaaatactatctgtaaacaggaaacacatggttaaacatattcacacctctataactgagctaaaatcactttytaccatcttggtagtagtaattttccggaaaaggaagcagatgaagaatgtaagcaattaagagtgaaaacaatttaactggcattggatttatattagtgttagtcagcattgctttaattattctctagtggaacactgttctatgaaatgaactaagatgttaaaatcaaagaatctt

SEQ ID NO: 525859 - DNA, 604 bp, Homo sapiens
agtgccatgtggaatagtgatgttgatagatacagtaagagtccaaggaagggattataatgagtaatcaggatagtcagaaagctcatggaatgataggacttgagctcatcttaagtgatgggtggaatttgaactggtgaagaggaccacatcctcagcaaagggagaaaaatgtaacaaaggtttagaggtggcagttaacatgataggtgtggaagacaggcagcagagcagtggccagggatgatggtgggttggaggaggaagagtatggctattggggaaaaatgtaaggaaagttggttggcagagtgagggccaractcaaagattattttgttttggccaaaattaactttaaaagatctgatgttaatcttatgttatacctttttaaaaaactattctcttcagaggtttgttttttattttacttatttgtgtcagtaaaaataaaatgttcacggccagattttggattgaatgcttagtagtcatgcaagtatcaaaaagcaagatttagataagagaaaatgttatctttttttactgtatcattttactattatattttatgattttttattgccttcattcagtt

SEQ ID NO: 525860 - DNA, 624 bp, Homo sapiens
tttttgtgtcttgcctgctgattttatgtttcatttataagaaaccgccagtgcttatcattacaggaaagctaatcctagttcatgccaattgagagatcaatttttgaaggtgtttgaaaacctggcccattttcatctggcagagtaaactactttgttctcaactaacaatttaaaatgtttgaactttaagaaagatcaaaattataagtgagaatgaagattctagcacattttaaatatcaaaaaatccattttatcttagcttcttttcctttattttgttatctgttttgttaaccatgtcaatccttagcaccactttctagaggggaagaggagtggacatttaaattatattgtctaccattagtcaaccactttatgaaaagaagaaaggaagaagggaggaagggagggaaggagggaagaaaggaaaagaatcagagggagaagagagaaaaaaatacaaaytggaaatgattactgtaggattttgaaatcagtgactttcatttctaaatcccttgttactaatcagaattcagtaacatgctactcacaggttcagtgttatggttattacatagaacatattttttccatttagtaatttgaaat

SEQ ID NO: 525861 - DNA, 582 bp, Homo sapiens
attttgcctgacactctcccaaaagagatttgagggatttcctgattcactggatggccaatrtcaccctgaagtatgaggtttttcacaaattaaactggaaaacatatctgaaaatctcatgccctgccagaactgattaaaagtgagaaaggcagagaataaagtaacacagaagtgatccttgtcatttttgccagattacatttcccccatgtagcaacgaggtgtctatcactccgggatcatccacttcgagggcaggctgagtgaaggtcattttggtttttattgattctatggctctggcattactcataaggatttacggtatttaacccaccaggagaagccctgaactataaatgactctccttttgccaggagagcctgctgcatcataagtgacaccggctacatggattccttcacagccatctctaatgaagcccgcagcctttgcctccgcacaaaagcacacggcctctcatttcatggggctgatccctcctttggctctgaatcagcacgaggttgtttagcttactaagtagggtaatccagatacagggacagaaaaag

SEQ ID NO: 525862 - DNA, 623 bp, Homo sapiens
tgtggagaaaattatacagagcatgcaagtattgaataggaaccttttaactttgttttgttttagaaaactttaacttctagttcacaatactcttgtgtatggttttcaakatttcatttaatgacctgccaaagcagaattaagttcataagggtttttttcagcttgaactgctgttacggctaaagtcaaagtattgtcatctttggagagtttctaaagcaattgctgcttgagtccatcagtgtgagagaggcattggtttgcctgactaaataatttgcccactaactccttccactgaaacaaagcttttaggatatcagacagtggaggatcctaaaatggcatgtgtgaggacttagaggagagatgggtagaaatcttaacttcctatcctagtccctaaaaatggtagaattaaggcctaccaatagtaggaagaagatacatctagaaagaaaatacacctgaagagtatctccttgtgttaggttgcatagagtatgattctacctagcatacgtgcaattcaaaatctgaaggataggttgtatggtaacttcatggcagagatggatcttatgttttatccagtacatcttaaaacagatgtcaga

SEQ ID NO: 525863 - DNA, 623 bp, Homo sapiens
tgtggagaaaattatacagagcatgcaagtattgaataggaaccttttaactttgttttgttttagaaaactttaacttctagttcacaatactcttgtgtatggttttcaatatttcatttaatgacctgccaaagcagaattaagttcataagggtttttttcagcttgaactgctgttacggctaaagtcaaagtattgtcatctttggagagtttctaaagcaattgctgcttgagtccatcagtgtgagagaggcattggtttgcctgactaaataatttgcccactaactccttccactgaaacaaagcttttaggatatcagacagtggaggatcctaaaatggcatgtgtgaggacttagaggagagatgggtagaaatcttaacttcctatcctagtccctaaaaatggtagaattaaggcctaccaatagtagraagaagatacatctagaaagaaaatacacctgaagagtatctccttgtgttaggttgcatagagtatgattctacctagcatacgtgcaattcaaaatctgaaggataggttgtatggtaacttcatggcagagatggatcttatgttttatccagtacatcttaaaacagatgtcaga

SEQ ID NO: 525864 - DNA, 623 bp, Homo sapiens
gtggaaatgtgggcagatgaattagcccctctgggcttcagtttccaattactactgcattctctaacttacaggactgttgtgaaagtcaggtaagatgagacctgggaaagtagactctaaaatgatctctgaatcacagttgctaaaattcagtcatttgtcatttgtttctgttattgacttttgggaaaggccgaagtcaatgatgtgacaacagccctgaacatgtaagtgtctaggtttaaaagcgacggagcaggttcgtagcttgatggtagctgacttgatagaagggaagggatgaaacttagatgggaattcaggcaaatgaatgatgctcacatccccagagaacacacaatttgttttcttaggcttaaaakttgtttgagaacaagggtatagaggtcttggtgaggaaacatactttccacataaagccagaagagagagaaaagacaagttttggagtattctcagtgttgtgagaaagagaaacagccatcctgtcttgctttgatatctccccctcctctcctctccgtgtatagggacccagggtcctgatgaaaagaagtagacagctttggacatggagtgggggaaacctggggctccca

SEQ ID NO: 525865 - DNA, 623 bp, Homo sapiens
gtggaaatgtgggcagatgaattagcccctctgggcttcagtttccaattactactgcattctctaacttacaggactgttgtgaaagtcaggtaagatgagacctgggaaagtagactctaaaatgatctctgaatcacagttgctaaaattcagtcatttgtcatttgtttctgttattgacttttgggaaaggccgaagtcaatgatgtgacaacagccctgaacatgtaagtgtctaggtttaaaagcgacggagcaggttcgtagcttgatggtagctgacttgatagaagggaagggatgaaacttagatgggaattcaggcaaatgaatgatgctcacatccccagagaacacacaatttgttttcttaggcttaaaatttgtttgagaacaagggtatagaggtcttggtgaggaaacatactttccacataaagccagaagagagagaaaagacaagttttggagtattctcagtgttgtgagaaagagaaacagccatcctgtcttgctttgatatctccccctcctctcctctccgtgtatagggacccagggtcctgatgaaaagaagtagacagctttggacatggagtrggggaaacctggggctccca

SEQ ID NO: 525866 - DNA, 610 bp, Homo sapiens
gtggttggctgaaaacctctaggagctccttcccratctgcctgggctgttgagctgaggtcacactcttctcaggggcacctcgaccaatgtcagagccacgtggaggtagctgaaggcatgctttcaccaggatgaccaccaaagatcaatgacttcaaaaggcaatggcacaagagcctttctgtttctgcccaacacaggacatcctgggttcaggaaaagttataatttaaatatacattcaagctttttcttttctttccttttctttttttgacagagtcttgctttgtcatccaggctggagtgcagtggtgtgatcttggctcactgcaacctctgcctcccaggttcaagggatcctgtgcctcaacctcctgagtagctgggattacaggcatgcaccaccacacctggctagtttttgtattttcagtagagtccgggtttcgccatgttggccaggctggtcttgaactactgacctcaagtgactcccaaagtgctaggattacaggcatgagccactgtacctggccaagctttttcttactatagagtgggagtggcatcttcttccagccttctgcatatgaggtacagtcta

SEQ ID NO: 525867 - DNA, 610 bp, Homo sapiens
gtggttggctgaaaacctctaggagctccttcccgatctgcctgggctgttgagctgaggtsacactcttctcaggggcacctcgaccaatgtcagagccacgtggaggtagctgaaggcatgctttcaccaggatgaccaccaaagatcaatgacttcaaaaggcaatggcacaagagcctttctgtttctgcccaacacaggacatcctgggttcaggaaaagttataatttaaatatacattcaagctttttcttttctttccttttctttttttgacagagtcttgctttgtcatccaggctggagtgcagtggtgtgatcttggctcactgcaacctctgcctcccaggttcaagggatcctgtgcctcaacctcctgagtagctgggattacaggcatgcaccaccacacctggctagtttttgtattttcagtagagtccgggtttcgccatgttggccaggctggtcttgaactactgacctcaagtgactcccaaagtgctaggattacaggcatgagccactgtacctggccaagctttttcttactatagagtgggagtggcatcttcttccagccttctgcatatgaggtacagtcta

SEQ ID NO: 525868 - DNA, 610 bp, Homo sapiens
gtggttggctgaaaacctctaggagctccttcccgatctgcctgggctgttgagctgaggtcacactcttctcaggggcacctcgaccaatgtcagagccacgtggaggtagctgaaggcatgctttcaccaggrtgaccaccaaagatcaatgacttcaaaaggcaatggcacaagagcctttctgtttctgcccaacacaggacatcctgggttcaggaaaagttataatttaaatatacattcaagctttttcttttctttccttttctttttttgacagagtcttgctttgtcatccaggctggagtgcagtggtgtgatcttggctcactgcaacctctgcctcccaggttcaagggatcctgtgcctcaacctcctgagtagctgggattacaggcatgcaccaccacacctggctagtttttgtattttcagtagagtccgggtttcgccatgttggccaggctggtcttgaactactgacctcaagtgactcccaaagtgctaggattacaggcatgagccactgtacctggccaagctttttcttactatagagtgggagtggcatcttcttccagccttctgcatatgaggtacagtcta

SEQ ID NO: 525869 - DNA, 610 bp, Homo sapiens
gtggttggctgaaaacctctaggagctccttcccgatctgcctgggctgttgagctgaggtcacactcttctcaggggcacctcgaccaatgtcagagccacgtggaggtagctgaaggcatgctttcaccaggatgaccaccaaagatcaatgacttcaaaaggcaatggcacaagagcctttctgtttctgcccaacacaggacatcctgggttcaggaaaagttataatttaaatatacattcaagctttttcttttctttycttttctttttttgacagagtcttgctttgtcatccaggctggagtgcagtggtgtgatcttggctcactgcaacctctgcctcccaggttcaagggatcctgtgcctcaacctcctgagtagctgggattacaggcatgcaccaccacacctggctagtttttgtattttcagtagagtccgggtttcgccatgttggccaggctggtcttgaactactgacctcaagtgactcccaaagtgctaggattacaggcatgagccactgtacctggccaagctttttcttactatagagtgggagtggcatcttcttccagccttctgcatatgaggtacagtcta

SEQ ID NO: 525870 - DNA, 656 bp, Homo sapiens
gatggaaatgttcattttcttaattgtatgatgattttacatcatataatctcatggagttttacactgtatataagttcagtttattatatatcaattatatcttcataaagccttttttaaaaaaaaagaattgtttttccttccacgctatcatcccattgtgttaacttatatgactgaktttacaattttgaccaaatagacaaattaatggaatgaagaactagttaagtgcaaggcaaaaactttacctcatgagtacataaaacaacatgctaaaggcattactcatgttactcgaagagctaagtaagacaagtccaggaaataatgtgataacattgtacaatatactatcttcaaatatgctgccaaagattcagaaatcaaagtgagggagaaccaccagagtagaggattctattcatgaggtgaagctatagacttctacagaaagagaaaagctgtacttttcttcttacatttcaaaacacataaaacaaaatagtcactttttaaaataagtgctgaccattgagttctcagataagttagaaatgatacactgctggtgagagtgtaaattaattcaaccattgtagaaaatagtgtggtgattcctcaaagaactaaaaacagaactaccctttgac

SEQ ID NO: 525871 - DNA, 197 bp, Homo sapiens
aaccatcttcacataaagtctcagcaattgcatgccccatagagggaagattaaaakagacaaacaattagtaagacaggaaactaaaagctgtccatggaagggaacaagaacagtaataaatgggtactccaaaagtcaagagttacacacaaatatcaaacctgtaatcacccaatgagttcttcctgcctgct

SEQ ID NO: 525872 - DNA, 500 bp, Homo sapiens
ctgacagacttttctggtttatagttggtgtgtcgcaaggttgtttatacatgagcttcagctcatagaacttcaggataaagagagtttcaattttagtgagtccaagtcagaaaaatggaagaaaaatttagaaacattagtttggagacttatagccaggaaagaattcaggattcrggatttcctgcaaggaaaataataaaatccccaaaacaatggacagggttaggaatttataacaggtacatgaaagttttcttctgaaacatagtttttctctctttagttccctacttctaacaaagataaatcatagaaagaccaatctatttgtaaaattatgttttagtcttatacctggcctgattatttgcataaagtaagtaagaatagtgatttatcacacaggctcttttaagttggtttgttggaacattttcataaaaaatctcagattagactttctaaaagcttaggagccagagctgagtgtgatg

SEQ ID NO: 525873 - DNA, 581 bp, Homo sapiens
attacgctgaaggaaagtagaaaataaaacaaaaaaagtacatattgtttgattcaatatatatataatttagaaaatgctaactaatgtagagtaatggaaagcagatcagtggttgcctgaagataggatgatggggaagggacaggagggagagattaaaaaagggcataaataaactttaggagtgattcattttgcatgacagatgtggatatgttcattatcctgattgttgtgttgcttgcacagatgtatatatatttcaaaacttaccaaattttaccctttgaatatgtgcctactaattgtgcaatactgtatgtcaattatttttcaataaagcagtttttttwaaaaaaaaaaaccttaaaaacaattaagaaaaaataaaaatgataaggaatgactaaatggttactttagaaggagacagtgagagaaggcctttctcaatgggatagttcatcaatggcctaggtcaaaatggcaggtgattggaaagttatagatagcttgatgggcatactcttcatgcccaggactctcactaggcacaccggatactgaaagtactgcaa

SEQ ID NO: 525874 - DNA, 574 bp, Homo sapiens
ggcagacataagagcggggagaaattctggccatgcactgggcgctctcaggtatggtttatatgcctggytagggcctggctccaaatgtcccccagcaaacaggtttgttttttttttttgtaattaccatactttgggcttggccctcacaagattatctcccttgaattagataggatttttttggacacgatgaaaaaccgtgcctcctcttaacagttactatattataatgctatgccttggtctttactgcgggggtctcctagttccaggaggatattaacccacacatatttgtgtatttagatgaaggtaatatatggtcctggtattaaaacttcaatcactatagaagagtttttaacaagatttaaaatatgtgcagaccccatgactcagcagtttgaactccaggaacctcatctttaaaaacatgcaaccagcaggtgtgcagaggatacttcttttatctctctttgtaaaagcaggaaaaactggaataacctaagggtctattgaggagagaggggttgctgacttacacatcagggtctatccatacaatgga

SEQ ID NO: 525875 - DNA, 574 bp, Homo sapiens
ggcagacataagagcggggagaaattctggccatgcactgggcgctctcaggtatggtttatatgcctggctagggcctggctccaaatgtcccccagcaaacaggtttgttttttttttttgtaattaccatactttgggcttggccctcacaagattatctcccttgaattagataggatttttttggacacgatgaaaaaccgtgcctcctcttaacagttactatattataatgctatgccttggtctttactgcgggggtctcctagttccaggaggatattaacccacacatatttgtgtatttagatgaaggtaatatatggtcctggtattaaaacttcaatcactatagaagagtttttaacaagatttaaaatmtgtgcagaccccatgactcagcagtttgaactccaggaacctcatctttaaaaacatgcaaccagcaggtgtgcagaggatacttcttttatctctctttgtaaaagcaggaaaaactggaataacctaagggtctattgaggagagaggggttgctgacttacacatcagggtctatccatacaatgga

SEQ ID NO: 525876 - DNA, 534 bp, Homo sapiens
aactggaggagcagagatggttaggggcaatatacaaggctggggaaatagctttgtgaagggattgaaagagtggaaaggaaattcagagtggtttgagcttggtgcatgagggagaaggaagtagtgtcaagaacaaaagttagagaaatagtggctctaggaccctgagagccttatcaaacccactctcctgatggcattagtgagctattaagttgatgacagacattctagaaaaatcacagtagatgccatgtacagaatgtattagatggaggcaagaaggtcatcaccgttaaaggtcggaggtaagaaatcaatcccacaatcccatttttagagtctctttcttcagaactactcctggtaccaagtacttcatgagtcagggtccagtcagaagagagaagcaaagtatgtatttcagatactacctgaggtgatttaacatagggaactggggacmtgggatatttgatggctgaaaatgtaaatagtggaagcagaggctatacatagagagagactggt

SEQ ID NO: 525877 - DNA, 600 bp, Homo sapiens
tttgtatttttttgtaaagatgagttctcactctgttgcctaggctggtctcgaactcctgggctcaagcaatcctcctacttaggtctcccaaagtgctgggattacagggataaaccaccatttttgtagtttttgtagcaatggggtcttgttatgttgcccaggctggtcttcaaacagtcatttccccttggcctccaaaagtgctgggattacaggcatgagctatcacacccagcccaggtcttaaaaatattttcatattcttaaatttagattccasagttctgcttacgcaaacaatgaatagaatacacttaaataaagactgatttgcatttgagctgagctgaacatcggcctagtatggatacctagtgattctaattttgttaagctctattttctcaatatttcattgacatttcttatagatgagtagttgaaagaaaggtagacggtctagaagctacttgaattttgcctagtacctatgtataattgaagaatagttgtttgcattttaggcatatactgttgtctgcctaattttgatcatgaagcctgcaagagtgatatagggactctaacagcctc

SEQ ID NO: 525878 - DNA, 552 bp, Homo sapiens
ttgtctgttgttcccttctttgtctccatgattcttgtcatttagctcccacttaaaagtgacatgtggtattttgttttctgttcctgtgttagttttatagctgcataatataccatagtatataaatgccatattaggaaaattgacttaggaattttctttagaactttagatttttatgtccacaagaatccttagtcattctcaaagctratgccaatgtttacacgaaaaaatggggcctgcagaaattggatgctttgcctgacatcacagaatcactacagtcaggcaaaagaagaaaaaagaacatgttcagatctttccagtttaatttttgactttggttgaagtggggttagatgagaaagagatgtgattattggccaagctgaatttgaagatacatgtctctctgacgttccttttcctatctgtatgcaagaacaatttgtaccactcttggcaagagcctgtctactaatgatcaaagaagtggctctctttcttctcaagtttgattattgtgagaaactgaatatgggttca

SEQ ID NO: 525879 - DNA, 552 bp, Homo sapiens
ttgtctgttgttcccttctttgtctccatgattcttgtcatttagctcccacttaaaagtgacatgtggtattttgttttctgttcctgtgttagttttatagctgcataatataccatagtatataaatgccatattaggaaaattgacttaggaattttctttagaactttagatttttatgtccacaagaatccttagtcattctcaaagctgatgccaatgtttacacgaaaaaatggggcctgcagaaattggatgctttgcctgacatcacagaatcactacagtcaggcaaaagaagaaaaaagaacatgttcagatctttccagtttaatttttgactttggttgaagtggggttagatgagaaagagatgtgattattggccaagctgaatttgaagatacatgtctctctgacgttccttttcmtatctgtatgcaagaacaatttgtaccactcttggcaagagcctgtctactaatgatcaaagaagtggctctctttcttctcaagtttgattattgtgagaaactgaatatgggttca

SEQ ID NO: 525880 - DNA, 526 bp, Homo sapiens
tatgtatgttcatgtgtaggtacrcacatacataagaagacctttatcagcacctgatattatttatatattcaacaagtcttagttcttgctgttacagttttctccggtagaatatgaactctataaggatagggactttgcctcttttcttcactcctatagccccagaccacagcagtgtgcctgaaacacagaagggtcacaacaaatattgattgaaagaataaatgatggaccatttagcttcaagaagaaaaaaatgcaatgaggctaattgttatcttcaaatatttgaattgcttttgcatagaagtgtgattagacataatctaaaatagagctaaattaatggtaatcccatttttaataacagtcacagtggttcagagatgaagtgtgtttattctctgttactgaatatgttcaaccagtgacagcctaatttcttaggtaagatttagaaaggatcatatttggactaaatgaattgtaagagctggtctaatcctgcagtctttgattt

SEQ ID NO: 525881 - DNA, 312 bp, Homo sapiens
gcttttgttgagcgtctaccatgtggcaagcacagaggacataaggccgagtaaatagggcctcagaagctcatagcctggaggccagggactgtggtggggctgccacacacagactttaataactataatacaatgtgctaagaacgatgatgtaaatatgcactaagtgttgtggaaatagaaatgaagagaaagttaattttttacttggaagggtaagggaccttagggaaagcctctgagaggagttcactattgagctgaacttttcaagaagagtaggaastttccataggcaaaacaacaaat

SEQ ID NO: 525882 - DNA, 614 bp, Homo sapiens
agcagattgggggagcagagagcttggcttgaggatgattatgtaagggctggagctaaggcagagtttctcaaacttggcactactggccttttagcttggaccattcattgttgccctgtgtatcggaggatgttcmgcagcatcctcggcctcaacccattagatatgtgcactccccctaaaaactgtcgccagacattggaaacgttccctgggggcaagattgctgcctttagagaagcactgagctaaggcctttgggacatgtttgtttatttactccataacattcttgaggaacttactgcaaacaagtggtgagaataacaagagggaaggacaaagtcctcacacgaaggacctcaaagtctggcgggaactagagtggacaaatgggcaaaggagaaggtgacttcagaacgtggggaaagcatgtaagaaagtatagacgactgacaaatccggggaatctgacagcggggaagggggctcggtgctgggaggagagggggtgtcaggtgagggccatgtgaggcaggacccatgtgaggcgggagcagagtcagatcatgaaggtgttggtgtgctgcaggggttgtatcaaagttaga

SEQ ID NO: 525883 - DNA, 395 bp, Homo sapiens
gaatggaaaaaaatgaggatcttaacattccaactgctttgaaattttatcactgaagtctttcrttaatattctccttacaaacatattagacacaatagtctttttttttgaaggttttgagctcaaggaaatttcatggaaaataaaaaaaaacatgaaaccttatcacttcagtataatctcataacagtttagaaaaagaatcacattgggtctgattttccatttcaagtgatctgtatggaagggctgaatgaacatgggttggtgaagtgaggtggtaatttcaccccgaaggcaatggcagcaaatacttgtagttagcaacgtataaaggtatgcttctcaacaagttcagtcactttagtctaccttaatgttaacctcacacc

SEQ ID NO: 525884 - DNA, 609 bp, Homo sapiens
ttcagtttttacattaactgaaaccaagatctctgtttcctgtagcctcccaaaggattacatataacaagctatrcccaactgaaaatgtaccataaaaagaaatgtattgcttacatatctaaaaaaatgttatggtggcattagacaaaacaagtctttctttcactttctaacacttaaaaatttcctgaccaaagataattcctggtatgcatgctaaggaattgtgtggcctttaatacacaaagttttgagttgtaacaactactcgataataagtttgcacagcatgtaatatctaaatataagccttttgtcttaaaaagattttaaattatgttcctaagttatatgaattctcacagcctattttgcattcttatttaacaaatatttctttaaaaaaaaaaagatcaactcaccaagcgcagtacatatctccttgttggagctgacgtgacaaaaacgcagtacataaaacaagagcgcttttttcatcaccctcagattctaagttacagatcatttccagtgcatctttgcaatcaacttctgaaatctaaagaaaaagccaatagaaatatgccacaaaatggttttatatta

SEQ ID NO: 525885 - DNA, 467 bp, Homo sapiens
tttcaaactcctgacttcaagtgatccgcccaccttggtgtgagccactgtggccagactaattttaaatttttttgtagagatagagtctcagtatgttgaactcctggyctcaagagatccctctacctcagcctcccaaagtactgggattgcagacatgagtcatgatgcccagtcaaaaaaaaaaaaaaaaaaaagcttttaaatacaggaaagatgttcacaactccagaaaagtattttgtctattaactttgttactcctgaaactgtacctcagacccttttctttgcatgttcacactcaacgagttggtctttcttaggtcaatgtaaatgcacagtagtgatataaataacagtttctgcttctgtcaccatacctgctgtaccactactgagaaataaaagaaactctttaactgtggaatgtgagccccctttaaattatcaggcccagagag

SEQ ID NO: 525886 - DNA, 388 bp, Homo sapiens
tatgtggttacatttgtacgtctgtgggtttgtgaacaattctggaaacagctcatcaaattttcccctaaatgctgtcagatttagccaaagaggtaggagaattgacagtggtctcagtagccaatgattcaatgtgggggtggtgaagcgggagctggagtgcaaaggagccaaggaaagacgcatggtggaaataggaaattcagggggaagagctgcttgagctgtttgcaacttctttcccccagaaccattaaaaaaatctcgtgagctcagatcatcaayaagagatgatcgattccccccgagtctgagctgcactgaaaactccccccgagtctaggtttttgctctttagatgtgggtttgtgactgcagcttcaaa

SEQ ID NO: 525887 - DNA, 643 bp, Homo sapiens
acaacggtcacaaatgggctcctgaagaatgtttcagaatgctctgttcacaaccatgggggcgtatctgccacctctgcccccaaatggacaatccgtcagtgtgataacccatcttctagaatggtaattaactcgagaagaggcagtccccaacctttttggcaccagggaccagtttcrtggaggacaatttttccagtgaacaggggagaaggtggtttcaggatgaaactgctccacctcagatcattaagcattagattctcataaggagcaagaaaccaagatccctcacatgcgcagttcacaatagggttcatgctcctctgaggatctgatgctgctgctgacctgacaggaggcggagctcaggcagtaatgtgtgctcgcccactgctcacctcctgctatgcagcctggttcctaacagaacgtggacctgtaccactctgtgacctgggggttggagaccctgcttggagatgttctcctttatccctacctgttcattgcaacactgaataaaaatttaactgaaatgttcattataattcacatgcattcaaatacttggttgtacttgggtaactgtcagagtttcctatattacctcactgctctagctttgtcttttgttcca

SEQ ID NO: 525888 - DNA, 621 bp, Homo sapiens
aaacagtaactcattcataaatcaatgcaaatgaatttggaattcagttgaaagaaataatttactagaaacatataaattaccaaaaaatagaaacccaaaataagccaataaacattaaaaaaatgaataagtaatcaaaagcttccccaccaaaaagaagtcacatacccagttcattttacaatcaattttttctaagtatttaaatatcatttctttctctcaaactattccagagaactgaaaaagaagaatcgaagaagaaggtaggataacttatgtgagcaaaagacagaaaatatrtgaacatagttgtaaaaatcctaagtaacatgttgtcatatttaaaaaatcctaatagatcaggatgaagtaggactgtccttggaatggacgtgatcactgtgttcccagagccttgctatgtggtttgagaagggcactgcaccctgtgatattctctccataaaacataaccccaacttcatgatgagaaactcatcagacaaacccaactgaagaaattctacaaaataccaggccagtatttctcaaaactctgaagatcatgaaaaataaagaccaagaatccgtcctagaacagaggagactctggag

SEQ ID NO: 525889 - DNA, 241 bp, Homo sapiens
tgtttaactgggtaaagtgaaaagaaaggagaggtaattttggtgcctggagtatctcaaggaggtaggcgtggagggagcagccgttgcgaaggttttggggagatgccagcaactctgttgcccrtcttttggtgtgtgtagggaaggtgccaaggtgtgttgtgggttctcaggaagggggaggtacctggagggtggcaagggcactggctcaggtcttccctcctctgtggccagc

SEQ ID NO: 525890 - DNA, 509 bp, Homo sapiens
cagagcttttaattgagcatgtctatagactctcagggtgtgctgtgtagacagccatatcatcctcaaatataaacagttctkttttttcccttccaatctttgcatgtacttttcttgtgttaccacattagctagaacctccagcgtagggttgaataaaaataataactttcttcttatctcctttctaaccaaaatgggaataatcctaaagttcaccatgaagtatgggatctgctataggtttctgctaagcgtttttattttttagtgaagaaattttatcaaaagttttatctgcatctattaaaattatcttatttgtcttcctttaatctaaaaatgtaaacatgatgttgaaaaattctggcatttctgtgatatggcctatttggccatcattcaatgtgcctatttgtttggatttcagtgagattgaactctatggtttcagtgttaaggttatgtcggcctcggtgagattgaactctgtggttttcgtatta

SEQ ID NO: 525891 - DNA, 610 bp, Homo sapiens
gaaataaggtttgttgtcacataaaccttaaaaatgactatttgtgaatctaaattaacaaaaggagccagcaattgagaagaactcttaggaatagcagtcacagygtgacagacacacacatacatatagataagggatttcctcatttatctcttcttcaaattttggctttaatcttaaattattctcagtatctttttttaaataaggacctcttattgttatttatatggacagattttaatatgtttgcatttgatgatactgtaaaaaacagaactgttgccagagttttaaaagtaaagggaattttttaaatgtacaactattagatatcaattttaaaactaccaaaaaactcagaatagccaattaaaccctaaatgatttctagtgaaatgagggaaaacacaagcacccggaagcctatcttgtctattataatagtcataaaatttctgaaatgtaaataatcactgcaatgctaataagagaaaaatagtattttatttacagaatacataaagttgtagaatacataaatttatagaaacttacatactccttcacctacagagtcagtgttaaacagccgaccctcggtgca

SEQ ID NO: 525892 - DNA, 585 bp, Homo sapiens
aagtaaagcacagtgagagtccccaagtgaggaggacagtgtartgtgaaaagcagtcagcactaaacctagggttatgtctaaatagtggagggaaaagagtttcaaagccacatgaagtgttgaatcataattttgcagtaatgactcttaaaaatcccaggaaaactggggtctacaccctcaaagtcaatgcagaagataaaggtagttaaacagagtctgtctattaaaaggacaaaagctgagtagacagcaaggaagggctaagaaccaaaagcacaaaataggatgaagaatgtaacatccaatagatcagctacgaaaattaactttacaactgaaaaaacaaaatctgtatgtaaactctctaaaaaacaaaataatacttaaatatgttcaaagatatattggaataaataaaaaagcagaagtcgtgattttaattttagaaaagtaaaatttaattgtaaagagttttcaagtgtataaagaggatcaatttataatgattaaaatattcacaacaaaaatttaatagtcatggcccactgtgtactgcaaactatgacatcatatttgaga

SEQ ID NO: 525893 - DNA, 585 bp, Homo sapiens
aagtaaagcacagtgagagtccccaagtgaggaggacagtgtagtgtgaaaagcagtcagcactaaacctagggttatgtctaaatagtggagggaaaagagtttcaaagccacatgaagtgttgaatcataattttgcagtaatgactcttaaaaatcccaggaaaactggggtctacaccctcaaagtcaatgcagaagataaaggtagttaaacagagtctgtctattaaaaggacaaaagctgartagacagcaaggaagggctaagaaccaaaagcacaaaataggatgaagaatgtaacatccaatagatcagctacgaaaattaactttacaactgaaaaaacaaaatctgtatgtaaactctctaaaaaacaaaataatacttaaatatgttcaaagatatattggaataaataaaaaagcagaagtcgtgattttaattttagaaaagtaaaatttaattgtaaagagttttcaagtgtataaagaggatcaatttataatgattaaaatattcacaacaaaaatttaatagtcatggcccactgtgtactgcaaactatgacatcatatttgaga

SEQ ID NO: 525894 - DNA, 531 bp, Homo sapiens
tttaatcttccagtgtttaaactagcagtaataaactaataacattcctaaacttccagtttcttccaaagttatttttattcatgttactaaattaaaaaaagtagtgttcaatactaattatttactgtgatctgttttttaaaacatctgagtggcattattcttggatgaaaagtaaatccaaattcagcctttatgtaatagtatgacatttttacttttggagtttataacagagtttaataaatgtataacatgagcaataatcaagatttttattgcatatgtttattaaagctcacttatagctagttaatagagtatgcgtagattttgytgagttaataaatccaatgcaaagtaccacttgtacatgatgatgtagatagcttcactataggtatcctgaagcatggagttcttcatgcacaatagtttgtcctttgtgtgaaaagataatttgctgaccatttgtgcacggaagtcctcatcatcagcaggacttaacttgagatgattcaagccaat

SEQ ID NO: 525895 - DNA, 587 bp, Homo sapiens
gtttcagtttggtgtaccttactattcatgaataccttttaaaatgttagtttttgctgagccatcattaggtgttcaagcaatttagaaacggattaaatcagctaaaagttactacaataatttgggcaagaagtgataacatttttgaacaggatacaacaatgaggtagtgggatatggtcatgttgtgaatatgtttgattttagaagcaacaaggtttgcaggaraggaagaatggtgttgaagatggtgccaaggatgctggttctcccaacaaattgtagctatgagtatgatgtttaattatatttatacatcttactttcttaacctggcttctgtaagcatgcaataaaaatgttttgcccatcatcagatcctcatatcactgcttcatgtataaaatactcttcatcttactgagtaatgtataccaagaaaattgtattttaggcattttgtcatttatttttgagggtgtacttcataagcaatatcacaatagcagcataattattttcccaatgtcagccccagttctggttttctttatttttccttttgagccttattggctgataag

SEQ ID NO: 525896 - DNA, 632 bp, Homo sapiens
ctcagtaaatgccagcaaatatttgggtgaatgaatgggcagaatgaccaggaggtcagcatctgccaggtgctgggaagagtccgtccttttttatttttatgttgaaatggaaagagtacacagaactctgaagggtgatgggagcaccgtattctaaatctcagcatcacacaatatacccgtgtaacaacctgtacatgttctcctgagtccaaaataaaaaaagaaagttctatagctgtgaggccttcagtccccacgtcttcagctgccacaagtctaaatgattcacatctcctcctcttctctccttccctgccctacacatttgccttgaagaaaaaggattrctcttcaccttttatattttgccttgatttttcttgatcaagaaataagactttttttttgagacagagtcttgctctgctgtccaggctggagtgcaatggtgcaatctcagctcactgcaacctccacctcctgggttcaagtgatcctcctgcctcagcctcccaagtagctgggattacaagcgtacaccaccacacctggctaatttttgtatttttggcagagacagtgtttcaccatgttggccaggctggtctcgaactcctgacctcagg

SEQ ID NO: 525897 - DNA, 612 bp, Homo sapiens
ccctgtgcagagcctgggcacccaggctgtcttctgctgaaaggcaagcctagtgggcagaggagagaaaggagcaaaggtcaaagataagaaacagggcaacttagatctgggcatctgctggcacttcagcaaaactgagctgtttacgcacaactctctgggcagaggatatgtggcttttgtctgattttcaaaggattctttttttttgagacgaagtctcactctgttgctcagggtggagtgcagtggcacaatcttggctcactacaacctccatctccttggttcaagcgagtctcttgcttcagcctcaggtgtgtgccaccacacctggctaatttttatatttttagtagagatgggttttaacatgttggctaggctggtctcaaattcctgaccttagaygacccacccgctttggcctcccaaagtgctgggattacaggcatgagccatcacgccctgctctcaaaaaagggctctctaatcaaaaagatggttatgattcaatgttccaggctatggtgccaaaagcactatcagcagagacagtttgttgttattattgctataaaacagctaccatttactgaatattttgct

SEQ ID NO: 525898 - DNA, 578 bp, Homo sapiens
gctgttatttgttacttgacgctgttgtagcctgttgacaggatgtgctacagagtttgcaggtgaaaaataaaaatgaagggctccttgctcagaaagtattaaaactgtcaggatggcaatagtagagtattaaaccaaatgcaggacccttctaagcatgggctgtgtgatcacacaagtcattggccatgawgtcatttctgcctctaaagagaggcagagctggggcatcctctcctgttctggctaagcctcagttttagaggcaagaactgtgtccctgggtcttggagatggggccttctcagcagtatcgcacacttccaactgtgggtctggtcaggggacagtgatcttgcaccttctgcaaaggtagaatgtatttttatgttccttctcccagctagaatgggtttccatcaatgtgctaagtgtgacagagtgtgtattgtctttccccaggggtataagccatttgttctgtaggagacatagaaaaaaggatccaggtagggtttaatgtttttctcacagtgactactgtgcctttctcctgggtcagcaccatcagtgat

SEQ ID NO: 525899 - DNA, 521 bp, Homo sapiens
gtttggggatacaaaagattcagtaaccatatctagatttcagaacatctacaagtggagctaaatgattttttgctagaagataaatttttcttgaaagaacttgactgtcatttcagcagttgacagctagcattcattaaagatgctaccttcaggcttttaaggaaaaggaagaaaatgaaatctaactggttggaatggagggtaaacataaattagagtataaagttttaaagttcttaagaatacacttagagaaactaaaattagtagaaaaggaaacaaggaatttgactaggcaagctacaaaatatgggataaaatcagtaaatatattaacaaaaaggtacttcaacaaattaagactatattattttatttttaccctggcaagtatttaaacatatcaattgtaagtgttgccaagggtaggataaaatgcgcatgggcatagycaagcatgggtgtagtggatgctgtagtgtgccacccagattcccagtgaaggatagaggcac

SEQ ID NO: 525900 - DNA, 595 bp, Homo sapiens
acagaacaatctgtcttcaggactagtgagtttcctgttgctggaagggctcagacagggactccaaaaacatttcaattagctttccatagacccaaagtctgaccattaatgccactccagggtggctttatatatgctattgcacttaaaggccctttattaaatgcaaagtacttaatgatattctttgttggaattttctcagtgatgactgaatgactcttttgtgctctgattagaggcttgggagaaagacctgatctgccagtaactctctcctgtcacagcacctgagttgtcttcactacagactcatcccactggctccccagagcactctattcagttaacatgccctayaggcagaacagcagggactctagcagctgacccatcctgggccctgacaggctggtggagagccagggatgacttttctgcgacagtcatggctgtggctgtggcactgtggagcggggtgatggcgaggcttctaatcccagctctgccactgacagatacaggctgcagctgccgttgagctcctcctgtctcagagcctcgtctgtgagtctgtgagtgggagcacaga

SEQ ID NO: 525901 - DNA, 475 bp, Homo sapiens
accatggcagtcagctctcaaaaatacaaacacagacagaattctggggtcctgagtrcagaagtgtgatctagaagggggaggacagagccaggtggacatgtcttctggcctttggagtccttgccttgtggggaaggaccatgtaagaggaggacagggagggcctttaaaacagagggcacagggcaggctcccctcttccctgggctagggggccgggcatgaactgctgttccaagcacgggcaggcagccgctgtgtgaatctttccattttctccagaaaaaacagaaatccaaattttctgttactgttattgttggcaaccaatttaagtgagtttcacaacaaggtgcaggctgaagacgtttctgagaatgttccgcttgttggccccatttctggatttatggagtatgaggacgtcgtcaaaatttgttgaacggtatacacagttttctttctgtatgtt

SEQ ID NO: 525902 - DNA, 568 bp, Homo sapiens
ggctgacactcttggttgtctaatagtctttttcttgtcaattgcatttctcatttctccctactkttcgacttttcattgttggcaaagttctgatttggtttccttgttttcctttcactgcttaagaaaagcgaacttcccagcttcaaggcataactggtctacatcagtcgtggtggtttcatttcctttgtcagtgatttgcttaggaatgaatagaacgtgtaactcacttttggtgtgtagaactgagggtaattcttctgagaagtttctggaaaggcttttttttgttttcattattgaaaatagctgcatggggaaaacacacctattattagttggctgtcatcattgactatgatatctgaaatgttctagctttcttgtgaccataaggggaggcattgcatactgagaatggcacagaagagagaagggaagaagctggagtcttgaagatgttattcagtagctgaaataactggcccaaagctgctctattcttgggcttctagttgtctgatacaataaaattctttattgttcagacctctgttagttg

SEQ ID NO: 525903 - DNA, 629 bp, Homo sapiens
gcaccattgcactccagcctgggcaacaagagtgaaactccatctcaaaaaaataaaaaataaaaaaagacccccaaccttgtctagactgtggggtttcagtttcaccccaggggtgtcctggttgggttagaatcctgaatctggyttgagttcgaatcctaaagaataaagggaataaaggctgtagccactgagatacttaatctggtctggttctggcttttgtgtgtctatctgtatttttggtctaaatatttggcccaacagaggttaaaggctttgatgttctcagcaaaagccttgtgagatctctagtttatctgtgtgctcaactggaacaaagagactccataaactagaaaaacctaaacaaaatggcacatttgaaaaattgagagccaactcctgtttgttgttctgtccacctccctctctcattcctccttctgcctttgctgtggtcccatggtgtttctgtccttctggggacctgagattcagtgtaggagtgaagtccatgattttaaagccttcatgtctctgctttttaactctgcctgctttgctgagctcttataatgagaaataaaccattcagaacagaaacaacagggcatcagaacacc

SEQ ID NO: 525904 - DNA, 629 bp, Homo sapiens
gcaccattgcactccagcctgggcaacaagagtgaaactccatctcaaaaaaataaaaaataaaaaaagacccccaaccttgtctagactgtggggtttcagtttcaccccaggggtgtcctggttgggttagaatcctgaatctggtttgagttcgaatcctaaagaataaagggaataaaggctgtagccactgagatactyaatctggtctggttctggcttttgtgtgtctatctgtatttttggtctaaatatttggcccaacagaggttaaaggctttgatgttctcagcaaaagccttgtgagatctctagtttatctgtgtgctcaactggaacaaagagactccataaactagaaaaacctaaacaaaatggcacatttgaaaaattgagagccaactcctgtttgttgttctgtccacctccctctctcattcctccttctgcctttgctgtggtcccatggtgtttctgtccttctggggacctgagattcagtgtaggagtgaagtccatgattttaaagccttcatgtctctgctttttaactctgcctgctttgctgagctcttataatgagaaataaaccattcagaacagaaacaacagggcatcagaacacc

SEQ ID NO: 525905 - DNA, 629 bp, Homo sapiens
gcaccattgcactccagcctgggcaacaagagtgaaactccatctcaaaaaaataaaaaataaaaaaagacccccaaccttgtctagactgtggggtttcagtttcaccccaggggtgtcctggttgggttagaatcctgaatctggtttgagttcgaatcctaaagaataaagggaataaaggctgtagccactgagatacttaatctggtctggttctggcttttgtgtgtctatctgtatttttggtctaaatatttggcccaacagaggttaaaggctttgatgttctcagcaaaagccttgtgagatctctagtttatctgtgtgctcaactggaacaaagagactccataaactagaaaaacctaaacaaaatggcacatttgaaaaattgagagccaactcctgtttgttgttctktccacctccctctctcattcctccttctgcctttgctgtggtcccatggtgtttctgtccttctggggacctgagattcagtgtaggagtgaagtccatgattttaaagccttcatgtctctgctttttaactctgcctgctttgctgagctcttataatgagaaataaaccattcagaacagaaacaacagggcatcagaacacc

SEQ ID NO: 525906 - DNA, 635 bp, Homo sapiens
gaatgcatatacttgaaaagtagtaaggaaagaatattctgctgaagtttttgttactagtcactctagcatatattataaaaaaggatactggagataattcagtatagttagaatttcaaaattaccttttcaaatcacacagtcataattactccccgattagaaaaggtcatttacaatcaactaaatttttaaagttactatttattgacaagcgtataagttcactagaaataaattttcatctttatgaaatattgcaggtgtctctccaaatgatttacagagtaagatgtctctcacacaaactatatctgcagatgattgtcaactaaaactaggctaaagggtctaacatctgttaccccacactttttataattctttcttaatacwtccaattcaccttcttattacatatattttatgtatttattaagctattgttcattatgtgtaatatataattaatgcccttaataagtgtatgtttacacaagttatgttttcctgtgaaatctagtcccagaagtggagttgttgagttaaagagatgtcaggttatttgaaattttgatacacagcactaagttacccttcagaaataatttaccaatttcatataccaacag

SEQ ID NO: 525907 - DNA, 465 bp, Homo sapiens
tcctgggctggcgcgggacgtcccggaatcgcaggcgcgcattccttcccgcctgagggcccgcctggccgtgactcccgcccctctcctcctccgaagagagatcggggccgccccagggtccgtctgcagccaccggggatggggctgagggtcggttcctgccccggtgcagccacccctgggaagaccgcctggcttggtcgcagccacggcgacatctagcctcggttctgcgaggctgggcgtggcagccagcttgggagtcgyccggcgcctgtagctgggtgcacaggtggtggagcatgccctgggccgcctctggatcacaggtgcccctggcctgagagcctgccagaccctgccccggcccggctcctcctctgtcagagctccagatctctatccaggggccctctacagccaccgggaatggggctgagggccggttcccgcccctgtgca

SEQ ID NO: 525908 - DNA, 465 bp, Homo sapiens
tcctgggctggcgcgggacgtcccggaatcgcaggcgcgcattccttcccgcctgagggcccgcctggccgtgactcccgcccctctcctcctccgaagagagatcggggccgccccagggtccgtctgcagccaccggggatggggctgagggtcggttcctgccccggtgcagccacccctgggaagaccgcctggcttggtcgcagccacggcgacatctagcctcggttctgcgaggctgggcgtggcagccagcttgggagtcgtccggcgcctgtagctgggtgcmcaggtggtggagcatgccctgggccgcctctggatcacaggtgcccctggcctgagagcctgccagaccctgccccggcccggctcctcctctgtcagagctccagatctctatccaggggccctctacagccaccgggaatggggctgagggccggttcccgcccctgtgca

SEQ ID NO: 525909 - DNA, 437 bp, Homo sapiens
cttacatctacaatgaataccagaccctacagcagaaagccattttctcacttttccacacacaatggttcctactaagtgaaaaaaaagccataaaatttcattcacaaatgtactactctgtctcaaaacatcgcacatratcatgcactgtactaaagccattagatcagttcttcagtcaggttaaagaagtatccctctaataactgacatttataatgctatcaatatccactcccaatcagtctgccattgttaatggtgtacagcattactgaatacaatggaattgatgacgcccatatccacggacaaaccgtgacttatgatggtttgatttatgatttttcaacgttatgatgggtttactggaatattagatgcgtttctgagttacactgggtttatgagtatgcgaccctatactccagaaa

SEQ ID NO: 525910 - DNA, 437 bp, Homo sapiens
cttacatctacaatgaataccagaccctacagcagaaagccattttctcacttttccacacacaatggttcctactaagtgaaaaaaaagccataaaatttcattcacaaatgtactactctgtctcaaaacatcgcacatgatcatgcactgtactaaagccattagatcagttcttcagtcaggttaaagaagtatccctctaataactgacatttataatgctatcaatatccactcccaatcagtctgccattgttaatggtgtacagcattactgaatacaatggaattgatgacgcccatatccacggacaaaccgtgacttatgatggtttgatttaygatttttcaacgttatgatgggtttactggaatattagatgcgtttctgagttacactgggtttatgagtatgcgaccctatactccagaaa

SEQ ID NO: 525911 - DNA, 423 bp, Homo sapiens
gcaaaaagcatgtggtatttacttgctgttctgtgcctattaagtgtaccatattaacaatcaaccaacattccaccatgtgaggaagttgactttaaatataagcacctaccatgaaatgagcaaaggaatttcatttaatttgatgactaagtttaaaatgtttttcagctttattaatgtatgctgctttcacgacattgccagccttcacattgttttattaaaataataaacaaaacaatttaagtaatcttgtagcagttagcaattgcatttagaaaaaaaaaatccatagtggtgactactcttttaagatctctgctataaacagacaaattgaatacagcatgcagggactctgagtgcaatcacatkccagctttccaaattgagcactacagggaaactctgaagccccgc

SEQ ID NO: 525912 - DNA, 423 bp, Homo sapiens
gcaaaaagcatgtggtatttacttgctgttctgtgcctattaagtgtaccatattaacaatcaaccaacattccaccatgtgaggaagttgactttaaatataagcacctaccatgaaatgagcaaaggaatttcatttaatttgatgactaagtttaaaatgtttttcagctttattaatgtatgctgctttcacgacattgccagccttcacattgttttattaaaataataaacaaaacaatttaagtaatcttgtagcagttagcaattgcatttagaaaaaaaaaatccatagtggtgactactcttttaagatctctgctataaacagacaaattgaatacagcatgcagggactctgagtgcaatcacattccagctttccarattgagcactacagggaaactctgaagccccgc

SEQ ID NO: 525913 - DNA, 623 bp, Homo sapiens
actccctgtgtgggtgaatgggaacatgatactgctaaatacagaagtggaaggctagaaattccagggaaagggaggagaagaaatattatgaatttagaatttattgaatgtgagacgtcaacagggcactcaggagggaatggttaacaggaagttacacatttaggactagagaattgtagagggcaaaggaakggggtgatttcagctggcacccttgggaggtagagataggtgcaaggagaccagttactacttagtgggcaatctgcccctctaggggtattaataggcaaagactccttttggtggagcacaaaatccgtaggtttgatcatataagtgaatgtgcaataggaaatattcaactgaataaaaccacatgaggaggaggctgagacagagaaaacaatataaataaaatgataaaatagcaatgtcaaatacagtaagaactcaaagttaaagtattagagaccaacatatatttttaagagagccaaaataggatggattgccccaaagagtgctatttggggaatatttctggagggtgagatttgaaatagagctttaagtgcctggtgagcatggcaggcagcctataggcaggaataata

SEQ ID NO: 525914 - DNA, 648 bp, Homo sapiens
ccccaaagaccctgctctgttctttcctctttacctgttcataatcttttttaactttcacaggctagatcttatgaaaaataactcttttccctggttgcttcttcctctgagtttctgcatttctgctggttggctttacatgttaatattcatcacatataacttaatattgccttctgttgtttcagcatatacattacttccccaactaaattttaagctccctgaaggaaagaattgtgcctttttattttttrgacattctttacagtaacttatgctgtagcacacatacattaccaaatagcaaaatatcatcagtgagtataaattatgatattaagaatagacttaaaaccaccatataagcagttttagggaaaaaatacataattggggtattcatgcattttgaagcctattaaaatataaatgcagaatatagtcagtcaatcatggtattctctataaagcacacttaggaaagggaaaattcatagcaggaatagtgatgtgtttaacaaacaggcatcagtgtattgaatgctgccaaacccaatccattgctcaacagaatgactataaataagacagcacagaggaggagagttagagatgaaatgggcaatgaggtggaaggagtcg

SEQ ID NO: 525915 - DNA, 648 bp, Homo sapiens
ccccaaagaccctgctctgttctttcctctttacctgttcataatcttttttaactttcacaggctagatcttatgaaaaataactcttttccctggttgcttcttcctctgagtttctgcatttctgctggttggctttacatgttaatattcatcacatataacttaatattgccttctgttgtttcagcatatacattacttccccaactaaattttaagctccctgaaggaaagaattgtgcctttttattttttagacattctttacagtaacttatgctgtagcacacatacattaccaaatagcaaaatatcatcagtgagtataaattatgatattaagaatagacttaaaaccaccatataagcagttttagggaaaaaatacataattggggtattcatgcattttgaagcctattaaaatataaatgcagaatatagtcagtcaatcatggtattctctataaagcacacttaggaaagggaaaattcatagcaggaatagtgatgtgtttaacaaacaggcatcagtgtattgaatgctgccaaacccaatccattgctcaacagaatgactataaataagacagyacagaggaggagagttagagatgaaatgggcaatgaggtggaaggagtcg

SEQ ID NO: 525916 - DNA, 617 bp, Homo sapiens
ttctcccttgaaggagactcaggccgcacagctccatgaccaccatactattcgctcatctcgtcttctcccctccctcttcccccacttcccttccttcttctgtcctcctcagaacaccaaaagaagtcattatttaaatattctccataccctccaatataaggtctgtgtggagaatattattatagacatatcagaatcagaactggactcaaggtgtgctcatccataaatggaatgagtgggaaagagaacaaagggattattctttctgaacagtgaaattttcttgatcctagaatatatcttatcacttttcctrggatatgtggccatactcattagcattcactgttgatctgaaaaggagaaaccaaaatacagccatttttgtatcttaattcaattaaataataatatttttattaatataaatacattcgattgtgcattaattagtgctaggctaaaatctttaatatgtatttagcgtttataacaaacattggtaaaaatttaaattattcagaatatgtatagttatgttgtcttacatagctattaatcaaaatttgaaaaatcatttagtcttaggaagcttgaacatatgaaag

SEQ ID NO: 525917 - DNA, 617 bp, Homo sapiens
ttctcccttgaaggagactcaggccgcacagctccatgaccaccatactattcgctcatctcgtcttctcccctccctcttcccccacttcccttccttcttctgtcctcctcagaacaccaaaagaagtcattatttaaatattctccataccctccaatataaggtctgtgtggagaatattattatagacatatcagaatcagaactggactcaaggtgtgctcatccataaatggaatgagtgggaaagagaacaaagggattattctttctgaacagtgaaattttcttgatcctagaatatatcttatcacttttcctaggatatgtggccatactcattagcattcactgttgatctgaaaaggagaaaccaaaatacagccatttttgtatcttaattcaattaaataataatatttttattaatataaatacattcgattgtgcattaattagtgctaggctaaaatctttaatatgtatttagcgtttataacaaacattggtaaaaatttaaattattcagaatatgtatagttatgttstcttacatagctattaatcaaaatttgaaaaatcatttagtcttaggaagcttgaacatatgaaag

SEQ ID NO: 525918 - DNA, 493 bp, Homo sapiens
gccttaaattgtgaacaaaagctgctcattaagctggtgggttctcggtgaactgtcagtaaacattttaagaaaccattaacctcacatttgatttcaatagakaattgacttttagaattgttgcagacacttttctattgatcacaaagggatgcattttgttacaagcggaaaagagaaaaacctccctcagcccagaccctcatatcttgctctctgggatgaacatttaatggatgttatgtattgactattaatattaggaaatagagaataaaataaacaatttaacaaagccaacaatgatggcttcttctgattataggaaaccacttagataccaaatgaatatggaaaattaaagaaaatatgacgtggtatttacatttaaaatatattttaatgttttagtgattcaaatttcaaatcccaaatgaagtaatgaaaaaaataatgttaaatttgtgactgaattcaaaagtggcatgta

SEQ ID NO: 525919 - DNA, 582 bp, Homo sapiens
cagaatgcaacaggaatgtgtgcgtatgctcttggatttcgacgaatgacttcgagccctgggatctgttgccttgtgaacttttgcagcctgtcaaaccacagtctagtagtaagagaaaccgtcctctgcctggtccaaagatgccaatgtggatagtttgtcgtccttgaaatgtggtgtgaccctcacagctaccacgtttctgaaggcatcagaaaaatcaaccatacttaagagttaaaataccgcacgtatcatacatttttaaaagtcagagtaacaagagtatatggaataagaagatgaagcaatccactaatcaccattttaatctcactgtcaagtcagctttatatatattttgcctacatagtttcttaggagtagygtctccttgtaaatgtgctgattgcctcttaattaagtgatcttatttataatactaaagaaactcagtagagacaaaaatgagaatcacattttaaactattagacataaggtcaaaaataaaggcttattgcaaggcagcattatcatcatccaagtgtctcttgcttacactgtgttgtgacaaagta

SEQ ID NO: 525920 - DNA, 582 bp, Homo sapiens
cagaatgcaacaggaatgtgtgcgtatgctcttggatttcgacgaatgacttcgagccctgggatctgttgccttgtgaacttttgcagcctgtcaaaccacagtctagtagtaagagaaaccgtcctctgcctggtccaaagatgccaatgtggatagtttgtcgtccttgaaatgtggtgtgaccctcacagctaccacgtttctgaaggcatcagaaaaatcaaccatacttaagagttaaaataccgcacgtatcatacatttttaaaagtcagagtaacaagagtatatggaataagaagatgaagcaatccactaatcaccattttaatctcactgtcaagtcagctttatatatattttgcctacatagtttcttaggagtagtgtctccttgtaaatgtgctgattgcctcttaattaagygatcttatttataatactaaagaaactcagtagagacaaaaatgagaatcacattttaaactattagacataaggtcaaaaataaaggcttattgcaaggcagcattatcatcatccaagtgtctcttgcttacactgtgttgtgacaaagta

SEQ ID NO: 525921 - DNA, 582 bp, Homo sapiens
cagaatgcaacaggaatgtgtgcgtatgctcttggatttcgacgaatgacttcgagccctgggatctgttgccttgtgaacttttgcagcctgtcaaaccacagtctagtagtaagagaaaccgtcctctgcctggtccaaagatgccaatgtggatagtttgtcgtccttgaaatgtggtgtgaccctcacagctaccacgtttctgaaggcatcagaaaaatcaaccatacttaagagttaaaataccgcacgtatcatacatttttaaaagtcagagtaacaagagtatatggaataagaagatgaagcaatccactaatcaccattttaatctcactgtcaagtcagctttatatatattttgcctacatagtttcttaggagtagtgtctccttgtaaatgtgctgattgcctcttaattaagtgatcttatttataatactaaagaaactcagtagagacaaaaatgagaatcacattttaarctattagacataaggtcaaaaataaaggcttattgcaaggcagcattatcatcatccaagtgtctcttgcttacactgtgttgtgacaaagta

SEQ ID NO: 525922 - DNA, 590 bp, Homo sapiens
agacacaaatgagtcaaagttaatctatcacattcatttttaaactttagtgtttctatgaatcatctgaagagcttgttaagagccagtgagttttcgggtgagcctcagattttgtatttctaacaagtttcagctcatatcaatgctgctggtccatgaactgtacttggagtagcaaggrtctagaatactgtgtgtcagatggaaagatgagacatttagtttttctccatgaataaaatacgtgagattcaactgttgctttgttttgcaatactatgggattcctctctaaaaattgttcaaaatctcatgctttgaagaactacattatatggattgtaaaatgacttaagcaggaagtacttgacatgaatatgtgcttaataaatattgattggttgatttctgaaaagtagatcttcagagatgtaaggcaaatgtcttccagtaatataaaatgatacatccctacttaggggatctaggatgctatgcattgagacaagacaaagtttatggtgtcagagccagagagaaagcaagggtgatctgagcccagcaacacagctccattgtaaatagct

SEQ ID NO: 525923 - DNA, 622 bp, Homo sapiens
ccctcgggagccccttctctcagggagcccctcctgctgcttttgcgactccgactcttccagcaggtgtcactgtctggcagcagtgggcgagcaggttgcggttcacctgactcatcttcaaataataacttttaaaatttatctttagggaagttgtttgacgtaaatgtatcaaaactttgacaaaaatgttgctacatcatatgcctgatttttccctcatgaattgaaattcacagaaaataaaggaattaatcttgtgctgatataaaattttattgagtattagaaacatttgtttataatgagaggggaatgtggctgggaggacataattaaatgaaacttttaggaccatttatttatgaatttgctaagcaaatatagattccttaggtctgttctagagtctctgatgrctgcaaaggggtaagccacagtgcttaccctcctgaagtattagtgtgtattatacacaccaagaaaggaacaattgtaatagaaaaggagaaagtcagtgtatcttattggcataatgacagggctcctaagttcatagaaacctgtttttgaatcctggctttgatgcattctaatcatatacagtacaagcgtctta

SEQ ID NO: 525924 - DNA, 608 bp, Homo sapiens
tgttcgggaggctgaggcgggaggatcatgtgagcccgggaggttgaggcttcattgagctacaatcacaccactgggctccarcctgggcaatggagcaagactgtctctaaaaaaaaaacaaaacaaaatataatattgcaaaagtttgtttgattagaattagctatattaagtgttgatgtaaaaagctggaatattctgttacacatgcataaaattgttattggttgagtataaaagttgtgccttgttttatctttgggttgaattttaatcatcaatattttctcagaggcatagtgtccaatctccctattcattttttttctttaaattagatataagtcaaatgaagagtatgtatatgtccgaggcaggggaagaggaaaatacatttgtgaagaatgtggaatacgttgtaagaaacctagcatgttaaagaaacacatacgaacccatacagatgtccgcccctaccactgcacttactgtaacttctcctttaagactaaaggtatgagatgcacattgcttcaaggtccttttaatatgtatttaggtgggaaagctaaaacccaactgtgcgttttctttgaccgatgaaa

SEQ ID NO: 525925 - DNA, 607 bp, Homo sapiens
ttatagctatgtaatttttcagagaaatgagactgagtatagaagtcatagatgaaaatcagttaaaaactttacctgaagactaatttagaaatacgaaagatcaagaaaaatgctgattttttcaaacacttggctgaacaaatcactgatcaaaataatttaaacgaatagcaatccactggaagggtgttttaaagccctgtatgaatgtgcttarttcttttttaagtaatggctgccctctagtgatatttcatttttttctcaaagtacctacaccaaaattctcttcaggatagaagtaattctgattttccaaatatcaaaaatctcgtaatgtccaattcaataatattgtaaacatttgtttttattaagaaaaatgtggctggacacagtggctcacacctgtaatcccagcaatttgggaggccaaggcaggagcatcacttgagcctgggagtttgagaccagctttcacagcatagggggacctctctataaataattaaaaaaaaatagccaggcatggtggcatacacctgtgtattccagctactcaggaggctgaggcaggaggatcacctgagcccaggaggtcaag

SEQ ID NO: 525926 - DNA, 607 bp, Homo sapiens
ttatagctatgtaatttttcagagaaatgagactgagtatagaagtcatagatgaaaatcagttaaaaactttacctgaagactaatttagaaatacgaaagatcaagaaaaatgctgattttttcaaacacttggctgaacaaatcactgatcaaaataatttaaacgaatagcaatccactggaagggtgttttaaagccctgtatgaatgtgcttagttcttttttaagtaatggctgccctctagtgatatttcatttttttctcaaagtacctacaccaaaattctcttcaggatagaagtaattctgattttccaaatatcaaaaatctcgtaatgtccaattcaataatattgtaaacatttgtttttattaagaaaaatgtggctggacacagtggctcacacctgtaatcccagcaatttgggaggccaaggcaggagcatcacttgagccygggagtttgagaccagctttcacagcatagggggacctctctataaataattaaaaaaaaatagccaggcatggtggcatacacctgtgtattccagctactcaggaggctgaggcaggaggatcacctgagcccaggaggtcaag

SEQ ID NO: 525927 - DNA, 607 bp, Homo sapiens
ttatagctatgtaatttttcagagaaatgagactgagtatagaagtcatagatgaaaatcagttaaaaactttacctgaagactaatttagaaatacgaaagatcaagaaaaatgctgattttttcaaacacttggctgaacaaatcactgatcaaaataatttaaacgaatagcaatccactggaagggtgttttaaagccctgtatgaatgtgcttagttcttttttaagtaatggctgccctctagtgatatttcatttttttctcaaagtacctacaccaaaattctcttcaggatagaagtaattctgattttccaaatatcaaaaatctcgtaatgtccaattcaataatattgtaaacatttgtttttattaagaaaaatgtggctggacacagtggctcacacctgtaatcccagcaatttgggaggccaaggcaggagcatcacttgagcctgggagtttgagaccagctttcrcagcatagggggacctctctataaataattaaaaaaaaatagccaggcatggtggcatacacctgtgtattccagctactcaggaggctgaggcaggaggatcacctgagcccaggaggtcaag

SEQ ID NO: 525928 - DNA, 597 bp, Homo sapiens
ggggatgtaaagggtggaggagaaatagcctctctctttgagactctctggaatggaagggaacacaaagtgaatatcacatatgccatatagcctctattttaagttggactgcccccaacgtatcctctgtgttggatgaagaaaacacaggcagttttcatttgaggcagtactagacagaatcaaagctgattaaagtaaaaagattgtgaaatggaatgcaagaattagaataaatgtataaattaaagcaaggctttcagaaagctttaaacctccaggcaaaacctaaaggtttttagtcaatttccctttgtattgggctatttgggtaaaagttcaccaagggtcatatgtcatgccagtatataaagcaatgtcacacagagtgactgaactcagggtagccatcttttctccttgattcaagacctgagtatggcrcactcatcactggtcaggcacaaggccagatgcttcagggacagggaaagaagaggacagagtctctgttcctgttgggggctggcaggtttcccagctttaagtaccagcatcaccggtaccacctgtactgtaccagtaacaatacct

SEQ ID NO: 525929 - DNA, 444 bp, Homo sapiens
taggacttttaaactacacaaacgtcacctgatatggaagaagggctctgcgaaatgrcaccaagaataggatggtggaaagagaatctactacattatcttggatattgagcagctctgacagattgtaaaaatcagggagtaactgggctgaggatgctaatgatgaatgtgattgaaatcagagcaggggaagaattttgagttggtgatcttggaaatgtcttcaaaagtggacaaatcattatcattttcatggtactgtcggagaatattttgaatggtctttgcagttcacaggattaaaatgtcagctttggctggggttgggaagacctgaatttgaaccttggttctaccatgtataacattgggcaagttattcaacctctctgagcctcagtttccccatctgtaaaatggagataaacatagcacttacta

SEQ ID NO: 525930 - DNA, 444 bp, Homo sapiens
taggacttttaaactacacaaacgtcacctgatatggaagaagggctctgcgaaatggcaccaagaataggatggtggaaagagaatctactacattatcttggatattgagcagctctgacagattgtaaaaatcagggagtaactgggctgaggatgctaatgatgaatgtgattgaaatcagagcaggggaagaattttgagttggtgatcttggaaatgtcttcaaaagtggacaaatcattatcattttcatggtactgtcggagaatattttgaatgrtctttgcagttcacaggattaaaatgtcagctttggctggggttgggaagacctgaatttgaaccttggttctaccatgtataacattgggcaagttattcaacctctctgagcctcagtttccccatctgtaaaatggagataaacatagcacttacta

SEQ ID NO: 525931 - DNA, 473 bp, Homo sapiens
ctgtgtcactaactagttccattaaaactttcataagtgtkagtactgattttacagagcctctgaaattcatctgctgtgtaggtctgactaagcatcctggatccctgattcagagaagaggaaaaaaatccacagtcacatttaagcaaaactctacatgtgcttattaagaaatgtcccatataaaacattttatgctgaattgacggtgcctaaaatagcatttttgataacaacaaggattgttgtaattgcaggaattgtttcatttgaggttactaaatggagagaaaccactttcctggctttttttttcttactgttttcatgagagaaggttttttggtccaaatatgtgaaatcacccagagggtacaaatgctacacgctttctctggccccagaatcacttacgtggacctgtttgtgtctattgctcaggggtgggctgggtctaaggcagactgccc

SEQ ID NO: 525932 - DNA, 564 bp, Homo sapiens
attagatataataaagcaagtcacatcagttgcttccrtaacctttccacatgaactaatgatcatgtaggcatgaataaattctcccatactaattctaaagtttaaaatcagcaacttgtcttaaataatgccttttaggccaggcacagtggcttacgcctgtaatcccagcactttgggaggctgaggcaggtggatcacctgaggtcaggagtttgcgaccagcctggccaacatggtgaaaccccgtctctactaaaaatacaaaaaattagctaggtgtggtggcaggcgcctgtaatcccagctactcgggaggctgaggcaggagaatcgcttgaacctgggaggcggaggttgcagggagccgagatcatgccattgcactctagcctgagcaacaagagcaaaacttagtctgaaaaaaaaaaaagccttttaaatcatgaactattattttccttgaaatggtttgaattgtgaacaaacagattctaaaaatctgatctcaggaaccattgagaatgtaagagtactttggaaataaaatcactctctcca

SEQ ID NO: 525933 - DNA, 564 bp, Homo sapiens
attagatataataaagcaagtcacatcagttgcttccgtaacctttccacatgaactaatgatcatgtaggcatgaataaattctcccatactaattctaaagtttaaaatcagcaacttgtcttaaataatgccttttaggccaggcacagtggcttacgcctgtaatcccagcactttgggaggctgaggcaggtggatcacctgaggtcaggagtttgcgaccagcctggccaacatggtgaaaccccgtctctactaaaaatacaaaaaattagcyaggtgtggtggcaggcgcctgtaatcccagctactcgggaggctgaggcaggagaatcgcttgaacctgggaggcggaggttgcagggagccgagatcatgccattgcactctagcctgagcaacaagagcaaaacttagtctgaaaaaaaaaaaagccttttaaatcatgaactattattttccttgaaatggtttgaattgtgaacaaacagattctaaaaatctgatctcaggaaccattgagaatgtaagagtactttggaaataaaatcactctctcca

SEQ ID NO: 525934 - DNA, 600 bp, Homo sapiens
actgttctagaaaatgaggatagtgtaaaaaccaaaacaaagtccactccacatggacagggcaaaaacatgttctggtttgcctaggacagtcccaatttctgttttttggccctatatcactattaaatagtgccatatttattctcaaaagtgttttggtgaagttaataaacagtcacccaactcatggagcttaccttctatagaagagatcatgaagttagcccacctggtgcctctgtgtaaattagacagagggtcttcctctgggcagacagagctcacaggtgtgtagttggacaagtagatatgccccttgtgcaaagtgaataaaracctttttatggaacgcttggcctgggaggcagagctcggtgtgcatttctgcctctgttcccttatcaggtgcagggatttgccctccaggtgcggattcaggaatgaaacaaaaagacacaaggcaatgactgacctatccctatatgtagtgaacagcctgcataacaactagttgatgtccagaagatgatcaataagcaaataaatatataagcaaatacaatgtcaaatagtggaatgcaccctgaagaaaacgaa

SEQ ID NO: 525935 - DNA, 631 bp, Homo sapiens
aggagctttctgggcgtgatggtaatgttctatatcttgacaggggtttgggttagaggtgtcaaatttgtyagagctcagtgcatgcacttaggatttgtgcatttcattgcatgtaaattttatcttaatagaaagtatcaatattgagctgtagttaaaaatatgaatactgaagtgtttaggaggatgcgtagtgatgtcttcactgtctggagggatgaatagatatatgatgaagcaaacatagtgaagcaatgacagaatttaggtgatgtgcaaaaattagcttcgctgtaggtttcaacatttttttaagtttgttggaaaaaacacgttttcaaagaaattcagatacattgtcaaattaaaaagcaggatagaatgctgcatgtgtaaggtgatatagtttagagagagtgaaaaaacactaaaagagaaaagccaatggttatcttggggtgttgtggtaatgtgtgattttaaattctttttattttctacactttctacaataaatataaaagacttatcagaaaaaaaaacttatcccataagacttttaaaatagtttcaaggaggcagattttaacttggagcatagagaaacactttccaatgtctggaacta

SEQ ID NO: 525936 - DNA, 566 bp, Homo sapiens
ctcctctctttttgagaggatctggggatgtgagcttagggctgctggcagccatktcgcccaccctacacagaaacttcctgcagtgggaaagaacaaagccgacatgcaggagagaaatagagcaagaggcaaagggtgaggagcaagaccaagagagaaagcatgcaagaaacagctgggctctgctgtttgtagatggacacaaattctagtttgggataacctgattctagttatcccaaaggccagcttcagtgcctctcttcttgtgttaaagctacataagccaagcacatctccttttttctgttacataaactaattagaattgaggttctattactttcatacaaagtcctagctttaaaacattctatttcttatttgtctagcctcagaaaaatctctagtgtttacagtgaaaaaatagaactttctcttcctagagctcttgtgagccaaaaatactgacagagctcacatgtgagagtccacaaaacattctaatttttgttttaatgactgtgtaattctcatttttattttagttctcaaatgagtga

SEQ ID NO: 525937 - DNA, 580 bp, Homo sapiens
ctgaaacaataggcaagagaagctcgtattagttttgatcaagaagccatgagctggagatatgatctggttcaacagcatgcaaaatcacatggcgtcccagtggcacttgtcagacacacccccggtttccagtctgcctttcattaagtgtgaagcccaaagcctctctgagcatgtgcaaggcaacagatttatgctgccctctgctggtgagcagctctactgcaaatcttttacaaggaggactgagcctgggctggttgacttcttcccttctcccagccccacctcctagtagactcaaagataaataaccctgctagacttagaagttgagttctgagtggggctgaggtgagagtagagtggtggagaatatagatcaggagaagtagaaagaccacaaaccagggatgtgtcactattagaatccaatatagcctagggggctcatctgtgtatttgctttgttgggggaaattttcattcgaactctctcatgasatttgagttacttagtactgaatgcattttgtgatgtattcagaaaatgcatttcactaatgtttccctaatt

SEQ ID NO: 525938 - DNA, 656 bp, Homo sapiens
gtttcctagttctgctcccaccagtttcaaaccccatggcctcaggcaagtgttctgaagcaccttttctgatctgtaaaatggagattgtagtttcttctctgccttaagtcctgttcagtgattaattaactgtatgaccttgggcaagtcatttggcctctatgaggccagttcctgcaattttaaaataaaatcagtagatttcactttacaaagaggktgcagtaatcaacatagataatgtatatagaaagtgtcttgtaaactgatcgttactgtatataaggttattattactatgacttctttttccaagcattgcaaaaatcgtagaagacatttttgttggtatctatagttataaatatgtatatatagtatattgattagattattctaaaatcttattcaagtctactaatttgatgttacttaaatcttaaaccagttacagctcttctagaatttgtccagcagttctcctggattttacaggaaaaccccacacaccaaaaaacaaacaaaaaaaaacaaaaaaacccaccttaaacctacttttacactattctgtaactgaagaattatcatttcagttgagcaatctcaaacaagggattgctatacttctaaaaaccatttatcacttgcttttt

SEQ ID NO: 525939 - DNA, 656 bp, Homo sapiens
gtttcctagttctgctcccaccagtttcaaaccccatggcctcaggcaagtgttctgaagcaccttttctgatctgtaaaatggagattgtagtttcttctctgccttaagtcctgttcagtgattaattaactgtatgaccttgggcaagtcatttggcctctatgaggccagttcctgcaattttaaaataaaatcagtagatttcactttacaaagaggttgcagtaatcaacatagataatgtatatagaaagtgtcttgtaaactgatcgttactgtatataaggttattattactatgacttctttttccaagcattgcaaaaatcgtagaagacatttttgttggtatctatagttataaatatgtatatatagyatattgattagattattctaaaatcttattcaagtctactaatttgatgttacttaaatcttaaaccagttacagctcttctagaatttgtccagcagttctcctggattttacaggaaaaccccacacaccaaaaaacaaacaaaaaaaaacaaaaaaacccaccttaaacctacttttacactattctgtaactgaagaattatcatttcagttgagcaatctcaaacaagggattgctatacttctaaaaaccatttatcacttgcttttt

SEQ ID NO: 525940 - DNA, 574 bp, Homo sapiens
ttagctgcaagttgcattaacccaaagcaacaaggaagagtttcaaggagtaaaaacaaagaatagttttaaggagtattactaggaatatatcttccttctacagcagaaaaactagatggggggaagtcctcctatagattgctaacgaatgcctcccccaaccacccaagaaggagttgttgatggaaagaattaaaaattgtgaccacttgaacggctccactggttggatctgtcttttccaaagagactgatctttctaggacttctgtctgcgtgagaggtcccacccaccctgctaccattttaaggagacctgtgaaagcctccttatttggcttccctcctactccccccgttatgccaccactgtgtgctactgcttgaaattaatcaagggccccttctgggaaagggattcctctttgagagaaacggaactggacacwtctctgccttccgcgtcccctcgccctgccagcccctgctccccaaagctccccagacaaagccccaggactcccgactcccgcggaagctgcgaggagccgcagacctgcccttgccagac

SEQ ID NO: 525941 - DNA, 607 bp, Homo sapiens
gtagtgtcttcattctatggggccccaaaaaatgccccatactattgtactattgctggtcagcggaagacaatgagtctatatgcttgtgatcctgtgaagtgagaaataaccaaagccctagaatttatagagagataaactcaagttccttggccaggcgatatgaccagggttggagagtcagttggtgagcccatgtagctgcccacgtcctagtccttttcctgtatgctgtaccttagggaagttattggccacacatcctttgaggatgcaggttagcttgggtcagaatgaaccataagatgcaaatacaaaccaaaatttggtgagctcaatttggtaagctcaaaaccagcaaaagagtcagggaaggactccttccatagtcaaatctcaaatttgggtttattcaggtaaagctatagggtygcctccatatccccaaataaatcacccctcctgatggaggtccaactttcccggcaacctgaacagacttttgggccagaaataatatgtgtccttggtctagaaacacaaccccggggttaataagagcaatccaacttatgacttcttatatccttttccatgaacatta

SEQ ID NO: 525942 - DNA, 594 bp, Homo sapiens
gttcaaagaatactgatgttcagaatggtgaatctgaggcatttggaattctgacttcacaataatcaaaagtaaaattgcattatatgtggcagattttttaaaaacctttttacgtgactgtgtcttaagccttgatattcagtaatgtgtgttttataagtggaactttcagtttccaagacatagagtctttaaaaaacagtttattgtgatgctcatagcttgtattagactggcccaggcaactttcattcttcaaggattttaaaccctttttgtttagagagtttcagcctaatcacctaaaattctatctgatttttaaagtaaatctaagtttcttcatgtaaatttggattggcctcaaagaaactctagtaagaaagagaccaggagggtaatggccaggtcaggaaatagcgtacaccatgctattcacttccacrcacattccattggccagaactcagttacatggttcctctcaaactgcaagggcatctgggaagtgtagtcttctcttgcgcctagaggaaaaaagatagtactggtgagaccctaacagatccaaccacagtgaggtcaaatatt

SEQ ID NO: 525943 - DNA, 627 bp, Homo sapiens
ggaagtttacctagcctctttaaggggcggtttccccattatttgggttggagcaataagacctgcctcacggggatgttttaaggattcaatgagacgtgtgtataatggcaggcaattaagtaaataactaattgttattattatttctctaaaagattgtaggcttataagatcagggatcatatcatttttttcagttgttctttttccayggtgattagcccagtgttacagaaaaaaaataacttgtataatagacagatattgagtaaggacaaacaattttcatggctttctatattttattcagtttttaaagacagatttatttctaattgcttatctttttagtgctccccttgtctcaattgtttatttttaataaaaattttatatatccatttatctcacttttatccagccatcttttccccttcccaacccagacttctatactccataatgcatttgctggtcagtttcttccctggtttgtgtgggaataattttacgtcatagcattgtgaatatgaaaattagataacataaaaaacttctcagcatagtgattggcacatataataagcctactatttttatcccttttttcaagacatttgatta

SEQ ID NO: 525944 - DNA, 627 bp, Homo sapiens
ggaagtttacctagcctctttaaggggcggtttccccattatttgggttggagcaataagacctgcctcacggggatgttttaaggattcaatgagacgtgtgtataatggcaggcaattaagtaaataactaattgttattattatttctctaaaagattgtaggcttataagatcagggatcatatcatttttttcagttgttctttttccatggtgattagcccagtgttacagaaaaaaaataacttgtataatagacagrtattgagtaaggacaaacaattttcatggctttctatattttattcagtttttaaagacagatttatttctaattgcttatctttttagtgctccccttgtctcaattgtttatttttaataaaaattttatatatccatttatctcacttttatccagccatcttttccccttcccaacccagacttctatactccataatgcatttgctggtcagtttcttccctggtttgtgtgggaataattttacgtcatagcattgtgaatatgaaaattagataacataaaaaacttctcagcatagtgattggcacatataataagcctactatttttatcccttttttcaagacatttgatta

SEQ ID NO: 525945 - DNA, 486 bp, Homo sapiens
acacattcaccctttgaaaaaattagacataggaatgcatttttactgcccatctttcattataaattcctactgattatttagtaaaaaaaatctgacaattagagcatgtaggagagtggttaaatcatgggtttgaattttgataaactagcaatgcctgttctatcccttattctgggtacatattagaaacttaataaatacgtgttcaagaaattaagttgcaggtattctgaattttgctctttatctaaaatatatttactttagagccactataaatgttaaataagataattcttagcaatgtttctggcaaatagtatagactcaaaaatggaaactatcatattcatttattgttacacaaagacacaaagcttactttaattgagggmaataggagttgttagaagaagagaaacatgaaacacagagggagttatagttaaaagatgaaacacaccaatatatgtaaaaggc

SEQ ID NO: 525946 - DNA, 631 bp, Homo sapiens
acagctggtgaagttggcacacgggaacaggatggtttgacccctaagtctattctgttaatagcacactgtgaatgagaaacaatgggaaccctagagctggtcttttcaaagttaagaacaaatgctatgtttaaaatatgtttcatttctagcttgtaactaaagtacaaacagaaaagaacacagatatgtgacaggttaagtaacagttcaggattgctcttgttcttgttaacaatttatggttaagttgactctcarttagcagatagttatttaatacctgtattttcaaaggactgttctttggcatcatgaagagatatttttttaaagagataagacacgatatttgcccccggctttcactgttaacgatttaatagcaaacgtaacacatgtgccaaaataattccaggagaagcccaacgaatatcatattctaatgaaagcacacacacaaaaaaatctgtccaggaatggttgcattttaattgagaattaaagatagattatagagagaatttgagaggctgaggcggggcacaagattttcttggtaggacaaatgctgacagcaaaagcccaaggagttaaagttcaggcccaattcaagggttatctagta

SEQ ID NO: 525947 - DNA, 631 bp, Homo sapiens
acagctggtgaagttggcacacgggaacaggatggtttgacccctaagtctattctgttaatagcacactgtgaatgagaaacaatgggaaccctagagctggtcttttcaaagttaagaacaaatgctatgtttaaaatatgtttcatttctagcttgtaactaaagtacaaacagaaaagaacacagatatgtgacaggttaagtaacagttcaggattgctcttgttcttgttaacaatttatggttaagttgactctcagttagcagatagttatttaatacctgtattttcaaaggactgttctttggcatcatgaagagatatttttttaaagagataagacacgatatttgcccccggctttcactgttaacgatttaatagcaaacrtaacacatgtgccaaaataattccaggagaagcccaacgaatatcatattctaatgaaagcacacacacaaaaaaatctgtccaggaatggttgcattttaattgagaattaaagatagattatagagagaatttgagaggctgaggcggggcacaagattttcttggtaggacaaatgctgacagcaaaagcccaaggagttaaagttcaggcccaattcaagggttatctagta

SEQ ID NO: 525948 - DNA, 631 bp, Homo sapiens
acagctggtgaagttggcacacgggaacaggatggtttgacccctaagtctattctgttaatagcacactgtgaatgagaaacaatgggaaccctagagctggtcttttcaaagttaagaacaaatgctatgtttaaaatatgtttcatttctagcttgtaactaaagtacaaacagaaaagaacacagatatgtgacaggttaagtaacagttcaggattgctcttgttcttgttaacaatttatggttaagttgactctcagttagcagatagttatttaatacctgtattttcaaaggactgttctttggcatcatgaagagatatttttttaaagagataagacacgatatttgcccccggctttcactgttaacgatttaatagcaaacgtaacacatgtgccaaaataattccaggagaagcccaacgaatatcatattctaatgaaagcacacacamaaaaaaatctgtccaggaatggttgcattttaattgagaattaaagatagattatagagagaatttgagaggctgaggcggggcacaagattttcttggtaggacaaatgctgacagcaaaagcccaaggagttaaagttcaggcccaattcaagggttatctagta

SEQ ID NO: 525949 - DNA, 642 bp, Homo sapiens
gccaagcctctgccctgctccagtactcctcatcgggggatatctrtgaacaaggcagaacagatctctaatctcagggagctgtgtgcagagtagtgaacagataaacatgtcagagggtgcagagccagagagggaggagcaggagacacaggtgtctctttaataggatgacagggaaggctcctctgaggaggtagcatgggctgattcctgaaacaaagaggcaactagtgcgagaagaccttagagagaggctctggaggcagagggccctgcgcaccgaggatctgagcagccaggctggctgtgtggagcacggtgtggggagccccctcccgtcggctttgtgggccctgcccatggggctctttcagtccagtgctgtggtcagtcacagagggctgtggccaagccagggaggtcactctggctgctgcttggaatatgctggagggggcaggtgtggcagctcagcagggccagcaaggattctgggtgatccgggtaggagaagacaggatggggcggggttggtggtcggactgcttccaaggcagagctggcagatttgctgccacgttggttctgaggtgtgagagggatgagttggagatgattcctaggtctgtggtctatgca

SEQ ID NO: 525950 - DNA, 608 bp, Homo sapiens
aaaggggaaaaacgaaggttacaggagagtaatgaggacattcattaacagatttttttccttttatgtttttaaaatttcttctatgacccaggcccctgtgcagggtactgaagcaaacagtacagggtcccagccctctaggagctcatgggccagcagggagttggacaatgttaatgaagtgggccctcagcagggtgtcttctgggacccacaggagccctgaggagggcatctgatatggtttggctgtatccccacccaaatctcctcttgaattgtatctcccataattcccacatgttgtgggagggacccagtgggagaaaattgaatcatgggggcagtttccccatacggttttcrtggttgtgaataaatctatgagatctgatggttttataaggggaaacctctttcacttggctttcattctcttctctcgtctgcctccatgtgagacatgcctttcgccttccaccatgattgtgaggcctccgcagccacatggaactatgagtccattaaacctctttcttttgtaaattgcccagtgtcgagtatgtctgtaacagcagtgtgaaaacagactaatgcagcaccca

SEQ ID NO: 525951 - DNA, 608 bp, Homo sapiens
aaaggggaaaaacgaaggttacaggagagtaatgaggacattcattaacagatttttttccttttatgtttttaaaatttcttctatgacccaggcccctgtgcagggtactgaagcaaacagtacagggtcccagccctctaggagctcatgggccagcagggagttggacaatgttaatgaagtgggccctcagcagggtgtcttctgggacccacaggagccctgaggagggcatctgatatggtttggctgtatccccacccaaatctcctcttgaattgtatctcccataattcccacatgttgtgggagggacccagtgggagaaaattgaatcatgggggcagtttccccatacggttttcgtggttgtgaataaatctatgagatctgatggttttataaggggaaacctctttcacttggctttcattctcttctctcgtctgcctccatgtgagacatgcctttygccttccaccatgattgtgaggcctccgcagccacatggaactatgagtccattaaacctctttcttttgtaaattgcccagtgtcgagtatgtctgtaacagcagtgtgaaaacagactaatgcagcaccca

SEQ ID NO: 525952 - DNA, 593 bp, Homo sapiens
caaatgcaaaaaaaaaaggtacttaaattatactaagtgtgttccagtataatgttacttattataaaagtaaagaatagttgttgatttttttwaagaaattaaagcatccagataaggtaaaaaatgcaaatcctctctcttgcttccttccctcactattgtccagatatagctcctcttgtttccaataaaacttttaacgtgccttttaaaggatattttcccctttgtttaaaccttaagcaacaaagaaacaaaatcccaagaatgaatttaattgtattgctatataaatgaatatttctgaattaggaaggaccaactcttttaaaacaccacaagtgctattttgactttcagatatttttcttggttctttagaagtgtagatatatgtaagcttttaatcaaagactttttaaaaatcacactttatgctatatctttaggatttatttaagtagacttcggttttatagactctgttttttcaaatttcatttttcaacattttttattcttcaacatcttgttagctccaagtagaaatgcgatttgcatttgaaacactaatattcactattcagtca

SEQ ID NO: 525953 - DNA, 551 bp, Homo sapiens
caaatgcaaaaaaaaaaggtacttaaattatactaagtgtgttccagtataatgttacttattataaaagtaaagaatagttgttgattttttttaagaaattaaagcatccagataaggtaaaaaatgcaaatcctctctcttgcttccttccctcactattgtccagatatagctcctcttgtttccaataaaacttttaacgtgccttttaaaggatattttcccctttgtttaaaccttaagcaacaaagaaacaaaatcccaagaatgaatttaattgtattgctatataaatgaatatttctgaattaggaaggaccaactcttttaaaacaccacaagtgctaktttgactttcagatatttttcttggttctttagaagtgtagatatatgtaagcttttaatcaaagactttttaaaaatcacactttatgctatatctttaggatttatttaagtagacttcggttttatagactctgttttttcaaatttcatttttcaacattttttattcttcaacatcttgttagctccaagtagaa

SEQ ID NO: 525954 - DNA, 656 bp, Homo sapiens
ccaaactcacgctgccagcagcatccttaatccccagaggcagtttttctctttccaaaaagaaatggtatcaaaactaaagctttttgttacaaaatcactattgcttttttaatgataatatttaatttactgtgaatatcaaataatggtaaaggaagccatgagtgtttttgttgttaccagtagtacataaagtttaaagaatggataaacactgatttacatgattttacagcactgactattttaaatgctttgtattgtttatatagtactggactgccatttagatagcattcatgattgtatttgtttgctattctaaaattttaaagctttttctctatgagaagagtaattcttgtgtttcagaatctaataaatagatggaaataaagcagattaaatattgttaaggagtactggcctcctcttctgatcttctatttcttggctcacagatgatgattttaaaatgccctctcaggtaggttgaaggtagtggcctatcatagtcttacatagaattataaccttcattataacrtaacctatgaaaattctttggttttattttaaatcaagatcaataaaataagatgttagcatcttatttcagccattctggcaattcttatatacctagtagattt

SEQ ID NO: 525955 - DNA, 636 bp, Homo sapiens
gaattttatgttgactttttttttttttctctcagtaatttaaccaggaacatgttggcttctggcttccagtgtttccatgaagacatcagctttcactcttactgtagttcctcgctgggctgtgctggagaaccagtctacccctggttctctcctaatcctcaggcttgatccgcctttgcctttcattgcgaggtctttgttcctcagccctgaaagatgacagcaaatctagccctgtgtttcagagctcccagcctgactctgcagccttgtgccccacacactttcaaaatccagaaaatgttttaagatgagactggtcacatgctagaggccatcatcacccctgccagggttttacttctgaagcacctctgtcactgtaggaggtttcattctgctttctataaactttggcctagggcgcccatcacccatgcaggtgaacagctaaatgagtgtcccctgtggacgatggctgtgcatttgaggacctataagtttccaatttgtttctttagtcccatgaaactccaaaatatcatgtggtttatcttycttccagaaaaaactctctggatctggggaaatgctcagaattggcaaatgtccccgggaggaaaaaagcag

SEQ ID NO: 525956 - DNA, 624 bp, Homo sapiens
ccaaagtgttgggtttacaggcatgagccactgctcccaggctcttttggtctttacatcaaacagaactagactccaacaaacttgcyggctcatctcttcactccatcgttcactcttatatatcccatgaaactacacatttttctctctattttgcaaaacagtgtagctctcctctactcttattcccaaacttgaagaatgaacctatcccatcaagttcctctaatagatcaagaaatttatttagccttttcataaaagaattatcataataaatggtaaaattcaattttctgcatgatctactcttctggcatcctcatgcaacaatcaaatgcagtgttcctgaactaattacataatctagagtttgtgaaagaaaattaaatcttagcaccccaaattcattaagccgaagggaaaagtcaagctgggaactgggtcacacaaacctaactcctccttttttgtttctaaataagatggctacaagatgaaaagctccatgcctcccccatgttttgcccacaagcaaatttttagtgagctgcaagatctttactctaaggtattctgttaaaatttcaccatggccatgtaaatttatagcttatcttt

SEQ ID NO: 525957 - DNA, 601 bp, Homo sapiens
gcttgcaaggtattgaatgctctcgggttaatatcacgtgtacattatgtccagcttcatgagcttctatccttttccacctaaaagatgactggcacwtcccaggaccaatctgatttcttccaacatgttcttatgacaccgatttggatcagatgaggccatgcccatgcacatttctctccagtcggcttcctggtccctgcatacgtttgttacagggttggatactcccacaaatcctggtgaggagggcgagacacagttaggttttgttggaatttaagctttgaatacaaccctgataatgctggactctcagttctcccctctctattgggatgtgtggggagggatgaggagggcatgtaccttgtgcttatgttttcacagggatggctcttgagcccaagtgttttcaggtaattggtatcaaggatcctgacattgagagaatgaaattttgatactgaaactgatccttcaatatgaactggaattattccccgctgagccaaactgctcattatctcgtacgtgacaaaaatctgctgtagcatatgtttcacctttattgaaaaaaaaaaagagtcattttaat

SEQ ID NO: 525958 - DNA, 646 bp, Homo sapiens
tggtggaaatggaacaaggcgtagggaaacatatcaggaatgtaaaatcaatgagatgtaatgatgaagggtgtgaaggaaagggagaawatcaggatgattccaggtttctgggtagcctggggagtgatgttgccattgagtgagatcgaaaatataggtggaagggcaaacctgtaaaggaaaattattttaaatacatattaccctggtgtgccactcagattaagagaacctgccacaaggagcagagttgcccaacactgcccattgctgcacctgtggctcctgggagaccatgttcctcctgaggctgcctactcaagccagccagttcctgttccatataggacactcctctagtgggcaactcctgctcagggattttcatcagcccacctgagactgtctcagaattgtgttgcaattggagactcttcccatccaatctgtcttctgtctcctctcacgggcactggacccatgttgggctctgaaggctcccctagcctacttctgttttcttccttatcctccacaaacatttcccccagtaaatcccttacatgcttagccccattttggcatctatgtcttgaaggccctaaactgacaagaggtagtaagtaggatgtcaagtaagcag

SEQ ID NO: 525959 - DNA, 617 bp, Homo sapiens
gcagtgcttcctggggctcacaggactgtggtgggattggtggccatccctcactgcataagcggagccttgaattaggaaagttgtgttgccctcttgagaagcatagaactttagagccaaatgagccaattttgtctaattccatccccrttattctcataatgaaatgggaaaagttcccttgtcccccaaaatcgaggggtcttgaccagcccagttagggtggagtttttgaaactccgtgaagggaaatagagcctcttacctgcaggaaagagaagtggcagggttttggaagagagacaggcccgacagttttgcattcgttcacattcacctcccaggatcacgggcaaggtccccagttgtaacaggaaaagttcccttttccccctagcagtgtgtgcgacaggggagtggctcacttcttcagcaccctgctgctcaaacctctaggggagcatacagaagggcaggctgtggggctccgaccccatggcagtgtctagaggtgaactaggggtgaacgtttacagctcctgaaccccagtgggtgtgtgttacagggtgctcttgtagtttagctgtccgtaggcagcttgtgttaaccagct

SEQ ID NO: 525960 - DNA, 617 bp, Homo sapiens
gcagtgcttcctggggctcacaggactgtggtgggattggtggccatccctcactgcataagcggagccttgaattaggaaagttgtgttgccctcttgagaagcatagaactttagagccaaatgagccaattttgtctaattccatccccgttattctcataatgaaatgggaaaagttcccttgtcccccaaaatcgrggggtcttgaccagcccagttagggtggagtttttgaaactccgtgaagggaaatagagcctcttacctgcaggaaagagaagtggcagggttttggaagagagacaggcccgacagttttgcattcgttcacattcacctcccaggatcacgggcaaggtccccagttgtaacaggaaaagttcccttttccccctagcagtgtgtgcgacaggggagtggctcacttcttcagcaccctgctgctcaaacctctaggggagcatacagaagggcaggctgtggggctccgaccccatggcagtgtctagaggtgaactaggggtgaacgtttacagctcctgaaccccagtgggtgtgtgttacagggtgctcttgtagtttagctgtccgtaggcagcttgtgttaaccagct

SEQ ID NO: 525961 - DNA, 618 bp, Homo sapiens
gaatgctgctcaattcatgaattgtgaataaaagacagattttaaactaaacttgttgaaattgtgttttttgagagtactaaaattgtattttcataatcttaacatgaatccaaagactggggtgaaactggttgtcatccatcatcatatactatcctataccttatttatctgcatttcaggaagaaatgtaaaataagaataatatttttatttttctattttttactagtcttatataaaaggattttgcttctgttctatttggatatagttgttgggtcttcggagttctatgttttcttaccattcttttaaaattataagtttttcttgattgtaacttttataatcatgaaaaacaaatgcctttcgcatatttgccacccaaagagaacaactgttttggtgtatttctttttatatttgttttacatatgtaaaatcactgcaaatattgaattttaggtactgaaatcagataaactggttcataaattttcagtttataactaatgccaaatgttcccaataagaggagataacaattwacttaactagtttgtcaacactgaatatagaataggtttatatcttccctttttttcatataaa

SEQ ID NO: 525962 - DNA, 557 bp, Homo sapiens
tgatcacgacagcacactccctcctctcctgaagtagaagaaacaataaataagcagtttcagatcatgcaaagtgccgtggaaaaaaggagacagggccatgtgaagatcttccgctcttggttgcaccatcactgctcacatgagaacctttattcgagagctgtcctgtctgcctgagccatccgcacccaccttccttgaagggcaagtcctcccttcagagttccagttccaactctgaactggaaatcatgagcaaactcttatgttgatgtgaaattgactttccaggtttgtggacccgggaggcgtgtggtgagggccgatgagggtcacgtctgtgtctgcgtctcaaagttctcagaagtggggtttcacgctggggccttagggctgagatttcctttgtttcccactgggcgtggctctggactggcagctcttgtcgcaagcagggcctgataagggcrctcttcctggctgccctgtgtgtgtccctccagtggctggcttgcctgccaggcagccagtgctcttcagggtacactggaggc

SEQ ID NO: 525963 - DNA, 571 bp, Homo sapiens
caaataaatacagaaaatacaccatcaatttttattatagagaaatagcactgtttttgctcaaaagacacctttgaatactgtgcagggactggagtgatttccctgcagcgttgagctgacagctgctaggggaagacccctgcctgcctttcccgctgcagactgtgtatgtctttccttcacagccgctttggcagagatcacggagatggtggcacagctccacggtacgatgatcaagatggagaatttccagaagctgcacgaactcaagaaagatttgattggcattgacaatcttgtggttccgggaagggtaagcagcagtggcctcactatgcactgcgcggggagcagaaagraggcatcggagggacttacatttgaaccttttgaagagagacccttgcaaagcaaaatgtcctctttccatccacctgggagacaactggaaaaacacaacagtgtcgttagttcagaatcattgtgttcggaggagataaagcaatcctctgacctcatattctgctttttctccttacggggtgattcgcttctttaccttttc

SEQ ID NO: 525964 - DNA, 571 bp, Homo sapiens
caaataaatacagaaaatacaccatcaatttttattatagagaaatagcactgtttttgctcaaaagacacctttgaatactgtgcagggactggagtgatttccctgcagcgttgagctgacagctgctaggggaagacccctgcctgcctttcccgctgcagactgtgtatgtctttccttcacagccgctttggcagagatcacggagatggtggcacagctccacggtacgatgatcaagatggagaatttccagaagctgcacgaactcaagaaagatttgattggcattgacaatcttgtggttccgggaagggtaagcagcagtggcctcactatgcactgcgcggggagcagaaaggaggcatcggagggacttacatttgaaccttttgaagagagacccttgcaaagcaaaatgtcctctttccatccacctgggagacaactggaaaaacacaacagtgtygttagttcagaatcattgtgttcggaggagataaagcaatcctctgacctcatattctgctttttctccttacggggtgattcgcttctttaccttttc

SEQ ID NO: 525965 - DNA, 498 bp, Homo sapiens
  misc_feature (1)...(498): n = A,T,C or G
aatgggatgcacctgtgttctgcccagtttcacttggggaaatgaagcgctcctgcactctctatttcacgatttgtttaatttccttaaatttcacattgttcatagttcactctttttgttatttcacttaagttctcaggatgaaataaaaaggcctattaaggtactgagcagtttaaaatacacatggatcataaaatatataagctatgtatataacatcagaggtataaatgttcctttaaaattgagcctggaaaaactggggacaaatatatcaacaggagctccttaaggagggctgtggttttcttctaaatgtcttcagataacaaacagcccaggggccgtcagtragcattacatcgttttaaaaccacagttctgcttccctcgcnccgtctgctcagacagtagctaagcagctatgtgagcccctcctctgctaggtctggggagatggatgagagtcagacagcgccctgactctcctgg

SEQ ID NO: 525966 - DNA, 498 bp, Homo sapiens
  misc_feature (1)...(498): n = A,T,C or G
aatgggatgcacctgtgttctgcccagtttcacttggggaaatgaagcgctcctgcactctctatttcacgatttgtttaatttccttaaatttcacattgttcatagttcactctttttgttatttcacttaagttctcaggatgaaataaaaaggcctattaaggtactgagcagtttaaaatacacatggatcataaaatatataagctatgtatataacatcagaggtataaatgttcctttaaaattgagcctggaaaaactggggacaaatatatcaacaggagctccttaaggagggctgtggttttcttctaaatgtcttcagataacaaacagcccaggggccgtcagtgagcattacatcgttttaaaaccacakttctgcttccctcgcnccgtctgctcagacagtagctaagcagctatgtgagcccctcctctgctaggtctggggagatggatgagagtcagacagcgccctgactctcctgg

SEQ ID NO: 525967 - DNA, 498 bp, Homo sapiens
  misc_feature (1)...(498): n = A,T,C or G
aatgggatgcacctgtgttctgcccagtttcacttggggaaatgaagcgctcctgcactctctatttcacgatttgtttaatttccttaaatttcacattgttcatagttcactctttttgttatttcacttaagttctcaggatgaaataaaaaggcctattaaggtactgagcagtttaaaatacacatggatcataaaatatataagctatgtatataacatcagaggtataaatgttcctttaaaattgagcctggaaaaactggggacaaatatatcaacaggagctccttaaggagggctgtggttttcttctaaatgtcttcagataacaaacagcccaggggccgtcagtgagcattacatcgttttaaaaccacagttctgcttycctcgcnccgtctgctcagacagtagctaagcagctatgtgagcccctcctctgctaggtctggggagatggatgagagtcagacagcgccctgactctcctgg

SEQ ID NO: 525968 - DNA, 376 bp, Homo sapiens
ccccatggcgggggtgtgacctcgaattcggatcttacccatcccwatcgacaggagccaacctgcgcttccgtatcacggcaacgtgaggaaaggcatgggtacacatacatgcactgaacacacacatgcgcagtctgtcagtcagtagccagggtgaatcctttcttaataatcttccctgtgatccattcttctcactgaacagatttagcccaagggttgcctgttctgtataggcaatgatggtacatgtgtgtcctcagggacagaactggcagcaacgctccatgaccaccctggatgtgacacccacacctgtgagaggacacggctctctgtgccctatgtgcctgcctcctcctttgagagtgca

SEQ ID NO: 525969 - DNA, 494 bp, Homo sapiens
gaccttgtccacatgcttttccaggagggaaagagcgctcgactttctggaacttttgcccctaattgcatcatttttcatttatataagagatcatgtatcaaattccaaatttatttttttctccccatcagggtcccacttcaccccttgtgagccagstgggttcaggagtaaaggagggtccattgcgcagtgtgactgaggggcatagggagaggagggtgtggccacctgtgcaggtaacaagtgcatggggacttagacattgtcatacgcaccagccgccatgccagacagctcaggaagacactcactgcactactagcggctcaaagggtaaaaaacagtgctaacaccgtggggttagcttcttgcaaaccttatcctcccccaaaaaaggtgctttataaaagattccaagcacctgaaacattgtgatgaggccgtgtctgttgcctttagacagcaggaggggcttgccagtgcacctc

SEQ ID NO: 525970 - DNA, 494 bp, Homo sapiens
gaccttgtccacatgcttttccaggagggaaagagcgctcgactttctggaacttttgcccctaattgcatcatttttcatttatataagagatcatgtatcaaattccaaatttatttttttctccccatcagggtcccacttcaccccttgtgagccagctgggttcaggagtaaaggagggtccattgcgcagtgtgactgaggggcatagggagaggagggtgtggccacctgtgcaggtaacaagtgcatggggacttagacattgtcatacgcaccagccgccatgccagacagctcaggaagacacycactgcactactagcggctcaaagggtaaaaaacagtgctaacaccgtggggttagcttcttgcaaaccttatcctcccccaaaaaaggtgctttataaaagattccaagcacctgaaacattgtgatgaggccgtgtctgttgcctttagacagcaggaggggcttgccagtgcacctc

SEQ ID NO: 525971 - DNA, 538 bp, Homo sapiens
tgtggtttaaatttttctcaacttcaatttctaaaatggtcagtggtgacagatataactcagataaacaaaggctcatttggatcctcagtgatttttttcttcagtaatatttaaaagcataaagwaatcctgagaccagaaagtgtgagaacagcccatttaaatcaactggatcagaccctaatcgagagatttgttagcagtttctcagtgcccaccttttattgttcactgaccacactaaaatgtggagatcctatttaatctgaagtaggtgtggtacaatttataaaatgggtaagacttgcagttttcataaggaggtttatattgcatacttgaaatctggaggtttttcaggaatgtatcataaaaccaccttccataaactgtctctcaggaaacagtaatgataacacagccagtcaactctcatttttaagcaggttattgcaaacttacaaactttctggaatcatcatttttattattattcttaagtgaggcagaaaaggcttccaatacttttgaagtc

SEQ ID NO: 525972 - DNA, 586 bp, Homo sapiens
ctgaaaggcaggctttgttctgataagtatgttgtctgcatactctaagagtccagcacagctcacaggccagcatacacctttgtcactgagcaaaaagtgtttgctgcttctccacyactatgatgatgggaccctttaccatcttgtttttattataactgccacacttaaccaattgcccacactcttttctctggctcttagattctactcagaaatttatctgagcataaccctaccctatgcatcttttcagcttctattcacactaccaactaaacaactttttcttagctcacagtcaaataactaagaaagagaatgtgtttcatgcttcatttcctcaattcagaaaaccattttctaaatgtaatattcagccggctcctagcctgggacatgcaagaagatgaaattcattttgcaatggttatgtagttattttgtttccttatctgccattagttgagcaaccctggacagagcttgtaaatttatatttgaaggcacataactgagagaagcaaccatccaactcctttgtctttatatttctatgccccttgacatctctcaaacacag

SEQ ID NO: 525973 - DNA, 626 bp, Homo sapiens
gttaggagagaggcaaggaacagaccctcctttacagccctcaggaggatgaaccccatccacaccttgatcttggacttttggcctccagaactgtgagacagtagctttctgttgttctaagtcacccagtgtgtggtactatgctatggcagccctaggaaatgaattcaaggatttatcaccctgtttggagatgtccagccctgttggcagagccagggagctgctttgggatgtgtgtaaacaaggrggcattcctcacaggcctctctcctccagtctggagattcatgccggcagtgagcgtgttactgtaaaaagtgtggcccatgcacctgtctcctccggccattgttccaggcacacctggcttactccatgccatccagactctgctgcagatctactgtcttatctctggaattgggtgttgagtccttccacgctgccctgcactggccattgattgactccagtgccgctatgggctggctctatctatacccatgccctgtccctgtgcctgaaaccccagcatggcctaagccttgatttccttcttgctcgggcttggacaggccctaaaaatgcctgggtccctccctctggtaccaaagataggg

SEQ ID NO: 525974 - DNA, 626 bp, Homo sapiens
gttaggagagaggcaaggaacagaccctcctttacagccctcaggaggatgaaccccatccacaccttgatcttggacttttggcctccagaactgtgagacagtagctttctgttgttctaagtcacccagtgtgtggtactatgctatggcagccctaggaaatgaattcaaggatttatcaccctgtttggagatgtccagccctgttggcagagccagggagctgctttgggatgtgtgtaaacaaggaggcattcctcacaggcctctctcctccagtctggagattcatgccggcagtgagcgtgttactgtaaaaagtgtggcccatgcacctgtctcctccggccattgttccaggcacacctggcttactccatgccatccagactctgctgcagatctrctgtcttatctctggaattgggtgttgagtccttccacgctgccctgcactggccattgattgactccagtgccgctatgggctggctctatctatacccatgccctgtccctgtgcctgaaaccccagcatggcctaagccttgatttccttcttgctcgggcttggacaggccctaaaaatgcctgggtccctccctctggtaccaaagataggg

SEQ ID NO: 525975 - DNA, 576 bp, Homo sapiens
ttttcctacatttttggggataagtgaggaagagaaagaagaaaaaatttaaagaatttaaagaaaaaaaaytgacatgtagttcacatgacaaaaatgatgcagatgaaaatgtaccaaaatgctctgtgatggtggtagcaccataagtgatttttaaaaatattgtgcaacttccaaaactttttttggggtaatttggttttattactttctaataaaattataattaaaagtatgaaaacatcaaaagaaggataaatagaagctaacacaaaataactactaacatgggggaaaattcagtggagatgaaagtaggtttttgatctggtgtttgaacaggccaacctgacaaagctggcaggtcgcaggacagacaggatttggtctctgctttttgaagatttggtctctgctttgtgagatctagagcctggacttctaactgctgcctcccagcaggcattggctatgctttcctgttttcctgggccaggagggtgtccctccaaagccacaccccacttccctatgccgtggctctcatgagccatgccacagaacattcggaac

SEQ ID NO: 525976 - DNA, 576 bp, Homo sapiens
ttttcctacatttttggggataagtgaggaagagaaagaagaaaaaatttaaagaatttaaagaaaaaaaactgacatgtagttcacatgacaaaaatgatgcagatgaaaatgtaccaaaatgctctgtgatggtggtagcaccataagtgatttttaaaaatattgtgcaacttccaaaactttttttggggtaatttggttttattactttctaataaaattataattaaaagtatgaaaacatcaaaagaaggataaatagaagctaacacaaaataactactaasatgggggaaaattcagtggagatgaaagtaggtttttgatctggtgtttgaacaggccaacctgacaaagctggcaggtcgcaggacagacaggatttggtctctgctttttgaagatttggtctctgctttgtgagatctagagcctggacttctaactgctgcctcccagcaggcattggctatgctttcctgttttcctgggccaggagggtgtccctccaaagccacaccccacttccctatgccgtggctctcatgagccatgccacagaacattcggaac

SEQ ID NO: 525977 - DNA, 594 bp, Homo sapiens
ctggtgtcactgctgttggtccctgccctccccttgagctgggactcagtcccaggggttgttcttagggcagcttttttcccactgtgaccttcattttctctgctactatttcccctgtggaatccccttttctatcccagccacctcccccttcagagagagaatctagagatttttctagaggtttcaccaacattattggtggtggtaactgcatgtgcctgttcctttgtaattccttaagttgggaattgtctgtttaaaatattcaccatctcacctctctttcttttgtctctctgcgccaggatttaatagtcttctccccaggatgtttcaataaatggctctttacatcaattaggacgatttcataaataagtttaagaagtgtcatgccctctgctgtttagctttgtaatgaaatttgaggaatataaagatggaattgaaattaatgatagtgtattcagtgtcrttggtatcttgagtttctatcttatactgtttttattcattcttagtagaatagatcacccataggtttttaaaaaatatataaaatatgttgaaaatttagtttagctcttt

SEQ ID NO: 525978 - DNA, 653 bp, Homo sapiens
gtgaaaaaagtatgcctcccagaggttagaatctcaggggcattctgttcaaagaacayaggaagaaatactttgtcctttttctcttaactcaggcctcacaggtctttttgaaagccagaagctaaagtggcttaagagaaagctagaagtattggggtagtggtgttcccacttcagggtgaagttgtcaggatgtacctgttttatgattctagttcctttgattggcagtccttgaactaaattaaaaacagagaaaagttcatatgatttaaactcatgatgcttctttgtgaaaagggaaaatgagacatgttgttagccccagcatctcttttgagatgggggttttactatgttgcccaggctggcctcaaactcctggattcaaactatcctcccccgtaggtggaattacaggtgcatgctaccgtgcttggctatgggcttgtttttaattgttggacggtctgggtgcccctttcactttattctttttttccgctctcacttttttttcctctcacttattaagtctttgtcctctttaagtcctcttctaaaagactggaattgcaggttacatttataactaaatcttcctatctaggtaaagagaaaatatactaaattccatagaaagcaggtaa

SEQ ID NO: 525979 - DNA, 653 bp, Homo sapiens
gtgaaaaaagtatgcctcccagaggttagaatctcaggggcattctgttcaaagaacacaggaagaaatactttgtcctttttctcttaactcaggcctcacaggtctttttgaaagccagaagctaaagtggcttaagagaaagctagaagtattggggtagtggtgttcccacttcagggtgaagttgtcaggatgtacctgttttatgattctagttcctttgattggcagtccttgaactaaattaaaaacagagaaaagttcatatgatttaaactcatgatgcttctttgtgaaaagggaaaatgagacatgttgttagccccagcatctcttttgagatgggggttttactatgttgcccaggctggcctcaaactcctggattcaaactatcctcccccgtaggtggaattacaggtgcatgctaccgtgcttggctatgggcttgtttttaattgttggacggtctgggtgcccctttcactttattctttttttccgctctcacttttttttcctctcacttattaagtctttgtcctctttaagtcctcttctaaaagactggaattgcaggttacatttatamctaaatcttcctatctaggtaaagagaaaatatactaaattccatagaaagcaggtaa

SEQ ID NO: 525980 - DNA, 626 bp, Homo sapiens
aattgccttcaacttgtcaacttcattaattactcrgcaacatattctaatgatgaaagagtaagtagcttctgattgctgctctgtgtcaagctcctctttctgaggcaagtaggcactgaaatgtctgtcatgttatcacagaagagaaaaacttttgctgaattatattttttcttataaagtatttaatccagatgctgtcctgcagaatccacacctccctatattttcagttatactaatcagtgaatcattccatttttatctgttgctcaagtatagaatcttatttctaatagcttctcacttcctcctttctttaacttttttcttccatcactttatcatctatttctctctactgaattctttcttattatttctttctatcaagtcatctcaaccctcacatgagtcatgatgaagcaggttaaattttcttaagtcctctgcatcaccatcagtgataaaattaagaaccatataatgatagcctttggtttgaccttggaaacacggatgggtatctctttcattttcagtgatgtgaacctacttctccctgcacttgaaatatttttgcatttgttacttttcccttagaagcctaaaatatatcacac

SEQ ID NO: 525981 - DNA, 402 bp, Homo sapiens
tccagctgacagtgatttgaggagaggcagacttgtgaccagcacagaagccctggggccgggtgaagcctgacctacctctggagcactgccaaccgctggtggtgactctgaccggcctgagagcaggaggtcagactgcaatacytctggggtccctccacggtctcagtgcccttgactgcagcccgccaggtgcctaatggatgcggcagatgtgcatgggagtgaatgccaatcagccctggagggcaaaccccgtggagatgcagatggaggttcaccaaccacagcccctcttcccacgtttcctttcccttactgaaaaggtgggtgggttcaacaccctggcaggcatgtgtgtgtgtgcattacctgtatacatcagtgcctgctccaaac

SEQ ID NO: 525982 - DNA, 402 bp, Homo sapiens
tccagctgacagtgatttgaggagaggcagacttgtgaccagcacagaagccctggggccgggtgaagcctgacctacctctggagcactgccaaccgctggtggtgactctgaccggcctgagagcaggaggtcagactgcaatacttctggggtccctccacggtctcagtgcccttgactgcagcccgccaggtgcctaatggatgcggcagatgtgcatgggagtgaatgccaatcagccctggagggcaaaccccgtggagatgcagatggaggttcaccaaccacagcccctcttcccrcgtttcctttcccttactgaaaaggtgggtgggttcaacaccctggcaggcatgtgtgtgtgtgcattacctgtatacatcagtgcctgctccaaac

SEQ ID NO: 525983 - DNA, 600 bp, Homo sapiens
actgttcttggttgaagctgaataacatactcccttctattttctgtccctcttccttccctctgcttccctgggccttctctccccaataaagtgtgagcatccaagtttttgcctcagacttgattttctaggtggcaagggctgaggcatgagggcctaggaaatgcccactttggttttccccatctgctctctgtcctctcagagccttccaaagcctgagccgtcgttcgctgccagtcctcagcacccctcccccagcctctcttatccttcccagcccagcctggagcccactatgcccacctgggctacatccatcctcagactgcagacccaaggccctgggctctgtctctcctggcctctctgttgctccctggatgctggctgtgcagatcactgtccgcatgagtctccattcacagtggacctgtgtggaggctttaaaatatgtccacaccttctccgctcaaactgtgaagcctaatgcccccaccccttgagtgtacaccagacttagtaacctgcttctaataaatagaatcggccgggygaggtggctcatacctgtaatcctagcactttgggaggcag

SEQ ID NO: 525984 - DNA, 537 bp, Homo sapiens
caggggatagtttgctctcatgggtgtccatgcagcatggcgtgggaaccccaaggctgggcaactggccagtcctggtggaggagaagacccagggtcacagtaggtgtcctaaggaaggcagcatctaagcagtctccaggaatcaccgttcctccctcatcctctatgtctcataggtctgtaactcaatgtcctcagtgtccccacccccactctctctctctctccactcagaagcactctggcccatggccacccctagagactttgttctgagtcaaaagaagctcttctctgtgagtgtgcacatgcgtgtgtacattcttggaactcttagaacccacctcacctctcaacaaacaaacyataacccctaaagaggatggttttggccaggcgcagtggctcaggcctgtaatctcagcactttgggaggccggggcgggcagatcacttgaggtcaggagttcaagaccaaccttgccaacatggtgaaaccttgtctctactaaaaatacaaaattagctgggcat

SEQ ID NO: 525985 - DNA, 611 bp, Homo sapiens
cctgcaggtagcctctggaacaggccgtggggcatgcgtgggcaccaacaaagtgttctctacctcctctccccttccggacccacaactcaaacccaggagctctgcctgctctagctccatyttcctgcctctggccaagcacaggtgaagagggggccccaggaggcctgcctgctcctggaagcccctcactcactccctgcatcccaccaccaccaccactcacagcctcacccctccatctgccttgaggtcatggggaaaaatagtgcagtgagtccccctctggcttcatcagttcccccaaggtgctgggaattccgacattattcctcatccctgtatggtccagggaagccaggcaacccccaggacctattctcccaccatgcaacccattccctgccccaggctcaaccccctgcccctgcccagctccccactctccagcctcaactcctgcatcatcttcatagcacatccatttgacatatgacacattcacccacttgtttgtctccacccactgagagcacggcctcaggagggcagatgcttcggcctgtttcactccctgccatatccctgcacctggagcagagctgccc

SEQ ID NO: 525986 - DNA, 613 bp, Homo sapiens
tgcctgcaggtagcctctggaacaggccgtggggcatgcgtgggcaccaacaaagtgttctctacctcctctccccttccggacccacaactcaaacccaggagctctgcctgctctagctccatcttcctgcctctggccaagcacaggtgaagagggggccccaggaggcctgcctgctcctggaagcccctcactcactccctgcatcccaccaccaccaccactcacagcctcacccctccatctgccttgaggtcatggggaaaaatagtgcagtgagtccccctctggcttcatcagttcccccaaggtgctgggaattccgacattattcctcatccctgtatggtccagggaagccaggcaacccccaggacctattctcccaccatgcaacccattccctgccccaggctcaaccccctgcccctgcccagctccccactctccagcctcaactcctgcatcatcttcatagcacatccatttgacatatgacacattcacccacttgtttgtctccacccactgagagcacggcctsaggagggcagatgcttcggcctgtttcactccctgccatatccctgcacctggagcagagctgccc

SEQ ID NO: 525987 - DNA, 622 bp, Homo sapiens
gatgaagtagtggctgccccaaaagtgaactccctcacagtccttggtagtgactgtgagattttctaatctaagactgcctccctgtctgaggtgtaaaactgaaatggatggaaattttcttctagaattcctttctagctggtgaggtcattctatttatagatatgattctaccccagatcattctcaaagccatccatctgtattgaaagttcatacccttaacttcyagtggcattgggtatgtgtgtgttttcttatattttcatgagtttttttatggtaatatgtgtgtggttttatcactgggtgacaaggagacaacacaactacatgctttgctgtctgaaaacgaagtgacaaattcatggtgacaaatcactgaaagacactgaaggaagtgacatcactggtaactgatcataatgcacacctgttatttgcatagtcatttgtgtactgaagaactagcagcaatgtctgtactttatacaattattaacacttaatatttcttggtaattgaaatttgaaccagcaccgcaaacacagtgaatatagtaagtactcaatagacactttataattaatgatcagtcatctaatcatctaagacaga

SEQ ID NO: 525988 - DNA, 622 bp, Homo sapiens
gatgaagtagtggctgccccaaaagtgaactccctcacagtccttggtagtgactgtgagattttctaatctaagactgcctccctgtctgaggtgtaaaactgaaatggatggaaattttcttctagaattcctttctagctggtgaggtcattctatttatagatatgattctaccccagatcattctcaaagccatccatctgtattgaaagttcatacccttaacttccagtggcattgggtatgtgtgtgttttcttatattttcatgagtttttttatggtaatatgtgtgtggttttatcactgggtgacaaggagacaacacaactacatgctttgctgtctgaaaacgaagtgacaaattcatggtgacaaatcactgaaagacactgaaggaagtgacatcactggtaactgatcataatgyacacctgttatttgcatagtcatttgtgtactgaagaactagcagcaatgtctgtactttatacaattattaacacttaatatttcttggtaattgaaatttgaaccagcaccgcaaacacagtgaatatagtaagtactcaatagacactttataattaatgatcagtcatctaatcatctaagacaga

SEQ ID NO: 525989 - DNA, 626 bp, Homo sapiens
ctggtcaggctgacacgagcacccatccccttgacaatgagtttcctcattgcgaacgagcagatttggcagctaatttgatgaatgtctctgtgcgcattactagtgtgagtcagtgctctgggcccagtcaaatctgtagctctgacaggaggaatttatgagcctgtgaggggaagggccagaacatggaccctgtgaattgcccataataacggttccctttgggtcttgtcaggcacccccttggcctcttctcaaagatccaagcggcatttcccctgggatgtagtggctcactcatttcgtttataatgcttctcccagcccaacsatctggcattgggaaaacctgcctagtccccttgggttagggcagcagagtccagtgagatgagtgagtcctacaggaacctggtaaaataactcagataaacatgggaacccaacaaacttccaccgagggttgaatagttcccagacatcaagcttggtggagatccttcatgttcactgttcatgatggctctgtcgtggcacgaaaagcattagacatggagtcatcagattttgtttctatggctttggcctaattatctgggtgactctgcaccagtcaatgtttt

SEQ ID NO: 525990 - DNA, 596 bp, Homo sapiens
catgcagcgtcatttaagggtcccatttctcaagtcgtaccctagtgagaactgccacaggtttggtaatggcaatgggctatttcccaacactggaagtttttgaacatcagttggatgtgaaaagatgaatgcatagagatgtttatttaacattatttacagtggtgaaaaaaacagaaataagctaaagcccaacaatagatgatttattaccaaaatatggtaaacgcataccatggaataccataaacattatgatataggtatatatttatttatataggaaaatagtgataatatagtgaacaagcagtaatgtatagtwtgatctcatttatagaaaagactctaggtagctatgcacccaattgctaactacatttatccccgggtagtgaaatgacacttactgttgttgttttcattttgcttgtatgtgttttctaattttaaaaagtgaatatatattgtttgtataatattttcaggttaaaataaataaataagggttgattggttttcatagcacttaaaccctcctctaacattgagactctatgaaactcatgacctaagaccataaacaactaatg

SEQ ID NO: 525991 - DNA, 526 bp, Homo sapiens
ttgcaaacctccctctacaagctgcctaatgtccatgctggggaacctgacattgcactggggaaacaaacacgggagaggaagagaggccatctcatcacctgtccctgctctgaaacaagaagacacctttgggaaactcctcattcagattccaccgtgctaaggtrcatatcctgtgctgtacaccctaagggaatgcaaggcatggcccagatccttcaggatgaagcatccagttacgtaagcattgttttagttttaaaacatgctgttaattaccatccctctatacttatttatatctctggatagaaacacaatctttaatgctccctaaaatttagttgttttgtttgtttgtttaacatttgcctggctatcttgtagggcatttgccaggcaatttttaatgagccttaaaatatttccattttgaagagatacccaacaactatccttggaaaaaggtgagtgtcaccaaatcaaacaagggggcagtgactctattttcccatcactaggc

SEQ ID NO: 525992 - DNA, 537 bp, Homo sapiens
cactcttgaccttgacccacccattctgctatacaagcccaatatgctgtccatggtgttaacagataaaccaaactctgtaaaatattttaaagaggtttattctgacccaatgaatgaccatggccccagagaacacaatctcgaggggtcctgagaaagtatgcctgaggcagttggattacagtttggatttatacattttagggaggcaggagttacaggcaaagtcataaatcaatacaaggaaggtatacattgatttcgccagaaaaggtgggatatcttgaagcagggacttacaggttaygggtggagtcagagatcctttgatttacaattagttaaaggaggaaaagtttgtctaaaaatttggagtcagcagaaacgcatattttaagttaagataaggaagtctgttaaccaattcattgggtcagagtgacctgtaggtgtgtatgacttaacaagggtttggcatggccataggtcctatttataatttgacatcttattttcacgaagagtctacttttg

SEQ ID NO: 525993 - DNA, 500 bp, Homo sapiens
tggcagcatgatgtgtttatggggtgaatgattgtcagattacagagacttttcatcagctatgctaaagtgagaacctaacacaaagacatttatggtgctcacataattgaattgctgggaatatgatattctttttaagtggtgggctagtgcagagaagcttcaccgctaggattcaaaggatgtttagggcaactggcagtaactacttctgtgaggagaacctcctgcatttcagacatggggctgagtgccatggcaatttaaacataaaacctgtagggatgrtgtacctaatatgcttacaatcttgtggggctgacaagaaatacatataaaatagaataaaaagcaatatgttttaagagaaagctgccgattttagaaactggaggtccagaggaaaaaaagaggacagggatccaggaggaagtaggaatcagaatggaattttagttcgttaccagtctcaccatattgcttttctcccaggcaac

SEQ ID NO: 525994 - DNA, 607 bp, Homo sapiens
ttgttttattttttcttctcgtgaaatcctgtgatgacttcctgggccaactccctcatggcygtgtgctgtttccacttaatctccagcttggggctaaggtatcctttgtttgtgatgaagggtgagtgtgacccagtgttgagaccaaggactcagtgtggagaatcactgagttaatccaattaaggagctgacctagtagataagaagtacccagagagattaatttatggaagggtagttttgaaataagcgttaatccaattaaggagctgacctagtagataagaagtacccagagagattaatttatggaagggtagttttgaaataagggtagggactaagtggcaccgccttcagaaaacaatgaaaaaatggcacatacaactcaatatcagatacaaacctaaatacagtcactgatcttgggtacacagttggaacttgaaatgaatgggtacgtatttatttggaggcaaaagaacataattttataaaatgtgtgctagaaaaaaaagatgaatgagatggaaattgtttgcctcataataaggcaaaggttgttttaggaaacttaaaaccagtcaataatggaatctgt

SEQ ID NO: 525995 - DNA, 607 bp, Homo sapiens
ttgttttattttttcttctcgtgaaatcctgtgatgacttcctgggccaactccctcatggccgtgtgctgtttccacttaatctccagcttggggctaaggtatcctttgtttgtgatgaagggtgagtgtgacccagtgttgagaccaaggactcagtgtggagaatcactgagttaatccaattaaggagctgacctagtagataagaagtacccagagagattaatttatggaagggtagttttgaaataagcgttaatccaattaaggagctgacctagtagataagaagtacccagagagattaatttatggaagggtagttttgaaataagggtagggactaagtggcaccgccttcagaaaacaatgaaaaaatggcacatacaactcaatrtcagatacaaacctaaatacagtcactgatcttgggtacacagttggaacttgaaatgaatgggtacgtatttatttggaggcaaaagaacataattttataaaatgtgtgctagaaaaaaaagatgaatgagatggaaattgtttgcctcataataaggcaaaggttgttttaggaaacttaaaaccagtcaataatggaatctgt

SEQ ID NO: 525996 - DNA, 607 bp, Homo sapiens
ttgttttattttttcttctcgtgaaatcctgtgatgacttcctgggccaactccctcatggccgtgtgctgtttccacttaatctccagcttggggctaaggtatcctttgtttgtgatgaagggtgagtgtgacccagtgttgagaccaaggactcagtgtggagaatcactgagttaatccaattaaggagctgacctagtagataagaagtacccagagagattaatttatggaagggtagttttgaaataagcgttaatccaattaaggagctgacctagtagataagaagtacccagagagattaatttatggaagggtagttttgaaataagggtagggactaagtggcaccgccttcagaaaacaatgaaaaaatggcacatacaactcaatatcagatacaaacctaaatacagtcactgatcttgggtacacagttggaacttgaaatgaatgggtacgtatttatttggaggcaaaagaacataattttataaaatgtrtgctagaaaaaaaagatgaatgagatggaaattgtttgcctcataataaggcaaaggttgttttaggaaacttaaaaccagtcaataatggaatctgt

SEQ ID NO: 525997 - DNA, 551 bp, Homo sapiens
agacgtcagttgggaaagtttagggtaaaactttttctttagttcagtctttcctgtctagttctaaaataaattgtgtttgattccctcccctgccgcaaaaaaaaaaaaagtccagggaccgggtgcggtggctcacgcctgtaatcccagcactttgggaggccaaggcgggtggatcacgaggtcaggagatcgagaccatcctggctracatggtgaaaccctgtctctactaaaaatacaaaaaaaaaaaattagccaggcaaggtggcgggcgcctgtagtcccagctactcgggaggctgaggcaggagaatggcgtgaacccagaaggtggagcttgcagtaagccgagatcgcgctactgcactccagccttggcaacagagcgagactccgtctcaaaaaaaaaaaaaaaaaaaaaagtccagaggcaggtgttccagggctggtatggcagctctaaccaagtcatcagggatgcagctttcttctagctttctgcatcactgacttttgcacacagctttaatcctaaaatgtccaag

SEQ ID NO: 525998 - DNA, 551 bp, Homo sapiens
agacgtcagttgggaaagtttagggtaaaactttttctttagttcagtctttcctgtctagttctaaaataaattgtgtttgattccctcccctgccgcaaaaaaaaaaaaagtccagggaccgggtgcggtggctcacgcctgtaatcccagcactttgggaggccaaggcgggtggatcacgaggtcaggagatcgagaccatcctggctaacatggtgaaaccctgtctctactaaaaatacaaaaaaaaaaaattagccaggcaaggtggcgggcgcctgtagtcccagctactcgggaggctgaggcaggagaatggygtgaacccagaaggtggagcttgcagtaagccgagatcgcgctactgcactccagccttggcaacagagcgagactccgtctcaaaaaaaaaaaaaaaaaaaaaagtccagaggcaggtgttccagggctggtatggcagctctaaccaagtcatcagggatgcagctttcttctagctttctgcatcactgacttttgcacacagctttaatcctaaaatgtccaag

SEQ ID NO: 525999 - DNA, 555 bp, Homo sapiens
atcagatcctgtctcaatgttgaacaatctattggctggtcagcagccaatcagattcaccctcttgagaatttcaagtatgtgttgcacagccrgaatgcaatcagagctcaaaggttactgagggttgggaactttacctacaatcaatgctgtaaacaggctgaagtcattaagaggcagagatgcttcttgaacaagctgcagagagaaaaatggcccaaatgtatgaacagatgagaccatagagacaccatagaggccccagagaaagagaatcaaagagagggactataagtcatttcaaagagggcttggatggctatgaaaccagagctcttaaggttataataagattgaaattttccataggatgctgtagtcacacaatagtgctgttttcttgaggagacagaagacttagccactcataatcatgacatctcattcataataatccatgattggaggtgtgggaaagtgaataggtatcttacagttagggtgagagaggaaaagagaaaaagaggggttggggagagagagacagagaga

SEQ ID NO: 526000 - DNA, 569 bp, Homo sapiens
gtggaatgatagacactgaagactctgaagggtgggagtgtgggagtggagtgagggatgagaaattgcttaatgggtacaatgtacattattcaggtgaaggttacactaaaagcccagacttcaccactatataatatatccatgtaaaaaaagctgcacttatatcctttcaatttatacaaaaaaaaaaaaaaaaaaaaaaaggaccttagtgttctgtgacctttatacgtgaagaatgggttaatagaaatagctgggttttcatggtgttcaggcaaacaggacaccaggaccagagagagaaagagaatttcagtstctgcagctttttcagaaggagagggagccctgcctagtcctcatgggtacctggacttcttggcaggactttttctggagtgaagacataggtacctagctcccatggcataatatattgaccatcaaaagcataaaccaacctcctgtgccccacattctgcctcaggaccatccagtccagcctgtttgggttctatttctcatgacaattctgatttaccatcaatctcttaggaggctca

SEQ ID NO: 526001 - DNA, 569 bp, Homo sapiens
gtggaatgatagacactgaagactctgaagggtgggagtgtgggagtggagtgagggatgagaaattgcttaatgggtacaatgtacattattcaggtgaaggttacactaaaagcccagacttcaccactatataatatatccatgtaaaaaaagctgcacttatatcctttcaatttatacaaaaaaaaaaaaaaaaaaaaaaaggaccttagtgttctgtgacctttatacgtgaagaatgggttaatagaaatagctgggttttcatggtgttcaggcaaacaggacaccaggaccagagagagaaagagaatttcagtgtctscagctttttcagaaggagagggagccctgcctagtcctcatgggtacctggacttcttggcaggactttttctggagtgaagacataggtacctagctcccatggcataatatattgaccatcaaaagcataaaccaacctcctgtgccccacattctgcctcaggaccatccagtccagcctgtttgggttctatttctcatgacaattctgatttaccatcaatctcttaggaggctca

SEQ ID NO: 526002 - DNA, 585 bp, Homo sapiens
gatatggttaatgagctgtggaagcagaattcacccaggaaatgatgtggggccaccctacacctgtttccaaaggctgtggagctccaggcttggaatgagtgaaatctgaaawcttactacctatttgggggctcccactcctctcttcagacataaatacagagatgggaaaggacttgacaggaacccatggactgaggaagatagcaatgggggcgggaagggggaaggggaattagaggagctgtgctttctttatctgactccccacatatgtaaaaacacacacacacacacacacacacacacacacacatactgcacttacagctcaggagctggggagctgagctctcatgcctattctgtggctcatggtgagccagttgcttcccttgtctaggcctcagtttgctcatctataaattttaggagaagggctagaatctctccggcccagcctgcagaggtccaggaatttggtatccccacctaagtatgatctctctgagagcagggacttggcttcaatctcatggatgactgatcactcagaacccagccagcctcagggagagtcca

SEQ ID NO: 526003 - DNA, 585 bp, Homo sapiens
gatatggttaatgagctgtggaagcagaattcacccaggaaatgatgtggggccaccctacacctgtttccaaaggctgtggagctccaggcttggaatgagtgaaatctgaaatcttactacctatttgggggctcccactcctctcttcagacataaatacagagatgggaaaggacttgacaggaacccatggactgaggaagatagcaatgggggcgggaagggggaaggggaattagaggagctgtgctttctttatctgactccccacatatgtaaamacacacacacacacacacacacacacacacacacatactgcacttacagctcaggagctggggagctgagctctcatgcctattctgtggctcatggtgagccagttgcttcccttgtctaggcctcagtttgctcatctataaattttaggagaagggctagaatctctccggcccagcctgcagaggtccaggaatttggtatccccacctaagtatgatctctctgagagcagggacttggcttcaatctcatggatgactgatcactcagaacccagccagcctcagggagagtcca

SEQ ID NO: 526004 - DNA, 653 bp, Homo sapiens
ccaccctgggtgattatcattctagttcagttacaattctaccataacagcatataatctaaacactaaattaacaagttaccaacagtaatacatttcattatactagggaaaatatgggaggggaaaatgagttaatatctataaattaacacaatagagcaaggaagaaaatatgaaatgctaatatagtgcccgtttctcagcttttcatgagttagttgtttctatttwtatatatttctttctccaccatccagtccatgatccttcttcctcagccagtatatgaactggattaagttctttatctggtggggtgacccaaatcacggaggtagacattctcttaatttccacagggattatctcctatccttagaacacatgttttaccagggcatttggatacctgctacttcttgcttgcaagattccagacatgtagaacaatgttctgggagatgtgagatgattaaagtgcctgcagattagactgcaacagagctgcaagggtgatataacccagatgcaggacagtgtaatgtactgttgaccctgacaggtgaaagtaatctgtttttgatgttttctgctatttgggctagagaaaaaagcatattccaggtcagtactcatattcagttgcacga

SEQ ID NO: 526005 - DNA, 540 bp, Homo sapiens
caaccaaataggaatggtcctgtttaagaatggaagaggtgcaggagttacagaatggcagagtgaggccctccataagcctactctcccattaaaataacagaaacactaggaaatggtcaaaataaactgtttcagaactctggaaattaaccaaaggctggcaacaatctgagggcgtttattcaggaaaaactgttgaaccttggtaagagcagaaaggtttgtgacacttgaacttggcctattcccatcccattctacccagcccctgttagccatgataactagcagcctcacaaccacaggaatggtaaaaaccagcaacyttgcagccaccagaggaaatagactgggtttgaagctcctcaaaatgtcccatctgcaaagcattgtcattatttagctgtccttccgacttctggagaagtcccatttaccaggcattgttgaaatttggcctaacagagttcactctgaagaaaaactctatacccaggggattggtcaaaaaccatcagcagcaattgtgtatcactg

SEQ ID NO: 526006 - DNA, 585 bp, Homo sapiens
ttcctttgttctctaaccctctggcagcaactgaagtagmgcttggcatctcacagggactcggtgggtagctcgattactcctggagcccctcagggcggatgtcctgtgtgactttggatgcttgattacttggtttggcttctatgcccattgcttttaatctggggaagtggcatggggtagggaaaggggaatggaaagaactggaagttaggagtcgggagaccaggagttaaaccaggcttctggccctgaccacttctgtgatcttgtcaggcatccacttctcagaggctcacttcaagtctaggaaatgggatcacagtttatcccggggttgctctgaagtttgaatgaagtgctataggtaaaaaggcttttcaaattaaaatcactatgcaaataaaagtaaagcattattattatctgtagtatgcatttgcataaattccgtcttctctaggcctccatgaaatggggataataatagttattacctctcgccaggattactgcaataccctcctaactggtcttcgtatttctatttttgcacttttaaaagtcattctttgcatagca

SEQ ID NO: 526007 - DNA, 624 bp, Homo sapiens
ctggaagccaagtacattccaacatggtgacttcccctccctctccttgttgtcacctgtgcaggtgtcatggcaccaccaggttgaggccacatttgcataataaaagattagggtgggagggccagtttcttcgaaggctgtgtaaatgacatacctggccaaaccaatcccctgggacctacgtaaatcaaacaccgcctcctcaagcccctctatataatcaactgcatcccaccccaaacttagaaaccctcttgggcacccccttcctctgcctgaggaagctctctctctctctcttctttctgtgtctattaaagtttccgccccttaaacctactccgtgcgtgtgtgtccatgtcgttaatcttgtcggctcgagacaacgaacctcgggtatttccccagacaacgaagccrcttcactctcagattggctaatgaggcccctgctactgtggagctggcagaggttttagtgggaagggtcaagaagggccttcatggggccctgggggttccttagcaacagcagcagagggctgtagataggtctatggatgtcagggaagactctaactggggtgggaaggcagattccacagaaaaggacagctagct

SEQ ID NO: 526008 - DNA, 562 bp, Homo sapiens
gtttctcctcataaatcatacattytctacttcgttctcctttgtatctgagaataacgttctcttcgttattctcagttacaaagatctgaggaggcattcagacgaaatagatatgacaatatctatgtgttaatacacatgattaaagactttgttggtgctggaataccagcaaaatgatagactaggaagctcctaatttgcatttccccacagaagaattttttaaaacctagaaactttctgaaccaattttgtcacagcactggaaaacagttaaaggtttacagcaatcaagtgaaggcccaatcaagaaaaagtcatcttcaaaatggcagggaagttttgtgttttaactcaccctggccccatcctctccccggtgtggcagcagtctttgtcttgaaacacagcagccagccttgttccaatttcctccttgtaaactggaagaatcagagcagatattacttgcgaattattatatacatgtcttttaaactgtctgggagataagtgaaggactgactcactaatctgtgttacctaactcagaaca

SEQ ID NO: 526009 - DNA, 570 bp, Homo sapiens
taattaacttatgcattacctcacatatttatctgtagtgtaaacacttaaaatctattctcagcaattttcaagtacacaatacattgatatgaagtatagtcaccttgctgtacaatagatattttgaattcattccttcggtctaactgaaattttgtatcctttgactaacatcctgtttgtatcctttgagctgtatctctgtttagttgaacattaagagaataaagatagatggtagcckgctaacaaaggagaacacactaaattacaaataaaaatgtaaaataatccaaaaattattacaatatgggttttaaagtaaatggagttcaacagtaaatacagcttctccatgcattagataactttctaacagttatttctgaagtgatgtattgtatctaatatccagttcttaaaaatgcttccaatgccagattttttctcttcttttatcccttcctttcttcctctctttttccattccccctttttctcttctctctcctctctctcattctttctctctctccaaactttcaatataaattcaaaccatctgtc

SEQ ID NO: 526010 - DNA, 488 bp, Homo sapiens
ccagtcacaattttaatgttttatttggaacctaacaaaaatgattttagagttcatcagtaagaaaaatgtttgagactagccaagacaaaaaatattaaacatatgcatagttgggagctgaaggagaggacaggaagaaagctattaccagatattgagacatagaatatgaaatcttaaaaataaaagctagcatatgagataatataaaattagtgtatgagaaaagttcatttctagtcagtgagaatgaaaggatcatttagaatatgattcagagatattgaataattattgaaattcaatataaaataggaatttagagatacctagcacataartgagagtaaacttaattctagttaatgtattaagttgaaggtaaaaaaaaaagaactagaataaaataaacttcaatgcttattgattcctggagatgaaaagaatttcataagtataaaagtaagtgtagaactaataaaaat

SEQ ID NO: 526011 - DNA, 645 bp, Homo sapiens
ctgccaaccctcaggaggtcaccactgccacgtgctcccgtaccttctgctggatggagtcagcacatggggatggcatgttcagaggtcagatctaggatctgtgcccagttccacaccctgttcaggtaaagtttttgtaaacaggaatgatgttgagccccgagccagtctcctctgtcctggaaagaggtctgtttgggcagaattgtgtccctgcaacattcatgtttacattctagccccctagcgctcagaatgtgactttatctggagatatggagtcattaaagaggtaatgaagtgaaaatgaggtcatcaaggtgggccctaatttgatctgactgatgtcctcctgagaagaggcgattaggacacagacacatacagatggacgaccacgtgaggacacagggagaagatggcatctgtgagtcaaagagagaggtctcaggaggacctgaggctgccrgcctccagagctgtgagaaaataaatttctattgttgaaggtcccaagtctgtgggacttgccatgcgggagctgggaagctaaaaccgagcccatttccatcacgtgtgccaacagcgtgcctgactcctctttttgccccaatttcccagccccactttcttctgtgaatg

SEQ ID NO: 526012 - DNA, 630 bp, Homo sapiens
tgtcatggacacaggataggaatagtggctcatgtgtcatagaactctcacccctgacttaacccaaatctcctacagaagctaacagccagtgtggggaaaaaagaccaacacagtcatttggcaatttacagacctagttaaatcttgagttttttgaatccaagctcttaacttgctacttaatgtttcctctgttatgttcatacattagytcttgataatcaaaacataaaaaccaaggtcgttcattatatgttcttgaaaagataagtaaattgtttgaagaattctgggatcgttttgccgaccacacaggaattaaagtctctacagtagtagagtagtctagacagtggtgtcacaaggatgagcaagacacctgagcccactctttaagacccatgatagcaacagaatatgctgtcatagagctaaatgcaacctatctttctgtgggtttgtgggtcagagagacagtgaaatattagggctgtatcttaaaggatgagcagaaattctctgggacaaagaagagacagaagaagacttccaagaatggtgatcacaaagcactgagccaggtgggaaagcaggggcttgtctgggaacagaggtggcagcacaggg

SEQ ID NO: 526013 - DNA, 630 bp, Homo sapiens
tgtcatggacacaggataggaatagtggctcatgtgtcatagaactctcacccctgacttaacccaaatctcctacagaagctaacagccagtgtggggaaaaaagaccaacacagtcatttggcaatttacagacctagttaaatcttgagttttttgaatccaagctcttaacttgctacttaatgtttcctctgttatgttcatacattagttcttgataatcaaaacataaaaaccaaggtcgttcattatatgttcttgaaaagataagtaaattgtttgaagaattctgggatcgttttgccgaccacacaggaattaaagtctctacagtagtagagtagtctagacagtggtgtcacaaggatgagcaagacacctgagcccactctttaagacccatgatagcaacagaatatgctgtcatagagctaaatgcaacctatctttctgtgggtttgtgggtcagagagacagtgaaatattagggctgtatcttaaaggatgagcagaaattctctgggacaaagaagagacagaagaagacttccaagaatggtgatcacaaagcactgagccaggtgggaaagcmggggcttgtctgggaacagaggtggcagcacaggg

SEQ ID NO: 526014 - DNA, 625 bp, Homo sapiens
atgatacattttggctgtgtccttacccaaatctaatcttgaattataactcccacaattaccacacgtcatgggaagaacccagtggaaggtgattgaattatggtggtgggtctttcctgtgctgttctcatgatagtgaattagtctcacaagatctgatggttttaaaaatgggagtttccctgcacaagctctctctctttgcctgctgctatccatgtaagatgtgacatgctcctccttgccttccactgtgactgtgaggcctccccagccatgtagaactgtaagtccattaaacttctttatcttcccagtatcagcaagactgtctttatcagcagcgtggaaatggactaatacaacatagttagcaagtattgtacyatgtggcaggattactctcaggcctttggactcctgttctgtttcttttcattacaccacagttaattcaggatgtgaaatccgggttggctgttctctgcaaagggacaatggtgtctgttaagataccactgcagggaaacccaaagttgatggcatgagcaggacttggtagtgaagggaattcacccagatttccacaatgcctcagctcccactctttgggaaataactg

SEQ ID NO: 526015 - DNA, 528 bp, Homo sapiens
actgggtacttaaaacaacagaaacttattgtctcccagttctggaggttagaagtctaagatcaagggttgctttcttctggggcagtgaaggaaaacctgccccacaccactctgctggtggttgctggcaatcattggcagttctgggcttatagatgcatcacctcgatttctgcctttatctctatctggccttctccctgcacctgtgcccctcagcctgcatctcccctttttataaggacaccagtccaactgattaggggcccaccctgctccagtatgtcctcatttttgacttaactaattccaaccgcaaggatcatatttccgagtaaggtcacattctaagttactggtgggtaggacttcaacataagatatttgagagggaacaactcaactgtagcataacccacctctcctgtgrtatgttcacgatagaggagcctcgagtggatgtgagttagagaccaatcatgacgcctcagcagatggtggactgtgccccaggccaagtctctc

SEQ ID NO: 526016 - DNA, 634 bp, Homo sapiens
tttgattgtacctggaagagacaattcgttgtgcattaatcatcaagcagcagttgaatgtaatattgatgatggagataaaacatcatggaacgctgtagtttttagagatctttcacttgcattatgtaattttatcctcaaatctgccataggttaaaaaaaaggagaagagaaagaggaagagcagtgtattaggccgttctcacattgctgtaaagaaatacctgagactgggtaattgataaagaaaagaagtttaattggctcgtggttctgcaggctgcacaggaagcatagcagcttctggggagccctcaggaaacttamaatcatggaagaaggcaaagggaaagcaggctcatcttacatggctggagaaagaagagtgaggaggtgctacacatttttaaacagtcagatcttgcgagaactctatcacgagacagcagtatgaggatggtgttaaaccattagaaactgcctccctgatccaatcacctaccacaaggccccacctccaacactggggataacaattccacatgagatttgggtggggacacagatccaagccatgccaagcaggagcagggggaggaggataaaggaggaggaggaaggcaagcttggt

SEQ ID NO: 526017 - DNA, 607 bp, Homo sapiens
caaaaaaatataaaaagtacctgggcatggtggtgcacacctgtggtcccagatactcaggtggctgaggtgggaggattgcttgagctgggaggtagaggctgcagtgagccatgatcgcaccattgcactcagccttggcaacagagtgagaccctgtctaaaaaaaaaaaaagaaaagaagagtataatggtaaaaatgagaattacccagctaaaacaggaattactcaaaaacaatttgatgtttttcctctggtatttgttccgatgcacatatacttgtaactgcccaaggggttcaccttgccctctgcttagacagagctcattcatcaagatgagaattgcaatagagaaagagtaactcacgcagagctsgttgtgcaagagaccagagttttattattactcaaatcagtcgcccgagcattcagggagcaaagtttttaaggataacttggtaggtcggggagccagtgagccaggagtgctgattggtcaggatgaaatcatagggagtggaagctgtcttcttgcactgagtcagttcctgggtgggggccacaagattagatgagccagtttatcgatttgggtggtgcca

SEQ ID NO: 526018 - DNA, 448 bp, Homo sapiens
ttctaaaacagcgtcatctgggaagttgttagaaatgcaaatgtacatgccccaccccagacctgaatcagatactgggaatagagcccatgttttagcaggcccttcaaaagatcctgatgcatgctcatatttgagaaccactgccctagttgattactaaggtcctctttagccttaatgttctgcggttctcatttgtctctcctgctgaggacaacccattcccaaaaaggatatccctcccccaagtcattcatcatttatttggtgctgaygaagggctggccaggaagttgggagtgctggaactttggagaaacagttctcctgggcattcagactcaacctctgcttgcaataggtacagattaaacgtagaacatttaataaccctacttagctcaggaaacattgaagaaaccaagtgatgcataattacgttcca

SEQ ID NO: 526019 - DNA, 415 bp, Homo sapiens
gtcatgtacttccattttgtgacagatgcttcctctgcaggaatatattgggttcaaacatttctacctccaggaatcgtttcttcaccctggyttcccttcactggtcagttattttccctgggttcgcataaccaataaacagtattgttctgctttgggtcctgtgtttttagggggcctccctctgaccctctttttgactgttccctccttacaggacaaatagtgccctcccagagcccatgccttcccttttggaccatattctaggtacccaacaccccagaatactctccttaaacagcccagagccctcttccataggtccatcctaaaagtggaccatgcagctggtgaacacaccccggggggactgaagagggaccaggtaaaaaccatttgctgccagaga

SEQ ID NO: 526020 - DNA, 480 bp, Homo sapiens
agatggaactgtctcccattatctgctcccctgcagccaytccagagtggcatcccggctgcagattagtaagggccacagagagagctacacagtcagtgtgacaatggccaatagtgcagtaggtccgcctccctccccactggccatggcatcagaggggcagtgaacagacctggagacactgcctgctcaggccactgcgggcatctctgggaatgaacatggactgaggtctgggctgctgggttctcttttattcgccaagtaagacaaagaacaggtcacaacatcacagggaatgagactgacagaaggacagatacacagagtgtcatgcagcactacacagggggcaggcgaggggacaggcaggggtgaattaagtcttgtttttttccactaacagaataaataaatacagtacacagtgtctttgccatgggctggcacgacctctaagcacaaatggtcacaaaa

SEQ ID NO: 526021 - DNA, 669 bp, Homo sapiens
gctttcagtacccaaggctggtgccctaaacttgagagccctccgagggcagggaycacatgtaccttccctgccttctctggcagatttgggtcaattgaatgggacaagtgttaacaaacatctgagggaagctcggctgctcctaaggtgggcctgcctccagccatgacagaacattgccccttaggagttcaggggaggcttcctggaggaggtagtgatatctaaggctgttggattccaaggcctagtgacagtcacttgtacccaggaactgacaaaaagcttcagcctaaaagcagctaggaagcttcccatacctatccagatgattattttttgttttagaaacagaacttcctggggctaatcccagaggacagttgatgggctattggccacaaaatccctcccaaaccaaaaacctcctctgtcactcctggaatctgccaacctcccacagcgctgcctaagtctctcctctgatgcccccatggctggtggattccccttccaaattccagaccccagcaagagacctgaggatttggaaaccctcaaatgcctgtcttggtgcttgccacatgtaggtgtggtctttagcctggattccaggccccttagccccacctctcgtgaagccagccacccccttcccatggtcta

SEQ ID NO: 526022 - DNA, 669 bp, Homo sapiens
gctttcagtacccaaggctggtgccctaaacttgagagccctccgagggcagggaccacatgtaccttccctgccttctctggcagatttgggtcaattgaatgggacaagtgttaacaaacatctgagggaagctsggctgctcctaaggtgggcctgcctccagccatgacagaacattgccccttaggagttcaggggaggcttcctggaggaggtagtgatatctaaggctgttggattccaaggcctagtgacagtcacttgtacccaggaactgacaaaaagcttcagcctaaaagcagctaggaagcttcccatacctatccagatgattattttttgttttagaaacagaacttcctggggctaatcccagaggacagttgatgggctattggccacaaaatccctcccaaaccaaaaacctcctctgtcactcctggaatctgccaacctcccacagcgctgcctaagtctctcctctgatgcccccatggctggtggattccccttccaaattccagaccccagcaagagacctgaggatttggaaaccctcaaatgcctgtcttggtgcttgccacatgtaggtgtggtctttagcctggattccaggccccttagccccacctctcgtgaagccagccacccccttcccatggtcta

SEQ ID NO: 526023 - DNA, 653 bp, Homo sapiens
aaccttcagctcacagcccctgtcccctccctgctgggcttagggtttgtatctgagatatgcctcatgccagagctctgttccttcagaaatgtgctcggagtctctgctgcacgtgggaatctctggtactaatacagtattcgcccagtatgcactgggacatccaactggttgttaaaatattggaatacttccaaatggttgataaataatttttgccccgagctcccgcagtatcccacccctgctacccagcccgtccctcaggaccccctggaccttcccacggctctgcaactaaagggtgaaaacctggcccaggcctgctgtggtcagtcctttctgatgcgccatgcccctgaggggcagttgattactcgcctctgacttgcttcacacgctcagggcccccagaccccagccctcccatggtacccctcagacctcacctgccttggggctgcccctcttgcagcccagccccttgctgtcagccccagggctcttctcagctttggggtcctcagcccctgccctggggtcctcctcacggtccggctgatcctcrggggctgactcactggctgactgctcagacagactcaggtgaagctcagcaggggggtcgctgccaggcagacgtgggggct

SEQ ID NO: 526024 - DNA, 472 bp, Homo sapiens
attccctgatttctatcttctctgatttggtccaaggcaataggaggacagcaagaaaaagcacattctgctgggcgcggggcttacgcctgtaatcccagcactttgggaggccaaagtgggcagatcacctgagctcaagagtttgagaccagcctggccaacawggtgaaaccccaactctgttaaaaatacaaaaattagccaggcgtggtgtcaggcacctgtaatcccagctactcgggaggctgaggcaggagaatcgcttgaaccggggaggcggaggttgcagtgagcagagatcgcgccactgcagcctgggtgacagagtgagactcggtctcaaaaaaaaaaaaagaaaagaaaagaaaaaacacattccctctggtatgcatgttcgtgtgcacactgtgtgcatgtatgtgtgctgtgagatgaagctgtgtggaagcctaaatcttccctgctaagc

SEQ ID NO: 526025 - DNA, 489 bp, Homo sapiens
cagttccacaccacctgcaacaacactgccacccccgcgccaccatgcagcgccacagccagtactctgaactcgccgcccacacaccccgcgggtgcgctggtttgcgctcctagcagccgctcacctgtctagcacctggatgttggcctctgggccgggaggccgcgggctggaactcgcggcttcacacacagcacaggcacctgtcgccgggactgggggaacaaacacactcggcgaccggtccacttcgggaaaatcctgggcctgagatggtcctgctcttaccagcgctctgctccctccaggcgggaaccggctcataggaagaggacgttctggggccggctctcaatcaggcagaggctcggcttcccaaaaggtgtgtgtctgagctgtgtgccagggggcaggtgtacgcccacactgccagtggatgcaggggtgacaagttgctctrtagagattctgggaggctctgtggat

SEQ ID NO: 526026 - DNA, 266 bp, Homo sapiens
gcgctggtttcccttaaccctttgaggaccacagctcaggcacacctcaggctggtgcctggccatggaaacacagacacacagatacacatcccaaaygcagcaaacacagacgcaaacacaaagtgcatggggcccccaccctgataaagccatcatgcagatacacatatctcatacatgtacacgctcttccagatacacatagaaatatagctgcacacatactccttccaacccagaaacccacaaatcagatgcacctg

SEQ ID NO: 526027 - DNA, 578 bp, Homo sapiens
gcagccaagagtagagaggccaagaggatagaagccaggagggcatgaggcagaagaggacccagtggcatccgtcgcactcagagggtccaagcacccagcagcgatgggggaggtgcttgctgaagaggcaaaataagccctttccaggatgccctgcatgtgggctgcacacaaacctacagtcccactcctgggtaagaacgtgcacacagcccacgcctgggggttcagcccatccctgacgccctttayccacctttgggatgacccaacagactgccatcttgagctcaaatgacttctgggcctggacttttgtaggccagtgctttccctgagcttaaccccagtggtgtccgggtgatttaggcggcactagcccttccctcaattaccagcagtcctgagcagtcctaaataggcaggcaatcttcataagacagcacgtttgctatgcaaagccagcaggcagagtctcaagcccccatccctccagtccacactccaacgtccctcatatggaaatgttcccattcccactgtccagtcacgcccccaggctagataatcggatg

SEQ ID NO: 526028 - DNA, 405 bp, Homo sapiens
ctgggaccagtgtctgactcttatgtgggcatttgggtggcatcttccacaatcacagggcagccgccaccaagtctctgtgggcaccaggccagcagtttggctcgagaggctgtctgtacaggggagctggtgccactgagcattcaggggctgtctggagtgtgagcaagccgggaagaatgcatgtctgggggtggagcgggtgtgtggagcatcaggcgamagagcgtggctgtgtgtctgccggtttgcagtggggctgtgtacacaggcatgagagacagggagacagacaccctgggattgtgtggtccagtgcagaagtcaacatgtcccaggggtgtgagaggatgcgtgtgtgcgtgtgtgctgtgaatgtatggggaatgtgtgtgagaggct

SEQ ID NO: 526029 - DNA, 369 bp, Homo sapiens
gcagctctcaaagtctatgtggggttccatgtgcatacttatcaaggagtggactctacctgcacaaggaaaagactaacagwtttaacagaggggtggctgctatgaaattgagtttggaccagaggtacttgaggtggaggagggttggggaatgtatgatggagtttctgccatccatggtgggaagaactcatgcacacctcattagcacccaggtatccaactgagacactagaatggatgtgctttaggaataagtgtcacacttttcaataaggcctattgtagaccaacctgctaaagcctaaaagcaaaccctgacaaattcacaaaggggtggattggtgattgagtcctgccaaatta

SEQ ID NO: 526030 - DNA, 414 bp, Homo sapiens
ctgcccatctccgtcgccctgtggagccgcgcttcaccgtcgacccgcgccgaatgcatggccgcgccgccagcctgcccgcctggtgcagcaagatctccacgctgctcaagagcatggccacgctgctagccgcgctgggcggccggcctgcgcacctggcggagctgccgaccgctgacacgggccagccgctggcgccgctgcctgaggcgccctgactgccggggccgctttgcctgggccgctcgcactggctcaactggtgccgcgaggctgtggcgcgcgagatcctcgagtgcggcgtctccgtgcagcatcaccgcgccacctacgagctgcgcgcactggacgcggcgcccccgcgctgtccgcgccgcaagccccmgcagtccgctggcgccccggtccgcg

SEQ ID NO: 526031 - DNA, 495 bp, Homo sapiens
cagcggcaggcagtgggcaagctgctgcaccactggcggagcctgcggcggcacgtgccgccaagccygggcctggcgcacggcgtgtactggccccagcacttcctgtcgcccctagacggcggcgcacccccgcgctacgaaagcctcacgctcgacctcttcatgctcggctacttccagctaccggagatgggcctgagccgcgaggatcgcaagttccgccacctactgtgctacgagatgttccaccggctggacagccacccgtgggagcgcatccgcctcttccaccgcgtggtgctggaggaggtggaggccggccggcgcggctggagcgacggcttcgaggacctcaggcacaggttcttcggaaacggcctggaggctgggccggcccccgaagaacaggcgaagaaaaaggaagagaaggggaaagaacaggagcggaccgaagaggccgctccggttcagaagggggacccgcccaagggg

SEQ ID NO: 526032 - DNA, 495 bp, Homo sapiens
cagcggcaggcagtgggcaagctgctgcaccactggcggagcctgcggcggcacgtgccgccaagcccgggcctggcrcacggcgtgtactggccccagcacttcctgtcgcccctagacggcggcgcacccccgcgctacgaaagcctcacgctcgacctcttcatgctcggctacttccagctaccggagatgggcctgagccgcgaggatcgcaagttccgccacctactgtgctacgagatgttccaccggctggacagccacccgtgggagcgcatccgcctcttccaccgcgtggtgctggaggaggtggaggccggccggcgcggctggagcgacggcttcgaggacctcaggcacaggttcttcggaaacggcctggaggctgggccggcccccgaagaacaggcgaagaaaaaggaagagaaggggaaagaacaggagcggaccgaagaggccgctccggttcagaagggggacccgcccaagggg

SEQ ID NO: 526033 - DNA, 495 bp, Homo sapiens
cagcggcaggcagtgggcaagctgctgcaccactggcggagcctgcggcggcacgtgccgccaagcccgggcctggcgcacggcgtgtactggccccagcacttcctgtcgcccctagacggcggcgcacccccgcgctaygaaagcctcacgctcgacctcttcatgctcggctacttccagctaccggagatgggcctgagccgcgaggatcgcaagttccgccacctactgtgctacgagatgttccaccggctggacagccacccgtgggagcgcatccgcctcttccaccgcgtggtgctggaggaggtggaggccggccggcgcggctggagcgacggcttcgaggacctcaggcacaggttcttcggaaacggcctggaggctgggccggcccccgaagaacaggcgaagaaaaaggaagagaaggggaaagaacaggagcggaccgaagaggccgctccggttcagaagggggacccgcccaagggg

SEQ ID NO: 526034 - DNA, 335 bp, Homo sapiens
tttactgttaaatgcctcctatggcttaygtgccagaattcagtttgggggagttccttagagatgttctcatagaaatctctacagaagcccccataacttatcatccaccctttcctcttctgtcctgcattaggaaatatgattccctgattcaggatcaggcccgggaactgtcttacctacggcaaaaaatacgagaagggagaggtgtttgttatcttctcacccagcatgcaaaagatacagtaaaatcttttgaggatctcctaaggagcaatgacattgactactacctgggacagagcttccgggagcaactggcccggggaagc

SEQ ID NO: 526035 - DNA, 586 bp, Homo sapiens
tgtccctccaccagccggggtcccctcgctcagcccatgagacaaataaatgaatacataaataaataaataaataaaagatggagtcttgctctgtcgcccagggtggagtgcagtggtgcgatctcggctcacttcaacctctgcctcccaggttcaagtgattctcctgcctcagcctcctgagtaactgggattacaggtgcatgccaccacacccggctaatttttcgatttttagtagagacgggatttcatcacgttggccaggctggtctcgaacccctgacttcaagtgatccacccgccttgacctcccaaagtgctgggattacaggcatgagccactgcacccagccagaagtgggcattaatatgcaggcgccgtatagggcaacatctgtgtgcacctcttacaaatcttaatgctgtgyatatgaggggagtccttcgtgtccccctggggatgtttgaggttgcctgtatgtgttatgtgtgtgcatatttttaagctcagatatgcataggcggattgacacctctgtttgaatgtattcccatgagctcatgccattaattcaccatc

SEQ ID NO: 526036 - DNA, 533 bp, Homo sapiens
tgtttgagaaacactagctttaggtaaacgtaagagggtcacgttagtatttttaaatcattggaagttggtttgttttgttttttcttaagtgggactcatttatacttcaatacacagaatggatatttagaggaagtcgtttttgacctaacacagatgagcacttccaattgaatagcgctttctgataatggggctgcccactacaartgaataactgggtttctctaggctggagctgcagacaggtcactatgtgtatggaggattgtattaatatgatcgtggctctttatagctctgcattactaatattctgttttaaagtctctcctcaatatccaatgtctctgtgtgaatgatggtaaggagtgggtaacagtaacaatcatcctgttgttgacaacagatgataagagaaagcccaactttacactctgtataatcttacaccaatgccccattcctcgtctaatttttttacatgttaacacatgaccttggcattactaaataagaagccctctcac

SEQ ID NO: 526037 - DNA, 549 bp, Homo sapiens
ctgggggtgggtgcttgggcagccggtggagggaggaggctgcgrcagtgttagggtcctggtagagagggagacaggtccctggtcatacagagccaggaccctgggaaaaggtctagcaagggaaatcacagcctaggatgagagcttgggaactaggggcagagccagggtagggaggagtgtgagagtggaaccaggatgcaagggggaggagcctgggagccctgggggtgggatcagaacccaggagacgagtgtgcctgggagtttgtctggcatcccgggggctttgataggagttgtccgggaccccagggagatgagggttcagagggtggtgagggcacataggaggggagtggaagcctggctctcaggcctaggcccctatcctgccccagggcaggtccaggccctggaccccgcctagcgtaggctagtgtgtatccctggaaccagaagagagtaggtgggctctggaggcctcaaaggacccccgctagactctgtgatccccacgccccagaacatgcgtgggcgctatga

SEQ ID NO: 526038 - DNA, 549 bp, Homo sapiens
ctgggggtgggtgcttgggcagccggtggagggaggaggctgcgacagtgttagggtcctggtagagagggagacaggtccctggtcatacagagccaggaccctgggaaaaggtctagcaagggaaatcacagcctaggatgagagcttgggaactaggggcagagccagggtagggaggagtgtgagagtggaaccaggatgcaagggggaggagcctgggagccctgggggtgggatcagaacccaggagacgagtgtgcctgggagtttgtctggcatcccgggggctttgataggagttgtccgggaccccagggagrtgagggttcagagggtggtgagggcacataggaggggagtggaagcctggctctcaggcctaggcccctatcctgccccagggcaggtccaggccctggaccccgcctagcgtaggctagtgtgtatccctggaaccagaagagagtaggtgggctctggaggcctcaaaggacccccgctagactctgtgatccccacgccccagaacatgcgtgggcgctatga

SEQ ID NO: 526039 - DNA, 543 bp, Homo sapiens
aggtgatccacctgccccagcttcccaaagtgctgggattacaggagtgagccatggcacctggcctagggttgttatatgtttgacatccgtcccatttgggaggccttctcatcagtcattttatgcctttaatgccattctaggtaggcaggaaaggggtcagggccagtgggcccatgtagcagatagggaaactgaggcccagagaggacaagccacttcttcaagaggacccaaactggatgccaggcaggccctctgcctctgggattttgcccatatggctcaactggcctaagtctgctggcccaaggaaaaatttcaacccaaccctgccctttcccccattcctctcgtgcaggggagttggcgggcctgcggcagcaaataatagctacgcaggagaaagccagtctagacaaggagctgatggcccagaagctggtgcaggctgagcgggaggcccaggcctctctgcgggagcagtgggcagcccasgaggaggacttacagtgactccagcgtgaaaaggttcaggca

SEQ ID NO: 526040 - DNA, 543 bp, Homo sapiens
tgtccaaatatagtcacatacatttgaccattttataattattgaataataaatttgttctgctattttacaatgaaaaataatgctgcagagagcatttttgcacatgtatcgtggcagatgtaggccagaggctcttcttttatccatcctatggccaacctatgaatgtatacacgtttaatgagattttgccagcaatcaaagccttcagggaaaatgtccctagctctttactacatcagatcaaggactctggataattggcataacatcctggaatagctgaaacagagatattattctctgctctcctctgttgtctttgtcttttcacgtcttaataaaagtgctggtgacaagagtgtaactatgtcagtgttctcctgctgtccttgcctgtgtgggtcttctcccaaacccgactttcctccagcggcttcactgaaaaagaggagggggctgtggggggtgggtcggggagcagaggaggaaataaactgratagggaggaagcttctcacaggcccggagagggtaagg

SEQ ID NO: 526041 - DNA, 557 bp, Homo sapiens
ccctcacctccacccatggccacccaggcccacagacgatactccacccccagccccactctgcttcctcttgtctctcatgctgctgagtccccaccccaccccagtcaccatcccttgccctgggactccattctttgttaagatctcctccctttctgggcctcagttgcctcatctgtaaaatgggaataacaatgcctttctatgcccatcatcctggagctggagaagcaatgccaggactcagagggtagacctcagtctcctcaagtctcagaattcttcattggaccatgggggtcatcttaactccagaggagttgtcagtagttgtggccgattttgtgggtgatgttaaaggaaacaagactcccaggcatcccaatatatatacacacccagccatctcccaaggaagctggtatatcaagtagtcaagaggtagaatcctccaagcccaggtgcaggagaaggttragtcctaaatatgaggggtgctctgtcccaagcatacagctgaggaggtctgagccaggccctagtcctctagccca

SEQ ID NO: 526042 - DNA, 598 bp, Homo sapiens
ccatttgacttatttgaggtaaacttaactggttagtggtgcatccagaatttgaacccacatctagcaagttctaaagcctgtgctcatttcactttacctttatgttctttctacattaacattcttctttctttgtagctattaacacaaaggcagagaaaactagaatcttgatgagaaatgggatgggaaaaaataactgctaataattaaagtattaatggtgtctrctacacccctctgtgttcttggagactggctgaactagattttccctgacatagtcatgctgagattgagtttttgattattttggaaactctctgagataaactcttcatagtaattctaaaaacttaactaagatagctctaagagaaggcttgtttcagtaagtattacttcttaatgactgtgtgtgattaaattttagaattagtattgccaatcaccgtgtaatcccagacctatatgcctttacgtttgaatatctaaaataaaaacaacagatttattcagttgaacaagtgaactggcttctctccttctaaatgtgtaagtgctctttttaactaacacagtattagtatttgtt

SEQ ID NO: 526043 - DNA, 520 bp, Homo sapiens
gcgcactgtaattccagcactttgggaggctgaagcaggtggwtcaccagaggtcaggagtgtgagaccagcctggccaacatggtgaaacctcatcgctactaaaaatacaaaaattagctgggtgtggtggcacatgcctataatcccagctactcgggaggctgaggcaggagaatcacttgaatccgggaggcagaggttgtagtgagccaagattgccccactgcactcaagcctgggcgacagagagactcaaactaaaaaagaaaaagaaaataatgactcatgagagccaatccaacatctgaagggaatctctgtcattaagactgaaacacgcatataatttttttaagctaaaggagataatctaagcaattactctgcaaaatcaacagcccacactgatttaaccactatttagcatctaaaagatagttgcacagtctgatataaagaactcagaaggactaattcaaatataacaattattctatctctacagaagagaaaaaga

SEQ ID NO: 526044 - DNA, 611 bp, Homo sapiens
aaatgaactagaggagccaggaatcagtactcaaaaaagcagaggagaaagcaagctgctacaagaaactcaagggaaacaagaaaagagaacttcagggtttcagcccaattcactaaataggaaagagggctaagattcaagatcagtgttggaactagtaacaaatattacatttcatgatagaggtgcaaaaataatgaaccacaggtatattcatgatctaatgttatgtaacctattacccccaaattttagtggtttaasacaagagtaagcatttattatatcttatggtttctgtgattcaggaatccagaagcagcttgattggatagctctgggtcggggctatcatgaaattcagtcagatgttggctgaagctacagtcatctgaaggcttgacttggttgcagggtctgttcccaagatagatcactcacataactagcaagttgttgctattagcaggaggcctcagttcttcccacacagagctaagattcaagacttctatgcaagtcaagaaatacacacacacacacacacacacacacacacacacacacacatagtgaagtctgaatataaattaggaactgagctcttc

SEQ ID NO: 526045 - DNA, 204 bp, Homo sapiens
cacaggctgagataggtcaccagcccacaacctaagcccttcacctcagacagaccacccaagttcacccacaggggcagagcrggcctagcacctcaggcaccctgccactgacatatatgcaccccaggaaaaggaaattgtatgtgtgttctgcccacttttcttaagcatcatgaaaatctccgtgtactgccaccaagt

SEQ ID NO: 526046 - DNA, 663 bp, Homo sapiens
gcatgcctttatcaaaacatctcatgtacctcataaatatatgcacctactatgtactcataaaaagtaattaaaaaataatttagaagaaaaaattaaaatgttgagcagtgtagaaaacttctgactccttagaatgtttgmttttaaggtgtcaattttattttgtcaggctggacattacctcaggatatgttttcaatatgccagatatagaatatacttttggaatggaatgaagaacaattttcttcaaaaggtgcagaacaaggacaatggtctttatatccctatgactagcccagtgcttgagacagaatatgtgcccacttaagagttgttgagagatctgatggtctttggtagcttacttctgtttaaagcatcctatttctgggctaatcctccatattaaaccaagacctttgttcttaagggctagtatcctcccagtggtaatagaatcagaaagaaaaaccagggtagttcaaggcagaatagccccaccacacatagttttacactgtggagttgtaagtctggttggctggaatcataatattacctaaagtttaaaaaaattatagcatctttaaaggtgaggattacagaatcatagcatatttttttaaatgacattcattgttccaatttactcattct

SEQ ID NO: 526047 - DNA, 622 bp, Homo sapiens
attggcagccatggtcgaagaatgtatttaagcttttaaaagctggagtaggggcagtaactggcatggaaatggttgcgcacgtataaaagtacagaaggtttttaatacttggacaagacactttcatcattgaggtagaactattttttcctgaatggtgccagcccgggcaagtggggtttgttcygcgtgggtatatacaggttgtatgctgggaaaaatgggtaataatgatgaaattttaagggctgcctgccaggctgctgaacgtgtttagaagtttccctttgttatggcatctgtagccttttggtgtccctttcaatggataatggtggcctgcggtggtaggttagccacctccagcagcttgtgtgcaagtttcctatttcttatgagggttccttttgtagttagaaaacccctttcctgccagattaaggtgtgagagtgtaggatgtaccacgcatatttggaattggtgtgaatgttaactctctttccgtttgctagggtgagatcctgggttagggctactagctttgcctgttgaaaggtagtatggagtgggagagcattggattctaggagctcagttttggtaatggtgacgtggaca

SEQ ID NO: 526048 - DNA, 628 bp, Homo sapiens
gtacacggctcgatcatctctcagtgcatcatctcacagagtagatgtttacggtgtggaaaatagtttttttttwaaaaaaaaactgaattaggtctagtattagcactttaagaatacaacgatgtgtatacctatgtaacaaacctgcaccttctgcacatgtatcccagaacttaaagtacaataaaaaagagcacaatggtgtgcaataaaataagactgtccttaaaattgatttgatgttgaaaatgttaatgctgcatggaatatatatatatatatatatatgttatatatgttatatatgttatatataggtatctatgttatatatcatctatgtagttatatatataattatatataggtacataaaacacctaaatcttcaatattgctagctacctatttaacctttattatgcaatataaataaacataatatattgcacaagtgccatctattctgatgttcagaaccaccatgagaaggtcagccctctccacttctgtttcctcggttttccccaggaaaggttttgtaggttagtggaaatcataaaatacatatctctgacagtaacaaatgaaaagtagagtgcctactcatgctgtttttttcttg

SEQ ID NO: 526049 - DNA, 534 bp, Homo sapiens
ggactgaataacagcaaacaagccttatttctgaggtcttatttgctccttagatatctcctgcctatggtcaggtatgattctagggcctggcacatgttttatgaaaaacaaaacccaaagaatgagatacttgagtgatakgtatagtatttccatagatgcttggctttttcacaaaggaagttaaaaagtctgggttatacaatgactttgaaaatgagcaaaatagtattttcttgattctcattaaagatctaacttttggaattgctttgtgagtcagtttatgagacacaagaaagttggccccattgtttacttagtcaccccttatttctgagaaaaaaatgaatttgttgagtgaatcaatgaatgaattgaatgctcctacataacttttaacaattttcaaataaaaccttcactcaaaagacaaaaatgtatgcccaaatctaaaggcatcttctgcaagagactatctggagggaacagcacagagttatgtgtgtacattttgatttgtgtgttaaa

SEQ ID NO: 526050 - DNA, 534 bp, Homo sapiens
ggactgaataacagcaaacaagccttatttctgaggtcttatttgctccttagatatctcctgcctatggtcaggtatgattctagggcctggcacatgttttatgaaaaacaaaacccaaagaatgagatacttgagtgatatgtatagtatttccatagatgcttggctttttcacaaaggaagttaaaaagtctgggttatacaatgactttgaaaatgagcaaaatagtattttcttgattctcattaaagatctaacttttggaattgctttgtgagwcagtttatgagacacaagaaagttggccccattgtttacttagtcaccccttatttctgagaaaaaaatgaatttgttgagtgaatcaatgaatgaattgaatgctcctacataacttttaacaattttcaaataaaaccttcactcaaaagacaaaaatgtatgcccaaatctaaaggcatcttctgcaagagactatctggagggaacagcacagagttatgtgtgtacattttgatttgtgtgttaaa

SEQ ID NO: 526051 - DNA, 596 bp, Homo sapiens
cttagcaggtgacacatggcatggtctttgaagtggataaaaacagacacaggtcaggactgaataacagcaaacaagccttatttctgaggtcttatttgctccttagatatctcctgcctatggtcaggtatgattctagggcctggcacatgttttatgaaaaacaaaacccaaagaatgagatacttgagtgatatgtatagtatttccatagatgcttggctttttcacaaaggaagttaaaaagtctgggttatacaatgactttgaaaatgagcaaaatagtattttcttgattctcattaaagatctaacttttggaattgctttgtgagtcagtttatgagacacaagaaagttggccccattgtttacttagtcaccccttatttctgagaaaaaaatgaatttgttgagtgaatcaatgaatgaattgaatgctcctacataacttttaacaattttcaaataaaaccttcactcaaaagayaaaaatgtatgcccaaatctaaaggcatcttctgcaagagactatctggagggaacagcacagagttatgtgtgtacattttgatttgtgtgttaaaaatcag

SEQ ID NO: 526052 - DNA, 598 bp, Homo sapiens
gatggggcaagagtctgatgctctgctctgcccaggtgttccttttcattaacactgcatcaattcaggctgtcagacaggctgttatacccatgacaactaaacagttggtagaaaacaggtacaggtgggctaccagtcacttatacatgaatcgaaagggctactcttgtcactcatccttagtggcaaaatggtataatagaaatggattacgtgcaatattctgtgctatttagagatgcatgtgacaaactggaaaaatgaggatgcatactttaaaatttaaataaaagtactctgccaaaatgtaagcatgacaataaatgtgttttcttatgaaagccaggcatgatacaaaatcgttttttaaaaaataattttagctagggtagttaacacagtttgaaagattgagtaaaattmtttggtgtcagaaatagaacaaactcctgtctggtaagctaataattttatgttagctatttctgggtatatcgtctctatgttagcacagcagttctcaaactttagtgtgtgtcagaatcaccaaaagaccttgctaaaacgaagattggcgggccccacccctagagtt

SEQ ID NO: 526053 - DNA, 557 bp, Homo sapiens
aatgacatttctcaaattcctttgcaaccagtgatacataagcacaagtattctgtagtacatctgggaaggttgcctgaagggagctgataccgctggaagaagaaactcttaggcccttacctacctttcctccttcctgttgcctaaaacataagtgcaatggctggagctttggcagctattttgggccwtgaggtgagatggaatgtctcagtgagtcacatgagacctggactggccaccatcaggcttcttttacattaaaaataataatacatctttacctgtttaagccacttttatttggagctttctgttgtgtgcagttaaacttaaccccatgacatggggccaccagcagctccagcttcaccttcccaactcagaaaccccagggtcaggaccactgctcttctcacttcacaccaaagtgtcaggcaaggcgaagcgctgaactgcacggctgggccgtgactggaggaacagccgaaacatggctcaggcgcattcccggggcattttatgttacttgttggtttgcttttgaggagagg

SEQ ID NO: 526054 - DNA, 557 bp, Homo sapiens
aatgacatttctcaaattcctttgcaaccagtgatacataagcacaagtattctgtagtacatctgggaaggttgcctgaagggagctgataccgctggaagaagaaactcttaggcccttacctacctttcctccttcctgttgcctaaaacataagtgcaatggctggagctttggcagctattttgggccatgaggtgagatggaatgtctcagtgagtcacmtgagacctggactggccaccatcaggcttcttttacattaaaaataataatacatctttacctgtttaagccacttttatttggagctttctgttgtgtgcagttaaacttaaccccatgacatggggccaccagcagctccagcttcaccttcccaactcagaaaccccagggtcaggaccactgctcttctcacttcacaccaaagtgtcaggcaaggcgaagcgctgaactgcacggctgggccgtgactggaggaacagccgaaacatggctcaggcgcattcccggggcattttatgttacttgttggtttgcttttgaggagagg

SEQ ID NO: 526055 - DNA, 531 bp, Homo sapiens
gtgttaaggctcactgtgcttggacactcagggtccggcagaaattccagccccttggccrgtgccagagccacttagttcttgccagaaagctggggaggggacacagggcatcagtcacctcccccttggggtctgcggcctgctgggatagcagtttagaagagggtttggtgaggaggccagttcatgaggccacaggaaagggcccgggcttcccgggtctcttggggcctgtgtgctagaaccacagggagagggccaactaggtccctctcgggggattggcaggtctgtggggggccagaacattaactgaagtgacagccagggggctgggtgctgggagtcagggaggcccttcctggcccctcgttttccctcgacctccctggaccaccccccaggcacctctccctgtcacctgcacctcctgctccctgcttgcccagcccgggtccctctcagggccaaaaggtgggtgggcaagggcccaggctggactgtgccaggctcaggaagtcaggtgcg

SEQ ID NO: 526056 - DNA, 466 bp, Homo sapiens
catcaccagcctccctcggggaggatccctgggcagttattgaacctctcsgtcccccatctgtaaaatgggcgtgacgacagtaccaacttcacaaccttgtcctgagaatttagggagccgctgtgtggaaagtgctctgaagaacagtgtctggcacgtgagaagctcggtgggttgggttagctggcaccacaataatgccatcacaatgggagctgctctcaccgccgtcatggccaaccattgctgccataaccaacaccatccccctggcacgatcaaagccatcttgtctccatcatcactgatgcctcatctccatgaccgttgccatccgcatccccactctgccaccatcaccactgtcaccccatcagcaccacgcccacagaggcgcactgtgggtgggagtatcccatctcatgctgcaatgcaggaggactggtggccccattctagagga

SEQ ID NO: 526057 - DNA, 197 bp, Homo sapiens
tgttattctattatgtgccttctgtttacttttaaactcaaccactaaagaagaaggtaccaccttcaccttaataaagtgattttcrgccgggcatggtggctcacacctgtaatcccagcctttgggaggccaaggtaggcagactgcttgagctcaggagttccagacccacctgggcagcatggtgaaaccca

SEQ ID NO: 526058 - DNA, 470 bp, Homo sapiens
tggactggctgctgttcctatccccaggaatcactgcttatgctacaacgatgggccctcggtgagcctttatgagcttattttgctccccatcagacctccttccaacattctktagctggagataccaagcatcctgctgcccccaacccacaacattgcaatgtccagacaattgcctagctctaagacaggctgggctcaccaggctgatatcccaggtatgagcctgccttggcattagatggccaggaggatgccagctcggcccctacattcataggctcctgtttctctggtgtagcagaggcccatggccagggacaggggcatataggacgtgccttgtattagaccaggtgactcctgcagtggattacaaccctgagactctccaataatatgactcagagaagaacatttcttccctgataagtataagactcagataaacccaaaggtggatacaa

SEQ ID NO: 526059 - DNA, 470 bp, Homo sapiens
tggactggctgctgttcctatccccaggaatcactgcttatgctacaacgatgggccctcggtgagcctttatgagcttattttgctccccatcagacctccttccaacattctgtagctggagataccaagcatcctgctgcccccaacccacaacattgcaatgtccagacaattgcctagctctaagacaggctgggytcaccaggctgatatcccaggtatgagcctgccttggcattagatggccaggaggatgccagctcggcccctacattcataggctcctgtttctctggtgtagcagaggcccatggccagggacaggggcatataggacgtgccttgtattagaccaggtgactcctgcagtggattacaaccctgagactctccaataatatgactcagagaagaacatttcttccctgataagtataagactcagataaacccaaaggtggatacaa

SEQ ID NO: 526060 - DNA, 470 bp, Homo sapiens
tggactggctgctgttcctatccccaggaatcactgcttatgctacaacgatgggccctcggtgagcctttatgagcttattttgctccccatcagacctccttccaacattctgtagctggagataccaagcatcctgctgcccccaacccacaacattgcaatgtccagacaattgcctagctctaagacaggctgggctcaccaggctgatatcccaggtatgagcctgccttggcattagatggccaggaggatgccagctcggcccctacattcayaggctcctgtttctctggtgtagcagaggcccatggccagggacaggggcatataggacgtgccttgtattagaccaggtgactcctgcagtggattacaaccctgagactctccaataatatgactcagagaagaacatttcttccctgataagtataagactcagataaacccaaaggtggatacaa

SEQ ID NO: 526061 - DNA, 619 bp, Homo sapiens
ctgaagtgtcaggattccgaatgctgaaacagatcactagccraaaatgcttttagacacttaaaggttgacttgactagcaaacttttaacctcagtttttgcttgatccaagtcaatgcctaaatctagaccagccctttgacccaatctctcatggagagtgttcctggtgaagtcatggaaatatggccaatggcctgtttacagatttgtgtgagtaaagtgaagcttttgcaggggactgtggcacttctcttcatcgttactcccacagattcctacagtaaattttccttgtactgtgaagagcaagggcgtctcacagaaactctcggggatggtatcctcttctccatttgcactcacccccaacttttcacccttccctccaaatcagaaggaaaaaagttctctctgctcatctaatgttaattttttctctctcccacccagggtgtatattttatcctcctcgtaattctttttcttttcttttctttttttgagatagagtctcactctgtcacccaggctggagtacagtggcacagtctcagctcactgcaacctccagttcccgggttcaagccattctcctgcctcagcctcccaagcag

SEQ ID NO: 526062 - DNA, 563 bp, Homo sapiens
ctgcccagggctagctcgttaaagatttacccttcctcacccctgcggtrgagaaagtctctcccaagctaggggacccctagctagggggttctggagtctgaggatcccttgctcttggccagtcctcacaagaggaacccgtgggaccacccagaccggcctcctttgtgcccagttggggatacctaagcagataggaaggactcaaccaaggccacagagctagcctgcacaggaccaagcttttcccaccctctccacataccccccactcccacccccagcagctcagctcagggcccaaggagtggcacaggtctcagtcagctctagggacgacctggctggattgaatctctgagctgacctgagaacaggtttccaagcatctggtaaaacactggggcacctgcctctctaatgccaaagttaatcctaggccagcatgattgtttaaccctctcctggtctggcttatgagaacagcagagatgtctgtgaatgtgcagggatggggcaatcacttattctgtaccagtctccatgctgggcaccagggc

SEQ ID NO: 526063 - DNA, 563 bp, Homo sapiens
ctgcccagggctagctcgttaaagatttacccttcctcacccctgcggtggagaaagtctctcccaagctaggggacccctagctagggggttctggagtctgaggatcccttgctcttggccagtcctcacaagaggaacccgtgggaccacccagaccggcctcctttgtgcccagttggggatacctaagcagataggaaggactcaaccaaggccacagagctagcctgcacaggaccaagcttttcccaccctctccacataccccccactcccacccccagcagctcagctcagggcccaaggagtggcacaggtctcagtcagctctagggacgacctggctggattgaatctctgagctgasctgagaacaggtttccaagcatctggtaaaacactggggcacctgcctctctaatgccaaagttaatcctaggccagcatgattgtttaaccctctcctggtctggcttatgagaacagcagagatgtctgtgaatgtgcagggatggggcaatcacttattctgtaccagtctccatgctgggcaccagggc

SEQ ID NO: 526064 - DNA, 521 bp, Homo sapiens
gtaatgccaggacggggacagcaccatggagagatagcaaagctatgtcagcagctgggcagcactgggcatcagctggcgacgtgggcaggaaggtggaggggtcacagttctgctggggcgcttccttatcctttcattcctaggagaagatggccagaggagttggaccttggagaattagaaaaaggagtagttgctaagtcatagccttggcatgaagtaatggtgaacagagggagtgtgtttatcctttgtttagacgtccagtgtgagggcttagggatggcctcgctctttagtggttgagctccctgacttctggggtctgcataggacctcatgtgtgcaggatggtctttgcagggtggtgggtctctgcaggacagcatgggcccctcattggcctctactccmtacctgtctgttggggatattctatctgggagacagagaggtggcccctcagagaacagtgtacattgctaattggtcagaattgcaccattgccagacccatt

SEQ ID NO: 526065 - DNA, 591 bp, Homo sapiens
tttgctggcttccctctgcattcagggagagatckcagcttcttagacttgcctttgcttgtgcagtttccggctggagagcgcttctgtttctgctgggcagcagaaccctatccatccatcaataccctgtttaagtcaaatgcctggaaccttccgggggcccagtgaatccctttgtctgtctcagggctcccatacccctggggggtctcccacagcccttactgctcggtgtcctaaatgcctctctgctggagatcccagtgccggtgctgctcagagcagtaccccatcaggattggatcagtgacagatggcacttcccctgcctcttctggcctgggccaggcccagaggagctctgtggaaactcacatcttagcaacaatttctctccctccggtctccagcatgcaccagggatacccctcaggggccccctgcactgctgccaggttcacagactcaaatgcccatgaggcccaacaaatatgtttatttagcataaatagagatgagccaacaggacaggtggtggggaccatgtccagttagagaaggcacgccgcgtgtgtggagggcggctgc

SEQ ID NO: 526066 - DNA, 330 bp, Homo sapiens
acattagagaattaggtacttaggttggaagaagcccaggcaatgacagagcrgagaatcctgctagaaaagagagagttggtccaagaagccttgtgggttaactcgctcttcatctgcatatccaagaattacttccatgataatgggcagagggagaatcaaggaaaactcatttgtgtggtctgttgaaacagagtaagtctggagtcatgtatgggttacttgatttttatgcctgaataaggaagagtcacttgaatagttaaaaaaaaaaaaaagagagaactatgtaaattccacataacaagaaaaagagaatttaagaga

SEQ ID NO: 526067 - DNA, 507 bp, Homo sapiens
ctgaggagcctcccagtccctgctctactgagtggagttctgtttggttagcaccagtaccttattagttttaaattttgagtataaactcagtctgtaatgtagaattcagaaaatgatgcaaacatcttcaaatagtcaaggtctgtcttttttttttttttttttttttgagatggagtctcactctgtcaccyaggctgaagtatagtgacgcgatctcagctcactgcaacctctacctcccaggttcaagcaattctcttgcctcagcctcccaagtagctgagattacaggtgcccaccaatacgcccaactaacttttttcatttttagtagagacggggtttcaccatgttggccaggctggtctcaaactcctcaccttgtgattcccctgcctcgggctcccaaagtgctgagattacaggcatgggccactgtgcccggccaaggtctgtctgaaatgataaattgtttcctttgccactggatctcctctgtaa

SEQ ID NO: 526068 - DNA, 554 bp, Homo sapiens
ctcccagtccctgctctactgagtggagttctgtttggttagcaccagtaccttattagttttaaattttgagtataaactcagtctgtaatgtagaattcagaaaatgatgcaaacatcttcaaatagtcaaggtctgtcttttttttttttttttttttttgagatggagtctcactctgtcacccaggctgaagtrtagtgacgcgatctcagctcactgcaacctctacctcccaggttcaagcaattctcttgcctcagcctcccaagtagctgagattacaggtgcccaccaatacgcccaactaacttttttcatttttagtagagacggggtttcaccatgttggccaggctggtctcaaactcctcaccttgtgattcccctgcctcgggctcccaaagtgctgagattacaggcatgggccactgtgcccggccaaggtctgtctgaaatgataaattgtttcctttgccactggatctcctctgtaaacaaatatgctctattctttctataatttcaaatatatctttctttccttctcctc

SEQ ID NO: 526069 - DNA, 554 bp, Homo sapiens
ctcccagtccctgctctactgagtggagttctgtttggttagcaccagtaccttattagttttaaattttgagtataaactcagtctgtaatgtagaattcagaaaatgatgcaaacatcttcaaatagtcaaggtctgtcttttttttttttttttttttttgagatggagtctcactctgtcacccaggctgaagtatagtgacgcgatctcagctcactgcaacctctacctcccaggttcaagcaattctcttgcctcagcctcccaagtagctgagattacaggtgcccaccaatacgcccaactaacttttttyatttttagtagagacggggtttcaccatgttggccaggctggtctcaaactcctcaccttgtgattcccctgcctcgggctcccaaagtgctgagattacaggcatgggccactgtgcccggccaaggtctgtctgaaatgataaattgtttcctttgccactggatctcctctgtaaacaaatatgctctattctttctataatttcaaatatatctttctttccttctcctc

SEQ ID NO: 526070 - DNA, 507 bp, Homo sapiens
ctgaggagcctcccagtccctgctctactgagtggagttctgtttggttagcaccagtaccttattagttttaaattttgagtataaactcagtctgtaatgtagaattcagaaaatgatgcaaacatcttcaaatagtcaaggtctgtcttttttttttttttttttttttgagatggagtctcactctgtcacccaggctgaagtatagtgacgcgatctcagctcactgcaacctctacctcccaggttcaagcaattctcttgcctcagcctcccaagtagctgagattacaggtgcccaccaatacgcccaactaacttttttcatttttagtagagacggsgtttcaccatgttggccaggctggtctcaaactcctcaccttgtgattcccctgcctcgggctcccaaagtgctgagattacaggcatgggccactgtgcccggccaaggtctgtctgaaatgataaattgtttcctttgccactggatctcctctgtaa

SEQ ID NO: 526071 - DNA, 570 bp, Homo sapiens
ctacgcttaggtcccacactgagctcttcttgcttttaggcctgacctcaagcatccttgctaatgaaaycctaggtcatgaggtttccctctagtcaatcactatgctcgctgtagtttagctctgggctgagcaggatgaattgaggctaagagtgactgcctctgtgcctaaaaccttgagcactgtgttctgaggaaaatttgtgtttacagtaatgcccctgtgacttggatgagtttccaggacttgtgagacatcccagaccctgtgctaagaaaaccatggttcctacagcccttgcatggggaaagtggatcaaatacagcagggggagctcatttcagggccatatttgtgctgtcttcctccttgttgctgtgactatggaatggaagaaggcagaaacaaggggtcattatctacagggcagtgagcaagtgttgggtttagttcttgtcccaaatggtcaggtccacagtcatccagttcttagtcacaggagttacaggtaatgccaagggctgagtagggaaactgctaagagatagaaatgaaactgagtgcca

SEQ ID NO: 526072 - DNA, 570 bp, Homo sapiens
ctacgcttaggtcccacactgagctcttcttgcttttaggcctgacctcaagcatccttgctaatgaaaccctaggtcatgaggtttccctctagtcaatcactatgctcgctgtagtttagctctgggctgagcaggatgaattgaggctaagagtgactgcctctgtgcctaaaaccttgagcactgtgttctgaggaaaatttgtgtttacagtaatgcccctgtgacttggatgagtttccaggacttgygagacatcccagaccctgtgctaagaaaaccatggttcctacagcccttgcatggggaaagtggatcaaatacagcagggggagctcatttcagggccatatttgtgctgtcttcctccttgttgctgtgactatggaatggaagaaggcagaaacaaggggtcattatctacagggcagtgagcaagtgttgggtttagttcttgtcccaaatggtcaggtccacagtcatccagttcttagtcacaggagttacaggtaatgccaagggctgagtagggaaactgctaagagatagaaatgaaactgagtgcca

SEQ ID NO: 526073 - DNA, 570 bp, Homo sapiens
ctacgcttaggtcccacactgagctcttcttgcttttaggcctgacctcaagcatccttgctaatgaaaccctaggtcatgaggtttccctctagtcaatcactatgctcgctgtagtttagctctgggctgagcaggatgaattgaggctaagagtgactgcctctgtgcctaaaaccttgagcactgtgttctgaggaaaatttgtgtttacagtaatgcccctgtgacttggatgagtttccaggacttgtgagacatcccagaccctgtgctaagaaaaccatgrttcctacagcccttgcatggggaaagtggatcaaatacagcagggggagctcatttcagggccatatttgtgctgtcttcctccttgttgctgtgactatggaatggaagaaggcagaaacaaggggtcattatctacagggcagtgagcaagtgttgggtttagttcttgtcccaaatggtcaggtccacagtcatccagttcttagtcacaggagttacaggtaatgccaagggctgagtagggaaactgctaagagatagaaatgaaactgagtgcca

SEQ ID NO: 526074 - DNA, 381 bp, Homo sapiens
ctctgctggaccaccttcctcttccatccccctggcagctaagaggaaacacatgtgtctcctcaactgtaaaatggagatggtgaggtccactcccaggatcttgtragagtatcatgaagccctggatttctaagtatctatggtggtcatatatcatggtatgaccagaatagtcccagtgcatatctgatgtcctagtgtcctgtttagcaatttggctctaatttggataataaagtataaacttaaaaactttaaagagctgtgcgaataccaagcagtgtacattgtatttatgggtggaagctattgctgctaactgtaaactaagtcaggaaaagaaaggagttaaaatggttttcttctcacccaaaatac

SEQ ID NO: 526075 - DNA, 381 bp, Homo sapiens
ctctgctggaccaccttcctcttccatccccctggcagctaagaggaaacacatgtgtctcctcaactgtaaaatggagatggtgaggtccactcccaggatcttgtaagagtatcatgaagccctggatttctaagtatctatggtggtcatatatcatggtatgaccagaatagtcccagtgcatatctgatgtcctagtgtcctgtktagcaatttggctctaatttggataataaagtataaacttaaaaactttaaagagctgtgcgaataccaagcagtgtacattgtatttatgggtggaagctattgctgctaactgtaaactaagtcaggaaaagaaaggagttaaaatggttttcttctcacccaaaatac

SEQ ID NO: 526076 - DNA, 566 bp, Homo sapiens
gtaaaagtaggatatagggagagctggaaagatgatgagtcccttgtccacatcccaccccacccagagcctatcaggtctcacaagctttctggaacattccttagtcccggtacataacacaggtttttatttatctctcttggtagggctcctcaggtcagagattcaaagactcacccaacatagggcctgacatgtcaccacatcccaagaaacattggagaataaatgataataagtttattaacaaataaacacaatttcaacaaaaggccagccatgatttttagctccaaagatatgccaggaatacttgaaatatatcatgtattaaaatcagctttagctgaaaatttaaaaaaaaatgagaaaaagaatgttagggagaaaaaaactatttaaacatattgaactttagcaaaagatctatttcacaatttattgtgaacaacttttctactctctcttgcaaaactactgagaaaatcagttcaaatgagaaaaaggaatgttgagttgcgtaaayggtgttgtttaaacataaaaaatgtgaatgccagact

SEQ ID NO: 526077 - DNA, 572 bp, Homo sapiens
tgaatcttttttgatataaattggaaaaacataatatttgaggttttggaaacattaataattatgtatataatttttgtcttccattatttattcagattctggattgtcattttttatttagactttttccaaaacaaatctttatttttcctataggtgaaagcactgaaagagaagattgaatctgaaaaggggaaagatgcctttccagtagcaggtcaaaaattaatttatgcaggtatgaattaaatattaaaattaacrtgccatgtcttgatattcttttagttttagaaatgttatcttatatattgtagtatattcaaattgtcagaaaaatgattgtacaaataaaagcagtgaaagagcagtcatttgaatctaatattaatattcaatcttctctttattcacatttgccctgtgtatttttccatcaaatggtattagttttgttttatcttttgtaagcatcgtgtaactggcttttgtttttttaatcaaacggagcttttttttttaaattgaattgaaaccatttatactgattgtgttattattagtatgct

SEQ ID NO: 526078 - DNA, 534 bp, Homo sapiens
gaagcagcattttttttctcccattgtagcatctctgatacagttcctgctaattactggtttattggctggcaactccattcctagtttgttactyttaaatggcagggagggagaaagcgaggaataggtagaaacagcagctttggtgcagtacaggcttctggattcctgcttagcttctacagcagcagggttccagcagcagtaccacctcctagcatctgagttggttctctgagctagttggactggaactccgtgatgcccttgttgctgtggaaaatggcatgtacatttagtggcaaaacggcagtttaaattatctaagatcgcctgggtgtgacaaccccagattttcatctttgaggagcagtgtcctaaaaccactctgctatcaaatacagtgtgagttagtctctagccaggaaaacagaaaccactctatttcaaagagggaaaggcttaatcttaggaaattgttaggaattggaagggctggaaaataggattacccagagaggcagtaaactg

SEQ ID NO: 526079 - DNA, 540 bp, Homo sapiens
tctgaactcccaaactcgtatcttcacattgtcaactagaaaactttagaacctccatgacttcaggtttcaaaytgactcattttttattccccagtctgattcttttcttgttcacttcttacttgtaccatcattcattcatccaccctctgcctcttttggcccagtaagtctgtttcttttcttttcctttctcctctctcctctgtcctctctcctttctcctttcctttctccttccttcctccttccttcctttctccttccttcctccttccctttcttcccctcattccacagttactaatgactctgtttcttaaagtctctggaatatttgttttcactgtcatttagttgccttagttcaggtccttatttcacttgtactcttgcattatccttatccacctggtctgcctcttccttaccagagtggaaagcaactctcatggggtctttgttaattcttttaatagttcctcatgacctggaagataagtccaaagcttattctttttaatttttaaaatttgt

SEQ ID NO: 526080 - DNA, 390 bp, Homo sapiens
agccgaacggctggcgtcccgggtctctcgctccgaatcccgcagaagcccctccttcggcgcctcagcctccaatcctctccaccgctccctccactctcggagtcgctcctctccccggccccgcccccgccgggccccgcccccgccctcgtcctcctycctgtgctctccgcgtcgcgcgctccctggcttccagggggctgcccgggcggggcggcgcagcgcggcggcgcggggaagggggaggagagccgcccgccagccgagcacttccagcgagctagcgagctagcgggtcgcgctgcgcgggggaggaggactcgccccccgcccgaccctagcggagccttttgttcccagccagaagtttgcatgccgggaccgtga

SEQ ID NO: 526081 - DNA, 612 bp, Homo sapiens
gcttttttagtgctataatgcaagactttaaaatgatattttaaaagaaagatactgaagaagctactgagaactgagtcataaggcttatgtattcttctttcaaaacatcttcctgggatttgtttcagacaatcttggctaatgggtacagaaatctcctttcactcctctcaacatggaaacctcaagattaaatgagaaagatctagtatatgggagtttgaatgatttttttcttcartttttaccttctgatgaggccacctacatgttgggagtgtatcttcccatggtcaaacaattgtttgtccaaatacaagaatctgtgaatttacaaaggcgattattacatcaccaactatggattggctacagagccccattttattgcttcctatttgttcacataggtatttttgagcacaaacctgcactttttctaaaccctcactcaagaaaagaatatatcagagacatttttatctacattcatttgaatgtaggatgatctgtctgaccaggagcatgtgaggtaacttgggatggtggaaagatggagtctttgtggtagacaacctaagtttatttataggaccatggccaagttag

SEQ ID NO: 526082 - DNA, 612 bp, Homo sapiens
gcttttttagtgctataatgcaagactttaaaatgatattttaaaagaaagatactgaagaagctactgagaactgagtcataaggcttatgtattcttctttcaaaacatcttcctgggatttgtttcagacaatcttggctaatgggtacagaaatctcctttcactcctctcaacatggaaacctcaagattaaatgagaaagatctagtatatgggagtttgaatgatttttttcttcagtttttaccttctgrtgaggccacctacatgttgggagtgtatcttcccatggtcaaacaattgtttgtccaaatacaagaatctgtgaatttacaaaggcgattattacatcaccaactatggattggctacagagccccattttattgcttcctatttgttcacataggtatttttgagcacaaacctgcactttttctaaaccctcactcaagaaaagaatatatcagagacatttttatctacattcatttgaatgtaggatgatctgtctgaccaggagcatgtgaggtaacttgggatggtggaaagatggagtctttgtggtagacaacctaagtttatttataggaccatggccaagttag

SEQ ID NO: 526083 - DNA, 596 bp, Homo sapiens
ggggtagagtacattctgtgtgacccttcctgggagggagagagattaggaaacctaaatatgaattccttcagactctactaatgtttttcccttactcgtctagctgtatatctggagggtacttccataataaawcttagccctgagtgttactatatgttaagatgttgagttctgtgagtccttcaagtgaattactgaaagcatggctagtcttaggtaaccccaccaaatattgcctcattcataaaccatgaaaaagttatattaactaaataatacatatttattttcttctcttttttttttttttttttttttgagaaagggtcttaccctgctacccaggctggagtgcagtgacaggatcatggctcactgcagccttgactttctggggaacaagtgatcctcccagctcagcttcctgtatatctggaactacaggtgcatgccattgtgcctgcctaattttttgtatcttttgttgagacagggtctcacttgttgcccaggctggtctcaaattcctgggctcaagtaatccttcaacctcagcctctcaaagtgctgggaatacaggcgtgagtcac

SEQ ID NO: 526084 - DNA, 596 bp, Homo sapiens
ggggtagagtacattctgtgtgacccttcctgggagggagagagattaggaaacctaaatatgaattccttcagactctactaatgtttttcccttactcgtctagctgtatatctggagggtacttccataataaaacttagccctgagtgttactatatgttaagatgttgagttctgtgagtccttcaagtgaattactgaaagcatggctagtcttaggtaaccccaccaaatattgcctcattcataaaccatgaaaaagttatattaactaaataatacatatttattttcttctcttttttttttttttttttttttgagaaagggtcttaccctgctacccaggctggagtgcagtgacaggatcatggctcactgcagccttgactttctggggaacaagtgatcctcccagctcagcttcctgtatatctkgaactacaggtgcatgccattgtgcctgcctaattttttgtatcttttgttgagacagggtctcacttgttgcccaggctggtctcaaattcctgggctcaagtaatccttcaacctcagcctctcaaagtgctgggaatacaggcgtgagtcac

SEQ ID NO: 526085 - DNA, 583 bp, Homo sapiens
aactttcatagccactctttatgttagctatcatcaaccctgttttcagatgaggaaactgactcattgaaaaattgaacactttttccaatgtcatataacaaaggagacttctgtcattaattctaactattcccaagcagaaattgttgttagaaaccacagaatgcctctgggagctttcaagtcaggaaacaggggaccagagagtccaggtgactcggccaaggtcacccagcaagttgttgggaaagcctggatatgagcccaagactccagagttctcttctagtcctccatcattactgtctcgtcagattctcacttccccagctacagcctgtgcaaacaagggagacggtgcagtgatagattgtgcctaagagctattttaatagccctgctgttttgctggagaaacacagatgttgtgatttgctcctcctgaagcctgcagcagggttactacttaagcagccaccagatgctgctgtttccsaaagacacctgaatgcagccaagctcctgggaacacaccaggagaactgcttaggtcaccaatgccccatgacgttcattaaca

SEQ ID NO: 526086 - DNA, 574 bp, Homo sapiens
taaatactcgttcccactgactcagagacatgctacagccgagggtgggggaggcaagagaatatagggacacaggtgttggagaaaagtttgtttcagcagcactcgcccatagctatgagtaagcaggggctcactggccacagagcacctgggctgtaagcatggactttactcagacggaccttgtcttagtttatggtactttcttgcttgctataacaaagtaccataaactggatggcttacatacaagagaaatatatttcttacagttcaggaggctggaagcctgagatcagggtgccagcayggtcagattctgatgagggccctcttctgggttacagattgcagctagttgtctagcctcttcttacaagggtgctaatcccagtcatgagggctccaccctcatgacctaattacctggcaaaggccctgcctctaaataccatcacactgggaataagatttcaacatatgaattctacaaggacagaaactttcagtccattgccaacctgcattcaaggccctccttttccatgccatgtactattagggaagctac

SEQ ID NO: 526087 - DNA, 574 bp, Homo sapiens
taaatactcgttcccactgactcagagacatgctacagccgagggtgggggaggcaagagaatatagggacacaggtgttggagaaaagtttgtttcagcagcactcgcccatagctatgagtaagcaggggctcactggccacagagcacctgggctgtaagcatggactttactcagacggaccttgtcttagtttatggtactttcttgcttgctataacaaagtaccataaactggatggcttacatacaagagaaatatatttcttacagttcaggaggctggaagcctgagatcagggtgccagcatggtcagattctgatgagggccctcttctgggttacagattgcagctagttgtctagcctcttcttacaagggtgytaatcccagtcatgagggctccaccctcatgacctaattacctggcaaaggccctgcctctaaataccatcacactgggaataagatttcaacatatgaattctacaaggacagaaactttcagtccattgccaacctgcattcaaggccctccttttccatgccatgtactattagggaagctac

SEQ ID NO: 526088 - DNA, 606 bp, Homo sapiens
aaaattgattggatttggaatcagaatttccagactaagtctaggctcaggtacttcaccaaaatacatttgaatttggacaaattatttcacccctttgaggatcagttttgtgaactgtaaagtgtgaataataatacatatgttgaaagaacatgtgatagagcttttaygacctgcattattattatttttaaggaaacagtgattagtccaggtgaaataaggtggactggtattctaaatgcatttaatagaggccattaattctcccctccctgcctctccatccttccctccctctctcactctttccatctccctgccttccttctttcttttctctaacatatatttattaagtgcttacctcgtgcaaacaacactgctagaatcagttgtgtcagtcaatatcccagcctgaaacaggtggttcattcaaactgagagtagtttaaggaagagacaacctaggtgtggacaggcaaagggaaacctaaaaaggatagggaagagctccagcaataacaagagctgggagccctgtccacctttaagcctgaggaaggaaatgggaggcgggttttccgagccaggatagagctg

SEQ ID NO: 526089 - DNA, 617 bp, Homo sapiens
ctggtctattttatttcctggagcaagatctgtgactccaacatttcaaggcctagatgataactttaatactattcccaagttcaaaggcttcactttcttatttgcagcttctaaataagctttggttttgtagggacaaaatgcccgcctctgaggaatgtgraagcagattccatttccacttcgatgacaagcccacgtgaaagcatatctaggggtaactcaactttctcttaaagccattccagtcaggccttcgtgccctctgccttaccaaagcagcatttgtgaaggtcaccagtgacctccatgttgctgaatccaatggtcagttctcaatccttacttgactgtcaacactatgcagcacagctacccactcctcctccatacagcacactcttcacttgacttccatgatgccactctcttgagtttcctctcctccctggctactcctttgtatttttatttatttttattttttatgagagacagggtttcaccatgttggccaggctggtctcaaactcctgacctcaagtgatctgcccaccttggcctcccaaagtgctgggattacaggcgtgagccactatgcccggccagtactc

SEQ ID NO: 526090 - DNA, 567 bp, Homo sapiens
gcttggaagagagggcttatatgatatatcaccaaaatcatttaagagctcttcattagatatttctcttttccaccaaaattgctctttggccacacccccaaccagatttctctcttccctgcctcttcttccagggtgacttggccccttcatctgggctcactttgcccttcacccacctacagccctgtgtctgtggggccatttccagcaggagcacctacagggagctgtaycttacttgtctcttgctcatagcagagggcctgctgcatggtacatgctccgtgggctattaagaaaatgaatgcacgaaataaccttatgtatgtgtgccgtatcttctttaatggaaaaggaaattaagacaaaagagtgtcaaagggctatggaacagtcaaaaagaaccctcaaattctcctgtcctcctctgcccccattgaccacaaagaccaaccactagtagcctttctattaaatactgaataattctgacctttcctgggtcttgtgaggatcaacattatgctatgagctagtctcggaccatgcagagagaaagat

SEQ ID NO: 526091 - DNA, 500 bp, Homo sapiens
atgggataccacccagcaataaacaggattgtatgagtgatacttgcagcaacaacatgaataaccttaaaatcattatgctaagtgaaagaagccagacacaaaaggctacatgctgtgtgatgacatttatatgacattctacaaaaggcaaaactgtacagatagaaatcaaattagtggtttccaggaactggaggtcagggagagcactaaccacaaagaagtatgagggaaccaacttttgtggygacaaaagttattctatgtatttcccacccatgcttaagagagagagtctctttactcaggatggactctagagtcaggcagacccagtttggacgccagctctgttacttcctgtgaggaacttgggacaactcacttttccttttctgagcctgattcttctaactatgaaaagaggagaagttttacttcatagagtacacatgtgtatgttgtaaatatgtgtaaatggttgttgattgagactc

SEQ ID NO: 526092 - DNA, 500 bp, Homo sapiens
atgggataccacccagcaataaacaggattgtatgagtgatacttgcagcaacaacatgaataaccttaaaatcattatgctaagtgaaagaagccagacacaaaaggctacatgctgtgtgatgacatttatatgacattctacaaaaggcaaaactgtacagatagaaatcaaattagtggtttccaggaactggaggtcagggagagcactaaccacaaagaagtatgagggaaccaacttttgtggtgacaaaagttattctatgtatttcccacccatgcttaagakagagagtctctttactcaggatggactctagagtcaggcagacccagtttggacgccagctctgttacttcctgtgaggaacttgggacaactcacttttccttttctgagcctgattcttctaactatgaaaagaggagaagttttacttcatagagtacacatgtgtatgttgtaaatatgtgtaaatggttgttgattgagactc

SEQ ID NO: 526093 - DNA, 500 bp, Homo sapiens
atgggataccacccagcaataaacaggattgtatgagtgatacttgcagcaacaacatgaataaccttaaaatcattatgctaagtgaaagaagccagacacaaaaggctacatgctgtgtgatgacatttatatgacattctacaaaaggcaaaactgtacagatagaaatcaaattagtggtttccaggaactggaggtcagggagagcactaaccacaaagaagtatgagggaaccaacttttgtggtgacaaaagttattctatgtatttcccacccatgcttaagagagagagtctctttactcaggatggactctasagtcaggcagacccagtttggacgccagctctgttacttcctgtgaggaacttgggacaactcacttttccttttctgagcctgattcttctaactatgaaaagaggagaagttttacttcatagagtacacatgtgtatgttgtaaatatgtgtaaatggttgttgattgagactc

SEQ ID NO: 526094 - DNA, 479 bp, Homo sapiens
cagtgttgagataaaagggttcatatctaagagctgccaccaaaaattgaggtcagacatttcccttaggacttatttcaaagcagcaaaactgactttgctgtcayctccatgaccccacttctcaagcattaccaactccccccacccttcgcttaaacaaacaaaacaaatcaaaacaaaaatcttggagaagagggctgaggaggaagatactagaggctttggaaggattgagagcttagtgcagaggcctttctttcacctccctgaaccacaacctgcccccagggaaaaggagaaaaggtgccaggaagatcctcccccttcacccccgcccctgccgccaagcatggggtgcctgcaagggagaatgccaggtattctctctgagatatctatttatgcagcagaccactcaactggcttcttgggcccacgcgagaagaggtagaagggaattgggagagatggtagga

SEQ ID NO: 526095 - DNA, 582 bp, Homo sapiens
ctaaggcaaagacttaattttttaaaggaatgccttttccttgtctataaattacactgagtgagtctctgaggccctgacaacccttccactgaggacttgttgaatgtggacttgaaaaacagcttatttatctctctccttactgttgtctcccttgctattctcatcttgacatccccttaccaatttggttttgtctcttaaaatcactctaatcttaccagggttttggatagcttggacaatgtgcaggttcctattatcttcaatgccttttccttttatttccccttgttctcatcagacacatttatttatttttatgcccaccatatttattgccagacagcaggctgacattctaggcatacgcctcatttttgaggaccttctctatttagcttttctatgatctcttcacagctctttttccactgggcagatcctaagactctatktgctaaagttttctatttttagattccaaaagcagtgaaagtaaagttaggatgtctttttccagaagctaccaaggagcaactggtcattggtcaattttatcagctcacagtttatttc

SEQ ID NO: 526096 - DNA, 577 bp, Homo sapiens
tgctacccttaaagtaggacaatggatgtgactgtcttagctctgagctgctggtattaggaattttaaaaattttatggattcattcatttattcatctatatacacaggcatttactgagaacttattctatgccaagcttgaaattggtgctaaaattctaaagaagaataaatcatatccctaccgataaagtggtgattctaacatatgattttaaaaaggataaggagatctcacacatttaatcaaaacacaacatcaagacatagcatttctcttcaccctctactcattcttatttgtgtctgaatatgctgtcattttctgayagattaatttataagaaagagccatatggactgtaagtaaaggagtgagcaagaagactggcatctattcctggctctaatatggatttattgagagaccttggacaagttacttgtcttatctggacctttggtttctcaattgtaagatgacagactaggttatccacgggtatgtaaagaaaatgaatgtgaagatgccaggttcaattggcgagaggcagggagagagttgggaaacaca

SEQ ID NO: 526097 - DNA, 617 bp, Homo sapiens
gttaaagtggatcaaatttgtatgtcaacagacagtatccagtctaaatagttaataaaagaaaatatcttgaaatattccctgctgatttttgtcctccaattaattttttaaaatggagctgaaatttaaatgactgtaccaacaacttaccttgatacttactttgagatttaaaaaataaccactttttaagaacatttcagattatgattaaattagatattaaacrcttcaaccacataagaatattgaggactgttgaatgagtcctgtgctctggtggtcctggaacttaattttatttatgaattttcagtcattagagaagagtatggtgtggatatgggaggttggattagccgactaaactttgaagtttgcaactttagcagatgttgggatagaagttaacacagtagttcaaattgatttcgcacttcatggtttatagaaatgctttcacattcatatctgaatatttgaaacaacctagtgggtaggtaggtaagcaattttatctgtgtttcccatggaagaaactgaggctgggagatgttcattgtttgttatccaaggtcatatagctagtaagtagaagagtccaaatgcaaacc

SEQ ID NO: 526098 - DNA, 632 bp, Homo sapiens
aaatctgtgctagccaaacagttttatattataatagctctttattctatccctttaattcacaacttctagactaaatatctgaattgccattgtcagttgttttatctctaaaactattagcatcttcatttgtaagtgttttaaacactttaaggtcttgctatttaagtagttaaaagtagttcggacgaattgcgcaaaagtgcctgttaataaacatcaatacacgtttcatgaatgaatgggtcaattctagattctatattaaaaatggagaccacttagaaaactaaagctattgggtaaaactattcgtgtagacatatgggtgacattaatattgtaggcagtgagagatttgggctaggagaagggaagagcattcctaatggagtgaacaagtatgggtattctggggtaggttaaaagrttgtgatacataaatagagtgtgattgtaattttttttttttttgagacagagtctcactctgttacccaggctggagtgcagtcgtgtgatctcggccctctgcaacctccacctcgcaggctcaagcaattctcccgcctcagcctcccaagtagctgggattagcaggtgcctgccaccatatccagctaattttt

SEQ ID NO: 526099 - DNA, 533 bp, Homo sapiens
atatcttgtttcaggctgtttctttctccgtacttcattggtttgaggattaaaataaaataacatatatggtccctattagacatttggcaaatacgttttctttcctctttcagagatctttcttatgtgtttctcttgataatcaagatgataagagacttattgtgtgtcacatattgtgatgagggccttatagtcattgtctcatttaattcttaaaataactctgtgagatagactctagaattaataactttttkttttttctgagacggggttgcccaggctggagtgtagtgaagtgattatagctcactgtaacctcgaactcctgggctcaagcgatcctcccacctcagcctgtagctaagcctagctcactcctgcagctaggactacaggcatgcaccgccaagcccagctaactttttttttttttttttttttgtaaaaatggggtcctgctgtgttgctcaggctggtcttgaattcctggactctagcagtcttcctgcctcagtctcccaaag

SEQ ID NO: 526100 - DNA, 446 bp, Homo sapiens
cagatgtataggtctgacctcattcctgattggacartgtccacatgtaataagtgttaaatattagggcatgacactatcctgcctaatcagaacattgactataattggttcagggatgggcaaatgaaccaagtcaagacaatcagacccagttggcactagtcatcacagtgtggcttgaaaaccaataaagagttattttttttccatcataagcctgaactcacatgataaaaacctgcctatgaatgagttaacacagagtgagactaacctgagagacatgaaatgagaatttaggttctgattacatcatttggaccattgttacaagccagtaaattccccttttctgctgaagtcagcttaagttaggttttctgtcacttgtaactaaaggatttctgagcaattaaagtttcccaccaacagttgacagcttc

SEQ ID NO: 526101 - DNA, 557 bp, Homo sapiens
aaccaaattttgtttaatgttgtttgtttaatgttggaayccctcaccaaacttacattccacaaaggcagagcccatatctgttctgttcaccatcatataccaagtgccttacagaatgcctggaacatagtagacactcaacaaatattcattgaatgaatgaatgaatgacactaggcttagatactagcttaaaataacagaagaagaatcctaatttcattaaaagtaggaccagctttacagaccagtgggagatccaggctacagggagaacacatggaattccagaatcatgaaccatctggaaggggctgaggacacatatgaagtacagtctaaagcttcaggatcaattttgggagccagatgttcttcatttaacggcaaaagaccagaggatcaaggtaactgaaaaatacagcacagcccagatccagagaatgaactgggagctcttacttagaaataagactcaatctctgaaagttccactataccttcaaagctgtgccaacctaaatctacctgaagtttctgtttctttatttgat

SEQ ID NO: 526102 - DNA, 624 bp, Homo sapiens
gttgcgaaaaattgtagatggaaaaccacgtttaagattttttataagtttttttttttcaaatcttaaggataagattgcataaatttgaaaagtgtgcctaccggagaacacaccaaaaatcatcactgctcactacggatagttgttgctcagaaattcatttagaatttcatcctcgctttagcttttacctggggttcttttaagtatttatttagagacgggcggggcggggctcggtgtctcaggccggtaatcccagagctttgggaggccgaggcgggaggattgcatgaggccaggagttccagatcagcgttggtaacatagtgagcctctgtccctacaaaagtattttttaaattatctgggtgtcgtgacacgcgcctgtagtcccaggtactcgtgaggctaaggtgggaggagtggtcgcrccactgcactctggcctgggtgacagatctagaccctgactcttaaaaaaaagagacaaggtctcgctctgttgaccaggctggcctccaactcctgggctcaaggaatgagtagctgggtctacagatgcactcatggtgccctaagtaactcatggttacctagaattcttttagtatatttgtt

SEQ ID NO: 526103 - DNA, 601 bp, Homo sapiens
tctatctcagaccacaccctaaccacataaaattaatgcttaacttttatcgttaggtagccaacctagaactgaaatagagttcatgaagagcctctggagtaattttattaagaaatacttcctygacttcttaggtcctgcacatggtataatttgaaggaaggttttgaagttacagcggaccagcgttcaacttctgtttatggaatttatttgccataatcatataataattacttactgaacaaggaactatagttggcactacaagtaacatagaaaaatgatacaggcacagttactgtgctcatgaagcttacacttcagcagaaatgacagatattaaatgagtaatcgcattgttatttgtgctattgagatcagtgcactttgatcagtgaagtgtaacagggaatcaagcctttgatcagtttaatagggaaacaaacctaggggactgggaaggcttccttaaaatagtaccatctgacatgagctctgaggaataagtaggcattcattatgcaaaaaggaggcataacactattctaggcggagaggtagcagatataaagtctgggaaggttaaaaaaaaaca

SEQ ID NO: 526104 - DNA, 657 bp, Homo sapiens
gtatttgagtctcagctgagccatgtccttgggcaggtttcacttcaccttcctaaccttcattgcctccttgctaaagtgaatgacgactcctctctcgcagggttatgaggtaagttcaaatgaaagaacatgggtaagacagcacagcacctgggacacgggaaacaattaaaacatggccactgctgttactaagtgaagagtaaagataaagcaaggattgtcttgggagagacacttcttgcctctttgtccctttggaaatttccartggactgcatgagcccattagataatctcttattcgtctgagaaaataaagcttgactgcagagagctttatctccaagaagaaaagaaaaatgaagacatccacactgtgataaacataaaattcatttctttacacaagaacctgagagcaaaggggtgaagggcagccacttgcagtatccccagcattgcagtatccccagcactgaggactggacaggcagagtctacaatgtccccacaatagctacaagagaatgtcatcctcccattgtccagatgaaaaactgaggctgaaagcagtgacatcattaagtcttttgcccaaagtcaaacacagatatgaatgccagagccaggctccttccttcctatttgaac

SEQ ID NO: 526105 - DNA, 565 bp, Homo sapiens
tgctgaaacagtaacaggctgtggcccacaggctaacatgcaaactcttcacccaacattccaggcccctcctgctctgatgcctgcagctcccagccttctgtgctgcttcctcctcccacaaccaacacacagcctcccaaatatctcccagatccctgaccacagggcacttgctcccctgcacctgggcctctgcacagcccctcattctttaatcaatggcctccccctcctccactaggccctcagcccttgacatcttccccgttctttgyctgctctgaggtccctgagggtggggcctgcatctggttttctttaccactgaattctgttacctgagcggagcctggcacacagcaagggctcactaaacacctgcttactggatgcataaaggagagctactgtttagtaggcacccactgtgtgccagccactgtgccaagcactgaactgcatcaactaatccaaccccctaaatcccaacctgatcctcatcgtggggataagaaaccaagactcagtgaggtaaccgactgtcccagagtcccacagccag

SEQ ID NO: 526106 - DNA, 565 bp, Homo sapiens
tgctgaaacagtaacaggctgtggcccacaggctaacatgcaaactcttcacccaacattccaggcccctcctgctctgatgcctgcagctcccagccttctgtgctgcttcctcctcccacaaccaacacacagcctcccaaatatctcccagatccctgaccacagggcacttgctcccctgcacctgggcctctgcacagcccctcattctttaatcaatggcctccccctcctccactaggccctcagcccttgacatcttccccgttctttgcctgctctgaggtccctgagggtggggcctgcatctggttttctttaccactgaattctgttacctgagcggagcctggcacacagcaagggctcactaaacacctgcttactggatgcataaaggagagctactgtttagtaggcacccactgtgtgccagccactgtgccaagcactgaactgcatcaactaatccraccccctaaatcccaacctgatcctcatcgtggggataagaaaccaagactcagtgaggtaaccgactgtcccagagtcccacagccag

SEQ ID NO: 526107 - DNA, 542 bp, Homo sapiens
gatactttatagagatgaatggaggtgggaacagagatgtcctgggggcaggaccccagttgggggtcacacagctaatgacagagacagaattcaaacccattaattaacacactaattcatgtaatgaatgtttatcaaagtgcagttctgtgccacagcttggaaggcctgaatttartaaaatccaacattatctaagggtgtcgtgtgaactgacttggcacctgtgcatgggggcattgcctggcctgttgcccaggctggagagcagtggcacaatcctagctccctgcagcctcgacctcctgggctcgagtgaccctcctgcgtcagcctgtgttgacttggtaagtgtgggtttcctttcattctcatagcagtgtggggaagaagatactgttatcctcacattactcaggaggacactgtagctcccagaggtgaaggaatgtgaattgaaggcgtccagctaggaaagcatggaggtggggtccagcctgagcccctggactccgtgtccagtgctcttcccactagat

SEQ ID NO: 526108 - DNA, 511 bp, Homo sapiens
ggattagcagtacaattaaactctgccggttggattctaccatcatcatattgataataaaaagcaataaagactactttacgagtattaattaaagagagactcgagagcaagagaaaggggagaaaaaaagttcataaaaaagctgcaatcaaaaaaagctttttatttcaggttggatggtgaagatactaaaggcagtagastgtgatggttattcacaagaactttggagtcagacagacctgagtttgggcggtgcctttgctacttacagtttaagcggtcactgaaaatctcattttcttcatttgtaaaataaagttaatagcaatacttcttttatacagttgttttgacgataaaattaaatagtgcttggcacatagcgtatgctaaataaattatagctatagctattaataagtcacagggacacagaaagtgaaaattacatggctcctgcttgagactgtgtggtttctgtgatcttccctatgatgctcagttt

SEQ ID NO: 526109 - DNA, 579 bp, Homo sapiens
ctggatagttccccttggcagtctaacaactgtgtataagttggcttgttcaaaactgagtttggtgtcatctccacttctcttccctgcaaactggcttctcctgtgtttcctgtccccatgaatggccccattgtccatccagtgtccgagccagaaatctccgctcttccatgtgttttccacccctccatgtgtgatgaaccgtccagttctgtggattccccctcccgtgttgatctcattcatttcagtccccttctttttaatctaaccactacctctcttgaggtttccctgccacctgtctttctccctttcacattccagacagatgaatctgtctccttgtaactctgatcacatgactcctctgcacagtgcctcctgcctggctgcccactgccctttctctttaatatggcactcctgagttctccagtctaattacctgcccwctttttcctcaaatcttaagactttagtcataaatcattactttcttttatccatatcatactcattttaccttatgacctttatatcttcatgcatgctgttacctctgtttagaatgtt

SEQ ID NO: 526110 - DNA, 600 bp, Homo sapiens
cctaaaagccctatctttagtaaaggactggtagatttacttatgatggacatacatgagctttatggcatgagttttgtgacttctacattaaccactcagaacactgacaagctgtaaaaatattatagatcacagccatttttcagatatktgcagttgccagattgctgatatgcagatcttattttgcaaagtcaaggcaaagtggtcccttcttagtttgcctgtttgccatatatgcatttggaatgatgccacactgcctggtgagaccccaacaaaggcattacttggtggcgtagaaaaataaccaatttccaaggaaagacagaaagaggcaggtcttcttcacccatatgggcctgttgtcttccaggtctaatttgggctatgtttggtttatctgtgtggtagacttcacttttcttacattaattatttgtgatctgccacctggggaagttggaaaacatcagaagttaatgctgttgggtttctttaaggagaagaaagaaaggcctagaggtgtctttgcaacaaagaaggtagctattaacctttaagggtgttgtagaagccagtataacatcactaatg

SEQ ID NO: 526111 - DNA, 608 bp, Homo sapiens
cattgtatttcattgtgaattttggatagccataatttatttaggtagtctgctattgctggacaagtaggttgtttccaatcattttatattatagacaatactgccatgaaaatgttgtaacaatatyatttcatgtatgtttgagggcatctgtcagattaaattcctagaagtggaattgatgtacacacagttattaacattttaaactttcatagatattgtcaagttgtaccaatttatgctgcttttgatataagggttcctgattgttcatatccctttcagtatagtgagttatcaaactcttcatatttccaatctgattggggagaaataacatctcattgaagttttatataacattttttatattatcagtcaggttatcatgtttgatatgtttaaagaccacttacatttccttatctgtaaattgtgcactcatatcctttgtccacttatctatttcctccttggattttttttctttctgattggtaggaaattttgcttactatattgtagccctttgccttttgagctgcaataattttgtctccctagtttgacatatgtcttttgatattaataacccatttatg

SEQ ID NO: 526112 - DNA, 572 bp, Homo sapiens
tttctgttgatgttgacattgctgttttttgtttgtgggggttttgtttttgtttttactttataataacatttmtttatataaaaaggaatgtttgggctggggctaggagaaatgttgaggtaatggaaaactctaataatgcgatcatctattgaagacacgagctcagggaaagcctttctactggtgacaggcatttttctgctaaggattcccaataggaatcaaatactgctgaagatagtagaatcagacttttgtgctggatcgcaggtaaaccctgggtagaccttgagatactgcccttgcagtggtgctgagtaacagaaggatgctagcatcctgcatcgagtcagaggagctcactgtagcccatccctccagtccacccagactagctagacagtgccttcttagctctcagcagccctcatcctactgagagaggaatttggagaagacctggggaaaccttgaaagaccacctcagaatccagctaaacagcttgggtcctctttcccagggccagttgaggcaggagactaatagcaggaagagagatggctcc

SEQ ID NO: 526113 - DNA, 572 bp, Homo sapiens
tttctgttgatgttgacattgctgttttttgtttgtgggggttttgtttttgtttttactttataataacatttatttatrtaaaaaggaatgtttgggctggggctaggagaaatgttgaggtaatggaaaactctaataatgcgatcatctattgaagacacgagctcagggaaagcctttctactggtgacaggcatttttctgctaaggattcccaataggaatcaaatactgctgaagatagtagaatcagacttttgtgctggatcgcaggtaaaccctgggtagaccttgagatactgcccttgcagtggtgctgagtaacagaaggatgctagcatcctgcatcgagtcagaggagctcactgtagcccatccctccagtccacccagactagctagacagtgccttcttagctctcagcagccctcatcctactgagagaggaatttggagaagacctggggaaaccttgaaagaccacctcagaatccagctaaacagcttgggtcctctttcccagggccagttgaggcaggagactaatagcaggaagagagatggctcc

SEQ ID NO: 526114 - DNA, 572 bp, Homo sapiens
tttctgttgatgttgacattgctgttttttgtttgtgggggttttgtttttgtttttactttataataacatttatttatataaaaaggaatgtttgggctggggctaggagaaatgttgaggtaatggaaaactctaataatgcgatcatctattgaagacacgagctcagggaaagcctttctactggtgacaggcatttttctgctaaggattcccaataggaatcaaatactgctgaagatagtagaatcagacttttgtgctggatcgcaggtaaaccctgggtagaccttgagatactgcccttgcartggtgctgagtaacagaaggatgctagcatcctgcatcgagtcagaggagctcactgtagcccatccctccagtccacccagactagctagacagtgccttcttagctctcagcagccctcatcctactgagagaggaatttggagaagacctggggaaaccttgaaagaccacctcagaatccagctaaacagcttgggtcctctttcccagggccagttgaggcaggagactaatagcaggaagagagatggctcc

SEQ ID NO: 526115 - DNA, 548 bp, Homo sapiens
ctgtaaaatgataataagcataccttaaatataacttccttttaaggctattcaagaaataaatgtgctaagggcctgtaaagggctgagcacagaggctggcatagtcagtgctcaataaatggaaaggagaagatggagatgaggaggatggaggtccagaaagttggagaagtgttggcctggtttcctctatcctgggacgtcagggctcccctcagccttggcagttccaggaatggccacgagatggcgcctgaatcccagttatgagggactcagcggcgcttcttagcagaggaagctgtttgcgrggaaaaagggccagagaagcaggtaggctcctcaagcttggatggagtggggcttggcactagatttgcttaaagtccagccacttcagcctctcccttcggtttgtctcctaggggttccctgtacgtacccctttccctccagcactggagccccgagtctcccgctgagcaggcacctctccctccacgcccaggcttcttaaaccaacccctcctccccttgtcattcat

SEQ ID NO: 526116 - DNA, 526 bp, Homo sapiens
ggttacaaggttgaagaaatgagcccacagggagtcagctttcttgctggggaagtgagacaacatacaagggagaaagcacaggtgggaaattgtgtggttcaggctggatgcttgggggaatcagaggagaggagagatgagggaagcttcttgaaggaggcggccttgagaggtgggccaggggtagaagaggaacatcattcaggaggggttgctaagggattctggtgtaggtgagaggatggactggatgatctgttgttctaggatctaggtttctaagattgtttctgagtccatgataaagtttgtggagctcccaaaatagtctgcagacagttgtatatatgtgattttatcaagggagamggcccatgatagactcagattttttttttttttttttttttttacacagttgattgtcagtgtgtaagccacagattctgaaggttaagagcttctgccttttgtgtggtgggaacttgaagaagggtagaggactaactggtctgggatgaat

SEQ ID NO: 526117 - DNA, 287 bp, Homo sapiens
attatgacctcactgacagttctttttctctgaattctcctttcttctcaacagcttatccaaatgttccgttggtcrctgttcatcccgccctgcagttctccttgactgattcaaccctttgtggtttgcagtcctgtttctctacagcttggacctcttattctttccatcataggtttaacactctgttgaatgcttctttgtagctatccaaaatttaccttaagctcaaaaaattcaaagtgaaagccatatccttctctcttcccttctgtgtatggtat

SEQ ID NO: 526118 - DNA, 287 bp, Homo sapiens
attatgacctcactgacagttctttttctctgaattctcctttcttctcaacagcttatccaaatgttccgttggtcactgttcatcccgccctgcagttctcctwgactgattcaaccctttgtggtttgcagtcctgtttctctacagcttggacctcttattctttccatcataggtttaacactctgttgaatgcttctttgtagctatccaaaatttaccttaagctcaaaaaattcaaagtgaaagccatatccttctctcttcccttctgtgtatggtat

SEQ ID NO: 526119 - DNA, 287 bp, Homo sapiens
attatgacctcactgacagttctttttctctgaattctcctttcttctcaacagcttatccaaatgttccgttggtcactgttcatcccgccctgcagttctccttgactgattcaaccctttgtggtttgcagtcctgtttctctacagcttggacctcttattctttccatcataggtttaacactctgttgaatgcttctttgtagctatccaaaatttaccttaagctcaaaaaattcaaagtgaaagccayatccttctctcttcccttctgtgtatggtat

SEQ ID NO: 526120 - DNA, 392 bp, Homo sapiens
cattttttttcccttttcttttcttttttttttttactttggccttttgagacaagaaattatttctttatattttctctaaattctgtttgaaaactgaacctccttctttagatcatgtccctctcctstcatatttattcagtgacagttaagggaggcttgtagcactttccatgttcttcccagatgtctccttaggcagatccctgagatggtgcagtgccctttcagtttccatgttgtggccgtagttttctcacagtccctcagcacgtaactctcaggccttttctccagtttccaatgacattttctcacagtccttcaggccctgaccaagagtcttgatgcccttccaggttgcatgaatggtctccttgaggcccagt

SEQ ID NO: 526121 - DNA, 471 bp, Homo sapiens
tacagtaatatttaaaaatgtattctttagaaaaataccaatgacagtatttgagtgagataaagtgaagaaaccaactgaagaaggtgaatagtaccgagaataattattctgctatttttagtattcagatgatcaattaaaaaaccattttttwaaaaaaaatttgttttaatatccatggatgctattttttagaaaaaattctacttttgaaaattgttttgaataatggtctatcaataaaaatctatcaataaatatattgctagtcaataaatacattgcaaacattacataaatgtaaataattttgacatcttatacccttttcatcctcacaaatatcctaattggtgtgccaaattatatagcaaccccaaatacactggaagccaaattagagaacctctaataaaccctccaaatatgtcatcctaagattctactttattaatttatcatttaaaa

SEQ ID NO: 526122 - DNA, 372 bp, Homo sapiens
taggtttttgtaatagcaggcatacctgtragacttgggaaactgggaagttagcataagcatgattcataatgtgggtaagtgggtagactatcagtgtgtcattggaaactgatgaaattgatcagaacacatacagaatcaacagcaaaagatgcatatgagaattatacttctagaatggtggcaggagaagttccacagacctgctccagtgaagcaaccatggctggtgagaattattttagaataagaacaatcacttattccagaaaaattttgtaagaacattaagtctgtgacacttgagtcatgacattcttctcacataaccccccagctcagcatgatggaagattccaggcaagagca

SEQ ID NO: 526123 - DNA, 372 bp, Homo sapiens
taggtttttgtaatagcaggcatacctgtaagacttgggaaactgggaagttagcataagcatgattcataatgtgggtaagwgggtagactatcagtgtgtcattggaaactgatgaaattgatcagaacacatacagaatcaacagcaaaagatgcatatgagaattatacttctagaatggtggcaggagaagttccacagacctgctccagtgaagcaaccatggctggtgagaattattttagaataagaacaatcacttattccagaaaaattttgtaagaacattaagtctgtgacacttgagtcatgacattcttctcacataaccccccagctcagcatgatggaagattccaggcaagagca

SEQ ID NO: 526124 - DNA, 451 bp, Homo sapiens
ccaaaaaatgaaggcaattcagagagagaaggtaaggaggaggaggattagttcacatttgctgatcaacaattatagtttcgttgtagaagatttttattatagtaactttaaaaatttatccatctttctctctctctctctttctattccccactcttcttttcctcatccagtttttytccttccattttatccttcaaaggaagattcatgcttaggtcttgtgattctagaggaggcactctctttacggagcatagcctgtatttcaggtagaacaaagacaattgttaagtcatcaccaggaacagggtgaagaggcttgcagacccttaataattattgtattgcaacctcttgtcctaaagatcatttattcgttgtcatttaatacccatcattggctggcgtgtgggtcatttacagctaatttcttcatgggtcaata

SEQ ID NO: 526125 - DNA, 451 bp, Homo sapiens
ccaaaaaatgaaggcaattcagagagagaaggtaaggaggaggaggattagttcacatttgctgatcaacaattatagtttcgttgtagaagatttttattatagtaactttaaaaatttatccatctttctctctctctctctttctattccccactcttcttttcctcatccagtttttttccttccattttatccttcaaaggaagattcatgcttaggtcttgtgattytagaggaggcactctctttacggagcatagcctgtatttcaggtagaacaaagacaattgttaagtcatcaccaggaacagggtgaagaggcttgcagacccttaataattattgtattgcaacctcttgtcctaaagatcatttattcgttgtcatttaatacccatcattggctggcgtgtgggtcatttacagctaatttcttcatgggtcaata

SEQ ID NO: 526126 - DNA, 550 bp, Homo sapiens
cagctgcaatgcaaacacaccatgtgtgcagcatccatcctgttgcgcccatcataagactggaggccagagagaatagatgtaaataagctggtgctcatgctgcctactgtgccatcagtaataaagtctttgtctctgatccaggaatttcatgtcttcygccagtgtctgtgaaacagtaacaggctaacttattagcttgtaagtggaatccaatcaaatcccagacctgacatctctatgttctgaaaatatgaatttctgacagttatttttactgaggaagtagttacaagacattttgtaagtatacctaccagttggtctccatctcaacgatggtcccatcattggtttttggcctcttaaagatggtgagtctctacaatattgtacttcatatacactctttatatctttagtgtgactccttcttgctaacttttttttgtgtggcttttacttatgtgtgtgtgtgtgtttaagtgaagaaatacatcatctcaggtcgattctatatggttgtgcagattggtgactacacaca

SEQ ID NO: 526127 - DNA, 550 bp, Homo sapiens
cagctgcaatgcaaacacaccatgtgtgcagcatccatcctgttgcgcccatcataagactggaggccagagagaatagatgtaaataagctggtgctcatgctgcctactgtgccatcagtaataaagtctttgtctctgatccaggaatttcatgtcttccgccagtgtctgtgaaacagtaacaggctaacttattagcttgtaagtggaatccaatcaaatcccagacctgacatctctatgttctgaaaatatgaatttctkacagttatttttactgaggaagtagttacaagacattttgtaagtatacctaccagttggtctccatctcaacgatggtcccatcattggtttttggcctcttaaagatggtgagtctctacaatattgtacttcatatacactctttatatctttagtgtgactccttcttgctaacttttttttgtgtggcttttacttatgtgtgtgtgtgtgtttaagtgaagaaatacatcatctcaggtcgattctatatggttgtgcagattggtgactacacaca

SEQ ID NO: 526128 - DNA, 550 bp, Homo sapiens
cagctgcaatgcaaacacaccatgtgtgcagcatccatcctgttgcgcccatcataagactggaggccagagagaatagatgtaaataagctggtgctcatgctgcctactgtgccatcagtaataaagtctttgtctctgatccaggaatttcatgtcttccgccagtgtctgtgaaacagtaacaggctaacttattagcttgtaagtggaatccaatcaaatcccagacctgacatctctatgttctgaaaatatgaatttctgacagttatttttactgaggaagtagttacaagacattttgtaagtatacctaccagttggtctccatctcaacgatggtcccatcattggtttttggcctcttaaagatggtgagtcyctacaatattgtacttcatatacactctttatatctttagtgtgactccttcttgctaacttttttttgtgtggcttttacttatgtgtgtgtgtgtgtttaagtgaagaaatacatcatctcaggtcgattctatatggttgtgcagattggtgactacacaca

SEQ ID NO: 526129 - DNA, 607 bp, Homo sapiens
cgaaggaaagaggattgagtagcaagatcctcagtgttatacagttctgagaaaatcttggacacgaatatggggagtcttccagcaaaagttgcctaatagaggagttctrcatgggccaggaataggctagcactaaaaccatcccaagaaaattgtataaaattgagcaagagaaaaacaaaacaataaaatccaaccgggcttgcagcagcaatcattaagccagcttgccctttggtccacttccttgtagctggttgttgctcactagcccagctttgagctgtccaatggacaaccccagattttctagcccctcaccctccatgaatctccttaaaaacccttgcccagaacccatggaagaaacaaacttgaggcttgagaattcctcctgtttcctcactgagaatgtcgcgatgattaaactctttctctgctgcaagtgccattgtcagtgtatgggtctgttgctgcccagagggcgtataagcctggcagtcctgcaacagcactggcaccctggaatgctcagccattggctgggatgggtgcagcacaagccagcactcacaggcaaggtgtaatggatccaaaagggtgg

SEQ ID NO: 526130 - DNA, 607 bp, Homo sapiens
cgaaggaaagaggattgagtagcaagatcctcagtgttatacagttctgagaaaatcttggacacgaatatggggagtcttccagcaaaagttgcctaatagaggagttctacatgggccaggaataggctagcactaaaaccatcccaagaaaattgtataaaattgagcaagagaaaaacaaaacaataaaatccaaccgggcttgcagcagcaatcattaagccagcttgccctttggtccacttccttgtagctggttgttgctcactagcccagctttgagctgtccaatggacaaccccagattttctagcccctcaccctccatgaatcyccttaaaaacccttgcccagaacccatggaagaaacaaacttgaggcttgagaattcctcctgtttcctcactgagaatgtcgcgatgattaaactctttctctgctgcaagtgccattgtcagtgtatgggtctgttgctgcccagagggcgtataagcctggcagtcctgcaacagcactggcaccctggaatgctcagccattggctgggatgggtgcagcacaagccagcactcacaggcaaggtgtaatggatccaaaagggtgg

SEQ ID NO: 526131 - DNA, 188 bp, Homo sapiens
gatgattaaactctttctctgctgcaagtgccattgtcagtgtatgggtctgttgctgcccagagggcrtataagcctggcagtcctgcaacagcactggcaccctggaatgctcagccattggctgggatgggtgcagcacaagccagcactcacaggcaaggtgtaatggatccaaaagggtggca

SEQ ID NO: 526132 - DNA, 551 bp, Homo sapiens
tcagccagttgttaggaggattagaaatatcatagcttagaaggcttggcacagagccggcaccccaaaagtcatagcggttattaatacagccaaaggttcaggaagacctcatctcagtttcagaaagatcctcgttatctttggaataaagaaaatgctttcgtgtgtctactttgaagagttggaggtggctgagcacaggctgggactatgagttttggctcccaatggcctttggcttaaagaacctaayaggacccaaagatagcatcagtttgagaaaacacatgagaatcttcattgctgccctcatggcctttcatatcaataccaaaaacctactgttttgtgttttgtagtccttttcttttttttttttttctggagagacgcaaagaatatttagataatatttctgtaattatttacttagtcttggtttctaattttcctcagagaaaggaaagcattatttgaaaataaaactaaagtagcatttaaaaatccctaggtgaggacatttttccagtggaagtttagcctccaga

SEQ ID NO: 526133 - DNA, 443 bp, Homo sapiens
tgtttagggtgaggtatgaatgtaggacttaaaccgtgtgatgtctaaactccgttccatggccatgagcctgtgatgcctgtgttgtctataacctgtcaatatttttctctcaacaatttccagctcaataagtgggcgagacaaggttatcaataacaagttggttattaaaggttaccgtctattcacgtgatagctttccatttccatcattgaattaaggtctcagtttttatttagttagttttttagttttggttgaaaggggtttgtgtttatgtgacttatttggttagtgggttattttgggggaaaagaggatctccttcttttgctgacttagataaaaaattcttgccttatgaaggctctggctgtgctgttggacttgctaacgtgtggagwacatggctatttaattgtaaaaagttgtcctgagg

SEQ ID NO: 526134 - DNA, 258 bp, Homo sapiens
tttttaattatctaagtgattagatttcttaggttgccttagttattaattctagttgcaatcagaggatrtattgtgagttcttttatccttatttgttggttttactcccttctatgttttaacactatattattaaggtgcagaaaggcttaagacttttgtaacgtctcagtgagttggaccttttattgctgtaactctttctgtttagttagtatctgatctaatactatcacatctattttcttttggtta

SEQ ID NO: 526135 - DNA, 482 bp, Homo sapiens
aagagtctagtgaaataggcctgttggagcctggaatatctttgaaatgaaaccacgctaccagcttggaccatttctatccagcctcccaggctgccccagatagcagggtagggctgtttagctaagcaggactcccatcctcaccttctttttgttggccttcaacaatgtcaagtttgagacaacatttccttactgagacttctcttctcaccacctgaggtttttaccatctctggagatagtctaccatggttttagaaagatctcttcccaagggatgaagagtgacttcaaacaaagatatctgtcccttccttctccccactcgaggtcagtaccagtgcccacatcccatacccagctagaaccctgttgaacacacagacagctggtttaccarggtctgctcagcttgttgttaggacattgctgtgttacagcctcttactgatgaaacacggtagtgaggaaatagt

SEQ ID NO: 526136 - DNA, 388 bp, Homo sapiens
ggtttaccaaggtctgctcagcttgttgttaggacattgctgtgttacagcctcttactgatgaaacacggtagtgaggaaatagtgacatgaagcagcagacgccactacaacaccaccgcttaggggctggcactcacctrtctccttcttatggctaggccttcagctcattttgggttctggctctctgagggccacatggcttgctgagcagtgggaagtccctgcctttggagtggatgctacttcacacaggaaaacatccatcctcagacccaaaacaggtgccttttgttagtattggactacgtggagttccaggccatccgtcatagcccctctgcttgtcccagccttcctgacaactttaggatatttgactcca

SEQ ID NO: 526137 - DNA, 530 bp, Homo sapiens
gactctgaggtggaagccagggaatggcttgtgtgtggattgtggacagggagggaaattggacatctgtttcagaggccaagctgccattcactctcccactggtagctacctctccccacatttactcaggcaattgcatctccttgacctcaatccctggcttttgagtgcagcccctaccgacattccacatctggagcttgtgaccttattatttatttattaaacaatttattgataaccttctatgttccagacattattattgttttgagacagggtcttgctctgtctcccaggctggagtgcggtggtgtgaacatagcttactgcaaacttgacctcctgggctcaagcgatccttctacttcagcctcctgaatagctgggactacaggcacaaaccatcatgcctcgctaatcttttattattattttttgtagacacagggtcttgctrtgttgcctaagctggtctcaaactcctgggctcaaggaatcctgctaccttggcctctcaaatgtgt

SEQ ID NO: 526138 - DNA, 595 bp, Homo sapiens
ctgctttctgcctcagagactatgcccttttctttggaactttccttctcatcctgtgaatggctggctcagccgctcagccccgcagtctcagcttaaatgtcacttccttttatgtgctttttaccacctatattttcctccacaacccactattctcaatcatcacctttttatttccttcctagcatgtccacaatttggaatattttctttttttttttttttgaggcagagtctcactctgtcatccagactggagtgcaatggcgcgatgtctgctcactgcaacttctgtytcccaggctcaagtgactctcctgcctcagcctcccaagtagctgggattacaggcatgtgccaccatgctcggctaatttttgtatttttagtagagggagggtttcaccatgctggtcaggctggtctcgaactcctcacctcaaatgatccacccacctcggcctcccaaagtgctgggattacaagcgtgagccactgcacccagcccacaacttataaatgttctattcagtcacctactcacttgatgttggttttattttgtttgtctctgttcttctcttcctaccac

SEQ ID NO: 526139 - DNA, 595 bp, Homo sapiens
ctgctttctgcctcagagactatgcccttttctttggaactttccttctcatcctgtgaatggctggctcagccgctcagccccgcagtctcagcttaaatgtcacttccttttatgtgctttttaccacctatattttcctccacaacccactattctcaatcatcacctttttatttccttcctagcatgtccacaatttggaatattttctttttttttttttttgaggcagagtctcactctgtcatccagactggagtgcaatggcgcgatgtctgctcactgcaacttctgtctcccaggctcaagtgactctcctgcctcagcctcccaagtagctgggattacaggcatgtgccaccatgctcggctaatttttgtatttttagtagaggsagggtttcaccatgctggtcaggctggtctcgaactcctcacctcaaatgatccacccacctcggcctcccaaagtgctgggattacaagcgtgagccactgcacccagcccacaacttataaatgttctattcagtcacctactcacttgatgttggttttattttgtttgtctctgttcttctcttcctaccac

SEQ ID NO: 526140 - DNA, 427 bp, Homo sapiens
ttctcatttctcacacaccctctaaacattaagtagacatcagaagtccacatttcaatggaattatgggatcttattttgctagaaaccragaatctcagtatgaacatcaattcttatcattccttcactgtgaaaaaaaaacacaaatttaaaagaaattattatcatatgaaaatgttgcattcctgaaattctaatcctttatctactacccccagtatattaagggcagttaatatgagtactactttttaataacctaccttgctgccaaatggacttacaatatagcaaaggtcacataaaatatgcaatatagtaaacaaaaggatggtaaaggaaaataaggaaaggggtataagttgtaaatgggaagtggccagttcacaaaatatataccatgaagtcctacacatctgctaaa

SEQ ID NO: 526141 - DNA, 427 bp, Homo sapiens
ttctcatttctcacacaccctctaaacattaagtagacatcagaagtccacatttcaatggaattatgggatcttattttgctagaaaccgagaatctcagtatgaacatcaattcttatcattccttcactgtgraaaaaaaacacaaatttaaaagaaattattatcatatgaaaatgttgcattcctgaaattctaatcctttatctactacccccagtatattaagggcagttaatatgagtactactttttaataacctaccttgctgccaaatggacttacaatatagcaaaggtcacataaaatatgcaatatagtaaacaaaaggatggtaaaggaaaataaggaaaggggtataagttgtaaatgggaagtggccagttcacaaaatatataccatgaagtcctacacatctgctaaa

SEQ ID NO: 526142 - DNA, 427 bp, Homo sapiens
ttctcatttctcacacaccctctaaacattaagtagacatcagaagtccacatttcaatggaattatgggatcttattttgctagaaaccgagaatctcagtatgaacatcaattcttatcattccttcactgtgaaaaaaaaacacaaatttaaaagaaattattatcatatgaaaatgttgcattcctgaaattctaatcctttatctactacccccagtatattaagggcagttaatatgagtactactttttaataacctaccttgctgccaaatggacttacaatatagcmaaggtcacataaaatatgcaatatagtaaacaaaaggatggtaaaggaaaataaggaaaggggtataagttgtaaatgggaagtggccagttcacaaaatatataccatgaagtcctacacatctgctaaa

SEQ ID NO: 526143 - DNA, 576 bp, Homo sapiens
tccgtgtccccaaggggcccaagacagcggctcagccttcagggccagtctgcaggtccgaccctcacccagcgggcctgtttcccactcgcccacgtccccgctcccattgagtcacccccatatgcaggcccactgtgagctcggaggcaggagagcctcgctccctaattcccgctctctgccccctacagaaaacccctaaaggtctcgacccctcttaagcccctccaccccggggagccttcccctgcagactccacgcttctgcgcggccttttgaccccatttcgcatgaaatctgcmgagcgaccgccccaaggaccagcgagcgctaatcagatccgtctgtgtctgcagagcttcacctgaggcctgggtccccgagggcggatgagcgggccggctctcgggcccgggctgggggacccgcagtccgcggtcggcggggatggggaggggtggccgcctgccgcgcggctcccgcgggccgtcgccaggtgcacggtccccctggtcccccgcagggaggacgccccctggtgcccccgccgccgccgggcctgggagctccag

SEQ ID NO: 526144 - DNA, 573 bp, Homo sapiens
tgtatggacacagttttgagtttgctggatttcaagatttcaagattgcattcaccgccatgcaaccagacacatggtcatctgtacagtkttttagttttataacagttatggaaggggctctgaaatggctacaaatactgttggttttctttctgaaacaaatactttaacaagtgttaagcccttgagattcaaactttcctattagttttagctctggaatgcagggaaaatgtccctcttattcattacttaattaactaactttcagaagtagctggcaataataggcactaaatgctttggctttatataagaatgcatgcatttacagcggttagctatatgcatatgagctattttaatactcttattgttgggtagtattcaactttttttttgttgacaactaatgaaattattatctgttgctagttgcacctaataatcttgaaatttaaaattacattatatgatatcctagaaaagaactaggttctctcttcacatttatatatgtcagaattagatgtcagatttaaaatcacagaataccttgcagtttccaag

SEQ ID NO: 526145 - DNA, 573 bp, Homo sapiens
tgtatggacacagttttgagtttgctggatttcaagatttcaagattgcattcaccgccatgcaaccagacacatggtcatctgtacagttttttagttttataacagttayggaaggggctctgaaatggctacaaatactgttggttttctttctgaaacaaatactttaacaagtgttaagcccttgagattcaaactttcctattagttttagctctggaatgcagggaaaatgtccctcttattcattacttaattaactaactttcagaagtagctggcaataataggcactaaatgctttggctttatataagaatgcatgcatttacagcggttagctatatgcatatgagctattttaatactcttattgttgggtagtattcaactttttttttgttgacaactaatgaaattattatctgttgctagttgcacctaataatcttgaaatttaaaattacattatatgatatcctagaaaagaactaggttctctcttcacatttatatatgtcagaattagatgtcagatttaaaatcacagaataccttgcagtttccaag

SEQ ID NO: 526146 - DNA, 621 bp, Homo sapiens
taagatattccagaggatacctcaagcccagcattgtcctttttctgagcttcacaatcaggtgttatagccatttaaattactggaaaatagctcggtgtggtagtgcacacctgtcgccctagctactggagaagctgaggcaggagaataactcaagcccaggagtttgaggctgcagtgaactgtgattgtgcaactccagccttggagtcttttaaaatattgtaaatattgatatttgaattttcatatatatggatatatatayatatatgtatataaaaatagacaacatttcagtgaggcagcaagtaggtactatttaccactgttagatactagaatgctagacatcatgctatactaagtggtttcagaataatggggtagtctgtccctggtaacaacccaaataagataatcttattgtgcataacaccaaggaggcttatataccatttccaaccacagtcacaagaaatacatgagtgtgtgtgtaaacatagataagcttatctgtatttcaagtagacttaaatctagcaatttcgtatccacttagagttgaacaatgacaaaactatcaaaatattaattacgatcatcatataggtagtt

SEQ ID NO: 526147 - DNA, 605 bp, Homo sapiens
agctgattgttgttcagtatcaaatgatgaagattggaaagaccactgaacatatcatttgtaattttagtcaatctgttgctattcaaatgcaaagccctcaaatttcgtaggtcagcgaaagcatgaggtgtaataaaacttattgtattcctggatagagtcaggtccaccaagctggtcatattggcaaaatctttccttttaatatttgtaacaaaattgtckgccaaccgcagttccacagttcttctgtcaatgtttggtggaacaaataaaagccctttcttggcacaaagggttgcaagattaggagacaaaatctgacagacacaacgctttggacagatctgagctttcactgctatgccaatgagaaacagataaaaaagaattttttccattgtagatcaggtttaagagcctgtaacggaagacacaaaatagaatgttagcatccagtgatttaattcatattcatattcctactagaataatatttgtatgcaatctagaatagagaaataatttcacttgtttgcttaacaagtattaatatttattctgtagtaaaggctataatgggcactagggaggaataacat

SEQ ID NO: 526148 - DNA, 581 bp, Homo sapiens
ctgctctctggcatggagggtgcgcccgccccactgcctctcatgaaaccctcactgagccacgtgttggcctctgaaggcccctctgagcactactcagtccctgctggcttcctcctcctgggtgtccccaagactcccaggaagggggtgtggccaggaccactgtcttgctctggcagygccagcaggtcttagggcagccctggtttcccggactgggccctgccacttctgacttggatgttgtctttgctaagttctgggcaccagaagcactgaattacagccctgcgttcgctccccgtaagaactcagaggctctgggaatttcccacacgtggacacgatggcagtggctgggcagggggctgggttcgtcttgcctcctcactggggtggctctgcgtggatgtcaggacacagagatgtattttttcagttgattttggagagggagagggatgggacgatctgagctggcctgtggtttagctaataggtgagaagtgcccatggatgtaatgatggagtgatattgtcattactcaagcaaggacggagcctcatccaggagcgga

SEQ ID NO: 526149 - DNA, 581 bp, Homo sapiens
ctgctctctggcatggagggtgcgcccgccccactgcctctcatgaaaccctcactgagccacgtgttggcctctgaaggcccctctgagcactactcagtccctgctggcttcctcctcctgggtgtccccaagactcccaggaagggggtgtggccaggaccactgtcttgctctggcagtgccagcaggtcttagggcagccctggtttcccggactgggccctgccacttctgacttggatgttgtctttgctaagttctgggcaccagaagcactgaattacagccctgcgttcgctccccgtaagaactcagaggctcygggaatttcccacacgtggacacgatggcagtggctgggcagggggctgggttcgtcttgcctcctcactggggtggctctgcgtggatgtcaggacacagagatgtattttttcagttgattttggagagggagagggatgggacgatctgagctggcctgtggtttagctaataggtgagaagtgcccatggatgtaatgatggagtgatattgtcattactcaagcaaggacggagcctcatccaggagcgga

SEQ ID NO: 526150 - DNA, 627 bp, Homo sapiens
ctcctgtgtcccgaatcccttgtttaccaggctggtttaccttctgcccttatcctcaacttgcttatctttatgctgcatttttgaagcagaaaattcaagctacactggaagtgacttcattctttgaagtatttttctgtaaccttcccatttgtagttcacttactgacactcgtcacccagcctttgagtaaatgtcaccctgctgctcattccattcacgttcccaggaaatgcctgggaaaccagtactcttcagggttgctacattggccactctctaggagcccattattgatgatcttatcgtgctatttatggcttcccagtaatactgatacaactagctctgaaaactcattaattcgtatttctttgtaactctggacttcatttaatggttgattgggagttccaggtaaattaatctttcacttgactgctttatgggagaaagcataaatgaagcagaaawgctgtattattgagcacaacatttgtgatagaaagcaaacccattattgagagatgcttcctctctgggctattataaaaatcccacgaaaaaggcagcctatccaaataagaaacatactcttaacttgtgtttttgacattgcttcc

SEQ ID NO: 526151 - DNA, 628 bp, Homo sapiens
cttcctctttctttctttttcttgttaactgtaactcagagccatcggtaaaccatgaaaaagaggaaaatttaactgttgaaaggcagaagcacttatgtaggccccaactaaagactgctttccattcactcatttgttaattgattgaatatttattgtgcacctactatatgccataaacatgcttaattttcgggatacaaagaattaaaaagtccctgttttcaacaaaaaaatgatatagtagagataaaaagcaataaataatttcaatattgagaaaagaaatttgaggatgtcatgaaagtatggaagaggkgaccttgactggggttggagataggaggcagctcaggactgatgggaggcagaacaggcttctaaggagagaggattcttaagccaagtttcaaatgttgactaggagttagaaggtgagtagtggaaggtggatctagtcatcaccagcttagagctttttatctccagattttctaagcaccatagactatgttatagaccctcttaaaatcctaaatcatgaacaaagaaaccacttgcttagtgattgcaataagataacataatttctgactcaccgagagtcagagaatcagaaggagct

SEQ ID NO: 526152 - DNA, 628 bp, Homo sapiens
cttcctctttctttctttttcttgttaactgtaactcagagccatcggtaaaccatgaaaaagaggaaaatttaactgttgaaaggcagaagcacttatgtaggccccaactaaagactgctttccattcactcatttgttaattgattgaatatttattgtgcacctactatatgccataaacatgcttaattttcgggatacaaagaattaaaaagtccctgttttcaacaaaaaaatgatatagtagagataaaaagcaataaataatttcaatattgagaaaagaaatttgaggatgtcatgaaagtatggaagaggggaccttgactggggttggagataggaggcagctcaggactgatgggaggcagaacaggcttctaaggagagaggattcttaagccaagtttcaaatgttgactaggagttagaaggtgagtagtggaaggtggatctagtcatcaccagcttagagctttttatctccagattttctaagcacsatagactatgttatagaccctcttaaaatcctaaatcatgaacaaagaaaccacttgcttagtgattgcaataagataacataatttctgactcaccgagagtcagagaatcagaaggagct

SEQ ID NO: 526153 - DNA, 649 bp, Homo sapiens
tctctcattctttttttaaacagcctaagttatgttcctaaaaatgaggcatgtatcatttcctctccgtcatcattgtcatttccagcatttccacttgccacacgtgcaagtgttgcttgttcccatcctggtctctgtggcccttcatgctagcttcctgagaaaatgcacatcccagtaagtaaggacaaatcatgaggcagggtgaaggatgacctgaaaataaggaacaaactactgtacgtgagcatattagtcactgaaaacagacctataaccatcaatagttcaaagaaactcaamctgcaacccaaagaatctgagtatgaataaggacttcactgattattttctgacccaaggtactgctattattgtggatattgaaatgttttatacataaactatatctccatatggtattgagattttgttaaaatttatttgctcattgtgttagttcctaagggctgccataaaaagtaccataaattaggtggcttaaaacaacatattttttttttctcatagttctgaaaatgtgaattctaaaaccagagtgttggcagcgccatgctttctctgagactctgggtagaatctttccttgactttagcaaccttctggtaagcgactgtgaattca

SEQ ID NO: 526154 - DNA, 583 bp, Homo sapiens
gaggaacaaacaagattgatattgacttagcatctattaggtgagattcattgaactagttgtaagagtgaaagtggcctgtctccactgaagctgcagtggaagaagaatcatctaatcatttatacatttctgagattcctttcaataggggcattctcaaatgtaaaccctgggttctcatgaacaatcatggacagaagagggcagaactgaaaaactcaaagcatgaaatatgtagaagaaaaatggcaaagagtttgtttttaatagcatacagtatgtgwtcttcttctataacattcaagcatttgttattgaaacaaagaatttgtgtctccgcatagttctactggctctgtgatgttggcaactttttaaccattgtgaaaatcagtttcatcatctttatgatgggaataataacatattatttagaaagtattagagtcagtatttgtaaaaaatctacagtacctgaataatattttgtagcttttcttatatttagtgttaatgtctgctatagggaattaataaacagggagagtagaaactcttaagtgcattagagtatgtttat

SEQ ID NO: 526155 - DNA, 501 bp, Homo sapiens
ccactgaagctgcagtggaagaagaatcatctaatcatttatacatttctgagattcctttcaataggggcattctcaaatgtaaaccctgggttctcatgaacaatcatggacagaagagggcagaactgaaaaactcaaagcatgaaatatgtagaagaaaaatggcaaagagtttgtttttaatagcatacagtatgtgatcttcttctataacattcaagyatttgttattgaaacaaagaatttgtgtctccgcatagttctactggctctgtgatgttggcaactttttaaccattgtgaaaatcagtttcatcatctttatgatgggaataataacatattatttagaaagtattagagtcagtatttgtaaaaaatctacagtacctgaataatattttgtagcttttcttatatttagtgttaatgtctgctatagggaattaataaacagggagagtagaaactcttaagtgcattagagtatgtttatac

SEQ ID NO: 526156 - DNA, 502 bp, Homo sapiens
ctgtcagagtatggctcctgggacgcttttgcttattttttgtacggctttttcgagttggcttaggcagaattcttctctgaacgataaagacgacatgcttcccactgaacttttctccaattcgcgtactagccggacttgaattttctggaaagatttcagttgaggaatgggaacaaagattatgatagctttccgaccaccaccaagttcaatttccttggctgccgtaatattcagctccctgagctgagctttgaggtccgagttcatctccagctccagaagagcctggaagatgctgacctcgaactcgtccggcttctcatcattggcttcacgatcttggcgctygaactgaacatggccttctcctgggagaactcgccgagcgcggcttaggaagaggtcttctttaactagaactgaaagtagttttatggttatttgggtgagaatttaagacattaacttatattggtggttcttaaagtgtggt

SEQ ID NO: 526157 - DNA, 628 bp, Homo sapiens
ctgcagcaggctttatattcttgtgataggcacagcctcttggaaaaggctcaatccctgctttggggtggaggaggatacctctcctaagtctttagttccttcacggtccactctccttcagcctataggcagtagctactttttgacacctgctacttctggacccctgtgagtattactctcttagtagtcaatcaccttctactacttttttacattaaatttccttcttcaaattactggtttgatttctttctccttattggactctgatagagataaatcctacctttaatttcacaatctagtaatattcaaaatccttccaggagtgttgctaagaactgcaatggaggtacttgcaatggaggtacttacattctccacgtctcctcttttgattrtcacttccattcagtgctacttctgcttaaaaccacgggagccttgtgcaactctatcaaagcacttgtgcatttgctaggctttacttaagatgggctgaaagaaggggagatcttaagactacagagttgcttttccaatcctgtccttccttctccctccatctccactcccaggactcacttccccccacatttccttatatgctccaaattcttct

SEQ ID NO: 526158 - DNA, 488 bp, Homo sapiens
agacttatcttcagaaaccatgcaagcaagaaaagagtggaatgaaatatttaaagtgctgaaagaaaaaaatatcaacaatagaatagaataatcagtttacagaaaaggaaatacaaacatttcttaaacattaataactatgcttaactctgttcataataaaagaaatgcaaaataaaattacatcaatataccatttttagcctataaatttgacaaatattaaaaagttatataaaacaatatgtgttagagtttgggaaatcaggcactctaatatactactaatggagattaaattgacacagtctttatgaagagcactttggtaaaatctattaaarttccaagtacatggacccttggactcagcaatttctcttctagaatttacgttatatatgtctatgcatgcatatgcagacttttatgtgccaaagattccacactgtggcactctatacagtagcgaaagattgcaaaca

SEQ ID NO: 526159 - DNA, 617 bp, Homo sapiens
ggataattctagatagtactgagtgctattaggaaaataaaacagtgctgtggaaggggctgaagctttgctttctagggctttctgagaagatgacacttaaattgagacttgawtgacaaaaaggagctggccttgctaagatttcagtatagtcgtccacccttatcccaggtttcactttctgcagtttccaccacccgctgacatctgaagtctgaaaatattaaatggaaaaatccagaaataaacaattcatgagttttaaattgcatgcaccattctgagtagcatgatgaactcttgtgctgtcctgctccattccgcctgaggcatgagtcatccccttgcccggcagatgcatgctgtatacactccccacccattagtcactcgtagccatcttggttatcagaaaacatgagtatatgtagggtttggtactatccacggggtcaggcatccactgggggtcttgaaatgtatggcccatggttaacaggggaacctttgtaaagggaattccagtggagggattactgagcacaaagaccatgaggcaggaatgagcttgaaatgatcaaagaatagaaagaaatagcagtggcagaataagt

SEQ ID NO: 526160 - DNA, 617 bp, Homo sapiens
ggataattctagatagtactgagtgctattaggaaaataaaacagtgctgtggaaggggctgaagctttgctttctagggctttctgagaagatgacacttaaattgagacttgattgacaaaaaggagctggccttgctaagatttcagtatagtcgtccacccttatcccaggtttcactttctgcagtttccaccacccgctgacatctgaagtctgaaaatattaaatggaaaaatccagaaataaacaattcatgagttttaaattgcatgcaccattctgagtagcatgatgaactcttgtgctgtcctgctccattccgcctgaggcatgagtcatccccttgcccrgcagatgcatgctgtatacactccccacccattagtcactcgtagccatcttggttatcagaaaacatgagtatatgtagggtttggtactatccacggggtcaggcatccactgggggtcttgaaatgtatggcccatggttaacaggggaacctttgtaaagggaattccagtggagggattactgagcacaaagaccatgaggcaggaatgagcttgaaatgatcaaagaatagaaagaaatagcagtggcagaataagt

SEQ ID NO: 526161 - DNA, 617 bp, Homo sapiens
ggataattctagatagtactgagtgctattaggaaaataaaacagtgctgtggaaggggctgaagctttgctttctagggctttctgagaagatgacacttaaattgagacttgattgacaaaaaggagctggccttgctaagatttcagtatagtcgtccacccttatcccaggtttcactttctgcagtttccaccacccgctgacatctgaagtctgaaaatattaaatggaaaaatccagaaataaacaattcatgagttttaaattgcatgcaccattctgagtagcatgatgaactcttgtgctgtcctgctccattccgcctgaggcatgagtcatccccttgcccggcagatgcatgctgtatacactccccacccattagtcactcgtagccatcttggttatcagaaaacatgagtatatgtagggtttggtactatccacggggtcaggcatccactgggkgtcttgaaatgtatggcccatggttaacaggggaacctttgtaaagggaattccagtggagggattactgagcacaaagaccatgaggcaggaatgagcttgaaatgatcaaagaatagaaagaaatagcagtggcagaataagt

SEQ ID NO: 526162 - DNA, 383 bp, Homo sapiens
gtgcactgggccctggagcaggccggccagtgggtcgagcaggtgcagccccaggtgccggggtcgtgagaggtgaagccttccaggcttctgggtccggtgaggacttggagaacttttacatctagctgaargattgtaaatgcaccaatcagtgctctgtgtctatctaaaggtttgtaaatgcaccaatcagctctctgtaaaatgaaccaatcagcactctgtaaaatggaccaatcagcaggacgtgggtgggggccaaataaaggaataaaagcaggcccccctggagcccatcaccgcaaccagctcaggtcaccttccacattgcgtaagctttgttctttcgctgttcgcaataagtctgattgctgctcact

SEQ ID NO: 526163 - DNA, 586 bp, Homo sapiens
ttacttttattttagacacatttgctattattttaggtaaacagtttaaaactgattacttcagcacatagcaagagatttgttttagatagtcaaaacagtcagcttatatggtaaaaattccttattgttacttggttctaaaagtaaattccctaaactctgtggttatattccataatttagtcartttcttcaataccatattgctttaattgaggagaagggactctagacaaagtaatgtaataatattaatattattcaataataaaattgtaatatgtttacagagtgctttttgcttttcagttaaaatactttcattcatattgtcttatttaaaaatagattatttcttcttagtcagatcctggtgacagtggggaaaaaaatcctacaaagctaacagaattcgtagcatagcattctgaagtttagtggaaaatagccctgagcacctacctaatatgtcctaaaagcatcattgtgtgataaatgatatttatgatgactccatgcagaaactggttatttgatagatattgaaaggtgttagacttacctacatcagaaatgtatagat

SEQ ID NO: 526164 - DNA, 373 bp, Homo sapiens
gaacggactatatggcagtttctgtgcttacttgcaaatgccatgtggcagcatctggtctgagacttgctttcattgtaacatcccatgtggcggcaagcttgtggaggaagatactaaagctctcttcgatctccatatgtcttaagctagtaatactgtcaacatraacctgaaaatgagattgattggccaagttggctcaggttagttgacaataactggattaagatagcaatggtggagatggaggaaagtgaatctactgaagggatggattgagggagagggcagaagcaagaatgtcggttttctagcataagcaacttggtacatggtggtgcaatatacagagacaaggaacactggagac

SEQ ID NO: 526165 - DNA, 598 bp, Homo sapiens
atgatgtctggcattaggcttcccccaacctaaggttttgtataacaagaaatccaatttgagttgtccgttgattatagtaagtcgaatctatgtctctggacaatgtgtgctataagtcatagagtgacctatgataactcagttaaatgaatatttatactgatatgcattaattccacttaaatagagcatattgatttttcaaatctaatataccctccatgaaaaagttgattatgcttgtattttaattgatttctttttctgcaggaaaatgcccacttttatgttgcagatatgattatatcagcaatggagaaaatgaagtgtaacattctgagtcaacagcagacagagagctggagtaaagaagtcagtgggttacttgggagtgatcagcctgactctgaaatgacttttgataccaacataaagcaagagtctgggtcttctacttcttcatacagtggctatgaaggcaagttgggcaaatatgagaaagctgtatgttatgtgtttcacatatatctcctctrtaattaccccttatccacggggcatatattccaagacccccagtggaagcctgaacctt

SEQ ID NO: 526166 - DNA, 538 bp, Homo sapiens
tgcatgtgtgtgttctcccagtggaatctggaacccaaaaggaaacaaagctttagaccaacaaaatgaagctttgatagtggaatggcagacatcggctamcagtcaaggagggttactggaaattccatctctaatagatagctgccaacttgtttatgaaggctggctctagataaaataggcactgtaacagagaatgttcaatgatctcagctacgctactgataagcatgagaagagttgagtcagagacagggtaattaaagcttatgcttccatgggctagagagaacctgcatccattctcctaacatctgtctacttattcctgctgctgccatgtccatacattggccggatagagcaattgggtcagagaggggcaggaaaggcatgggagaaggttaggaaccaaggggaagaagaggtagatgccatcaacacctccttatcttcctgctcttttgaagtccatgaaatctactcatcccatacccttctcctaggcaaccctattgtctgtcaaggttcaaga

SEQ ID NO: 526167 - DNA, 459 bp, Homo sapiens
actgtttcagaaatttgtatttgattcctgaaaaagacgttcttgttacctgtagtcatatataaccaagtcgttattaaataaagtgatttttttaagcagcaatgtatcagtaaatrtactgtgaggaataaactattctaagaatcttcgggatgaattagatcagagaataatttgattttgattacaggttgtctctctactcctcatttaatgttccattaagattattttttagtcaagccaggtagaatcaaaatatccaagaatatagttatgaattgtcataggaatctggcatgaatcacatacttattattaaaatgcaaaggttactctgtcttcctggaaatcataattcacttttctctgccttttctgatgcaatttaaaattttcccatgtagatgctccatcaaaagcatggaaacttaattttttgtatttagaaaaatg

SEQ ID NO: 526168 - DNA, 459 bp, Homo sapiens
actgtttcagaaatttgtatttgattcctgaaaaagacgttcttgttacctgtagtcatatataaccaagtcgttattaaataaagtgatttttttaagcagcaatgtatcagtaaatatactgtgaggaataaactattctaagaatcttcgggatgaattagatcagagaataatttgattttgattacaggttgtctctctactcctcatttaatgttccattaagattattttttagtcaagccaggtagaatcaaaatatccaagaatatagttatgaattgtcataggaatctggcatgaatcacatacttattattaaaatgcaaaggttactctrtcttcctggaaatcataattcacttttctctgccttttctgatgcaatttaaaattttcccatgtagatgctccatcaaaagcatggaaacttaattttttgtatttagaaaaatg

SEQ ID NO: 526169 - DNA, 415 bp, Homo sapiens
ctgattaactagcaatcttaattctttttaamatttttaaaaatattttattttaaatttttgtttatttatttttaagactgcattatgagactggccaatttttgtatttttggtagagacaaggtttcctcatattgcccaggctggtctcgaactcctggcctcaagtgattcacccaccttggcctcccaaagtgctgggattacaggcatgaaccactgtgcccagcctagcaatcttaattctatctgcggttttaattcccccttaccgtgtaacataatttcaggctcctggcattaaaatgtggacatctttgggggaccattattccacttattacagggtctgatgtaatcggaccaaactcactagagattaatatataagcaagaatgataatttattact

SEQ ID NO: 526170 - DNA, 409 bp, Homo sapiens
aactagcaatcttaattctttttaacatttttaaaaatattttattttaaatttttgtttatttatttttaagactgcattatgagactggccaatttttgtatttttggtagagacaaggtttcctcatattgcccaggctggtctcraactcctggcctcaagtgattcacccaccttggcctcccaaagtgctgggattacaggcatgaaccactgtgcccagcctagcaatcttaattctatctgcggttttaattcccccttaccgtgtaacataatttcaggctcctggcattaaaatgtggacatctttgggggaccattattccacttattacagggtctgatgtaatcggaccaaactcactagagattaatatataagcaagaatgataatttattact

SEQ ID NO: 526171 - DNA, 524 bp, Homo sapiens
attaactagcaatcttaattctttttaacatttttaaaaatattttattttaaatttttgtttatttatttttaagactgcattatgagactggccaatttttgtatttttggtagagacaaggtttcctcatattgcccaggctggtctcgaactcctggcctcaagtgattcacccaccttggcctcccaaagtgctgggattacaggcatgaaccactgtgcccagcctagcaatcttaattctatctgcggttttaattcccccttaccgtgtaacataatttcaggctcctggcattaaaatgtggacatctttgggggaccattattccacttattacagggtctgatgtaatyggaccaaactcactagagattaatatataagcaagaatgataatttattactatgtactataaaaatataacattaggggagtggagtaggtgggaatgtccatactggttggtaaatggcttctctcttttttttttttttcagtgtattttctcttttattc

SEQ ID NO: 526172 - DNA, 661 bp, Homo sapiens
catatcagtgttcaaaggagattcttgtttagaaatagtaaattatttaaatggttgagatattggatatagtgctgaagtttttttagaggttgcatttctcacaaragatcctgacaattcagtcaaacacagtaatactatcttcaataaatactgatatgttctccagcacttgctttgctttaacaaaagtagttcctaaactttgttttgttaccatgttttagtaactcctctcctgcgttctcaaatttttgtaaagcagtcagtattccatatcagatacaatgatcatgcagcacaatgatgtgcttttgtcttcttaacatttttaattgtttggttgccttctagctgtaattaaaatcttgggaagatgttcacatgggattgagaagcatatgtgatttgcacgttcagcggataggatttactgaaaatgagcctccctttaaggggtaggggtaggaagagaattgcaagtttgaaggttgagaaatatctgcatgcattacaagcagtcttcaaaggagaagcccactctactcaggttaagggatttgtgttttgaaaattgttcgttttgggcccagaaattagacttaggccactgagaggaataattctctaagggcaagtatttattaatatttttata

SEQ ID NO: 526173 - DNA, 539 bp, Homo sapiens
ggctaatttttgtatttttagtatagacagtgtttcaccatgttggccaggctggtcccaaactcctgacctcaaatgatctgcccacctcagcttcctaaaatgctgggattacagacgtgagccactgtgcctggcctggagtcatattattttgtaaaagcagtaaagaatataaaatggtaaccataaagaggaaatattttaatacagcaaatatatctgaaatttgaccccctaagcatatcagtattccccccatctagtcctctatatatccatattatttgtaygtaaacaaaagcatttttatcttccacctttcctctggtatatcggaagtgttttacacacttcctctgaggagttttgattatattaaatattatatgaaatatttctacactttactatcatgccctttaaaacatttttaaagcctaaaggaaggtactgccattctatttccctccctttgttaaagtcaccaagattaatttgatattggttgactgagacggtcttactcacccaggctg

SEQ ID NO: 526174 - DNA, 464 bp, Homo sapiens
tgtaaatctttttttagtgcagtttggcaaatatcccaaatgaaattcaactctaagttaaaagtatcaaagagatagagctaagtgctctggcccagagctaagaccctctgggccgcccagaggctctggagagcttaggaatagcaaacccaattgcccaggagctaaagggactgcaggatacctgttgctttaccactamagaacagttacccccagagacagccctcagcgaccagatttctgggctgctgtgaagatcttaaaggcccacaacccttgtccccgccacccccaaactcagaaagtgggagttatccccactgtaactcacagtgctaagaacagcaagcattgaacacggaaacctgatctctcctccatcgtccacctcctgggactccagtcgctcccacctcctgggactttcaggttctatctgctggtgggaagtgcacttt

SEQ ID NO: 526175 - DNA, 619 bp, Homo sapiens
ggttcggctgtgtccccacccaaatctcatcttaaattctgggtcccataatccccatgtgtcatgagagggactcgggaggaagtgactggatcatgtgggtgatttcccccatgctgttcctgtgagcgagttcccatgagatctgatggctttgtaagcatctagcattccccctgcttgcattcattctctttcctgccgtcctgtgaagaggcgccttccaccatgatggtaagtttgctgagggctccccagccatgcagaactttgagtcaattaaacctctttgcttyataaattacccagtctcaagtatttcttcacagcagcgtgagaactgactaatacagcagcccaaacaaatgaagacagtttgataatcaccattgtcttttagtttagtttttgttctgatgaaactcttgcctattagaattacatattgaggtcccatgggtggtgcatgcaggctttaagccacagagaaaactttaatttttctcagaaaagacattttgcagggttgtaatatgttatttattttgcttccagatatcagcggtgctccatggccttcccactacttctttattaaaatcccatccctaacaatttc

SEQ ID NO: 526176 - DNA, 491 bp, Homo sapiens
gtctggaacaggatttgccttgccccactcactcatgagacaattctgattctgggcaaatgttttagggccatggtaagcccaggtaaaggtgtggaaagagcaaggattataattcatcagctataaccctaggctggaagagatcaattgagaaacacttctggctctgaaggtcggaaattctttgctatgcacacaggttaggtgccccgcagggaatgtggattgggaacaacagtagaataggcagacaataaggagctgcacccaccccacttaaacacacwtccacccctgccaaaaatgctaaagcatcattggctttcctcaaagacaaacatgttgactctagtggtttcaaaagtctgggtagcactcataattattctggggtgatacgagagtggtgtacacagaaaacatggataaggccgcagtggcaatggggacgtgggtagcaagtatgggaaggcagatacaaaaactgt

SEQ ID NO: 526177 - DNA, 626 bp, Homo sapiens
gcctcctaataccatcgtctcccggcagccccgcctcctaataccatcgtctcccggcagccccgcctcctaataccatcctgtcccagcagctccacttcctcataccatcatgtcccagcagccccacctcctcataccgtcatctcccagcagccccacctcctcataccgtcatctcccagcagccccacctcctcataccataatgttccagcagccccacctcctaatacctttgtctcctatcagccccacctcctaataccatcgtgttccagcggctccacctcctaataccgtcatcttccagcagccccacctcctaataccattacattggtgattagatttcaacatctggktttgggagggcacacaaacatttagaccgtagcaaacagtacctgtttgccctacacaaaattgaataaactgaacaacaagattttaggacagaaataggaaaacagtgcaatagaaggatagatctattcttttacttcagatacgttcaagtaaaatcacatttaatatagaatgtatagaattacccccattatagtagaaatatttctgtcaatctaaccatctgtctgtacgtatctgtacctatctatccagtg

SEQ ID NO: 526178 - DNA, 499 bp, Homo sapiens
tagaaaacatgtaaaagataatacccaatgtggttaagagtcaaaggaaatgaacatttttatatgcagctagtgggaaggaaaaacttttgctgggcaatctgccaaagtgcactagaagtctttaaaaatgcattccctttaactcagtaacttcacttcaagaaacttacccctaggaaataaactggcaaatatatagctatttaactatgcttcagcttcactacttttctttttttttttttctgagatggagtctagctctcttgcccaggttggagtgcagtggcatgatcttggctcactgcaatctcygcctcctgggttcaagtgattctcctgtctcaccccctccccccaccaagtagctggaattacagttgcccgccaccatgtctgactcatttttgtatttttagtagagacagggtttcaccatgttggccaggctagtctcaaactcttgatcaccttgacctcaggtgatctgcctgcc

SEQ ID NO: 526179 - DNA, 597 bp, Homo sapiens
taactataaatgttccagttaaaaatgcaaaagattggaattttagacatctaattatctactgaaattatcaacatctaaaatgaatcaatatctttgttctccacctggaaaatttaaggatgtagaaaactcagtcattctttaggttctctttccaactgtcatgagtacttttgacttacatcaccaatttcctactcacttacttactactctttagctctttacttattcttttatctcagacattccatctgaatcactctttcttccacctttargcttttctatcgtgaggatctgagaatggaaaatccttaatctttgtctgaaaatgtttttattttacccttgttctcaaaagacatttttactggtctacagttttaggttgacagtatctttcttcaatcctggtctccattattgccattaagaaatcatctggaaatccaatagccactctattaaagacaatctatcttttttcacatcatgattttatatataaaaaaccataaagactccaccaaaaaactgttagaactaataaatgaattcagtaaagttgcaggatacaagtcaacatacaga

SEQ ID NO: 526180 - DNA, 597 bp, Homo sapiens
taactataaatgttccagttaaaaatgcaaaagattggaattttagacatctaattatctactgaaattatcaacatctaaaatgaatcaatatctttgttctccacctggaaaatttaaggatgtagaaaactcagtcattctttaggttctctttccaactgtcatgagtacttttgacttacatcaccaatttcctactcacttacttactactctttagctctttacttattcttttatctcagacattccatctgaatcactctttcttccacctttaagcttttctatcgtgaggatctgagaatggaaaatccttaatctttktctgaaaatgtttttattttacccttgttctcaaaagacatttttactggtctacagttttaggttgacagtatctttcttcaatcctggtctccattattgccattaagaaatcatctggaaatccaatagccactctattaaagacaatctatcttttttcacatcatgattttatatataaaaaaccataaagactccaccaaaaaactgttagaactaataaatgaattcagtaaagttgcaggatacaagtcaacatacaga

SEQ ID NO: 526181 - DNA, 597 bp, Homo sapiens
taactataaatgttccagttaaaaatgcaaaagattggaattttagacatctaattatctactgaaattatcaacatctaaaatgaatcaatatctttgttctccacctggaaaatttaaggatgtagaaaactcagtcattctttaggttctctttccaactgtcatgagtacttttgacttacatcaccaatttcctactcacttacttactactctttagctctttacttattcttttatctcagacattccatctgaatcactctttcttccacctttaagcttttctatcgtgaggatctgagaatggaaaatccttaatctttgtctgaaaatgtttttattttacccttgttctcaaaagacatttttactggtctacagttttaggttgacagtatctttcttcaatcctggtctccattattgccattaagaaatcatctggaaatccaatagccactctattaaagacaatctrtcttttttcacatcatgattttatatataaaaaaccataaagactccaccaaaaaactgttagaactaataaatgaattcagtaaagttgcaggatacaagtcaacatacaga

SEQ ID NO: 526182 - DNA, 530 bp, Homo sapiens
tctgatgttagaaactttgcatagcttgtccgaacatccattttgttgcttgtaagaacagaaagaatagcatcttacaccatattttataaggttattataagcataaaatcaagtgagataattctttggaaagaattacataaatctaaaatagcacaataattattgttgttgcaccagtataattttaccctccaaaccctctgaagagtagctttggaaaataacatataaattcatctgcagtaatatagaaaatttcagcatggatatgaaaattaatacatgcytgtaaagtggtttcccaaaggtatgcagcattataagaataataaatcaccataaatcagatacaatagatacattttgcacttaacacagtgaatgatttagggtccatgcaattttcatcagagaagttcacttagggcttaccaccaaatagctccacagtagcaggtagagagcaatataacaatgacctttaaaccacccagtgactcattagagaagttcctcaattctgg

SEQ ID NO: 526183 - DNA, 530 bp, Homo sapiens
tctgatgttagaaactttgcatagcttgtccgaacatccattttgttgcttgtaagaacagaaagaatagcatcttacaccatattttataaggttattataagcataaaatcaagtgagataattctttggaaagaattacataaatctaaaatagcacaataattattgttgttgcaccagtataattttaccctccaaaccctctgaagagtagctttggaaaataacatataaattcatctgcagtaatatagaaaatttcagcatggatatgaaaattaatacatgcctgtaaagtggtttcccaaaggtatgcagcattataagaataataaatcaccataaatcagatacaatagatacattttgcacttaacacagtgaatgatttagggtccatgcaattttcatcagagaagttcacttagggcttaycaccaaatagctccacagtagcaggtagagagcaatataacaatgacctttaaaccacccagtgactcattagagaagttcctcaattctgg

SEQ ID NO: 526184 - DNA, 358 bp, Homo sapiens
cttggacctgacactaccaggacagttgccaggatccataatgatttagtgcagttcttactcctacttcagagcctatgtgaacagactattagaagtccttttgattcttttttttttttttttgatacagagtttccctcttgtcacctaggctggagtgcaaaggcatgatctcggctcagtgcaacctctgcctcctgggttcaagttattctcccatctcagcctcccaagtagctgggattacaggcatctgccataatgcccaactaatttttgtatttttagtagagacggggtttcgctgtgttagtcaggctggtctyaaactcttgacctcaggtgatccacccgc

SEQ ID NO: 526185 - DNA, 616 bp, Homo sapiens
aatcacaaaaccaatatgcaatagagccataaatccaattcaggcctatctcatatcacaattattttctgtctgctacaccaagtggcctccttcagttttgcaagacgccctcagtgccaaggcatgagccctgaccagggagtcagagaaactttttctttctttctttttttctctttctttctttctttctttctttctttctttctttctttctttctttctttcttttcttttcttttcttttctttctctttctttctttytttttctttctttcttttctttctttctttttctttctttccttctttctttccctttccttccttctttctttctttcctttttctctttcttttttctttttcttactttctgtctctctttttttctttttctcttctttcctttctttcccttccttccttcctttccttttcctttttttcttccttccttccttccttcctttcttttcttcctttctttcttttttatttgatggagtctcactctgtaagccaaggtggagtgcagtggtgtgatcttggctcactgcaacctctgcctcccaggatcaagtaattctccagcctcagcctcctgagca

SEQ ID NO: 526186 - DNA, 616 bp, Homo sapiens
aatcacaaaaccaatatgcaatagagccataaatccaattcaggcctatctcatatcacaattattttctgtctgctacaccaagtggcctccttcagttttgcaagacgccctcagtgccaaggcatgagccctgaccagggagtcagagaaactttttctttctttctttttttctctttctttctttctttctttctttctttctttctttctttctttctttctttcttttcttttcttttcttttctttctctttctttctttctytttctttctttcttttctttctttctttttctttctttccttctttctttccctttccttccttctttctttctttcctttttctctttcttttttctttttcttactttctgtctctctttttttctttttctcttctttcctttctttcccttccttccttcctttccttttcctttttttcttccttccttccttccttcctttcttttcttcctttctttcttttttatttgatggagtctcactctgtaagccaaggtggagtgcagtggtgtgatcttggctcactgcaacctctgcctcccaggatcaagtaattctccagcctcagcctcctgagca

SEQ ID NO: 526187 - DNA, 575 bp, Homo sapiens
ggtgcgccaccatgcctggctagttttttgtattttagtaaagacggggtttcaccatgttgcccagggtggtctcaaacttctgacctcaggcgattcacctgcctcagcctcccaaagtgctgagattcagagaaactttcatggaggggggacagatggagtcaagwcttgtggggtgaacaggagtaccacaggtagaacgaggttgtgaaagattttccagacagttggaagagcatgtgaaagacagattttgagaaagtcaagtctggggaactgcaagccttttggcacaagaaagccactgtggattgcagaggcaggatgcctagattcaaatcccaactggtacacttctaagctttgtaactttggcaagtttttaccctcttttttcttatctataaaatatagatagtaatagtacctacctaataaagttgtcaaagagtaaatgatataatatatgtgaagcattttgtccagtgataggaacccaggaagggctccatgaatattatatattattattattctaaagtagctggaatacaatgttcaaaggagagagt

SEQ ID NO: 526188 - DNA, 537 bp, Homo sapiens
tctttcttgtataaacaccacctatctaagatgcrtcttttaaggttcctcaaagtgaaacaatgaactaaaaccatgtgtcaaacaatctgaatgtcgtcttaggcttcaatgattttcctcaataatttacgctcgtgtatttttaaaagcaatttgattttgtctggtcattccaaaatacccaatttaattttcacagaaaaaaacaattcattctttttttttgttgttgttgcattcatatttcagtggcttatgtaacatttaaattacaaattacaacagtgattgcaaagggtatttaaaaaaaagcattggggcaaatagcaatccacctggtaggagagaagtgtgtttgtgagccttgctgttggggttcagaggccatttatggagggtgggtggagatggggtggctgtggaaggcctgccctggctgctgccgtcctcggccaccgcgtctctcctttccttggtgtctacactgtgccttggggcctggaatcccctgccatgcctcccattctaaggtgg

SEQ ID NO: 526189 - DNA, 419 bp, Homo sapiens
tgcagagcctcggacaaattgcccaggaactttctggtttctgtgctcctcggtgaggaacatcatattttgcatcgcccttacagcctaaaacccacccacccaggccgcgccctggttggccactgtcccctccgaggtgagctcctccccagcgagctccatccttcccccacctccgcytcgccggctccgaaacgctcctgtccattctgaaaagatgggtattgaggcaccccaacaggccaggaaaagatccctgtaggattattttctacaaggccttttcctgattttccttaaaaaagcaaaacccagggcccgcgggatccagccacgcagtggtcctctgggctgcggccaggccgctccggaggtggctgtaagaccccagcgagcccccagcgagctccctggca

SEQ ID NO: 526190 - DNA, 617 bp, Homo sapiens
cacaggcctttttttaaaaaaaaaaaaaaatagttatccwctccgttcagcgaatatgtacaaaacatatgccagccgccagcactccggcacagactctatgatgaaacaaagctgaggaacatactctaagtatcatagaccatgagatttgaacacccaaacatcaatggtttgcctgctggtgtgtttaagaaagaaaaggtgaaatcgagaaaagacacttggctttattgacttatttctgccttaacagggagttggggtgttttatagctcatccattgaatgctgttattttacagacattatgaacacatttttatttatttattttgagacagggtctcactgtgtcgcccagggtggagtgcagtggtgtgaccacggctcactgcagccttgatctcgtgggctcaatcaatcctcccacctcagcctcctgagtagatgggagcacaggtgcacaccaccgtttttctgtatttctctgtattttttgtagagatggggtctcactgtgttgcccaggctaatctcaaacttctgggctcaacagagcctctcacctcagcctcccccagtgttaggattacaagcctgagccaccatgcgca

SEQ ID NO: 526191 - DNA, 538 bp, Homo sapiens
ctggggtgagacgcctgccacaggtgagaagtgayggaatcaggtcgaccccagtgcctctgctcctcccatggcaacacaggaggccccatccctttgttagtgagccacagacacagtgcagccaccggatggtgcggaagcccgaggcctgccctctgaccccctcccactgacggccatgaggaccctgtccctggagcatctccttggggtaaggcttcgatccttatgcagaaccatgtgagggtgcagagtgtctcatctgtcacctgtgccttagtgagaaagaggaacagcaagtcagggaacctactcggccaaggccggacacggcacaggcctcaatgctcaaggcatggatggaccatccccggcttgtctgaactgtagtcctgtgtgtttccaggaacgcatgctttctaatggttcctgtaatccattcttattgttattatttggaaagacctggaaggagagactggtgagctgcatgtgtgttctgagcctgggtgcccactatgtgtcctccctctcc

SEQ ID NO: 526192 - DNA, 538 bp, Homo sapiens
ctggggtgagacgcctgccacaggtgagaagtgatggaatcaggtcgaccccagtgcctctgctcctcccatggcaacasaggaggccccatccctttgttagtgagccacagacacagtgcagccaccggatggtgcggaagcccgaggcctgccctctgaccccctcccactgacggccatgaggaccctgtccctggagcatctccttggggtaaggcttcgatccttatgcagaaccatgtgagggtgcagagtgtctcatctgtcacctgtgccttagtgagaaagaggaacagcaagtcagggaacctactcggccaaggccggacacggcacaggcctcaatgctcaaggcatggatggaccatccccggcttgtctgaactgtagtcctgtgtgtttccaggaacgcatgctttctaatggttcctgtaatccattcttattgttattatttggaaagacctggaaggagagactggtgagctgcatgtgtgttctgagcctgggtgcccactatgtgtcctccctctcc

SEQ ID NO: 526193 - DNA, 538 bp, Homo sapiens
ctggggtgagacgcctgccacaggtgagaagtgatggaatcaggtcgaccccagtgcctctgctcctcccatggcaacacaggargccccatccctttgttagtgagccacagacacagtgcagccaccggatggtgcggaagcccgaggcctgccctctgaccccctcccactgacggccatgaggaccctgtccctggagcatctccttggggtaaggcttcgatccttatgcagaaccatgtgagggtgcagagtgtctcatctgtcacctgtgccttagtgagaaagaggaacagcaagtcagggaacctactcggccaaggccggacacggcacaggcctcaatgctcaaggcatggatggaccatccccggcttgtctgaactgtagtcctgtgtgtttccaggaacgcatgctttctaatggttcctgtaatccattcttattgttattatttggaaagacctggaaggagagactggtgagctgcatgtgtgttctgagcctgggtgcccactatgtgtcctccctctcc

SEQ ID NO: 526194 - DNA, 631 bp, Homo sapiens
tgcgggttcccagtgcatgggaacggtcctctgagaccacgtgggagagaattaattacacattggctttgacaagctcaacagtgggaagacagctttcattctctcccttctttcatcctctctcagaaaagctgagcatcacagaccgtcccaaccacctcctttctggtactgaccaaaacccagtaatgatcgcgtggagggtggatgctgggtttggcaattgctgaatgggagctcgaatgagggagccttgggatgtgactcattcacgtcctctctgctttgctctttgaatccaagcaactttattacattttccctcacatcagtccacttaaaaaactcctcatgtggagtgagtggggttagaaacagaggctgcagtcgtcactggagatggggcccttgtgagggaagcagatggcaccatcaggagaaagaacgttcaaatttaaacagcggaagagaacagggaaatgcttttaaaaatgctgggatgattgtggggtctttaattctcgattctctgggcatcactggacacccgacatctgagaatgctgctgggctcctgaraagtcacaattgctgcccaacattagttgttttctctgagctcaggcca

SEQ ID NO: 526195 - DNA, 669 bp, Homo sapiens
tggtgtgagcccaggtagagcaaactagggaaaggctggcacgggagtgttttctccagcatgtgtactggatgcgtcctttctaggctaacctgatgtcactgttgggccaagtgccccatccagggatgcgggcaggcggctgagctggccagggcacaccagatggcaggtagggccaatgacctgtgtcttgtttggaatataaaygctgttttgtgttgtaactgcctaaaaataaggcccagtcttatgtgctgccttgacatctggtgagactgggaaggcctccaggggctcacctgcaagctcctctctccaccctgcaactgtggatgaggggccagccagccacctcctccccagggacaggcacaggccctgctggtcccagagaagccgcctccatgctgtcagccccagaatgactcaaacaagcccgtcacaccttcggcaaggaccagggaccccaccctctcgttcctatggagcctaccacccgtggtgcctgaggctgtgtctgtcctgcgtggagcctggcgtggcctgcatgggggtgtgggtcctcctccctgaggctgtgttggtgaccagtaacccgtgctgaccgcgggtgaccagtaaccggtgctgaccgcgggtgaccagtaaccggtgctgaccgtgggt

SEQ ID NO: 526196 - DNA, 669 bp, Homo sapiens
tggtgtgagcccaggtagagcaaactagggaaaggctggcacgggagtgttttctccagcatgtgtactggatgcgtcctttctaggctaacctgatgtcactgttgggccaagtgccccatccagggatgcgggcaggcggctgagctggccagggcacaccagatggcaggtagggccaatgacctgtgtcttgtttggaatataaatgctgttttgtgttgtaactgcctaaaaataaggcccagtcttatgtgctgccttgacatctggtgagactgggaaggcctccaggggctcacctgcaagctcctctctccaccctgcaactgtggatgaggggccagccagccacctcctccccagggacrggcacaggccctgctggtcccagagaagccgcctccatgctgtcagccccagaatgactcaaacaagcccgtcacaccttcggcaaggaccagggaccccaccctctcgttcctatggagcctaccacccgtggtgcctgaggctgtgtctgtcctgcgtggagcctggcgtggcctgcatgggggtgtgggtcctcctccctgaggctgtgttggtgaccagtaacccgtgctgaccgcgggtgaccagtaaccggtgctgaccgcgggtgaccagtaaccggtgctgaccgtgggt

SEQ ID NO: 526197 - DNA, 669 bp, Homo sapiens
tggtgtgagcccaggtagagcaaactagggaaaggctggcacgggagtgttttctccagcatgtgtactggatgcgtcctttctaggctaacctgatgtcactgttgggccaagtgccccatccagggatgcgggcaggcggctgagctggccagggcacaccagatggcaggtagggccaatgacctgtgtcttgtttggaatataaatgctgttttgtgttgtaactgcctaaaaataaggcccagtcttatgtgctgccttgacatctggtgagactgggaaggcctccaggggctcacctgcaagctcctctctccaccctgcaactgtggatgaggggccagccagccacctcctccccagggacaggcacaggccctgctggtcccagagaagccgcctccatgctgtcagccccagaatgactcaaacaagcccgtcacaccttcggcaaggaccagggaccccaccctctcgttcctatggagcctaccacccgtggtgcctgaggctgtgtctgtcctgcgtggagcctggygtggcctgcatgggggtgtgggtcctcctccctgaggctgtgttggtgaccagtaacccgtgctgaccgcgggtgaccagtaaccggtgctgaccgcgggtgaccagtaaccggtgctgaccgtgggt

SEQ ID NO: 526198 - DNA, 383 bp, Homo sapiens
aatgcgctgtgagtgacgggggaccctgggcrgtgagtgcagacaggggtgtgggactgctgcttccagatacaaaatagctactcccgttgcagcccaaactggagtcagcatctactgggcctgcaggaatgaacgccttactaatgaccatgaattcagagtgcgaggaagaaccaggcctgtttagtattggggacattccagatttagggatatggagggctctgcttattaggtcatgggctttgtccatgtggacacacattgggttggaaatggcccttttcacaaagcgtgccttctttcctcatctggtgtgtcttcctcgaccgcagaagctggagagcttgcaggagccacggttcctgacccctctgcag

SEQ ID NO: 526199 - DNA, 476 bp, Homo sapiens
ctggttgtatgtctttgacctgaatctggtggttttggtgcacctgattccccattttcaacttgtggcaaaggctgtcagtgggtcaggtctttggggttctaagagccaatcctggaggtcccaccaaagccctgtctgccagccctgctccagggggccctcagcttgccctggagcccccgcggtggtttctgtttcttttgctgagccatcaatggtacaactcactgttccccgaggaagtagaatatctttgttcatttatttattccttcatttgttgattcattagttcttttatttaactatagttatataaataactatagtatattagtttttatttaactataatataaagagttaaataactatattgttaaataaaagaactatttaatagtaataacttttattactaacrctgaacacctatgacttgtaggtgctttcccaagctctggggacataga

SEQ ID NO: 526200 - DNA, 571 bp, Homo sapiens
atacatatcataggagtggggccagtagctttataagaggaggaagagaagctagcatgttcaactctcctgccatgtgaagccctragccatctcaggactctgtagagagtccccatcagcaagaaggccctcaccagatgaggccccttgactgtggacttagtctctataactgcaaggaataaattgctttctctataaattatccagttccaggcattctgttataggcaacagaaaacagaatgagacaatcacctttctagaaaggcatgtcctactatgaatacatcccattttacattaagttcagtgagaaattatacacatgaaaaagtttttctacttttaacattactcaaatattaatttttatgacatgaatatatttttcttctaaaagattcaagcaacacatagggctacagggtccgccctgaagatggttcactcacagggctgcaagttggtgttgcttgcaggtaggtgaatagaataaaatgtagaagtatctcatgtcctttcattctcccaattgttaatcttatccaagaggcaattactgtca

SEQ ID NO: 526201 - DNA, 571 bp, Homo sapiens
atacatatcataggagtggggccagtagctttataagaggaggaagagaagctagcatgttcaactctcctgccatgtgaagccctgagccatctcaggactctgtagagagtccccatcagcaagaaggccctcaccagatgaggccccttgactgtggacttagtctctataactgcaaggaataaattgctttctctataaattatccagttccaggyattctgttataggcaacagaaaacagaatgagacaatcacctttctagaaaggcatgtcctactatgaatacatcccattttacattaagttcagtgagaaattatacacatgaaaaagtttttctacttttaacattactcaaatattaatttttatgacatgaatatatttttcttctaaaagattcaagcaacacatagggctacagggtccgccctgaagatggttcactcacagggctgcaagttggtgttgcttgcaggtaggtgaatagaataaaatgtagaagtatctcatgtcctttcattctcccaattgttaatcttatccaagaggcaattactgtca

SEQ ID NO: 526202 - DNA, 633 bp, Homo sapiens
ctgtgatgggccatccctgccctagagagcactatctctagacttctcccactttccaaactaccctttttctagccattcttttgtagatcccacctcctgatactaaactctttatgacgttctttacttatgtgctctagtctctatcagtgtttgttgagtgaccacataataaactgaacccgttatttttcttgagatatttcaccttccctgaaaactcagtatgcataacggatttacagscttctcttgtcttctgcccccaagtatagtttcctctgcttgaagagctcatagcccatagaaaataatctagacccctcagcacggctcctactacccactgcaatgggctcagtccacctttctaccctcattcccagcactctgctcttttcaccttcaacttctcctttgtctgtgagacccctgctgcctggcataccctggcccaatttgttcatctggataaaaggcttattttaaatgtcactgctccttggttgcttcttgtagcacacacttgtgtaccttcctagcatcattaactcctcctttatctgagttcctagagcacttgatacaacctctattatagcgtttacattgccactttatttgtgtaga

SEQ ID NO: 526203 - DNA, 633 bp, Homo sapiens
ctgtgatgggccatccctgccctagagagcactatctctagacttctcccactttccaaactaccctttttctagccattcttttgtagatcccacctcctgatactaaactctttatgacgttctttacttatgtgctctagtctctatcagtgtttgttgagtgaccacataataaactgaacccgttatttttcttgagatatttcaccttccctgaaaactcagtatgcataacggatttacagccttctcttgtcttctgcccccaagtatagtttcctctgcttgaagagctcatagcccatagaaaataatctagacccctcagcacggctcctactacccactgcaatgggctcagtccacctttctaccctcattcccagcactctgctcttttcaccttcaacttctcctttgtctgtgagacccctgctgcctggcataccctggcccaatttgttcatctggataaaaggcttattttaaatgtcactgctccttggttgcttyttgtagcacacacttgtgtaccttcctagcatcattaactcctcctttatctgagttcctagagcacttgatacaacctctattatagcgtttacattgccactttatttgtgtaga

SEQ ID NO: 526204 - DNA, 575 bp, Homo sapiens
gggacacaggctcgggcactacaccaggtaattagctttaaaattttgtagagacagaggtctcattatgagacgtaggctggtcttgaactcctggcctcaagagatcctcccacttcaccctcccaaagtattgagattacaggcatgggccacagaagtgactaaatatttaatacaataatttggccatccatgtaggtcacctatgtccatgtgtgtgtcttatgcccaccttgccctctgcttctctccctaagggagcatggaagattatggtttttataacctcatgatggccaaaaagagttggggacttcaagaacataggcagcatctctttcctycatagtgcccctggcagggctggcatttgaggctgaaattccatggctatcctagtctaacttagcttgacctggcccaggggtgctgcctggactatgaacacttactgggtcccctaacacagtcaagtctgtctgtgtttcccattcaaccctggcttgagtgctgttcactgcacagttctttgctgtggaactactgctcctccattatgtcaatctcctcag

SEQ ID NO: 526205 - DNA, 622 bp, Homo sapiens
ctcaggtgcaagtgtggcagagaagaggaataacacaataaaataaaaccacagataaattataaattaataaagagaagtagagattggctttaatcaggattaaggttttgccacgctagtatgacagaggaagatggggcaagggaatgattataatgatggaccatggaatctagtttcattaaagagagaaatgaggacatagcagatgggggacagtgagaagatgttaattagagtcagcgaattgagggttagaagaattgttgggagtcaaagtgaggtgggaagttaaagaaagaaaaataaaattaaaaagagaaataaggtttcctatattaggctgacttgtcccagaggcagcaacaggcacagcccagacccagggaaagtcttgataatgctatctatctaagaagccaggacacaaaggaatgtgctctggagactctcccagcactccctcaacatagggagaagaaaaacaaattttcatttgttttatggtatgagtttataaattccattctctgtaactggtgacttcaagtattctgttttatctaagtagtggagtggtcataaaccrtctgagcaggccacctgggcgccatagtga

SEQ ID NO: 526206 - DNA, 397 bp, Homo sapiens
aatactgtgtgactgattacatttttgtatgagaatttattaggcataaaagaatattaaaaataaaggatacctctataaaccttaataaaacatatacatttcccataattccaataaaaataccagtgtcattttttttagaaatgrttctaaagattttctaaaacaacacacatgagaaaagataaaaataaataaataagatgaataacctataagacaacaaaatatattatggtatgctataattaaaacctggactagataacacactggattactggaacagagatgatattcaaaagtggctttgagcaagttgaaaaatttagtatataataaaagtgtcacttcaaatccatagggaaaagatggattgtaaacagagttgtca

SEQ ID NO: 526207 - DNA, 537 bp, Homo sapiens
cagtgtcagctccattgtctcagaggccggcggccaagtgagggaccagtctcacccggggggcgtcgagcctcagcgcatcgccccgtcttccctggctgcagaaaaccactaggccggtggaagtgctccgtttaattggtccctagtacgcccccgaaaggaaatggagacgatttccgtcaagttctcttagtatttctgtcatttacagaaaagcagtagctactcacatgtggctcagatgtctgtgtgggggttgtgagccagggcattaaaattgggtgttaaccgtttgccactcagaagaattattagccattggaggaggagcggtttctcttgctaagcggggttaagtgaaacttggctgctctgaattggccagaggagtaaatgagcagagggctgacctgcgtcttccaaaggcagaagcrcaggggaagcccggagcctcttctgagttagtggctttctctgcgaatctcatgcggtctctggagtctgtgttgggatgaaggttaaagcatttacaac

SEQ ID NO: 526208 - DNA, 497 bp, Homo sapiens
ttcgttggtttatttcctgctgtttttctccttcttcctttccctcccccacatcccattttccattagttatcaagtctttacaaygtgtcttataaatatgactgagatgagtcttctttattctgaccttttaggactgccccggatccaatcttcatcatgccctgccagggctaagggaccaggccctaattcatcttcgtgctccagtcttacagttgccagagtgatttatcttaaatgcaaatttagccatgaaacctgtggcttaaaagacttgaatgattttctatcatctgcagcataaagtgcctgctcctccccatgacagacaccttcttgacccgctccctgcccagctccagcctcctctgacacctctcccgactcacatccctgcattttacaacaccgaggtgcttgttctctacgtggaacttagcgtttctgaatacactgactttattcatccccctgtacactgggcatgagct

SEQ ID NO: 526209 - DNA, 497 bp, Homo sapiens
ttcgttggtttatttcctgctgtttttctccttcttcctttccctcccccacatcccattttccattagttatcaagtctttacaatgtgtcttataaatatgactgagatgagtcttctttattctgaccttttaggactgccccggatccaatcttcatcatgccctgccagggctaagggaccaggccctaattcatcttcgtgctccagtcttacagttgccagagtgatttatcttaaatgcaaatttagccatgaaacctgtggcttaaaagacttgaatgattttctatcatctgcagcataaagtgcctgctcctccccatgacagacaccttcttgacccgctccctgcccagctccagcctcctctgwcacctctcccgactcacatccctgcattttacaacaccgaggtgcttgttctctacgtggaacttagcgtttctgaatacactgactttattcatccccctgtacactgggcatgagct

SEQ ID NO: 526210 - DNA, 422 bp, Homo sapiens
aagtctttacaatgtgtcttataaatatgactgagatgagtcttctttattctgaccttttaggactgccccggatccaatcttcatcatgccctgccagggctaagggaccaggccctaattcatcttcgtgctccagtcttacagttgccagagtgatttatcttaaatgcaaatttagccatgaaacctgtggcttaaaagacttgaatgattttctatcatctgcagcataaagtgcctgctcctccccatgacagacaccttcttgacccgctccctgcccagctccagcctcctctgacacctctcccgactcacatccctgcattttacaacaccgaggtgcttgttctctacgtggaacttagcrtttctgaatacactgactttattcatccccctgtacactgggcatgagc

SEQ ID NO: 526211 - DNA, 567 bp, Homo sapiens
tacaggcacccaccatcatggctggctaatttttttttttttttttttttaagtagagctggggtttcacaatgttggccaggttggtctcaaactcctgacctcaggtgatcccaactgacagataaaactgtgtgtatatgtcatgtacaacataatgttttgaagtatacgtacattgtgaaatggttaactctagctaattaaaaaatgttttacctcacatagttattttagtaatgagaacacttaacatctggtgggtttttcaaaaacacaatgttttccaagattacaatgtcattaactatagccaccatgctgtccaatagatctcttgaatgtattcctcctattcaactgtaattatgtatcctttgaccaacatctccccaaccctccttcacccctaaccatgccagcccttggtaaccaccattctattctctacttctatgaacaccaaaattatttaaaggctgtacttgwcaagaaatataaatgtatcatttcaagttcagataatgtgtgtatttaattcttatttacctgccgtttgaagacaat

SEQ ID NO: 526212 - DNA, 612 bp, Homo sapiens
ggtgaccagggctaagaacttgccccagaccaccagcctccctgctgagaaggcaagcagactcacagtttttttgcatctcaggaagcctgcagaagtgatccagttccttcaaagggtctgtggattctctaggctttcctggtatgttcctacagtagttcttgaagcaaaagttcacagtgtgagtcttcacacactgctctctctgtctgatggggagccgcaagctagtcctaactcttatctgtcatcttaatctctgtagttatttctaaactgggctccactacttccccagatgtgtgatcatggcctagttacttatcaatctgggttctagtttttccagctctaaaatgggsatgattatgtctgctttttacgattgttgagggttttgagtaaaagaaattatattgatcataatacattgcttctatttggcctataaaatgattattccatgttgttcaatctcatatttggaaggtttaagcacagtgccataggtgttggcttcataaatggcatttgttatagtgacagtgggagggctcacataaagttgaggaagataaggggtctgcttcacagttccaaatacataaa

SEQ ID NO: 526213 - DNA, 545 bp, Homo sapiens
tgctgtaacaactcagagaattttaatatgtatatacagggctgatgagtaaccacttcaaatattctgcaatggggtctcatcttccctttcaatccttttaggtggaggtgctagagctgctgtgaggggcccagaaaaatgaatgggcatgggtgcatgttcaggggttcacacaaggagtagaattagaactggaattctgaggggaagatccacaggaggaaaagaaatgtatcttttcacaataaacatatacgtatgcatgacttttataattcaaaaagtgaattttttaaaaaatctggataaaccccatatatcatcatgatkaagaaagtatccaataaaaaaggttcggaaattaatttgaatttaacaagtgagtttgcaatttaatttactaaaaggtgagtatatgagtggcattacagagtctacagacaaggtttggttggcacctgtgtttatggacctcttgtaataaatcaagggaacatggggatgaggcccaggctgtactggagcagggattgcaattgcca

SEQ ID NO: 526214 - DNA, 594 bp, Homo sapiens
cagtttacttctcatttttcagaatagagattgattatgaaggaggcacaaaacaaaccaataaacaaaaaacccaaatatttgattatggcattaactttatggtcatttctagaggagtgtgtgagagacattaactaggttctgattcttggaatagattagacattggccttgcacccagctccacggaatgatgtccccagaaggccttgcttgtgcctggacactgatgtctgaggagtacgcttccctgagctttccatgggtcaatcttagagggcagggctccatgatcctggccttgactgaagggggaaggatagattggaggtttttccaaagactcactggaatttggagataaaatatttaataggttgaaagcctttacaagggagaactctggtctccctgtgracgatgaccaaatatggtaaaaatgttcccatttctggtggatcaatcagtccttaaatatttctagaataacttccatggttaaaatctggatccagattttctaatgagcaatttgcagaaagaacccacctgcatcaaatggcaaagtcagaaccacgtgcaagagtgaac

SEQ ID NO: 526215 - DNA, 566 bp, Homo sapiens
cttagttacagctccacgtttgccttatttgtacacagtctgaacagttagctgcctttgattggtccaaacttggtgattggcacaagcataggtgacagtctgtgtacgcatccagttagattacagttcactatgtatggagaaacctttaggctgamcttaaaatatgtaagaaaccagctttaggctaaacctaatttaacacaggtaaatctcaatttaaatactattggtaaccttttctcattattggctgacaaatgatgtcccttttcctttagaaacattttcaaagaatccaatccttttagtcgtcaaatcaagtgtttcttagttttcaactgagtaagaaaactttttcatttattatttactagggtcaggagcatttagtagcaatgataaaagtgcagatcagagactacttatattgaacagaagtgctttataaggtctctattcaactgacattctgttaagtatttctagtcaatggattcctacgcggactgttgaaactttaagctcaggataagtggtctggatgtgcagtgcagtttagt

SEQ ID NO: 526216 - DNA, 566 bp, Homo sapiens
cttagttacagctccacgtttgccttatttgtacacagtctgaacagttagctgcctttgattggtccaaacttggtgattggcacaagcataggtgacagtctgtgtacgcatccagttagattacagttcactatgtatggagaaacctttaggctgaacttaaaatatgtaagaaaccagctttaggctaaacctaatttaacacaggtaaatctcaatttaaatactattggtaaccttttctcattattggctgacaaatgatgtcccttttcctttagaaacattttcaaagaatccaatcyttttagtcgtcaaatcaagtgtttcttagttttcaactgagtaagaaaactttttcatttattatttactagggtcaggagcatttagtagcaatgataaaagtgcagatcagagactacttatattgaacagaagtgctttataaggtctctattcaactgacattctgttaagtatttctagtcaatggattcctacgcggactgttgaaactttaagctcaggataagtggtctggatgtgcagtgcagtttagt

SEQ ID NO: 526217 - DNA, 525 bp, Homo sapiens
gaatgtgccaaacattgaacagcatattctagccctcccttcaaacagtccacttgctctcaaatggcaatgaattctattcttttttaaggaattgcaagatttttttaaagcattgagggttttgtttgtttgtgttttttgtttttttgagatggagtcactctgtcrcccaggctgaagtgcaatggctcgatcttggctcacagcaacctccatctcctgggttcaagcaattctcctgcctcagcctcccaagtagctgggattacaggcacctgccaccacacctggctaatttttgtatttttagtagagacggggtttcaccatgttggtcaggctggtctcgaacacctgacctcagtgatccacctgcctcagcctcccaaagtgctggaattacaggcgtgagccaccgtgcccagccaagttacattattaaagcatttggtcagctcctttattttgctttgttgaaagtcagcaaaaggggaaggcagagattttaagaaagtttaaaaa

SEQ ID NO: 526218 - DNA, 525 bp, Homo sapiens
gaatgtgccaaacattgaacagcatattctagccctcccttcaaacagtccacttgctctcaaatggcaatgaattctattcttttttaaggaattgcaagatttttttaaagcattgagggttttgtttgtttgtgttttttgtttttttgagatggagtcactctgtcgcccaggctgaagtgcaatggctcgatcttggctcacagcaacctccatctcctgggttcaagcaattctcctgcctcagcctcccaagtagctgggattacaggcacctgccaccacacctggctaatttttgtatttttagtagagacggggtttcaccatgttggtcaggctggtctcgaacacctgacctcagtgatccacctgcctcagcctcccaaagtsctggaattacaggcgtgagccaccgtgcccagccaagttacattattaaagcatttggtcagctcctttattttgctttgttgaaagtcagcaaaaggggaaggcagagattttaagaaagtttaaaaa

SEQ ID NO: 526219 - DNA, 606 bp, Homo sapiens
aacagcacaagccctggaacactgctcatttgataagaaaagaaggtaccacttcctttcttcttccttcatccctactagttttagaaaaattagggactgagccagaccttgctagttgcctgtccattctcctcttttcaaaaaatctcagctttgtgcaaagtgacaataggtccatctaaaaatactatattttctagtctgcaagccaaggagagaggcctcaggagaaaccagcccttctgacaccttgatcttggacttctagactccggaactgtgagaaaataaatttctgttggttaagccatctagtctgtggtgttttgttaaggcacccctagcaagctaatgcaagactcatattcagaagatagagagagctttataaaacaatatcaaaaagacagtcaatacaatgagaactgtacaaaaaaaattacagaaagcacttcacraaagaggatatccaaataaccaataaacatatgaaatgaaaagtacctcaactttaggtgattcattagttattagggaaataaaaattaaaaacattatatgatactatcacatactcattggaatggccaaaattgaagggat

SEQ ID NO: 526220 - DNA, 529 bp, Homo sapiens
ggatcattttagtaaagtatcttcccaccccctccccaaccactgcccaacatacacacagtgtttggccactgatgttgttgcttaggtagacactattcttagtgggtcaacagtttctatgggaagacaatagcattggtaaggstctcttattctcttttcatagctacattcagctttttaactccactaattgcttgctgattgctgtattattttcaacaattccatgaagcctgagtagctctacaaacaaatcctatcaaattgtggctactttgaaggaactgtttctaaggtcagtgtttgatatttgttgtgaccccagaagggctcctttgcaaatagtccacttatagtctaagatatatcttctttaaatccaccaatctccttccttttgtctttcactataacctccactgtttcttttttgtatgtgtgttcctaggtttaaacttcatgctctactgcaaataaagtaatttccttggggaagagattcagaggtatccattttaggacc

SEQ ID NO: 526221 - DNA, 529 bp, Homo sapiens
ggatcattttagtaaagtatcttcccaccccctccccaaccactgcccaacatacacacagtgtttggccactgatgttgttgcttaggtagacactattcttagtgggtcaacagtttctatgggaagacaatagcattggtaaggctctcttattctcttttcatagctacattcagctttttaactccactaattgcttgctgattgctgtattattttcaacaattccatgaagcctgagtagctctacaaacaaatcctatcaaattgtggctactttgaaggaactgtttctaaggtcagtgtttgatatttrttgtgaccccagaagggctcctttgcaaatagtccacttatagtctaagatatatcttctttaaatccaccaatctccttccttttgtctttcactataacctccactgtttcttttttgtatgtgtgttcctaggtttaaacttcatgctctactgcaaataaagtaatttccttggggaagagattcagaggtatccattttaggacc

SEQ ID NO: 526222 - DNA, 529 bp, Homo sapiens
ggatcattttagtaaagtatcttcccaccccctccccaaccactgcccaacatacacacagtgtttggccactgatgttgttgcttaggtagacactattcttagtgggtcaacagtttctatgggaagacaatagcattggtaaggctctcttattctcttttcatagctacattcagctttttaactccactaattgcttgctgattgctgtattattttcaacaattccatgaagcctgagtagctctacaaacaaatcctatcaaattgtggctactttgaaggaactgtttctaaggtcagtgtttgatatttgttgtgaccccagaagggctcctttgcaaatagtccacttatagtctaagatatatcttctttaaatccaccaatctccttccttttgkctttcactataacctccactgtttcttttttgtatgtgtgttcctaggtttaaacttcatgctctactgcaaataaagtaatttccttggggaagagattcagaggtatccattttaggacc

SEQ ID NO: 526223 - DNA, 497 bp, Homo sapiens
gtttcagtttagaaatgggcccctcccagagtctgtcaacttgctgcatcaggccgcccaacagggtaatattgaaatgtgcattgcttgacattaaatctcctacactctcgtgaatgtgctgttctcgcctcccccttcccagaaatttctcaatgtgccagcagtgtctcccttattactgccagtctcttcctacaacaatctaagaggaattgagaaaatcagataaccagttttgttaaatcagtaacttaatgcactcaagcttcagtcaggggcaaagattcagtcaggggcctctggctgaaggaatttcaggacacttgctccatcaaaagcatggaaagaactctctatrctgcttggtggccaagttttacttctagactgtttcaaaagagcttaggtttctagacatgtcagggtcaaaatatctcaggcaatttggcaaaataagaataaaagcaggaaaacagagaaacctacactcaatc

SEQ ID NO: 526224 - DNA, 586 bp, Homo sapiens
gacgcatcttgtgcagtcagctttacctgcagcaacaaacaataccaacatctcactggcttatgacaacaaccatttctttatatttgaggactgctgatcagggaccactctgctgagctctgctatggtctgctgacccatgcgctctcatagaagacaacagaggctcaggaagggacagatctatgttggtccatgtcagacttcttcccagtgacggtatatgtcacatctgctcacatgtcattggccacagcaagtctcatagccaagctcaaattaaaaaaggaggaaaaccttctataatgaagaaagtgttattctcattctgcctatgtgaaagcagggcaaggtcaggaagggaatagctaattgtgaayaatacatggcacttattagtcaacatgaatttattaaatgcccattatcttttgactctgctaagatactatatgacacacaattaagaaaattagtccttgtttagaagtaaatttttaaaaagagaacagtttaaaaatgattaaatcctaaccaactactgctttacaatctaggttgagatggcaataaatatgttaga

SEQ ID NO: 526225 - DNA, 595 bp, Homo sapiens
gaataatacattttttaaaaccactttatcttgttttcccctatcagttagccagcatggcacataactaacaggcacatcagttatgtaccagaaaattcatgactcattcaacaaatatgtgttggttatctgctgcatgccaggcactgcaccagaggatagggttactctggagagctcacagagctcagtctagcacaaagacatttactagccaatgacacaaaatgatcragaaatttcacattcttttgtcatattatgtttttgaaattttacatgtcaaaaacagtgtacattttatacttacatcacatttcagttgggactagccacatttcaaacccaatgccaacaaaaggctagtgtcttgtactggacaacatgggtacagatattccaatggggacgaaaagcatgcatatcaggagtaagtcgtttcctcaaagaacataaaatctaaccagtagattagccactatacatgcaaaatatatatggtacagaaacataaccgtagaattactcagtaggtaaagaaatctgtaagaaacattaatatataagatactgggtgagcaactgtgtgtag

SEQ ID NO: 526226 - DNA, 587 bp, Homo sapiens
tcacgttcaaactgtgagatggggcattgamattaattgaaataaattaaggaaatggccagaagtgtaaaagaaaacaaaataagagtcatttgttcatttccaagacctagcctatacctagtttggtagaacatcaccaattcctttttgattgggtaaattaagggtgaagaaacttgctgtattaggttcttcccctggagactggcctacatccaaagctggcttctgtttcttgatattcaagctggggctgaaagattaatccaagattgagtccagctcagggattcaacctctttcagtactattggatttaatatctgctgacctgttaatcattttattctatagttattcacttgcttctctcagataggaatcttttaattcctaaaacatggcccaattgattattcataggttgcattttttccaatacaaaacctttagctacaaaccatacttctttcaactgttaaataaaaagatgtttcagaaagcactttctatcagtattcatttatcattatttaacaataaagcttaactaggccttgagtatatatcaagttgaagagcag

SEQ ID NO: 526227 - DNA, 521 bp, Homo sapiens
attatgattagttacaacagcgcacaatgctcctaaaatatagaatgcaacaaagtagcgtcttctctccatggacatggtagtcgcattttcaaaaagtttatggtataataaaaccatgggaaaataatttttaatatatagtagactaactttccaaaaccggaaaattatatacaggattttccttatgggactggtttgaaggatatttgaagggctttaaggactaaaggcatctctgagcaatgcagaaagtctagttactttaatatccaatcactacaagttcatgacaaccactcgacatggtaatacagaaatgtgaatgttrtgtttccaaagtgcctcctgagggtgattctggttttgctcactccacggagatggacctggcagaggcttcaacaaaaaagtcaaaaccccaagctcttgggaactgacgtagaaggaagcaggaagaaggaagatgaggcctggtggagtttcttgactggaaacaattagctgcattgtttttt

SEQ ID NO: 526228 - DNA, 489 bp, Homo sapiens
ctgcaccctctttcctgagcattgaaaaatacagatgagaagcagagggaggttgtagtttctatttggtcacagagagtaatcaagtggaagccagatcaccatttacaagaaagactgaatgggagatttggacatgtacgattctatgagactgtgtgaaatgtgtattcacatagtactctgttaccatagtaaccagtcacgtcaggcttcctaggagtctagggaggagctgtcaactttcacaactagttcattcacaaacaacccttcttacaaaatgctttgtgatggcagtgaccacrtagttaatcatccaaagcaggtcactttttacaatacaagtagatgctcttaacaatttagaaggtacaacaagtatcaaccagaactgtcccaagcaaactgatttacattggaatttatgtctaagtaaagaagaaccatcaagaaacaataactattacactgtgtaacattactacg

SEQ ID NO: 526229 - DNA, 627 bp, Homo sapiens
attgctggttactagaggcacaaattgggaattaaagataaaatttaattatttcaacccaagcagtttcatatatgagaagggaggtgrtgtgagcatgcaaggggacaacgtttttgcttcagcccaagacgcactgaggcttggcaccatttgagagatgccaagcacacttcagaagaaaggagaactaaaataagccagaacggttaaataatgcctcaacccctggagggctggggatcaaataagccagaacggataaataacgcctcaacccctggagggctggggatcaattagaaaacagtcccttagtataaaactgctaaatatctaggccctaaactcttttttgtccatttatttattctttgtattttttttttacttttattttaagttcagaagtacatgtgcaggatgtgcagttttgttacacaggtaaatgtgtgtaatggggatttattgtacagattatttcatcacccagatattaagcctagtgcccgttagttatttttcctgatcctctccctcctcccacccttcgccctccaataggccccagtgtgtgttgttccccaccatgcgcccatgtattctcatcatttagctcccacttac

SEQ ID NO: 526230 - DNA, 528 bp, Homo sapiens
gacacattatgatactcatctggttgccactacatattgtaaatgaaacagttattcaaatagcccaccttaaaatttaaaaaawggaagctcaaaattattattttatcaccttttttttacaaagcagacatggagactgacactattcctatctttcataaggggaaccccttggagtttgtgtctcaccaagtggaaacacctgtctggcttgttcttcctctttctttgaatcttgtgtattacaaggactcatagaagctgaccacccttaaagtggatgggagaaagacaatcagaagtcctaattctccttttaaaaggaacagagaaaatctatgagatgggagactgcagtgaagaatccagtcattattttgattattaaaagttttcattagacctatgttatttcctgaaatgggaaagcaccttattgtaatcacctcccccctaagatgaagatgaaatgtttaatgttctttgggaatactacttccattcttcgtgaagagtgacagagga

SEQ ID NO: 526231 - DNA, 598 bp, Homo sapiens
acttctactcccaagcccctccttccctttcctgtttatcttttagattctggcctctgtgatctcacattaacgccaatagcttttttctggtttccctatcattaattcatcctatccagtgatgatagataaggttttctcaaaggtagcttgtagtatgttccttctttcattagaaccttcagtgtttcccaatgatagaccaaattaagtacaaattgctcactcttgcatttcagagcctccaccatatggcaccaactccctttccagtctcagttcacacatctcctctacaagtaccaacagggtggctcactgctcatcaaaagtgggctatgcatatgccctgatgcctttttctcatgctgttacctcayttggtgagttctcctccacaatgttcccctaaaaaagctcactcttctttcaaagccagtctgatattccacaatattcacaaatcatttttttctggttgacccaacagaatgtattcactttcccatctgaatctctgcagctgttcatactgcctcttctgtcaggttacacatcatcccctggtatagcccgtgtagtgttaatagtatct

SEQ ID NO: 526232 - DNA, 598 bp, Homo sapiens
acttctactcccaagcccctccttccctttcctgtttatcttttagattctggcctctgtgatctcacattaacgccaatagcttttttctggtttccctatcattaattcatcctatccagtgatgatagataaggttttctcaaaggtagcttgtagtatgttccttctttcattagaaccttcagtgtttcccaatgatagaccaaattaagtacaaattgctcactcttgcatttcagagcctccaccatatggcaccaactccctttccagtctcagttcacacatctcctctacaagtaccaacagggtggctcactgctcatcaaaagtgggctatgcatatgccctgatgcctttttctcatgctgttacctcacttggtgagttctcctccacaatgttcccctaaaaaagctcactcttctttcaaagccagtctgatattccacaatattyacaaatcatttttttctggttgacccaacagaatgtattcactttcccatctgaatctctgcagctgttcatactgcctcttctgtcaggttacacatcatcccctggtatagcccgtgtagtgttaatagtatct

SEQ ID NO: 526233 - DNA, 121 bp, Homo sapiens
gaggtagcctgagggggaacttcatttctgtttccatgagggccaccaagctaggaaaggccaatcrcctttaaccccacaaaaaggcccctttgacaagttccgctttgattcacggagg

SEQ ID NO: 526234 - DNA, 483 bp, Homo sapiens
aaacatatatacaaatgtgtgtgtgtgtatatatatatatatatatatatatatatatatatatatgactacgtatgagaggaagcagtataaaagcaaaattgagaaagaagcagaaaaaagggartcaaagctggaccatgttctctgagactgcaggaacccaggccctgacttccctcactcaagcaagtccctcacccaggcttctccccctcataagtacctggctttagcttggctctgagaagagaccagagcagtggagtggaggctgaagccaggggaaagaaggcagcaggcatgccccacacagcaggggatctgagtaagcccatgcagtagggtgagaagaagagtgagcctagctggatcagagttgtagaacagcgtcagtgcagaaacaggggtcgagagcaatgtggacaccagaatcactgctttatcgtagctagcacccctcttttggtggggcctgagtgg

SEQ ID NO: 526235 - DNA, 565 bp, Homo sapiens
tgcgatttctgagaagtacctggcatgtgaactggcttttaacctgcattatctacaataagtaactccacacttyggtttaggttccatttattgccctctgctcgctcttgctctctctctctctctctctctctttctctctttctttctttcttctttggtttgagacagagttgccaggctggactggagtgcagtggcgccatcttggcttactgcagcctctgcctcccaggttcaagcaattctcctgcctcggcctcctgagtagctgggactacaggcgcgtgccaccacgcctggctaattttttgtgtttttagtagagacggggtttcgccatgttggccaggatggtcttgaactcctgacctcatgatccacccacctcagcctcccaaagtgctgggattacaggcgtgagccaccatgcccagccaccctctgctctttcatagctttgcaacagcctctctccatcactagccacatgcatagggatcatagacctgccaatgacaagaggagcacttaacgttaagcaagtgctggccactctgta

SEQ ID NO: 526236 - DNA, 565 bp, Homo sapiens
tgcgatttctgagaagtacctggcatgtgaactggcttttaacctgcattatctacaataagtaactccacactttggtttaggttccatttattgccctctgctcgctcttgctctctctctctctctctctctctttctctctttctttctttcttctttggtttgagacagagttgccaggctggactggagtgcagtggcgccatcttggcttactgcagcctctgcctcccaggttcaagcaattctcctgcctcggcctcctgagtagctgggactacaggcgcgtgccaccacgcctggctaattttttgtgtttttagtagagacggggtttcgccatgttggccaggatggtcttgaactcctgacctcatgatccacccacctcarcctcccaaagtgctgggattacaggcgtgagccaccatgcccagccaccctctgctctttcatagctttgcaacagcctctctccatcactagccacatgcatagggatcatagacctgccaatgacaagaggagcacttaacgttaagcaagtgctggccactctgta

SEQ ID NO: 526237 - DNA, 565 bp, Homo sapiens
tgcgatttctgagaagtacctggcatgtgaactggcttttaacctgcattatctacaataagtaactccacactttggtttaggttccatttattgccctctgctcgctcttgctctctctctctctctctctctctttctctctttctttctttcttctttggtttgagacagagttgccaggctggactggagtgcagtggcgccatcttggcttactgcagcctctgcctcccaggttcaagcaattctcctgcctcggcctcctgagtagctgggactacaggcgcgtgccaccacgcctggctaattttttgtgtttttagtagagacggggtttcgccatgttggccaggatggtcttgaactcctgacctcatgatccacccacctcagyctcccaaagtgctgggattacaggcgtgagccaccatgcccagccaccctctgctctttcatagctttgcaacagcctctctccatcactagccacatgcatagggatcatagacctgccaatgacaagaggagcacttaacgttaagcaagtgctggccactctgta

SEQ ID NO: 526238 - DNA, 586 bp, Homo sapiens
gtttgttacaaagtgaagttctcttcgcaataagccatgtatttttttgtccaaatgcagcagataaggcagtattacttgatcactgctgttgagttttcataaagaatttttaggactccttggttcccttccatgagttctctttaygtaggaaagaccagatgtacctaaggagtttggcccagttgctaactggactgttcacaagtatctcatcttccacaccaacccattgttcttgtctacatgaaagtttgtggttggaaagacagaagcataaagagaataaattactgaattgataaatagcctgtgataaaaatttagattccatcacaatgtcttgaaaattctaagggaaaatgatttgtaacctgaaattccatacccagctaaactattatgcaagtatatgggtggacacagaccttttcttttttttttttaattatactttaagttttagggtacatgtgcacaacgtgcaggttagttacatatgtatacatgtgccatgttggtgtgctgtacccattaactcatcatctggacaaagacattttcagatacataagaactacct

SEQ ID NO: 526239 - DNA, 590 bp, Homo sapiens
ttggagtaatctatgtgccacactgagtccttcatatagtttgtctcattatataattagaatctataaagtaggaaatgacagaygtgcttagaaccaaggaaatagtgcggttagaaccaaggaagtagtaaataaaattagacgtggttagaactaaggaaatgaagattctacacttaaaaataaaaaagcaacttttgagtaattgcagaaaggcctgggattttctacaatttgtagataaatcctgataccatctaatgatgtttactgtggtttctgggcccaggtagagtgtaacaaggaccagcaaataacctcttaaataggtccgggtcaataaccagaacagaaaacttgcttttggccacatctcttaaggaggggccattactagttaagaagagagttccatattaaataaataaataaatgttctggttgtgggttgtttaattcaaattcctattcagttcatctgataataaactatatttaattcatgatgtaattctgtgttccgtaatggtttttacaaagccccaacttgaaaaaacttttttgggtattgcttattagtggatgca

SEQ ID NO: 526240 - DNA, 680 bp, Homo sapiens
  misc_feature (1)...(680): n = A,T,C or G
tgagaaggggcaaggttttgactttatgttgtagttcatgttcactgatgcagagaggtgtttataatgtattgtgagtgacttaagcagagcataaaacaccatattatcccattttgtaaaataaaaaaacaggcaaatgaaacactaaacaacattatttattaacattagaaaatttgaaacatcaaaacatacttcagagcanagaaaatggggaacacctaaatgtttaactataaagcaccagcttaataaattgaggtagatatatatgtagccttgaaatatggctgtataaaggagtactaagagggaantttgtagctrtaagtgcctacattaaaaaagaagaaaaacttcataaaaaagaatgatgcatctcaaagaattagaaaagcaagagcaaaccaaagccaaaattagtagaagaaaaagaaacaataaagatcagacaaaaatgaaattgaaataaagaaaataatacgaaagatcaatgaaacaaaaagttggtttttgaaaagttaaacataattggtaaacttttagccagactgagaaaaaataagcagatccaaataaataaactcaaagttgaaaaaggagacattacaactgatactgcagaaactcaaaggacaattattggttactatgagcaactatatgccaataaattg

SEQ ID NO: 526241 - DNA, 680 bp, Homo sapiens
  misc_feature (1)...(680): n = A,T,C or G
tgagaaggggcaaggttttgactttatgttgtagttcatgttcactgatgcagagaggtgtttataatgtattgtgagtgacttaagcagagcataaaacaccatattatcccattttgtaaaataaaaaaacaggcaaatgaaacactaaacaacattatttattaacattagaaaatttgaaacatcaaaacatacttcagagcanagaaaatggggaacacctaaatgtttaactataaagcaccagcttaataaattgaggtagatatatatgtagccttgaaatatggctgtataaaggagtactaagagggaantttgtagctataagtgcctacattaaaaaagaagaaaaacttcataaaaaagaatgatgcatctcaaagaattagaaaagcaagagcaaaccaaagccaaaattagtagragaaaaagaaacaataaagatcagacaaaaatgaaattgaaataaagaaaataatacgaaagatcaatgaaacaaaaagttggtttttgaaaagttaaacataattggtaaacttttagccagactgagaaaaaataagcagatccaaataaataaactcaaagttgaaaaaggagacattacaactgatactgcagaaactcaaaggacaattattggttactatgagcaactatatgccaataaattg

SEQ ID NO: 526242 - DNA, 623 bp, Homo sapiens
taattcagtttttcccccttaaaatacaatcacaattatttattgagcactgacaattggaaaggcactgggctaggtactggaaagaattataaaatgacatggaatctcttcccgtggcacttggttcatgcttcctttaatttttttcccccacttcaaagtayttgaggtgtcctagtccattttgtgctgctataagaaaataactgagactgggtaatttatatagaatagaagtttacttctcacagttctggaggttagagtttcaagatcaagttgactgcaggttcgggcatctgatgagggctgctgtctgcttccaagatagctccttgaaaactgcatccttcagagggaggagcactgtgtcctcacatggaggaaggcggaaggcaaagaggaacaaactccctttgtcaagttgttttgtaagggtgcctgatcccattcttgagagaggtgctctcatggcctaatcacttcttaaaggccccaccttctaatactattttaaattttggaggggacatgttcaaactatagcagtcgagtatggtattctgatcaccattgtatttatctgcttcagacaaatttggagaatttgacttaaagca

SEQ ID NO: 526243 - DNA, 632 bp, Homo sapiens
ttgatagccccaaattccattccagcacttctttgctatatagtctggccatcatccatcccccttagaccagatgtaatacattgtaggatgaagtaggtgtttcatgtgatggaatgggtattaaccatcccatagattggattaattttagaatgtcacatcacttcaagtcttgttggcatgctcagaacttatgctttctgaggcaacttgagtggctgcctacagcaggatgaatcctgtggcttgtgacaaacctggcttctgcctgtgtctatgaggcaccacggcaaagatgccatggctctgaatcccagcttcactgtgcttagtacatggtctggaacagagaatgcacttcaygtatcttcattatcaccactgccacaactaccagatgagcttagtcaacctgttcactgaggcttcctgagagtgatgcctattttatttaccttgcaatattattgtgaaaattataagaaagtttgcataaaaagtaatttgcatagtgtccaataaagagtagaattaaggaaaatgtaactactactattattgatgttgttgttactattattatcactactgaggctggaagaatatctacttctgctgtgccatcagta

SEQ ID NO: 526244 - DNA, 582 bp, Homo sapiens
tacttgaaacagaatatccaagaagaggagaaaaagaaatggctacartagatcagtcctccaccaggagtggcttgaatctcaggggaggtttgacaatgtctggagacatttttggttttcacaacaatgggaagggggtttgtaccactggtgtctagtgggaggtcccaggaagctgctaaatgtcttacaacatgcaggacagtcctctacaacaaagaactattcagtccaaaatgtcaataaggctgaaaccctgaaatagaggaagacaaagaggtcttcatatatcctgcagtttaagaaatgggttttaaatatttactgagcatctattatgtatataaatggtgctttttttatgagatggtccaaggaataaaagtcacattcacgaacatcaaaaagtttccagtttacttggagatggtacatacacaatgaaattgtgtgttatttattacagcaatacttcacttgcaatggagattgatacttatattggtttgctagggctgccataataaagttggcttaaataacagaaatttattttctttcaattctggaggctgtacg

SEQ ID NO: 526245 - DNA, 637 bp, Homo sapiens
ggctgttccctctgtttggaatgctcattccaccccaacgcctctgtggtaggctgaattatggtccccaaagatatccaggtcctaatctctgagacctttgaatgttaccttaaatgatatcagggattttgcagataaggataaagggactctcctgaaatggggagactgtgctggattatctgggtaggccccgagtgtaatcacaagcatccttataagagggaagcagagggacgtctgactcagaaggcagaaggcaatgtgacaatggaaacagaragatttgagaatgccatgacattggctttgaagatagaggaaggggccatgggcaaggaatgttctctagaagctggaaaaggtaaagaaacagattttcctcaggagctgctgagtggatgtggccctgcctatatcttggtttctgcccagtgaaacccattttggacttctggcctccagtaagagagcaggtttctgttgttttaacccacaaagtttgtggtaatttgttatagcccccagaggaaactaatacaatgacttcatgtttgagcaaatgctttgcactccccagagtaaaagaggagagccctgaccaagggtctagaacaataccacccaataaggt

SEQ ID NO: 526246 - DNA, 637 bp, Homo sapiens
ggctgttccctctgtttggaatgctcattccaccccaacgcctctgtggtaggctgaattatggtccccaaagatatccaggtcctaatctctgagacctttgaatgttaccttaaatgatatcagggattttgcagataaggataaagggactctcctgaaatggggagactgtgctggattatctgggtaggccccgagtgtaatcacaagcatccttataagagggaagcagagggacgtctgactcagaaggcagaaggcaatgtgacaatggaaacagagagatttgagaatgccatgacattggctttgaagatagaggaaggggccatgggcaagsaatgttctctagaagctggaaaaggtaaagaaacagattttcctcaggagctgctgagtggatgtggccctgcctatatcttggtttctgcccagtgaaacccattttggacttctggcctccagtaagagagcaggtttctgttgttttaacccacaaagtttgtggtaatttgttatagcccccagaggaaactaatacaatgacttcatgtttgagcaaatgctttgcactccccagagtaaaagaggagagccctgaccaagggtctagaacaataccacccaataaggt

SEQ ID NO: 526247 - DNA, 600 bp, Homo sapiens
tccaccttgggagactgatttgccagaggcctctcctttctatctgtgcttctgaactgggcttgaatcaaagccaacctactgccactgctctaacttgactgcattgtttatggtaatccacgtggaccctgaaacctggtcgtctgatgcactacatgcatgcacagactgagggcagccttctcagcatcagcacaacctctgcagtgagtactgctcataagatcagtgcagggagcagcagatgtttgctccaaccttctgcagtacatgtagtagcaatcgcagggctgaggctctgtgggcagtctcccaatttcctcctagggagaaatgcatacagaggcttagcaccacagttgggtgctgttcacttctgtctagttaaggagtcattattagccagaaaggractatgatgtcagtttggtctttgtggatttcctgactcagtgtttatgaaggagacacattagtaatggtctaagatatctggtccaatttgtatcaaacaatagtcgtttctcattttccattgctgtggtaattttaatgcattctcctctgtgaggcagtggaaataaataccatggagga

SEQ ID NO: 526248 - DNA, 621 bp, Homo sapiens
aagcttgtgagttagaatatcagattgaggccaggcatggtggcttatgcctgtaatcctagcattttgggaggccaaggtggcaggatcgcttgagctcaggagttagagaccatcctgggcaacatagtgagaacttgtctctacaaaaatgttaaaaaattaggtgtgctggtgtgagcttgtggtctcagcaactggagaggctgagktgggaggatcgcttgagcccaggagggtgagcctgcagtgagtcatgttcatactagtgctctccaacctaagtgaccgagtaaaactctgtctcaaaaaaaaaaaaaaaagaagaaaaacaaagaaagaaaaggaaagaatatcagattgagggactctcctagaagtttgcagaaaagggtcaagagataggaaattgagaagaaaagccaaagctaaggacacagatagaattagtggaaatatctattattcatctaataggagtcccagaaagaaaaatacaaaaaaaagaaaagaagaaatatttggagaaataatggagattaaataatggagattaacagatgcaattacagatgcaaaaacatattaaaagacccctagcaagataatgagaaccccaca

SEQ ID NO: 526249 - DNA, 621 bp, Homo sapiens
aagcttgtgagttagaatatcagattgaggccaggcatggtggcttatgcctgtaatcctagcattttgggaggccaaggtggcaggatcgcttgagctcaggagttagagaccatcctgggcaacatagtgagaacttgtctctacaaaaatgttaaaaaattaggtgtgctggtgtgagcttgtggtctcagcaactggagaggctgaggtgggaggatcgcttgagcccaggagggtgagcctgcagtgagtcatgttcatactagtgctctccaacctaagtgaccgagtaaaactctgtctcaaaaaaaaaaaaaaaagaagaaaaacaaagaaagaaaaggaaagaatatcagattgagggactctcctagaagtttgcagraaagggtcaagagataggaaattgagaagaaaagccaaagctaaggacacagatagaattagtggaaatatctattattcatctaataggagtcccagaaagaaaaatacaaaaaaaagaaaagaagaaatatttggagaaataatggagattaaataatggagattaacagatgcaattacagatgcaaaaacatattaaaagacccctagcaagataatgagaaccccaca

SEQ ID NO: 526250 - DNA, 636 bp, Homo sapiens
cagctgctatggaaaacaatatggcaattactccaaaaattaagaatagaactattatatgatccagtaagcccacttctgggtatgcatcctaaataatggaaaggagggtctcaaagagatatttgcacacccatgtttatagcagcattatccacaatagttaagaggtggaaacaacccaagtgtccatggacagatgaatggattaacaaaatgtgtatatccacataatgaaatattactcagccttaaaaaggaaggaaaccctgtcacatgctacaacatggatgactcttgagaacgttatgctaagtgaaataagttagttacaaaatgacaaatactgtgtgattctacttacattagatatctaaagtagtcaaatacatagctataaaacatagaatgaaagttactagggaatggggataggagacaaatgagaattgttttttaatgggtatsgttttagttctgcaagaagaaaaaatcctggagatctgattcacaacaatgtgaatatacttaacactactgaactgtacacttaacactagaaagttatgacatgtgcttttttccacaataaaaaaatacttacagttcatatttttcactccaactggatacagc

SEQ ID NO: 526251 - DNA, 606 bp, Homo sapiens
aaaaaaacatttttgatcatgtcaactccctcatctatgataaccatccaaacctcagctcctcctcctttcctttgaaactaaaataggaagcactggcatgaaaaacttctgctttttaaagtctcaaaactggttacttgtatttaaaagcctttttgcctgtttaaaactaaaaacacttttacrccttcattaaagttatgaccgatgtgtttaattttaaagacatagctgccattcttaattacttcctctacctttaacatccctgtcttacataaaatattcaaaaaaaaaaaaacaatgtgaggccgtgctttggattccatgtggccaatttcactctgtggcagttgccagcagaactccacatctagaacaaccagtatgtgcctaaggcctttcctgttctttttgtttccttgagtttattcctgtcaggtgtaagcactccagaaatgtagaattatgacataggaactcacactgagtcatagctggaactcatctcttctgagttcacaattaaaaacaaatgaaatctaaaattacattgaaaacataaaggtagatggaagtttaaagtgcagatgtggcttcagc

SEQ ID NO: 526252 - DNA, 328 bp, Homo sapiens
tgccacactctttagatgaagttyatttatgagactttctttatatagcctgtatagttacataaactagagtcaatcaggtttttctaaactgcgctcttgttactagatcttattacagtcttcacatttcagagctaaattaaaaaaacacacacatttagccatatgttttctatggaaagcactaaccatacatttgaaaatgagggtgactttcttttttgtattttgcagccaggatattttattcaccaaaattaagcgaagcagttcctacttatgaactcatatgaactaattcagccccgtcaaatcgagaaacttt

SEQ ID NO: 526253 - DNA, 567 bp, Homo sapiens
ttaaaagaggagtccaggcaaaacagtaagaacatgggtaagaaatggaaagmcaataaatgtcttgacttgttttcgggactcagactgcctaggcttaaatgcctgcaatgtcactccctggctctctgttcttggcaagttacttcacttcccaggcacctggtacccacctctcagggaacctggtatctatcctatgatgcaaacattctctagttcaaggagatggcctgattaggtgcattcaacagtggctatagacctaagactctatcaacttaaaattagttttatagaggaaatgatacctgataaaaggacacaggaaagaagaaaaaaagttcattttttcttctatatcattatttgtggtccaacttcaccaaagctaccacaacagacaaataatgaaatcagatcagagtgagtttagaattcagaaaagcagaagaaactgacagagattgggagtctccctggaatggatgtagtggtggcaccagcctcatcaggacctggcgatcagaaggatggatcccgcctgggccagcctatcagcaagca

SEQ ID NO: 526254 - DNA, 601 bp, Homo sapiens
ctggaaaggatttcttagtaccgtaattacatttattacatcaatagccgaggaaggtgggggtgggcagggggaatgacaacgttcwttcttaactccagcaaatccagttacatccaaaaagatcgagagatgtaatctaaagaatgaaaattacttgagtgagccacacatatttacataaagcatattcaggacaactagcttcagatcacactaatttctacaaaatcggtgcaggttatagaaatgcgtttttttgtttttttttttttttttttgagatgcagtctcgctctgtcgcccaggctggagtgcagtggcatgatctctgctcactgaaagctccgcctcccagattcacgagtagctgggactacaggcgcccaccactatgcctggctaattttttgtatttttagtagagacgtggtttcaccgtgttagcgagaatggtcttgatctcctgacctcgtgatccgcctgcctcggcctcccaaagtgctgggattacaggcgtgagccaccacgcccggctctagaaatgcattcttatgagtagcagaattccaaggaccaaatgcttttaaaacatcttact

SEQ ID NO: 526255 - DNA, 601 bp, Homo sapiens
ctggaaaggatttcttagtaccgtaattacatttattacatcaatagccgaggaaggtgggggtgggcagggggaatgacaacgttctttcttaactccagcaaatccagttacatccaaaaagatcgagagatgtaatctaaagaatgaaaattacttgagtgagccacacatatttacataaagcatattcaggacaactagcttcagatcacactaatttctacaaaatcggtgcaggttatagaaatgcgtttttttgtttttttttttttttttttgagatgcagtctcgctctgtcgcccaggctggagtgcagtggcatgatctctgctcactgaaagctccgcctcccagattcacgagtagctgggactacaggcgcccaccactatgcctggctaattttttgtatttttagtagagacgtggtttcaccgtgttagcgagaatggtcttgatctcctgacctcgtgatccgccygcctcggcctcccaaagtgctgggattacaggcgtgagccaccacgcccggctctagaaatgcattcttatgagtagcagaattccaaggaccaaatgcttttaaaacatcttact

SEQ ID NO: 526256 - DNA, 627 bp, Homo sapiens
ccgccctgcctgcctgcctgtgtggtctgcctctcaaagtcttaatcgcaagtaacaacaaacttggatcattaccagaagagataggtcagctcaaacagttaatggagctggtatgttaccgatttttaagatgctcttttttgttggttgactgatcatagcctctcaaggtattcagaaaacctttttgctacggttggacaaggtagagcctctgttgtttgagggcaggtatatgataaagacattaartggggagaggaacagctttgaaacttcactgtgacagacacagttcctggaatttaaaggcttcctgtaatttacagctcctgaagtttgcaggatttgccgtttttgaagtttatgggctatcatgttgtagttagtattttcagattgcatataaatttgtaaaaaattatggctaaactgccaaaataatctccaaataagttagtaggccacacttcatgaaggtataaaattaagtcagaagacagaaagaatggggtgctctgattctgtcgagattttagaaatcattgtcgcaaatcgttgtaattttaaaatgtgaccgtgtccctagggatagaaaaggagaacaagctatagatgagcaga

SEQ ID NO: 526257 - DNA, 627 bp, Homo sapiens
ccgccctgcctgcctgcctgtgtggtctgcctctcaaagtcttaatcgcaagtaacaacaaacttggatcattaccagaagagataggtcagctcaaacagttaatggagctggtatgttaccgatttttaagatgctcttttttgttggttgactgatcatagcctctcaaggtattcagaaaacctttttgctacggttggacaaggtagagcctctgttgtttgagggcaggtatatgataaagacattaagtggggagaggaacagctttgaaacttcactgtgacagacacasttcctggaatttaaaggcttcctgtaatttacagctcctgaagtttgcaggatttgccgtttttgaagtttatgggctatcatgttgtagttagtattttcagattgcatataaatttgtaaaaaattatggctaaactgccaaaataatctccaaataagttagtaggccacacttcatgaaggtataaaattaagtcagaagacagaaagaatggggtgctctgattctgtcgagattttagaaatcattgtcgcaaatcgttgtaattttaaaatgtgaccgtgtccctagggatagaaaaggagaacaagctatagatgagcaga

SEQ ID NO: 526258 - DNA, 630 bp, Homo sapiens
ctctcttagcagttagagaccactgtttcctcaacctgtacttcctaaaacgcaggtttctgcctaktttttttatgcccacgagccttaattatagcctcatcctttattatgtccgttacctgaatgccacctgatgtcccatcttcagtaggttttcctttgtcttcccacattttagtatctcccattctgcttaaattgcagatcacagacctggcccttctgatatcctcagacaatagcaacgggtatactttattactgaagggcagaggagttgcctgaaaaaaaatgtatcacagtgatttgatctgaatgctcccaaaatgcacccaccaaatcaatggcttgaaataaagcataacccaaataccagatgaattattgaaaggctaccaatttatttttagaagtccctgaatgaattttacttgtcctaacgtagaaacaaagaataaaaattgcatacaatcaatactaagaaacacagcaagctgtcgttcttaatgggtttatgtttggaatatagagaaacacttttgtcattaatatcctggcatcagcaaaaaacaagaattgtaaaatcgcatagattaaacttaaggcaaggaattagtcatttaagag

SEQ ID NO: 526259 - DNA, 509 bp, Homo sapiens
ttttctcatcacaggtaagtctctagaaagcaagatacaaaacaagcctatgtaaattaattcatgcttctcatgcacaagcagacctcatcaataataaaaaaaacttttgatcactgttttgtaaggcaaagatctttctgtaacagattgtgaacaatgagcctctttcttgttgttttatctctgaccttgttttcagaagaccctaaatcaatgtttgcccagctaraaagtacgttttgccccctcaatcatctttgtaatcactcattactgtaatgctgaagttaattgaagtgggttatacctatatgttgcatttttaaagttgttttatgttaacactcctgagatctaaagacaaattctgtgctatattatttcaggaacacacagaatgagattaggagcccaaaagcatgaattcctaatcccatttgtggagtacacagtgttgaatcttcttatccttcattttcagatgggaggaaactaaaacccagagt

SEQ ID NO: 526260 - DNA, 439 bp, Homo sapiens
actctacatagcatattcattctctctctctctctctctctctctctcgctgacttgctcttcccatcttgcttgcttgccctggtgaagcaagctgcatattgtgaggtgctctayggagagttccacttggggaggaatccagcaaaccggatggaactgaggccttcatatcacagctcacgaggaactgaatccactaacaaccatgcgattgagtggggctcttcccattcaagtccaaatgcatgcagcttggagagagacatgactaagggatgcccagattcctgactaaaactgtgagatgaaaaacgtgttgtttaaatcacttaagttttggagtaatttgtcctgcagcaatagatcacgaatgcggttattatcactgccttaaaaagactaagcctaacgagcagcatggcttgcacagccccgt

SEQ ID NO: 526261 - DNA, 439 bp, Homo sapiens
actctacatagcatattcattctctctctctctctctctctctctctcgctgacttgctcttcccatcttgcttgcttgccctggtgaagcaagctgcatattgtgaggtgctctacggagagttccacttggggaggaatccagcaaaccggatggaactgaggccttcatatcacagctcacgaggaactgaatccactaacaaccatgcgattgagtggggctcttcccattcaagtccaaatgcatgcagcttggagagagacatgactaagggatgcccagattcctgactaaaactgtgagatgaaaaacgtgttgtttaaatcacttaagttttggagtaatttgtcctgcagcaatagatcacgaatgcrgttattatcactgccttaaaaagactaagcctaacgagcagcatggcttgcacagccccgt

SEQ ID NO: 526262 - DNA, 623 bp, Homo sapiens
atttcactggatgcctcctctggcgtcctaaatgcaacatgacaagtgacaaatgttctgaaaggaagggaggtccttggactacaatcatgttggaatgaatgactaccccgagcagactaaataaattacccagcattcactttaagccaggagagaagttttcaggaacttaggctaagagtcttaagctccctaagtgtcttcaggcagcaggataagggggtaagaggacagactatgmaggtagaagacctgggagcagaagccttcctgaccatgtggttctatgaaaagtacttatgctcttgaaccccttctttgtgaaataaatcttgaaatttaatgcattaataatgaggcacatacgttactatatcacaaatgtttttcaattttataaaaaatgttgttttaaactaattggtttcctgtgaaatttttttttgttatgcatttgaaaacattatttgaaaagagatgcatagctaagtgggtgctataagggatgaagaataatataaagaatgtttggcacaaatatcaggcacttagtaattaacagcccgttaatattatcataccttgctttgcataatcctggccaaaggactgtttctttt

SEQ ID NO: 526263 - DNA, 623 bp, Homo sapiens
atttcactggatgcctcctctggcgtcctaaatgcaacatgacaagtgacaaatgttctgaaaggaagggaggtccttggactacaatcatgttggaatgaatgactaccccgagcagactaaataaattacccagcattcactttaagccaggagagaagttttcaggaacttaggctaagagtcttaagctccctaagtgtcttcaggcagcaggataagggggtaagaggacagactatgcaggtagaagacctgggagcagaasccttcctgaccatgtggttctatgaaaagtacttatgctcttgaaccccttctttgtgaaataaatcttgaaatttaatgcattaataatgaggcacatacgttactatatcacaaatgtttttcaattttataaaaaatgttgttttaaactaattggtttcctgtgaaatttttttttgttatgcatttgaaaacattatttgaaaagagatgcatagctaagtgggtgctataagggatgaagaataatataaagaatgtttggcacaaatatcaggcacttagtaattaacagcccgttaatattatcataccttgctttgcataatcctggccaaaggactgtttctttt

SEQ ID NO: 526264 - DNA, 623 bp, Homo sapiens
atttcactggatgcctcctctggcgtcctaaatgcaacatgacaagtgacaaatgttctgaaaggaagggaggtccttggactacaatcatgttggaatgaatgactaccccgagcagactaaataaattacccagcattcactttaagccaggagagaagttttcaggaacttaggctaagagtcttaagctccctaagtgtcttcaggcagcaggataagggggtaagaggacagactatgcaggtagaagacctgggagcagaagccttcctgaccatgtggttctatgaaaagtacttatgctcttgaaccccttctttgtgaaataaatcttgaaatttaatgcattaataatgaggcacatacgttactataycacaaatgtttttcaattttataaaaaatgttgttttaaactaattggtttcctgtgaaatttttttttgttatgcatttgaaaacattatttgaaaagagatgcatagctaagtgggtgctataagggatgaagaataatataaagaatgtttggcacaaatatcaggcacttagtaattaacagcccgttaatattatcataccttgctttgcataatcctggccaaaggactgtttctttt

SEQ ID NO: 526265 - DNA, 643 bp, Homo sapiens
gcacactcacacacactcacacagaggtatttgtaatctatgctcccccactggtctactggtgttctgccaaggccatttatttttatattttaacatctttatatttgttaaggcacagaaaccaaccttcttaaaaaagattgtttgaaagtcttcactgtcaactttgtgtgtacaggataatctcttcaccacggttgtgaagaatgctaagaaattattttcaacattcctttttctagttttgtttcctaataccacccaccattaaccccgtatgttttccaaaaarcaatttttaaaactattctatgtcagttcattattttgtgtcattatacacgtgttctaagtgttaaatgttgaatgcccttgtcagtatttgtttctctgaaacatttatgccttaatacccactaaggtcttatttcccaagaacaaggatattctcctacaacaatgcagttatcaaagtcagtagatgtaacagtcacatgatattttcatctaagaaacatttcatattgcaattttaacaaatatcccgaagatttcccctgttctgatggagaatcgagtccaggctcacatgttgtacttaggtgccatgtcaccttcgtctccttttagtctgaaatgc

SEQ ID NO: 526266 - DNA, 533 bp, Homo sapiens
aaaaagtactgtacctgactgccacgtgctagtgtgtccagtgcagcctgtgcattcgactgaagcccctctttctgcagatcattttatcttccaacccatgttggaaccaaaagtatgcaaatgggagggctgaaccagccacarataatccaataaagagtcgcatgtgggatgctaaaatgcaagtttttgagaagaaactgagtaatgatctagaagtcttataaacctacacatgttacatgggatccaaaggaccatcccattctctgtctacctcatccattttccttacttgtctaatgttcactggcattttagcttgtgattcttgacttagagagtcaaattagccttagaaacgtcaccatggtgagtgcaaagatgaaaactcaacagatttggttttaacaactctgtaccatacagtgccttaatgaccgtaagtcatcttcctgagttcaactttcctcataagtgacatctaaaaacgacatcatctgttcctgctagagtgtttatggaaatca

SEQ ID NO: 526267 - DNA, 590 bp, Homo sapiens
attcattgactttcttgcctgctgcagattttgggacttctcttccataatcacacgagacatattttaaaaataaatctccctttctctcataggataactatttgtctatctaactatcaaataggacatacacctctattcacagcctattggctccatttctttggagaaccctgaagaacagagagggcaaatttatgggtttttttgggtttttttcccacaatgagaaaaaaaaaaaagaaaagaaaagaaagaaatgagtcccgcctcccctggaggaagggrgcagccacagggatgggcatcaaaggtgaggactcagatcacagggaaaggtgaaactcccggggaagattccaaacttgcagttatgttttgtttcctgcttgttctactcacagacactaactttggagcttttttcctaatgaaattgcaaatattttgttatgtttaatcttgaatgaagaggcagactgttatattaagaggcaaccaatgtcattccatcttttcttactactgaaaacattacaaaaaagaaacctgaaaattggcaggtaggcggcctccgcaataaccct

SEQ ID NO: 526268 - DNA, 513 bp, Homo sapiens
tggaaatattcattgactttcttgcctgctgcagattttgggacttctcttccataatcacacgagacatattttaaaaataaatctccctttctctcataggataactatttgtctatctaactatcaaataggacatacacctctattcacagcctattggctccatttctttggagaaccctgaagaacagagagggcaaatttatgggtttttttgggtttttttcccacaatgagaaaaaaaaaaaagaaaagaaaagaaagaaatgagtcccgcctcccctggaggaagggagcagccacagggatgggcatcaaaggtgaggactcagatcacagggaaaggtgaaactcccggggaagattccaaacttgcagttatgttttgtttcctgcttgttytactcacagacactaactttggagcttttttcctaatgaaattgcaaatattttgttatgtttaatcttgaatgaagaggcagactgttatattaagaggcaaccaat

SEQ ID NO: 526269 - DNA, 331 bp, Homo sapiens
accaaaggattctatgtttggcttttttctttttgcatcaataaagaagaacaacatccttcctaggcacrttatttacttaacaacttaaagaagcttattgaagattttgatcctatacacctttatgtgagataagaaaaatctgttctcaaaaataaaaaatatctgaccaccaccgcagtgaatggtgaaggacccatgagaaagaactcagtgggttgagaagacaacaactaactcaaaagccaccaactgaatgaaaacaataggctaaggcaggaaagcctggtagataaagcagcataggcaggacaagtgcaaagaaggc

SEQ ID NO: 526270 - DNA, 638 bp, Homo sapiens
ttcataacagatatcttcagtttgtctggaatttaatcatccaaataaaagaaataaggtattttacatcttaaatcttgcatctttaaattggaacatattcatatccttcagaactgaagcataaagatgttttaaaatacaaacctggtatccatcctaggaagcaagctgggtattctctaggacatggggccctgttttgtgaagagggagagggagaggtctgattaaaggggtcatttaatttatgatctgtagatttcattcaactgtcttaccagagaatcattcgtaacagtcaatctaccaaaggattctatgtttggcttttttctttttgcatcaataaagaagaacaacatccttcctaggcacattatttacttaacaacttaaagaagcttattgaagattttgatcctatacacctttatgtgagataagaaaaatctgttctcaaaaataaaaaatatctgaccaccaccgcagtgaatggtgaaggacccatgagaaagaactcagygggttgagaagacaacaactaactcaaaagccaccaactgaatgaaaacaataggctaaggcaggaaagcctggtagataaagcagcataggcaggacaagtgcaaagaagg

SEQ ID NO: 526271 - DNA, 581 bp, Homo sapiens
tacttaacctccaaggactattacaaagagtgtgtttataagtttgaaaggggtacaaattttcaaagcaatatgtgtctccaagagttactgtctagcaaaataccctgtaacctttctttcccctgctacagaatgcagctttttccctggccctgtttctctcttytcctcattaactttcttctttggctcccaggtaaagagagaggttttctacacccctattctaaggacaaaaaaatcatcttaaataccctttatctttcataagggagtatatagcaatgaggcataattgccatccaggactttaggtgaaattttgaaggatatctggtacctgaacatatagaatctatactttaaatttatggaaaatcgtttaaaaatgtgctatgacctagggactctcaataaatagtctctctatcctgtgaaatatgcattttctgaaatgaatgaacatagggaaaaggaaattggtcaaataatcatctgtgaatataagattaatacgtacctgatacacatgaaaattagacatatatcacagttatttaagagatttaacagaaact

SEQ ID NO: 526272 - DNA, 644 bp, Homo sapiens
tctgtgggttttttcccttgaattgatctgtttctttagaatctttaaatctctcatccttagaggtatcaatgcacgcatgctattctctgttcagtatgttaaattctcatttctaagtttggcacttcttttttagttttagctcagactattatcctttagctcagaacttctctggactaaactctccagagagtaaatctcacattttcagccagggtagcagaaggagagttgcctggttgtgcaggatagtcaaagtgtctagggatctgtctgacttttttttttttttgagacggagtctagctttgtcacccaggctggaatgcagtggctctatcttggctcactgcaagctccgtctcccgggttcatgccattctcctgcctcagactcctgagtagctgggactacagaygcctgccaccacgcctgggtaattttttgtgtttttagtagagtaggggtttcaccgtgttagccaggatggtctcgatctcctgacctcgtaatccacccacctcagcctcccaaagtgctgggattacaggcgtgagccaccgcacccggccagctctatcagatttttaaaccagccttcctgggcttagtcacaacccacacacttttgaaaggt

SEQ ID NO: 526273 - DNA, 555 bp, Homo sapiens
caaaatttttaaaataatttttctatatgtttaatgattcttttgattcagtgatttattttattttataaattatatacttaagatatttaacatcacagattgaacaatttcaaatattttatgctccacaatcaccagattttaacataaaggctcagaaacgtaaacagtcatttgtctgggacacataatycttgggatgccttctggtagaaagagagaaaaattcatgacatattaataattctctaaagtttattctgtgccttcaacatgttagaaattattctcctcactttctctttaattaacattgtgattttatttctgggtttaatatagaatgtggaggaatgtattatttacagatcaaaagagatattaatgagagaaaaattacattatcccaccattactttttctttcttctctctccttggcatggggcacacatgctagtccgttttcaccattagcaaaagatccattcaggaaaccctctctcctggcctttcatcctgtagtttggttcatccatgtcacagcacttct

SEQ ID NO: 526274 - DNA, 555 bp, Homo sapiens
caaaatttttaaaataatttttctatatgtttaatgattcttttgattcagtgatttattttattttataaattatatacttaagatatttaacatcacagattgaacaatttcaaatattttatgctccacaatcaccagattttaacataaaggctcagaaacgtaaacagtcatttgtctgggacacataattcttgggatgccttctggtagaaagagagaaaaattcatgacatattaataattctctaaagtttattctgtgcyttcaacatgttagaaattattctcctcactttctctttaattaacattgtgattttatttctgggtttaatatagaatgtggaggaatgtattatttacagatcaaaagagatattaatgagagaaaaattacattatcccaccattactttttctttcttctctctccttggcatggggcacacatgctagtccgttttcaccattagcaaaagatccattcaggaaaccctctctcctggcctttcatcctgtagtttggttcatccatgtcacagcacttct

SEQ ID NO: 526275 - DNA, 568 bp, Homo sapiens
cgtatctctgaaactgaccttcctgtgtccctcttataaagccccttgtaataacaacattggcccacctggataattcaggataatctacccatctcaagatgtttaacttaattacattggtgaagtttcttttgctatagaaggtagaatagtcacagattctggggatatgaacatctttggggggcactattcagctatatcctttgtggcttattcaccttgctatgtgctcaagaaagctagactcctgccaataatagtgaataaaattaaaagtccattgtcaataattaaaatttttttttctgtattattgttaaaactaacatttgcttaaattgtagtgccaaaatatttttaatatctctctgaacaatgatgagtgagtgatcttaatttmtggaccatctaggtcaataatatttaaatggtaatagaaattttagtctgtttggaataatgtgtacttttataggcttctgttcattgttcaaaatgttcttggtgtggtgccattataatagtcattataattatttcctgggacctttagtacttttgt

SEQ ID NO: 526276 - DNA, 568 bp, Homo sapiens
cgtatctctgaaactgaccttcctgtgtccctcttataaagccccttgtaataacaacattggcccacctggataattcaggataatctacccatctcaagatgtttaacttaattacattggtgaagtttcttttgctatagaaggtagaatagtcacagattctggggatatgaacatctttggggggcactattcagctatatcctttgtggcttattcaccttgctatgtgctcaagaaagctagactcctgccaataatagtgaataaaattaaaagtccattgtcaataattaaaatttttttttctgtattattgttaaaactaacatttgcttaaattgtagtgccaaaatatttttaatatctctctgaacaatgatgagtgagtgatcttaatttctggaccatctaggtcaataatatttaaatggtaatagaaattttagtctgtktggaataatgtgtacttttataggcttctgttcattgttcaaaatgttcttggtgtggtgccattataatagtcattataattatttcctgggacctttagtacttttgt

SEQ ID NO: 526277 - DNA, 636 bp, Homo sapiens
ctaaaagagaaactcctgtgaataaatacctccaaataattagatttaaaatttggattagtcatgcttttcttttttacttcaccacccagtattatggtaagtggttgaataccactaacaaatataagtaaacacaygtatactaaatatgaaacagttaaataacaaagccctgtgttagacagaagtctcaactcctagagaaaatggatccagagacagtaaatatttgtttcaagagataggaaataaccataaaagaatggaggaaagtgtcagaggattccctcagcacagacaagagtttattcacttaagaattactcctgcagtagcataccccagaagatgttcacaaacattcaaagagtttctattgggcagccccaactactatagtttctgggttgtgcatattggtgcaaaagtatctagaaagagaaaaataaatgttactctaaaagtggtagaaatacattgataaaccatgtatagatgaggcactaaacccttactctgttcattaaactttgagcaactgcagacaataatatttattacgtattactattattttttgcaattgttgtatcagcattggcatcaggaaaatgacctgcatggtgtgaatta

SEQ ID NO: 526278 - DNA, 636 bp, Homo sapiens
ctaaaagagaaactcctgtgaataaatacctccaaataattagatttaaaatttggattagtcatgcttttcttttttacttcaccacccagtattatggtaagtggttgaataccactaacaaatataagtaaacacatgtatactaaatatgaaacagttaaataacaaagccctgtgttagacagaagtctcaactcctagagraaatggatccagagacagtaaatatttgtttcaagagataggaaataaccataaaagaatggaggaaagtgtcagaggattccctcagcacagacaagagtttattcacttaagaattactcctgcagtagcataccccagaagatgttcacaaacattcaaagagtttctattgggcagccccaactactatagtttctgggttgtgcatattggtgcaaaagtatctagaaagagaaaaataaatgttactctaaaagtggtagaaatacattgataaaccatgtatagatgaggcactaaacccttactctgttcattaaactttgagcaactgcagacaataatatttattacgtattactattattttttgcaattgttgtatcagcattggcatcaggaaaatgacctgcatggtgtgaatta

SEQ ID NO: 526279 - DNA, 616 bp, Homo sapiens
aacttgttttaacatgctgttacatgttaattcaatcttccaatagtcaatttaacaaatatttattgagaactaactatatgcccagctctctactaagtgatatcaaattaaacatgttaccttccttttctcgaaattttacaaaattttactcagtctttggaatatgaaggtactggaaggatgggtcaaagtgtgtacataaataattaagttcaatctctaagtgctacaggagaatcaaccatttgctgtaggagcactgaggaaggaggaattcattctcagggattagtagggatggtcttcagtaatctccccataactacattatattcaacaatatgstcccttgggatgaaggagaagaaaggcttgccttacatatagagaaatctaaattaaagtttatttgtgaaacaacctgaattctgttattttttatatactgtatacagaaggttctaaaaagtcaacccctcagttagattccaaccaagtagatatcctcttaaaaccagttttaaaaagagtctatatggcataatggaaagagcctcctgaataagttcctccttagcagacagcttctctaggagaaagcataccttgg

SEQ ID NO: 526280 - DNA, 616 bp, Homo sapiens
aacttgttttaacatgctgttacatgttaattcaatcttccaatagtcaatttaacaaatatttattgagaactaactatatgcccagctctctactaagtgatatcaaattaaacatgttaccttccttttctcgaaattttacaaaattttactcagtctttggaatatgaaggtactggaaggatgggtcaaagtgtgtacataaataattaagttcaatctctaagtgctacaggagaatcaaccatttgctgtaggagcactgaggaaggaggaattcattctcagggattagtagggatggtcttcagtaatctccccataactacattatattcaacaatatggtcccttgggatgaaggagaagaaaggcttgccttacatatagagaaatctaaattaaagwttatttgtgaaacaacctgaattctgttattttttatatactgtatacagaaggttctaaaaagtcaacccctcagttagattccaaccaagtagatatcctcttaaaaccagttttaaaaagagtctatatggcataatggaaagagcctcctgaataagttcctccttagcagacagcttctctaggagaaagcataccttgg

SEQ ID NO: 526281 - DNA, 617 bp, Homo sapiens
tggacaatgagttcattagtgcatcaatgactggagcagagtctatctctgatttccatgcacctaaccagtgggcatgcaatataaaataagttgaatgaacaaatgaataratgactaaatataataaccataatagctaacatttattgataatttctctgtgccaccctccatgctaagtgttttcatgtgttattttatttaatctaattattattttccatttacagaggagaaaaacagaagctgtgagaagttaaaaattaactaagattaaccaactatttaataatagagttaggatttaaacacaatcagtctgatcttgaaaactgctctcttaaccacatcatgaatgtcattagttttcaaattggtattgcacaattccggatgagactatcttcataaagaggtagaactaatttctgcaagatatagtaatttagccacagttccagcataggagtaaaaagcaaaagtttaaattgccccacagggaaattgacaaatactaaatatcccatgggagctagttaaagtataccattgcctaaaggaaggaatatccttcaagtctagggacatcacaacttaatattctcaaaataccc

SEQ ID NO: 526282 - DNA, 496 bp, Homo sapiens
ctttacattttattattaatatttatacttctaagtatttttcctaaggaaaaagtacttcccacagaagaaaaaaattaagtagatgagtatgttcattgcactgtaatttattatgccaaaaatggaagatactgggagaaaaattatkgagcatcaactgggtaaactataatacaaacaaacgttaagcgtgaagggatagaaacatagggcagtgtttgtgtaaaaatgtctgagtcgaaaattatgtgcatactgatgaatgatataaatgtactcatggatatctgaaagggaatgtgacaaaaaaaatttagatattttatttatttttgctgcaaacgtagataaattcttttctgcatgttatgaatttcatattttgtgtatatattgtttcagctagatgctggtgtgccagaaaaaataagcctgatttccagagatgagaagagtgtacttgtggtgacctacagtgacttaaagcgctgct

SEQ ID NO: 526283 - DNA, 496 bp, Homo sapiens
ctttacattttattattaatatttatacttctaagtatttttcctaaggaaaaagtacttcccacagaagaaaaaaattaagtagatgagtatgttcattgcactgtaatttattatgccaaaaatggaagatactgggagaaaaattatggagcatcaactgggtaaactataatacaaacraacgttaagcgtgaagggatagaaacatagggcagtgtttgtgtaaaaatgtctgagtcgaaaattatgtgcatactgatgaatgatataaatgtactcatggatatctgaaagggaatgtgacaaaaaaaatttagatattttatttatttttgctgcaaacgtagataaattcttttctgcatgttatgaatttcatattttgtgtatatattgtttcagctagatgctggtgtgccagaaaaaataagcctgatttccagagatgagaagagtgtacttgtggtgacctacagtgacttaaagcgctgct

SEQ ID NO: 526284 - DNA, 618 bp, Homo sapiens
ttattaacatgtgtatttacatacacacatgggcatgagtaacccagaggggtggttagagcttggacctttagagcatcttagcaacaacaacaacaaaaagacagttttttagagaagtgaaaaagacagaggaaaaggattttgagcttcaagggcgtgcaattgtaggaaggtaaataarcgggagaaactaatgggaaataagggataatgagatgtgttgtgcagattcctctgatgccatctctgggttgatacaggagagttgtctccagtgattaagaattgccttgcccttcctggtagaaagaaggagagcagagactttttcttgtgtctcctcctttttcattgcctgtagctcataataattcttaggctgaagtggcaaattttgaagtggcatattctactacccttcacattataaaccatttttagaatatttgccactctttcttgcatacagtaatgccagaaaaaatctatttttctgcatttgagccaaatgtggaaaattcttattagagagttgaatgtgaagatagacttttattcttggcagatctttttaattgaaatgattatatcctaatatcagacccacaggagagc

SEQ ID NO: 526285 - DNA, 618 bp, Homo sapiens
ttattaacatgtgtatttacatacacacatgggcatgagtaacccagaggggtggttagagcttggacctttagagcatcttagcaacaacaacaacaaaaagacagttttttagagaagtgaaaaagacagaggaaaaggattttgagcttcaagggcgtgcaattgtaggaaggtaaataagcgggagaaactaatgggaaataagggataatgagatgtgttgtgcagattcctctgatgccatctctgggttgatacaggagagttgtctccagtgattaagaattgccttgcccttcctggtagaaagaaggagagcagagactttttcttgtgtctcctcctttttcattgcctgtagctcataataattcttaggctgaagtggcaaattttgaagtggcatattctactacccttcacattataaaccatttttagaakatttgccactctttcttgcatacagtaatgccagaaaaaatctatttttctgcatttgagccaaatgtggaaaattcttattagagagttgaatgtgaagatagacttttattcttggcagatctttttaattgaaatgattatatcctaatatcagacccacaggagagc

SEQ ID NO: 526286 - DNA, 653 bp, Homo sapiens
ttttttcaatcatttaggttcaattctaggtacaaggttgactgatagaaaagcagctattttcaataaacgagggctgaaatctaaccctgcggtccaggtaaaaggasagagaaaagattcatttaaaaataacatatgagtactacttttcaaaggatgaacatattattttccaaatttaaatcttccaaaaagctattctgtaatttcctatcaaaacaagataacaatactttgccatatttcccttgactttgtgtaataataatgatgatgataatcaaatagtgacattcaaaaataacaatttttttttttttgcagagttcaggagaagggtgcaggaggtattagaaaagatgcacataggtcttatatctcatcaaagcatgaatttccaactcattaaaacactccattctctgccctaatctcccaaagagcattcagctgaatgaaaagctgctgacattcgtgccagttcacagctagaatgacatggctgggggacaggagatgctgcagtttccattatccattgaacaccttggcaattcttaattcatcctgtgaatgtgatacttactcttgtactgctctggctatggaaagggccgtagatccagtttcattaacgctatctaaggtca

SEQ ID NO: 526287 - DNA, 653 bp, Homo sapiens
ttttttcaatcatttaggttcaattctaggtacaaggttgactgatagaaaagcagctattttcaataaacgagggctgaaatctaaccctgcggtccaggtaaaaggacagagaaaagattcatttaaaaatmacatatgagtactacttttcaaaggatgaacatattattttccaaatttaaatcttccaaaaagctattctgtaatttcctatcaaaacaagataacaatactttgccatatttcccttgactttgtgtaataataatgatgatgataatcaaatagtgacattcaaaaataacaatttttttttttttgcagagttcaggagaagggtgcaggaggtattagaaaagatgcacataggtcttatatctcatcaaagcatgaatttccaactcattaaaacactccattctctgccctaatctcccaaagagcattcagctgaatgaaaagctgctgacattcgtgccagttcacagctagaatgacatggctgggggacaggagatgctgcagtttccattatccattgaacaccttggcaattcttaattcatcctgtgaatgtgatacttactcttgtactgctctggctatggaaagggccgtagatccagtttcattaacgctatctaaggtca

SEQ ID NO: 526288 - DNA, 653 bp, Homo sapiens
ttttttcaatcatttaggttcaattctaggtacaaggttgactgatagaaaagcagctattttcaataaacgagggctgaaatctaaccctgcggtccaggtaaaaggacagagaaaagattcatttaaaaataacatatgagtmctacttttcaaaggatgaacatattattttccaaatttaaatcttccaaaaagctattctgtaatttcctatcaaaacaagataacaatactttgccatatttcccttgactttgtgtaataataatgatgatgataatcaaatagtgacattcaaaaataacaatttttttttttttgcagagttcaggagaagggtgcaggaggtattagaaaagatgcacataggtcttatatctcatcaaagcatgaatttccaactcattaaaacactccattctctgccctaatctcccaaagagcattcagctgaatgaaaagctgctgacattcgtgccagttcacagctagaatgacatggctgggggacaggagatgctgcagtttccattatccattgaacaccttggcaattcttaattcatcctgtgaatgtgatacttactcttgtactgctctggctatggaaagggccgtagatccagtttcattaacgctatctaaggtca

SEQ ID NO: 526289 - DNA, 653 bp, Homo sapiens
ttttttcaatcatttaggttcaattctaggtacaaggttgactgatagaaaagcagctattttcaataaacgagggctgaaatctaaccctgcggtccaggtaaaaggacagagaaaagattcatttaaaaataacatatgagtactacttttcaaaggatgaacatattattttccaaatttaaatcttccaaaaagctattctgtaatttcctatcaaaacaagataacaatactttgccatatttcccttgactttgtgtaataataatgatgatgataatcaaatrgtgacattcaaaaataacaatttttttttttttgcagagttcaggagaagggtgcaggaggtattagaaaagatgcacataggtcttatatctcatcaaagcatgaatttccaactcattaaaacactccattctctgccctaatctcccaaagagcattcagctgaatgaaaagctgctgacattcgtgccagttcacagctagaatgacatggctgggggacaggagatgctgcagtttccattatccattgaacaccttggcaattcttaattcatcctgtgaatgtgatacttactcttgtactgctctggctatggaaagggccgtagatccagtttcattaacgctatctaaggtca

SEQ ID NO: 526290 - DNA, 515 bp, Homo sapiens
tggtggatgagtcgttgaaacatattccttccagccaattttcatgtctgattttcttccagccaggtttcctgtcctcgaacccaacctttgggctgtgtttcttctcagccgaccttaaatctatgcacctgaatggagaaagaacactcctccacttcctaatgtctcctcccagtgacctttcctaggcacccagttccctcttgctatctagggactggcaagacaccaccacacttagagcaattctctggttggcagccctctgctctgaaagtactctgctattcttattccttccattgacaactcttgagttcacaagaaaaaggagaagaggttataactagctctcttccttgttcagaaatctctgaacagaccttcctggggagaggacactttccattagccagtcagttattcattcaaaaccatatttatcaagtactgkgcatgttctggggactaataagagaagcttcaagaagcttatagcctaaagttgctga

SEQ ID NO: 526291 - DNA, 604 bp, Homo sapiens
tttggggggtggatctaaatcagcatagcacttttgtgtgactttttcttagtgaaaatattaaaggaacttagcatttcttttcaccagtaccactgatgtctctaagcctcttctgtgagtgctcccgtgattcctccatcaccttcagccacagatttaaaaaatctactagcaatggggaaacaatccagagtgacttagaaaagaaagattccttgtygtcatggaacttttttgtgtgtcatgtgtatcaaatgcaaataattacagtcatttccctctccttaggacagagctttagttttccctgacatcctggtaagacactgtctcagtgactgatactctggaaagttcatctttaaaagagatgaacacccaatcaatgtgttgcattcagcagataccagaaatactgagataccagagtggagtgaaatcagggccttactggggagaaggggctggccatcaacattcggtgaacatagcaggcaaagttaccatatttggggactaaaaatctaataattcaggtaaagatctcacatcataacaccctcaccacccacacgcacaaactcactttagttttatcagc

SEQ ID NO: 526292 - DNA, 589 bp, Homo sapiens
gctgacaccctgatgttaacctgagcagaatccagccttgaattgcctggacttctgacccacagaactgagctaaatggatgttgttacatgttgctcaatttgtagtcatccattacctagcagtagaaaatgaatacacctccaaatgtggccaaacaaatccctttcagtgcactgggaaagcatgggttgacagaacatagaggagtttttgggcacagattgtccaatagaagtcataccrtaccctgaacaactcctgtgggttcacaaagtattcagatttacggagtactgaggttttatcattcagctttagtatgttaaaagcatgtatagtgtccaaactcatcaagcacatttgatctgggcaaaactccaagaattctatgagtttgaagctcagttcctctcagcatttgggtccataatcatgtttgtaagcagatggtaatccaagacattgtatgatagaaaaaccctacctcaatattttctctctaaatccaaatcacttccctaagatgtgtaatagtcaaataaaatggtaaactatattttgtggaataagctggcattcttattg

SEQ ID NO: 526293 - DNA, 654 bp, Homo sapiens
gaagttaacttttacaaacccttttgaacataytgagaagaacaattgttttttgttatgctatgatgaaatgttatcaatagatttcataacattaaattgttctggagatcttgaaataaatcctattaactatgatatgccatttactatattattagactgaattttatttacatatttttacatcaatattactgaagaattagtcttctttttctgtgaattctctatcatattcttggccagaatagtatggtacttgggaagcctgtttccctaatgtgccacaacagcctgattattattattattattattattattattattattattattattattttgagacagagtctcactctgtccccaggctggagtgcaatggtatgatcttggctcactgcaacctccaactccctggttcaagcaattctcctgcctcagcctacgaagaagcagggattacaggcacacaccaccatgcccagctaatttttatattattaatagagacagggtttcaccatgttggccaggagagtcaccatctcctgacctcgtgatccgccagcctcagcctcccgaaatgctaggattataggcatgagccactgcacccggcccagcctaattattaattgtaaatat

SEQ ID NO: 526294 - DNA, 525 bp, Homo sapiens
caacatgccaatatagtcaaaataaataactatcaagttgaccaaaatgttctgctttagattttcccagcacaaagatcaatatgtatgcattggtggatgttagggttttgttggtgtaggtttttgtttgtttctttgtttttattttttacagattttcatcctactttacactgatgtaaatctaactacccaaggcttaccagaagctttattttacattatttctaccaaaaattcatatcctcaaatattaaaagtggcattctgtattaccatttttcaagtaatgtagtctgcatttattagtacatttcaatatatgttttttacatggggtaasgttataaaaatgccatgcagttgattttctaggtaacaacggaatctgttttctcaaacagtagcatgagaattcttgatataccaccctcagaggtactgaaaacaactatataattttgctgaaatttggattttttcataatttcttcagaggctgagtcatggcaacatatgaca

SEQ ID NO: 526295 - DNA, 619 bp, Homo sapiens
ttttaaaagtcattaatttacctattaggaataatcaatggatgttacacagcatctttctgtctctattaagaaagattttagcctggtgcggtrgctcacgcctgtaatcccagcactttgggaggccgaggcgggcggatcacaaggtcagaagattgagaccatcctggctaacactgtgaaaacccatctctactaaaaatacaaaaaaattagccaggcgtggtggtgggcgcctgtagtcccagctacccgggaggctgaggcaggagaatggcatgaacccgggaggcagagcttgcagtgagccgagatcgcgccacagcactccagcctgggcaacagagccagactccatctcaaaaaaaaaaaaaaaaaaaaaaaaaaaagaaagaaagttttttgacacaaacaaagcacttaataaaatatttgaaattaagatatttcaattaaaatcaaataataaaatgtgaatctgccaaagaaaatattttgtttgtctatattgtgttaagacatactgtcaacttttcgaatgcatagtatagtattgttaactataagcacgatgttatgcagtagatctctaggtcttatttatcttgcataattg

SEQ ID NO: 526296 - DNA, 129 bp, Homo sapiens
tggcacctgcgcatggcgcacggcagtagtagtggcagtcctgaccctgcccgcagacaccagcagcaaagaccccagggccrgatgcctccaaggcatctaagtcaggtggtccgtcccatagctaca

SEQ ID NO: 526297 - DNA, 470 bp, Homo sapiens
tgccaggctcctctttcttccttgtcatcacctgccttctgcaaagcctgatttagcaaagtacagctctgtgttttctgtaacytcaagacagcataggcgtgttgactaccttgcctttcctggagtttttatacatatatagtatatatttgtatatcgatttataatatacaaatatttgtatatacatatttatatatattatgtaaactccaagtgcatacttgtgcacataattatatccgtaaaccttttttcctgttaatttgtacattatcagtttgtttgatagactcaaataattaaagcttcaagggaaatataaagaactaattaagttagcacctacttttcaaatatcgcattttttcacagacctattaaataagacaaataacatttaaactttatttttaaatttgcagaatagtatttttcagcagatggtttattttagcaaattccat

SEQ ID NO: 526298 - DNA, 470 bp, Homo sapiens
tgccaggctcctctttcttccttgtcatcacctgccttctgcaaagcctgatttagcaaagtacagctctgtgttttctgtaacttcaagacagcataggcgtgttgactaccttgcctttcctggagtttttatacatatatagtatatatttgtatatcgatttataatatacaaatatttgtatatacatatttatatatattatgtaaactccaagtgcatasttgtgcacataattatatccgtaaaccttttttcctgttaatttgtacattatcagtttgtttgatagactcaaataattaaagcttcaagggaaatataaagaactaattaagttagcacctacttttcaaatatcgcattttttcacagacctattaaataagacaaataacatttaaactttatttttaaatttgcagaatagtatttttcagcagatggtttattttagcaaattccat

SEQ ID NO: 526299 - DNA, 509 bp, Homo sapiens
ctggtgcctctcctgacccctcctcccttgttaccaaggatgccaaaactttcccagctttcagaatgacgactgtttggttctacctggcttatccttactgatcctgcctaactggctcttgaatcatgttttccagaggtcaactgagtctaagaagacattaaaaatcctgaaattggccatatcatcctgcccctccttgattttggacaggatgcatttgggatctggcagcacttttctgagggcatcaactaccaaggttggagggatctttacatcaacctacactatacctaccagatgctttctttgaccatcttgatatccagatatggagtattccmatttcttggttcccatggactgaaactttacaggtaaaggccaaagttttgattcagcatgaatgagaaattcaatgtactataagctggaaagacttggctgaaactcagccccagctaaagcaacatcagaactgcatacacagtggtaaagatcaa

SEQ ID NO: 526300 - DNA, 491 bp, Homo sapiens
gagagagagaagaaaatcgaaaaatagatgatgsatgttgttaaggaattagtaaaccgttaagtgctctatcattattagatattcgggtgatcatcccgcatgtagctatttgaccaatgctgcttgtaaattggcttaggaaaattaacatacattttattaaactgacgagtatgccttttactgaaagcaaggaatagacatagccattttgtttaagaaatataagcacatgagaggcttaaaaaggtaggggttgtatgttctcagcactgcagctaaattcttaaatggaaactgttcttttagcagtttcagagtaggctatctcaagctgattgctacagactcaaattttaagtcgcatttctttcagaaacagaaggaaagtcaatctcactttcgaaaagagaaagtaaggtgacccttgtcatagtaacataatgcagcaggtcccaggtgtaacccggaggaaaaggcagacaagg

SEQ ID NO: 526301 - DNA, 491 bp, Homo sapiens
gagagagagaagaaaatcgaaaaatagatgatggatgttgttaaggaattagtaaaccgttaagtgctctatcattattagatattcgggtgatcatcccgcatgtagctatttgaccaatgctgcttgtaaattggcttaggaaaattaacatacattttattaaactgacgagtatgcctyttactgaaagcaaggaatagacatagccattttgtttaagaaatataagcacatgagaggcttaaaaaggtaggggttgtatgttctcagcactgcagctaaattcttaaatggaaactgttcttttagcagtttcagagtaggctatctcaagctgattgctacagactcaaattttaagtcgcatttctttcagaaacagaaggaaagtcaatctcactttcgaaaagagaaagtaaggtgacccttgtcatagtaacataatgcagcaggtcccaggtgtaacccggaggaaaaggcagacaagg

SEQ ID NO: 526302 - DNA, 526 bp, Homo sapiens
aatagttcacatactttggaaatatacaaaattctggagatttttaaaagcttatcatcatagtattaagtctaacctatcgaaattgagcgatgttttctgacaacaatctcttgggttccaccagttctccattctaaactgcactactactcacatgtgcattatcctctggacctttcactaagcacctctgctgtcctaaggaaccgtgtgaccagggagccaccatacatttttacccaaacagctccagttaaatataccacaatgtaaataattcaatcattttaccatctagcttaaaaattaagcttttctttccctctttctctttggtcttttcttcctccctccccaccccgggattctcttttttttttttttttttttttttttttttgagatggagtctcgctctgtcgcccacactggagtgcagkggcgcgatctcggctcactgcaacctcctccccgggtcaagccatcctcctgcctcagcctcccgagtggctggaactacagg

SEQ ID NO: 526303 - DNA, 651 bp, Homo sapiens
ataccgatgtactggccgtagcaccctggaatgttgtaggtatatcatcttgtaaatcagttagtgaaaaagagtggtttaagtctgactcagagatagtctttccagatgaattgacttctgcctataaacaagatagacccaagagcagtgtgacaacaggaaacaacaggaaacatacacaatctacaacctgctaaatcctctctgttggatttattttaattgctagtttaatatctattatcaggcagttaatcactgagcactcttgtgtccaacactgtactaggtatcataggaagaagcatacacaacacctgttctcaagaagccrttacttgatgagggacaaaactaacacccatggttcacaatccacaatgctaaaaagctctcaaaactcaaggtttttttggtaatttttaggcaaagcctgatatgagctgatgtgaacctatgaatagtctttatcccacattagtgtaaacattaatcccacattaatgtaatattcccagatttgctgaagaaatcctaatggatttgattatgaggtgctgccccagatcgcacggcaggttagttaatatatggtatatgtaagatcttttcttaagtctgaaaaattctcatgtacaaaacacattt

SEQ ID NO: 526304 - DNA, 591 bp, Homo sapiens
ccagttaatgcccccaccctcctgagtgtagtcactggatcagctccctttcaaaatagcacaaaagggcaaactcatggattctttttttttttttttttttttttgagacggagtctcgctctgttgcccaggctggcgcccagtggcgcgatctcggctcactgcaacctctgcttcccgggttcaagcgaatctcctgcctcaacctcctgagtagctgggattataggtgcgtgccaccactcctggctaatttttgtatttttagtagagacggggtttcaccatgttggtcaggctggtcttgaactcctgactttgtgatccacccgcctcggcctcccaaagtgctaggattacaggcatgaaccaccrcacccagccaaactcatggattcttgataacggataagaccaatgtcatctgaattaacaaaggaccccttaggagtcagacatgagctcatgagtcactaaactccatgtaacgctatcatattatagtcaaggatagagtctgtaataaaaatgatcctctcaggcctacaaccccatcaacccttcacccgtaatacaacccagcataca

SEQ ID NO: 526305 - DNA, 476 bp, Homo sapiens
ccttcagaaattgctataaatctttaggaattataggcaaagtcttgtgaaggaagatttttcctgatgcaaggttgcagagcatagaccatattttcaaaggttcctatgacccaaaagatttaaagaacgactgaactgaactttttttttaacctttcagaattaaagatttcttacaattaagagaaatctgtaatgaaaaatgtttctccccaaagggcattattagactgagtagaggcagatcctgacttggsatcccaaagctgtgtatcaatcaataaatatttactgagtatctattatatttaaaccattctcataagcccgagggaaagcgaagcccctaattttagagtgttaacagtcatctcgccaactccagcagaaattcaacaaccaatgacactcagcttttcagtattaagtattttaagtggagaaatagtaggagggaatcttcttgtgttttc

SEQ ID NO: 526306 - DNA, 640 bp, Homo sapiens
ctaacagaactaatgtgcctgagaacacttttgctattcatgaataaaatatggagtggaagccagagaagtgcaatttaagtctcaccttagttgccctatgttttcaaactcagtacaatgtggtaaaayttacaaggcatactcggtttaaaaataagaccagaggttcctttataagtcctacagactgagggaaatgaaaattgcattacatatccacctttagtccacttctcttgcacagctcctgataaattgctttgcaacttaactggcaatactagttggtcccacatcccaccctcagcctcccacccaccagggtagatttctgaacttagtggaaaaagtcccacgtctccactaagtgcaggcactaaaccaagctattaggaaggggaaaggggagtgggggttcattagagaaatgctttgctagtggttcaaagtacatcttttctcagaataactcctttttttccctacattctatttcttaagtttgagagtaggtaaatgtaaattttaccaaaaataaaacaagattataatgcaacacgtgaatcagccttttgaagggcacaggaagggaagtcacaactcccaacctcctcctcccaatccccactccccagac

SEQ ID NO: 526307 - DNA, 289 bp, Homo sapiens
ttgaacctgggggaaggaagttgcagtgagccgagatcatgacactgcattccagcctgggtgacagagtgagactctgtctcaacaaaaataaataaataaatawaaataaattaacttttatccaggttcagtggcaggctcctgtaagtcccagctacttgggcgcctgaggctgaaggatcacttaagctcaggactgcaaggccagcttgggcaacataccaagaacctgtctctaaaaaacaaatttaactttttattcatatagacttttaaggacaagctt

SEQ ID NO: 526308 - DNA, 582 bp, Homo sapiens
gagccaccgtgcctggctatgtgcctacccttcactctgactgtgttttgctttcttgactggttcttcatcaaatgcggctgctgctgccacctgggcttattctgtggaattttgttccttgagttctggtactgattcttcactgcaagattcagtgccagacctgtgcagggaatataaagatggcagcagaaagagcccacacttcttatttcaggagaaaattataagtctattccttaagctagtgcttccccaccttstatggtaatggcacacatagaaaatgatactatttggacctaagcggtggctcactcctataattccagctctttggaagactgaggtgggaggattgcttgaacaggagtttaagaccaacctgggcaatatagcaaaactcccatctctacaaagaaatttaaaaattggctgaggcaggaggatttcttgagcccaagagttcgaggccacagtgagctatgatcgcaccactgcattccagcctgagcaacagaacaagaccccatctcttacaagaaaagaaaaaagaaagatactatttgtatggtacaa

SEQ ID NO: 526309 - DNA, 251 bp, Homo sapiens
actcacgacgccccccgcatgtcacacgacaaggccagcagggccgccaccagagggcaccagcggctgggacccgcaggaaagggaggaagaacaggtggcgccggtgaggcgaaggcgagggcacgagggggyggcctgcggcccgcgctgctccggggaggggcttccacctggacagtgacggaagccagggcgactcaacaggacacatttgcaccatttgcacggctgggtgaaacgacaacccc

SEQ ID NO: 526310 - DNA, 641 bp, Homo sapiens
gtcagcaaagctccaagaggtcaaagcaccagaatagaaaataaaagacatacttaacacattctacaatatcaatttctaaaaatataatataagcttcccaatgtatagaatatgttcatcttaaataactccagaccgaatgaccatttatacctaatactcccacatggtcacagattgatgtcctcattgtctctatttcacatggcagtaagatgagaaataaaggagcctcaattcttacataattgtaattgttttatgagaaaaggaggrttaggaggtagaagttatagaatagtaactgttataataaaaagttatttttcctataggcatttcaatgtaagggtgctgcttttattataaatgcagagctaaacaaccaaaataccactgggcaaatccaatatttaattatatctacttttttttaaggtttttcttttcctattattaccactactctattgttggggaacactctttatatatatttctcatgttttttcacatttatcactcaatgttatgataaaacacaaatttttttaattttaattttttatttttctttaagttctgggatacatgtgcagaacgtgcaggtttgttgcataggtttacatgtgccatgg

SEQ ID NO: 526311 - DNA, 641 bp, Homo sapiens
gtcagcaaagctccaagaggtcaaagcaccagaatagaaaataaaagacatacttaacacattctacaatatcaatttctaaaaatataatataagcttcccaatgtatagaatatgttcatcttaaataactccagaccgaatgaccatttatacctaatactcccacatggtcacagattgatgtcctcattgtctctatttcacatggcagtaagatgagaaataaaggagcctcaattcttacataattgtaattgttttatgagaaaaggagggttaggaggtagaagttatagaatagtaactgttataataaaaagttatttttcctataggcatttcaatgtaagggtgctgcttttattataaatgcagagctaaacaaccaaaataccactgggcaaatccaatatttaattatatctacttttttttaaggtttttcttttcctattattaccactactctattgttggggaacactctttatatatatttctcatgttttttcacatttatcactcaatgttatgataaaacacaaatttttttaattttaattttttattttwctttaagttctgggatacatgtgcagaacgtgcaggtttgttgcataggtttacatgtgccatgg

SEQ ID NO: 526312 - DNA, 610 bp, Homo sapiens
tcaatctcagtttctcccactcctggagtctgtaggagtttaactggagagctraggaaattctcccaactgtatattatgaagcactgataagttcctttgcagaaacttggtaggcagaaagagtgtgagtgaattcatttatatgcctaatttaagacataattgagaggcacagtgttctaatagatggagttctggctgaggaattaagaaacctgagttccattcttagcacagatgatggctcagtgcagggaaatcaagggctggcactttccagaggaatttgaactctagagacagtcaattcaggacacaattattcagaaatacagccatgatccccattatctagagctttcattgttccgataaaaaccaaatttagctctccctaaattcttagcaaagtcctaataaaaaatggtatttgagttgagcctctagaggggaaaagaaggtattatttagcattcactcttcaagggggagctttctttggaacattgttcaaagcagacctgtggtgtggaggaggggctcccccaaccctggtgatggggaggcacaccagggctctttcaagtcctgcctagggcactggaca

SEQ ID NO: 526313 - DNA, 471 bp, Homo sapiens
tggttaagtcccttaagttctggaagcttcagtttcctctcctgttaaatgggcactatagtagcttttatgtaggatttgtaagrtaactaaatgagatactatacgtgaagtccttttagtacagtgcctagcatataatgagtgctcaatatattttgggtatcattattatttaacttgtgcagagtcatcccaactgccaacatcactagatagaagtggatagttctctgtttctgacccaccccttcatcttctcagaatctgattttaggtcgcagttgatcaagtataggagtactttgttacaggtatttgtcaagattctgttcactagtatttcttttctcccatgcttctccagcactgtagcttcagaaggtgatagaaaagtcaggttaagggttctgaagtcagactccctgggttcaagaccctggcttaccacttactcactctatggccttg

SEQ ID NO: 526314 - DNA, 471 bp, Homo sapiens
tggttaagtcccttaagttctggaagcttcagtttcctctcctgttaaatgggcactatagtagcttttatgtaggatttgtaagataactaaatgagatactatacgtgaagtccttttagtacagtgcctagcatataatgagtgctcaatatattttgggtatcattattatttaacttgtgcagagtcatcccaactgccaacatcactagatagaagtggatagttctctgtttctgacccaccccttcatcttctcagaatctgattttaggtcgcagttgatcaagtataggagtactttgttacaggtatttgtcaagattctgttcactagtakttcttttctcccatgcttctccagcactgtagcttcagaaggtgatagaaaagtcaggttaagggttctgaagtcagactccctgggttcaagaccctggcttaccacttactcactctatggccttg

SEQ ID NO: 526315 - DNA, 511 bp, Homo sapiens
ggtcctgccatttgccccatcctgtagacagggctgcaggaagcagcccagccagcaaccagtgtggagggagagggagtccaaggcccaggccggcccctccccatctggggctgccctgcaaccctcagtggtaacttaggacagctcctatttcccctttggctaaaagggtctacaccagtgtgtcaccactcccaaacagtccccttcctgggcctttgccactttgttgaatgaagacctcacctgcagttaagcaaaatattaacaygtgagatgcctttcaagatgcaaaaggatattttccttctaaaatcacatgggcaggaaggctctgaagatgttagagccccagtggactggagaaagccaggaagaaagcagtgtgggtcctgcagtagcccctgccgcttctcctgcctcctgctctcccaggacgcccggggccgacccgggccgacccttgtcatgctccttccgttcgcctgggcctccatgctttcagcta

SEQ ID NO: 526316 - DNA, 632 bp, Homo sapiens
tcctcctgtggatggacatggaggttgtttctagtgatttgctccgacaccctaggctgcagtctagtcttgcccatgtcttattggatatgtatatgactagaaggggattcctttatagacttttgcccaggttgttscctttacctggaatagcttcctgtcagaaaaccttatctgtccctgaaggcacttctcacatgccaattcttccatgacttccaactcacctggtcaaagcaatatcttcttccatccattctcctgcatcctccagtttgtatcacttaaatgatgctaccatatacaaccttgttctgtagttacctgagtattcccaagtaggccataagtttcttatgggcaagtattgtgttgtatggtacctccctgcttagaccctagcacagatttttgccagagtggcccctcaacaaacatctgttgaatccactaaactctccttttgctaccaagtactgctatcattatctaatgatatatatcttatgacaataatatacacctaatggctgctacattctcatgtgttattatttatgtattttcatggggctctctaatgtatgtgggagaaactaaatgtttagggtataccctgagctcaacaa

SEQ ID NO: 526317 - DNA, 380 bp, Homo sapiens
ctggatcctatgctgtgcattcatatagatttccgtattttccatgtcgtagttttttatctcactatgttggaatttcttattaaagccttctccatgacagctaaaatcatgtgaatcttgttcacggctatgctcccaggacaaagcacactgcctgatagatacaagtcttttaaaaagttagctaaatgtataaacaaacaaataaatgagatgaagaattacctgcacatagaaggcytaagtgactggtggttagggaaattaccaactaacagaggaagtagaggaggaaaaggagatttgattcaaaaattgcagtttcattttggtcatgttttatttgaggtatctatggggtcaccagggaaaatact

SEQ ID NO: 526318 - DNA, 402 bp, Homo sapiens
ctgtggagggaggctggtacccctaactcccacattgttcaagggtcaactgtatttgctaaacaaatgaagttgaaaaagttctaagttactagctattacattgacacagggaaccttctgtttatatctaataattcccacctggtgagagaaatcagaaaatctaaaatgkgattactcatttgttttctcaagaattacttcctgaatatcttgagtgtgccaaaccctagcaatcaaacacacacctttctgcttctggagcaggcgcttctcgctttcggacatggttctgaattgacgcgagtgcttctggtgaatactgggcagcgttgctctccatgtatttcaaaacatactcgtctgtatcaaggatgatgaaccggtgaccaaacactg

SEQ ID NO: 526319 - DNA, 461 bp, Homo sapiens
tccttaattctcccactgccacattgtatttttccccttttaactcttttttaaaatcaatctttctctctttctttcctttctttctttcctttcttttctttttccttccttccttccctccttccctccktccctccttgcttccttccttccttccctacttccctccttccgtagagatagtgtcccactatgttgcccaagctggtctcgaattcctggggtcaagcgatccgcccacctcgcctcccaaagtgctgggattacaggcatgagccaccgcgcccagctctctttattctaccatcaatcccttcggttaaacacctttgtttttgtagggaaagccttgaatatgtgctgcagggcagggtgcactctgataggtacttgatttttgttgactgaagagctgcaggttgaagggtggtcacctcaatccctcgtttgtacctgca

SEQ ID NO: 526320 - DNA, 575 bp, Homo sapiens
tgtgaatgaaaaggaagtattagatgagaagatagtgcttgtccatctctgagctgctgatggactaggaatcctggctcactgtagtgacccaggagcactatccagagccttctctcccaagacatcccatcagggctctttcctaagggcacccctgaagaccctgctccacttcccagtgtggccttttctgtaattagaagtagtaattaataatcagttgcagagaagtgagccaagattgtgccactgcactgcagcctgggtgacagagtgagactccgtctcaaaaaaaaaaatcattagttattccatagaagagcttcatttgaaaagtcaatctactcagttcagatcagtaattgtaaactatcacaaagctacagctttcatctccatgatattacaattacctacctgcctaacctgtagtatctacaaaggttgtgatygtttatcactcagaattacttcattttaaaaatttttcaacttttcttttctattcaggaggtatatgtgcaggtttgttacaagagtatattgcatgatgctgaggtttgcggtatgac

SEQ ID NO: 526321 - DNA, 566 bp, Homo sapiens
aaataacactttttttttttttccccagagacagagtctcactctgttrcccaggctggagtgtagtgatgcgatctctgctcactgcaacctctgcctcctgggttcaagcaattctgcctcagtctcctgagtagctgggactacaggtgcacgccaccacactcggctaatttttttttgtattttagtagagacggggtttcaccatgttgcccaggttggtcttgaactcctgagctcaggcaatctgcccacgtcggcctcccaaagtgttaggattacaggcgtgagccaccgcacccggccattactttattttttattctaattataaaagtaacatatgtttatttatagatttaaatatagactgcatcagttctacatacatacacatttataaaactgaaatattattttacccacttattattatttgtttagcaatttatcaaaaatattttttttaagataaataaaactgcagggtgtggtggttcatgtctataatcccagcactctgggaggctgaggcaggtggatcacagacaggagttcgagac

SEQ ID NO: 526322 - DNA, 539 bp, Homo sapiens
ggcaggtacatggagcacagccaactctgtaagctagacctgcacaaggaagcactcagaggaaagagcttacattcctgccatcctttgaagatgaagaaatgttagacttaaatgcatttggtaagacagagaagaatgaagaatcacgtgttgtaatataaatagcagcaagacaaagrgaaccaggcttaatcagaattatttttaacaagcaaagtatatttatgtgttacctgtgtaattaagcattttttaaaaggcagaaggaagtagtagtcattgagatagaacctagtcaagcatatgtgaatgaaccccattgtggtatactcagtaatatatagattataagccacatgttataactgtatgcaataaaatcttgatctaaagcaagttagaaatgaaggtggtacagtccaattcatgtgtgtggtatttactttcaaaggaggaggcctatgtaaactgatgcagctacccatatctccaatataatcttctattccattttcaactcaaaatgattatcaatt

SEQ ID NO: 526323 - DNA, 482 bp, Homo sapiens
gcaggtacatggagcacagccaactctgtaagctagacctgcacaaggaagcactcagaggaaagagcttacattcctgccatcctttgaagatgaagaaatgttagacttaaatgcatttggtaagacagagaagaatgaagaatcacgtgttgtaatataaatagcagcaagacaaagagaaccaggcttaatcagaattatttttaacaagcaaagtatatttatgtgttacctgtgtaattaagcattttttaaaaggcagaaggaagtagtagtcattgagatagaacctagtcaagcatatgtgaatgaaccccattgtggtatactcartaatatatagattataagccacatgttataactgtatgcaataaaatcttgatctaaagcaagttagaaatgaaggtggtacagtccaattcatgtgtgtggtatttactttcaaaggaggaggcctatgtaaactgatgcagcta

SEQ ID NO: 526324 - DNA, 482 bp, Homo sapiens
gcaggtacatggagcacagccaactctgtaagctagacctgcacaaggaagcactcagaggaaagagcttacattcctgccatcctttgaagatgaagaaatgttagacttaaatgcatttggtaagacagagaagaatgaagaatcacgtgttgtaatataaatagcagcaagacaaagagaaccaggcttaatcagaattatttttaacaagcaaagtatatttatgtgttacctgtgtaattaagcattttttaaaaggcagaaggaagtagtagtcattgagatagaacctagtcaagcatatgtgaatgaaccccattgtggtatactcagtaatatatagattataagccacatgttataactgtatgcaataaaatcttgatckaaagcaagttagaaatgaaggtggtacagtccaattcatgtgtgtggtatttactttcaaaggaggaggcctatgtaaactgatgcagcta

SEQ ID NO: 526325 - DNA, 624 bp, Homo sapiens
acaggtctgcagacctgggaaggtctcagaaaacttacaatcatggtagaagrgaaagcaaacacatctttcttcacatggccgcagcaaggagtagtgctgagcaaagggcagggaagccccttataaaaccatcagttctcaggagaacgcactatcacgagaacagcatgggggaaccgcccccatgattcaattatctccacctggtcccacccttgacacgtggggattattacaattcaaggtgagatttgggtggggacacagagccaaatcatatcagcctcctaacttcacatttggtaaatttgatttctggtactttgcctattctatagcttcttcaacactcaagatggtatatgtaaatagaactgagataaatgacagctttaacagtttgtataaaaagtccaaaggtaagctgcaataaagtgctcctttaaaaagttaacctctgtattttcttgctagactccctggtagggaaatacataaagactcaagatcctaataaataacataaataggaaagaggggaagatgatggtagtcattcatacctcagcttcctgcagggtcccgtggtttaggcacaccatgtcagggcaagtgatggga

SEQ ID NO: 526326 - DNA, 624 bp, Homo sapiens
acaggtctgcagacctgggaaggtctcagaaaacttacaatcatggtagaagagaaagcaaacacatctttcttcacatggccgcagcaaggagtagtgctgagcaaagggcagggaagccccttataaaaccatcagttctcaggagaacgcactatcacgagaacagcatgggggaaccgcccccatgattcaattatctccacctggtcccacccttgacacgtggggattattacaattcaaggtgagatttgggtggggacacagagccaaatcatatcagcctcctaacttcacatttggtaaatttgatttctggtactttgcctattctatagcttcttcaacactcaagatggtatatgtaaatagaactgagataaatgacagctttaacagtttgtataaaaagtccaaaggtaagmtgcaataaagtgctcctttaaaaagttaacctctgtattttcttgctagactccctggtagggaaatacataaagactcaagatcctaataaataacataaataggaaagaggggaagatgatggtagtcattcatacctcagcttcctgcagggtcccgtggtttaggcacaccatgtcagggcaagtgatggga

SEQ ID NO: 526327 - DNA, 674 bp, Homo sapiens
gtgaataatgttgctatgaatatgggtgtacaaatatctctttgagaccctgctttcagttcttttgggtatatacccgattgctggatcatatgttacctctttgtttaactttttgaatgacattctattttaagtactttttgagtctgttgaattgattgtagtgatgcaactcctaaatatgtttgytcatagtgatatttcccgcccctgaccttcattaaggtataattgacaaattacatttgcagtatacaatgtgatgttttgctctatgtatataaatgcttaaatcaagctaatgaacatcatcacttcacatttttctttgtgtgtgtgtggtgagatcatttaaaatctactcttggccattttcaagtatacagtgtattattactaactctagtcaccaagctgcgtgagagctccccagaacttattcatctcatctaaatgaaactttgtaagcttgaccaacatctccccattcccaccccaccatagtggtcttttaatttccatagctcatatgatgtgaatcaggacagtgaggtcagcttacatttcaggacttcagggataccttgccgaggtaggtgaaccactctctagcccgtcgttcccagaaatgcattagctgtaagttttgggataactgagggtgagaattt

SEQ ID NO: 526328 - DNA, 674 bp, Homo sapiens
gtgaataatgttgctatgaatatgggtgtacaaatatctctttgagaccctgctttcagttcttttgggtatatacccgattgctggatcatatgttacctctttgtttaactttttgaatgacattctattttaagtactttttgagtctgttgaattgattgtagtgatgcaactcctaaatatgtttgctcatagtgatatttcccgcccctgaccttcattaaggtataattgacaaattacatttgcagtatacaatgtgatgttttgctctatgtatataaatgcttaaatcaagctaatgaacatcatcacttcacatttttctttgtgtgtgtgtggtgagatcatttaaaatctactcttggccattttcaagtatacagtgtattattactaactctagtcaccaagctgygtgagagctccccagaacttattcatctcatctaaatgaaactttgtaagcttgaccaacatctccccattcccaccccaccatagtggtcttttaatttccatagctcatatgatgtgaatcaggacagtgaggtcagcttacatttcaggacttcagggataccttgccgaggtaggtgaaccactctctagcccgtcgttcccagaaatgcattagctgtaagttttgggataactgagggtgagaattt

SEQ ID NO: 526329 - DNA, 480 bp, Homo sapiens
ctgcaataacttttctggttctcctctgatagctatttcaactcgagcatacatctgaagaacaatgtttaatgagtaatatagttaacttytataaaccagcagaagaaaactcattctcttcaaaacgaatccaaaacttaaaaaaaaaaggattgcaatggaaaatatgaaataatatgggagtaataaatcttaacaaaataatagttacaatagatgaaagtatgttaaatttgccaattaaaatatgaagacactctttatctatataagcttacaggatacaataatatgtcagctacataagataccttgaaaagatgcagaaaacttcaaaataatagatcagattaaaaaaatcagttaattatgaactataagaaactagtaaacttaatatctgatgaaaatagaattttaaacaacatgtatatagtagaaagataaaagtgattattttataaagtaaaatgatga

SEQ ID NO: 526330 - DNA, 544 bp, Homo sapiens
aatattccagtagtgaggattaagtgagaaactgcaggtaaaactctttrcacaatgcctgacagagtaaatgtcccttattaggcattactactgcctaacctctaacttcatcaattcaaccctcactctacggtagtcagcttttcaaaagattcactgacttaacacataccagttctgagaaatcttcaacggattcccattgcctattaaagtccaaactccttcatctgacattcaaaaaaacatgacatagctccatctcccatcacacccctccctatccaactattctctatgcacactggactgctcacaatttctataatatattaaatactttcatctccataacttagaaatactcttgctgctttctctaaagaattctatttatccttcatggttcagcagaaacattaccttctccacaaagctgattctctccagtactcttaagtatgttgtatgcatctctattacgatactttcatattacttgtctgtaagctcactaaaacaaggtttattgatttctaca

SEQ ID NO: 526331 - DNA, 649 bp, Homo sapiens
taaggaaggagttaagcacatgctagaatattaggattgccttttaaattcacaattgggatacaaaattcctcttcagttttcggtaatctctaacctagataaactgaactaaaatcaaaagacatgtatgattatctacccatttagtaaataaactcatctttcagggattaattctgtttctacatctatatatattggtaaaaggaataaatatccttaaaagctaattgatcttggccctctaaccattcatgagtagctttctcttggttaaaatctaaggcattaggaaacctcagtttttggttttgytgttacactccaggatgactctgactatttgtaacttccttggctggtttcttttgggtaatcaagtaaaatattagcaaatattagttatacacttagtttaaaaatataactaaattcttcaggtaaagtactatataatacattgctcggttctatccagaaataatatgtctaatttccaattactgaagaatatattaacctttttttttttttttgagacggagtctcactctgttgctcaggctggagtgcagtggtgcaatctcagttcactgcaacctccgactccctcagttcaagtgattctcgtgcttcaggctcccaa

SEQ ID NO: 526332 - DNA, 348 bp, Homo sapiens
ctgagataaaaattcccaaatgaaatatttacaatgcttggttatagcaccacttaccaaagtcgttaaaatgcctttctgttgtatgtctaagtctgctttggtgcacaggatgaggtacctatggacaacttyatatagtacatgtcctttatagacactaacaaatttaataccgttttcatttaggatagatagtgtaaacaacacaattatctctaagaaatcatgcatcatggcaattataagttctatgtgtattagaaacatttcagccctcatagctctaagaatggcaacatttaggaaccctgttagatctctaagagagccttttgtttgtttgtt

SEQ ID NO: 526333 - DNA, 471 bp, Homo sapiens
gtgctggccagtaggaaatggtctggtgtggaatttcttattttaattgctttttctttctttcttttttttttttttttttgagatggagtctcgctctgtcgcccaggctggagtgcagtggtacaatctcggctcactgcaacctccgcctccagggttcaagctattctcctgcctcagcctcccgagtagctgggattaccgagtagctgggattacaggcgcgtgccaccatgccagctaattttgtatttttagtagagacggggtttcaccatgttggtcaggctggtctctaactcctacctcaggtgatccacctaccttggcctcccaaagtgctggtattacagtcgtgagccaccttgcccagccttgtgtggaatttcttacagaagctgtgcttacatcagatagtgaggaaatgagcaamggatattttctctcctggtgaatcttttccaatca

SEQ ID NO: 526334 - DNA, 548 bp, Homo sapiens
tgcttgggaggctgaggcaggagaatggcgtgaacccaggaggcagagtggccaaaatcgtgccactgtactccagcctgggcgacaraacaaaactccatctcaaaaaaagaagaaaaaaaaatatataaatatatagacactttagtctcagttcttatgagctctttgataggaagtatttgaaattgctatactttctagaggtatgttaattttcttgttttaaatcaagatattaaaaagtaaaattaataagacagccattctctttcacgctctacaaaatccaagttaggttatacacatttgtcccttgcaacaaatgctgcatgtttcattttcatgacggcaaagcaagtctatggttttatacctcaaggcttcatcataaaatactcagccagcaggcaccaagaatggaacaacaacaaaacccaagtcattaaaaacacacttgaaagctttctaaatgatgttctgtggctgtctgtagatgaaacttgcaaaatacagaacattagaaacttgtataatttatttttctg

SEQ ID NO: 526335 - DNA, 605 bp, Homo sapiens
tgaccaatgctaaaattatatgtgacataattttgcatttcttaagtgcaataaaactaattaatttgacaccaattttcraaagtgatatgcagtcataaatattacttggtctactaagcaattaacaactttcaaagaaaatgcctactctaataaaataagccaattaattttcaagaatcacctacttacataaaagagatgtgctaattatatattatactacttattaagacatgtcccagagaaatttatttgatggtgcttttatagttagtggttattatatattggtaagcaatatcatatttccaaaaatgttttaatggaagaggttgaaatagctggcctcaaaattgacttccactatggaaatacttttaaattattgattcttgtggataattcagactttaaaaacaaacaagcaaaaaactacacatacgtatatcacaaatgtgctcctaactacacataagaaaaataatatcatctgctttttcaataaaatgagcctatatacacatttatttggccaccatctagcctttgttgggtcctttacatatgtcttccctttttcatgtctgagaaatcagcaa

SEQ ID NO: 526336 - DNA, 605 bp, Homo sapiens
tgaccaatgctaaaattatatgtgacataattttgcatttcttaagtgcaataaaactaattaatttgacaccaattttcaaaagtgatatgcagtcataaatattacttggtctactaagcaattaacaactttcaaagaaaatgcctactctaataaaataagccaattaattttcaagaatcacctacttacataaaagagatgtgctaattatatattatactacttattaagacatgtcccagagaaatttatttgatggtgcttttatagttagtggttattatatattggtaagcaatatcatatttccaaaaatgttttaatggaagaggttgaaatagctggcctcaaaattgacttccactatggaaatacttttaaattattgattcttgtggataattcagactttaaaaacaaacaagcaaaaaactacacatacgtatatcacaaatgtgctcctaactacacataagaaaaataatatcatctgctttttcaataaaatgagccyatatacacatttatttggccaccatctagcctttgttgggtcctttacatatgtcttccctttttcatgtctgagaaatcagcaa

SEQ ID NO: 526337 - DNA, 572 bp, Homo sapiens
tgaatgactacatataaatcagcgacaaatctcccagtcaaattattcccaagttcctgaccttcaaagctgtgagcaaagtaaactgggtgttacaagccactaatatttcaagtaatttttttcccagaaatacataactaaaacagaatttatgtctcaaaatgaggtcccgctgcaacaaaaaattgaaacaaattagcattgctttgagactggaagccaggcagaagatacaagagccttgagaagactatttgtgaagaatgaaggacgtcattatcagaactgtagaagaggtgccctcttgttatataatggaaggaagttgggcaacagttatctacctatgagaacatagaaaatagaatatgccaacctattatttttgctaaggagatttctaggcagaatgatgaaagtaacaacttttttttttttttaaagcagcaaatgataaaagagagagaaagaagtttaaactggaattatagaaggcccaggattgtctttctagccagtgaaaatttctcgaagcaagaaatgrcctcatggtaaagacaaagtcaagg

SEQ ID NO: 526338 - DNA, 650 bp, Homo sapiens
ttgatggtgatacaagtaatcaagtatttaagcaatggaggatggaagacaaatagtcaaatgatacttgctaagatttactgggtacctgtaacattgtcttatagcttcacaacagtttctaatgtaggtgttataattattctcaaccacattctgcagatacggaaatcatgacacagaaagggtattcgtttaaagtttcatggcaaataaatgatgaaactggaattttaactgagattgacttgctcccgactctgaaatctgaactgttgctctctattgtctcccgcatataacatacaattttgccttgacctagaccccctgttaaaaactgtggcttttaatattctgtgtaattcattgcatagagatgtcagaatgattttagatcacctataaatacctcctggagattacctgaatcattgcattttatctttgtaattttaaggaatatttgaattatrctagttgagaaagaaagagacaaagggtgtcagttccctgggttttgagtagataatggcaaagtttctcctataattcagggctctctgacagctaagtcaatattgaaaactgttagggttaatattcctttgcctgttatgctcaacagggcattatgcagtgaatgattc

SEQ ID NO: 526339 - DNA, 556 bp, Homo sapiens
gcatggataaaaccaaaaaactccagtgaactaaaagtctatttgaactgtttgaaccttgctttgcatttttgcttccaatattcaaaaacatttaagcagatggtactcagataagtgtggggacatctccctgagtgtgtagtaacagatctaatttttgtaaattgaattgtactttacatctaatagagacagcaccagttcctggggattcttgaaaggtggcaatctaaatcacctttattttctgagcttcctctcaggtgcctaaaacagcagcttcagaatttctgtgaggatgaatgtgggtgttgaagtgggagatagctagagaacttgtcttgaaatggcattttgtttttcacagacagtgctttgagatgggttttatgtttatttaggtgggcttggggtggggggttttgtgatagccagcctttggtgcttgtactactctcaaaccatacccgagccacatgtgcaggcatgtgtgtagagacttgaggtgtactgacccaacttgtygccagcctgggctctcagaaggtttcag

SEQ ID NO: 526340 - DNA, 533 bp, Homo sapiens
agatgatttacaatttatatagaactttgtattttaaagtgtattttaattccctggtatcaattttgcagtaactcctagatggtctgtatgatgttaactgtagacaaatcaatgcaaaaataatagtctaagtagacactaggctgtgatctgtcagtctaaaatttgttttctggtgtcatagcaataccaattttaactattcctgctttcctctagaggtaattgaacagtattttttttttcgagacagagtttcacttrctctgccgcccaggctagagtgcaatggcaggatctcagctcactgcaacctctgtctcctgagttcaagtgattctcctgcctcagcctcgtgagaagctgggattacaagcatgggccaccatgcctggctaatgtttgtatttttaatagagacggggtttcgccatgttgcccaggctggtctcgaactcctggcctcaatggatccacccgcctggacctcccacagtgctgggattacaggcaggagccactatgcccag

SEQ ID NO: 526341 - DNA, 643 bp, Homo sapiens
caaacactaaggaaagaagcaaaccacaaagggatcaaggatttctcatggaacatgtgccctgaacaccctctggaagtttctgtgatgtttgctgtcatggcaatggattactctggattaggctgctgccccgggattgttctgttcacctgcttgctgttttcatttttgttagcttgctgtttagacacttaaggtggattccattttgttatccagatgtttctatgcccaggggcactagcatgcattctaatcactgggcatgtattgctctttaatagtatgtagaaaattgagaaagccttgagagctggcctgaaaaatttattagtccctcactaaaacttcatctttaaaatcatgtctctgtggtgtgattgtacctggaagaactagaactcaaccactcaattatgagctcaagaatgtatgaaattgaacatgytcagaaattaatcatttttctcatctcttctgtgaatgatatctcagcagtcaagttatctttcactgctaggggatattcaaaagtaagaatttggaagatcttactaaaaggctttagacagaacctggaaatagattctctgcatttgtatgcaagttaatttttgaattctctacatatgctgaggga

SEQ ID NO: 526342 - DNA, 541 bp, Homo sapiens
gctgaggccactaggaaaaaaaagaccacacacatacactacacacacacacacacacacacacacacgtatgtacacatatatgtatatgtatatgtacatatacacatgcacatacacatgaatatatatatgtgtgtgtgtgtttttgtgtagcttatacataagccaccctcatgggacaaatatagaaatctaaaaataaaacaaagaaaactttgggaaggcaagtgggacctggcacccagtgatctgaaggtagctgagttgtgtcagggttatggaaagcttaagacaggaaccccaggagatctgcctgtagcagccactgagacactcctccttccagaacaactgacatctcaggctctgcaacaacttccaccattactaccctgttccaaagttgtaaagcaactgaagtcccaactctaatagtctcaacaattgtattacctaacagtattacacaggccaatgtcattgatcaaatctcmttacaagaaagaattgcttgtatagggcaagtcgtggtgatatt

SEQ ID NO: 526343 - DNA, 645 bp, Homo sapiens
ttaattttcaaataccttggccttccatttcgattcagccaactaccgagcttgctcttgcctttggattgattttggtattgttcagtgccattctgggtaaaaacataggaaacccatcaaattttgcttctcctggtattttcacaggtattacttttctactcttcccgtaatatgcctcaagcttttaatgttagcaagtttagaaaaaagattttcaaacatgaatttcagatacacacacacacacatacacaaaagtacaaaatacctgtcaaaatttggcaatatgccaagagctggggagaacacaatcattgccctaaagaaatctatatttttaacccataaacattcacctgaaagacccaaaggacacataagcattaaccacatatacactgaagtagttacataatatatcagtgaatgactatgttttgcagggtgacgggtaaagtgggacttattggagttgtatgttaagatacgtagttaggatttttttctgaggctgtcagtacatttcaactgagaaaaaagcatttccagcacaaggtgctgcctgagacaaaaaaaattccagcacaaggtgctgcctgaggaaaaggtcagagyggtctaagttgatggaggagagca

SEQ ID NO: 526344 - DNA, 201 bp, Homo sapiens
gccggagaggcctggaggagacttcggacctgctttcacaactgcagaggtgaggcacttccccttccctgcatccttcctaccagggctgggacrtgaccccagggccacaggcagcctggagctgacctgggatggggagaccaggggtacagaggatgggagtaaaaccctggggcgaggggtagcaggagaattggg

SEQ ID NO: 526345 - DNA, 629 bp, Homo sapiens
atttacaagtcgaatgaccccagaaaagcacttaaattctttgcggaatttggctaaatcattggatgctgagcaggacaccacaaacccaaaacccttctggaacatgggagagaactcgaaacagctgcccggacctcagaagctctcagatcctaggctctggcaggaaagtttttggaagaattatagccagcttttctggggcctcccctctctgcacagcgagtccytggtggctaacgcctgggtaactgacaggtcttatactttacagtctcctcctttcttgttcaatgaaatgtccaatgtctgcccaattcaaagggagactacaatgtccccactgcttttccaggcccagcccctgtcccatctggggcccgagtgccaacactttatttcatccacaccccaattccggcccacacctatggctcaggccgaggctcaggcccatcttcaatcttctttcccagtcctatctcctgcttttccatccctgattcagaacactggagtagcttgccctgcatcgcagaataaagtgcaagctctctccctacctgaaactcagcaccctgaatggcctttgttgaggagacaactagaaggtaggttggctttac

SEQ ID NO: 526346 - DNA, 629 bp, Homo sapiens
atttacaagtcgaatgaccccagaaaagcacttaaattctttgcggaatttggctaaatcattggatgctgagcaggacaccacaaacccaaaacccttctggaacatgggagagaactcgaaacagctgcccggacctcagaagctctcagatcctaggctctggcaggaaagtttttggaagaattatagccagcttttctggggcctcccctctctgcacagcgagtccttggtggctaacgcctgggtaactgacaggtcttatactttacagtctcctcctttcttgttcaatgaaatgtccaatgtctgcccaattcaaagggagactacaatgtccccactgcttttccaggcccagcccctgtcccatctggggcccgagtgccaacmctttatttcatccacaccccaattccggcccacacctatggctcaggccgaggctcaggcccatcttcaatcttctttcccagtcctatctcctgcttttccatccctgattcagaacactggagtagcttgccctgcatcgcagaataaagtgcaagctctctccctacctgaaactcagcaccctgaatggcctttgttgaggagacaactagaaggtaggttggctttac

SEQ ID NO: 526347 - DNA, 495 bp, Homo sapiens
caacactgggacaacctgggaaggatccaagagtctctggatctgatgcagcttygggacgaatcaccagggacaagtcaggccaagggcaaacccagtccctggcagtcctccatgtccacaggtgaaagcagcaaggaggcacagaaggtgaagttccagctagagagggacccgtgcccacatctggggcaaattctgggtgagaccccacaaaatctatccagggatatgaaaagcttcccacggaaggttctgggggtgacttctgaggagttggaaaggaacttgaggaagcccttgaggagtgactcgggaagtgatttattaagatgcacagagaggactcatatagaaaacatcctgaaagcccacatgggcaggaacttgggccagaccaacgagggcttgatccccgtgcgtgtgcgtcgatcctggcttgctgtcaaccaggctcttcccgtgtccaacacccatgtgaaaaccagcaatcta

SEQ ID NO: 526348 - DNA, 495 bp, Homo sapiens
caacactgggacaacctgggaaggatccaagagtctctggatctgatgcagctttrggacgaatcaccagggacaagtcaggccaagggcaaacccagtccctggcagtcctccatgtccacaggtgaaagcagcaaggaggcacagaaggtgaagttccagctagagagggacccgtgcccacatctggggcaaattctgggtgagaccccacaaaatctatccagggatatgaaaagcttcccacggaaggttctgggggtgacttctgaggagttggaaaggaacttgaggaagcccttgaggagtgactcgggaagtgatttattaagatgcacagagaggactcatatagaaaacatcctgaaagcccacatgggcaggaacttgggccagaccaacgagggcttgatccccgtgcgtgtgcgtcgatcctggcttgctgtcaaccaggctcttcccgtgtccaacacccatgtgaaaaccagcaatcta

SEQ ID NO: 526349 - DNA, 439 bp, Homo sapiens
tcacccagagaaccccacagaggccacgctgagagacttcactcagtcccacagagacctcccgcaaatgtcagagaccttccatggttctcacagggagatctcacacagaraccccacaaagacctcagagacttcacacagagtcataaaacagggacctcatgcagagactcatgcagctcactgcaacctccggcctccagccccagaaatggcacacggcaccccccactgcctcacagagacctctctcagagtcctcctcacacagagaccttgcctggagacctcccactctccacagagaccttgtatagattcctcacacaggcctcaggttgctccacactcattgcccagaaacctctcacatagaattccctcaaacattccacacagagattctgtagggctttcacagggtcctcacacaggg

SEQ ID NO: 526350 - DNA, 614 bp, Homo sapiens
gggacatcctcacactttttttttttttttgtaatagcrctgcctctgaaaagaattatggattccacaggcagacctgcaaaattctttcttccacaggtttccattagcttgaattctgacccacaatttagaaaattcatttttttaaattattttttgagatggagtcttgctctgtcgcccaggctggagtccagtgggataatcttggctcactgcaacctccgcctctggagttcaagagattctcctgcttcagcctcctgagtagctgggattataggtgtgcactaccatgctcggctaatttttgtatttttagtagagacagggtttcaccatgttggccagctggactcgaactcctgacctccggtgatccacccgcctcggcctcccaaagtgctgagattataggcatgagccactgtgcccaaccaaaaatttttaagtgaagaaaatgttaccaaccttcaatgaaagaaaatatcttatttgttcagtttgttattatccagccaaattacatcaatgtcatatattttttaaagtttgggggagacaagacttgaatttgagatgcctgacttctgtactttgaaaatatgata

SEQ ID NO: 526351 - DNA, 614 bp, Homo sapiens
gggacatcctcacactttttttttttttttgtaatagcgctgcctctgaaaagaattatggattccacaggcagacctgcaaaattctttcttccacaggtttccattagcttgaattctgacccacaatttagaaaattcatttttttaaattattttttgagatggagtcttgctctgtcgcccaggctggagtccagtgggataatcttggctcactgcaacctccgcctctggagttcaagagattctcctgcttcagcctcctgagtagctgggattataggtgtgcactaccatgctcggctaatttttgtatttttagtagagacagggtttcaccatgttggccagctggactcgaactcctgacctccggtgatccacccgcctcggcctcccaaagtgctgagattataggcatgagccactgtgcccaaccaaaaatttttaagtgaagaaaatgttaccaaccttcaatgaaagaaaatatcttatttgttcagtttgttattatccagccaaattacatcaaygtcatatattttttaaagtttgggggagacaagacttgaatttgagatgcctgacttctgtactttgaaaatatgata

SEQ ID NO: 526352 - DNA, 637 bp, Homo sapiens
aacctgctatgtaaaattgccagcaagaaaaaaaagtgcaagaataaggtctatgactgaagtggctcggtgtcatgattccctactctagcattctcagaaggatcccatccgttagacatgcagaaactgcagcccatccaaatgtgatctgtttaatcaataatcaacagttcatattgaagacagtatttttgctatatgtgcttgtcataatgaaggacggtgtacaaagaacaagttgaaccagatgaacactttaattttgatgccaaaatcaatcactttttgtcataacaccaggcayagataatggttgatccagtgcacactgtctgtattaccccataatttcctgcagcagacatgttgtaatttgacatactccttgatcattaacacattgcagtagtcagatatacttgtcaagattaagctaaatgtcagtagaagactcagtgaaggcttgaaaatcttgcagcttgctctcagagacactgccaactgaaatgataaatgtcattgggctgtggtactattctcatcgacgtatcaataaataaagggatgctggcgaaaaaatgttcttccagatacctgcccactctgaacctagagttcttttcatcactgtgaa

SEQ ID NO: 526353 - DNA, 191 bp, Homo sapiens
ccaggtgttcaagaccagcctgggcaacatggtaagatgccatttctacaaaaaaaaaaaaaaaaaattaagagttaaagtgatatgtaagaaatataagattaagaaggtaagtatcagattgttgagkgaatctttcagtgtatttttaaacattctaattagacttaactgactatattgtaaacaaa

SEQ ID NO: 526354 - DNA, 505 bp, Homo sapiens
cccctctaccacatggcccagaagagggggaacgctgcccctgcttcagtttccctccaattcaggtttgaggccatcatcctcttccctgggtaggtagcagaagcacaactctggagaaaaagctgagcgcatagtggaagaagcctctggtagggctctggcgggctgtcagggggcgatttagggcgattgctttccaccaggcacattgtttcactgcagcaaatatttcctcagcgttgctacaagacgtctatttggcaaaccacagagggcctgcaggccccactctctactggtaaagaggcaggcgggcactgctgatgactggagtaaatctgagctcacaattaaaatctctttagagattgcagccaagtgactgatggataggaccccaggctccatccrtcccctccacgctcctccaccaagacagatatcgacagggcatcataaatagcctcgcatatccagggcttgcaggctggcaggagatgag

SEQ ID NO: 526355 - DNA, 469 bp, Homo sapiens
tgtgaaatgcggatgctaatgtctacaacacaggagctgggagggatccaagacatagcttataagaaagagcccagaagagactcagaacacattggtcgaaatatgaatgtcctcccctcatagtggcaccacggtgcggtggggtgttgagggaaggacactgtaccgtgggtgtaatgagaggggtcctaggctatagatgacttcaagaatgaaggtccatggcaggagctgttgggagtrtcccactatgtggaaaacctggccaaaccagctgagctaccagccacagacctgggtccacaaacccataaatagcctcatgtgcaatctgctgatcagccacaccagctctaagtcccacaagtaccgagactatgacccttgtaccctgtggttcagtgttctccaaagttagcaagtgccagaagcaccaggaggagctgctaaagcagagcttgcaggg

SEQ ID NO: 526356 - DNA, 644 bp, Homo sapiens
aattaaggttacctgtttagctggccaaactttttactggtatttctgaggaagacttaaaatttttcatttgccctttgcagataatcttatggagggtatggatgaaatttggggtaaaggagtttttatagcagtgtgtttaaaaaaacaaaaacaaactcttctccctctgggctgcctttttttctttagtctcaaatgtatgtgggggttgttttagttaactccttgaaggtttaaatttcaaagacatggtgagattcacatctctgagagactgagaaaggacggaagttttctccaagaaggcattttagggcatatttgcctattatgaaagatccagggtatttttttttaagtttttcttttccttgagcacaggacagtcttaaggaatatttttgtaatggaggcccaaaatataagaaggcctggagctgaaggagttgatgatggagctctggaaagtaggtggagtgtaggtacagcaaagccagcctggctgccagttccctgagacagtgttctgtttatctcctggttggcagtatttacacaagtaacctatacacmccggccctggatatcaggctggagtactttctgtaaatctttcagaggaaggcaagttagtaggc

SEQ ID NO: 526357 - DNA, 649 bp, Homo sapiens
aggagaggccaccagaccaagtagtgctcaggtcagaccaaccccatctgatggacaagactgccctgcagagggtccaacagttcacctagggctaaagtcacttatgggagcaagtcaagcctaaggggacagccttccctggctgtgctccactacagatggtcccacaccaaaccctctgggctacacatcagctggtttactgctcctaccacatgtctaatctgctttccctgccaactcaagtgtccatggtggttgaggggtctcttcctgctggggatctagaggcccgtggcactagtgggttgctccttgcctggtcaactcagtcattcccctggagtggttgggaatcaggaaaaaayttggttgcacagtaacctgtagccctgtgtatggttcccaccttcttcccccttcagctcagcttccatatcttccctctatccactcttgttgctttccctctgaagatctgttaggagcatggcagtcatcttggtctctgtgggagctattccacctcactgcatctagtccatcatctttccttccaccccctcaattatttcttccatgtattgctcattgagtgttgtatctaaaaagccattgccataatgaagtcatcaagattttcttc

SEQ ID NO: 526358 - DNA, 598 bp, Homo sapiens
tgaacccaactttgcctcttattggaaacttactaagctctgttccctaaatttctcatttataaaataaagttcatgataggaccttgtaagtgtattataattaaatattaacatcaatttaatgctcataatttagccaacttaagtttggatcacagctccaccttgggctcataacttaggctgtctgagtatcagtttatcttcagcagaatggagataacagtatctattttttagtaatgttgttttgatgacataagatagcagtgtaaaatgccttgatcatagctaactctgaaggaatgttaacttctttgcccatccctgttaattacaggtttttccaaaataatgcagtagggygtatgcctttcggaaactatattgccttttagagggcaatttcaatggacaacaacttttagacccaaggaatttactgtaatggttgaatagcaggcaatgaagactaaattttgggatagagagctatgctcctataatcacaatctacaagtagatatttctctaatgctaaaatgttgccttactttccacatatttccagaagccctgatctctacatttctga

SEQ ID NO: 526359 - DNA, 598 bp, Homo sapiens
tgaacccaactttgcctcttattggaaacttactaagctctgttccctaaatttctcatttataaaataaagttcatgataggaccttgtaagtgtattataattaaatattaacatcaatttaatgctcataatttagccaacttaagtttggatcacagctccaccttgggctcataacttaggctgtctgagtatcagtttatcttcagcagaatggagataacagtatctattttttagtaatgttgttttgatgacataagatagcagtgtaaaatgccttgatcatagctaactctgaaggaatgttaacttctttgcccatccctgttaattacaggtttttccaaaataatgcagtagggcgtatgcctttcrgaaactatattgccttttagagggcaatttcaatggacaacaacttttagacccaaggaatttactgtaatggttgaatagcaggcaatgaagactaaattttgggatagagagctatgctcctataatcacaatctacaagtagatatttctctaatgctaaaatgttgccttactttccacatatttccagaagccctgatctctacatttctga

SEQ ID NO: 526360 - DNA, 681 bp, Homo sapiens
tgccccatttgagcttgccatctatttcctgctgggcctttgactgattcagctattgagctgatggaatgcagaaataaaatggagatttttttcattgtgtactgctttacactttttagtttctgaatcctgtgaatctattgcatactctaaaatttyaacatgtatgtttttattaacttttctttttgttgagatagagtattgctctgtcacccacgctggagtgtagtagcgtgatcttggctcactgtaacctccacctcctgggttcaagcgattctcctgcctcagcctccccagtagctgggattagaggcacgcgccaccatgccgagctaattttttgcatttttggtagagacagggtttcaccatgttggccaagctggtctcgaactcctgacctcgtgatctgcccaccttggcctcccaaagtgctgggattacaggtgtgagccacagcacccagcccttatacacttttcactttgaaaataatcatatattcatggggaattgcaaaaaatagtagagacaagtcccctgtagccttcagtcttcctcaatggttacatcttatgtaactctagcacaagatcaaaatcaggaaattgacattgatatgatgtgtgtgcatatagtcctatgccactttatgatgtgtgtagattcatg

SEQ ID NO: 526361 - DNA, 681 bp, Homo sapiens
tgccccatttgagcttgccatctatttcctgctgggcctttgactgattcagctattgagctgatggaatgcagaaataaaatggagatttttttcattgtgtactgctttacactttttagtttctgaatcctgtgaatctattgcatactctaaaattttaacatgtatgtttttattaacttttctttttgttgagatagagtattgctctgtcacccacgctggagtgtagtagcgtgatcttggctcactgtaacctccacctcctgggttcaagcgattctcctgcctcagcctccccagtagctgggattagaggcacgcgccaccatgccgagctaattttttgcatttttggtagagacagggtttcaccatgttggccaagctggtctcgaactcctgacctcgtgatctgcccaccttggcctcccaaagtgctgggattacaggtgtgagccacagcacccagcccttatacacttttcactttgaaaataatcatatattcatggggaattgcraaaaatagtagagacaagtcccctgtagccttcagtcttcctcaatggttacatcttatgtaactctagcacaagatcaaaatcaggaaattgacattgatatgatgtgtgtgcatatagtcctatgccactttatgatgtgtgtagattcatg

SEQ ID NO: 526362 - DNA, 515 bp, Homo sapiens
gctattttaaatatgtcaaaagaaatatattttccggaaaaatactttgatttccttcagggcctgctatctgtcatgtgatactacactagagtcaggttggaagttggtatcttactactacagagtctattttgttagtcttaagatctctattttaatgttactgctggtcagttgtgtctagactccaaatggagaagggtatgatgaggcatgtcttgacctgttccccacttcccatcatggcctgaattaattttctaagtttctttgargtccccttggctgaaagggggggtccattaagttggttgaggggcttagaattttttttttgttttacacattcaatatatttaagtgctatttggtctggagtgataagaaaaatctaagaaaagaatcttaggcatgtcagctattcctttatcccctccttatttcatttcttcctttcacaaaagtgaagatgtgaaaaacagcaccagccattgaggttgaagtgagctggc

SEQ ID NO: 526363 - DNA, 528 bp, Homo sapiens
aaaggtctgacagaaacatttaccagaggccctgtggggctaccacctgtgaggtttcatctgcataacaagactgcctttgcccaggtttctcctcttctcccccactcataactgtctttccacaatatcctgctttgccacaatctgagccccccattctctctgtaacatcaagatgatacaaaagcgttaaccatcttgcctttgcgttttttttatagtcatgactcctgtgcacacgtatgcacacaataaaatttgtacayccttttcccttgttaatctatgtattatgtttgttttatagattcagattaccaaaacttcaggggaaaaattcaaacctccctaaaatggtaaggaaaaattttaaattctcctaaatataaatttttccaaatttcccttaaaaatggctatattgtattttatgagtccattgctaagaaaacttcagaaatgtcaaaatgatgatagttttgccttcttttcatttctttatggaatacacatgttaaaagaaaa

SEQ ID NO: 526364 - DNA, 528 bp, Homo sapiens
aaaggtctgacagaaacatttaccagaggccctgtggggctaccacctgtgaggtttcatctgcataacaagactgcctttgcccaggtttctcctcttctcccccactcataactgtctttccacaatatcctgctttgccacaatctgagccccccattctctctgtaacatcaagatgatacaaaagcgttaaccatcttgcctttgcgttttttttatagtcatgactcctgtgcacacgtatgcacacaataaaatttgtacatccttytcccttgttaatctatgtattatgtttgttttatagattcagattaccaaaacttcaggggaaaaattcaaacctccctaaaatggtaaggaaaaattttaaattctcctaaatataaatttttccaaatttcccttaaaaatggctatattgtattttatgagtccattgctaagaaaacttcagaaatgtcaaaatgatgatagttttgccttcttttcatttctttatggaatacacatgttaaaagaaaa

SEQ ID NO: 526365 - DNA, 603 bp, Homo sapiens
gtttgaaaaccactgaactaagatacaggatgtttcagtgccttggctttgtgagtatctatctattcggtacagagcaaggcttctcaaccaagacactcttgacatgttgagctgggtgtttctttattgtggcgggccgtcytgtgaactgtgggatgtttagcagcatccctggtctctttacactgtgtgtcagtagcacccttcctggggacaaactccatcctcaagccacctccttaactgagaaccacagatgtaaagaattcacaggtccagttccaagctcagaccccaatctgtttgaggactgtgctgttttataccagcttctcttttcttttctactactatggcaaggttaaacattggctaacattataatgctggtgattttttttttttaataggtagagaaaagcaggctcgagattctcacataaatgggggtattcgtctgccacatttctaaattaataggagaaaaggttgcttggttacctgaaataaaagtcaaaaaaggtttctaggtaccagcataggcatttcagggcctgaaagcaaaatccaattatctttccacaagtatatgtattaaaa

SEQ ID NO: 526366 - DNA, 574 bp, Homo sapiens
ttataccattagctcctctgattctcacaccttcagactcagactgaattacaccaccagatttcctggttctccagcttgcagactgcagatcatgggactcctctacaatgatatgaaccaattcccatattaaatgttctcttatatctatatctcctattggttctacttctctggagaccccctggatgggtccaatctactgtagcagcctacttgcctggcattcacactcttcatgtgtatgccagcacgtatattctactgaacccatcctagaagtcctaggctgtcgaattttgtagctgttacttagctttccttgcctactagccggggtaggacaactatttgagtaamcaggctatagattagccactggtccatgaggctgccagaccaaaagtctttgcccatacagactcatgctcttgggaatttgaattgggaaatcagaagtgaggcagttggccatgatggttgggattgaaaagtcataaggcagagtgaggccgctggagtcctgagcaaaccaaaggagtaagagaaatcatgagaaagcagcagccat

SEQ ID NO: 526367 - DNA, 481 bp, Homo sapiens
tgcttgcctcaggacccccacactgctcagcagtggttgcaggggccctgagctcctggccatgtgccccatgactcccccaacagagggagctctgcacagcggtgaagacaatggctctgggtcttggcttaggctcttgaaacccagctccgccacatactaacagggtagtgttgggcaaagggactgaacatctctgagccttggttttctcatctataaaatgggtttcacaggtgtattaatgaagacacaatatatgtgaagtgcttagcatatgcyccagcatatagtgagtgctctatcagtggtagctcaaatgtctttattatggacctcagagagccacgggttgttggggaaagagctcggtgtgtcccagtgcattgcaaattgtctgggttcaacctggaagtctccatctgtgcccacatccactgtcctttacgatgatgggttctagattttattggctaca

SEQ ID NO: 526368 - DNA, 526 bp, Homo sapiens
aacaaattgtgccttcaaaaactgttaaatgcggccgggcgcrgtggttcacgcctgtcatcccagcactttgggaggccgagccaggtggattacctgaggtcaggcgttcgagaccagcctgaccaacatagtgaaacccccgtctctactaaaaatacaaaaattagctgggcgtggtggcaggcgcctgcagtcccagctactcaggaggctgaggcaggagaatcgcttgaacccgggaggcagaggttgcagtgagccgagatcatgttaccgcacaccagcctgggcgacagagggagactccatctcaaaaaaaaaaaaaaaaagaactgttaaatccattaaaaatgtactcccaaccaacaatggcagtcatgggtctgagccaagtctactgaacttacaatcctgccagccatagagtttgtgtcatatacttccctcacactgaaagttacacaaatcttagtacctgggaagacagagaaagccaaagagctggtcttctcccatatatgtt

SEQ ID NO: 526369 - DNA, 455 bp, Homo sapiens
ctctacttggccattagcagcccttgatgttgtgatgatgttgttagtattgactgctctttcaggaccagccaacaggctcttgtaggcaaaatttatttttagtaccagacatcttgtattactgtaaatgagagcgagaggctgtaatgatagctctcaagcccaagcacctctgcatttagtggctctaatttcattatagagaaattaccatgaaatagcactgtgaccaattagatacacttctgggaaattttaggtgtaggtgaagcaccttttttcattcattctctgtttctgatagtttggacccagaatcaagctgacrgtttatcgtgtagagtagcagcctcctgaggtcagcgcctcatgcattgtctggtgcatgagcatttcatgatgcttcccagagtgagttcttccaactctagccttcctactccttcttggag

SEQ ID NO: 526370 - DNA, 455 bp, Homo sapiens
ctctacttggccattagcagcccttgatgttgtgatgatgttgttagtattgactgctctttcaggaccagccaacaggctcttgtaggcaaaatttatttttagtaccagacatcttgtattactgtaaatgagagcgagaggctgtaatgatagctctcaagcccaagcacctctgcatttagtggctctaatttcattatagagaaattaccatgaaatagcactgtgaccaattagatacacttctgggaaattttaggtgtaggtgaagcaccttttttcattcattctctgtttctgatagtttggacccagaatcaagctgacagtttatcgtrtagagtagcagcctcctgaggtcagcgcctcatgcattgtctggtgcatgagcatttcatgatgcttcccagagtgagttcttccaactctagccttcctactccttcttggag

SEQ ID NO: 526371 - DNA, 582 bp, Homo sapiens
ccaccagaaacatgattctcagactattttcataggtcagacccttaaaatggggtgttttaaatatgaacctctcaatttcccattagagatattatatagccagaatatactggaaccagatgtactgtagcaggaatataaaggttttaaaagacctttttccctctaaggctgcttatttatctttaagtrtaattattcagatgagaaattaggatcatggcccttaattgggagtcaaatgtgtgggttattctggattttgccacagccttatttgagttttgatttcctctataaaacgtgaagaataagtgagtcgtcctgtaattgcaagctgtgtagttgagacatactgtcgtgttgtcaaaggtttgcagtatgttagaaaaaattgcttgtaaattaaatgtcattaaaacatccagaaagattctcaaagtcaagaaatagactggagatggcttttaagggcccttcaatcattgacagttttgaaaccagtgtttctcagagtgtggtccccaaactagcagcatcagcatgacttggaaacattggaaatgcacattctcatgc

SEQ ID NO: 526372 - DNA, 628 bp, Homo sapiens
gatctgcctgagttatgccaccagaaacatgattctcagactattttcataggtcagacccttaaaatggggtgttttaaatatgaacctctcaatttcccattagagatattatatagccagaatatactggaaccagatgtactgtagcaggaatataaaggttttaaaagacctttttccctctaaggctgcttatttatctttaagtgtaattattcagatgagaaattaggatcatggcccttaattgggagtcaaatgtgtgggttattctggattttgccacagccttatttgagttttgatttcctctataaaacgtgaagaataagtgagtcgtcctgtaattgcaagctgtgtagttgagacatactgtygtgttgtcaaaggtttgcagtatgttagaaaaaattgcttgtaaattaaatgtcattaaaacatccagaaagattctcaaagtcaagaaatagactggagatggcttttaagggcccttcaatcattgacagttttgaaaccagtgtttctcagagtgtggtccccaaactagcagcatcagcatgacttggaaacattggaaatgcacattctcatgcctcatcccagacctgctgaatcagaaact

SEQ ID NO: 526373 - DNA, 493 bp, Homo sapiens
tggtagatgtagcaggagagctggagttgggggaaaaaagtattattttaccaccactgtgtacttaagattgtttctggcaagagtcacccaatgttcaatttagataaaattttggtgacgaatgagcaatttacatgttcttaaaatgtctcctcatagattgccttttggttgcaaggggaacaataataattacacagtgcagaaatcagatacccctttgactagtgactgaaatgaacatcaccaataaaggacagacagacatcatgtgcctctggatacgatgccccaaagaggaggtaatactactcttgtrctatttgactggaaatgcatagcctgagtttaatgatgaggaagcgttatagaagccccaaacaaggaacattccatcttacaaacaggaactgtttttaacatgtcagtgtcataaagaagaaaaaaatctaaagagatatgtcaactcactacgatatatgattttaga

SEQ ID NO: 526374 - DNA, 493 bp, Homo sapiens
tggtagatgtagcaggagagctggagttgggggaaaaaagtattattttaccaccactgtgtacttaagattgtttctggcaagagtcacccaatgttcaatttagataaaattttggtgacgaatgagcaatttacatgttcttaaaatgtctcctcatagattgccttttggttgcaaggggaacaataataattacacagtgcagaaatcagatacccctttgactagtgactgaaatgaacatcaccaataaaggacagacagacatcatgtgcctctggatacgatgccccaaagaggaggtaatactactcttgtactatttgactggaaatgcatagcctgagtttaatratgaggaagcgttatagaagccccaaacaaggaacattccatcttacaaacaggaactgtttttaacatgtcagtgtcataaagaagaaaaaaatctaaagagatatgtcaactcactacgatatatgattttaga

SEQ ID NO: 526375 - DNA, 493 bp, Homo sapiens
tggtagatgtagcaggagagctggagttgggggaaaaaagtattattttaccaccactgtgtacttaagattgtttctggcaagagtcacccaatgttcaatttagataaaattttggtgacgaatgagcaatttacatgttcttaaaatgtctcctcatagattgccttttggttgcaaggggaacaataataattacacagtgcagaaatcagatacccctttgactagtgactgaaatgaacatcaccaataaaggacagacagacatcatgtgcctctggatacgatgccccaaagaggaggtaatactactcttgtactatttgactggaaatgcatagcctgagtttaatgrtgaggaagcgttatagaagccccaaacaaggaacattccatcttacaaacaggaactgtttttaacatgtcagtgtcataaagaagaaaaaaatctaaagagatatgtcaactcactacgatatatgattttaga

SEQ ID NO: 526376 - DNA, 553 bp, Homo sapiens
catgcccccaatattgagtgccttctccagatattgtcacaccrgatctattaaacacttcgaggtgttctttagccctaaattagatgaaacattctagaaagtggcaaaattgatgaatttcagatttttctctaaagcttgagagctttacatatcctttataagcctgcttgtgaaagatattgtttttaatacatgctttaatgttttcagggcttgtcatcagaatattgatacaattttttttaatgcagtaggacccaaactagaaatgaattacaactattgggaaagaaaaaactattgttattattgcagatgatataatggtccaagtagaaagcctgggaatctcatcttagaattaatatgaaattagcaaaaacctccagatatccaaaagttaatagacaaaggtagctttaagatataattgtagtatatcaccatttgttgtggcaacaagctttgtcacatttatagacaaactgagcatgtgtgcagaaactatacaaagataacagaagacctgtatagatggaaaaataca

SEQ ID NO: 526377 - DNA, 553 bp, Homo sapiens
catgcccccaatattgagtgccttctccagatattgtcacaccagatctattaaacacttcgaggtgttctttagccctaaattagatgaaacattctagaaagtggcaaaattgatgaatttcagatttttctctaaagcttgagagctttacatatcctttataagcctgcttgtgaaagatattgtttttaatacatgctttaatgttttcagggcttgtcatcagaatattgatacaattttttttaatgcagtaggacccaaactagaaatgaattacaactattgggaaagaaaaaactattgttattattgcagatgatataatggtccaagtagaaagcctgggaatctcatcttagaattaatatgaaattagcaaaaacctccagatatccaaaagttaatagacaaaggtagctttaagatataattgtagtatatcaccatttgttgtsgcaacaagctttgtcacatttatagacaaactgagcatgtgtgcagaaactatacaaagataacagaagacctgtatagatggaaaaataca

SEQ ID NO: 526378 - DNA, 553 bp, Homo sapiens
catgcccccaatattgagtgccttctccagatattgtcacaccagatctattaaacacttcgaggtgttctttagccctaaattagatgaaacattctagaaagtggcaaaattgatgaatttcagatttttctctaaagcttgagagctttacatatcctttataagcctgcttgtgaaagatattgtttttaatacatgctttaatgttttcagggcttgtcatcagaatattgatacaattttttttaatgcagtaggacccaaactagaaatgaattacaactattgggaaagaaaaaactattgttattattgcagatgatataatggtccaagtagaaagcctgggaatctcatcttagaattaatatgaaattagcaaaaacctccagatatccaaaagttaatagacaaaggtagctttaagatataattgtagtatatcaccatttgttgtggcaacaagctttgtcacatttatagacaractgagcatgtgtgcagaaactatacaaagataacagaagacctgtatagatggaaaaataca

SEQ ID NO: 526379 - DNA, 640 bp, Homo sapiens
gccagcaagacaggggataggggagtgaggcaaaaagatgaaaggctattttggtgcgagtgatgcatgatrtgagggaccagtctgaagcaaagacaatttaaggcagccaccttgatgcagctcttttcatttagggaatatttttaaactgcagttttgacaaaaatgtgttgattttaaaattattctttttgcgccgggtgcaatagctcatgcctgtaatcccagcactttgggaggctgaggcaggtggataacctgaggtcaggagttcaagaccagcctggccaacctcgtctctacccaaaatacaaaaattagctaggcgtggtggtgcatgcctgtagtcccagctactcgagaggctgaggcagaagaattgcttgaattggggagacagaggttgcagtgagccaagattgtaccactgcactccagcctgggcaacagagcaagactccatttcaaaaaaattctcaataaaatcaatcaatcaatcaataagtaaatgtattctttttattaccagtgatgcctgcaatagagcttctttactcttaaccctgtggttctcaactaaaggtacttttgcttctcaggacacacttggcaaagtctggagatacttttggttgtc

SEQ ID NO: 526380 - DNA, 640 bp, Homo sapiens
gccagcaagacaggggataggggagtgaggcaaaaagatgaaaggctattttggtgcgagtgatgcatgatgtgagggaccagtctgaagcaaagamaatttaaggcagccaccttgatgcagctcttttcatttagggaatatttttaaactgcagttttgacaaaaatgtgttgattttaaaattattctttttgcgccgggtgcaatagctcatgcctgtaatcccagcactttgggaggctgaggcaggtggataacctgaggtcaggagttcaagaccagcctggccaacctcgtctctacccaaaatacaaaaattagctaggcgtggtggtgcatgcctgtagtcccagctactcgagaggctgaggcagaagaattgcttgaattggggagacagaggttgcagtgagccaagattgtaccactgcactccagcctgggcaacagagcaagactccatttcaaaaaaattctcaataaaatcaatcaatcaatcaataagtaaatgtattctttttattaccagtgatgcctgcaatagagcttctttactcttaaccctgtggttctcaactaaaggtacttttgcttctcaggacacacttggcaaagtctggagatacttttggttgtc

SEQ ID NO: 526381 - DNA, 640 bp, Homo sapiens
gccagcaagacaggggataggggagtgaggcaaaaagatgaaaggctattttggtgcgagtgatgcatgatgtgagggaccagtctgaagcaaagacaatttaaggcagccaccttgatgcagctcttttcatttagggaatatttttaaactgcagttttgacaaaaatgtgttgattttaaaattattctttttgcgcygggtgcaatagctcatgcctgtaatcccagcactttgggaggctgaggcaggtggataacctgaggtcaggagttcaagaccagcctggccaacctcgtctctacccaaaatacaaaaattagctaggcgtggtggtgcatgcctgtagtcccagctactcgagaggctgaggcagaagaattgcttgaattggggagacagaggttgcagtgagccaagattgtaccactgcactccagcctgggcaacagagcaagactccatttcaaaaaaattctcaataaaatcaatcaatcaatcaataagtaaatgtattctttttattaccagtgatgcctgcaatagagcttctttactcttaaccctgtggttctcaactaaaggtacttttgcttctcaggacacacttggcaaagtctggagatacttttggttgtc

SEQ ID NO: 526382 - DNA, 357 bp, Homo sapiens
tgtgagccaccatacctgcccccaggccttattttaaatatcattttttaagcaggtcttccctgaacagtccctctcccctcaaccaggttaggtctcaaggtcacatgctcccctaacaccctgtgctttcctaagtaccacttargattgtgatagcctgagccggtgtgactatgtgtttggctcataagctcataaaggcagggaccctccatcttgttcacagctgtggccctggagcgagcaatgccgggcatctaacagatgctcagtaaatagttgttcaatgaatgcctgaataaataggttgctccagtacccatgactctaatgaacaaacatttggctacctct

SEQ ID NO: 526383 - DNA, 357 bp, Homo sapiens
tgtgagccaccatacctgcccccaggccttattttaaatatcattttttaagcaggtcttccctgaacagtccctctcccctcaaccaggttaggtctcaaggtcacatgctcccctaacaccctgtgctttcctaagtaccacttaagattgtgatagcctgagccggtgtgactatgtgtttggctcataagctcataaaggcagggaccctccatcttgttcacagctgtggccctggagcgagcaatgccgggcatcwaacagatgctcagtaaatagttgttcaatgaatgcctgaataaataggttgctccagtacccatgactctaatgaacaaacatttggctacctct

SEQ ID NO: 526384 - DNA, 603 bp, Homo sapiens
agctgctttgtaaagagctactagtggatactttgaacaaaacaaaaaacaaagcaacaccactcctccatcattctccgcatccccccttcagagggatccgtgcaaccagcaccagttcctgcaccctttgaagatcctgcagtgtaaatagagctggtctgttctttcccgcctgtcagcctgggatttgtgcatatgctttttcagtttcctctcgtccatctgcttttccagtttgatttctgcctcctgtctccctctccctgaggtcattttgtccatcttcccactccattaagcactcagcggcaccctgtctatctggtggtgctgactctctttatgttggaacacttttagtgaccatatcgtcaccttaggggcacctgatacctatcttctttttcccttccttgactagctttccttcttattgactatataaaagataagtatttattttcagtattcttagaatttagtatttttgtatttcttggtcttaaaagtcamgtaccaagaaccattactttcaggtactggctttcctctgttccaactcacggtggaattatttcatttctcattctcttcttaggt

SEQ ID NO: 526385 - DNA, 554 bp, Homo sapiens
aactttacgagtcttttatttatttatttatttttacttttattttttattgagataagatctcactgtgtcacccaggctggagtacagtggcagtcttggctcactgcagcctyaaattcccaggctcaggtgatcctcccacctcagcatcctgagaagctggaaccacaggtgtgtgccaccatgcctggctaattattgtattttttgtagagtttttccatgttgtccaggctggtttcaaactcctaggctcaagcgattcacccgctttggcctcccaaagtgctggaattgagccaccacacctgtgtgtcaagctataattttaggagtctttgtaaagagatttttcatttaacgtttggagtaactccatgacattggaaatttcatagaaagaaatcagagctcaggaatgtttctttttggtttaggtttggatgcctatggcagaaaaacctaaagtaataatgactaaaataggatagaactatatttccctttcatatgaaagaagtttgtcaatagacaattcagagcttatacaa

SEQ ID NO: 526386 - DNA, 554 bp, Homo sapiens
aactttacgagtcttttatttatttatttatttttacttttattttttattgagataagatctcactgtgtcacccaggctggagtacagtggcagtcttggctcactgcagcctcaaattcccaggctcaggtgatcctcccacctcagcatcctgagaagctggaaccacaggtgtgtgccaccatgcctggctaattattgtattttttgtagagtttttccatgttgtccaggctggtttcaaactcctaggctcaagcgattcacccgytttggcctcccaaagtgctggaattgagccaccacacctgtgtgtcaagctataattttaggagtctttgtaaagagatttttcatttaacgtttggagtaactccatgacattggaaatttcatagaaagaaatcagagctcaggaatgtttctttttggtttaggtttggatgcctatggcagaaaaacctaaagtaataatgactaaaataggatagaactatatttccctttcatatgaaagaagtttgtcaatagacaattcagagcttatacaa

SEQ ID NO: 526387 - DNA, 554 bp, Homo sapiens
aactttacgagtcttttatttatttatttatttttacttttattttttattgagataagatctcactgtgtcacccaggctggagtacagtggcagtcttggctcactgcagcctcaaattcccaggctcaggtgatcctcccacctcagcatcctgagaagctggaaccacaggtgtgtgccaccatgcctggctaattattgtattttttgtagagtttttccatgttgtccaggctggtttcaaactcctaggctcaagcgattcacccgctttggcctcccaaagtgctggaattgagccaccacacctgtgtgtcaagctataattttaggagtctttgtaaagagatttttcatttaaygtttggagtaactccatgacattggaaatttcatagaaagaaatcagagctcaggaatgtttctttttggtttaggtttggatgcctatggcagaaaaacctaaagtaataatgactaaaataggatagaactatatttccctttcatatgaaagaagtttgtcaatagacaattcagagcttatacaa

SEQ ID NO: 526388 - DNA, 394 bp, Homo sapiens
agtaaggaaaggcatttagagaaggtaggatgtgtttatgttgtgaaagaccttgagtaaaaggctaagctgtatagatgtttgcttcttgcttgtaagttattggcagctatcatatacttcttctcctgttttttttttgttttktttttttttttggtttcttttttttgaagcagggtctcactcaagtcacctaggctggaatgcagtggcatatcatctcactgcaacctctgcctcccagctccagctatcctcctgcctcagcctcctgagtagctgagactatgggtgtgtaccaccacgcctgtccagcccatacatttgtttaattaaaaaaaaaagttatcacttacttctagaagagatttgtataatggacttacacagt
